United States Patent Application Publication US 2006/0048240 A1 - sequence listing, part 4

SEQ ID NO: 13037 - protein, 531 aa, Triticum aestivum
  misc_feature (1)..(531): Ceres Seq. ID no. 15169600
MAVSARRVAFATAASLAVYWLLKSFLHAPHPALLPAAAALVAVAVGAGGKRGGPGAPPGPAAVPVFGNWLQVGNDLNHRFLARLSARYGPVFRLRLGVRNLVVVSDPRLATEVLHTQGVEFGSRPRNVVFDIFTANGADMVFTEYGDHWRRMRRVMTLPFFTARVVQQYRAMWEAEMDDVVSDLRADSAARGAGVVVRRRLQLMLYNIMYRMMFDARFDSVDDPMFVEATKFNSERSRLAQSFDYNYGDFIPILRPFLRGYLNKCRDLQTRRLAFFNSNYVEKRREVMDTPGQDKNKLRCAIDHILAAEKSGEITPENVIYIVENINVAAIETTLWSIEWALAEVVNHPDVQRKVRGEIRDVLGDDEPITESNISKLPYLQAVIKETLRLHSPIPLLVPHMNLEEASLGGYTIPKGSKVVVNAWWLANNPELWEKPEEFKPERFLGEESNVDATVGGKVDFRFLPFGVGRRSCPGIILALPILALIVGKLVRSFEMVPPPGVDKLDVSEKGGQFSLHIANHSVVAFHPISP

SEQ ID NO: 13038 - protein, 392 aa, Triticum aestivum
  misc_feature (1)..(392): Ceres Seq. ID no. 15169601
MVFTEYGDHWRRMRRVMTLPFFTARVVQQYRAMWEAEMDDVVSDLRADSAARGAGVVVRRRLQLMLYNIMYRMMFDARFDSVDDPMFVEATKFNSERSRLAQSFDYNYGDFIPILRPFLRGYLNKCRDLQTRRLAFFNSNYVEKRREVMDTPGQDKNKLRCAIDHILAAEKSGEITPENVIYIVENINVAAIETTLWSIEWALAEVVNHPDVQRKVRGEIRDVLGDDEPITESNISKLPYLQAVIKETLRLHSPIPLLVPHMNLEEASLGGYTIPKGSKVVVNAWWLANNPELWEKPEEFKPERFLGEESNVDATVGGKVDFRFLPFGVGRRSCPGIILALPILALIVGKLVRSFEMVPPPGVDKLDVSEKGGQFSLHIANHSVVAFHPISP

SEQ ID NO: 13039 - protein, 380 aa, Triticum aestivum
  misc_feature (1)..(380): Ceres Seq. ID no. 15169602
MRRVMTLPFFTARVVQQYRAMWEAEMDDVVSDLRADSAARGAGVVVRRRLQLMLYNIMYRMMFDARFDSVDDPMFVEATKFNSERSRLAQSFDYNYGDFIPILRPFLRGYLNKCRDLQTRRLAFFNSNYVEKRREVMDTPGQDKNKLRCAIDHILAAEKSGEITPENVIYIVENINVAAIETTLWSIEWALAEVVNHPDVQRKVRGEIRDVLGDDEPITESNISKLPYLQAVIKETLRLHSPIPLLVPHMNLEEASLGGYTIPKGSKVVVNAWWLANNPELWEKPEEFKPERFLGEESNVDATVGGKVDFRFLPFGVGRRSCPGIILALPILALIVGKLVRSFEMVPPPGVDKLDVSEKGGQFSLHIANHSVVAFHPISP

SEQ ID NO: 13040 - DNA, 1442 bp, Triticum aestivum
  misc_feature (1)..(1442): Ceres Seq. ID no. 15169607
gaccaagcccagcccataccggcagccacctccgtcgtcgtcggtactgacgcggcacgagccggcgaatccgacaggccccctacctctcgctcgccgcgagatcccgcgtccatggcggtcggcatcgcgctcctgctcgaccttgcggcccgcgcgccccgctcctccgcctcgctccactcgcacgccgccttctccgccgccgccgccgccgccgccgcggcagccctgtccgcctccggcgtacccctctccgcgcggccattcttcggttttccaggattcactgttgctcattgtgatgctggtgcaacttatggatcgattgatagtcctgatcttgccaatgatcttaatgagaagatacatgactcgattcatgatctccaattaccgataaaagaatacccgttggagctgaagccgcttttgtatgcatttggctttaagcatttgagtatgacgactattagggcctttttattatactatttaccacttctggagcctcgtccgcccactgatgacgatgacgatgacgatctgcttcaagatgattcagagaggccgccggttgacctggttactcccttccataattcattgaagcaaatcgctcgcgagatttctgttgtaacaacaagaagagtattcgaaaggattgcggtttgtcatgtttcacaaagaacagcatggaagcttctcaaagatgctgcaaaatcatcgaagaggaaagctctgagggggatgtcaattccagaatacacatactgtgttgccagaacaactttccgagcgcatgcattgggagtagctgctacttgggttgtacaatctgtcgtccaggtctacaaatgttttattcgtcaacctgataatgatgacgaattgttcgacgagaaggaaaaactcagattgtttgcgagaaggatctatagtgtaaccatcaaatgtggtttctctttggtttttgcctcgattggagcaggcctcggcgtccttctgcatccagtgcatggacaatggattggttgtatccttggagattttgcaggaccagttgttgctatccttattttcgagaagttacagttcccgctagaaggttaaagaccaccatctcctgctacaaagttaagaaacccaggtcatccgaccttgtttctagcctgcctggttttcgaagaacatgaagtggagctccttggccttgagtctaccctttcaggatattcattggcctaacttggagctcaaagttgatgaataactatgcatgcatggttaatagcttttcgtggcacaatgcctttgggtattgtgtaatgcttacttttggcacatttaataactagctactgtacttcgttgccgtgctttacattttgaactcaaaggaacatttctgtccactggtttgctaaatttctacagtaagc

SEQ ID NO: 13041 - protein, 370 aa, Triticum aestivum
  misc_feature (1)..(370): Ceres Seq. ID no. 15169608
DQAQPIPAATSVVVGTDAARAGESDRPPTSRSPRDPASMAVGIALLLDLAARAPRSSASLHSHAAFSAAAAAAAAAALSASGVPLSARPFFGFPGFTVAHCDAGATYGSIDSPDLANDLNEKIHDSIHDLQLPIKEYPLELKPLLYAFGFKHLSMTTIRAFLLYYLPLLEPRPPTDDDDDDDLLQDDSERPPVDLVTPFHNSLKQIAREISVVTTRRVFERIAVCHVSQRTAWKLLKDAAKSSKRKALRGMSIPEYTYCVARTTFRAHALGVAATWVVQSVVQVYKCFIRQPDNDDELFDEKEKLRLFARRIYSVTIKCGFSLVFASIGAGLGVLLHPVHGQWIGCILGDFAGPVVAILIFEKLQFPLEG

SEQ ID NO: 13042 - protein, 332 aa, Triticum aestivum
  misc_feature (1)..(332): Ceres Seq. ID no. 15169609
MAVGIALLLDLAARAPRSSASLHSHAAFSAAAAAAAAAALSASGVPLSARPFFGFPGFTVAHCDAGATYGSIDSPDLANDLNEKIHDSIHDLQLPIKEYPLELKPLLYAFGFKHLSMTTIRAFLLYYLPLLEPRPPTDDDDDDDLLQDDSERPPVDLVTPFHNSLKQIAREISVVTTRRVFERIAVCHVSQRTAWKLLKDAAKSSKRKALRGMSIPEYTYCVARTTFRAHALGVAATWVVQSVVQVYKCFIRQPDNDDELFDEKEKLRLFARRIYSVTIKCGFSLVFASIGAGLGVLLHPVHGQWIGCILGDFAGPVVAILIFEKLQFPLEG

SEQ ID NO: 13043 - protein, 216 aa, Triticum aestivum
  misc_feature (1)..(216): Ceres Seq. ID no. 15169610
MTTIRAFLLYYLPLLEPRPPTDDDDDDDLLQDDSERPPVDLVTPFHNSLKQIAREISVVTTRRVFERIAVCHVSQRTAWKLLKDAAKSSKRKALRGMSIPEYTYCVARTTFRAHALGVAATWVVQSVVQVYKCFIRQPDNDDELFDEKEKLRLFARRIYSVTIKCGFSLVFASIGAGLGVLLHPVHGQWIGCILGDFAGPVVAILIFEKLQFPLEG

SEQ ID NO: 13044 - DNA, 1742 bp, Triticum aestivum
  misc_feature (1)..(1742): Ceres Seq. ID no. 15169619
tggagtttggaaggaaatcttgggtggctgcagtcctctgatccttctcattctggaggcgtattcagtacaaaccaatattctggttggtgattgtcagcatggagatggcaagtagcgccaagtggtttgctgtggctcttgttttcatcactgtgatcctactcagggtcataagaggaaggaggatggccgctgctccagccagtgagaaaccacctccacctgtggtgaatggttttgctttactaggacttctacctaggcttcttacaatggaccttcgaactaagataaattgcctgcacgataagtatggcagtgtgttcacagttagtccttttggactaactaatgtaacctttctgatcggcccggaggtccaatcccatttctttcaagggttggagtcagagattaaccatggcaatcttcttgagttccttgtgctgatgtttggacaagagataggtcaaggtgtcgatgcagccactcggactgagcagtcccgcttttatctcgatgcattaaagcaatccaagttgaggagacatcttgatccaatgcttcaagaggtcgagagctactttggcaaatggggcctggaaggagaagttgatttaaaacatgagtttgaagagttgctcatgttgatatcgagccgatgtctactaggaaaagaggttcgggagaagatgtttgatgagttctataaactatttcgtgatgtcgaaaatggagtgaacatgatcagtgtcttcttcccatatattccaattcctgcaaaccgtaggcgtgacaaagcacgtcttaagctcatcgaattactttctggaactgtgaggtcacgtaagagctccccctcagtggaggaagatgtgctacaaagattgatagattccaagtataaagacggccgctccacaacggaaacagaggtaaccgggatgatcattgcattgatctttggtggaaagcacacaagttccctcgctagtacctggaccggagcttgcctactcacccatccaaagttcttagcggctgcatcccaggagcaaaaggaaatcatgatgaaatacgaggacaaaatagaatatgatgccttgttagagatgaatacccttcataattgtatcaaagaggcacttcggttgaacccaccaacaacaatgttggttcgcaaggcacttaaacatttcacagtgcggacaagacaaggccaagagtatggcattcccaaggggcatactcttgcaagtcccataatacaaaacaattacttgccttacatttataaggaccccgaggtatatgatccagatcggtttggtcccgtaaggcaggaggacgtggttggcggcaagttttcttatacatcctttggtggtggaaggcatttttgcagtggggatgcctatgcttacatgcaagttaaagttatatggagccacttgctcaacaactttgatctcaaattattatctccttatcccaagactgactggagtaagttaatcccagagcctcaagggaatatgatggttagctacaagagacgccagctgctaggctagcttgctatatatatcatttgcatgaggagcaccggcttgcatgcttgtgtttgtatgggtgcatcacttattacttgtatttgtgtatgtttttatgattgtaataattttcagtaacccttggatgagctatatatggtcttctcatagtgtgtgccactagtg

SEQ ID NO: 13045 - protein, 491 aa, Triticum aestivum
  misc_feature (1)..(491): Ceres Seq. ID no. 15169620
MEMASSAKWFAVALVFITVILLRVIRGRRMAAAPASEKPPPPVVNGFALLGLLPRLLTMDLRTKINCLHDKYGSVFTVSPFGLTNVTFLIGPEVQSHFFQGLESEINHGNLLEFLVLMFGQEIGQGVDAATRTEQSRFYLDALKQSKLRRHLDPMLQEVESYFGKWGLEGEVDLKHEFEELLMLISSRCLLGKEVREKMFDEFYKLFRDVENGVNMISVFFPYIPIPANRRRDKARLKLIELLSGTVRSRKSSPSVEEDVLQRLIDSKYKDGRSTTETEVTGMIIALIFGGKHTSSLASTWTGACLLTHPKFLAAASQEQKEIMMKYEDKIEYDALLEMNTLHNCIKEALRLNPPTTMLVRKALKHFTVRTRQGQEYGIPKGHTLASPIIQNNYLPYIYKDPEVYDPDRFGPVRQEDVVGGKFSYTSFGGGRHFCSGDAYAYMQVKVIWSHLLNNFDLKLLSPYPKTDWSKLIPEPQGNMMVSYKRRQLLG

SEQ ID NO: 13046 - protein, 489 aa, Triticum aestivum
  misc_feature (1)..(489): Ceres Seq. ID no. 15169621
MASSAKWFAVALVFITVILLRVIRGRRMAAAPASEKPPPPVVNGFALLGLLPRLLTMDLRTKINCLHDKYGSVFTVSPFGLTNVTFLIGPEVQSHFFQGLESEINHGNLLEFLVLMFGQEIGQGVDAATRTEQSRFYLDALKQSKLRRHLDPMLQEVESYFGKWGLEGEVDLKHEFEELLMLISSRCLLGKEVREKMFDEFYKLFRDVENGVNMISVFFPYIPIPANRRRDKARLKLIELLSGTVRSRKSSPSVEEDVLQRLIDSKYKDGRSTTETEVTGMIIALIFGGKHTSSLASTWTGACLLTHPKFLAAASQEQKEIMMKYEDKIEYDALLEMNTLHNCIKEALRLNPPTTMLVRKALKHFTVRTRQGQEYGIPKGHTLASPIIQNNYLPYIYKDPEVYDPDRFGPVRQEDVVGGKFSYTSFGGGRHFCSGDAYAYMQVKVIWSHLLNNFDLKLLSPYPKTDWSKLIPEPQGNMMVSYKRRQLLG

SEQ ID NO: 13047 - protein, 462 aa, Triticum aestivum
  misc_feature (1)..(462): Ceres Seq. ID no. 15169622
MAAAPASEKPPPPVVNGFALLGLLPRLLTMDLRTKINCLHDKYGSVFTVSPFGLTNVTFLIGPEVQSHFFQGLESEINHGNLLEFLVLMFGQEIGQGVDAATRTEQSRFYLDALKQSKLRRHLDPMLQEVESYFGKWGLEGEVDLKHEFEELLMLISSRCLLGKEVREKMFDEFYKLFRDVENGVNMISVFFPYIPIPANRRRDKARLKLIELLSGTVRSRKSSPSVEEDVLQRLIDSKYKDGRSTTETEVTGMIIALIFGGKHTSSLASTWTGACLLTHPKFLAAASQEQKEIMMKYEDKIEYDALLEMNTLHNCIKEALRLNPPTTMLVRKALKHFTVRTRQGQEYGIPKGHTLASPIIQNNYLPYIYKDPEVYDPDRFGPVRQEDVVGGKFSYTSFGGGRHFCSGDAYAYMQVKVIWSHLLNNFDLKLLSPYPKTDWSKLIPEPQGNMMVSYKRRQLLG

SEQ ID NO: 13048 - DNA, 1894 bp, Triticum aestivum
  misc_feature (1)..(1894): Ceres Seq. ID no. 15169623
aacccaaattaacagtagcccgcggcggcctgcgcgtgagcgatgcccgccgcggcattcgcctccgcgttcgcgtctcctcctcctccgtgggccccacgaccgcctcctcgccacgccagcctccgcctgcccccgccaaggagcagcagcaacaacagcggcggcggcggaggggacaagcccaccacctcgtgggtcagccccgactggctgacgtcgctgtctcgctcggtgctcggccgggggaacgacgactcggggatacccgtcgcctccgccaagctcgacgacgtgcaggacctcctcgggggcgcgctcttcctgccgctcttcaagtggttccgcgaggaagggcccgtctaccgcctcgccgcggggccgcgcgacttcgtcatcgtcagcgaccccgccgtagccaagcacgtcctccgcgggtacggcacgcggtacgagaaggggctcgtcgccgaggtctccgagttcctctttggctctgggttcgccatcgccgagggagcgctctggacggtgagacgtagagcagttgtaccatctctacacaaaagatttctctcagtaatggtcgataaagtgttctgtaaatgtgctgagagattggtggaaaagctcgagacttatgctttgagtggtgaacctgttaatatggaagcgaggttttcgcaaatgacgttagatgtgattggtttatccttgttcaactacaactttgattccctcacatcagatagtcctgttattgatgctgtttacactgcactcaaagaagcagaggctcgttctacagatcttttaccatactggcagatcgatttgctgtgcaagattgtccctagacagataaaagcagaaaaagcagttaacacaataaggaataccgttgaagacctaattacaaaatgcaaggcaattgtagatgctgaaaatgaacagattgagggtgaagaatatgtcagcagtttgcagttacgtgatgatctattgtcaatgttagttgctggtcatgaaacaacaggttctgtactgacatggaccatttatcttctcagtaagggtccagtagcactaaggaaagcccaagatgaggtagatcgtgttctacaaggtagactccccagatatgaagatgtaaaagagctgaagtacttgatgcgctgtatcaatgagtccatgcggctatacccacatcctcctgtgctgatacggcgtgcactagttgatgatgtgcttcctggaaactacaaggttaagactggtcaagatgttatgatttctgtgtacaatatacacagatcacccgaggtatgggacagagcagatgaattcattccagagagatttgatttggagggtcccattccaaatgagtcaaacactgatttcaggtttatcccttttagtggaggtcctcgaaaatgtgttggagatcagtttgctcttttagaagcaattgtggcacttgcaattgtcatacaaaagatggacattcagcttgtggcagatcaaaaaatcagcatgaccactggggccactatccatacaaccaatggactgtatatgaatgtaagtctgcgtaaagttgagcaagaagctgacttagcactgagtccatcgggctagacaaaagcaaagcaaaacagggtgggattagtacaggcagaggcaacagaattgtcaatacgtgagatgcctctgcaattaaatttggacatgtttggaatgtttccttgtccagaaatttgagatacctctcttcagttcttgtatcttttcagcaggttccagctatcaatggctaataggttgcgtaaactgtaaagaaatggatcattgacttgctgattttgacagttaatgtaaatcggtggtacct

SEQ ID NO: 13049 - protein, 532 aa, Triticum aestivum
  misc_feature (1)..(532): Ceres Seq. ID no. 15169624
MPAAAFASAFASPPPPWAPRPPPRHASLRLPPPRSSSNNSGGGGGDKPTTSWVSPDWLTSLSRSVLGRGNDDSGIPVASAKLDDVQDLLGGALFLPLFKWFREEGPVYRLAAGPRDFVIVSDPAVAKHVLRGYGTRYEKGLVAEVSEFLFGSGFAIAEGALWTVRRRAVVPSLHKRFLSVMVDKVFCKCAERLVEKLETYALSGEPVNMEARFSQMTLDVIGLSLFNYNFDSLTSDSPVIDAVYTALKEAEARSTDLLPYWQIDLLCKIVPRQIKAEKAVNTIRNTVEDLITKCKAIVDAENEQIEGEEYVSSLQLRDDLLSMLVAGHETTGSVLTWTIYLLSKGPVALRKAQDEVDRVLQGRLPRYEDVKELKYLMRCINESMRLYPHPPVLIRRALVDDVLPGNYKVKTGQDVMISVYNIHRSPEVWDRADEFIPERFDLEGPIPNESNTDFRFIPFSGGPRKCVGDQFALLEAIVALAIVIQKMDIQLVADQKISMTTGATIHTTNGLYMNVSLRKVEQEADLALSPSG

SEQ ID NO: 13050 - protein, 352 aa, Triticum aestivum
  misc_feature (1)..(352): Ceres Seq. ID no. 15169625
MVDKVFCKCAERLVEKLETYALSGEPVNMEARFSQMTLDVIGLSLFNYNFDSLTSDSPVIDAVYTALKEAEARSTDLLPYWQIDLLCKIVPRQIKAEKAVNTIRNTVEDLITKCKAIVDAENEQIEGEEYVSSLQLRDDLLSMLVAGHETTGSVLTWTIYLLSKGPVALRKAQDEVDRVLQGRLPRYEDVKELKYLMRCINESMRLYPHPPVLIRRALVDDVLPGNYKVKTGQDVMISVYNIHRSPEVWDRADEFIPERFDLEGPIPNESNTDFRFIPFSGGPRKCVGDQFALLEAIVALAIVIQKMDIQLVADQKISMTTGATIHTTNGLYMNVSLRKVEQEADLALSPSG

SEQ ID NO: 13051 - protein, 324 aa, Triticum aestivum
  misc_feature (1)..(324): Ceres Seq. ID no. 15169626
MEARFSQMTLDVIGLSLFNYNFDSLTSDSPVIDAVYTALKEAEARSTDLLPYWQIDLLCKIVPRQIKAEKAVNTIRNTVEDLITKCKAIVDAENEQIEGEEYVSSLQLRDDLLSMLVAGHETTGSVLTWTIYLLSKGPVALRKAQDEVDRVLQGRLPRYEDVKELKYLMRCINESMRLYPHPPVLIRRALVDDVLPGNYKVKTGQDVMISVYNIHRSPEVWDRADEFIPERFDLEGPIPNESNTDFRFIPFSGGPRKCVGDQFALLEAIVALAIVIQKMDIQLVADQKISMTTGATIHTTNGLYMNVSLRKVEQEADLALSPSG

SEQ ID NO: 13052 - DNA, 1720 bp, Triticum aestivum
  misc_feature (1)..(1720): Ceres Seq. ID no. 15169627
cgaaaacatctcagccccccgcatccattccaccagcgaacagagagcagaagagcaccacacgctcgccatggacacgtggcacatcttcctcggctcgatcctcctcgccatcccgctgatcctactcctccgcggccgcaagggcggccggctccgcgtcccgcccggcccgccgtccttgccggtgctgggcagcgtcgtgtggctgaccaactcgctcgccgacgttgagcccctgctccggcgcctcttcaagcgctacggccccatcgtgtccctgcgcgtggggtcccgcctctccatcttcgtcgccgaccgccgcctggcccacgcggcgctcgttgagcgcggcgccacgctcgcggaccgccccgcgctcccttcgctcaagctgctgggcgagaacaacaacaccatcacgcgcgccagctacgggcctgtctggcgcctcctccgccgcaacctcgtctccgagacgctgcacccgtcccgcgtccgcctcttcgcgcccgcgcgctcctgggtgcgccgcgtgctggccgagaagctgcgtgatgagtcgtcgtccggcggcgcggccgtcgtggagacgttccagtacgccatgttctgcctcctcgtgctcatgtgcttcggtgagcggctcgacgaggccacggtccgcgcgatcgccgccgcccagcgcgaacttctcatctacaggtcgaggaagatggccatcttctccttcctgccgtcggtgaccaagcatctctaccgcgaccgcctccagaccgtgcacgccatgcagcggaggaagaaggacctgttcgtgccgctgatcaacgctcggcgggagtacagaaaactcggcggcgagcccaagaaagagagcgcgttcgagcactcctacgtcgacgccctgctcgacataaagctccccgaggagggaaaccgcccgctcaccgacgacgagatgatcaacctctgttccgagttcctcgacgccgggaccgacaccacctccaccgggctgcagtggatcatggccgagctggtgaagaacccggccatccaggagaagctctacaaagagatcagcgccacgaagggggacgaccaggacgaggtctcggaggaggacgtccacaagatgccgtacctcaaggcggtggtcctcgagggcctccggaagcacccaccggcgcacttcgtgctgccgcacaaggcggcggcggacatggagatcggcggatacctgattcccaagggggcgacgatgaacttcatggtggccgagatgagcagggacgagcgggagtgggagaagccaacggagttcgtgccagagcggttcctgccaggcggcgcgggcgaagcggtggacgtgaccggcaaccgggagatcaagatgatgccgttcggcgtgggccggaggatctgcgccgggctgggcatcgccatgctccacctggagtacttcgtggccaacatggtgagggagttcgagtggcaggaggtcgccggcgaggaggtggacttcgccgagaagaacgagttcaccgtcgtcatgaagaagccgctgcgcccacgcctcgtgccacgaagggcctgagacaaaatccatctccatcagcaagtagtcaaaatcgaccagtagtccactcctatcgcttcggtcgttcttgtttttagtttactccatgttgataatggttaattagttgctgtacgatag

SEQ ID NO: 13053 - protein, 531 aa, Triticum aestivum
  misc_feature (1)..(531): Ceres Seq. ID no. 15169628
ENISAPRIHSTSEQRAEEHHTLAMDTWHIFLGSILLAIPLILLLRGRKGGRLRVPPGPPSLPVLGSVVWLTNSLADVEPLLRRLFKRYGPIVSLRVGSRLSIFVADRRLAHAALVERGATLADRPALPSLKLLGENNNTITRASYGPVWRLLRRNLVSETLHPSRVRLFAPARSWVRRVLAEKLRDESSSGGAAVVETFQYAMFCLLVLMCFGERLDEATVRAIAAAQRELLIYRSRKMAIFSFLPSVTKHLYRDRLQTVHAMQRRKKDLFVPLINARREYRKLGGEPKKESAFEHSYVDALLDIKLPEEGNRPLTDDEMINLCSEFLDAGTDTTSTGLQWIMAELVKNPAIQEKLYKEISATKGDDQDEVSEEDVHKMPYLKAVVLEGLRKHPPAHFVLPHKAAADMEIGGYLIPKGATMNFMVAEMSRDEREWEKPTEFVPERFLPGGAGEAVDVTGNREIKMMPFGVGRRICAGLGIAMLHLEYFVANMVREFEWQEVAGEEVDFAEKNEFTVVMKKPLRPRLVPRRA

SEQ ID NO: 13054 - protein, 508 aa, Triticum aestivum
  misc_feature (1)..(508): Ceres Seq. ID no. 15169629
MDTWHIFLGSILLAIPLILLLRGRKGGRLRVPPGPPSLPVLGSVVWLTNSLADVEPLLRRLFKRYGPIVSLRVGSRLSIFVADRRLAHAALVERGATLADRPALPSLKLLGENNNTITRASYGPVWRLLRRNLVSETLHPSRVRLFAPARSWVRRVLAEKLRDESSSGGAAVVETFQYAMFCLLVLMCFGERLDEATVRAIAAAQRELLIYRSRKMAIFSFLPSVTKHLYRDRLQTVHAMQRRKKDLFVPLINARREYRKLGGEPKKESAFEHSYVDALLDIKLPEEGNRPLTDDEMINLCSEFLDAGTDTTSTGLQWIMAELVKNPAIQEKLYKEISATKGDDQDEVSEEDVHKMPYLKAVVLEGLRKHPPAHFVLPHKAAADMEIGGYLIPKGATMNFMVAEMSRDEREWEKPTEFVPERFLPGGAGEAVDVTGNREIKMMPFGVGRRICAGLGIAMLHLEYFVANMVREFEWQEVAGEEVDFAEKNEFTVVMKKPLRPRLVPRRA

SEQ ID NO: 13055 - protein, 329 aa, Triticum aestivum
  misc_feature (1)..(329): Ceres Seq. ID no. 15169630
MFCLLVLMCFGERLDEATVRAIAAAQRELLIYRSRKMAIFSFLPSVTKHLYRDRLQTVHAMQRRKKDLFVPLINARREYRKLGGEPKKESAFEHSYVDALLDIKLPEEGNRPLTDDEMINLCSEFLDAGTDTTSTGLQWIMAELVKNPAIQEKLYKEISATKGDDQDEVSEEDVHKMPYLKAVVLEGLRKHPPAHFVLPHKAAADMEIGGYLIPKGATMNFMVAEMSRDEREWEKPTEFVPERFLPGGAGEAVDVTGNREIKMMPFGVGRRICAGLGIAMLHLEYFVANMVREFEWQEVAGEEVDFAEKNEFTVVMKKPLRPRLVPRRA

SEQ ID NO: 13056 - DNA, 1428 bp, Triticum aestivum
  misc_feature (1)..(1428): Ceres Seq. ID no. 15169639
ccggccactggccaagcatgaagcatccccattccttttcctttccgtagctttcttctttgccgctttgcgtgcctccctctctcgctctctcgtccgcagcagctgggacgatggggacgatgaggtcgtcggcggtggcggtagcggcgcggaagcagcagctgctgccatgcttggccctgctgcttcttgcgggggcggcgtccgcccaggcccagaagtacaacgcggtgttcaacttcggcgactccatcactgacacgggcaacctgtgcacgagcgggaagccgacggcgatcaccttcacgcagcccccctacggcgagacctacttcggcacccccacctgccggtgctccgacggccgcgtcatcgtcgacttcctcagcaccaagtttggggtgcctttcctgccaccgtccaaggcgaacggcacggacttcaagcagggtgcgaacatggccatcacgggggcgacggccatggacgcgcccttcttccgcggcctcggcctctcggacaagatctggaacaacgggcccatcagcttccagatccagtggttccagcagatcgccgccactgtgtgcgggaacgactgcaagcggtacctgcgcgagtcactggtggtgttcggcgagttcggcggcaacgactacaacgcgatgctgttcggcaactacaacccggaccaagcgagcaggtacacgaccaagatcgtcaacaccatcatcaggggcgtggagaaggtggtggcaatgggggccagggacgtggtggtgcccggggtgctccccatcggctgcttccccatctacctcaccgtctacggcaccaacagcagcgccgactacgacgccctcggctgcctccgcaagttcaacgacctctccaccttccacaacaacctgctccaggccaagatcgcccgcctccggaagcgctacggccgggcggcgcgcatcatgtacggcgacttctactccgccgtctacgacatggtccagaacccaaacaaatacggattcaacgcggctttcgaggcgtgctgcggctccgggggaggcaagtacaactacgccaacagcgcgaggtgcgggatgcagggcgcggcggcgtgcgccaacccggccgaccacctcagctgggacggcatccacctcaccgaggctgcctacaagcagatcaccgacggctggctcaacgggccctactgcagcccgcccatcctccacacttaaacattattttatttatttatttatatatggagttgggtagtattatttattatttgatttgaggttgagtttaccgaaaggaaaaagggaaatttgattcagtgccgtatggtggtgctgagatgtatacgttgcccaagaaaaaaaaatggaggcaactcttgaataaattgttaatgtttcc

SEQ ID NO: 13057 - protein, 376 aa, Triticum aestivum
  misc_feature (1)..(376): Ceres Seq. ID no. 15169640
MGTMRSSAVAVAARKQQLLPCLALLLLAGAASAQAQKYNAVFNFGDSITDTGNLCTSGKPTAITFTQPPYGETYFGTPTCRCSDGRVIVDFLSTKFGVPFLPPSKANGTDFKQGANMAITGATAMDAPFFRGLGLSDKIWNNGPISFQIQWFQQIAATVCGNDCKRYLRESLVVFGEFGGNDYNAMLFGNYNPDQASRYTTKIVNTIIRGVEKVVAMGARDVVVPGVLPIGCFPIYLTVYGTNSSADYDALGCLRKFNDLSTFHNNLLQAKIARLRKRYGRAARIMYGDFYSAVYDMVQNPNKYGFNAAFEACCGSGGGKYNYANSARCGMQGAAACANPADHLSWDGIHLTEAAYKQITDGWLNGPYCSPPILHT

SEQ ID NO: 13058 - protein, 373 aa, Triticum aestivum
  misc_feature (1)..(373): Ceres Seq. ID no. 15169641
MRSSAVAVAARKQQLLPCLALLLLAGAASAQAQKYNAVFNFGDSITDTGNLCTSGKPTAITFTQPPYGETYFGTPTCRCSDGRVIVDFLSTKFGVPFLPPSKANGTDFKQGANMAITGATAMDAPFFRGLGLSDKIWNNGPISFQIQWFQQIAATVCGNDCKRYLRESLVVFGEFGGNDYNAMLFGNYNPDQASRYTTKIVNTIIRGVEKVVAMGARDVVVPGVLPIGCFPIYLTVYGTNSSADYDALGCLRKFNDLSTFHNNLLQAKIARLRKRYGRAARIMYGDFYSAVYDMVQNPNKYGFNAAFEACCGSGGGKYNYANSARCGMQGAAACANPADHLSWDGIHLTEAAYKQITDGWLNGPYCSPPILHT

SEQ ID NO: 13059 - protein, 260 aa, Triticum aestivum
  misc_feature (1)..(260): Ceres Seq. ID no. 15169642
MAITGATAMDAPFFRGLGLSDKIWNNGPISFQIQWFQQIAATVCGNDCKRYLRESLVVFGEFGGNDYNAMLFGNYNPDQASRYTTKIVNTIIRGVEKVVAMGARDVVVPGVLPIGCFPIYLTVYGTNSSADYDALGCLRKFNDLSTFHNNLLQAKIARLRKRYGRAARIMYGDFYSAVYDMVQNPNKYGFNAAFEACCGSGGGKYNYANSARCGMQGAAACANPADHLSWDGIHLTEAAYKQITDGWLNGPYCSPPILHT

SEQ ID NO: 13060 - DNA, 1588 bp, Triticum aestivum
  misc_feature (1)..(1588): Ceres Seq. ID no. 15169651
accgaaacggctcactgggaaaaggggagaaaaaacagagctcaataacttcgaggaggaggagaggcgtggcgggggaaggaagggagggagggagctcgtcgtcgtcggcggcggatggcggtggagtaccgctgctgcgggggccccttcttcgagcacatcgccatcatcgtggtgctggtgctcttcgcggggctcatgtccgggctcaccctcggcctcatgtccctcagcctcgtcgacctcgaggtcctcgccaagtccggcaccgacaaggaccgcaagtacgcagctaagatattgcccgtcgtgaaaaaccagcaccttctgctatgcactcttctgatctgcaacgctgcagctatggaggcactgccaatcttccttgatagcctggtgactgcttggggtgctgttttgatctctgtgacattgatcctgctgttcggcgagatcataccacaatctatctgctcacggtatgggctggcaattggtgcctcggttgctccgttagtccgtgttcttgtttggatttgtttccctgttgcatatccaatcgccaagctgctggaccatgtgcttggtcacggtaaagcggcacttttccgcagagctgagctaaaaacacttgtgacactgcatggaaatgaggctggtaaaggtggagagttaacccatgatgaaacaactataatagctggagctcttgagctcagtgaaaagaaagctaaagatgctatgacacctctttgtgatacatttgtgattgatataaatgcaaagctcgacaggaaactaatgcaagaggtcattgagaaaggtcatagcagagtgccagtttattatgaaaaggatacaaacattattggattgatattggtgaagaatttattatccattaaccctgatgatgaaattcccataaagagtgtaactatccgcaaaattcctcgcgtttcagaagacatgcccctgtatgacatcctaaatgaattccagaagggccacagccacatggcggttgtcataaggcaaaacattccaaactacccagctaagcagcccagcatcgatggtggatctcttgaggtcgccatcgccattgatgacaagcagggtgagaaggttgcgaagagtctcactccgctgtggaggtggaagagctaccccaacacccagaactccaacacggggagcaggagggggaaatggtccaaagaccagtcggacgtcctccaagtgcacgaagagccgttgcccacgctgagcgaggatgaagaagccgtcggcatcataaccatggaggatgtcattgaagaactgctgcaggaggagatctacgacgaaaccgacgtacatgttgaggagcaataacacattgcttgctagggtttacgcacatggtaaacttgccgttttggctggagccggaagcaaagttgcgtgccatgccagtttcttttctttctttgtgccgaggggaagaagaaacaatatatgtatgtatgataacgtaacgttgtactgctacgtgtgaatagacagagaccgcaaatattagttcgtctgaagtgttgatacc

SEQ ID NO: 13061 - protein, 420 aa, Triticum aestivum
  misc_feature (1)..(420): Ceres Seq. ID no. 15169652
MAVEYRCCGGPFFEHIAIIVVLVLFAGLMSGLTLGLMSLSLVDLEVLAKSGTDKDRKYAAKILPVVKNQHLLLCTLLICNAAAMEALPIFLDSLVTAWGAVLISVTLILLFGEIIPQSICSRYGLAIGASVAPLVRVLVWICFPVAYPIAKLLDHVLGHGKAALFRRAELKTLVTLHGNEAGKGGELTHDETTIIAGALELSEKKAKDAMTPLCDTFVIDINAKLDRKLMQEVIEKGHSRVPVYYEKDTNIIGLILVKNLLSINPDDEIPIKSVTIRKIPRVSEDMPLYDILNEFQKGHSHMAVVIRQNIPNYPAKQPSIDGGSLEVAIAIDDKQGEKVAKSLTPLWRWKSYPNTQNSNTGSRRGKWSKDQSDVLQVHEEPLPTLSEDEEAVGIITMEDVIEELLQEEIYDETDVHVEEQ

SEQ ID NO: 13062 - protein, 392 aa, Triticum aestivum
  misc_feature (1)..(392): Ceres Seq. ID no. 15169653
MSGLTLGLMSLSLVDLEVLAKSGTDKDRKYAAKILPVVKNQHLLLCTLLICNAAAMEALPIFLDSLVTAWGAVLISVTLILLFGEIIPQSICSRYGLAIGASVAPLVRVLVWICFPVAYPIAKLLDHVLGHGKAALFRRAELKTLVTLHGNEAGKGGELTHDETTIIAGALELSEKKAKDAMTPLCDTFVIDINAKLDRKLMQEVIEKGHSRVPVYYEKDTNIIGLILVKNLLSINPDDEIPIKSVTIRKIPRVSEDMPLYDILNEFQKGHSHMAVVIRQNIPNYPAKQPSIDGGSLEVAIAIDDKQGEKVAKSLTPLWRWKSYPNTQNSNTGSRRGKWSKDQSDVLQVHEEPLPTLSEDEEAVGIITMEDVIEELLQEEIYDETDVHVEEQ

SEQ ID NO: 13063 - protein, 384 aa, Triticum aestivum
  misc_feature (1)..(384): Ceres Seq. ID no. 15169654
MSLSLVDLEVLAKSGTDKDRKYAAKILPVVKNQHLLLCTLLICNAAAMEALPIFLDSLVTAWGAVLISVTLILLFGEIIPQSICSRYGLAIGASVAPLVRVLVWICFPVAYPIAKLLDHVLGHGKAALFRRAELKTLVTLHGNEAGKGGELTHDETTIIAGALELSEKKAKDAMTPLCDTFVIDINAKLDRKLMQEVIEKGHSRVPVYYEKDTNIIGLILVKNLLSINPDDEIPIKSVTIRKIPRVSEDMPLYDILNEFQKGHSHMAVVIRQNIPNYPAKQPSIDGGSLEVAIAIDDKQGEKVAKSLTPLWRWKSYPNTQNSNTGSRRGKWSKDQSDVLQVHEEPLPTLSEDEEAVGIITMEDVIEELLQEEIYDETDVHVEEQ

SEQ ID NO: 13064 - DNA, 1498 bp, Triticum aestivum
  misc_feature (1)..(1498): Ceres Seq. ID no. 15169659
cggtttcttctagccccaaagtcaagcagaggaattcctaaaaaaaaaaagtcaagcagaggaggaggagcactgaggcttctagaaacttgaggcagggaggttcggcaggaggcatgtgggggcggcactactggggcgcccggcggccgagcgacggcgccgcgggtgcggaggccggcggcggcgtggtggtgatgttcgcgtggctgtcgagtcaggagcggcacgtgcgcgcgtacgtggacctgtacgcggcccttgggtgggcgtgcctcgtctgccactccgacttcatcaccctgtttatgccggagaaggctgctgtgcttgctgaccgggtgctcacggagctcgttaaggaactgaatattagaccagtacctgttgtgtttgcatccttttcgggaggaccaaaaggttgcacatacaaggttcttcagctgatccagagaaggtgcaaagggcagctgagtttggatgactatcaacttgtacgggactgcgtatgtggacaaatatatgactcgagtcctgtagattttgtgagtgatttaggcacccgctttcttcttcacccaagtgtcctgaagatgcctgaacctccacgtgtcttatcatggatgactagaggcattgcctcgggtctagacactcttttcattggcaagtttgaagcacagcgcaaagaatattgggagacactatactcatcagtgcatgttggcccaatactcatattctgttcagaggatgatgaacttgctccatgttcggccgttcaaaattttggacggcgtctgctggagctgggtggtgatgtgaatttagttaaatggcacagttctccacatgtaggacattacaagcatcacactgaggaataccgagctgcagtgactgagctgctcatgaaggcttcagcgctttacacaagcagaaaacgactcaatgactacagtgtcggcacgagtgaggacagtgacacaccttattcgtctcgcaatctacataagactgctgtaagctccagtgataggctagggagggtttcagttgatccagccaatcatttcttcttaccgagttccatggagtaccatgaaagcaggagtgaagtgctaaaacccgagttgttcaacatgccgagtgttgaaagcgcgaagaaccctgatggcgtgttggggacgatgctctatgatgcatgtgtcccaaagaacgtggaaggctgggacttcaagcttgcatcaatagatggacagcgtatgcattttactgcccgtcagcatggtacttccaatccaacaaaatgtatacgccgctcaagattgtaatgattttgactcaacatctaagtgcattccagcagactgctctatactgccagagtatacttgtttcaggagaatgttattgtgttgaccttttctggaaattttagagtatactgccagagtatactaatgcttttttaaagaaaaaaaaaaaaaaaaaaaag

SEQ ID NO: 13065 - protein, 405 aa, Triticum aestivum
  misc_feature (1)..(405): Ceres Seq. ID no. 15169660
MWGRHYWGARRPSDGAAGAEAGGGVVVMFAWLSSQERHVRAYVDLYAALGWACLVCHSDFITLFMPEKAAVLADRVLTELVKELNIRPVPVVFASFSGGPKGCTYKVLQLIQRRCKGQLSLDDYQLVRDCVCGQIYDSSPVDFVSDLGTRFLLHPSVLKMPEPPRVLSWMTRGIASGLDTLFIGKFEAQRKEYWETLYSSVHVGPILIFCSEDDELAPCSAVQNFGRRLLELGGDVNLVKWHSSPHVGHYKHHTEEYRAAVTELLMKASALYTSRKRLNDYSVGTSEDSDTPYSSRNLHKTAVSSSDRLGRVSVDPANHFFLPSSMEYHESRSEVLKPELFNMPSVESAKNPDGVLGTMLYDACVPKNVEGWDFKLASIDGQRMHFTARQHGTSNPTKCIRRSRL

SEQ ID NO: 13066 - protein, 378 aa, Triticum aestivum
  misc_feature (1)..(378): Ceres Seq. ID no. 15169661
MFAWLSSQERHVRAYVDLYAALGWACLVCHSDFITLFMPEKAAVLADRVLTELVKELNIRPVPVVFASFSGGPKGCTYKVLQLIQRRCKGQLSLDDYQLVRDCVCGQIYDSSPVDFVSDLGTRFLLHPSVLKMPEPPRVLSWMTRGIASGLDTLFIGKFEAQRKEYWETLYSSVHVGPILIFCSEDDELAPCSAVQNFGRRLLELGGDVNLVKWHSSPHVGHYKHHTEEYRAAVTELLMKASALYTSRKRLNDYSVGTSEDSDTPYSSRNLHKTAVSSSDRLGRVSVDPANHFFLPSSMEYHESRSEVLKPELFNMPSVESAKNPDGVLGTMLYDACVPKNVEGWDFKLASIDGQRMHFTARQHGTSNPTKCIRRSRL

SEQ ID NO: 13067 - protein, 341 aa, Triticum aestivum
  misc_feature (1)..(341): Ceres Seq. ID no. 15169662
MPEKAAVLADRVLTELVKELNIRPVPVVFASFSGGPKGCTYKVLQLIQRRCKGQLSLDDYQLVRDCVCGQIYDSSPVDFVSDLGTRFLLHPSVLKMPEPPRVLSWMTRGIASGLDTLFIGKFEAQRKEYWETLYSSVHVGPILIFCSEDDELAPCSAVQNFGRRLLELGGDVNLVKWHSSPHVGHYKHHTEEYRAAVTELLMKASALYTSRKRLNDYSVGTSEDSDTPYSSRNLHKTAVSSSDRLGRVSVDPANHFFLPSSMEYHESRSEVLKPELFNMPSVESAKNPDGVLGTMLYDACVPKNVEGWDFKLASIDGQRMHFTARQHGTSNPTKCIRRSRL

SEQ ID NO: 13068 - DNA, 1750 bp, Triticum aestivum
  misc_feature (1)..(1750): Ceres Seq. ID no. 15169663
cgcgcgccacgccaagcagagcaaacccacgccgccgccgccgccgccgccgccgtcgtattcgcccacgcgcgcacagaagactccactccctcctctcgcagccatggcggtggcggacaaggcggtcgccgggggcggcgaggcccagcagccggagccggagccggagccggccgccgaggcctcaacgttcgccgagctgggcgtctgccgcgagctggtggaggcctgcgacgccatggggtggaagcagcccaccaagatccaggcgggggccatcccccacgccctccaagggagggacgtgattgggctggggcagacggggtcggggaagacgggcgcgttcgcgctgcccatcatccaggcgctgctcgagcaccgccagcccttcttcgcctgcatcatgtcgcccacgagggagctggcgattcagattgcggagcagtttgaggcgttagggtcagctatcggcttggtttgctcagtgcttgttggaggagttgaccggatgcagcaagtgttatccattgcaaaacgtccacatattgtggttggaactcctggccgtcttttggaccatttgaaagatacaaaaggttttagcctaactaaagtgaaatacctggtacttgatgaagctgataaattacttaatttggagttcaaggaatcacttgatgatattctgaaggtcattcctaaagaaaggagaacttaccttttttcagccacaatgaccaaaaaggtaagcaaactgcaacgtgcttgtctcagaaaccctgttaaggtggaagtatcctccaaatattctacagtggacacacttaaacaagagtggtatttcgttcctgcagattactaggattgttatcttgttcatgttctgaatgagttgccagggagcatgatcatgatcttcgtgcggacctgcgagtcaacaagactccttgctctcactttaaggaatcttggttttaaagctctctctatcagtggccagatgagtcaggacaaaagactaggtgctttaaacaagttcaaagcaaaagatttcaacatccttatctgcaccgacgtggcgagtcgtggtcttgacattcaaggagttgatgtggttatgaattatgatattccaatgaattctaaggattatgtccatcgggttggtaggactgcgcgtgcagggcaatcgggatatgccgtctcttttgtgaatcagtatgaggctgagtggtttaagctgattgagcagctccttggaagggaaattcctgaccggaaggtagatatggatgaaatcctgatacttcgtgagcatatatcagattcaaagaggattgcactgacgaaactgagggaggacggtggtcacaagaagagaaggaaggtggcggaggacgacgatgatgaagaagaggaggctccaagaggccaccgacagaaaccgaggtctttcaagaaatcatcaaggcggtgatagcactcgagtgcagataagtcggaacctcctgcctgatgaccagtagaatccgtacataccgctccacctcgcgaaagctatttatcggaattttgtccttagttcgtccgatgcaccagccatattgttagttactaagttgcaccagcgctatctatgctaccttttgtttgaaagtcaggccactttgagcaaatagccagtatttctctgtttgacacaagattttacatctaatctatatgaatatttcacctttacatc

SEQ ID NO: 13069 - protein, 288 aa, Triticum aestivum
  misc_feature (1)..(288): Ceres Seq. ID no. 15169664
ARHAKQSKPTPPPPPPPPSYSPTRAQKTPLPPLAAMAVADKAVAGGGEAQQPEPEPEPAAEASTFAELGVCRELVEACDAMGWKQPTKIQAGAIPHALQGRDVIGLGQTGSGKTGAFALPIIQALLEHRQPFFACIMSPTRELAIQIAEQFEALGSAIGLVCSVLVGGVDRMQQVLSIAKRPHIVVGTPGRLLDHLKDTKGFSLTKVKYLVLDEADKLLNLEFKESLDDILKVIPKERRTYLFSATMTKKVSKLQRACLRNPVKVEVSSKYSTVDTLKQEWYFVPADY

SEQ ID NO: 13070 - protein, 253 aa, Triticum aestivum
  misc_feature (1)..(253): Ceres Seq. ID no. 15169665
MAVADKAVAGGGEAQQPEPEPEPAAEASTFAELGVCRELVEACDAMGWKQPTKIQAGAIPHALQGRDVIGLGQTGSGKTGAFALPIIQALLEHRQPFFACIMSPTRELAIQIAEQFEALGSAIGLVCSVLVGGVDRMQQVLSIAKRPHIVVGTPGRLLDHLKDTKGFSLTKVKYLVLDEADKLLNLEFKESLDDILKVIPKERRTYLFSATMTKKVSKLQRACLRNPVKVEVSSKYSTVDTLKQEWYFVPADY

SEQ ID NO: 13071 - protein, 208 aa, Triticum aestivum
  misc_feature (1)..(208): Ceres Seq. ID no. 15169666
MGWKQPTKIQAGAIPHALQGRDVIGLGQTGSGKTGAFALPIIQALLEHRQPFFACIMSPTRELAIQIAEQFEALGSAIGLVCSVLVGGVDRMQQVLSIAKRPHIVVGTPGRLLDHLKDTKGFSLTKVKYLVLDEADKLLNLEFKESLDDILKVIPKERRTYLFSATMTKKVSKLQRACLRNPVKVEVSSKYSTVDTLKQEWYFVPADY

SEQ ID NO: 13072 - DNA, 1379 bp, Triticum aestivum
  misc_feature (1)..(1379): Ceres Seq. ID no. 15169674
ccattccgactctctctccaccgaaacagaaacaccaacctcccctcggccggcgaccatggcggaggccgcggccgcaggagcgacgcctctcctccgcaacctccccgatgagatcgtgctctgggagatcctcgcccgccttgaccccagatcgctcatccgctgccgcgccgtccgccgcgcctggcgccgcgccacctccacccgtcgcttcctcctggcccaccacgcacgccagcccgcattccccatcgccgccgacaacaggtaccgtaacttcctcgccttcgaccaccggtccgccgccaccgccgacgcccagttccacaccgtcgcccggcttggcgggtccttcagtctggagctctgctgcgacggcctcctcctcgtcgccaagtctggcatgcttggcaatcgcgcccgcctcgccgtctgcaacccggtaacgcgtcagcacgcctccctcccgcccctgccggacttcaacatcctggggatgtacctacacggacctaccgacgagtaccggctgttactgcaatggaggggcgcaatggactggggggacgacagtgactttgactcgcctacaggcaaaaatggctgctatgtctttgcgctgggatccgaccagccaccgaggtacatcgggttgtcggagcccaaattctcgtcggcttacttccacggacctgcccgggtgcgtgatagcctgcattggtgcctgttttatcgcccaggcgagaccccactggaggattgtgaggctggatgggaactggtggtatttgacaccatagctgagtcatttcggcagatgcatgctccagttgatcccaccaagtcatgcatccttgagatggatgacatgcttggcatctattgctgtaacaaggctgcggaagttgttgatatatgggtgttgccgaactacgacagtgaggtttgggacttgaagtaccgggttgcattgccgatcgcagaaatcaggggaaagcttgaaggccatgatggtgagtgctattggtatgtgaccgttgcttcgggtggtggtgacgagctcttgctggccagttttggtcgttcgctgttttacattgacactcatggcaaactggttgctagcttccaagacatctttccctctaggcatcggctcaaacaaactcttgttccgcatgatttcttcagaacagtaaaaggtcaggctgtcgacgcttcacctttcatctgacggatgttgagagaggcggtgcttcttaacaggctagttttcatatcctcgtgagttgtaatgtctatgtattggatcaagtatgggcctgctgatttcttctttttgtgtcaatcagaagtgactgtcatgtggttgcatg

SEQ ID NO: 13073 - protein, 411 aa, Triticum aestivum
  misc_feature (1)..(411): Ceres Seq. ID no. 15169675
HSDSLSTETETPTSPRPATMAEAAAAGATPLLRNLPDEIVLWEILARLDPRSLIRCRAVRRAWRRATSTRRFLLAHHARQPAFPIAADNRYRNFLAFDHRSAATADAQFHTVARLGGSFSLELCCDGLLLVAKSGMLGNRARLAVCNPVTRQHASLPPLPDFNILGMYLHGPTDEYRLLLQWRGAMDWGDDSDFDSPTGKNGCYVFALGSDQPPRYIGLSEPKFSSAYFHGPARVRDSLHWCLFYRPGETPLEDCEAGWELVVFDTIAESFRQMHAPVDPTKSCILEMDDMLGIYCCNKAAEVVDIWVLPNYDSEVWDLKYRVALPIAEIRGKLEGHDGECYWYVTVASGGGDELLLASFGRSLFYIDTHGKLVASFQDIFPSRHRLKQTLVPHDFFRTVKGQAVDASPFI

SEQ ID NO: 13074 - protein, 392 aa, Triticum aestivum
  misc_feature (1)..(392): Ceres Seq. ID no. 15169676
MAEAAAAGATPLLRNLPDEIVLWEILARLDPRSLIRCRAVRRAWRRATSTRRFLLAHHARQPAFPIAADNRYRNFLAFDHRSAATADAQFHTVARLGGSFSLELCCDGLLLVAKSGMLGNRARLAVCNPVTRQHASLPPLPDFNILGMYLHGPTDEYRLLLQWRGAMDWGDDSDFDSPTGKNGCYVFALGSDQPPRYIGLSEPKFSSAYFHGPARVRDSLHWCLFYRPGETPLEDCEAGWELVVFDTIAESFRQMHAPVDPTKSCILEMDDMLGIYCCNKAAEVVDIWVLPNYDSEVWDLKYRVALPIAEIRGKLEGHDGECYWYVTVASGGGDELLLASFGRSLFYIDTHGKLVASFQDIFPSRHRLKQTLVPHDFFRTVKGQAVDASPFI

SEQ ID NO: 13075 - protein, 276 aa, Triticum aestivum
  misc_feature (1)..(276): Ceres Seq. ID no. 15169677
MLGNRARLAVCNPVTRQHASLPPLPDFNILGMYLHGPTDEYRLLLQWRGAMDWGDDSDFDSPTGKNGCYVFALGSDQPPRYIGLSEPKFSSAYFHGPARVRDSLHWCLFYRPGETPLEDCEAGWELVVFDTIAESFRQMHAPVDPTKSCILEMDDMLGIYCCNKAAEVVDIWVLPNYDSEVWDLKYRVALPIAEIRGKLEGHDGECYWYVTVASGGGDELLLASFGRSLFYIDTHGKLVASFQDIFPSRHRLKQTLVPHDFFRTVKGQAVDASPFI

SEQ ID NO: 13076 - DNA, 1921 bp, Triticum aestivum
  misc_feature (1)..(1921): Ceres Seq. ID no. 15170095
aaaaaaaagatccgaaacccctgacctgcgcgcctgtccatcccagcatggccgccgcctcgtcctcctcctgcggcggcgccggctgcggggcccgctgctcctcctccacctcgtcatccgtagaggatgctccggaggggattctgggccgtctctccatatccggtgccgccgcctcctgcggcaagtgcggcggcggcgccgtgttgccggaggcgtcggtctgtgcggagagtgcttgcgggcccagctgttcgggaagttcaagctcgccgtcacaagcaacgccatggttcggccaaccgactccgtcctcgtcgccttctccggcggccccgcctctagggttgctctgcaatttatacatgagatgcggtccaaggcaatcgaaagctgggacgccagcaattcgcaagccctaccggtcttcaatgtcggggtggcgttcgttgacgagagtgttttgttgtcgaagcccgaatgcgaagttgagcaggcaactgaagatattaagtcaattgtgtcgagtttgttgccgggagataacgcaatgcacattgcctctcttgatgacgtgttctccccggaatcaaaagacggtgaaggcaggctgagggagctagttggaatgattactgatgatactgggagggaggatcttcttcagtgcttgcgcatgctttcgttgcagaagattgcactggaaaatgggtacacaaagatcatgctgggatcatgtgcttctacaatagcatgtcatgtgctatctgcaacagtaaagggccaaggttattccttaccagctgatatccaatatgttgatacacggtgggaagtgcctgtcgttcttccacttcgtgattgcctggcccaagagcttagcctgctctgtgaatttgatagtttaaagacacagcaacttcttgataggccttgcagtggcatcaatggcttagtcgcatcttttgttgcacgactaagggaggagaatccttctcgtgagcatactattgtaagaactgcacaaaaacttaagccattcccttttaacaagttctcagcaaatggctatcatgatttcctgccgtcgcggctgcgtcccaagttccaggatgttgatagcgatgagtctgctttctctgaggttctctgcctgatatgtcgaagtccattcagtgaatcagaactccagaatgttgaaagcacaaggcacacgtctcagaagaaaattgatctgtatactgcttattgctgtcaaagctgtcatttccagattctaccaggaggtagagacctgtatgaccatttcttttcactactaccaaggttctggactgagagagtagatactgcatctgccagccatagctcgctaagagatcaaatagaagactatcttcttgaagacgatgatgatgggaactgacacttgttcattgagtgaatcccaaacttacttgccagaagcctgcagagattccttcctagttgggcctcacaaatcatgacataaaccaaacttgcttgggataacagtgttcgcatctagtaaggcactggtttattcagacttctgccatattcttagaattaccctccattatattttttatttaattttctggtgtacctgtaagtcctccctcaagttaaaacatgtctgaaacttgtagtgataaaggaaaccatcacttgccagcagttttgcactgatctcaaacagctgactttgggtagctgcaggctcccaacttccatgtgattacagtattctgattggtctcacctactgtaccaactatttgcctgcaagattgtaatcagatgaatttacaaaatgggtttacaacaactattgtgctgtataaacttttgtactcgcttgattataatctattacactgttgcatttgtttcg

SEQ ID NO: 13077 - protein, 475 aa, Triticum aestivum
  misc_feature (1)..(475): Ceres Seq. ID no. 15170096
KKRSETPDLRACPSQHGRRLVLLLRRRRLRGPLLLLHLVIRRGCSGGDSGPSLHIRCRRLLRQVRRRRRVAGGVGLCGECLRAQLFGKFKLAVTSNAMVRPTDSVLVAFSGGPASRVALQFIHEMRSKAIESWDASNSQALPVFNVGVAFVDESVLLSKPECEVEQATEDIKSIVSSLLPGDNAMHIASLDDVFSPESKDGEGRLRELVGMITDDTGREDLLQCLRMLSLQKIALENGYTKIMLGSCASTIACHVLSATVKGQGYSLPADIQYVDTRWEVPVVLPLRDCLAQELSLLCEFDSLKTQQLLDRPCSGINGLVASFVARLREENPSREHTIVRTAQKLKPFPFNKFSANGYHDFLPSRLRPKFQDVDSDESAFSEVLCLICRSPFSESELQNVESTRHTSQKKIDLYTAYCCQSCHFQILPGGRDLYDHFFSLLPRFWTERVDTASASHSSLRDQIEDYLLEDDDDGN

SEQ ID NO: 13078 - protein, 378 aa, Triticum aestivum
  misc_feature (1)..(378): Ceres Seq. ID no. 15170097
MVRPTDSVLVAFSGGPASRVALQFIHEMRSKAIESWDASNSQALPVFNVGVAFVDESVLLSKPECEVEQATEDIKSIVSSLLPGDNAMHIASLDDVFSPESKDGEGRLRELVGMITDDTGREDLLQCLRMLSLQKIALENGYTKIMLGSCASTIACHVLSATVKGQGYSLPADIQYVDTRWEVPVVLPLRDCLAQELSLLCEFDSLKTQQLLDRPCSGINGLVASFVARLREENPSREHTIVRTAQKLKPFPFNKFSANGYHDFLPSRLRPKFQDVDSDESAFSEVLCLICRSPFSESELQNVESTRHTSQKKIDLYTAYCCQSCHFQILPGGRDLYDHFFSLLPRFWTERVDTASASHSSLRDQIEDYLLEDDDDGN

SEQ ID NO: 13079 - protein, 351 aa, Triticum aestivum
  misc_feature (1)..(351): Ceres Seq. ID no. 15170098
MRSKAIESWDASNSQALPVFNVGVAFVDESVLLSKPECEVEQATEDIKSIVSSLLPGDNAMHIASLDDVFSPESKDGEGRLRELVGMITDDTGREDLLQCLRMLSLQKIALENGYTKIMLGSCASTIACHVLSATVKGQGYSLPADIQYVDTRWEVPVVLPLRDCLAQELSLLCEFDSLKTQQLLDRPCSGINGLVASFVARLREENPSREHTIVRTAQKLKPFPFNKFSANGYHDFLPSRLRPKFQDVDSDESAFSEVLCLICRSPFSESELQNVESTRHTSQKKIDLYTAYCCQSCHFQILPGGRDLYDHFFSLLPRFWTERVDTASASHSSLRDQIEDYLLEDDDDGN

SEQ ID NO: 13080 - DNA, 1955 bp, Triticum aestivum
  misc_feature (1)..(1955): Ceres Seq. ID no. 15170099
atagccagatccatagggttcttctttttcttccccggcccaccgttcctctacagatcgaagtaggtcgcagctacctcgatcttctcacccatggcgtcctcgaacaagcactggccgagcatgttcaggtccaaccctgctgcctgcgacttccaccaccagcctgacatgagcaacacccacaccaggtcctccttgatctcctcagggcttgaccaggagatgacaaggagcccaggggagacgaaaccgcggtggaacccccggccggagcagatctggatcctggaggggatcttcaactccggcgtcgtcaaccctccccgcgacgagatccgccgcatccgcctccgcctgcaggagtacggccacgtcgccgacgccaacgtcttctactggttccagaaccgcaagtcccgcaccaagaacaagcttcgcgccgccgcggccgcagccgctgcccagggccaacagcctaccggcggtcgcgccgccgtgatgcgcgcgtccctagcggtgaggatgcctgcgccggctccggtgacgccgccgaggcgtttcctcgcgccgtccggcacgctccaggcgccgacgtcctcgtcatcgtcctcctccgaccgctcctccggatccagcaggtcggtgaccatgaaaacgacggccatggcgtctgcggcggcagcctccctgtcccagccgatgctgccgctgtcgaccgccgccatcgacctgttcgccccggctccaccactgacaccgtcgcctgggctgtccgcgtgccagctctactaccagctgcagaacaatcccatgtcgtcgatgccgacgccgacgccggtgcgcgagctggtaacctccatccctgagcagccgccgctccacctgcagtggccgccgcagagccagagccagtacctgccagccaccgagctcggcggcttcctcggctcgcatgcccacacgcatccgacggcggtctcccctggcgcgctcctcctgcctggcctctgcaccgactcggcgttagggcagcatgagatcgtggacgacatgagctcctccaagctgggtctcggcgtcggcggccagttcaacttcaacgtggcggcggatccaccctccgacgcggtgagcgccgtgattaaggacgacgagaaggcaaggctggggtttctgcaccactacggcctcggcgccaccgccggcgcggacgtcagtgcggccgtcctcccatgcactccgcctaccggcaacgccgccgcaagctctgcattcaccgatcagctgcaagggctcctggacgccgggctgctggccggaggaggcgcgccgacgccaatggcgacggtagtgaccgtggccgccgggcggccgggcgcccccgtgcaatgctacagcgtgccggcgatggtgcgcatggacgtgaaggcgctgttcggcccggcggccgtgatgctcgggcagaccggcgaggcaatccccgtcgacggggccggggtcaccgccgagcccctccagaacggcgcctgctactacgtcctgatgtgagactcgctgaagatcgatcgccgatgcctgtgtacgtcttgggtcaagggcgccgcgcgggagaatttgggcaaggcgaattatagttatctctacctagttgctacaaggaaaaaaagtccttatatatagctagctgctagtatattttgctttggtcagtatgtggatctactatagcttctaatcgagcgtcttgtgttactcttattttagtgaggatatcttctaacatggacaatagtgttggcttaatttcctgttgcaataagctgccccatgttgctagtactattcagtggtggtattaagatttaagcatcctcttatatttttaaaaaaatatttaaggttggctaacatgcatgtatgagatgagatgaactttgatgagaggcatgagg

SEQ ID NO: 13081 - protein, 485 aa, Triticum aestivum
  misc_feature (1)..(485): Ceres Seq. ID no. 15170100
MASSNKHWPSMFRSNPAACDFHHQPDMSNTHTRSSLISSGLDQEMTRSPGETKPRWNPRPEQIWILEGIFNSGVVNPPRDEIRRIRLRLQEYGHVADANVFYWFQNRKSRTKNKLRAAAAAAAAQGQQPTGGRAAVMRASLAVRMPAPAPVTPPRRFLAPSGTLQAPTSSSSSSSDRSSGSSRSVTMKTTAMASAAAASLSQPMLPLSTAAIDLFAPAPPLTPSPGLSACQLYYQLQNNPMSSMPTPTPVRELVTSIPEQPPLHLQWPPQSQSQYLPATELGGFLGSHAHTHPTAVSPGALLLPGLCTDSALGQHEIVDDMSSSKLGLGVGGQFNFNVAADPPSDAVSAVIKDDEKARLGFLHHYGLGATAGADVSAAVLPCTPPTGNAAASSAFTDQLQGLLDAGLLAGGGAPTPMATVVTVAAGRPGAPVQCYSVPAMVRMDVKALFGPAAVMLGQTGEAIPVDGAGVTAEPLQNGACYYVLM

SEQ ID NO: 13082 - protein, 475 aa, Triticum aestivum
  misc_feature (1)..(475): Ceres Seq. ID no. 15170101
MFRSNPAACDFHHQPDMSNTHTRSSLISSGLDQEMTRSPGETKPRWNPRPEQIWILEGIFNSGVVNPPRDEIRRIRLRLQEYGHVADANVFYWFQNRKSRTKNKLRAAAAAAAAQGQQPTGGRAAVMRASLAVRMPAPAPVTPPRRFLAPSGTLQAPTSSSSSSSDRSSGSSRSVTMKTTAMASAAAASLSQPMLPLSTAAIDLFAPAPPLTPSPGLSACQLYYQLQNNPMSSMPTPTPVRELVTSIPEQPPLHLQWPPQSQSQYLPATELGGFLGSHAHTHPTAVSPGALLLPGLCTDSALGQHEIVDDMSSSKLGLGVGGQFNFNVAADPPSDAVSAVIKDDEKARLGFLHHYGLGATAGADVSAAVLPCTPPTGNAAASSAFTDQLQGLLDAGLLAGGGAPTPMATVVTVAAGRPGAPVQCYSVPAMVRMDVKALFGPAAVMLGQTGEAIPVDGAGVTAEPLQNGACYYVLM

SEQ ID NO: 13083 - protein, 459 aa, Triticum aestivum
  misc_feature (1)..(459): Ceres Seq. ID no. 15170102
MSNTHTRSSLISSGLDQEMTRSPGETKPRWNPRPEQIWILEGIFNSGVVNPPRDEIRRIRLRLQEYGHVADANVFYWFQNRKSRTKNKLRAAAAAAAAQGQQPTGGRAAVMRASLAVRMPAPAPVTPPRRFLAPSGTLQAPTSSSSSSSDRSSGSSRSVTMKTTAMASAAAASLSQPMLPLSTAAIDLFAPAPPLTPSPGLSACQLYYQLQNNPMSSMPTPTPVRELVTSIPEQPPLHLQWPPQSQSQYLPATELGGFLGSHAHTHPTAVSPGALLLPGLCTDSALGQHEIVDDMSSSKLGLGVGGQFNFNVAADPPSDAVSAVIKDDEKARLGFLHHYGLGATAGADVSAAVLPCTPPTGNAAASSAFTDQLQGLLDAGLLAGGGAPTPMATVVTVAAGRPGAPVQCYSVPAMVRMDVKALFGPAAVMLGQTGEAIPVDGAGVTAEPLQNGACYYVLM

SEQ ID NO: 13084 - DNA, 1366 bp, Triticum aestivum
  misc_feature (1)..(1366): Ceres Seq. ID no. 15170103
accctctcccggcccattacattacacgaaagcaaagcatacctgagcagagctgcggcagagcttcgagctgaggccttgtggagtagtcaaacattgagagaacgaaaatggcacggagcccagctcaaatcgctatccggttgatcgctctgctccttctgcttccagtggcgtggtcggcgacgttcacgatgaccaacaactgcggctacacggtgtggccggggctgctgtcgggcgcaggcacggcgccgctgtcgacgacggggttcgcgctggcgcagggcgcgtcggcgactgtgaccgcgccggcgagctggtccgggcgcatgtgggcgcgcacgctctgcgccgaggacgctgccggcaagttcacctgcgccacgggcgactgcggctcgggcgcgctccagtgcaacggcggtggcgctgcgccgccggcctcgcttgtggagttcacgctcgacggctccggtggcatggacttcttcgacgtcagcctggtcgacggctacaacctgccgatgctggtcgtaccgcagggcgctgccactgccgccgccgccagctccacgagcgggcccaagtgcatggccaccggctgcctcgtcgacctgaacgccgcgtgcccggccgcgctgaaggtcacgtcgacgggtgccgccagcagcgcggtcggcgggagcgccatggcgtgccgcagcgcgtgcgaggcgttcggctccccggagtactgctgcagcggcgcgtacgggagccccaacacgtgccggccgtcggcgtactcgcagtacttcaagagcgcgtgcccccgcgcctacagctacgcgtacgacgactccacctccaccttcacctgcgccgccggcaccaactacgccatcaccttctgcccaagcaccaccagtgggaagtacaccgacgagaacccgcaggctgccggcgtgccgcccacgaacggcacgatggtgtaccgcggcggcgagcagttctcaacgggcggcggcgcctccattgccgcccatgcgtcgcagctcctcctcgcggtggccgtcgccgtcgctctgctcctactgtaagcgctggccatgcgtgcaatggcggcaacagcgtacgtactcccgcctctcgaggtgtccttatccggccggcctcttttggcgtgacggaggcagagataatactcgagcggagcacaggagaagggcgggcgggcaagatcaaagtttgacagtgccgctactgatgactgataaaacaaggatatcttacagtagtgtcgtagacttaggttaatgtttactctctacgcttctttgatttgttgagcggaaatgatgatgtgttcattgttcgtcgtgat

SEQ ID NO: 13085 - protein, 323 aa, Triticum aestivum
  misc_feature (1)..(323): Ceres Seq. ID no. 15170104
MARSPAQIAIRLIALLLLLPVAWSATFTMTNNCGYTVWPGLLSGAGTAPLSTTGFALAQGASATVTAPASWSGRMWARTLCAEDAAGKFTCATGDCGSGALQCNGGGAAPPASLVEFTLDGSGGMDFFDVSLVDGYNLPMLVVPQGAATAAAASSTSGPKCMATGCLVDLNAACPAALKVTSTGAASSAVGGSAMACRSACEAFGSPEYCCSGAYGSPNTCRPSAYSQYFKSACPRAYSYAYDDSTSTFTCAAGTNYAITFCPSTTSGKYTDENPQAAGVPPTNGTMVYRGGEQFSTGGGASIAAHASQLLLAVAVAVALLLL

SEQ ID NO: 13086 - protein, 295 aa, Triticum aestivum
  misc_feature (1)..(295): Ceres Seq. ID no. 15170105
MTNNCGYTVWPGLLSGAGTAPLSTTGFALAQGASATVTAPASWSGRMWARTLCAEDAAGKFTCATGDCGSGALQCNGGGAAPPASLVEFTLDGSGGMDFFDVSLVDGYNLPMLVVPQGAATAAAASSTSGPKCMATGCLVDLNAACPAALKVTSTGAASSAVGGSAMACRSACEAFGSPEYCCSGAYGSPNTCRPSAYSQYFKSACPRAYSYAYDDSTSTFTCAAGTNYAITFCPSTTSGKYTDENPQAAGVPPTNGTMVYRGGEQFSTGGGASIAAHASQLLLAVAVAVALLLL

SEQ ID NO: 13087 - protein, 249 aa, Triticum aestivum
  misc_feature (1)..(249): Ceres Seq. ID no. 15170106
MWARTLCAEDAAGKFTCATGDCGSGALQCNGGGAAPPASLVEFTLDGSGGMDFFDVSLVDGYNLPMLVVPQGAATAAAASSTSGPKCMATGCLVDLNAACPAALKVTSTGAASSAVGGSAMACRSACEAFGSPEYCCSGAYGSPNTCRPSAYSQYFKSACPRAYSYAYDDSTSTFTCAAGTNYAITFCPSTTSGKYTDENPQAAGVPPTNGTMVYRGGEQFSTGGGASIAAHASQLLLAVAVAVALLLL

SEQ ID NO: 13088 - DNA, 1827 bp, Triticum aestivum
  misc_feature (1)..(1827): Ceres Seq. ID no. 15170107
gaccggttaaacacacttcgacgctgacgggtgggcctcacgtggcaggaacggaaacacaccgcgaagctttggctaatccaacccacagagacggcgcgcatggcgaccgcggcggcggcggcggtggcgtcgctccggtacttcccctcttccgtcaggaaccgcagctatcccggaactatcggcggcggcgctgtggtcacgttttctccgcggcggggccgctgtgcgacggcggccgtggccgcgccttcgcgggaggcggagccggcctcctcgctcggggacctcacccgcgtagacttccccatcctcgaccaggaatttgatggtaacaaattagtttacttcgacaatggtgcaacatcacagaaaccctctcatgtgatgaaagccttagacgactactaccgattttataattcgaatgttcaccgtggcattcatgctctcagcgcaaaggctactgatgcatatgagagtgcaagaaggaaagttgcaaatttcgtcaatgcggctgatagtagagagattatttttactcgtaatgctacagaagctatcaatttagtagcttattcatggggcctatctaacttaaaacaaggagatgagattattcttacagttgcagagcatcatagtgcgattgttccttggcaatttgtatcccaaaaaactggtgctgtcctaaagtatgttgggctgactaaagaagaggttccagacatggagcagttaaaagggcttctgtcaagcaagacaaagattgttgttgtccatcatgtttcaaacgtcctgggttcaatgcttcctattgaggaggtcgtatcatgtgcaaacaaagttggagctaaagttcttgtagatgcttgtcaaagtgttcctcatatgccagttgatgttcagaagcttggtgcagattttcttgttgcatcctcgcataagatgtgtggccctacaggcgtcggattcttgcatggaaaatttgagatcttgtcatctatggagcctttcttaggtggtggtgaaatgattgcagatgtgttcgaagacaaatctacatatgctgagccgccttctagatttgaggctggaactcctgcaattggagaagctataggattgggggttgcgatagattatctgtcacactttggcatgcagacgatccacgagtatgagaaagagttggggtcgtacctttatgagagccttctctccgttccaaatgttcgtatctatggtccagcgccttctgcaagtgatcaccgtgctcctttatgttctttcaatgttgagaatgttcatccaacagatattgccgaaattcttgatctccagcatggcatagcgattcggtcagggcatcattgtgcacagattttgcatcgcacccttggtatcaatgcgagcgcccgtgctagtcttcacttttacaacacaaaagaggaggtggatgccttcatccatgggctaaaagctaccattgatttccttacttcccaccactagttcagttcagttagcaaacattagcttcctcgttgtctctcactagttgaagtgcgatagaaggcctacctgctcaaactgtctgatgtctttcagctttttcgtgtaaaccatgcacgggcaagtttatctactccagtactcttgccctctggaagtttcgagataaagtactgtcggctatgtagcctgggcggctccgtttatttcctatatataaaccgtattatacctggaccgttggccagttcatctgtaatttacgatctgtcaataactccataacagtaagcatggtggatacttgtg

SEQ ID NO: 13089 - protein, 471 aa, Triticum aestivum
  misc_feature (1)..(471): Ceres Seq. ID no. 15170108
MATAAAAAVASLRYFPSSVRNRSYPGTIGGGAVVTFSPRRGRCATAAVAAPSREAEPASSLGDLTRVDFPILDQEFDGNKLVYFDNGATSQKPSHVMKALDDYYRFYNSNVHRGIHALSAKATDAYESARRKVANFVNAADSREIIFTRNATEAINLVAYSWGLSNLKQGDEIILTVAEHHSAIVPWQFVSQKTGAVLKYVGLTKEEVPDMEQLKGLLSSKTKIVVVHHVSNVLGSMLPIEEVVSCANKVGAKVLVDACQSVPHMPVDVQKLGADFLVASSHKMCGPTGVGFLHGKFEILSSMEPFLGGGEMIADVFEDKSTYAEPPSRFEAGTPAIGEAIGLGVAIDYLSHFGMQTIHEYEKELGSYLYESLLSVPNVRIYGPAPSASDHRAPLCSFNVENVHPTDIAEILDLQHGIAIRSGHHCAQILHRTLGINASARASLHFYNTKEEVDAFIHGLKATIDFLTSHH

SEQ ID NO: 13090 - protein, 375 aa, Triticum aestivum
  misc_feature (1)..(375): Ceres Seq. ID no. 15170109
MKALDDYYRFYNSNVHRGIHALSAKATDAYESARRKVANFVNAADSREIIFTRNATEAINLVAYSWGLSNLKQGDEIILTVAEHHSAIVPWQFVSQKTGAVLKYVGLTKEEVPDMEQLKGLLSSKTKIVVVHHVSNVLGSMLPIEEVVSCANKVGAKVLVDACQSVPHMPVDVQKLGADFLVASSHKMCGPTGVGFLHGKFEILSSMEPFLGGGEMIADVFEDKSTYAEPPSRFEAGTPAIGEAIGLGVAIDYLSHFGMQTIHEYEKELGSYLYESLLSVPNVRIYGPAPSASDHRAPLCSFNVENVHPTDIAEILDLQHGIAIRSGHHCAQILHRTLGINASARASLHFYNTKEEVDAFIHGLKATIDFLTSHH

SEQ ID NO: 13091 - protein, 261 aa, Triticum aestivum
  misc_feature (1)..(261): Ceres Seq. ID no. 15170110
MEQLKGLLSSKTKIVVVHHVSNVLGSMLPIEEVVSCANKVGAKVLVDACQSVPHMPVDVQKLGADFLVASSHKMCGPTGVGFLHGKFEILSSMEPFLGGGEMIADVFEDKSTYAEPPSRFEAGTPAIGEAIGLGVAIDYLSHFGMQTIHEYEKELGSYLYESLLSVPNVRIYGPAPSASDHRAPLCSFNVENVHPTDIAEILDLQHGIAIRSGHHCAQILHRTLGINASARASLHFYNTKEEVDAFIHGLKATIDFLTSHH

SEQ ID NO: 13092 - DNA, 1557 bp, Triticum aestivum
  misc_feature (1)..(1557): Ceres Seq. ID no. 15170115
ataatatagttcggtccgtcggctctgttgtgggtgagggcggttcatcgaaggtggtagcaatggggaaggctgggaggtggctgaggagcatcttggccgggaaaagggatggcggcaggagaggcggcaagcgggggcagtcacagtgtgactcggcgcctttggccgagctgccggcggccgcgagcccgagggagaagaggcgatggagcttccggcggcctgcggcggcggtcaagcccgccgccgcaccgtcgccgttggcccaggaagcaggcggtctgtcggtgtcggtgtccgagcgcgagcttgagcagagcaagcacgccgtggcggtgaccacggcggccgccgatgccgcggtgatacacctgacggccccagaggcggaggacgacctcaacctgtatgccacccctgtccaggaggccgcggccgcaaggatccaggccaccttcagaggctacctggcaaggaaggctctgtgcgcgctgagaggtctggtgaagctgcaggcgctgatcaggggccacctggtgaggaagcaggccagagccacgctccgccgcatgcaggcgctcctcatggcgcagacccgcgtgcgcgcgcagcgcatgcgcatactcgaggaggaagaccacgctgccgccgctgcccctgttgaccgccggtccccgcagcaccccagacgccgccgctcctacgagatggacaggtccggcgaggagcatgccaagatcgtcgagatggacatgggggagccgccgcggcgggggcggagcagctgctcggtcgcggcgagcgagccatggtcggcagagcgccggcgagccgagtactacggccccggccagtgctcgccagcgccgtcggcggcgttcaccgagatcacgagcccacgcgcctacagcgggcacttcgaggacttcgagccggcgacggcgcgtgtcagcgcgtacgtgccggcaggttacgccgacgagggcgagtccgcgtccgagttcttccccaactacatggccaacacccagtcctcgcgcgccaaggcccggtcccagagcgcgccgaagcagaggcccgactcgccgtcgccgctggagcggcagccgagccggcgccgcggtggcccggcacccctgccgagaagcgtcaagatgcagcggtcgtcgtcgcacgtcggcgtgcccatgccatcgtcggcggccgccatgtacgcacagcactacccgtggtcggtgaagctggaccggtccagcgcgtcgctccatgagagcgagtgcgggtcgacgagctccgtcctcaccgccgctaccaccgtcggttacagccgctccatggtcggattcgaggtgcacaggagccagtattgagtactggtagctgaagcaagatatagttctccatgcctttcactcaacttcagaacaactcaaagataatgtgcactccgttcgaaaaaaagaagataatgtgcactgtgtgcgtgtcaaatgtgggcgccccatgccttgtgactcgatcccttgctgcgttttagtaaagtgatctgctcat

SEQ ID NO: 13093 - protein, 456 aa, Triticum aestivum
  misc_feature (1)..(456): Ceres Seq. ID no. 15170116
NIVRSVGSVVGEGGSSKVVAMGKAGRWLRSILAGKRDGGRRGGKRGQSQCDSAPLAELPAAASPREKRRWSFRRPAAAVKPAAAPSPLAQEAGGLSVSVSERELEQSKHAVAVTTAAADAAVIHLTAPEAEDDLNLYATPVQEAAAARIQATFRGYLARKALCALRGLVKLQALIRGHLVRKQARATLRRMQALLMAQTRVRAQRMRILEEEDHAAAAAPVDRRSPQHPRRRRSYEMDRSGEEHAKIVEMDMGEPPRRGRSSCSVAASEPWSAERRRAEYYGPGQCSPAPSAAFTEITSPRAYSGHFEDFEPATARVSAYVPAGYADEGESASEFFPNYMANTQSSRAKARSQSAPKQRPDSPSPLERQPSRRRGGPAPLPRSVKMQRSSSHVGVPMPSSAAAMYAQHYPWSVKLDRSSASLHESECGSTSSVLTAATTVGYSRSMVGFEVHRSQY

SEQ ID NO: 13094 - protein, 436 aa, Triticum aestivum
  misc_feature (1)..(436): Ceres Seq. ID no. 15170117
MGKAGRWLRSILAGKRDGGRRGGKRGQSQCDSAPLAELPAAASPREKRRWSFRRPAAAVKPAAAPSPLAQEAGGLSVSVSERELEQSKHAVAVTTAAADAAVIHLTAPEAEDDLNLYATPVQEAAAARIQATFRGYLARKALCALRGLVKLQALIRGHLVRKQARATLRRMQALLMAQTRVRAQRMRILEEEDHAAAAAPVDRRSPQHPRRRRSYEMDRSGEEHAKIVEMDMGEPPRRGRSSCSVAASEPWSAERRRAEYYGPGQCSPAPSAAFTEITSPRAYSGHFEDFEPATARVSAYVPAGYADEGESASEFFPNYMANTQSSRAKARSQSAPKQRPDSPSPLERQPSRRRGGPAPLPRSVKMQRSSSHVGVPMPSSAAAMYAQHYPWSVKLDRSSASLHESECGSTSSVLTAATTVGYSRSMVGFEVHRSQY

SEQ ID NO: 13095 - protein, 266 aa, Triticum aestivum
  misc_feature (1)..(266): Ceres Seq. ID no. 15170118
MQALLMAQTRVRAQRMRILEEEDHAAAAAPVDRRSPQHPRRRRSYEMDRSGEEHAKIVEMDMGEPPRRGRSSCSVAASEPWSAERRRAEYYGPGQCSPAPSAAFTEITSPRAYSGHFEDFEPATARVSAYVPAGYADEGESASEFFPNYMANTQSSRAKARSQSAPKQRPDSPSPLERQPSRRRGGPAPLPRSVKMQRSSSHVGVPMPSSAAAMYAQHYPWSVKLDRSSASLHESECGSTSSVLTAATTVGYSRSMVGFEVHRSQY

SEQ ID NO: 13096 - DNA, 1640 bp, Triticum aestivum
  misc_feature (1)..(1640): Ceres Seq. ID no. 15170123
aaaatcccccaaaacatggacggctacaggcgggctccgccgccggcggcggccgccgcatcggcggcatcagtgctcggcgacgacgatctcctccgcgagatcttcatccgcctcggcttccccaactgcctcgtccgcgccgccctcgtctcccagcggtggctcctcaacgcctccgacccggccttcctccgccgcttccgcgagcgcaacccgccccgcgtcctcggcgtctgcgccggctactcggtgagaccgttcaagttcgtgccgctcccacagcccccggagctcgccgccctctcgcggcgcgcggcctcctcctgcgcctacgcctttgcccgaggaggccagcgcatcgagcactgccggaacggccgcctcatcgtcgagtccctccgcaagggaacattcaagcactccgtcctcgcgccgctgctctacggggagcccgaggcggtcctcccaccgatcccgccgccccgccgtcatccgcaggagctcactcaagggtcattcactcagattttcctgcccgaggacggggggcgcgaaggcatcaccttggtgaatctgtggaaggtccagcgagaagtccgtgcggaggtctacgtgctgggagccgccggatggggcgtccctaccaccgccatcacagagatagagctccagtatgccgcaaccttctttgcaaaaatgctaccgcccgtccatggtaaggtcttcgtggtgaccggctttgggtacaccctgggtctagatttggccacggcaacgttcgtgatgctacaactaccagctggagtgcgttacaattacatgctctcatctgcggagggttccgggatctatcttgtcactgtggaccggtttcagctcagcgtgtggctccatcggatggcaggcgacaaccatggtgcaggtggctggctcttggtggacacgttttctgttctcgaggcatgcgcacgtcttgcgggtgacagttgggtgccttgtgaatatcttaatgttgccgctgtcggagacaatgccgactttgtgttcttggatcatccatcaagcggtgttatcttttatgttcatctcagtagcagggtggttaagatggtgtatcagaggacggcagatgaacatgagtgtagaagtgtggctgtacgcatctctcctgttatgacaatctggccgcctatattcccagcactgaacataggacatgatcaagaggggattgttagggctgtcagatctctcgacagaagatgacccgagtgttcgaaggcagctgaccagggccatcgggaggctcgaggtggtcctgcagcagctgatcctggcctccaactctataaggtgagaccgagctcgaagcaaaactcgaggacgcggttagtaagatcaagagggatgtgcagtgcccgccatgtatgctatatctgctctgctcttgttcttggcctttgactgatttaccttcacatggacggagcgttgtagcttgtgcagcaactaaaaatctaggtaaattgattagtgttggactgttggtccaaggatgagcaacttgtgctctgtactcattcttttccctgtacacaaaaatttatagttgtatgtgaaattcagatttgtggagc

SEQ ID NO: 13097 - protein, 422 aa, Triticum aestivum
  misc_feature (1)..(422): Ceres Seq. ID no. 15170124
KIPQNMDGYRRAPPPAAAAASAASVLGDDDLLREIFIRLGFPNCLVRAALVSQRWLLNASDPAFLRRFRERNPPRVLGVCAGYSVRPFKFVPLPQPPELAALSRRAASSCAYAFARGGQRIEHCRNGRLIVESLRKGTFKHSVLAPLLYGEPEAVLPPIPPPRRHPQELTQGSFTQIFLPEDGGREGITLVNLWKVQREVRAEVYVLGAAGWGVPTTAITEIELQYAATFFAKMLPPVHGKVFVVTGFGYTLGLDLATATFVMLQLPAGVRYNYMLSSAEGSGIYLVTVDRFQLSVWLHRMAGDNHGAGGWLLVDTFSVLEACARLAGDSWVPCEYLNVAAVGDNADFVFLDHPSSGVIFYVHLSSRVVKMVYQRTADEHECRSVAVRISPVMTIWPPIFPALNIGHDQEGIVRAVRSLDRR

SEQ ID NO: 13098 - protein, 417 aa, Triticum aestivum
  misc_feature (1)..(417): Ceres Seq. ID no. 15170125
MDGYRRAPPPAAAAASAASVLGDDDLLREIFIRLGFPNCLVRAALVSQRWLLNASDPAFLRRFRERNPPRVLGVCAGYSVRPFKFVPLPQPPELAALSRRAASSCAYAFARGGQRIEHCRNGRLIVESLRKGTFKHSVLAPLLYGEPEAVLPPIPPPRRHPQELTQGSFTQIFLPEDGGREGITLVNLWKVQREVRAEVYVLGAAGWGVPTTAITEIELQYAATFFAKMLPPVHGKVFVVTGFGYTLGLDLATATFVMLQLPAGVRYNYMLSSAEGSGIYLVTVDRFQLSVWLHRMAGDNHGAGGWLLVDTFSVLEACARLAGDSWVPCEYLNVAAVGDNADFVFLDHPSSGVIFYVHLSSRVVKMVYQRTADEHECRSVAVRISPVMTIWPPIFPALNIGHDQEGIVRAVRSLDRR

SEQ ID NO: 13099 - protein, 239 aa, Triticum aestivum
  misc_feature (1)..(239): Ceres Seq. ID no. 15170126
NPPKHGRLQAGSAAGGGRRIGGISARRRRSPPRDLHPPRLPQLPRPRRPRLPAVAPQRLRPGLPPPLPRAQPAPRPRRLRRLLGETVQVRAAPTAPGARRPLAARGLLLRLRLCPRRPAHRALPERPPHRRVPPQGNIQALRPRAAALRGARGGPPTDPAAPPSSAGAHSRVIHSDFPARGRGARRHHLGESVEGPARSPCGGLRAGSRRMGRPYHRHHRDRAPVCRNLLCKNATARPW

SEQ ID NO: 13100 - DNA, 1778 bp, Triticum aestivum
  misc_feature (1)..(1778): Ceres Seq. ID no. 15170139
ctagtttcccatcctgccgcatctcttttcgccgctgattctcgcgaaagcgcaccatggcttcaacgcccgtcgaccgccatctctctctacacgcggatcgtgaggagggcccgacaaggaacacggtgttcctggcgtagttaagctgctattggagacaccctccggcttcgcaattttctcttttgccgaggattacctcgacaaagatatccagatcatctggcttcacgacttccaaatgtttgaggacaaatccagtgccattaaccttactacccggcgattaggcgccaaactcgcccagatgatcatgaagtgctccttctatgatgacaaactagttgttggaaggtctgaatataaagaaataattgaagaatcactgggtctaacctgtgtgtacaatgatcatgtgatggaggtgatgtggggtctgcagaatctcatgcatacttcttttcctgaagaaaaatctaagatgtctagggatgaccagctcctcgtgagcaaaggattgtatatggtcttagatcgacacggcattaagatcaaggcagagatgcttaatgagcatattattaagaagacccgcgatgtacgtaatactgatttacgtgaagatgcagttgcaattgtgttgcacgaaatggttgatgcctatttcgaggagttttctaaaattgataccgaggaatggagtttattcaaactagcattagctttgaaagtaatgattgatcctcatggaggacttaaagctggtgacccttatgagatgttcacacatgacgagttaatagtgatggggcgtgacgcatctaaatatgaaggtactcttgataagaaaactgtcttggcaatgtacaatgacgctgttgttctccgtgaggacaagatggatttgctgtacgaattggactgcttggttgaggaggctaaaggagcactggaaactgaagaagtgctggagaagcttgcaacattaagtgttgactccaagcagcaaactgactgtacatcttcaacagcggtgagtctgacagtacccaaccaaagcagcatctataaggagcaacactgtcctatcacagcagatgcagatggcgcggagatctcgccaaccactccagatgaagttactgctgaaagggatgctgtccgggaaaatacacaggctcaagaaactactgctgaaggaagaaaggagatcggtactgctgaaggaagaatgaacctcggtactgctgaaggaagaatgaaccttggtactgctggaggaagaataaacctcggtactgctgaaggaagaaaggagctcagtcgcattattgctcagaaggtgcccccttgtcattatcaagaatggaagcctcttcacattccgcagctcattccaaccactccatatggtgcggagatcttgccaaccactccaaatgaagttactgctgaaaggaatgctgtccgggaaaatacgcaggctcaagaaactaccgctgaaggaagaaaggagatcggtcacattcttggtcagtagttagccctgcgttgttatcttgacagtggtaactctcttcacgactagtgtgttccacttcccgcaacagactgctagcgtctcccacttctactagtcgctacctaagttgtttaggcgcttccactgattacgttgataatggcatgccttctcaggagtgccaagcttctcctaattatgcccctcgacatttgtattgcctaggtacctatgaaatgctttttgttatttg

SEQ ID NO: 13101 - protein, 432 aa, Triticum aestivum
  misc_feature (1)..(432): Ceres Seq. ID no. 15170140
MFEDKSSAINLTTRRLGAKLAQMIMKCSFYDDKLVVGRSEYKEIIEESLGLTCVYNDHVMEVMWGLQNLMHTSFPEEKSKMSRDDQLLVSKGLYMVLDRHGIKIKAEMLNEHIIKKTRDVRNTDLREDAVAIVLHEMVDAYFEEFSKIDTEEWSLFKLALALKVMIDPHGGLKAGDPYEMFTHDELIVMGRDASKYEGTLDKKTVLAMYNDAVVLREDKMDLLYELDCLVEEAKGALETEEVLEKLATLSVDSKQQTDCTSSTAVSLTVPNQSSIYKEQHCPITADADGAEISPTTPDEVTAERDAVRENTQAQETTAEGRKEIGTAEGRMNLGTAEGRMNLGTAGGRINLGTAEGRKELSRIIAQKVPPCHYQEWKPLHIPQLIPTTPYGAEILPTTPNEVTAERNAVRENTQAQETTAEGRKEIGHILGQ

SEQ ID NO: 13102 - protein, 410 aa, Triticum aestivum
  misc_feature (1)..(410): Ceres Seq. ID no. 15170141
MIMKCSFYDDKLVVGRSEYKEIIEESLGLTCVYNDHVMEVMWGLQNLMHTSFPEEKSKMSRDDQLLVSKGLYMVLDRHGIKIKAEMLNEHIIKKTRDVRNTDLREDAVAIVLHEMVDAYFEEFSKIDTEEWSLFKLALALKVMIDPHGGLKAGDPYEMFTHDELIVMGRDASKYEGTLDKKTVLAMYNDAVVLREDKMDLLYELDCLVEEAKGALETEEVLEKLATLSVDSKQQTDCTSSTAVSLTVPNQSSIYKEQHCPITADADGAEISPTTPDEVTAERDAVRENTQAQETTAEGRKEIGTAEGRMNLGTAEGRMNLGTAGGRINLGTAEGRKELSRIIAQKVPPCHYQEWKPLHIPQLIPTTPYGAEILPTTPNEVTAERNAVRENTQAQETTAEGRKEIGHILGQ

SEQ ID NO: 13103 - protein, 408 aa, Triticum aestivum
  misc_feature (1)..(408): Ceres Seq. ID no. 15170142
MKCSFYDDKLVVGRSEYKEIIEESLGLTCVYNDHVMEVMWGLQNLMHTSFPEEKSKMSRDDQLLVSKGLYMVLDRHGIKIKAEMLNEHIIKKTRDVRNTDLREDAVAIVLHEMVDAYFEEFSKIDTEEWSLFKLALALKVMIDPHGGLKAGDPYEMFTHDELIVMGRDASKYEGTLDKKTVLAMYNDAVVLREDKMDLLYELDCLVEEAKGALETEEVLEKLATLSVDSKQQTDCTSSTAVSLTVPNQSSIYKEQHCPITADADGAEISPTTPDEVTAERDAVRENTQAQETTAEGRKEIGTAEGRMNLGTAEGRMNLGTAGGRINLGTAEGRKELSRIIAQKVPPCHYQEWKPLHIPQLIPTTPYGAEILPTTPNEVTAERNAVRENTQAQETTAEGRKEIGHILGQ

SEQ ID NO: 13104 - DNA, 1554 bp, Triticum aestivum
  misc_feature (1)..(1554): Ceres Seq. ID no. 15170159
aaaacatactaggcaagaaagggaaagagaaatagacagcggaaagttgcctccatagtggaaacaggctaggcgtgagagagttcagttttggcaaccacagcatgggaagtgttccagcagccacccccagcgtgcgcgagatctggcgcgcgcagcgcgccgacgggccggcggccgtgctcgccatcggcacggcgaacccggcgcactgcgtgccccaggacgagttcccggacttctacttccgcgccaccaacagcgaccacctcactgccctcaagggcaagttcaagagagtctgtaagcatgccccagctttcttgatcatcttccatttaggacgtgtttgattggaccattaactaactgtttgtttggttggcatgcgtcgagcgcagttcagaagctaggcgttgagaagcgctacctccaccacacggaggagctgctgcgcgcccaccccgagttcctcgacgacgaggcggcgtccctggacgcccggctggacatcgtcgccaccgccgtcccggagctggccgcggaggcctctaagaaggccatctccgagtggggccggccggccgccgacatcacccacctcgtggtcaccacaaactccggcgcccacatcccgggcgtcgacttccgcctcatcccgcttctcggcctccgcccctccgtgcgtcgcaccatgctctacctcaacggctgcttcgccggctccgccgcgctgcgcctcgccaaggacctcgccgagaacaaccgcggcgcgcgcgtcctcgtggtctgcgccgagctcaccctcatgctgttcaacgggcccaaggagggctccttcgagaggctcatccaccaggggctcttcggcgacggcgcgggcgccgtcgtcgtcggcgccgacccgctgagccccgtcgagcacgccctgttcgagatggtgtccgccgcgcagacggtgataccggactccggcgacgccatcaccatgcacatcaccaagggcgggttcggcggcaacatctccacgagggacgtcccggtgttcattggggacaacgtcgagcggtgcctccacgactcgctggagccgctcggcatcggcgcgaaatggaacgacctcttctgggcggtgcaccccgggtcgtctgccattctggaccgcatcgacacggtgctccagctcgagccggagaagctggcggcgagccgccgggtgctgagcgactacggcaacatgttcggcgtgacaattatatttgttctcgacgagctgcgccggaggcttagggagcaggaaggggccggcggcgcgccggagtggggtgtggtgatgaccttcgggccggggctcaccgtggagacgatggtgttgcacgccactgggcacatgcatgcgtccccatgaagaggaattgacactggattaagaggtcaattcgttgtatcagtttgcacttatttggcactgtttgaagtcgtttaccaaaaccatccttacttgaatgtgtgcgtaataaagtcaaagttcaatagtttcaggatctattcaac

SEQ ID NO: 13105 - protein, 237 aa, Triticum aestivum
  misc_feature (1)..(237): Ceres Seq. ID no. 15170160
MLYLNGCFAGSAALRLAKDLAENNRGARVLVVCAELTLMLFNGPKEGSFERLIHQGLFGDGAGAVVVGADPLSPVEHALFEMVSAAQTVIPDSGDAITMHITKGGFGGNISTRDVPVFIGDNVERCLHDSLEPLGIGAKWNDLFWAVHPGSSAILDRIDTVLQLEPEKLAASRRVLSDYGNMFGVTIIFVLDELRRRLREQEGAGGAPEWGVVMTFGPGLTVETMVLHATGHMHASP

SEQ ID NO: 13106 - protein, 199 aa, Triticum aestivum
  misc_feature (1)..(199): Ceres Seq. ID no. 15170161
MLFNGPKEGSFERLIHQGLFGDGAGAVVVGADPLSPVEHALFEMVSAAQTVIPDSGDAITMHITKGGFGGNISTRDVPVFIGDNVERCLHDSLEPLGIGAKWNDLFWAVHPGSSAILDRIDTVLQLEPEKLAASRRVLSDYGNMFGVTIIFVLDELRRRLREQEGAGGAPEWGVVMTFGPGLTVETMVLHATGHMHASP

SEQ ID NO: 13107 - protein, 156 aa, Triticum aestivum
  misc_feature (1)..(156): Ceres Seq. ID no. 15170162
MVSAAQTVIPDSGDAITMHITKGGFGGNISTRDVPVFIGDNVERCLHDSLEPLGIGAKWNDLFWAVHPGSSAILDRIDTVLQLEPEKLAASRRVLSDYGNMFGVTIIFVLDELRRRLREQEGAGGAPEWGVVMTFGPGLTVETMVLHATGHMHASP

SEQ ID NO: 13108 - DNA, 1782 bp, Triticum aestivum
  misc_feature (1)..(1782): Ceres Seq. ID no. 15170175
aatgcacactcgttcagctagtagcccaacatctcttgacttttgagaaaaatggcttttgaccttgcagcggcggcagcggcagtgccatggagctacctcctgtacgggctcacgggctctgcgctcctgtggcaggcccgcctgctgctggaccggctgtggtggcgcccgcggcggcttgagcggacgctgcgcgcgcagggcgtcggcggcacgccgtaccgcttcctcatgggcgacctcaaggacttcggccggctcaacgacgaggcctgggccaagccattgccgctgcgctgccacgacatcgtcccccgcgtcatcccgttcctccacaacaacgtccgggacaacggcaagccgtgcttctcttggttcggaccggtggccaacgtggccatcactgaccctgagcttatcaaggacgtgctgtccaacaagtttggccacttccagaagccccagttcccggctctcaccaagctgctcgccaacggcctcacgacccatgagggggagaaatgggtcaagcacaggaggatcctcaatcccgctttccatcttgagaagctcaagctcatgctaccggctttttctgcaagctgtgaagagcttgtcaccagatggaaggagttgcattgttctggcggatcgtgcgaggtggatgtgtggccggagctccagaacctcaccggggatgtcatttctcgcacagctttcggcagcagttatctcgaaggaaggcggatattccaactgcagtccgagcaagctaagctctttgttggtgcggtccagaggattattattccgggttacctattcttgcccaccaagaacaatttgaaaatgcgcaaaaacaataaggaggttgaatcagttttacaaggtctaatcaataaaagaatgcgagctatggaagaaggtgaaaaatcggaaaatgatctgctaggcctgttgctagagtcaaatatgaaggacatggacgagaatggccaacctagccaaggaatggcaatggaagatgtcatcgaggagtgcaaactattctacttggcaggaatggagacaacgtcggtgctgctcacgtggacaatgattgtactaagcatgcatccggagtggcaagaccttgcgagggaggaggtcctaggtttatttaggaagaacaaacccgagtacgagggccttagccgactaaaaatggtgaccatgatccttcacgaggttcttcggttgtatccatcggctacagtttttagccgaaaaacatacaaggatatggatatcggaggggtcagatacccctcgggtgtgttcatcgaggtgccagttctatttatcaatcatgatccagacatatggggaagtgatgtcaatgagttcaaaccagaccgatttgcccaggggatttccaaggcatctaagcatccgggcgccttcttgtcatttggttgggggccacgggtgtgcatcggccagaactttgcaatgctcgaagccaagatggcactaagcatgatccttcagcatttcgagtttgagctcgcgccatcatatacgcatgcaccgcacaccgtgatgacattgcaaccaatgcatggtgcgcaaattaatctcagagctatctgactaggtacacatttaagccaatatttggttgttcttagttatcggtgtaaacaatgttggcttttgtaagatgaactctctattttaactattcgtgtaaacaatattgatttgtgtaagatgaactatgcatttgaattatctggc

SEQ ID NO: 13109 - protein, 527 aa, Triticum aestivum
  misc_feature (1)..(527): Ceres Seq. ID no. 15170176
MAFDLAAAAAAVPWSYLLYGLTGSALLWQARLLLDRLWWRPRRLERTLRAQGVGGTPYRFLMGDLKDFGRLNDEAWAKPLPLRCHDIVPRVIPFLHNNVRDNGKPCFSWFGPVANVAITDPELIKDVLSNKFGHFQKPQFPALTKLLANGLTTHEGEKWVKHRRILNPAFHLEKLKLMLPAFSASCEELVTRWKELHCSGGSCEVDVWPELQNLTGDVISRTAFGSSYLEGRRIFQLQSEQAKLFVGAVQRIIIPGYLFLPTKNNLKMRKNNKEVESVLQGLINKRMRAMEEGEKSENDLLGLLLESNMKDMDENGQPSQGMAMEDVIEECKLFYLAGMETTSVLLTWTMIVLSMHPEWQDLAREEVLGLFRKNKPEYEGLSRLKMVTMILHEVLRLYPSATVFSRKTYKDMDIGGVRYPSGVFIEVPVLFINHDPDIWGSDVNEFKPDRFAQGISKASKHPGAFLSFGWGPRVCIGQNFAMLEAKMALSMILQHFEFELAPSYTHAPHTVMTLQPMHGAQINLRAI

SEQ ID NO: 13110 - protein, 466 aa, Triticum aestivum
  misc_feature (1)..(466): Ceres Seq. ID no. 15170177
MGDLKDFGRLNDEAWAKPLPLRCHDIVPRVIPFLHNNVRDNGKPCFSWFGPVANVAITDPELIKDVLSNKFGHFQKPQFPALTKLLANGLTTHEGEKWVKHRRILNPAFHLEKLKLMLPAFSASCEELVTRWKELHCSGGSCEVDVWPELQNLTGDVISRTAFGSSYLEGRRIFQLQSEQAKLFVGAVQRIIIPGYLFLPTKNNLKMRKNNKEVESVLQGLINKRMRAMEEGEKSENDLLGLLLESNMKDMDENGQPSQGMAMEDVIEECKLFYLAGMETTSVLLTWTMIVLSMHPEWQDLAREEVLGLFRKNKPEYEGLSRLKMVTMILHEVLRLYPSATVFSRKTYKDMDIGGVRYPSGVFIEVPVLFINHDPDIWGSDVNEFKPDRFAQGISKASKHPGAFLSFGWGPRVCIGQNFAMLEAKMALSMILQHFEFELAPSYTHAPHTVMTLQPMHGAQINLRAI

SEQ ID NO: 13111 - protein, 350 aa, Triticum aestivum
  misc_feature (1)..(350): Ceres Seq. ID no. 15170178
MLPAFSASCEELVTRWKELHCSGGSCEVDVWPELQNLTGDVISRTAFGSSYLEGRRIFQLQSEQAKLFVGAVQRIIIPGYLFLPTKNNLKMRKNNKEVESVLQGLINKRMRAMEEGEKSENDLLGLLLESNMKDMDENGQPSQGMAMEDVIEECKLFYLAGMETTSVLLTWTMIVLSMHPEWQDLAREEVLGLFRKNKPEYEGLSRLKMVTMILHEVLRLYPSATVFSRKTYKDMDIGGVRYPSGVFIEVPVLFINHDPDIWGSDVNEFKPDRFAQGISKASKHPGAFLSFGWGPRVCIGQNFAMLEAKMALSMILQHFEFELAPSYTHAPHTVMTLQPMHGAQINLRAI

SEQ ID NO: 13112 - DNA, 1311 bp, Triticum aestivum
  misc_feature (1)..(1311): Ceres Seq. ID no. 15170183
aacatccaaatcgaaaaacagtagagagtatggctcgtggcgcccctctgcttgcagcagcagtggtagctgttgtggcacttgggtctgtaggggcgacagagcaggaggccgccggcttgaggcagcctccggtggcgcagggcctgtcgttcgagttctaccggcagagctgccccagggcagagtccatcgtgcgtgacttcgtccgggacgccgtccgcaaggacatcggcctcgccgccggcctgctccgcctccacttccacgattgcttcgtgcagggctgcgacgcgtcggtgcttctggacgggtcggccacggggccgggggagcagcaggcgccacccaacctcacgctccgcccgtccgccttcaaggccgtcaacgacatccgggaccggctggagcgtgagtgccgcggcgccgtcgtctcctgctccgacatcctggccctcgccgcccgcgactcggtggtcgcctcgggcgggccggagtaccgcgtgcccctcggccgccgcgacagccccaggttcgccacggcacaggacgtgctgtccggtcttcccccgccgtcctcgaacgtgccgtccctcctcgatgtgctccgggagatcggcctcgacgccaccgacctcgtcgcgctctccggcggccacaccgtggggctcgggcactgcacctccttcgacgaccgcctcttccctcgcccggaccccaccatgagcccggacttccttggcaggctgaaacgaacgtgtccatccaagggcaccgacgcgcgcacagtgctggacgtgcgcaccccaaacgtgttcgacaacaagtactacgtgaacctggtgaaccgggaggggctcttcgtgtccgaccaggacctcttcacgaacgccaccacccggcccatcgtggagcgcttcgcgcgcagccagcgtgacttcttcgaccagttcggcgtatccatggtcaagatgggccagatcaaggtgctcactggcgaccagggccaggttcgccgcaactgctccgctcgcaaccccgggactgctgacgggctccagtggtcgtccctggtgcagaccgtcgtcgacgccacccggagagcctcggtttgtaaatctatggtcgacaagtctatgtagtgtgtactgtacctggactagtagctgttagccatgcatgtggtaataaaaactgagcagggcaacccatggtcgacgaggctgtgtacgtacctgtgtaatgtaccttgtcgtgactcaaacgtgtgctaggctgctagctagcagacctacggtgaccagttagttt

SEQ ID NO: 13113 - protein, 379 aa, Triticum aestivum
  misc_feature (1)..(379): Ceres Seq. ID no. 15170184
HPNRKTVESMARGAPLLAAAVVAVVALGSVGATEQEAAGLRQPPVAQGLSFEFYRQSCPRAESIVRDFVRDAVRKDIGLAAGLLRLHFHDCFVQGCDASVLLDGSATGPGEQQAPPNLTLRPSAFKAVNDIRDRLERECRGAVVSCSDILALAARDSVVASGGPEYRVPLGRRDSPRFATAQDVLSGLPPPSSNVPSLLDVLREIGLDATDLVALSGGHTVGLGHCTSFDDRLFPRPDPTMSPDFLGRLKRTCPSKGTDARTVLDVRTPNVFDNKYYVNLVNREGLFVSDQDLFTNATTRPIVERFARSQRDFFDQFGVSMVKMGQIKVLTGDQGQVRRNCSARNPGTADGLQWSSLVQTVVDATRRASVCKSMVDKSM

SEQ ID NO: 13114 - protein, 370 aa, Triticum aestivum
  misc_feature (1)..(370): Ceres Seq. ID no. 15170185
MARGAPLLAAAVVAVVALGSVGATEQEAAGLRQPPVAQGLSFEFYRQSCPRAESIVRDFVRDAVRKDIGLAAGLLRLHFHDCFVQGCDASVLLDGSATGPGEQQAPPNLTLRPSAFKAVNDIRDRLERECRGAVVSCSDILALAARDSVVASGGPEYRVPLGRRDSPRFATAQDVLSGLPPPSSNVPSLLDVLREIGLDATDLVALSGGHTVGLGHCTSFDDRLFPRPDPTMSPDFLGRLKRTCPSKGTDARTVLDVRTPNVFDNKYYVNLVNREGLFVSDQDLFTNATTRPIVERFARSQRDFFDQFGVSMVKMGQIKVLTGDQGQVRRNCSARNPGTADGLQWSSLVQTVVDATRRASVCKSMVDKSM

SEQ ID NO: 13115 - DNA, 1635 bp, Triticum aestivum
  misc_feature (1)..(1635): Ceres Seq. ID no. 15170651
ctttcctgaggagaacaatgaaggatgacatagttgtccccatgctcgattttgaagtccaagatggccacatagcacctttggtttatggttcacagggtgattgggatagtagcctaaagataatacttgactggtcccctttttcttcgatggaagaactgctacagcagttcgaggatatggatagtcatggaaccaaggtggtgatatacaatttatggatgaatgacgatggccttttagaacttgactttgatgatgatgatgaggacatattgcttcgggatcaaggtcaaaacagtggggcgtcaacaaagatccaaaaagaaattattcagcaacatatatctcacagactcagattctcattgcgtgcatatagctccatcctttacctcaagaagtttgagaacttccaaattatactaagaggaaagcctgttgaacagataaacattgctgatgagctgaagtttaagaaagtagttacttacaaacctcaagtttcccatgattctcaagtggtgtcagtgaaggtagatattggctttgcaaaagaggctcctgttttgggaatttttgggattaatgtctaccataaaaatcgactaatcatgccattctggaaggtccttcaagaagcatctagtagagggaggagtgttataggtgtacttgaggcaaattttattgagccggcacatgacaagcaagattttgagaggactccactgttcattaggctggaaacaaaactgaaacaaattatcgttgattattggaaagaaaagtgtcatctaataggttaccagccaatcgatccgaaattgagatcccagtataaggctgctcttcaagattcaggtggtcctagagcgaagattcggcacgaagcttccactgctcagaaggctggagggcacctctcaaatttgctcccacagacatatgatgatgtagaagcttttagactgacagctaacagggcaggttctgctttgcattcgtctggccaagcacaagaagatagtatggactcagcaggcttggaagaggatctggtagatattggctctcttggtgtacttgatcccaattgcaatgagaagttgagtgaagaaaatttggttctgttcacaaggcgtgaagatcttcggcaacgagatacacagttgaagcagacgattggtgagctggagcatgaactagaggaaacaagaaggaagtgctctcagctcgcagctgagctgcagttacggaggagccagcaacaacattacatgtgaagggcctaaactatgggaaccaaactcctggaaatatgtggtttcatcaaagcacaaatactgaacagcgatacggatattggttgctcatacgcatacaaatgatcagcgtgatcggtatagttgccctcttcaagggaaatcttcagtgtgaagttactctgttttttttttcttttttctttttctgttcttgtgtggtgctggccgccactgttagccatggtgtggtgtggtggcagcacgtacagttcactgtaatatatactgttactgtgtgttactatttcgcatctttttacatattctatagagcagaacactaatggatgataactactagtgt

SEQ ID NO: 13116 - protein, 428 aa, Triticum aestivum
  misc_feature (1)..(428): Ceres Seq. ID no. 15170652
FLRRTMKDDIVVPMLDFEVQDGHIAPLVYGSQGDWDSSLKIILDWSPFSSMEELLQQFEDMDSHGTKVVIYNLWMNDDGLLELDFDDDDEDILLRDQGQNSGASTKIQKEIIQQHISHRLRFSLRAYSSILYLKKFENFQIILRGKPVEQINIADELKFKKVVTYKPQVSHDSQVVSVKVDIGFAKEAPVLGIFGINVYHKNRLIMPFWKVLQEASSRGRSVIGVLEANFIEPAHDKQDFERTPLFIRLETKLKQIIVDYWKEKCHLIGYQPIDPKLRSQYKAALQDSGGPRAKIRHEASTAQKAGGHLSNLLPQTYDDVEAFRLTANRAGSALHSSGQAQEDSMDSAGLEEDLVDIGSLGVLDPNCNEKLSEENLVLFTRREDLRQRDTQLKQTIGELEHELEETRRKCSQLAAELQLRRSQQQHYM

SEQ ID NO: 13117 - protein, 423 aa, Triticum aestivum
  misc_feature (1)..(423): Ceres Seq. ID no. 15170653
MKDDIVVPMLDFEVQDGHIAPLVYGSQGDWDSSLKIILDWSPFSSMEELLQQFEDMDSHGTKVVIYNLWMNDDGLLELDFDDDDEDILLRDQGQNSGASTKIQKEIIQQHISHRLRFSLRAYSSILYLKKFENFQIILRGKPVEQINIADELKFKKVVTYKPQVSHDSQVVSVKVDIGFAKEAPVLGIFGINVYHKNRLIMPFWKVLQEASSRGRSVIGVLEANFIEPAHDKQDFERTPLFIRLETKLKQIIVDYWKEKCHLIGYQPIDPKLRSQYKAALQDSGGPRAKIRHEASTAQKAGGHLSNLLPQTYDDVEAFRLTANRAGSALHSSGQAQEDSMDSAGLEEDLVDIGSLGVLDPNCNEKLSEENLVLFTRREDLRQRDTQLKQTIGELEHELEETRRKCSQLAAELQLRRSQQQHYM

SEQ ID NO: 13118 - protein, 415 aa, Triticum aestivum
  misc_feature (1)..(415): Ceres Seq. ID no. 15170654
MLDFEVQDGHIAPLVYGSQGDWDSSLKIILDWSPFSSMEELLQQFEDMDSHGTKVVIYNLWMNDDGLLELDFDDDDEDILLRDQGQNSGASTKIQKEIIQQHISHRLRFSLRAYSSILYLKKFENFQIILRGKPVEQINIADELKFKKVVTYKPQVSHDSQVVSVKVDIGFAKEAPVLGIFGINVYHKNRLIMPFWKVLQEASSRGRSVIGVLEANFIEPAHDKQDFERTPLFIRLETKLKQIIVDYWKEKCHLIGYQPIDPKLRSQYKAALQDSGGPRAKIRHEASTAQKAGGHLSNLLPQTYDDVEAFRLTANRAGSALHSSGQAQEDSMDSAGLEEDLVDIGSLGVLDPNCNEKLSEENLVLFTRREDLRQRDTQLKQTIGELEHELEETRRKCSQLAAELQLRRSQQQHYM

SEQ ID NO: 13119 - DNA, 1902 bp, Triticum aestivum
  misc_feature (1)..(1902): Ceres Seq. ID no. 15170655
aagtgttgtgccaacggatgctggttttacattttataaacttgtcatggtattaagctgttgccccatggctgacgtatatctatgtttatatgatttactttgggccttatttgtatggtccagcagccgggcccatacacgtagtatttgaactaaattccacgaggatgggctgggatccgtgtccaccctagtctgtccaaattaagccttattgtgcaatgtctatttttaagtgatgtttaaggttgttgcttttcgtatgaaagtttttttttttaacatgtgacacacttgcttcttgagccttgtttgctgcatacctaaatgctaaaaccactcttgcaggttacagacagaaagtaaaagacattgtgcagggtgctctgtttcctgaggttggtgttgacaaaaggactggttctgctggaggaactggagggcaagttgttgttcgtgatatcgatctttattcatactgtgagtcttgcttacttccgttcagcatacaatgccatgttggatatgtgccctccggtggaagggtcgttgggttaagcaagctttcaagagtagctgatgtctttgccaagagatttcaaaaccctcagagattagctaatgaagtttgtggtgcattgcatgttagcatacaacctgctggtgttgctgttgctatgcagtgctggcacataccgttgccggagaacttcaaatgcaaaaattcgcgagctttgattagaacctcacattcatctcgttcgggagtttttgagggcgagaacagctccttttggaatgattttgtggctcttcttaagcttagaggcatagacatggagatggacagccgttctgcttctttaacttggtgccccttaaggcctcatgaggttccgctttgcaatgggcacgcaaagaagattacaaccaatggtgctagctcagcaaaatcggcatccattccatctaatatggtttctgctgtcagctcaatgctcctgtctcttggtgaggaccccctaaggaaagaacttctaggcagtcctcagcgttacgtgcaatggctgatgaggttcagagcatgcaatcttgatgtgaagctgaatggttttacacttaacagtgcaagtgtatatgagagaccaggcgaagatgctactgatcatcgagcaattggttctgagctgcatttgccattttgtgcccagtgcgagcaccacctcctgccgttctacggagtagtgcacattggttactttggcagtggagacggtgaagggatcaaccgctcacattttcaggctctggttcatttctacgggtgcaagcttcaggtccaggaaaggatgacaagacagatagctgaagcagtttattccgtctcacatcgtggagccatagttgttgtagaagcaaaccatatctgcatgatatcaaggggaatagagaaaatcaggagtagtacagcaacaattgcagttttgggtcagttttcaaccgattcttctgccaaggcatcctttctacagaacgtcttagatactgctaatcaggaagtatgagtggcttcagatcatatactgatagaatctcagcgaaaagatacaatgagtctaatccctggtcgtcatttcagcaaggcaggcactgcgacgactatatatatggtttgaagttgtcatgcagctatggcatggttgccattttaccagccattgcaggtgggagcgaccaggacctcgtcgcgtggaatgttgtgtctgaagaagattaaccagaagcaccagaaagttttggttctcccgtgttgtaccattttcgtttgaacgacatgtcaaagttatcctagcgttgtaggtgtggcggctgtgccgagcaatacagtataaatgtttt

SEQ ID NO: 13120 - protein, 295 aa, Triticum aestivum
  misc_feature (1)..(295): Ceres Seq. ID no. 15170656
MQCWHIPLPENFKCKNSRALIRTSHSSRSGVFEGENSSFWNDFVALLKLRGIDMEMDSRSASLTWCPLRPHEVPLCNGHAKKITTNGASSAKSASIPSNMVSAVSSMLLSLGEDPLRKELLGSPQRYVQWLMRFRACNLDVKLNGFTLNSASVYERPGEDATDHRAIGSELHLPFCAQCEHHLLPFYGVVHIGYFGSGDGEGINRSHFQALVHFYGCKLQVQERMTRQIAEAVYSVSHRGAIVVVEANHICMISRGIEKIRSSTATIAVLGQFSTDSSAKASFLQNVLDTANQEV

SEQ ID NO: 13121 - protein, 242 aa, Triticum aestivum
  misc_feature (1)..(242): Ceres Seq. ID no. 15170657
MEMDSRSASLTWCPLRPHEVPLCNGHAKKITTNGASSAKSASIPSNMVSAVSSMLLSLGEDPLRKELLGSPQRYVQWLMRFRACNLDVKLNGFTLNSASVYERPGEDATDHRAIGSELHLPFCAQCEHHLLPFYGVVHIGYFGSGDGEGINRSHFQALVHFYGCKLQVQERMTRQIAEAVYSVSHRGAIVVVEANHICMISRGIEKIRSSTATIAVLGQFSTDSSAKASFLQNVLDTANQEV

SEQ ID NO: 13122 - protein, 240 aa, Triticum aestivum
  misc_feature (1)..(240): Ceres Seq. ID no. 15170658
MDSRSASLTWCPLRPHEVPLCNGHAKKITTNGASSAKSASIPSNMVSAVSSMLLSLGEDPLRKELLGSPQRYVQWLMRFRACNLDVKLNGFTLNSASVYERPGEDATDHRAIGSELHLPFCAQCEHHLLPFYGVVHIGYFGSGDGEGINRSHFQALVHFYGCKLQVQERMTRQIAEAVYSVSHRGAIVVVEANHICMISRGIEKIRSSTATIAVLGQFSTDSSAKASFLQNVLDTANQEV

SEQ ID NO: 13123 - DNA, 1619 bp, Triticum aestivum
  misc_feature (1)..(1619): Ceres Seq. ID no. 15170659
aggttagggaaacgctaccaaatccctccctccgctctcttcttcctcgccgcggtgattctttcctcactccccaccccagcccgctcggcgcttgctcactactgatctcacggggagggcccggcggccaatcgccgcctccagcatcgtcgagcctcgcgcctcacgcctcctcctctcactcccgagccggcaaccgcggcagcaggagcggcgagaggagggcaaggcgaagacccgagaggacgcaatggagtacagaagagtgaaggatcaggagagttatgacgccatatctcagaaggacatagaaagccctgatgggaggtctctttctagcactgcagcaacttccccccttggcaccgtaggaggttcgaagggcaagaatagctggaagcaaaagtctattgtaacaattgcattgacattactaacaagttcccaggcaatactgattgtgtggtcaaaaagagctggaaagtatgaatatagtgtcacaacagcaaatttttcggtggaagctttaaaatgtctattatcacttctagccctgtacagaacatggaacagtcaaggtgttacagaagataataggttaagtacatcatttgatgaagttagtgtttatcctatccctgccgtactttacatggtaaagaatctattgcagtattacatcttcgcctatgtggatgcaccagcttaccagatcctgaagaacctgaatattatcagcactggtgtcttataccgtatcattttaaagaaaaaattaagtgaaattcagtgggctgcatttattctcttatgtgctggctgcactacggctcagctaaacccctcatcagaccatgttcttcaaacgccaattcaaggttggatgatggccattgtgatggctcttctaagtggttttgctggggtatacacagaagctataataaaaaaacgtccttcgagaaacatcaatgtgcagaatttctggctgtacatttttggaatgctcttcaacttagttgccatttgtgttcaggactttgatgctgtcatgaacaaaggcttttttcatggctactcatttattacacttctgatgattcttaaccatgcactcagtggcattgctgtatcaatggtgatgaagtatgctgacaatattgtcaaggtgtattcaacttcagtcgcaatgcttctgacggcaattgtatcggtcttcttgttcggcttcaacctatcccttgcattcttcctcggatctacggtcgtttcaatctcggtgtatctgcattctgtcgggaagccacagcagcagaaatgagttcctcccccatctttctttccaagattggcagcgagcgcctcgatgcggcgtcgtggaacggattatggacggcacggcagcatcgaaggggaataggcttcgttctaggtcatggcactgttgttgaggcaaggcgattcgcccggtgacatattcaggttcaccatccgtttgaactgcttctttggtggcatacctggctcacttttgcttcgtgaccagggtggatgacatacgctagtttcttatctgggtaggccggcgagaatgcgagacgctggctatcttcttc

SEQ ID NO: 13124 - protein, 356 aa, Triticum aestivum
  misc_feature (1)..(356): Ceres Seq. ID no. 15170660
MEYRRVKDQESYDAISQKDIESPDGRSLSSTAATSPLGTVGGSKGKNSWKQKSIVTIALTLLTSSQAILIVWSKRAGKYEYSVTTANFSVEALKCLLSLLALYRTWNSQGVTEDNRLSTSFDEVSVYPIPAVLYMVKNLLQYYIFAYVDAPAYQILKNLNIISTGVLYRIILKKKLSEIQWAAFILLCAGCTTAQLNPSSDHVLQTPIQGWMMAIVMALLSGFAGVYTEAIIKKRPSRNINVQNFWLYIFGMLFNLVAICVQDFDAVMNKGFFHGYSFITLLMILNHALSGIAVSMVMKYADNIVKVYSTSVAMLLTAIVSVFLFGFNLSLAFFLGSTVVSISVYLHSVGKPQQQK

SEQ ID NO: 13125 - protein, 222 aa, Triticum aestivum
  misc_feature (1)..(222): Ceres Seq. ID no. 15170661
MVKNLLQYYIFAYVDAPAYQILKNLNIISTGVLYRIILKKKLSEIQWAAFILLCAGCTTAQLNPSSDHVLQTPIQGWMMAIVMALLSGFAGVYTEAIIKKRPSRNINVQNFWLYIFGMLFNLVAICVQDFDAVMNKGFFHGYSFITLLMILNHALSGIAVSMVMKYADNIVKVYSTSVAMLLTAIVSVFLFGFNLSLAFFLGSTVVSISVYLHSVGKPQQQK

SEQ ID NO: 13126 - DNA, 1778 bp, Triticum aestivum
  misc_feature (1)..(1778): Ceres Seq. ID no. 15170666
aactctcgtctcgttctagtattcttgctcccacacggcgacgtcgccatcgacatcgctgccgctctctcctcagcagcgctcctctaccaccacctcctctaggcaggggttagcggccgccccctccgcgtgcgccgtcccaaaccctagcatatccccctccccgactcctctgcgccggagcttccctccgaccgcgcagatcgccggcgatggggtccaaggaccaggacctggccgcgtcgtcgggcggtggcggaggcttcttctcctcgatcgccgcgggcgtgcgcagctggggcaccgccgtgcacaaatcggtcaacgggttggttggctatgaagggcttgaagttatcaacccagatggaggcacagacgatgcggaagcagaggctatgaaggggcgatggaaacaggaggatcgcgacagttactggaagatgatgaacaagtacataggatcagatgtaacgtcacttgttacacttccagtcatcatctttgagccgatgtcaatgcttcagaaaatggcagagttgatggaatattgtgacctgttagacaaagcagatgaatgtgaggatccacacatgcggatggtatatgcttctacatgggctttgtcagcctacctagcctaccaccgtacgtggaagcctttcaatcccatccttggagagacatatgagatggttaaccaccagggtattacatttattgctgagcaggtaagccatcatcctccgatgggtgcagctcactgtgagaatgatcattttacttacgacatcacatcaaagttgaagacaaagttcttgggaaactcagtggaagtgtatccagttggaaggactagagtgacacttaaaaaatccggtgtcgtgttggaactggtaccaccactgacgaaggtcaacaacttgatatttgggcgcacatgggttgactcttttggagagatggtcttgacaaatctgacaactggagacaaagctgtgctgtatttccagccatgcggctggtttggggctgggcgattcgaggtggatgggtatgtatatactgcagctgaagaaccgaaaataatgatgacaggaaaatggaacaagtccatgagttaccagccttgtgatcaagaaggtgatcctcttccagggacggagctaaaagaggtctggaaagctgctcctgctccaccgaatgacaagtaccagtatacatactttgcgcacaaaataaatagctttgatacagcacctaagaagctcttgccttcagactcccgattaaggcccgacagatatgcccttgagaagggcgacatgtctaaatctggggcacacaagagcaggcttgaagaacaacaaagagctgagaagaaaattcgggacaccaagggggagcaatttactccaaaatggttcaagatgacggaagacatctcccctaccccgtggggcgacctggaggtgtatgaatacaatggcagatacgccgagcaccgggctgcgatagacagctctagcgtcgctgccaaggagaaggacgtcagctccatcgagttcaacccgtggcagtatggcgacttgccttcccaatgatttcaaagggtctgaaaccacccatatattattttctcatcgaaaacgctttcaggccttgtgctgatgcataccggcggtttccgtgccttgtagtattacatgactttccaccttttctcttcgtgctgtgatacagttcaggatgtgattgtgtatttgatgtagtcc

SEQ ID NO: 13127 - protein, 463 aa, Triticum aestivum
  misc_feature (1)..(463): Ceres Seq. ID no. 15170667
MGSKDQDLAASSGGGGGFFSSIAAGVRSWGTAVHKSVNGLVGYEGLEVINPDGGTDDAEAEAMKGRWKQEDRDSYWKMMNKYIGSDVTSLVTLPVIIFEPMSMLQKMAELMEYCDLLDKADECEDPHMRMVYASTWALSAYLAYHRTWKPFNPILGETYEMVNHQGITFIAEQVSHHPPMGAAHCENDHFTYDITSKLKTKFLGNSVEVYPVGRTRVTLKKSGVVLELVPPLTKVNNLIFGRTWVDSFGEMVLTNLTTGDKAVLYFQPCGWFGAGRFEVDGYVYTAAEEPKIMMTGKWNKSMSYQPCDQEGDPLPGTELKEVWKAAPAPPNDKYQYTYFAHKINSFDTAPKKLLPSDSRLRPDRYALEKGDMSKSGAHKSRLEEQQRAEKKIRDTKGEQFTPKWFKMTEDISPTPWGDLEVYEYNGRYAEHRAAIDSSSVAAKEKDVSSIEFNPWQYGDLPSQ

SEQ ID NO: 13128 - protein, 401 aa, Triticum aestivum
  misc_feature (1)..(401): Ceres Seq. ID no. 15170668
MKGRWKQEDRDSYWKMMNKYIGSDVTSLVTLPVIIFEPMSMLQKMAELMEYCDLLDKADECEDPHMRMVYASTWALSAYLAYHRTWKPFNPILGETYEMVNHQGITFIAEQVSHHPPMGAAHCENDHFTYDITSKLKTKFLGNSVEVYPVGRTRVTLKKSGVVLELVPPLTKVNNLIFGRTWVDSFGEMVLTNLTTGDKAVLYFQPCGWFGAGRFEVDGYVYTAAEEPKIMMTGKWNKSMSYQPCDQEGDPLPGTELKEVWKAAPAPPNDKYQYTYFAHKINSFDTAPKKLLPSDSRLRPDRYALEKGDMSKSGAHKSRLEEQQRAEKKIRDTKGEQFTPKWFKMTEDISPTPWGDLEVYEYNGRYAEHRAAIDSSSVAAKEKDVSSIEFNPWQYGDLPSQ

SEQ ID NO: 13129 - protein, 386 aa, Triticum aestivum
  misc_feature (1)..(386): Ceres Seq. ID no. 15170669
MMNKYIGSDVTSLVTLPVIIFEPMSMLQKMAELMEYCDLLDKADECEDPHMRMVYASTWALSAYLAYHRTWKPFNPILGETYEMVNHQGITFIAEQVSHHPPMGAAHCENDHFTYDITSKLKTKFLGNSVEVYPVGRTRVTLKKSGVVLELVPPLTKVNNLIFGRTWVDSFGEMVLTNLTTGDKAVLYFQPCGWFGAGRFEVDGYVYTAAEEPKIMMTGKWNKSMSYQPCDQEGDPLPGTELKEVWKAAPAPPNDKYQYTYFAHKINSFDTAPKKLLPSDSRLRPDRYALEKGDMSKSGAHKSRLEEQQRAEKKIRDTKGEQFTPKWFKMTEDISPTPWGDLEVYEYNGRYAEHRAAIDSSSVAAKEKDVSSIEFNPWQYGDLPSQ

SEQ ID NO: 13130 - DNA, 1489 bp, Triticum aestivum
  misc_feature (1)..(1489): Ceres Seq. ID no. 15170690
cgcagaaaggcagaagctccttcctcccccaaaaaaagcgagacgacgggacgagacagcgagggcgagacagacagacaggaggccgaggccgaggccgaggcgcgacccacccaagcaagccctaggcgacgagacgcgacggcgacgacggcggcggcgaaggcgtatcccgcgtccgcgtgcccggattcggggctcatccggtcggctcggccatgtccaccaagagggttctttgcaagttcttcatgcatggtgcttgcttgaaaggagagtattgtgagttctcccacgactggagtgaccaagcaaataatgtttgcacgttttaccagagaggctcatgctcttatggtaaccgttgcagatatgaccatgtcaaggtttctcgtaacaacccagtgcctccactaccatcatcaagtaccgcaacacgtaattccccacttcgcccgccaccatcatcaagtactgcgacacatgttgcatctacatctccacaacttttaagttctggacgtcctcttcacttgggacaccaaacaaattcaagcaaccaacggcaacagatatctatggataagctggcagtttctgaaagtaagcctgcatggaggaatgaggtccaacttaacagtgtatcagaggatgggattggctggtcatccattcaaactgcgcaaaaccaaacttccatgaaacttgctgatatgccaatttgttcttttgctgctggtggtaactgcccgtatggggaagagtgtcctcacatgcatggggatttgtgtgcgttctgtgggaaaatgtgcttgcatccttatcgtcctgatgagaggcaggagcatatcaagctatgtgaaaagaaccacaagcgtcttgaggctttgaaacgtagccaagaaatagaatgcagtgtctgcttggaccgcgtgctctcaaagtctactgctgcagaaaggaaatttggactattatctgaatgtgatcatcccttctgtatttcatgcataagaaattggcgtggcaactctcctacatctggtatggatgtgaactcagcactgagagcttgcccaatatgccgcaaactttcgtactatgtcattccaagtgttctttggtacttctcgaaagaggaaaagttggagatcactgaaaactacaaagcaaagctcaagtcaatagattgcaagtacttcgatttcggaacgggcacttgccccttcgggacaagctgtttctacaagcatgcttacagagatggccgcttggaagaagtcgtattgcgacatcttgattgtgatgatggaagtacacttattgctaagaacattaggttgtcagacttcctcggccggttgcatctttagggacctgcttcatatatatcgaattattccgaagacatcagtttaaatcgaggcatcttggaaaactgctgctttatctccaatttttttggtggttgctttgtcgccaaacatac

SEQ ID NO: 13131 - protein, 384 aa, Triticum aestivum
  misc_feature (1)..(384): Ceres Seq. ID no. 15170691
MSTKRVLCKFFMHGACLKGEYCEFSHDWSDQANNVCTFYQRGSCSYGNRCRYDHVKVSRNNPVPPLPSSSTATRNSPLRPPPSSSTATHVASTSPQLLSSGRPLHLGHQTNSSNQRQQISMDKLAVSESKPAWRNEVQLNSVSEDGIGWSSIQTAQNQTSMKLADMPICSFAAGGNCPYGEECPHMHGDLCAFCGKMCLHPYRPDERQEHIKLCEKNHKRLEALKRSQEIECSVCLDRVLSKSTAAERKFGLLSECDHPFCISCIRNWRGNSPTSGMDVNSALRACPICRKLSYYVIPSVLWYFSKEEKLEITENYKAKLKSIDCKYFDFGTGTCPFGTSCFYKHAYRDGRLEEVVLRHLDCDDGSTLIAKNIRLSDFLGRLHL

SEQ ID NO: 13132 - protein, 373 aa, Triticum aestivum
  misc_feature (1)..(373): Ceres Seq. ID no. 15170692
MHGACLKGEYCEFSHDWSDQANNVCTFYQRGSCSYGNRCRYDHVKVSRNNPVPPLPSSSTATRNSPLRPPPSSSTATHVASTSPQLLSSGRPLHLGHQTNSSNQRQQISMDKLAVSESKPAWRNEVQLNSVSEDGIGWSSIQTAQNQTSMKLADMPICSFAAGGNCPYGEECPHMHGDLCAFCGKMCLHPYRPDERQEHIKLCEKNHKRLEALKRSQEIECSVCLDRVLSKSTAAERKFGLLSECDHPFCISCIRNWRGNSPTSGMDVNSALRACPICRKLSYYVIPSVLWYFSKEEKLEITENYKAKLKSIDCKYFDFGTGTCPFGTSCFYKHAYRDGRLEEVVLRHLDCDDGSTLIAKNIRLSDFLGRLHL

SEQ ID NO: 13133 - protein, 264 aa, Triticum aestivum
  misc_feature (1)..(264): Ceres Seq. ID no. 15170693
MDKLAVSESKPAWRNEVQLNSVSEDGIGWSSIQTAQNQTSMKLADMPICSFAAGGNCPYGEECPHMHGDLCAFCGKMCLHPYRPDERQEHIKLCEKNHKRLEALKRSQEIECSVCLDRVLSKSTAAERKFGLLSECDHPFCISCIRNWRGNSPTSGMDVNSALRACPICRKLSYYVIPSVLWYFSKEEKLEITENYKAKLKSIDCKYFDFGTGTCPFGTSCFYKHAYRDGRLEEVVLRHLDCDDGSTLIAKNIRLSDFLGRLHL

SEQ ID NO: 13134 - DNA, 1414 bp, Triticum aestivum
  misc_feature (1)..(1414): Ceres Seq. ID no. 15170694
tccttttcctctgcccgccgctcgcccggaacctccccgtcgccgccgccgccgccgctcgcccgagacctccccgtcgtcgccgatctcccggagccaccgcacctccgctcgtcgcgccgctcgtatcctcctcctccgcctcctcgccggagacaacatgtcgacgcttgccgcggcgagggccgacaacttctactacccgcccgaatggagcccgaagaagggtgggctgaacaagttccacggccaacatgccctcagggagcgggcgaggaagctggatcagggcatcctgattataagattcgagatgcctttcaatgtctggtgtggtggatgcagctccatgatagggaagggagtaaggtttaatgctgaaaagaaacaagttggaaattattactctaccaagatatggagcttcagtatgaaatcaccatgttgccagcatgagatagtcatacatacggacccgaagaatactgagtatgttataatcagtggggctcagcggaagactgaagattttgatgttgaagatgcagagacgctcctgctccctgcggatgaagaaagagacaagcttgcggatcccatgtataagcttgaacaccagggagaggatattcggaagaagaaagaagaggagcctgttttagttcggcttcaacgcctctctgatagccgtcattctgatgattattccctgaacagaaccctccgctaccgccttagggtcatctagtgaattcctttgtataatttttcatcagtaagttgtctaactgtcaggattcttatccacttgttgtcctattatttatgtagagccaaaagaagagagttgctgaagagaagaaatcagcgaggaggatggggctcggagtacgccttctgccaccctccgcagaggatgctgccgctgcagctcgtgtgaggttcgcctcgaatttcgagaagaacaggaaggacaagagagcagcgatcaaggccgcctccatcttcccggagccatcaggctcagcttcgaaagacaagctagaccttgcgctgaagaggcggaatataaaagctagtgcagcgtcggcgctgatggcgggcagggcaaagccgtcgtcgtggtcgcggcagagcaccggttctggaagtgcaaggactgctgtgccgatattggcaaggcgcaagtagagccacaccccgagttgtgcttgcgcaaccaagcaagaattttgtgatcttgtccggtctgttgctcagtacgccccatgtatacgtgtatcttgtgtagtaccttcattgatctagcagtgtactgtaaccttggtgttatgtcctgctgtcgtggctggggctgtgagcctgtgacatatcatgagaaactgatttgccttgtaactgatgattctggacc

SEQ ID NO: 13135 - protein, 248 aa, Triticum aestivum
  misc_feature (1)..(248): Ceres Seq. ID no. 15170695
PFPLPAARPEPPRRRRRRRSPETSPSSPISRSHRTSARRAARILLLRLLAGDNMSTLAAARADNFYYPPEWSPKKGGLNKFHGQHALRERARKLDQGILIIRFEMPFNVWCGGCSSMIGKGVRFNAEKKQVGNYYSTKIWSFSMKSPCCQHEIVIHTDPKNTEYVIISGAQRKTEDFDVEDAETLLLPADEERDKLADPMYKLEHQGEDIRKKKEEEPVLVRLQRLSDSRHSDDYSLNRTLRYRLRVI

SEQ ID NO: 13136 - protein, 195 aa, Triticum aestivum
  misc_feature (1)..(195): Ceres Seq. ID no. 15170696
MSTLAAARADNFYYPPEWSPKKGGLNKFHGQHALRERARKLDQGILIIRFEMPFNVWCGGCSSMIGKGVRFNAEKKQVGNYYSTKIWSFSMKSPCCQHEIVIHTDPKNTEYVIISGAQRKTEDFDVEDAETLLLPADEERDKLADPMYKLEHQGEDIRKKKEEEPVLVRLQRLSDSRHSDDYSLNRTLRYRLRVI

SEQ ID NO: 13137 - protein, 144 aa, Triticum aestivum
  misc_feature (1)..(144): Ceres Seq. ID no. 15170697
MPFNVWCGGCSSMIGKGVRFNAEKKQVGNYYSTKIWSFSMKSPCCQHEIVIHTDPKNTEYVIISGAQRKTEDFDVEDAETLLLPADEERDKLADPMYKLEHQGEDIRKKKEEEPVLVRLQRLSDSRHSDDYSLNRTLRYRLRVI

SEQ ID NO: 13138 - DNA, 780 bp, Triticum aestivum
  misc_feature (1)..(780): Ceres Seq. ID no. 15172618
aaatcacccacagctaagcttccgccacccaactcttccgtccatccaaaagacgtacggcacgtgcaagttcgaagaaggaaagcatcgaatcaatggcgggcgtgagccggagcatggtggcgccgctgctggtgctgaacctggtgatgtacatcgtcgtcatcggcctcgccagctggaacctcaaccacttcatcaacggcaccaccaactacgccggcgtggccggcaacggcgccaccttctacttcctcctcttcgccatcctcgccggcgtggtgggcgccgcctccaagctcgccggcgtgcaccacgtcaggacctggcgcggggacagcctcgccaccagcgcctcctccgcgctcgtcgcctgggccatcacggcgctcgccttcgggctcgcgtgcaaggagatccacgtcggcggtcaccgcggctggcggctccgggttctcgaggcgttcatcatcatactcgccttcacccagctgctctacgtgatggcgctccacgccggtctcttcggcaaccagttcggcgacgggtacggcgcggagcaccagtacggcgaccaccatcacaagggcatgggcaccggcgcccccgccgccagggtctgaccgtctttgagcttttactttgcttaatttcttgatgggccaatgaacaagatgtatgtatgtatcaatgtatgtgtgcgtgtgtttgtgttgggcgagtgtgatgtaacatgtatgcatacatagtgtcggtgcatgtgctgccgttgttttttac

SEQ ID NO: 13139 - protein, 218 aa, Triticum aestivum
  misc_feature (1)..(218): Ceres Seq. ID no. 15172619
NHPQLSFRHPTLPSIQKTYGTCKFEEGKHRINGGREPEHGGAAAGAEPGDVHRRHRPRQLEPQPLHQRHHQLRRRGRQRRHLLLPPLRHPRRRGGRRLQARRRAPRQDLARGQPRHQRLLRARRLGHHGARLRARVQGDPRRRSPRLAAPGSRGVHHHTRLHPAALRDGAPRRSLRQPVRRRVRRGAPVRRPPSQGHGHRRPRRQGLTVFELLLCLIS

SEQ ID NO: 13140 - protein, 175 aa, Triticum aestivum
  misc_feature (1)..(175): Ceres Seq. ID no. 15172620
MAGVSRSMVAPLLVLNLVMYIVVIGLASWNLNHFINGTTNYAGVAGNGATFYFLLFAILAGVVGAASKLAGVHHVRTWRGDSLATSASSALVAWAITALAFGLACKEIHVGGHRGWRLRVLEAFIIILAFTQLLYVMALHAGLFGNQFGDGYGAEHQYGDHHHKGMGTGAPAARV

SEQ ID NO: 13141 - protein, 168 aa, Triticum aestivum
  misc_feature (1)..(168): Ceres Seq. ID no. 15172621
MVAPLLVLNLVMYIVVIGLASWNLNHFINGTTNYAGVAGNGATFYFLLFAILAGVVGAASKLAGVHHVRTWRGDSLATSASSALVAWAITALAFGLACKEIHVGGHRGWRLRVLEAFIIILAFTQLLYVMALHAGLFGNQFGDGYGAEHQYGDHHHKGMGTGAPAARV

SEQ ID NO: 13142 - DNA, 982 bp, Triticum aestivum
  misc_feature (1)..(982): Ceres Seq. ID no. 15172622
acgggcaatccacgccgcggattgggaaacggtgaccgacgaccccatccggccatcttattagtagcacctacggcacaaggcaacaacgcacgcctctcccagcgcccaaacactccgctcggctgctagctgcgcgtccatacaaacgcagttacgcgcacaagtacagaaccgccccctcctcttccgggaggccggccggccggccagcccgctcctcccctcccatccacctctgtccttagcatggtgagggacaccggcggcgccctgcagctgctggcggtgcttctcctcgtcctggcgtccgagctcgccaccttcagctgcggccacaggatccccagggcggacgtcgccgcctggaagcgcggggcgacgccgacgggacgcacggcgtccaccacgacgacgacgacggccactcgtgccggcggcgcggcggcggcggcgctcggcgactccaagaggctggtgccgcaggggccgaacccgctgcacaactagcgccgcgcaggttcttcctcgctcccatttttctcgcgcggaagaacgccggctatctagcgagcgactgagtagtgtgtggacgatacaatcacatatgcagtgatgtaactgtaattagctagcccattagatcgagctccggagattgcatccaaagaaatagtgtaaattacatgtacgatgtatcttcttcttcctccatgattttcactacttctttggagcaaagatctgaaacagcaggacaattattgattgactgattgattgattgggagcttgctgcagccctgtccctgcgagagcttggagcggtcaatggctgtcctcagtgtttaatttcggagggcgtttagggtcatttcgcgttggccaaggcgtggcaagcggacaagggcgccacgacaagcgggtgctttgtcacgccatggctaaaatatgattgatcctcactagcctttttgtttgc

SEQ ID NO: 13143 - protein, 86 aa, Triticum aestivum
  misc_feature (1)..(86): Ceres Seq. ID no. 15172623
MVRDTGGALQLLAVLLLVLASELATFSCGHRIPRADVAAWKRGATPTGRTASTTTTTTATRAGGAAAAALGDSKRLVPQGPNPLHN

SEQ ID NO: 13144 - protein, 43 aa, Triticum aestivum
  misc_feature (1)..(43): Ceres Seq. ID no. 15172624
TGNPRRGLGNGDRRPHPAILLVAPTAQGNNARLSQRPNTPLGC

SEQ ID NO: 13145 - DNA, 719 bp, Triticum aestivum
  misc_feature (1)..(719): Ceres Seq. ID no. 15172660
tagaacatcctaaccgaaaataccgcagccgccacacacgacgaacaccggaacgaagcagatcggcggcgcgtcactccaatcaccggttcataaaatggcgacggtttcggattctctggtctgggagctcgtcaggaagaacaactgcttcctgatcaagcagttcggcaacagcaatgccaaggtccagttcagcaaggagcccaacaacctctacaatgtccactcctacaagtactctggcctggcaaacaagaagactgtgacagtgcagccagctgctgagaaggagatgactgtggtcctctccacaaccaagtcaaagaagcagaacaagcctgccgcgttcacccacaagactgtcatgcgcaaggagttccgcaagatggccaaggctgtcaagaaccaggtcagtgataactactataggcctgacttgaccaagcctgctcttgcaagactgagtgcagtttaccgcagcctccaggttgccaagtccggtgtcaagaagaagaacaggcagtaagcactgaggggccaatgagcttgttttgtggatccgttggtttatgtttccagctttttagatttgttctaaaagtatggaggttgaatatgatgaatggtgtgtgctgcatactggcacaagttttctcagtaggttctatatctgtacccatgactatgttgtgaagcctcttgaaatcatttccacg

SEQ ID NO: 13146 - protein, 143 aa, Triticum aestivum
  misc_feature (1)..(143): Ceres Seq. ID no. 15172661
MATVSDSLVWELVRKNNCFLIKQFGNSNAKVQFSKEPNNLYNVHSYKYSGLANKKTVTVQPAAEKEMTVVLSTTKSKKQNKPAAFTHKTVMRKEFRKMAKAVKNQVSDNYYRPDLTKPALARLSAVYRSLQVAKSGVKKKNRQ

SEQ ID NO: 13147 - protein, 77 aa, Triticum aestivum
  misc_feature (1)..(77): Ceres Seq. ID no. 15172662
MTVVLSTTKSKKQNKPAAFTHKTVMRKEFRKMAKAVKNQVSDNYYRPDLTKPALARLSAVYRSLQVAKSGVKKKNRQ

SEQ ID NO: 13148 - DNA, 454 bp, Triticum aestivum
  misc_feature (1)..(454): Ceres Seq. ID no. 15172859
gcacaggggagcaattcaagtggtggcaaatcgtgtgccgagaaacatcctggaacaggtttacaaaatcaccctgccaaagcccaaggcatatgaggaagcatctcgaccaccaaccgctgctgagttgttgatggcgtactgcacatctcgggggcatgtcagccatgctgggctgcctgatgagaccagggctgctcggcagatactgaaggattacattgatggaaagattccacactttgagcttcctcctggtgagatagatgatgaaactgatggagaggacaacagtgacctagaaggctcaagcactgcagcagctgatcaatcagacgacggtgcttctgatgaagatgatgaggaaatcaatcgagctgaacctttagcttttttgcttgtggaaaataatatcctcggctgaatcgacttgaaatcaggaagagtgaaactt

SEQ ID NO: 13149 - protein, 140 aa, Triticum aestivum
  misc_feature (1)..(140): Ceres Seq. ID no. 15172860
HRGAIQVVANRVPRNILEQVYKITLPKPKAYEEASRPPTAAELLMAYCTSRGHVSHAGLPDETRAARQILKDYIDGKIPHFELPPGEIDDETDGEDNSDLEGSSTAAADQSDDGASDEDDEEINRAEPLAFLLVENNILG

SEQ ID NO: 13150 - protein, 96 aa, Triticum aestivum
  misc_feature (1)..(96): Ceres Seq. ID no. 15172861
MAYCTSRGHVSHAGLPDETRAARQILKDYIDGKIPHFELPPGEIDDETDGEDNSDLEGSSTAAADQSDDGASDEDDEEINRAEPLAFLLVENNILG

SEQ ID NO: 13151 - DNA, 624 bp, Triticum aestivum
  misc_feature (1)..(624): Ceres Seq. ID no. 15173027
acttcccccgaaaaggacctcactccccagcccagcccacccctccccgcccgctgcacagtccaaatccccgctccggcccggcgaccgaccgaggatgcccgcctccatgcccaagctgctcttcctcctgctgctcctcctcctcgccgcggccgcccactcttcaccggtcgtcccggatgcggcgggcgaggggtccgaccaggcggcggtgcgcatggtgccgatggccccggctggggggtcggggttcagcggggtggtgctgaacgagacgcggcggcggctggggagcttccagctctgcgcgccctgcacctgctgcggcgggcccaggggcgcctgcgtcctctccccgtgctgctacgctatcaactgcaacatccccaaccgcccattcggattctgctccttcacgcccaggtcttgcgactgcctccactgcaacgtctgagctctgcttctgctctgccctgctctcgagggtgatgagggcaatgttgagggcgatagtaagtattttagagtgtgggtggggaaaaaggacatgacagcatgagagttcccccaacccgaatgcttgccgatttgttattgttttagccctatagccattttgcc

SEQ ID NO: 13152 - protein, 163 aa, Triticum aestivum
  misc_feature (1)..(163): Ceres Seq. ID no. 15173028
TSPEKDLTPQPSPPLPARCTVQIPAPARRPTEDARLHAQAALPPAAPPPRRGRPLFTGRPGCGGRGVRPGGGAHGADGPGWGVGVQRGGAERDAAAAGELPALRALHLLRRAQGRLRPLPVLLRYQLQHPQPPIRILLLHAQVLRLPPLQRLSSASALPCSRG

SEQ ID NO: 13153 - protein, 151 aa, Triticum aestivum
  misc_feature (1)..(151): Ceres Seq. ID no. 15173029
LPPKRTSLPSPAHPSPPAAQSKSPLRPGDRPRMPASMPKLLFLLLLLLLAAAAHSSPVVPDAAGEGSDQAAVRMVPMAPAGGSGFSGVVLNETRRRLGSFQLCAPCTCCGGPRGACVLSPCCYAINCNIPNRPFGFCSFTPRSCDCLHCNV

SEQ ID NO: 13154 - protein, 119 aa, Triticum aestivum
  misc_feature (1)..(119): Ceres Seq. ID no. 15173030
MPASMPKLLFLLLLLLLAAAAHSSPVVPDAAGEGSDQAAVRMVPMAPAGGSGFSGVVLNETRRRLGSFQLCAPCTCCGGPRGACVLSPCCYAINCNIPNRPFGFCSFTPRSCDCLHCNV

SEQ ID NO: 13155 - DNA, 1042 bp, Triticum aestivum
  misc_feature (1)..(1042): Ceres Seq. ID no. 15173043
atcgcacccctcctccctcgtccccatctcctcgcgccgccgccacctccttcccgccccggccccctcccgatccagtcctctccccaccaccgacctcgcggtcctcctcacccaccgccgccgacctcatccctccctccgctcaccatctctccctacccacgcagtagggttccatccctctcctccttcctccccgcttcccctcccggccccgaccttcctgccacgccgcctcaccgccacccgtcgcctcatcctctccactcccccgcacgccggtagcccgcgcctctgagacccggcgccggcgccggtggaggaggtcgcggccgcagccgtggaggagtacgaggcgcatccactgccatcgggacgagatagagcaagtcgactgggtcgtctccgccatgaacgacaaggcgacccgaaacagcgcacatgtcagctctccgtctgagcaagggagccgtccagtcgccgccgccagggtgccgctgctggtcagtatgcgtgccaccggaacaggtcggggagcttccggttggtgtgtgtgcctccttccttcagcacaagcagcaggcccagggcattagcaccatcccaacgaaattgatggaccaagtaaccagctgccaagttcttcaaggttcgtgaagagagctgatctggttttgtgaaggaagggcgagaaagattatgtggggatcagattgtccatggcgacttaggaggagcagcaccatctcaggttgctccgatctggttgtgtgaaggaacatgcaaggtctgctactcctgttgtgctcccttgaacgatctggtgaaggacaattttccattggtcgtccccccatgctatctctctctgctgcatagttaggttcggtttttttgttctctttctagtttaagcgtaagcagattccagtaggtctctatgtatgtggatcatgagttagaacatctaatctaattagggactgcagacttgctatgtcatgatgaaacttgcttgcattcagttcaaaaaatttcc

SEQ ID NO: 13156 - protein, 99 aa, Triticum aestivum
  misc_feature (1)..(99): Ceres Seq. ID no. 15173044
SHPSSLVPISSRRRHLLPAPAPSRSSPLPTTDLAVLLTHRRRPHPSLRSPSLPTHAVGFHPSPPSSPLPLPAPTFLPRRLTATRRLILSTPPHAGSPRL

SEQ ID NO: 13157 - protein, 95 aa, Triticum aestivum
  misc_feature (1)..(95): Ceres Seq. ID no. 15173045
IAPLLPRPHLLAPPPPPSRPGPLPIQSSPHHRPRGPPHPPPPTSSLPPLTISPYPRSRVPSLSSFLPASPPGPDLPATPPHRHPSPHPLHSPARR

SEQ ID NO: 13158 - protein, 71 aa, Triticum aestivum
  misc_feature (1)..(71): Ceres Seq. ID no. 15173046
MSALRLSKGAVQSPPPGCRCWSVCVPPEQVGELPVGVCASFLQHKQQAQGISTIPTKLMDQVTSCQVLQGS

SEQ ID NO: 13159 - DNA, 554 bp, Triticum aestivum
  misc_feature (1)..(554): Ceres Seq. ID no. 15173055
aactcaaccctcccacccacacaactacacaagtcccaaaccatctgcaagcatccttcatcctagctaggctcctaacttacttgtaccttacttaggcaaggaagcaacggcagcagcaagaatagttgaggagaaggagaggagctgataagctatggcgtcgatgatgggaggagacttcgtggaggcctacgtgctcaggaacgcctacaaggagaagctgaggcgcatggaccaagcggaagccgcggcggcgctcggcggcgccaagagcagcacggagaaggtggccgccggggccgccggagagaagaaggctgctgctggtggcggtgcgagcaccagggggcgattctttggcctcatgaagaagaaggtgcaccccaaacccaaggcggcgcccacttccccttgatgaatactgtatttgcgatgccacgaaattgtaggccgcagcttccttctagctaggagcgtgtgtgtgtgtaagtttgttctttcgatcgtttagcttctcttggatgagtgtgtaaagcaaaaccttttgttat

SEQ ID NO: 13160 - protein, 86 aa, Triticum aestivum
  misc_feature (1)..(86): Ceres Seq. ID no. 15173056
MASMMGGDFVEAYVLRNAYKEKLRRMDQAEAAAALGGAKSSTEKVAAGAAGEKKAAAGGGASTRGRFFGLMKKKVHPKPKAAPTSP

SEQ ID NO: 13161 - protein, 83 aa, Triticum aestivum
  misc_feature (1)..(83): Ceres Seq. ID no. 15173057
MMGGDFVEAYVLRNAYKEKLRRMDQAEAAAALGGAKSSTEKVAAGAAGEKKAAAGGGASTRGRFFGLMKKKVHPKPKAAPTSP

SEQ ID NO: 13162 - protein, 82 aa, Triticum aestivum
  misc_feature (1)..(82): Ceres Seq. ID no. 15173058
MGGDFVEAYVLRNAYKEKLRRMDQAEAAAALGGAKSSTEKVAAGAAGEKKAAAGGGASTRGRFFGLMKKKVHPKPKAAPTSP

SEQ ID NO: 13163 - DNA, 456 bp, Triticum aestivum
  misc_feature (1)..(456): Ceres Seq. ID no. 15173081
agtcgagagggatgactccagagccaagaaccaggatattggtgaaagcaatacatatgaagaaggatgggcctgagactgaagatcgatccccaagtatgactgggaaaaatctaaaattggatcgtcgatcaggacttttccatgttcgtaaatagtcaccggaagatcctgcttaattatcctagcagaagatgctgagcatctgggcttatggaacatcatccagtgactttcaaccttgggctaaaagaaatccacaagagaagagtcattgacaatacgatgccccaaaatttatgctgtttgaaatgtcacagcaggatatgtttaggatgtattgggcaattcaattgcaggtacttgcttagatgcttgtattctggagatgtatgtgtaatacttacatatgtttgtttcttcttgcattatatatgtcgttcgtagttgtttctg

SEQ ID NO: 13164 - protein, 77 aa, Triticum aestivum
  misc_feature (1)..(77): Ceres Seq. ID no. 15173082
MEHHPVTFNLGLKEIHKRRVIDNTMPQNLCCLKCHSRICLGCIGQFNCRYLLRCLYSGDVCVILTYVCFFLHYICRS

SEQ ID NO: 13165 - protein, 53 aa, Triticum aestivum
  misc_feature (1)..(53): Ceres Seq. ID no. 15173083
MPQNLCCLKCHSRICLGCIGQFNCRYLLRCLYSGDVCVILTYVCFFLHYICRS

SEQ ID NO: 13166 - protein, 51 aa, Triticum aestivum
  misc_feature (1)..(51): Ceres Seq. ID no. 15173084
SRGMTPEPRTRILVKAIHMKKDGPETEDRSPSMTGKNLKLDRRSGLFHVRK

SEQ ID NO: 13167 - DNA, 846 bp, Triticum aestivum
  misc_feature (1)..(846): Ceres Seq. ID no. 15173102
taccccggcgagtaaggaggcacggccatcgccaacgtgctcttcggaagatacaatccagggggaaggctgccgctaacgtggtacaagaacgagtacatcagcaagatcccgatgacgtccatggcgctgcggccggtcgccggcaaggggtaccctggcaggacctacaagttctacggcgggccggaagtgctctacccgttcggccacggtctcagctacagcaacttcagctacgcgtccgacgccaccgccgcatcggtcacagtcccggttggcgcatgggagtcctgcaagcagctcacccgcaagccggggacggccccgctggcctgcccggccgtcaacgttgccgggcacgggtgccaagaggaggtaggcttcagtctgaccgtggccaaccgtggcagcagggacggcacccacgtcgtgatggtctacacggtgccgccggccgaggtggacgacgcaccgctgaagcagctggtggcgttccggagggtgttcgtgcccgctggagccgccgtccaagtgccgttcacgctcaatgtgtgcaaggcgttcgccatcgtcgaggagacggcgtacaccgtcgtgccgtcgggcgtcagcacggtcctggtcggagacgaagcgctgtcattctctttccccgtgaagatcgagctggctgtatagattctttacatgtccattgaattttttagtttctttacataccaaagatgaaagattgaaggccaaaccgttagatactgtgggcagcacgtataatatcttctccttttctttgcgagaagtgtaatatcttctcctctgctactataaacgcacagtttacac

SEQ ID NO: 13168 - protein, 232 aa, Triticum aestivum
  misc_feature (1)..(232): Ceres Seq. ID no. 15173103
PRRVRRHGHRQRALRKIQSRGKAAANVVQERVHQQDPDDVHGAAAGRRQGVPWQDLQVLRRAGSALPVRPRSQLQQLQLRVRRHRRIGHSPGWRMGVLQAAHPQAGDGPAGLPGRQRCRARVPRGGRLQSDRGQPWQQGRHPRRDGLHGAAGRGGRRTAEAAGGVPEGVRARWSRRPSAVHAQCVQGVRHRRGDGVHRRAVGRQHGPGRRRSAVILFPREDRAGCIDSLHVH

SEQ ID NO: 13169 - protein, 188 aa, Triticum aestivum
  misc_feature (1)..(188): Ceres Seq. ID no. 15173104
MTSMALRPVAGKGYPGRTYKFYGGPEVLYPFGHGLSYSNFSYASDATAASVTVPVGAWESCKQLTRKPGTAPLACPAVNVAGHGCQEEVGFSLTVANRGSRDGTHVVMVYTVPPAEVDDAPLKQLVAFRRVFVPAGAAVQVPFTLNVCKAFAIVEETAYTVVPSGVSTVLVGDEALSFSFPVKIELAV

SEQ ID NO: 13170 - protein, 185 aa, Triticum aestivum
  misc_feature (1)..(185): Ceres Seq. ID no. 15173105
MALRPVAGKGYPGRTYKFYGGPEVLYPFGHGLSYSNFSYASDATAASVTVPVGAWESCKQLTRKPGTAPLACPAVNVAGHGCQEEVGFSLTVANRGSRDGTHVVMVYTVPPAEVDDAPLKQLVAFRRVFVPAGAAVQVPFTLNVCKAFAIVEETAYTVVPSGVSTVLVGDEALSFSFPVKIELAV

SEQ ID NO: 13171 - DNA, 724 bp, Triticum aestivum
  misc_feature (1)..(724): Ceres Seq. ID no. 15173110
accaaactcacccaccttcgcccatttctgaagctcaagcgcgagcctgccacaaggagcatctctccccagccatatagcgataccatggcggcatcggtgacctgcgccttcttcttcgacgccgagctgctcgccgagcccggcatgccggcgatggacgcgtgcgcgctctgcgccaagccgctggcgcgcgacagcgacgtcttcatgtacagaggggacacgcccttctgcagcgaggagtgccggcacgagcagatgcacctcgacgccgtgggcgccaggcaggccgcccggcggctgcagaggttcacggcggaggcggagtgccaccgtgggcagaggcactccaggaaggtgtccatcgcgagctagccggccggccgcggaaagtattgtttcgatccacaagatctgaattctgaagaaaacagcagctgtattttgaatgtctctgtccctccggccggtgctcttgctgaaccagaggaggcatcagatgcaccttggcgctgcctacggaaggccgggcagggcggcatcaggcggcacgaagcatatgtgcctgtagatttccctcacgtttccatggcaagctaattaagctgcccggatgggatgaaattgtacttgttttcggtcggtgtgtgctgtgcagatgaattatttgattagaaatgaaaacaaaaaagtaaaccccatggatttgaagggagcaccc

SEQ ID NO: 13172 - protein, 125 aa, Triticum aestivum
  misc_feature (1)..(125): Ceres Seq. ID no. 15173111
TKLTHLRPFLKLKREPATRSISPQPYSDTMAASVTCAFFFDAELLAEPGMPAMDACALCAKPLARDSDVFMYRGDTPFCSEECRHEQMHLDAVGARQAARRLQRFTAEAECHRGQRHSRKVSIAS

SEQ ID NO: 13173 - protein, 96 aa, Triticum aestivum
  misc_feature (1)..(96): Ceres Seq. ID no. 15173112
MAASVTCAFFFDAELLAEPGMPAMDACALCAKPLARDSDVFMYRGDTPFCSEECRHEQMHLDAVGARQAARRLQRFTAEAECHRGQRHSRKVSIAS

SEQ ID NO: 13174 - protein, 76 aa, Triticum aestivum
  misc_feature (1)..(76): Ceres Seq. ID no. 15173113
MPAMDACALCAKPLARDSDVFMYRGDTPFCSEECRHEQMHLDAVGARQAARRLQRFTAEAECHRGQRHSRKVSIAS

SEQ ID NO: 13175 - DNA, 972 bp, Triticum aestivum
  misc_feature (1)..(972): Ceres Seq. ID no. 15173121
atcaatgattagtgcctgtattaacgctggagatccgaaacaagcagagaaattggtaaggaatatggatgagctttccatgaaacccaacagggaaatatacatggatgtgatgcgggcatatgctgagcgtaacttagtagatggagctcaatcgataaaaacaaaaatgtcattcgctggaatcgagcccccattggagtgcttcacattgcttatagaagcatatggacgggctggcaaccctgattatgcatatgaagcgtttgaacagatgaggaagaatgggcatgaaccagatgaccgttgcctggctggtatgataactgcactcatgaagaagaaccagctggaccaggctttgaagttgctgctgagtttagagaaggagggggttaaacctggagttaagacaaatctggtcctgctggattggctgtccatgttgcagttggtgcaagaggctgaacaacttgtacaaaagataagaaaggcgggagaagagcccctagagatccatgtttaccttgctgatatgtatgcgaaatcacgccaggaagagaaagcccgcaaatccctcaagatcttggaagagaagaagagactgctgaaggctgatcagtttgagaggattataagaggccttctggtagggggtttctcggaggatgcaagcaaatatttcaaaatgatgagatctcgtggctttgttccatcagcaacagtcgaggccggggtcaggggcgtcggtcgcctggctggcaggtagctagctggtcatggcactgattctggtatgaaatctagcagtagcaccaacgacgtcacagcttattcagaggaactgatgtgataaagatccctattatcgggcgaattttagttgttatttaaggtctgtagagcataagctcagatgaagttgatgagtgcgtgaacccctggtgctagtgccatgaattttctgctctc

SEQ ID NO: 13176 - protein, 255 aa, Triticum aestivum
  misc_feature (1)..(255): Ceres Seq. ID no. 15173122
SMISACINAGDPKQAEKLVRNMDELSMKPNREIYMDVMRAYAERNLVDGAQSIKTKMSFAGIEPPLECFTLLIEAYGRAGNPDYAYEAFEQMRKNGHEPDDRCLAGMITALMKKNQLDQALKLLLSLEKEGVKPGVKTNLVLLDWLSMLQLVQEAEQLVQKIRKAGEEPLEIHVYLADMYAKSRQEEKARKSLKILEEKKRLLKADQFERIIRGLLVGGFSEDASKYFKMMRSRGFVPSATVEAGVRGVGRLAGR

SEQ ID NO: 13177 - protein, 254 aa, Triticum aestivum
  misc_feature (1)..(254): Ceres Seq. ID no. 15173123
MISACINAGDPKQAEKLVRNMDELSMKPNREIYMDVMRAYAERNLVDGAQSIKTKMSFAGIEPPLECFTLLIEAYGRAGNPDYAYEAFEQMRKNGHEPDDRCLAGMITALMKKNQLDQALKLLLSLEKEGVKPGVKTNLVLLDWLSMLQLVQEAEQLVQKIRKAGEEPLEIHVYLADMYAKSRQEEKARKSLKILEEKKRLLKADQFERIIRGLLVGGFSEDASKYFKMMRSRGFVPSATVEAGVRGVGRLAGR

SEQ ID NO: 13178 - protein, 234 aa, Triticum aestivum
  misc_feature (1)..(234): Ceres Seq. ID no. 15173124
MDELSMKPNREIYMDVMRAYAERNLVDGAQSIKTKMSFAGIEPPLECFTLLIEAYGRAGNPDYAYEAFEQMRKNGHEPDDRCLAGMITALMKKNQLDQALKLLLSLEKEGVKPGVKTNLVLLDWLSMLQLVQEAEQLVQKIRKAGEEPLEIHVYLADMYAKSRQEEKARKSLKILEEKKRLLKADQFERIIRGLLVGGFSEDASKYFKMMRSRGFVPSATVEAGVRGVGRLAGR

SEQ ID NO: 13179 - DNA, 606 bp, Triticum aestivum
  misc_feature (1)..(606): Ceres Seq. ID no. 15173252
gagccccttactcgcagaaaccctagcagatcggtcgagccctccgccgccgccccgccttcagctctctccttccttctccgatccaagatgaagttcattgctgcctatctgcttgcttacctctctggcaacgccagcccctctgcagaggacctgacatccattcttgagtctgttggttgtgaaatcgacaatgagaagatggaactcatgctgtcccaagtgaagggcaaggacatcaccgagctcttggctgctggtagggagaagtttgctgcggttccatctggtggtggtggtgtggctgtttcagctgctgcccctgctgctggaggtgctgctgcccctgcagctgagtcaaagaaagaagagaaggtcgtggagaaggaagagagtgatgatgacatgggcttcagtctgttcgactaagttgtggggcaccttgtgtctgaagtatctatccttggccaggaaactagagtcaatgatgttttagcctttatttagctgagttgtgaaacactggcaagacaatgttttgatatgtaattcagcccctggttgctggttgatttactggtgaaccatacctttgctatccat

SEQ ID NO: 13180 - protein, 143 aa, Triticum aestivum
  misc_feature (1)..(143): Ceres Seq. ID no. 15173253
EPLTRRNPSRSVEPSAAAPPSALSFLLRSKMKFIAAYLLAYLSGNASPSAEDLTSILESVGCEIDNEKMELMLSQVKGKDITELLAAGREKFAAVPSGGGGVAVSAAAPAAGGAAAPAAESKKEEKVVEKEESDDDMGFSLFD

SEQ ID NO: 13181 - protein, 113 aa, Triticum aestivum
  misc_feature (1)..(113): Ceres Seq. ID no. 15173254
MKFIAAYLLAYLSGNASPSAEDLTSILESVGCEIDNEKMELMLSQVKGKDITELLAAGREKFAAVPSGGGGVAVSAAAPAAGGAAAPAAESKKEEKVVEKEESDDDMGFSLFD

SEQ ID NO: 13182 - protein, 75 aa, Triticum aestivum
  misc_feature (1)..(75): Ceres Seq. ID no. 15173255
MELMLSQVKGKDITELLAAGREKFAAVPSGGGGVAVSAAAPAAGGAAAPAAESKKEEKVVEKEESDDDMGFSLFD

SEQ ID NO: 13183 - DNA, 818 bp, Triticum aestivum
  misc_feature (1)..(818): Ceres Seq. ID no. 15173284
actccgccacacgagtgagcagcatacgcgcgacagacgatcccgaacccagagagggggaacacggagccggccgcggagggggagcccagccaagccagccagagtgaacaaccgtcccaaccaccgacgggcgggcatgagggccaccgagatgttgaccgccgcggcgggggctgccgccgggacgacgccctccacggcctcggtggccggcctggccggggccagcgggggcgtccccgccgcgggcgccggcgggaacttccccctcggcgccgccctcctcgccttcgccttcgccaacctcgtcaacgtcctctccatctggttaaaggagaagaagtgggatgcaaggaagtttcttacatcttccggagttatttcatctctttctgcggccgtggcaagtttggctgtggcggttggccaacaagaaggcggagatagctctgtttttgcccttgcattggtttttgctgccgttgtaatgtatgatgcatcaggagttaggtttcacacaggccgccaagctgcgttgttaaatcaaatagtttctgatttatcaccggaacatccaattatctctaccttccggccgcttcgggaacctcttggacacagtccatttcaggtttttgccggagcccttgttggttgtacagtagcgtatttaatggggaattcttctgtatgagaaatactgtagttggcaatttgccttatactcagattacactacttttatacgaggaacattttttgtgcaaagtctactttgtatctctggccatataaagtgcccttctgttgaactg

SEQ ID NO: 13184 - protein, 231 aa, Triticum aestivum
  misc_feature (1)..(231): Ceres Seq. ID no. 15173285
LRHTSEQHTRDRRSRTQRGGTRSRPRRGSPAKPARVNNRPNHRRAGMRATEMLTAAAGAAAGTTPSTASVAGLAGASGGVPAAGAGGNFPLGAALLAFAFANLVNVLSIWLKEKKWDARKFLTSSGVISSLSAAVASLAVAVGQQEGGDSSVFALALVFAAVVMYDASGVRFHTGRQAALLNQIVSDLSPEHPIISTFRPLREPLGHSPFQVFAGALVGCTVAYLMGNSSV

SEQ ID NO: 13185 - protein, 185 aa, Triticum aestivum
  misc_feature (1)..(185): Ceres Seq. ID no. 15173286
MRATEMLTAAAGAAAGTTPSTASVAGLAGASGGVPAAGAGGNFPLGAALLAFAFANLVNVLSIWLKEKKWDARKFLTSSGVISSLSAAVASLAVAVGQQEGGDSSVFALALVFAAVVMYDASGVRFHTGRQAALLNQIVSDLSPEHPIISTFRPLREPLGHSPFQVFAGALVGCTVAYLMGNSSV

SEQ ID NO: 13186 - protein, 180 aa, Triticum aestivum
  misc_feature (1)..(180): Ceres Seq. ID no. 15173287
MLTAAAGAAAGTTPSTASVAGLAGASGGVPAAGAGGNFPLGAALLAFAFANLVNVLSIWLKEKKWDARKFLTSSGVISSLSAAVASLAVAVGQQEGGDSSVFALALVFAAVVMYDASGVRFHTGRQAALLNQIVSDLSPEHPIISTFRPLREPLGHSPFQVFAGALVGCTVAYLMGNSSV

SEQ ID NO: 13187 - DNA, 784 bp, Triticum aestivum
  misc_feature (1)..(784): Ceres Seq. ID no. 15173319
tcttactggtgtagcatctggcattgccttccgtcttgcttcatggaggccattgcaacttgtgatgtccttaaagatgggtctcttcaccaccttgttcctcctgctaggaggttccgtcttctaccatctcgtggaagcaagcatccttatggttgctaaacacaataaatcatccgtcaatgtcattacatcttccagcaggctctctcttagtgtcctcacacagcaatcgctccttgcttgcggttgcgtcttccttcacgcctacgccgaagggcttgcacttggtgtggcggcacgcaaggcatctggtctaggccgctacatggttcttccagtctctcttcacggcctaccacggggtgctgctgttgctagttgtgtatatggtgccactgatagctggcgaggagccttggcagctgcagctctgaccgggtttgcgggaccaagcgcggccatcggtgcaatccttgcgaagattggctatgatggactggactattggatggtgattgcatgcggggctttgatcccaagctttggccgtgtcttcagacgctcgttgcggctggacgcgaggaagagcgtctgcgggatcctgataggttttggttttgcttgggtgtgtttgatgtccaccagattcatctgcttgcacaccccttactgcaattcagctccagaagcggtcacatgatgtgttcctgtcagatagtcacatgtaacatcaatgtaacgataatactgaaattataagagggacatcctttcctgtaac

SEQ ID NO: 13188 - protein, 233 aa, Triticum aestivum
  misc_feature (1)..(233): Ceres Seq. ID no. 15173320
LTGVASGIAFRLASWRPLQLVMSLKMGLFTTLFLLLGGSVFYHLVEASILMVAKHNKSSVNVITSSSRLSLSVLTQQSLLACGCVFLHAYAEGLALGVAARKASGLGRYMVLPVSLHGLPRGAAVASCVYGATDSWRGALAAAALTGFAGPSAAIGAILAKIGYDGLDYWMVIACGALIPSFGRVFRRSLRLDARKSVCGILIGFGFAWVCLMSTRFICLHTPYCNSAPEAVT

SEQ ID NO: 13189 - protein, 212 aa, Triticum aestivum
  misc_feature (1)..(212): Ceres Seq. ID no. 15173321
MSLKMGLFTTLFLLLGGSVFYHLVEASILMVAKHNKSSVNVITSSSRLSLSVLTQQSLLACGCVFLHAYAEGLALGVAARKASGLGRYMVLPVSLHGLPRGAAVASCVYGATDSWRGALAAAALTGFAGPSAAIGAILAKIGYDGLDYWMVIACGALIPSFGRVFRRSLRLDARKSVCGILIGFGFAWVCLMSTRFICLHTPYCNSAPEAVT

SEQ ID NO: 13190 - protein, 208 aa, Triticum aestivum
  misc_feature (1)..(208): Ceres Seq. ID no. 15173322
MGLFTTLFLLLGGSVFYHLVEASILMVAKHNKSSVNVITSSSRLSLSVLTQQSLLACGCVFLHAYAEGLALGVAARKASGLGRYMVLPVSLHGLPRGAAVASCVYGATDSWRGALAAAALTGFAGPSAAIGAILAKIGYDGLDYWMVIACGALIPSFGRVFRRSLRLDARKSVCGILIGFGFAWVCLMSTRFICLHTPYCNSAPEAVT

SEQ ID NO: 13191 - DNA, 688 bp, Triticum aestivum
  misc_feature (1)..(688): Ceres Seq. ID no. 15173348
cttgctagatactacttgaacaacttcgcagatgggacgaagcaggatgccatggatcttcttcaaggactttacatcacatctgttagtcgagacatggcacctccaacaaaagcaggatttgtagagagctatgcgtccgcccgccttgcttttgcattggtttccggagcttttatgttcatgatgatgtcactgagacatgctcggcatgatgctcgtcatttattgctgtcacttctctgggctggtctttgcatcgggatcacacactttgtgagaagcaatggccgggtattcacgaaccggccccgtgcccacaagtcgtcacacccttgatggaaagcaggcggggtgatagattatcattcgttcatcaaacaatggcagtactccacttttttctatgtagagatgtaatttgtgtccatccctttctcctgaagattgtgttctattatctatctatattctttgttcttcaagtccatatgcataatcgatctttgaccagtaaataaacagctgttgctagttgcaacaatcacattttccagtaccaggacatagttacagcttcccgcgataaaaggatatagagatacggctttccggtgtatttatgccaaagtggcgaagtgatgttgtgcagagcttttcagttatgccaattgagatttgttgttcc

SEQ ID NO: 13192 - protein, 112 aa, Triticum aestivum
  misc_feature (1)..(112): Ceres Seq. ID no. 15173349
LARYYLNNFADGTKQDAMDLLQGLYITSVSRDMAPPTKAGFVESYASARLAFALVSGAFMFMMMSLRHARHDARHLLLSLLWAGLCIGITHFVRSNGRVFTNRPRAHKSSHP

SEQ ID NO: 13193 - protein, 95 aa, Triticum aestivum
  misc_feature (1)..(95): Ceres Seq. ID no. 15173350
MDLLQGLYITSVSRDMAPPTKAGFVESYASARLAFALVSGAFMFMMMSLRHARHDARHLLLSLLWAGLCIGITHFVRSNGRVFTNRPRAHKSSHP

SEQ ID NO: 13194 - protein, 80 aa, Triticum aestivum
  misc_feature (1)..(80): Ceres Seq. ID no. 15173351
MAPPTKAGFVESYASARLAFALVSGAFMFMMMSLRHARHDARHLLLSLLWAGLCIGITHFVRSNGRVFTNRPRAHKSSHP

SEQ ID NO: 13195 - DNA, 728 bp, Triticum aestivum
  misc_feature (1)..(728): Ceres Seq. ID no. 15173355
aagaaagcattgtaagatggttgtgaccaatgctttgtttggacaaaagctggtgaatgctagacgactaggatttgtgtttcggcgaaagcagatattgaaaggagctgcccaggaggagcacgattgtattccggatgaacactatgtgcagacattattttctatcaaaggactggaagatgaacttgaaaggagaactttgacctatacatcatggaaccagtcaactttagatcctaaagataaaatgacttggcatccaacgacatttgaatatgacgcagcaagttctgagcagatcaatgctataaagagtatcgatcatgtgaactatgaggtggaacacaggactgagtggtgccaatccaacggcacatccgtcccatgtttcttatttgccagaaagttctcatatggcgccgcgatgcatctgttggaggatggcgcttttggtctgctaaaatctgctcaactactggttaacttttaacaaattctcttgtatacgagcaatcatttttcgtgtgggtggatcaattcatagccaggtccagcttcgttgtttgcagtagcatttgcagctgaagctactcagcgatggagtatcatagtttactgctaggatttagattgtgtatagatcatcggatcggagcagagtaggttattattgtacagagcatcattgaagtacgggaatagcatcaggatgcaatctccaactt

SEQ ID NO: 13196 - protein, 163 aa, Triticum aestivum
  misc_feature (1)..(163): Ceres Seq. ID no. 15173356
RKHCKMVVTNALFGQKLVNARRLGFVFRRKQILKGAAQEEHDCIPDEHYVQTLFSIKGLEDELERRTLTYTSWNQSTLDPKDKMTWHPTTFEYDAASSEQINAIKSIDHVNYEVEHRTEWCQSNGTSVPCFLFARKFSYGAAMHLLEDGAFGLLKSAQLLVNF

SEQ ID NO: 13197 - protein, 158 aa, Triticum aestivum
  misc_feature (1)..(158): Ceres Seq. ID no. 15173357
MVVTNALFGQKLVNARRLGFVFRRKQILKGAAQEEHDCIPDEHYVQTLFSIKGLEDELERRTLTYTSWNQSTLDPKDKMTWHPTTFEYDAASSEQINAIKSIDHVNYEVEHRTEWCQSNGTSVPCFLFARKFSYGAAMHLLEDGAFGLLKSAQLLVNF

SEQ ID NO: 13198 - DNA, 599 bp, Triticum aestivum
  misc_feature (1)..(599): Ceres Seq. ID no. 15173361
actcggaaaaagatctccgctttgccctgcctgcctgcgccggacggagccaccccacccaccaaagcgatccgccggaccggcgagcggcgagcggcggagcaagggagagatggcggcgacgggggaggagacggtgcgtgcgtcgcacatcctgatcaagcacgaggggtcccggcgcaaggcgtcctggaaggaccccgagggccgggtcatctccgccaccacgcgcgccgacgccgccgcgcgcctcggcgacctccgcgcccagatcctcgccggccgcggctccttcgccgacctcgccgcgcagcactccgactgctcctccgcccgccgcggcggcgacctagggcctgcggctcttctcattctggcagccccaagcttgaatgaagaaaaatgtcttgtatcgtctcaccattttgctacggccatttgagctggttgataccatcatcacaggtcaatgtttgagcttatgatgtcttgatcgggaaatgtggaaatgtttttttttcttcatttcatctgtgataaatcatttcaaatgaatgttgtatgcaccatgaaatatctcctacttatagtaaggtttc

SEQ ID NO: 13199 - protein, 146 aa, Triticum aestivum
  misc_feature (1)..(146): Ceres Seq. ID no. 15173362
LGKRSPLCPACLRRTEPPHPPKRSAGPASGERRSKGEMAATGEETVRASHILIKHEGSRRKASWKDPEGRVISATTRADAAARLGDLRAQILAGRGSFADLAAQHSDCSSARRGGDLGPAALLILAAPSLNEEKCLVSSHHFATAI

SEQ ID NO: 13200 - protein, 131 aa, Triticum aestivum
  misc_feature (1)..(131): Ceres Seq. ID no. 15173363
TRKKISALPCLPAPDGATPPTKAIRRTGERRAAEQGRDGGDGGGDGACVAHPDQARGVPAQGVLEGPRGPGHLRHHARRRRRAPRRPPRPDPRRPRLLRRPRRAALRLLLRPPRRRPRACGSSHSGSPKLE

SEQ ID NO: 13201 - protein, 109 aa, Triticum aestivum
  misc_feature (1)..(109): Ceres Seq. ID no. 15173364
MAATGEETVRASHILIKHEGSRRKASWKDPEGRVISATTRADAAARLGDLRAQILAGRGSFADLAAQHSDCSSARRGGDLGPAALLILAAPSLNEEKCLVSSHHFATAI

SEQ ID NO: 13202 - DNA, 515 bp, Triticum aestivum
  misc_feature (1)..(515): Ceres Seq. ID no. 15173375
ttaaacagtttacagttgatttagcttcagtggagaccaacatggtattctttgatattgcggatccacgcataacacctgacaaactctgtcaagtcctggaacagcgcaatgtgcttgcaatgccagcaagctccaagagcgtcagacttgtcactcactaccaaatttcagacagtgacgtgcagtatactttgacatgcatcgagaaagccgtggaggaaatactgtcaggcaacgccaaattcgagcgcctgacaaacggcactaccacgaactcatatgggcactaggccacggcctatggagtgcagtcagtggtatccagcttgtttgtggccgtggcctttgcagtagtgaagtagtaacaactttgcagaataatctgttgctatttgggccgatggaagccccccacttggtgtcaatgtgatgtgttcacttcagcccggatacaggaaaatgttcgccaggccggcccatcatcactcaagtgtactctaccttttcccagc

SEQ ID NO: 13203 - protein, 96 aa, Triticum aestivum
  misc_feature (1)..(96): Ceres Seq. ID no. 15173376
KQFTVDLASVETNMVFFDIADPRITPDKLCQVLEQRNVLAMPASSKSVRLVTHYQISDSDVQYTLTCIEKAVEEILSGNAKFERLTNGTTTNSYGH

SEQ ID NO: 13204 - protein, 83 aa, Triticum aestivum
  misc_feature (1)..(83): Ceres Seq. ID no. 15173377
MVFFDIADPRITPDKLCQVLEQRNVLAMPASSKSVRLVTHYQISDSDVQYTLTCIEKAVEEILSGNAKFERLTNGTTTNSYGH

SEQ ID NO: 13205 - protein, 77 aa, Triticum aestivum
  misc_feature (1)..(77): Ceres Seq. ID no. 15173378
MHRESRGGNTVRQRQIRAPDKRHYHELIWALGHGLWSAVSGIQLVCGRGLCSSEVVTTLQNNLLLFGPMEAPHLVSM

SEQ ID NO: 13206 - DNA, 534 bp, Triticum aestivum
  misc_feature (1)..(534): Ceres Seq. ID no. 15173382
acagctaccaccactctatcagtctatcccgttggttctacttggcgtcagcacggcacctgccttccaagttcatccaccatgggcgactcatcctcggcttcctacatcagaatggtgcaccatctgatagagaagtgcatttgcttcaacctcaacaaggaggggtgcatggaggccctggagaagcatgccaagatcaacccggtcgtcactgccactgtgtggaaagagctggagaaggagaacaaggagttcttcgagtcttacaacagggaccgcgtggagcggaacatcgaggcggcgacgatggagcggatccagaagatgctctccgacgcggctgcctccaagacctccgacgacgatgagggctagaaggctgctgcttatgtccaagctcatgcgcatgcatcacctctagctaattaattgtatgaatagcatgtcttccgttaattggatccattatgtctaggaggatcgaatttattaattgcacctatctcataacagaccagtagcttgaaaccg

SEQ ID NO: 13207 - protein, 125 aa, Triticum aestivum
  misc_feature (1)..(125): Ceres Seq. ID no. 15173383
TATTTLSVYPVGSTWRQHGTCLPSSSTMGDSSSASYIRMVHHLIEKCICFNLNKEGCMEALEKHAKINPVVTATVWKELEKENKEFFESYNRDRVERNIEAATMERIQKMLSDAAASKTSDDDEG

SEQ ID NO: 13208 - protein, 122 aa, Triticum aestivum
  misc_feature (1)..(122): Ceres Seq. ID no. 15173384
SYHHSISLSRWFYLASARHLPSKFIHHGRLILGFLHQNGAPSDREVHLLQPQQGGVHGGPGEACQDQPGRHCHCVERAGEGEQGVLRVLQQGPRGAEHRGGDDGADPEDALRRGCLQDLRRR

SEQ ID NO: 13209 - protein, 98 aa, Triticum aestivum
  misc_feature (1)..(98): Ceres Seq. ID no. 15173385
MGDSSSASYIRMVHHLIEKCICFNLNKEGCMEALEKHAKINPVVTATVWKELEKENKEFFESYNRDRVERNIEAATMERIQKMLSDAAASKTSDDDEG

SEQ ID NO: 13210 - DNA, 851 bp, Triticum aestivum
  misc_feature (1)..(851): Ceres Seq. ID no. 15173393
gaatccatccacctctcgagctcttttctgaagccgcaagcgagcagagcacaccgcacacgtagcagtttccctttcagatattttcttcgactagccaccatgactgctttggccaagccctccgcctcagcgccgaagccgaagaagacctccgccgctggagccgcccacccgacctacttcgagatgatcaaggaggcgatcgcggctctcaaggacaggaccgggtcgagctcggtcgccatcgccaagttcatcgaggagaagcacggcaaggccctcccggccaacttcaagaagatgctctccgtccagctccgctcctccgccgccaagggcaagctcgtcaaggtcaaggcctcctacaagctctccgacgccgccaagaaggactcccccaagcccaaggccaagcccgccgcccccaaggctgcggcgaagcccgcaaaggacgccgccaagcccaagaagaaggcctccgcgaagcccaagaaggccgccgccgctggcacgaagcgcaaggcacccgagaagaagaagctggtcgccaaagccaagaagtcgcccgcggcgaaggccaaggcgaagccgaagaccgtccgctccccggccgccaagaaggcccgcaaggtcgcctccgcttgatctgatctgatctgatcttataggtggttttaagtgtgcgttggtgctctgggtctgtacaaaaggatgcctcatcctccctgatttaggcttcggttctgctaggcaggttctatgtactatcgctggtggtgtttagtgtctggaatgttcaggtgtcagatgtatccagctcaaactctgaaatgaatttgcagtttcgc

SEQ ID NO: 13211 - protein, 215 aa, Triticum aestivum
  misc_feature (1)..(215): Ceres Seq. ID no. 15173394
ESIHLSSSFLKPQASRAHRTRSSFPFRYFLRLATMTALAKPSASAPKPKKTSAAGAAHPTYFEMIKEAIAALKDRTGSSSVAIAKFIEEKHGKALPANFKKMLSVQLRSSAAKGKLVKVKASYKLSDAAKKDSPKPKAKPAAPKAAAKPAKDAAKPKKKASAKPKKAAAAGTKRKAPEKKKLVAKAKKSPAAKAKAKPKTVRSPAAKKARKVASA

SEQ ID NO: 13212 - protein, 181 aa, Triticum aestivum
  misc_feature (1)..(181): Ceres Seq. ID no. 15173395
MTALAKPSASAPKPKKTSAAGAAHPTYFEMIKEAIAALKDRTGSSSVAIAKFIEEKHGKALPANFKKMLSVQLRSSAAKGKLVKVKASYKLSDAAKKDSPKPKAKPAAPKAAAKPAKDAAKPKKKASAKPKKAAAAGTKRKAPEKKKLVAKAKKSPAAKAKAKPKTVRSPAAKKARKVASA

SEQ ID NO: 13213 - protein, 152 aa, Triticum aestivum
  misc_feature (1)..(152): Ceres Seq. ID no. 15173396
MIKEAIAALKDRTGSSSVAIAKFIEEKHGKALPANFKKMLSVQLRSSAAKGKLVKVKASYKLSDAAKKDSPKPKAKPAAPKAAAKPAKDAAKPKKKASAKPKKAAAAGTKRKAPEKKKLVAKAKKSPAAKAKAKPKTVRSPAAKKARKVASA

SEQ ID NO: 13214 - DNA, 802 bp, Triticum aestivum
  misc_feature (1)..(802): Ceres Seq. ID no. 15173407
gctaatggcggtcgtcaccgccgttgtaatccggtcgcggtggtttcaccgtagccatggacgggacgcgggacgtcacgtcactatctcccccgctacttaaccaatcgggcgtgccggggtagggacgcccgcctccagccgcagtccacgaacccatcgctacagcggtgcggcctcgcctcacccacccacccacatcaccaccgccgaaaaagaagatcccgggcaagcggcgaccgagcaaggatgccgtctgcgcggccggcggcgttactcgtcgcggccgtgttcctgtggtggtcgggggccggcgcgctggcggacggcggcaacggcacggtgtgcctgtgcacgggcccgcagtgcgtgccgccctgccccgtcccggggacgacgccgccgacgacgtcgccgatgcagttccccttctgcccgcagcggccgccggcggtcgggcccttcccgtgggagcagcagccgccggcgtcgccgaggtcggggtcggggttccctcaggacgcgggcttcctcgcggcagcagcggccagccccgctaggaatccggcggcgtggctggcggtggccgccttgtgctctgctttcctgctgctcctgcactagtaaccctctatctggctagctcatccacccctgtagatcgacggatgttgtctgaatactgagcggctgctgtgctgatgtctgaatctatatgtatgtaattctaggtcttgagttcaattctaaaggctatgaacaaacaatctaagaaggattggttgggttcctcctttctgcc

SEQ ID NO: 13215 - protein, 124 aa, Triticum aestivum
  misc_feature (1)..(124): Ceres Seq. ID no. 15173408
MPSARPAALLVAAVFLWWSGAGALADGGNGTVCLCTGPQCVPPCPVPGTTPPTTSPMQFPFCPQRPPAVGPFPWEQQPPASPRSGSGFPQDAGFLAAAAASPARNPAAWLAVAALCSAFLLLLH

SEQ ID NO: 13216 - protein, 68 aa, Triticum aestivum
  misc_feature (1)..(68): Ceres Seq. ID no. 15173409
MQFPFCPQRPPAVGPFPWEQQPPASPRSGSGFPQDAGFLAAAAASPARNPAAWLAVAALCSAFLLLLH

SEQ ID NO: 13217 - DNA, 905 bp, Triticum aestivum
  misc_feature (1)..(905): Ceres Seq. ID no. 15173417
acgactccatcgcggagacaaccaaacaacctcgtacagcacaggcgatcgatcggcgcggccatggagaagccgccgatcccgagcatcatctccaccgtcacctactgctgcggggcgtgcgggtacgacctgaggctgagctcgctggcgcgggacacggcgggcggcgctggcgcgaggcggcggtgcgtgggcgcggcggaggtggtgttcgacgccatcgacgacgcgcgcttcggccacctggaggagttccggtggctggacgtgcgcgcctgcctccccttctcgcgccgcacgcgcctgctctgccgcaagtgcggcgcccgcctcggctacggctacgacgacaccgccgccgccgaccgcccgccgcgctaccacatcaagatccgggccctccagcccgcccccgatcccgcctcggaccacgcggcgccgtccgatccgtgatctgagatcctgccgtattctttgattgcctgtgcatgcagccgcatctgtctctctctcctttcaatcgaatctcctccaaagtcgctcgcttggacccgaagcaaggaatgaaacagactggttgattgatcgggatccgattttgctttctgatatttttaagcggaattattggtcttgacttggttgcgttgtggaactgtagaagtcaaaagttgtgtactgttccagtctgaacttccaatgctggtggcgacactgatcgtgcaagggggaggatcgccagcagcagctttcaaccatgcatcgtctctttgattcaaaggatcttcataggatttttgaaggattagaatccttaggaatgtttcctacgttggtcgtttgattcgtaggattgaatcttgtagaatttttttctaaggatttatttgtactacatttcg

SEQ ID NO: 13218 - protein, 152 aa, Triticum aestivum
  misc_feature (1)..(152): Ceres Seq. ID no. 15173418
DSIAETTKQPRTAQAIDRRGHGEAADPEHHLHRHLLLRGVRVRPEAELAGAGHGGRRWREAAVRGRGGGGVRRHRRRALRPPGGVPVAGRARLPPLLAPHAPALPQVRRPPRLRLRRHRRRRPPAALPHQDPGPPARPRSRLGPRGAVRSVI

SEQ ID NO: 13219 - protein, 151 aa, Triticum aestivum
  misc_feature (1)..(151): Ceres Seq. ID no. 15173419
TTPSRRQPNNLVQHRRSIGAAMEKPPIPSIISTVTYCCGACGYDLRLSSLARDTAGGAGARRRCVGAAEVVFDAIDDARFGHLEEFRWLDVRACLPFSRRTRLLCRKCGARLGYGYDDTAAADRPPRYHIKIRALQPAPDPASDHAAPSDP

SEQ ID NO: 13220 - protein, 130 aa, Triticum aestivum
  misc_feature (1)..(130): Ceres Seq. ID no. 15173420
MEKPPIPSIISTVTYCCGACGYDLRLSSLARDTAGGAGARRRCVGAAEVVFDAIDDARFGHLEEFRWLDVRACLPFSRRTRLLCRKCGARLGYGYDDTAAADRPPRYHIKIRALQPAPDPASDHAAPSDP

SEQ ID NO: 13221 - DNA, 666 bp, Triticum aestivum
  misc_feature (1)..(666): Ceres Seq. ID no. 15173438
gttgtcgaaagaggatgcagaagttactgctgccattctttgttcaaagtgggaagccgaaataaggaatccagaatggcacccgtttagggctgtcatggttgatggaaaggaaatggaaaaaatcgatgctggtgacgcaaagcttcaagaactaaaagatgagcatggcgaagaaatatattcgttggtgaccaaggcgctgcgtgagtacaacgctaacagcaccaggtatcccgtaggagagctgtggaacttcagggaagaacgcaaggcgtctctcaaggaagctgtccaggtggtcctcagacagtggcgagccaacaggaggaagcgttgattgagcccagacaatcaatgctgcttctttcctcctggtatggacagcagcagcattagtggtgtggtttgattgatgattctctagtgaccatctaccccatgctggacacaagttgaataatgaataatcctgttgttgcagtagtagtagcattagtggagtctctgtctatccatctgtgtgaacaaggttgaataaagacttgcagtagtatcagcacctgcaagcatgccatcgacccgatcatcggtgtcggttggtaagcgctgatgtatgctttgctgtctaagttgctgatagtaaattcagagtggttgttgtct

SEQ ID NO: 13222 - protein, 112 aa, Triticum aestivum
  misc_feature (1)..(112): Ceres Seq. ID no. 15173439
LSKEDAEVTAAILCSKWEAEIRNPEWHPFRAVMVDGKEMEKIDAGDAKLQELKDEHGEEIYSLVTKALREYNANSTRYPVGELWNFREERKASLKEAVQVVLRQWRANRRKR

SEQ ID NO: 13223 - protein, 80 aa, Triticum aestivum
  misc_feature (1)..(80): Ceres Seq. ID no. 15173440
MVDGKEMEKIDAGDAKLQELKDEHGEEIYSLVTKALREYNANSTRYPVGELWNFREERKASLKEAVQVVLRQWRANRRKR

SEQ ID NO: 13224 - protein, 74 aa, Triticum aestivum
  misc_feature (1)..(74): Ceres Seq. ID no. 15173441
MEKIDAGDAKLQELKDEHGEEIYSLVTKALREYNANSTRYPVGELWNFREERKASLKEAVQVVLRQWRANRRKR

SEQ ID NO: 13225 - DNA, 490 bp, Triticum aestivum
  misc_feature (1)..(490): Ceres Seq. ID no. 15173442
agcttccccgcctcaaatctcttctagggctttgcttccactcccctgactcgggagataccgtgggcgagatgcaggcgtcgatctcgagcccgctgccggtggcctggtaccccgcgctggccgtcctcacggtcgccgtcggcctcatgctcactgcctccttcttcatttatgaagcgactgtatccacgcgcagccgaagcttagccaaggagctcaccaccgcagctgttgcttccgtttttctgggttttggatctcttttcgttctcctcgcaagtggtgtttttgtctgacaagggacttgcagcctatacctacatggacatccaagaatttctctaggggaaaggacatcaaagattgaaaattcgtgtttacatgtagtcctgtgttttgaggtttatttcagttaaccctcgcttctcatgttacatgacatattactgttataatacaaatacaaaacagaaagattgatgtgcct

SEQ ID NO: 13226 - protein, 98 aa, Triticum aestivum
  misc_feature (1)..(98): Ceres Seq. ID no. 15173443
LPRLKSLLGLCFHSPDSGDTVGEMQASISSPLPVAWYPALAVLTVAVGLMLTASFFIYEATVSTRSRSLAKELTTAAVASVFLGFGSLFVLLASGVFV

SEQ ID NO: 13227 - protein, 75 aa, Triticum aestivum
  misc_feature (1)..(75): Ceres Seq. ID no. 15173444
MQASISSPLPVAWYPALAVLTVAVGLMLTASFFIYEATVSTRSRSLAKELTTAAVASVFLGFGSLFVLLASGVFV

SEQ ID NO: 13228 - protein, 49 aa, Triticum aestivum
  misc_feature (1)..(49): Ceres Seq. ID no. 15173445
MLTASFFIYEATVSTRSRSLAKELTTAAVASVFLGFGSLFVLLASGVFV

SEQ ID NO: 13229 - DNA, 443 bp, Triticum aestivum
  misc_feature (1)..(443): Ceres Seq. ID no. 15173446
taccgatcccatcatgcgacaggtgttgatggatttccaggagaaccctagggctgctcaggatcatctgaaggaccctggagtagcacagaagatccaaaagctcataaacgctggaatagtccaaacgagatgatcaagcaaagctagaacgaagccaggggcgtttgtattgagattgtgctcggttgtgtcaccattgtacactgcttctctgcccagcgtgaacgaacttctattctatgccatggggcttttctgttggattcgtgagtacagcctgccacaacgttattcctgtttacggctatattatgttattacagttttatgtgggcaatgccccatattattagttgtagccgtttttgccttcacagtggacagacaacagtagaatgttattgtattttatttcttgctctagggaaatgctgtcaatg

SEQ ID NO: 13230 - protein, 49 aa, Triticum aestivum
  misc_feature (1)..(49): Ceres Seq. ID no. 15173447
MGLFCWIREYSLPQRYSCLRLYYVITVLCGQCPILLVVAVFAFTVDRQQ

SEQ ID NO: 13231 - protein, 44 aa, Triticum aestivum
  misc_feature (1)..(44): Ceres Seq. ID no. 15173448
TDPIMRQVLMDFQENPRAAQDHLKDPGVAQKIQKLINAGIVQTR

SEQ ID NO: 13232 - protein, 40 aa, Triticum aestivum
  misc_feature (1)..(40): Ceres Seq. ID no. 15173449
MRQVLMDFQENPRAAQDHLKDPGVAQKIQKLINAGIVQTR

SEQ ID NO: 13233 - DNA, 986 bp, Triticum aestivum
  misc_feature (1)..(986): Ceres Seq. ID no. 15173516
acatcggcccgtagcggaggagcctcctacagtcctactctcctcctctccccccattcactccatcgacgaagcgcacggagggtaactgcacaggaggaaaaccggcgaaggaagcggcggcggctccgggcgtggtcatggacgagaagacgcaggataaggtggaggcggcggtgctggagatcctgcggggttccgacatggagtccctgacggagtacaaggtccgcaccgccgccgccgaacgcctcggcatcgacctcgacctccccctccacaagcgcttcgtgcgacgcctcgtggaggactacctcaagtccctcgccgaagaagaagacgagaagcagaagggcggctcccgcaaggaggggaaaaagaaacagcagcgtcaggaggaggaagagcaggaagaggatgaggagaaggagggggaagaagaggaggaggaggaggacaagggaggtgaaggaaagaaagagttcgacgataatggagacctcatcctctgccgcctgtcgaagaacaggagggtgacgctgcaggagtttaagggcaaaacgctggtgtcgatccgcgagtactacatcaaggacggcaaggaaatgcccagctccaaagggatgagtatgacggtcgagcagtgggagacattcagcaaatcagtacctgcaatagaagacgccatcagaacacttggagaatcagattgaaaggatgccagaaaaacctaaaaatctcgacgctcgttctggacctctgcaagtagagtagtccatgggtgctctgagtactccatggggctactagagttcatctggacttgtataaagcttctcccttagtcaaggtaccgtacctactgatgcgtgctgggtagacagtttgggtgtgttcgcgaactagttctccgccggtatggtggaccgaagtttcatcgctgtgccatgtgatcttgtgctgttgaattgtcctttctgataccg

SEQ ID NO: 13234 - protein, 190 aa, Triticum aestivum
  misc_feature (1)..(190): Ceres Seq. ID no. 15173517
MDEKTQDKVEAAVLEILRGSDMESLTEYKVRTAAAERLGIDLDLPLHKRFVRRLVEDYLKSLAEEEDEKQKGGSRKEGKKKQQRQEEEEQEEDEEKEGEEEEEEEDKGGEGKKEFDDNGDLILCRLSKNRRVTLQEFKGKTLVSIREYYIKDGKEMPSSKGMSMTVEQWETFSKSVPAIEDAIRTLGESD

SEQ ID NO: 13235 - protein, 169 aa, Triticum aestivum
  misc_feature (1)..(169): Ceres Seq. ID no. 15173518
MESLTEYKVRTAAAERLGIDLDLPLHKRFVRRLVEDYLKSLAEEEDEKQKGGSRKEGKKKQQRQEEEEQEEDEEKEGEEEEEEEDKGGEGKKEFDDNGDLILCRLSKNRRVTLQEFKGKTLVSIREYYIKDGKEMPSSKGMSMTVEQWETFSKSVPAIEDAIRTLGESD

SEQ ID NO: 13236 - DNA, 644 bp, Triticum aestivum
  misc_feature (1)..(644): Ceres Seq. ID no. 15173519
tactaacagtccaaaactcgtataacttgctgtgtcgcaattttgatgctggattggcagaatgctgccatcacgagagaatcagtttgctggcgtacagcccaatggcaatgggtatactttcagggaagtatcactcatctgatgacagcggaccgccagatgcaaggatgaatcttttcatggggagatactccgagggtgaatccagatacaatctgaagaaccccaaactggaatcggcagtgaaggaatatagaagaattggcgtcaagtatggcatttcgccatcaatcctagcagttgcatttgtactcagacacccccttgtgggttcagctgttttcggtgttactaaattatggcagctcgaggaggttcttcaggccacaggggtccatctctgtgaagaaatattggcggagatcaatgatgtacatgcaagatttcccaatccttgtccataataatgttccaaaatacgatatttttctttgtccattgcgatatccagatatgataaataggcggtagcaatttgtgcatgtcatccttgtgaatcttctttgtaccgttccaattttatcagttcatgtctgcgaagggacaatagagagtagcaattttgcaacgctgagttagtc

SEQ ID NO: 13237 - protein, 154 aa, Triticum aestivum
  misc_feature (1)..(154): Ceres Seq. ID no. 15173520
LTVQNSYNLLCRNFDAGLAECCHHERISLLAYSPMAMGILSGKYHSSDDSGPPDARMNLFMGRYSEGESRYNLKNPKLESAVKEYRRIGVKYGISPSILAVAFVLRHPLVGSAVFGVTKLWQLEEVLQATGVHLCEEILAEINDVHARFPNPCP

SEQ ID NO: 13238 - protein, 120 aa, Triticum aestivum
  misc_feature (1)..(120): Ceres Seq. ID no. 15173521
MAMGILSGKYHSSDDSGPPDARMNLFMGRYSEGESRYNLKNPKLESAVKEYRRIGVKYGISPSILAVAFVLRHPLVGSAVFGVTKLWQLEEVLQATGVHLCEEILAEINDVHARFPNPCP

SEQ ID NO: 13239 - protein, 118 aa, Triticum aestivum
  misc_feature (1)..(118): Ceres Seq. ID no. 15173522
MGILSGKYHSSDDSGPPDARMNLFMGRYSEGESRYNLKNPKLESAVKEYRRIGVKYGISPSILAVAFVLRHPLVGSAVFGVTKLWQLEEVLQATGVHLCEEILAEINDVHARFPNPCP

SEQ ID NO: 13240 - DNA, 652 bp, Triticum aestivum
  misc_feature (1)..(652): Ceres Seq. ID no. 15173713
acccaactcattcgctctctcgttctcctctccccgcaccaagagcagcaagaggcaagcgcaccccaaagctaagctctgctcagcaattttctccaaagtaacctacacacaaataccaatataccatggcgccatcagtggcctgctccttcttcttcgacgccgagctgcacggtgagcccgacatgccgtcgatggacgcgtgcgcgctctgtgccaagccgctggcgtgcgacagcgacgtcttcatgtacaaaggggacacggcctactgtagcgaggagtgccgccacgagcagatgcacctcgacaccgtctgtgccaagcaggccgcgcggaggcagcagcggttctcggcggggacagaatcccaccgtgggcagcggcagtccagcaaggtgtccgtcgcgagctaagcggccggcctggccgaggaaagttttgttcgaatagacaagatcggaattctgaagaaaacaacatctgtgggcatctgatgtctccgtctctccggccggtgctcttgcctcaaccggaggaagcatcaggtggcacgaagcataggttgttagaagggagagagaaggattgttgcgaaataattggatgtattattgagcctcgagggcgagtatatatatatgaacac

SEQ ID NO: 13241 - protein, 96 aa, Triticum aestivum
  misc_feature (1)..(96): Ceres Seq. ID no. 15173714
MAPSVACSFFFDAELHGEPDMPSMDACALCAKPLACDSDVFMYKGDTAYCSEECRHEQMHLDTVCAKQAARRQQRFSAGTESHRGQRQSSKVSVAS

SEQ ID NO: 13242 - protein, 76 aa, Triticum aestivum
  misc_feature (1)..(76): Ceres Seq. ID no. 15173715
MPSMDACALCAKPLACDSDVFMYKGDTAYCSEECRHEQMHLDTVCAKQAARRQQRFSAGTESHRGQRQSSKVSVAS

SEQ ID NO: 13243 - protein, 73 aa, Triticum aestivum
  misc_feature (1)..(73): Ceres Seq. ID no. 15173716
MDACALCAKPLACDSDVFMYKGDTAYCSEECRHEQMHLDTVCAKQAARRQQRFSAGTESHRGQRQSSKVSVAS

SEQ ID NO: 13244 - DNA, 775 bp, Triticum aestivum
  misc_feature (1)..(775): Ceres Seq. ID no. 15173736
gcaattgcatccagttctcgcgccgcccccgtcccataatcccttcccgtcctcgcctcgtcgccggtaatggcgggtcccggcatcggagcggccgcgcctcgcctgtcgctgctgctgctgctgctcgtcgtcgtcttcgcgggctcctcccgccacagccgcaccgaggcggccgtgcggacgtgcacgtacacggtgaaggtgaagacgagctgcgcgtcgccggcgccgacgtcggacgcggttagcgtggcgttcggggacgcgtaccgcaacgaggcgtacggcgcgcgcctcccgagcgcgccgggcgggagggccttcgagcggtgcggcaccgacaccttccgcgtctccggggtgtgcggctacggcgtctgctacctctacctccgccgcgccggccgcgacggctgggcgcccgagtgggtccaggtcaccgagccgggccccggcgccggagagaagcccgccaccttctacttcggggcgccgctgccggacggcgtctggtacggccacaaccgctgcctcaaggccaaggccaaggcagcgggcacggcagcggcggcggctcggacaaacaccacctctgctgctgcttcgcctctgggctagcgcgacctgattcggctctacccaccgggcgcagcccctctccgtatgtaattcggcattcgtcgagaataagcagactgtgcttacagattcagaataagtaattagagaatcataatccgaaatatgatgaggccatgagggcaccttcttc

SEQ ID NO: 13245 - protein, 183 aa, Triticum aestivum
  misc_feature (1)..(183): Ceres Seq. ID no. 15173737
MAGPGIGAAAPRLSLLLLLLVVVFAGSSRHSRTEAAVRTCTYTVKVKTSCASPAPTSDAVSVAFGDAYRNEAYGARLPSAPGGRAFERCGTDTFRVSGVCGYGVCYLYLRRAGRDGWAPEWVQVTEPGPGAGEKPATFYFGAPLPDGVWYGHNRCLKAKAKAAGTAAAAARTNTTSAAASPLG

SEQ ID NO: 13246 - DNA, 783 bp, Triticum aestivum
  misc_feature (1)..(783): Ceres Seq. ID no. 15173814
attcaacaacccaaatcctttcaatgctgggtcatccactagtaatagcactcaatcatctgggctgtttacgtcttcccctacaatggggcagcagccatttggccactcatttaaccagcaatcaagcactccagctttctccaccagtatgttcaatacatctaacatcggaatcactggaggtggagggatatttggcaacacttcttcaccttttcaaacatcaccatttcaacaatctgctttggtgaccctcctgaacatcaagtgcatgaataagaagacgggtgagcagtacacgcaagggccgaggttggacaagttcaaggagatgttggtgaagaaggctgaggagcagggagtggagtttatctcgtttgacggtgccaagggcgagtggaagttcagggtgaagcacttcagctcctacgggtttggtgaagccgaagccgacgacctggccgattccttgtagctttgttgataggtgcttgttttcttttggatgaacggtggacactcgattccatgtagcgttggtcggtagctggtctgggagaatattggttgtgatgcttttcttctctgaatgctgctatgagttccttcccatgttcttctgtacatattcttttttcttgcagaatgcacaaaaattacattctggcaccaatctagcacgtgcgtggattggataatgaactgacatctgtacaaatctggtcgatgaataatcttgttactgtcctggatggaatgcatccttttggcagtttatct

SEQ ID NO: 13247 - protein, 158 aa, Triticum aestivum
  misc_feature (1)..(158): Ceres Seq. ID no. 15173815
FNNPNPFNAGSSTSNSTQSSGLFTSSPTMGQQPFGHSFNQQSSTPAFSTSMFNTSNIGITGGGGIFGNTSSPFQTSPFQQSALVTLLNIKCMNKKTGEQYTQGPRLDKFKEMLVKKAEEQGVEFISFDGAKGEWKFRVKHFSSYGFGEAEADDLADSL

SEQ ID NO: 13248 - protein, 130 aa, Triticum aestivum
  misc_feature (1)..(130): Ceres Seq. ID no. 15173816
MGQQPFGHSFNQQSSTPAFSTSMFNTSNIGITGGGGIFGNTSSPFQTSPFQQSALVTLLNIKCMNKKTGEQYTQGPRLDKFKEMLVKKAEEQGVEFISFDGAKGEWKFRVKHFSSYGFGEAEADDLADSL

SEQ ID NO: 13249 - protein, 108 aa, Triticum aestivum
  misc_feature (1)..(108): Ceres Seq. ID no. 15173817
MFNTSNIGITGGGGIFGNTSSPFQTSPFQQSALVTLLNIKCMNKKTGEQYTQGPRLDKFKEMLVKKAEEQGVEFISFDGAKGEWKFRVKHFSSYGFGEAEADDLADSL

SEQ ID NO: 13250 - DNA, 682 bp, Triticum aestivum
  misc_feature (1)..(682): Ceres Seq. ID no. 15173822
cattacctccacccatggaggaggaggaggtagaatctatggagtcagatacttctgtcattgcagagagttcttccgcttctgctatcatgcctgagaatttgcagtcgagctatccggtgctagttccagcatatttctcaccattcttgcaattctcagttcctttctggcaaaatcagaatgatggagatgatcttggacaaggaacacatgagattgttaagcctgttccggttcattcaaagagtccaatcaatgttgatgaactggtgggcatgtcgaagctaagcataggggatcccaagcaagatacggtatctacctctctttccttaaaaatggtaggaggtcaaaatagacaatcggctttccaggcaaatctcccaacgagggctcaggcctgagccccctcagcacacaaactgcacttagatgagccctggcaaaaataagctttgcctcttttccttttcttttctttttaagattaactgtggtctgtagtctgtccaatgtaccctgtgttgtaagttatgttatgtatggatgcatctgttgtttgtatggcacatgatatgcccagtgcatgttgacagaatcattaatgttagtgctgatctccagggttgtactgcaaactcttatataagaaaaagaaatatcagtcagttattggacc

SEQ ID NO: 13251 - protein, 134 aa, Triticum aestivum
  misc_feature (1)..(134): Ceres Seq. ID no. 15173823
LPPPMEEEEVESMESDTSVIAESSSASAIMPENLQSSYPVLVPAYFSPFLQFSVPFWQNQNDGDDLGQGTHEIVKPVPVHSKSPINVDELVGMSKLSIGDPKQDTVSTSLSLKMVGGQNRQSAFQANLPTRAQA

SEQ ID NO: 13252 - protein, 130 aa, Triticum aestivum
  misc_feature (1)..(130): Ceres Seq. ID no. 15173824
MEEEEVESMESDTSVIAESSSASAIMPENLQSSYPVLVPAYFSPFLQFSVPFWQNQNDGDDLGQGTHEIVKPVPVHSKSPINVDELVGMSKLSIGDPKQDTVSTSLSLKMVGGQNRQSAFQANLPTRAQA

SEQ ID NO: 13253 - protein, 122 aa, Triticum aestivum
  misc_feature (1)..(122): Ceres Seq. ID no. 15173825
MESDTSVIAESSSASAIMPENLQSSYPVLVPAYFSPFLQFSVPFWQNQNDGDDLGQGTHEIVKPVPVHSKSPINVDELVGMSKLSIGDPKQDTVSTSLSLKMVGGQNRQSAFQANLPTRAQA

SEQ ID NO: 13254 - DNA, 658 bp, Triticum aestivum
  misc_feature (1)..(658): Ceres Seq. ID no. 15173842
tctccacatcaacgccagcaagaacaaatgatgcaactgatacaacaacttcagcagagaggattgaatcgccagcagattgcgcaggcgctgcagcgacttccccatcttaatgcccaacatctgaaccagcagcaacggcaacaacagcaagcatctccaaggatgccagcatctgcagcagggaagcccgcaaacacggcaggatcgcagccggcgacaccttcctcaggcggaaccgcggcgggtgcaaatgcgccgcatcaaggagggggaaattgcagccaacttattgggaagagaaagatacatgatttggtggcgcaggtggatccacagtgcgaggttgatccagaggtggaagatttgattctggagattgccgacgacttcattaacacagcggctgattttgcgtgcaggcttgcaaagcacaggaaatcgtcggttgtggaagccaaggatgtgctactgcacctgcagaagaattgtcacctgtccgctcctggtttctcacaggagaggatgtgaatgaatctgcagagaaattcagtgtaggctttggtagaattgtggcatttactttgaaaagcgtgaattgtatttgagatagatacttataccattataggtaaatgagaactgctatacggacgac

SEQ ID NO: 13255 - protein, 176 aa, Triticum aestivum
  misc_feature (1)..(176): Ceres Seq. ID no. 15173843
SPHQRQQEQMMQLIQQLQQRGLNRQQIAQALQRLPHLNAQHLNQQQRQQQQASPRMPASAAGKPANTAGSQPATPSSGGTAAGANAPHQGGGNCSQLIGKRKIHDLVAQVDPQCEVDPEVEDLILEIADDFINTAADFACRLAKHRKSSVVEAKDVLLHLQKNCHLSAPGFSQERM

SEQ ID NO: 13256 - protein, 167 aa, Triticum aestivum
  misc_feature (1)..(167): Ceres Seq. ID no. 15173844
MMQLIQQLQQRGLNRQQIAQALQRLPHLNAQHLNQQQRQQQQASPRMPASAAGKPANTAGSQPATPSSGGTAAGANAPHQGGGNCSQLIGKRKIHDLVAQVDPQCEVDPEVEDLILEIADDFINTAADFACRLAKHRKSSVVEAKDVLLHLQKNCHLSAPGFSQERM

SEQ ID NO: 13257 - protein, 166 aa, Triticum aestivum
  misc_feature (1)..(166): Ceres Seq. ID no. 15173845
MQLIQQLQQRGLNRQQIAQALQRLPHLNAQHLNQQQRQQQQASPRMPASAAGKPANTAGSQPATPSSGGTAAGANAPHQGGGNCSQLIGKRKIHDLVAQVDPQCEVDPEVEDLILEIADDFINTAADFACRLAKHRKSSVVEAKDVLLHLQKNCHLSAPGFSQERM

SEQ ID NO: 13258 - protein, 121 aa, Triticum aestivum
  misc_feature (1)..(121): Ceres Seq. ID no. 15173846
MPASAAGKPANTAGSQPATPSSGGTAAGANAPHQGGGNCSQLIGKRKIHDLVAQVDPQCEVDPEVEDLILEIADDFINTAADFACRLAKHRKSSVVEAKDVLLHLQKNCHLSAPGFSQERM

SEQ ID NO: 13259 - DNA, 889 bp, Triticum aestivum
  misc_feature (1)..(889): Ceres Seq. ID no. 15173862
tccgttctcccttctcccatcccatgtaacaaaatcagctcagctcagcgacaacagcggcggatgatgagagctcctcctcggctactgtcgcctccttcctccgccacggctcctcacctcctcctctacgcttcctccgcggcctgccgcctccctccctccgcggccgccgtcgcccgctccgtctccgtctccaccaccgtcgtcgacgccccggccgccgccgccgagccgggctcctccgactcggcctccgccacgccgcgacgccgcctcatcctcctccgccacggggacagcgcggttggggaacgcttcaccagagatcatgacaaaccactgagcaaagctggaagagctgatgcaataagcgtttctgataaattccatcaaatgggatggatacctgagcttatcctatgcagtgatgcaactcgtacaaaggaaactcttcagatcatgcaagagcatgttcaaggattgtctcaagcacttgtgcatttcatcccaagtttctactcgattgctgcaatggatggtcaaactgccgagcacttgcaaaaggcaatttgtgaatattcaactgatgagatactaacggtgatgtgcatgggacataataaaggatgggaagaagcagcctctatgttttctggtgattcagtggtgctcaagacgtgtaatgctgcattgctagaagctgctgggaaatcatggattgaggctttttcgcaggctggccttgggggatggaagcttcacggcattgtaaagccataaagtgaaaacattgtagctaaagctagatacagtttttttgtagcatttttgttctcattttgcctggtgtagctatgattgaatgttaatgaagttattgatgtgg

SEQ ID NO: 13260 - protein, 260 aa, Triticum aestivum
  misc_feature (1)..(260): Ceres Seq. ID no. 15173863
SVLPSPIPCNKISSAQRQQRRMMRAPPRLLSPPSSATAPHLLLYASSAACRLPPSAAAVARSVSVSTTVVDAPAAAAEPGSSDSASATPRRRLILLRHGDSAVGERFTRDHDKPLSKAGRADAISVSDKFHQMGWIPELILCSDATRTKETLQIMQEHVQGLSQALVHFIPSFYSIAAMDGQTAEHLQKAICEYSTDEILTVMCMGHNKGWEEAASMFSGDSVVLKTCNAALLEAAGKSWIEAFSQAGLGGWKLHGIVKP

SEQ ID NO: 13261 - protein, 239 aa, Triticum aestivum
  misc_feature (1)..(239): Ceres Seq. ID no. 15173864
MMRAPPRLLSPPSSATAPHLLLYASSAACRLPPSAAAVARSVSVSTTVVDAPAAAAEPGSSDSASATPRRRLILLRHGDSAVGERFTRDHDKPLSKAGRADAISVSDKFHQMGWIPELILCSDATRTKETLQIMQEHVQGLSQALVHFIPSFYSIAAMDGQTAEHLQKAICEYSTDEILTVMCMGHNKGWEEAASMFSGDSVVLKTCNAALLEAAGKSWIEAFSQAGLGGWKLHGIVKP

SEQ ID NO: 13262 - protein, 238 aa, Triticum aestivum
  misc_feature (1)..(238): Ceres Seq. ID no. 15173865
MRAPPRLLSPPSSATAPHLLLYASSAACRLPPSAAAVARSVSVSTTVVDAPAAAAEPGSSDSASATPRRRLILLRHGDSAVGERFTRDHDKPLSKAGRADAISVSDKFHQMGWIPELILCSDATRTKETLQIMQEHVQGLSQALVHFIPSFYSIAAMDGQTAEHLQKAICEYSTDEILTVMCMGHNKGWEEAASMFSGDSVVLKTCNAALLEAAGKSWIEAFSQAGLGGWKLHGIVKP

SEQ ID NO: 13263 - DNA, 743 bp, Triticum aestivum
  misc_feature (1)..(743): Ceres Seq. ID no. 15173877
aggagcagaaggcgatggcggacgtgcagatgggcagcggcacggagacggagaccttcgcgttccaggcggagatcaaccagctgctcttgctcatcatcaacaccttctactccaacaaggagatcttcctccgcgatctcatctccaactcatcagatgcgcttgacaagatctggttcgagagcctcacggacaagagtcagaccatgcgaacaacctgggcaccatcgtgggctcgggctccaaggagttcatggaggctctgcagggccggggccgtggctgcgccagcaggagtgaagcaagcgctgatatctttgtcggatacaacagacttggctaatctcggaaacaaccttcagagcttggggttctctatcatctccactggtggtacagcgtcaagcttggaagcagctggagtgaatgtgagaaaagttgaatagcttacacattttcctgaaatgattttggccttcattcatcaaaagttggtgtacaaggaactccaggagaagaatcttgaagtaaataatttatatagataaggatcttatgttgtcgtggtggctgctgctgtgaccgaagatcaaaagaagcctggagatgtgcatcatagttttagttgatgttgccaccatgttttggtgcatgtgtatttgattgtatgtacacttgatggatcgtgcagtcgtgtatgtgttgttgtgagtttcatttagtgatttctggatttgatc

SEQ ID NO: 13264 - protein, 148 aa, Triticum aestivum
  misc_feature (1)..(148): Ceres Seq. ID no. 15173878
EQKAMADVQMGSGTETETFAFQAEINQLLLLIINTFYSNKEIFLRDLISNSSDALDKIWFESLTDKSQTMRTTWAPSWARAPRSSWRLCRAGAVAAPAGVKQALISLSDTTDLANLGNNLQSLGFSIISTGGTASSLEAAGVNVRKVE

SEQ ID NO: 13265 - protein, 144 aa, Triticum aestivum
  misc_feature (1)..(144): Ceres Seq. ID no. 15173879
MADVQMGSGTETETFAFQAEINQLLLLIINTFYSNKEIFLRDLISNSSDALDKIWFESLTDKSQTMRTTWAPSWARAPRSSWRLCRAGAVAAPAGVKQALISLSDTTDLANLGNNLQSLGFSIISTGGTASSLEAAGVNVRKVE

SEQ ID NO: 13266 - protein, 139 aa, Triticum aestivum
  misc_feature (1)..(139): Ceres Seq. ID no. 15173880
MGSGTETETFAFQAEINQLLLLIINTFYSNKEIFLRDLISNSSDALDKIWFESLTDKSQTMRTTWAPSWARAPRSSWRLCRAGAVAAPAGVKQALISLSDTTDLANLGNNLQSLGFSIISTGGTASSLEAAGVNVRKVE

SEQ ID NO: 13267 - DNA, 704 bp, Triticum aestivum
  misc_feature (1)..(704): Ceres Seq. ID no. 15173904
atcctataccgattgggttatctgggtggattcccttcttccttttgctgtgtggcggccggcgacccaagcctgaatccccgtcgaggatttatgtgccaagctgcgtactgttctgttttattcctcggaccaaacttgttgagctgattccagcaaggaggaatctgcaaagcagcttggtgttaagcttgcatcttccctaaacagctctagattaaatgggagaagcaagctcggatgatctttgccattgtcaagggtgtcttggcaagtacaccctactcagagatgaagagaacccacagctcgcaaagtttgagagacgccttccttgctttggttgtggaataggatggtcctcatttcttttaggtttcttgtgtccattgctttggtactatgcaacgactctttactgctgcaagtactacaatagggatccccgagagcgcccgggtcttgctgcctctgctattgcggcggccatcttcactaccgcggcaactattaccctctccatcattctgattatctgggcacaaaagtgatttctgaggcagggagaacagggctggatgattggttgtttatcggcagatgagggattcagaaggcaacttctaatgttgaggatagcagatcgttttagttcatcatgtaatcatagtgcatatgcaagtgtttatcgaagggcttcatct

SEQ ID NO: 13268 - protein, 109 aa, Triticum aestivum
  misc_feature (1)..(109): Ceres Seq. ID no. 15173905
MGEASSDDLCHCQGCLGKYTLLRDEENPQLAKFERRLPCFGCGIGWSSFLLGFLCPLLWYYATTLYCCKYYNRDPRERPGLAASAIAAAIFTTAATITLSIILIIWAQK

SEQ ID NO: 13269 - protein, 67 aa, Triticum aestivum
  misc_feature (1)..(67): Ceres Seq. ID no. 15173906
PIPIGLSGWIPFFLLLCGGRRPKPESPSRIYVPSCVLFCFIPRTKLVELIPARRNLQSSLVLSLHLP

SEQ ID NO: 13270 - DNA, 733 bp, Triticum aestivum
  misc_feature (1)..(733): Ceres Seq. ID no. 15173921
caggtgtcaactgtaagataggagtggatataaatacaacatcagctgattcagagaaaactatgccctttttcatgtcaaaaggctggagagagaccctgtgtaaatgtggaacatgcaccaacttctatgcacaacgaggcattgcacatcttactgataaggaggactctattgaggaatatgagaagatagctaagcagaaaagggagaagaagttggagcagcaggaaggagctgaagctaacttcatcaattcacttaaccatgtccagaagatagagattctgagtggcatcaatgacatgaaaaatgagtttcaatcctttatggaatcctttgatccatcaaaaccagttacatctgatgatgtaaaatctattttcgagaatcttgctaggaagaagcagaggttatcctgagcttcagttgcttcaggccttgcttgagcgggtgagcctaatgccctgctgcttctacgccaaaatttccaactgttatctggccaccactgtcttggtgggtactgttaacttatgctgtggccaccatggcgtgtttatctactgtactgtaatgctagcttcgtcgtagttctgctagatgtttcaaagtcagctcgtgatagtgatccgagcgaccagtggagtgaacagcatgtttgttcctttggatcaaaactttgtggtgattcccattacccaaaaatgtgttctccattgcgctgcccttg

SEQ ID NO: 13271 - protein, 139 aa, Triticum aestivum
  misc_feature (1)..(139): Ceres Seq. ID no. 15173922
GVNCKIGVDINTTSADSEKTMPFFMSKGWRETLCKCGTCTNFYAQRGIAHLTDKEDSIEEYEKIAKQKREKKLEQQEGAEANFINSLNHVQKIEILSGINDMKNEFQSFMESFDPSKPVTSDDVKSIFENLARKKQRLS

SEQ ID NO: 13272 - protein, 119 aa, Triticum aestivum
  misc_feature (1)..(119): Ceres Seq. ID no. 15173923
MPFFMSKGWRETLCKCGTCTNFYAQRGIAHLTDKEDSIEEYEKIAKQKREKKLEQQEGAEANFINSLNHVQKIEILSGINDMKNEFQSFMESFDPSKPVTSDDVKSIFENLARKKQRLS

SEQ ID NO: 13273 - protein, 115 aa, Triticum aestivum
  misc_feature (1)..(115): Ceres Seq. ID no. 15173924
MSKGWRETLCKCGTCTNFYAQRGIAHLTDKEDSIEEYEKIAKQKREKKLEQQEGAEANFINSLNHVQKIEILSGINDMKNEFQSFMESFDPSKPVTSDDVKSIFENLARKKQRLS

SEQ ID NO: 13274 - DNA, 797 bp, Triticum aestivum
  misc_feature (1)..(797): Ceres Seq. ID no. 15173925
tagacaaggaaggaatgtggtagaaaatccaaaaatggaagctgaacttcgatacaaggatttgtctcataaatttcacaaaatggcacaaaaagcagccaactctccacaatgttgtattctattggataatgcacttgattccgtcgctccgcatatacatgatttactcaatgcatccactagtgccatgaatgaactatgtaaagacaaagagaatgttgacccaaatgtgcagcaagtagatgagttgcttagatctgcacggctgaagaaaaaagaggttcagtcaaagaacttaaggagatagaaaatttggcttgataagttactcaaggggaagcacagagtaactaaaggaccaacaaaacagggagaaaagccacaaaggaagaaggatggtgtgcaacaaaagaaaaaagatggtgtgcagcctcaagtagaagtcgagaagtatgacaacaacaaagaagtaaatttggtgcttcaagagtgcaataatattatgagtttcacccagctcttgacggctgaccatgataatctgttctagcatggaagctccttagataatattttgtacatggtggtgatcatgatgattatctgttctagcatggaactcgtgagatagtatttaatactgaatttcaatcaagtggtactgaatttgtattgttaaattactgctgttttttgttgctatatgactgctgtttgcatacagttttttttgtatagctaagtttgaaatttaatactgaatttcaatcaagtggtattgaatttgtattgtt

SEQ ID NO: 13275 - protein, 102 aa, Triticum aestivum
  misc_feature (1)..(102): Ceres Seq. ID no. 15173926
RQGRNVVENPKMEAELRYKDLSHKFHKMAQKAANSPQCCILLDNALDSVAPHIHDLLNASTSAMNELCKDKENVDPNVQQVDELLRSARLKKKEVQSKNLRR

SEQ ID NO: 13276 - protein, 91 aa, Triticum aestivum
  misc_feature (1)..(91): Ceres Seq. ID no. 15173927
MEAELRYKDLSHKFHKMAQKAANSPQCCILLDNALDSVAPHIHDLLNASTSAMNELCKDKENVDPNVQQVDELLRSARLKKKEVQSKNLRR

SEQ ID NO: 13277 - protein, 75 aa, Triticum aestivum
  misc_feature (1)..(75): Ceres Seq. ID no. 15173928
MAQKAANSPQCCILLDNALDSVAPHIHDLLNASTSAMNELCKDKENVDPNVQQVDELLRSARLKKKEVQSKNLRR

SEQ ID NO: 13278 - DNA, 668 bp, Triticum aestivum
  misc_feature (1)..(668): Ceres Seq. ID no. 15174006
gcccccccgcagccgaaagcccgaaaccgaagaacccgagagggcgaagccgagaaggggacagcagcgggcgagagaggcagagagaggcgaggagacgagagcaccgtcgccatgagcgccctcaagttctgtagcaaatgcgacaacatgctgtacccgcaggaggacaaggagatgcacaccctcctctacgcttgctcgaattgccagcaccaggagattgctactgatacttgtgtgtacaaaagggttcttcggaaatctgctgatgaacctaaagacaccctaaaagacgcagctgctgacgcgtctctgccacgcaccagaagtgttaaatgctacaactgtggctatccagaagctgcttatttccaggccccgacgaagggagagcttggcctgacgctgtacttcatctgctgcagccctacctgtggccacaggtggagggactgactgactgacaaggggggaaccctccacagaacggagtgttagttcttggcactgaaacttgactggccctgtgttgctcatgacttgcgtttgtcttaacttgttagcttgtggtatctgtgttccgaagtttagggcaacttcatcactgtgggcttactgcttctgagcttgttctcttcaatctatatatatgcagatgttggttg

SEQ ID NO: 13279 - protein, 152 aa, Triticum aestivum
  misc_feature (1)..(152): Ceres Seq. ID no. 15174007
APPQPKARNRRTREGEAEKGTAAGERGRERRGDESTVAMSALKFCSKCDNMLYPQEDKEMHTLLYACSNCQHQEIATDTCVYKRVLRKSADEPKDTLKDAAADASLPRTRSVKCYNCGYPEAAYFQAPTKGELGLTLYFICCSPTCGHRWRD

SEQ ID NO: 13280 - protein, 114 aa, Triticum aestivum
  misc_feature (1)..(114): Ceres Seq. ID no. 15174008
MSALKFCSKCDNMLYPQEDKEMHTLLYACSNCQHQEIATDTCVYKRVLRKSADEPKDTLKDAAADASLPRTRSVKCYNCGYPEAAYFQAPTKGELGLTLYFICCSPTCGHRWRD

SEQ ID NO: 13281 - protein, 102 aa, Triticum aestivum
  misc_feature (1)..(102): Ceres Seq. ID no. 15174009
MLYPQEDKEMHTLLYACSNCQHQEIATDTCVYKRVLRKSADEPKDTLKDAAADASLPRTRSVKCYNCGYPEAAYFQAPTKGELGLTLYFICCSPTCGHRWRD

SEQ ID NO: 13282 - DNA, 746 bp, Triticum aestivum
  misc_feature (1)..(746): Ceres Seq. ID no. 15174052
gctgatccactcgcatcaaatcttggcacacgcacatacatttatatgtaatctgcatcgcgattttgattcagatagatagatagatggtgacgacgatggggcacgtggtggcgctcctctccgctgccctctccggcggcgtggtcggctgcagtcgccacgacgaccactaccactcgggcggctgctgcgtgtgcatatcaaggttccgcgacggggaggacatacgcagcctgccgtgcggccacgccttccaccggcaatgcgtcgacaggtggttggcgctgtgccgccggacctgcccgctctgccgcctgcacgtcggcggcgtgacagatgagcaccagctcagcgacgacctcgtcatctggttctcttctctcttcgtcgccggcttgtagcctgtaggaacatcagtccatcgctgctctgcggtgtaggctcttagtcgatgagcatgtcaagcatttctcatggagaaatctcaccgctcgtggcgggccctacttctaccccttgttctaggctttgcttcactgatataagtgataaacagttcaatatggaggctcatggcaccaaaaagttaaattatgtcaaacagacagacgtccttctcattatacaacatgggtgaagtgtgccaacagttattctagttgtcccgacagttattcatgtatacattctttgcggccgcaagttggttgcttcaaaacaacaagttactgtaactaattcac

SEQ ID NO: 13283 - protein, 105 aa, Triticum aestivum
  misc_feature (1)..(105): Ceres Seq. ID no. 15174053
MVTTMGHVVALLSAALSGGVVGCSRHDDHYHSGGCCVCISRFRDGEDIRSLPCGHAFHRQCVDRWLALCRRTCPLCRLHVGGVTDEHQLSDDLVIWFSSLFVAGL

SEQ ID NO: 13284 - protein, 101 aa, Triticum aestivum
  misc_feature (1)..(101): Ceres Seq. ID no. 15174054
MGHVVALLSAALSGGVVGCSRHDDHYHSGGCCVCISRFRDGEDIRSLPCGHAFHRQCVDRWLALCRRTCPLCRLHVGGVTDEHQLSDDLVIWFSSLFVAGL

SEQ ID NO: 13285 - protein, 61 aa, Triticum aestivum
  misc_feature (1)..(61): Ceres Seq. ID no. 15174055
MSMSSISHGEISPLVAGPTSTPCSRLCFTDISDKQFNMEAHGTKKLNYVKQTDVLLIIQHG

SEQ ID NO: 13286 - DNA, 544 bp, Triticum aestivum
  misc_feature (1)..(544): Ceres Seq. ID no. 15174132
tttcgacgctgccgacgccgagttctgcggcctcaggggcatgatagactccaggatcatcaacaccaaccatctcgccgcgttcagcaagttcgtgcagctggccatccggtgcgtggaggagggcgctgccgcccgaccgtccatgagcgacgtcgtcaaggagatcgagatgatgctgcagaacgaggggctcagcagcgcctccacgtctgcgaccgacttcgacgtcactaaaaccgctcctcgccacccttacaacgatcctctcccaaagaaggacaaggacatgagcacagactcattcgacgactacagcggaggatattctttccagtcaaaggtccaaccaaagtagctggtttctgctagggattctatgctggccggaccttttcttcctccctcctcaccaagtagcttgcctaatacagtatgtcgacatgtcaagaatttttattctatgtgatttaccattaacactctcttattagagtggttttgtatggccatgttctaatcaaaacgttgttacttacggctg

SEQ ID NO: 13287 - protein, 118 aa, Triticum aestivum
  misc_feature (1)..(118): Ceres Seq. ID no. 15174133
FDAADAEFCGLRGMIDSRIINTNHLAAFSKFVQLAIRCVEEGAAARPSMSDVVKEIEMMLQNEGLSSASTSATDFDVTKTAPRHPYNDPLPKKDKDMSTDSFDDYSGGYSFQSKVQPK

SEQ ID NO: 13288 - protein, 105 aa, Triticum aestivum
  misc_feature (1)..(105): Ceres Seq. ID no. 15174134
MIDSRIINTNHLAAFSKFVQLAIRCVEEGAAARPSMSDVVKEIEMMLQNEGLSSASTSATDFDVTKTAPRHPYNDPLPKKDKDMSTDSFDDYSGGYSFQSKVQPK

SEQ ID NO: 13289 - protein, 78 aa, Triticum aestivum
  misc_feature (1)..(78): Ceres Seq. ID no. 15174135
FRRCRRRVLRPQGHDRLQDHQHQPSRRVQQVRAAGHPVRGGGRCRPTVHERRRQGDRDDAAERGAQQRLHVCDRLRRH

SEQ ID NO: 13290 - DNA, 966 bp, Triticum aestivum
  misc_feature (1)..(966): Ceres Seq. ID no. 15174225
actcgaccctgcctccagtccatagccatacaccaccaccttcctcccaagtcccaagcgaacaaacactcgatcgcttcgatggcgactctgcggcggtgctccgggctgttgctcgcggcggtggcgctggcgctggcggcggggatggcggcggcgcaggggccggccggcgcgccggcgccggcggccgggatcagctcggagtgcatgaccgcggtgctcaacatgtccgactgcctgccgtacgtggagagcgggagcaagacgcggcacccggacaaggcctgctgcccggagctggacggcctgctgcagtccaaccccgtctgcctctgccagctgctcgccggcggcgccgactcctacggaatcagcgtcgactacaagcgcgccatggcgctgcccggcgtctgccgcctcaacgcgccgcccctcagcgcctgcgcagcttttggagtccccgtggggccttcttcggcgccattaacaggagtgccctctccatccgctacaggaccactgatgcctgagaacccgccatccgcaacgccgtccaagtcgaagtcccacgccccgggccgcctcaacggccgcggcctcgtcgccctcgccgcgctgccgctggcgatcacggccgccgccatgttctagggcagcaagagttcgcggacgtgtggcattgtgccggtctcacacgcttggcccgatgagatcacattcttctccattcttgcctcacattctcattgctgtacacgagagattatttttctggttgatccatttccttgtcgcaattcccttacctgtgtgtaatctgctagagatggttgacagtctgtgtattacgtagatttgcattgctgctactaaattaattctttcgttatgtgtctcttcctcttatatataatactagcaagatgcccgtgcattgcacggaacattaagatgtattttttt

SEQ ID NO: 13291 - protein, 217 aa, Triticum aestivum
  misc_feature (1)..(217): Ceres Seq. ID no. 15174226
TRPCLQSIAIHHHLPPKSQANKHSIASMATLRRCSGLLLAAVALALAAGMAAAQGPAGAPAPAAGISSECMTAVLNMSDCLPYVESGSKTRHPDKACCPELDGLLQSNPVCLCQLLAGGADSYGISVDYKRAMALPGVCRLNAPPLSACAAFGVPVGPSSAPLTGVPSPSATGPLMPENPPSATPSKSKSHAPGRLNGRGLVALAALPLAITAAAMF

SEQ ID NO: 13292 - protein, 190 aa, Triticum aestivum
  misc_feature (1)..(190): Ceres Seq. ID no. 15174227
MATLRRCSGLLLAAVALALAAGMAAAQGPAGAPAPAAGISSECMTAVLNMSDCLPYVESGSKTRHPDKACCPELDGLLQSNPVCLCQLLAGGADSYGISVDYKRAMALPGVCRLNAPPLSACAAFGVPVGPSSAPLTGVPSPSATGPLMPENPPSATPSKSKSHAPGRLNGRGLVALAALPLAITAAAMF

SEQ ID NO: 13293 - protein, 176 aa, Triticum aestivum
  misc_feature (1)..(176): Ceres Seq. ID no. 15174228
STLPPVHSHTPPPSSQVPSEQTLDRFDGDSAAVLRAVARGGGAGAGGGDGGGAGAGRRAGAGGRDQLGVHDRGAQHVRLPAVRGEREQDAAPGQGLLPGAGRPAAVQPRLPLPAARRRRRLLRNQRRLQARHGAARRLPPQRAAPQRLRSFWSPRGAFFGAINRSALSIRYRTTDA

SEQ ID NO: 13294 - DNA, 954 bp, Triticum aestivum
  misc_feature (1)..(954): Ceres Seq. ID no. 15174256
accatatcctctcccattgactgctgcacccccagcgtccgcatcccgctgccgcttcccgatggcctccagcgcccccctcgaaggagtatctcatgatgcaggggtcacggtgtccacatcagagagtgttggtcagaatgacttgctgattgtcgggcctggtgtgcttggtcgaatcgtagctgagaaatggcgacaggagcatccagattgcaaaatttatggccagactgcaaccacagatcatcacagtgaactaactaaaattgggataattccctccctgaagggacccagagttgatcagaaagttccgtacgttattttctgtgctcctccatatcgcacggatgattaccctggggatcttagagttgctgcatcaaactggagtggggaaggctctttcctgtttacatcaagtactgccgtgtatgactgcaatgacaatggattttgtggcgaggattctccttgtgtgccgattggatgctgcttcgcttggaattgccatcatgaagaggagacttcgcgggcgtgtctttgtgggctgtgacaaccaacctctgtccaggcaagaaataatggaccgtgttaacaggagcgggaaatttgatggcaagtttgagggcttcacaggtacagacggtccattggggaagaggatggataattccaaaactcgggctgagatcggctgggagcccaaatatcctagtttcacagaattccttggtctcagcaattgacatcttgccagctgcaacatccctctgattccatatgtaaatcaataccgatttgatagcagatacaatctgcattatgaatttcttcgacagttgtcctaaagttcctcctccttatgttagtgtaagcatgagtaggtacctccaaagttatctggactctttgatcggtattaagttcaatacaaatatagatccaagc

SEQ ID NO: 13295 - protein, 185 aa, Triticum aestivum
  misc_feature (1)..(185): Ceres Seq. ID no. 15174257
PYPLPLTAAPPASASRCRFPMASSAPLEGVSHDAGVTVSTSESVGQNDLLIVGPGVLGRIVAEKWRQEHPDCKIYGQTATTDHHSELTKIGIIPSLKGPRVDQKVPYVIFCAPPYRTDDYPGDLRVAASNWSGEGSFLFTSSTAVYDCNDNGFCGEDSPCVPIGCCFAWNCHHEEETSRACLCGL

SEQ ID NO: 13296 - protein, 165 aa, Triticum aestivum
  misc_feature (1)..(165): Ceres Seq. ID no. 15174258
MASSAPLEGVSHDAGVTVSTSESVGQNDLLIVGPGVLGRIVAEKWRQEHPDCKIYGQTATTDHHSELTKIGIIPSLKGPRVDQKVPYVIFCAPPYRTDDYPGDLRVAASNWSGEGSFLFTSSTAVYDCNDNGFCGEDSPCVPIGCCFAWNCHHEEETSRACLCGL

SEQ ID NO: 13297 - protein, 132 aa, Triticum aestivum
  misc_feature (1)..(132): Ceres Seq. ID no. 15174259
MITLGILELLHQTGVGKALSCLHQVLPCMTAMTMDFVARILLVCRLDAASLGIAIMKRRLRGRVFVGCDNQPLSRQEIMDRVNRSGKFDGKFEGFTGTDGPLGKRMDNSKTRAEIGWEPKYPSFTEFLGLSN

SEQ ID NO: 13298 - DNA, 825 bp, Triticum aestivum
  misc_feature (1)..(825): Ceres Seq. ID no. 15174260
aatatggctaaagttgtcgagggtcatcgcaggttcatgggtttcaagaagacaatcttgctagatcgaaaactcatcgtcgacctagcagaccagtacaacaacggctcgttgcgatgggatgagttctctttgctgatcaaggctgcccacgcagggcggatgggatcagcctcaaagcggacagtgattcccgacagacccaaggaggaggactacttctacgcgaacccccaggagtgcctgcaagaccccgaccgcctacgcacgtcatgataaccgccgccacccctgtcaatatttccacccaccttataccattcttttcacagacgcagcagccgaaccagaggccaggttcgtcgttacttcgaagaaaccaaccgaaagaggggcggctcggctcgccataggtgtaaaactcggggagggggtgggcgtgggtgttgtatatcttggatgtagctgcctagctggtaaatactctacacgttatagaaatggagggcggtttattcgttcgttccacggaaaataatgaggagtcatactgaagatactcttgtatagaagatggtgatgatagagtctactaccacgaagaggaaaggtaaatttgagtgaggggagagatggctggacccacatgtctgtctctggctggtcttcttttggttgtgtaaaacatactagcagttgttcttctccgtagcctcccccgtgctccctccccgtcagtcaggcagggcttatttttttgtcaatcaaagttgctgagagttgtatactacagtgtttatattggatcgatgtggttacctgtgc

SEQ ID NO: 13299 - protein, 91 aa, Triticum aestivum
  misc_feature (1)..(91): Ceres Seq. ID no. 15174261
NMAKVVEGHRRFMGFKKTILLDRKLIVDLADQYNNGSLRWDEFSLLIKAAHAGRMGSASKRTVIPDRPKEEDYFYANPQECLQDPDRLRTS

SEQ ID NO: 13300 - protein, 90 aa, Triticum aestivum
  misc_feature (1)..(90): Ceres Seq. ID no. 15174262
MAKVVEGHRRFMGFKKTILLDRKLIVDLADQYNNGSLRWDEFSLLIKAAHAGRMGSASKRTVIPDRPKEEDYFYANPQECLQDPDRLRTS

SEQ ID NO: 13301 - protein, 79 aa, Triticum aestivum
  misc_feature (1)..(79): Ceres Seq. ID no. 15174263
MGFKKTILLDRKLIVDLADQYNNGSLRWDEFSLLIKAAHAGRMGSASKRTVIPDRPKEEDYFYANPQECLQDPDRLRTS

SEQ ID NO: 13302 - DNA, 568 bp, Triticum aestivum
  misc_feature (1)..(568): Ceres Seq. ID no. 15174285
ccaagcacaccagcctcctcactcctcacagcatcctctcagtccttagcttccttccctcgccaccacccacagccaaggaggatgtcttgctgcggcggcaactgcgggtgcggcgccggctgcaagtgcggcaacggctgcggcgggtgcaagatgttccccgacgtggaggccaccgccggcgcggccgccatggtcatgcccaccgcctcccacaaggggagctccggcgggttcgagatggccggcggggagaccggcggctgcgactgcaccacgtgcaagtgcggcaccgcgtgcggctgctcctgctgcagctgcaactgagccggcgcccaggaggccggccggcagaggcgagcacgaggatgaggaggagaagcaagcaatcatcatcaccatcaccaccacccagcgtatcagtaccactagccgccgcatgcgctcgcgcgcgcgctaaataaaataaaaccgtcatgtgttccttagttctgtacgcctcgcgtgtagtgttcgaccagtgtccctcctcatgcctccacttctagtgaatatatggcgccgc

SEQ ID NO: 13303 - protein, 154 aa, Triticum aestivum
  misc_feature (1)..(154): Ceres Seq. ID no. 15174286
KHTSLLTPHSILSVLSFLPSPPPTAKEDVLLRRQLRVRRRLQVRQRLRRVQDVPRRGGHRRRGRHGHAHRLPQGELRRVRDGRRGDRRLRLHHVQVRHRVRLLLLQLQLSRRPGGRPAEASTRMRRRSKQSSSPSPPPSVSVPLAAACARARAK

SEQ ID NO: 13304 - protein, 109 aa, Triticum aestivum
  misc_feature (1)..(109): Ceres Seq. ID no. 15174287
PSTPASSLLTASSQSLASFPRHHPQPRRMSCCGGNCGCGAGCKCGNGCGGCKMFPDVEATAGAAAMVMPTASHKGSSGGFEMAGGETGGCDCTTCKCGTACGCSCCSCN

SEQ ID NO: 13305 - protein, 81 aa, Triticum aestivum
  misc_feature (1)..(81): Ceres Seq. ID no. 15174288
MSCCGGNCGCGAGCKCGNGCGGCKMFPDVEATAGAAAMVMPTASHKGSSGGFEMAGGETGGCDCTTCKCGTACGCSCCSCN

SEQ ID NO: 13306 - DNA, 572 bp, Triticum aestivum
  misc_feature (1)..(572): Ceres Seq. ID no. 15174361
ttttaaggatgctgctacctttttggtctagtgccctgccaacattaccagttacagcaccccctaaaaaggaaaatgatgctccagaaggccggtcacgacatcagaggacgtcacgaatcgatcccacaaagatcttacttgcaatggcaatcatggcatgtatagcaacgatgggaattctctactaccggttgtcgcagcgcagtctttctgaaaactttgcccatgatgaggctcagtagtagagttgaaacttccaacttgcagtttgtttctggtactgccttgctgctgattcaagggttttaccctgcctgtattattttccatttccccctttttgggcctttcagggtggttgtggatgggaaggtggaggtagtgattatagttacataagagttatagcagactggttttatatgctgattcatctgttatcttataccagacgggaaattgttgaagttgtcaactattttcttattcctgttgtcgcgccttctgaactgctacaggtgttactttgatcgagccattctaaaacatcgctgtgttatttctccagc

SEQ ID NO: 13307 - protein, 80 aa, Triticum aestivum
  misc_feature (1)..(80): Ceres Seq. ID no. 15174362
LRMLLPFWSSALPTLPVTAPPKKENDAPEGRSRHQRTSRIDPTKILLAMAIMACIATMGILYYRLSQRSLSENFAHDEAQ

SEQ ID NO: 13308 - protein, 78 aa, Triticum aestivum
  misc_feature (1)..(78): Ceres Seq. ID no. 15174363
MLLPFWSSALPTLPVTAPPKKENDAPEGRSRHQRTSRIDPTKILLAMAIMACIATMGILYYRLSQRSLSENFAHDEAQ

SEQ ID NO: 13309 - protein, 57 aa, Triticum aestivum
  misc_feature (1)..(57): Ceres Seq. ID no. 15174364
MMRLSSRVETSNLQFVSGTALLLIQGFYPACIIFHFPLFGPFRVVVDGKVEVVIIVT

SEQ ID NO: 13310 - DNA, 1866 bp, Triticum aestivum
  misc_feature (1)..(1866): Ceres Seq. ID no. 15174867
atcagtcgacatcgccacaggttgccgctagcagcagttaatcactactcagctggcctattaactcactgatccttctgctaagctgcttgatagttcgactgcattaattccctcgcaccccaccccacgcatggctccaccgtcgcagtgcttcgacgccatgcacagcgcggccaacaatggcgccgccccggcggtggctgacgcaaagccgcagtgccccgccgtgctcgacgccgacgtgttccggcgccagggacacgaggtcatcgacttcattgccgagtactacggcggcatgggggactaccccgtgcaccccagcgtcacgcccggcttccttcgcaatgtgctccccgcggaggcgccgtcccgcccggagcccgacgcgttcggctccgcgctgcgggacgtccgcgacctcatcctcccgggcatgacgcactggcagagcccccgccacttcgcgcacttcccggcgtccagcagcaccgtcggggccctcggggaggcgctcattgccggcatcaacgtggtgcccttcacgtgggccgcctcgccggccgccaccgagctggagatggtggtcgtggactggctcggcaaggcgctgcatttgccggagagcctcctgttcgccggcggcggcgggggcacgcttctgggcacctcgtgcgaggccatactctgcgccctcgtcgccgccagggacaagaagctcgccgagatcggcgagaggaggatcggcgaccttgtcgtctactgctccgaccagacccatttcgccttccgcaaggctgcgcgcatcgccgggatcccgcgggaccactgccgcgcgatacacacgtgccgcgaagacatgttcgcgctctcgcccacggagctgcaggccgccatgcaggccgacgtggacgccgggctggtgccgctgttcctgtgcgcgaccgtcgggaccacccagacgaccgccgttgaccccatcggcaagctctgcaccgtggcggcgtcccacggcgtgtgggtccacgtcgacgcggcctacaccggctcggcgctggtctgcccggagttccggcacgtgatcgacggcgtagaggccgtggactcgttcagcatgaacgcccacaagtggctcctggccaacaacgactgctgcgcgatgtgggtgaagaggccgagcgagctcgtggcggcgctgggcacggagcaggagtacatcctcaaggacgcggcgtcgaaggggcacgacgtggtggactacaaggactggaccatgacgctgacccgccggtttcgcgcgctcaagatgtggctcgtgctccgctgctacggcgtggacggcctgcgcgaccacatccgctcccacgtgcgcatggccgaggcgttcgaggacatggtgcgggccgacgagaggttcgaggtggtgacggacaggcagttcgcgctggtgtgcttccggctccggtcgccggagaggttcggcggcgagaagacggccaacgagctcaaccggggcctgctcgaggaggtgaacgcggtcggcccgggcccgtacatgagctccgcgaacgtgggcggcgtctacatgctcaggtgcgccgtcgggagcacgctcacggaggagcaccacgtcgctgacgcatggaaggtggtccaggatcgggcctcggtaatcctccggaaaatggaaattatttacagcgtgcttggttaaagttcgggcgaggtgaatatatatgtttctctatgtaaaatctacctgcagacattacttgatcctaattaagtctcgacctcaattaggtcgtcggaaccatgcggatttgtatttgatatttatatatatgaagcaatttactggtt

SEQ ID NO: 13311 - protein, 527 aa, Triticum aestivum
  misc_feature (1)..(527): Ceres Seq. ID no. 15174868
MAPPSQCFDAMHSAANNGAAPAVADAKPQCPAVLDADVFRRQGHEVIDFIAEYYGGMGDYPVHPSVTPGFLRNVLPAEAPSRPEPDAFGSALRDVRDLILPGMTHWQSPRHFAHFPASSSTVGALGEALIAGINVVPFTWAASPAATELEMVVVDWLGKALHLPESLLFAGGGGGTLLGTSCEAILCALVAARDKKLAEIGERRIGDLVVYCSDQTHFAFRKAARIAGIPRDHCRAIHTCREDMFALSPTELQAAMQADVDAGLVPLFLCATVGTTQTTAVDPIGKLCTVAASHGVWVHVDAAYTGSALVCPEFRHVIDGVEAVDSFSMNAHKWLLANNDCCAMWVKRPSELVAALGTEQEYILKDAASKGHDVVDYKDWTMTLTRRFRALKMWLVLRCYGVDGLRDHIRSHVRMAEAFEDMVRADERFEVVTDRQFALVCFRLRSPERFGGEKTANELNRGLLEEVNAVGPGPYMSSANVGGVYMLRCAVGSTLTEEHHVADAWKVVQDRASVILRKMEIIYSVLG

SEQ ID NO: 13312 - protein, 517 aa, Triticum aestivum
  misc_feature (1)..(517): Ceres Seq. ID no. 15174869
MHSAANNGAAPAVADAKPQCPAVLDADVFRRQGHEVIDFIAEYYGGMGDYPVHPSVTPGFLRNVLPAEAPSRPEPDAFGSALRDVRDLILPGMTHWQSPRHFAHFPASSSTVGALGEALIAGINVVPFTWAASPAATELEMVVVDWLGKALHLPESLLFAGGGGGTLLGTSCEAILCALVAARDKKLAEIGERRIGDLVVYCSDQTHFAFRKAARIAGIPRDHCRAIHTCREDMFALSPTELQAAMQADVDAGLVPLFLCATVGTTQTTAVDPIGKLCTVAASHGVWVHVDAAYTGSALVCPEFRHVIDGVEAVDSFSMNAHKWLLANNDCCAMWVKRPSELVAALGTEQEYILKDAASKGHDVVDYKDWTMTLTRRFRALKMWLVLRCYGVDGLRDHIRSHVRMAEAFEDMVRADERFEVVTDRQFALVCFRLRSPERFGGEKTANELNRGLLEEVNAVGPGPYMSSANVGGVYMLRCAVGSTLTEEHHVADAWKVVQDRASVILRKMEIIYSVLG

SEQ ID NO: 13313 - protein, 471 aa, Triticum aestivum
  misc_feature (1)..(471): Ceres Seq. ID no. 15174870
MGDYPVHPSVTPGFLRNVLPAEAPSRPEPDAFGSALRDVRDLILPGMTHWQSPRHFAHFPASSSTVGALGEALIAGINVVPFTWAASPAATELEMVVVDWLGKALHLPESLLFAGGGGGTLLGTSCEAILCALVAARDKKLAEIGERRIGDLVVYCSDQTHFAFRKAARIAGIPRDHCRAIHTCREDMFALSPTELQAAMQADVDAGLVPLFLCATVGTTQTTAVDPIGKLCTVAASHGVWVHVDAAYTGSALVCPEFRHVIDGVEAVDSFSMNAHKWLLANNDCCAMWVKRPSELVAALGTEQEYILKDAASKGHDVVDYKDWTMTLTRRFRALKMWLVLRCYGVDGLRDHIRSHVRMAEAFEDMVRADERFEVVTDRQFALVCFRLRSPERFGGEKTANELNRGLLEEVNAVGPGPYMSSANVGGVYMLRCAVGSTLTEEHHVADAWKVVQDRASVILRKMEIIYSVLG

SEQ ID NO: 13314 - DNA, 463 bp, Triticum aestivum
  misc_feature (1)..(463): Ceres Seq. ID no. 15175003
aattgctttgtctcatcgagttatgatgccactactcactttgagacgactgtgacagatgttcttaatatgtacacactgattactggaaagactgttgatcttagcgttgatctcagtgctgccagcgctgcagaagagtactagatctcaaacccagaattttcttcaagacatacttcctggaggacgaggaacaccaccggaatcctactgtgtgatggtcacgtgtgacatcagctgcgtactgcgtagggttccaggtccacgcctgctaccagcactatgcgaaattattatctttggaatggtgctgggttccttcgttaacttccatattgatccactgggttgtaaacgttattctatcataacgatggctttgacatgttaatgttcgtcttgtcgatgtattctacagttatacatattggtgtcttggatgtattttccgtttcgagtg

SEQ ID NO: 13315 - protein, 57 aa, Triticum aestivum
  misc_feature (1)..(57): Ceres Seq. ID no. 15175004
MVTCDISCVLRRVPGPRLLPALCEIIIFGMVLGSFVNFHIDPLGCKRYSIITMALTC

SEQ ID NO: 13316 - protein, 48 aa, Triticum aestivum
  misc_feature (1)..(48): Ceres Seq. ID no. 15175005
NCFVSSSYDATTHFETTVTDVLNMYTLITGKTVDLSVDLSAASAAEEY

SEQ ID NO: 13317 - DNA, 457 bp, Triticum aestivum
  misc_feature (1)..(457): Ceres Seq. ID no. 15175006
atcattgctctgtcagttcccttctttgcgcttgtgatggctctgattggttctttattcgcgatgcttgtgacctacattcttccttgcgcctgctttctggccatcctcaaggcaaaagcgacttggtatcagactgcgacatgctcattcatcatcgccgtaggggttacctgcgcctgcgtggggacatactcatccctctccgggattgtccagaactacgcaacctgattctccctacatacataattgagaagattgctcgttcaaccgcgttattatacatataattaagcatatgtatgagcgagagtggaggattcaaattttgccgaacaatgaattatgtccatcgatatataaatgttgtatgattaaatttgtattgctgttaaatttgtggcaaccccgataactttgcattattattgttaaatttgtgtgttgatggatc

SEQ ID NO: 13318 - protein, 96 aa, Triticum aestivum
  misc_feature (1)..(96): Ceres Seq. ID no. 15175007
HCSVSSLLCACDGSDWFFIRDACDLHSSLRLLSGHPQGKSDLVSDCDMLIHHRRRGYLRLRGDILIPLRDCPELRNLILPTYIIEKIARSTALLYI

SEQ ID NO: 13319 - protein, 77 aa, Triticum aestivum
  misc_feature (1)..(77): Ceres Seq. ID no. 15175008
IIALSVPFFALVMALIGSLFAMLVTYILPCACFLAILKAKATWYQTATCSFIIAVGVTCACVGTYSSLSGIVQNYAT

SEQ ID NO: 13320 - protein, 65 aa, Triticum aestivum
  misc_feature (1)..(65): Ceres Seq. ID no. 15175009
MALIGSLFAMLVTYILPCACFLAILKAKATWYQTATCSFIIAVGVTCACVGTYSSLSGIVQNYAT

SEQ ID NO: 13321 - protein, 49 aa, Triticum aestivum
  misc_feature (1)..(49): Ceres Seq. ID no. 15175010
MLIHHRRRGYLRLRGDILIPLRDCPELRNLILPTYIIEKIARSTALLYI

SEQ ID NO: 13322 - DNA, 887 bp, Triticum aestivum
  misc_feature (1)..(887): Ceres Seq. ID no. 15175022
agagtccttcccgagcgcggacagcgggctcctaccagcagcgtctccctccgacctccctggagcagccgctcacgcccagcaacgtcgccgcccggatctacgccgtcgaccattccataggcagggcatcaacactgtcaattgcagaggcttggacctgcttcggcatccagtagagcaaacaagaaggtcaagccggaaacaaatatttcatcctcgttcggacttctcatctcgcaatggaagccaagttctttcggttcctgaagcttgttggagttggcttcaaagccaggacagagcgcgaaggccgcgagttgtttctgaaactgggctacagccatgaggtgcagttcaccgctccacctgccgtccgcgtcttctgcttcaagcccaacataatatgctgtactggcattgacaagcatagagtgcaccatttcgctggagctgtccgatgcagtaaacctccagaagtgtacaaggggaagggcatactgtacatcgacgaggtcataaagctgaagccggggaagaaacagcagaagaagtaacacatgggtaaacctccccatttgacttctagcttgtttagacgccccatcacatttgtggtgccgcggatttcatgtggtttttctcgtgccgggttttggctagccctagtaccatgctggacttcgtaataatactctgtatgctatgggaatcatctggtgagcatgtactgtatgacttgcataccgtgggggcggatcagcacatttgaacatttgtgtttttgttttgggctggctagatgcatgtaacagcccaatgtgtttgttgatgtcactactttcttcatattttctctacacaatattagctcgttgctttgttac

SEQ ID NO: 13323 - protein, 115 aa, Triticum aestivum
  misc_feature (1)..(115): Ceres Seq. ID no. 15175023
ESFPSADSGLLPAASPSDLPGAAAHAQQRRRPDLRRRPFHRQGINTVNCRGLDLLRHPVEQTRRSSRKQIFHPRSDFSSRNGSQVLSVPEACWSWLQSQDRARRPRVVSETGLQP

SEQ ID NO: 13324 - protein, 104 aa, Triticum aestivum
  misc_feature (1)..(104): Ceres Seq. ID no. 15175024
MEAKFFRFLKLVGVGFKARTEREGRELFLKLGYSHEVQFTAPPAVRVFCFKPNIICCTGIDKHRVHHFAGAVRCSKPPEVYKGKGILYIDEVIKLKPGKKQQKK

SEQ ID NO: 13325 - protein, 58 aa, Triticum aestivum
  misc_feature (1)..(58): Ceres Seq. ID no. 15175025
SPSRARTAGSYQQRLPPTSLEQPLTPSNVAARIYAVDHSIGRASTLSIAEAWTCFGIQ

SEQ ID NO: 13326 - DNA, 750 bp, Triticum aestivum
  misc_feature (1)..(750): Ceres Seq. ID no. 15175269
aacacctccaactcaaaaggcccccactttgccgtctctttcacctaacaataatatctgcctacctgtcttgcacaccatacaggtccaagcccgcccgcccgcccatagagctcgccgcctccctccctgtctccttccccgcctctctctcgtcgtcgtcccccgcagcgccggccgaagcaaagcacggggacttaaccgccgccatgagctactacggccagcagcagccgcccgtcggcgcgcctccaccgcaagggtatccaggaaaagaggagtacccgccggcaggctaccctccggccgggtacccaccgccggggcagggacaaggctaccctccccagggatacccgccgcagcaggggggttatccgccgcagcaggggtatccgccacagcagggagggtacccgccgcagcaagggtacccgcagcaggggtacccgcctcagtacgcgcagcagccgccgcggcagcagcagagcagtggcccgtccttcatggagggatgcctggccgccctttgttgctgctgtctgttggatgcttgcttctaagttgatttctaagcggcagggaacagacttggtgcagctgctatgtgttccatattggaaattgggattggcttgttgattaatagtagtacttcgtagaggagattacaagaactccttaccgtcatgtttgtatgttcagatgattggtgtaccttttcgcataaaaaaagatgtttgttgtaag

SEQ ID NO: 13327 - protein, 188 aa, Triticum aestivum
  misc_feature (1)..(188): Ceres Seq. ID no. 15175270
TPPTQKAPTLPSLSPNNNICLPVLHTIQVQARPPAHRARRLPPCLLPRLSLVVVPRSAGRSKARGLNRRHELLRPAAAARRRASTARVSRKRGVPAGRLPSGRVPTAGAGTRLPSPGIPAAAGGLSAAAGVSATAGRVPAAARVPAAGVPASVRAAAAAAAAEQWPVLHGGMPGRPLLLLSVGCLLLS

SEQ ID NO: 13328 - protein, 186 aa, Triticum aestivum
  misc_feature (1)..(186): Ceres Seq. ID no. 15175271
HLQLKRPPLCRLFHLTIISAYLSCTPYRSKPARPPIELAASLPVSFPASLSSSSPAAPAEAKHGDLTAAMSYYGQQQPPVGAPPPQGYPGKEEYPPAGYPPAGYPPPGQGQGYPPQGYPPQQGGYPPQQGYPPQQGGYPPQQGYPQQGYPPQYAQQPPRQQQSSGPSFMEGCLAALCCCCLLDACF

SEQ ID NO: 13329 - protein, 117 aa, Triticum aestivum
  misc_feature (1)..(117): Ceres Seq. ID no. 15175272
MSYYGQQQPPVGAPPPQGYPGKEEYPPAGYPPAGYPPPGQGQGYPPQGYPPQQGGYPPQQGYPPQQGGYPPQQGYPQQGYPPQYAQQPPRQQQSSGPSFMEGCLAALCCCCLLDACF

SEQ ID NO: 13330 - DNA, 583 bp, Triticum aestivum
  misc_feature (1)..(583): Ceres Seq. ID no. 15175332
gaataagtgatttcaaacatgcacatgaacaggtttgtgcaagtgtatcttgtgattcaacgaatatgaatgagcttgttcagtggaatgatgtctacggagaaggtgggtcgaggaaaacgacaacgctaagctacttcatgtagcgatgttgagagcatgtacatacatgataaacgttagcacagagcaatggctgcgattggaggggggctacagcaaaaagaagtgtaggcatcagatcaagaagggaccgtcacagtgagagcaacggagggatgcaaatctggttgatgccttgtggcaggtcaacaagagcacagcagacatggcctgctccagcgcatcaccatccaaaggagatagatttgtatttgtagcagtcgggccggccatcgtttttcgtcggtttattattgagaatctttgtttagattgcaagttgtagaacctgtgcaagtgtacagtatgaatgagaatcaggccaggtcaattaacttgttattgtggtcagttcagggaaatattcattttattttattaaccagaagattaattcattacttggtgcttcgacgatttg

SEQ ID NO: 13331 - protein, 47 aa, Triticum aestivum
  misc_feature (1)..(47): Ceres Seq. ID no. 15175333
ISDFKHAHEQVCASVSCDSTNMNELVQWNDVYGEGGSRKTTTLSYFM

SEQ ID NO: 13332 - protein, 39 aa, Triticum aestivum
  misc_feature (1)..(39): Ceres Seq. ID no. 15175334
MACSSASPSKGDRFVFVAVGPAIVFRRFIIENLCLDCKL

SEQ ID NO: 13333 - protein, 38 aa, Triticum aestivum
  misc_feature (1)..(38): Ceres Seq. ID no. 15175335
MLRACTYMINVSTEQWLRLEGGYSKKKCRHQIKKGPSQ

SEQ ID NO: 13334 - DNA, 571 bp, Triticum aestivum
  misc_feature (1)..(571): Ceres Seq. ID no. 15175340
accgtacgtggagaacacggtttcccacagcaaaagttgatgactgcgccgctgtctgtctattcttgaaaacagatttggcaaataaattgtccgattcaggaaccaaagatttcggaactaatgtggaactggacggtgataagcatttctcgactgtcaaatcaagcaccgtggctcctacagatcttgctaccgcattcgtaacaggtaacgagtggcctgtccttagcggcgacccaatgcctgccactccgacaaatttgctgacgcctacttcagctgcaaaccaaagcatgaaaggttgaatttgcctgccagctgagatgctcagttagttcaagagctgtgtgactttgttttgcttacactggccaatgttgatgggaagccggtgcgagttctattcgcaagtgggtgtaagcctcgattttgttcttttgtaaagtaaaaggtcagttataggttgtgattggttatatttgttctttgtccatataataatgacccgtccccgttgatggcattgctagattcatctatgcctcctggccgtttgtctttgttattg

SEQ ID NO: 13335 - protein, 101 aa, Triticum aestivum
  misc_feature (1)..(101): Ceres Seq. ID no. 15175341
RTWRTRFPTAKVDDCAAVCLFLKTDLANKLSDSGTKDFGTNVELDGDKHFSTVKSSTVAPTDLATAFVTGNEWPVLSGDPMPATPTNLLTPTSAANQSMKG

SEQ ID NO: 13336 - DNA, 587 bp, Triticum aestivum
  misc_feature (1)..(587): Ceres Seq. ID no. 15175378
aattcgataactaaactgcacctgcccaaggtccacaaatccggtggagctgccattgatatgtggattaaggcaaaagagctggaaaccaacacggactactacctggagctcgtgtccaagggagtcggtaaaccgaaggaagagctcgcggagttcctgagaggcccgaggtacttccgcgcgcaggaggccattgactacgggctcgcggacacgatcctgcactcgctggacggctctttcaagccgaaggacctgacggcgcagctggccaaggcgcaggagatgcggcagtctgggaagcgcgcaccagctggagctgggcgatggtcgactccgaccactcccaggtagactagaaggcaaagatacgctcaggcgactgtgctgccacaggttgtagacttagaagatatccgcctgttgtctgggatagattgaagctgatgaaaacgttgcactcgcactatacagcacccatattttgccaccatcttgtattgtctggcatatttcactagtggaaaccctgaatttttgtcaactttggctgtggcagatgtgatagtgaaccccgaatttcg

SEQ ID NO: 13337 - protein, 118 aa, Triticum aestivum
  misc_feature (1)..(118): Ceres Seq. ID no. 15175379
NSITKLHLPKVHKSGGAAIDMWIKAKELETNTDYYLELVSKGVGKPKEELAEFLRGPRYFRAQEAIDYGLADTILHSLDGSFKPKDLTAQLAKAQEMRQSGKRAPAGAGRWSTPTTPR

SEQ ID NO: 13338 - protein, 98 aa, Triticum aestivum
  misc_feature (1)..(98): Ceres Seq. ID no. 15175380
MWIKAKELETNTDYYLELVSKGVGKPKEELAEFLRGPRYFRAQEAIDYGLADTILHSLDGSFKPKDLTAQLAKAQEMRQSGKRAPAGAGRWSTPTTPR

SEQ ID NO: 13339 - DNA, 1198 bp, Triticum aestivum
  misc_feature (1)..(1198): Ceres Seq. ID no. 15176085
ctgataggcgatagcgataccattccttcctccacggagcgatggaagacacgacgccgcccgctgacgagaggccgctggtgctcctggggcagccgctcttcccggagttcgccaccgcgctggccggccgcttccggttcgtcctggtcgcggacgccgacgccgcgaccctggcccaggggagggcgctgctcatcgggctcaacccggtcacggacgaccacctggccgcgctcccggcgctcgggctcgtggcgggcatctccgtgggcgtcaaccacgtcgacctcgccgcctgccggcgccgcgggatcgccgtcaccaacgcaggcgccgccttcgcggtcgacacggccgactacggcgtcgggctcgtcgtcgccgtgctccgccggttggccgccgccgaggcccacgtccgggccggcaggtgggcggccgacggcgactatcctctcaccaccaaggtgagcggcaagcgggtggggatcgtggggctgggcaacatcggctcccgcatcgcgcggcgtctcgccgccttcggctgcgccgtctcctacaactcgaggtcgcccaagccgtcggcgccgtacgagttcgtcccggccgtgcgcgacatcgccgccggcagcgacgtgctggtgctatcctgcgcgctgacggaggagacgaggcacgtggtgaaccgggaggtgatggaggcgctggggaaggccggcgtactggtgaacgtcggccgcggcggcctcgtggacgagccggagctggtccgctgcctgcaggagggcgtcatcggcggcgccggcttggacgtgttcgagagcgagccggacgtgccgccggagctcttctccatggacaacgtcgtgctttcggcgcacagagccgtggccacgccggagtccatccgcggcacgatcgagctcgtcgcggccaacctcgacgccttcttcgcagggaagccactgctcagccccgtggagctctgagacaaccgccgccgccggagggttcttacaaggacgctgtcgtgagcggcggcaactagtgtgatcttgccgtccacggcggtaacgaataataagagaggacgtgacaaggcagctggtagaggcgaagcattggcttagggcgacgccatcctgtattttcctatctgtacacgatgtcatgtgaattatatcgacttgctgcc

SEQ ID NO: 13340 - protein, 316 aa, Triticum aestivum
  misc_feature (1)..(316): Ceres Seq. ID no. 15176086
MEDTTPPADERPLVLLGQPLFPEFATALAGRFRFVLVADADAATLAQGRALLIGLNPVTDDHLAALPALGLVAGISVGVNHVDLAACRRRGIAVTNAGAAFAVDTADYGVGLVVAVLRRLAAAEAHVRAGRWAADGDYPLTTKVSGKRVGIVGLGNIGSRIARRLAAFGCAVSYNSRSPKPSAPYEFVPAVRDIAAGSDVLVLSCALTEETRHVVNREVMEALGKAGVLVNVGRGGLVDEPELVRCLQEGVIGGAGLDVFESEPDVPPELFSMDNVVLSAHRAVATPESIRGTIELVAANLDAFFAGKPLLSPVEL

SEQ ID NO: 13341 - DNA, 1854 bp, Triticum aestivum
  misc_feature (1)..(1854): Ceres Seq. ID no. 15176087
attatcgagcttctgcttcccaccttcttctcatagtagctgtctgttcgatccgtcaaatccggccagccgatcttcaataagctgcaccactgccaactagtactgccaaccccacggacggatccaagagagagcggccggccatggaagacgccgtcctcctcaccgtggccaccaccgtgtccatcctctgctgcacgctactcctccgtgcagctcgctcccatcactccaagtccaagctcgtcaccaccgtcccgccgccttccccgtggcggctcccgctcgtgggcaacctgcaccagctcgcgggcggccgcctcccgcaccgcacgctgtccgccctcgccgccgcccacggccccgtcatgctcctccgcctcggccaggtcccggccgtcgtcgtgtcctcgcccgacgccgcgcgggaggtgatgctggagcaggaccacgtcttcgccacccgcccgtcgctcgccatcccctccaagctcttctacggctgcaccgacgtcgccttcgccccggacggcccctactggctgcacgcgcggaagacgtgcgtgctccacctcctcagccccgccagggtgcgggcctaccgcgccgtccgggaggaggaggtgggcgcgctcctggacaaggtccggcggcaggcgcgcgtcgtgaacctgagcgagctcctcgccgggtttgccaaggacgtgatcgggcggatcgtgttcggggcgagcgccgccacgcgcgccgacaggtggggcgccaaggtggacgcgctgctggaggagggcaacgcgctgctcggaacgttccacgtcggcgactacttcccgagactggcgtgggtcggcgccctggacggcaccgacgccaaggtcggcaaggcgttcgacaggatcgacgccgttctcgaggagatcgtcgacgccgcggagagacgaatgggccgagtccacggaggagacgcgctggggctgcacgacagcaccttcgtcgacgtgctgctgtctctcggcaacaacacctccggcaacggcaccggcggcgcgtccccggagcggcggttcacgagggacaacgtcaaggggctcctagcgaatctcttcggggcaggggcagactccaccatcatcgtgctcgaatgggccatggcagagctgctccgcaacaaggaggccatggagaagctacaagacgagctaaggagtagatccgtaagcaccaactccgatatgatcaccgaagaagatttacaggggatggtctacctgaaagcggtgataaaggagacaatgcggctgcaccctcccgggccgctgctgatcccccgcgaggccatggagtccgcgaggatccagcagtacgacgtgccgagcaagaccatggtgatcgtcaacgcgtgggccatcggaagggacccgggcagctgggagtctccggaggagttccgaccggagaggttcctcggcaccggcggcgaggtggacttccggggccggcatttccagctcgtgccgttcggttccgggaggagggtgtgcccggggatcaacttcaccatgtccatcatggaggttgcgattgccaacctcgtcggccggttcgactgggcgctgccggagggcgcggcagcggcggtggacatggaggaggcgcctgggatcacctcacggaagagggttccgcttcacgtcttggctacaccgcgggcgcaggcatcgtgcaatcacgacgtgtagttcggaattcatattgtgctcctccaaatggttctagcaatttgaaggctcatttctttaacaatactttttgtattaatatcaagaagatataagtatgcttgtcctcttc

SEQ ID NO: 13342 - protein, 531 aa, Triticum aestivum
  misc_feature (1)..(531): Ceres Seq. ID no. 15176088
MEDAVLLTVATTVSILCCTLLLRAARSHHSKSKLVTTVPPPSPWRLPLVGNLHQLAGGRLPHRTLSALAAAHGPVMLLRLGQVPAVVVSSPDAAREVMLEQDHVFATRPSLAIPSKLFYGCTDVAFAPDGPYWLHARKTCVLHLLSPARVRAYRAVREEEVGALLDKVRRQARVVNLSELLAGFAKDVIGRIVFGASAATRADRWGAKVDALLEEGNALLGTFHVGDYFPRLAWVGALDGTDAKVGKAFDRIDAVLEEIVDAAERRMGRVHGGDALGLHDSTFVDVLLSLGNNTSGNGTGGASPERRFTRDNVKGLLANLFGAGADSTIIVLEWAMAELLRNKEAMEKLQDELRSRSVSTNSDMITEEDLQGMVYLKAVIKETMRLHPPGPLLIPREAMESARIQQYDVPSKTMVIVNAWAIGRDPGSWESPEEFRPERFLGTGGEVDFRGRHFQLVPFGSGRRVCPGINFTMSIMEVAIANLVGRFDWALPEGAAAAVDMEEAPGITSRKRVPLHVLATPRAQASCNHDV

SEQ ID NO: 13343 - protein, 456 aa, Triticum aestivum
  misc_feature (1)..(456): Ceres Seq. ID no. 15176089
MLLRLGQVPAVVVSSPDAAREVMLEQDHVFATRPSLAIPSKLFYGCTDVAFAPDGPYWLHARKTCVLHLLSPARVRAYRAVREEEVGALLDKVRRQARVVNLSELLAGFAKDVIGRIVFGASAATRADRWGAKVDALLEEGNALLGTFHVGDYFPRLAWVGALDGTDAKVGKAFDRIDAVLEEIVDAAERRMGRVHGGDALGLHDSTFVDVLLSLGNNTSGNGTGGASPERRFTRDNVKGLLANLFGAGADSTIIVLEWAMAELLRNKEAMEKLQDELRSRSVSTNSDMITEEDLQGMVYLKAVIKETMRLHPPGPLLIPREAMESARIQQYDVPSKTMVIVNAWAIGRDPGSWESPEEFRPERFLGTGGEVDFRGRHFQLVPFGSGRRVCPGINFTMSIMEVAIANLVGRFDWALPEGAAAAVDMEEAPGITSRKRVPLHVLATPRAQASCNHDV

SEQ ID NO: 13344 - protein, 434 aa, Triticum aestivum
  misc_feature (1)..(434): Ceres Seq. ID no. 15176090
MLEQDHVFATRPSLAIPSKLFYGCTDVAFAPDGPYWLHARKTCVLHLLSPARVRAYRAVREEEVGALLDKVRRQARVVNLSELLAGFAKDVIGRIVFGASAATRADRWGAKVDALLEEGNALLGTFHVGDYFPRLAWVGALDGTDAKVGKAFDRIDAVLEEIVDAAERRMGRVHGGDALGLHDSTFVDVLLSLGNNTSGNGTGGASPERRFTRDNVKGLLANLFGAGADSTIIVLEWAMAELLRNKEAMEKLQDELRSRSVSTNSDMITEEDLQGMVYLKAVIKETMRLHPPGPLLIPREAMESARIQQYDVPSKTMVIVNAWAIGRDPGSWESPEEFRPERFLGTGGEVDFRGRHFQLVPFGSGRRVCPGINFTMSIMEVAIANLVGRFDWALPEGAAAAVDMEEAPGITSRKRVPLHVLATPRAQASCNHDV

SEQ ID NO: 13345 - DNA, 1791 bp, Triticum aestivum
  misc_feature (1)..(1791): Ceres Seq. ID no. 15176091
accgatagaccgataaactagcagccgtcccgtcatcaaccttgcaagttagaaaccagccccgtctccaaattaatggacgtcacggcatgggcatgggcctccttcctggccgtcgtcctcgtcgtcctaaccattctccgccgtggccgtggctcgcagccgcaggggaacaggcttccaccaggaccgaagccgtggcccgtgatcggcaacctcaatctcatcggcgcgctgccgcaccgctccatccacgagctgtccaagcagtacggcccgttgatgcagctccggttcgggtccttccccgtcgtggtgggctcctcggccgagatggccaggttcttcctcaagacccacgacacggtgttcgccgaccggccaaggaccgccgccggcaagcacaccacctacaactactccgacgtcctgtgggcgccctacaacgcccacttccgccgcgcgcgcaggctcttcgccaccgagctgttcagcgcggcgcggctcgagtcctacaagcacatccgccacgaggaggtgagcgcgctgctgcgcgacctggccgcggccgctcacggggcatctggccgtgccgtgccgctcaggggacacctctttgcggcgaccaacggcatcatctcgcgggtggtgctgggcaagaagtacgcggagaaggaggcaggaggctcggcagccatggcgctggaggatttgtcgggcttaattgaggagtttttccttctcaacggcgtgatcaacgtcggcgatttcattccgtggttcgactggctggacctgcaagggtacgtccggaggatgaagaagtacagcaagaagatggaccgctttctcgagcatgtcctggaggaacacgaggagcgccggcgtgtcaagggggagcagttcgtggcgagggacatggtggacgtgctgctgcagctcgccgacaatcctaaccggcttgaccgagacaccgtcaaggctctcactcaggaacttatcgtcgggggttcagatacctccagtgtaaccatggagtgggcgatgtcggaggttctcaggaaccctgaggtcttgggcaaggccaccaaggagctcgaccgtgtggtcggccgtgacaggatggtcatggagaaggacatcccagacctcccttacatagaggccatcgtgaaggaggcgatgcgcatgcacccggtgtcgcccatgttggcgccccacctcgcacgcgaggacgcgtccgtcgacggccacgacatccccgccggcacgctcgtcctcgtcaacgtgtgggccatcggccgtgacccgacctattgggacgcgccggaggagttccgaccagagaggtttatggggagcaagatcgacgtgaaggggcaggacatggagctgctaccgttcggggccggccgccggatgtgccccgggtatagcctgggactgaaggtggtgcagttgatcgtcgccaatcttctgcatggcttcacgtgggggctccctgacggcacaacgatggagcaactcaacatggaggagatatatgggctcaccactgcgcgcaagttcccgttagaggcagtggtggagcctaagctccaagaacacgtcttctcgtagcgccgccgccgcaaaaatgctagactcacgcatcattacggaggttctagtcattgtggtatacgacttctagtccaagtcagttttatacccctaccctaagtcggtttgtaccctcttatatactcttgtatgccgcatcaaatcatcaataagcaacagttttattct

SEQ ID NO: 13346 - protein, 514 aa, Triticum aestivum
  misc_feature (1)..(514): Ceres Seq. ID no. 15176092
MDVTAWAWASFLAVVLVVLTILRRGRGSQPQGNRLPPGPKPWPVIGNLNLIGALPHRSIHELSKQYGPLMQLRFGSFPVVVGSSAEMARFFLKTHDTVFADRPRTAAGKHTTYNYSDVLWAPYNAHFRRARRLFATELFSAARLESYKHIRHEEVSALLRDLAAAAHGASGRAVPLRGHLFAATNGIISRVVLGKKYAEKEAGGSAAMALEDLSGLIEEFFLLNGVINVGDFIPWFDWLDLQGYVRRMKKYSKKMDRFLEHVLEEHEERRRVKGEQFVARDMVDVLLQLADNPNRLDRDTVKALTQELIVGGSDTSSVTMEWAMSEVLRNPEVLGKATKELDRVVGRDRMVMEKDIPDLPYIEAIVKEAMRMHPVSPMLAPHLAREDASVDGHDIPAGTLVLVNVWAIGRDPTYWDAPEEFRPERFMGSKIDVKGQDMELLPFGAGRRMCPGYSLGLKVVQLIVANLLHGFTWGLPDGTTMEQLNMEEIYGLTTARKFPLEAVVEPKLQEHVFS

SEQ ID NO: 13347 - protein, 445 aa, Triticum aestivum
  misc_feature (1)..(445): Ceres Seq. ID no. 15176093
MQLRFGSFPVVVGSSAEMARFFLKTHDTVFADRPRTAAGKHTTYNYSDVLWAPYNAHFRRARRLFATELFSAARLESYKHIRHEEVSALLRDLAAAAHGASGRAVPLRGHLFAATNGIISRVVLGKKYAEKEAGGSAAMALEDLSGLIEEFFLLNGVINVGDFIPWFDWLDLQGYVRRMKKYSKKMDRFLEHVLEEHEERRRVKGEQFVARDMVDVLLQLADNPNRLDRDTVKALTQELIVGGSDTSSVTMEWAMSEVLRNPEVLGKATKELDRVVGRDRMVMEKDIPDLPYIEAIVKEAMRMHPVSPMLAPHLAREDASVDGHDIPAGTLVLVNVWAIGRDPTYWDAPEEFRPERFMGSKIDVKGQDMELLPFGAGRRMCPGYSLGLKVVQLIVANLLHGFTWGLPDGTTMEQLNMEEIYGLTTARKFPLEAVVEPKLQEHVFS

SEQ ID NO: 13348 - protein, 428 aa, Triticum aestivum
  misc_feature (1)..(428): Ceres Seq. ID no. 15176094
MARFFLKTHDTVFADRPRTAAGKHTTYNYSDVLWAPYNAHFRRARRLFATELFSAARLESYKHIRHEEVSALLRDLAAAAHGASGRAVPLRGHLFAATNGIISRVVLGKKYAEKEAGGSAAMALEDLSGLIEEFFLLNGVINVGDFIPWFDWLDLQGYVRRMKKYSKKMDRFLEHVLEEHEERRRVKGEQFVARDMVDVLLQLADNPNRLDRDTVKALTQELIVGGSDTSSVTMEWAMSEVLRNPEVLGKATKELDRVVGRDRMVMEKDIPDLPYIEAIVKEAMRMHPVSPMLAPHLAREDASVDGHDIPAGTLVLVNVWAIGRDPTYWDAPEEFRPERFMGSKIDVKGQDMELLPFGAGRRMCPGYSLGLKVVQLIVANLLHGFTWGLPDGTTMEQLNMEEIYGLTTARKFPLEAVVEPKLQEHVFS

SEQ ID NO: 13349 - DNA, 1738 bp, Triticum aestivum
  misc_feature (1)..(1738): Ceres Seq. ID no. 15176122
ccaagcgccaaaccctctccccatccgtcttcctcgtgctctccgcccctccccttctcccctcccatcctctcctctctttatacgcctccgccccgagctctcctcccccattccgccgcattacgtcgcgcacacgggcaggggagagccggcagcggagagagagcaggagacgagatggcggccgcgtccttcaccgccgccaagttcctggcgccggcggccgcgagatccggcggcgaccgggcgcccttccccgcgccgtccgcgttctccatgcgctcgctccgccacaggcccgccaggcgcctcagctccgtcctggccgtctcctccgacgtgctcaaggccgcgcccgccgccgccgcgtacccggctgtgacacgcgaagaggcattggagctttacgaggacatgatccttggccgtaacttcgaagacatgtgcgcgcaaatgtactaccgtggcaagatgtttggtttcgtccatctttacaacgggcaggaggccgtctccaccggcttcatcaagcagctgaaccaacccgactgtgtcgtcagcacgtaccgtgaccacgtccacgcgctgtccaagggtgtcccggcccgtgcagtcatggccgagctctttggcaaggccactggctgctgccgtggacagggtggttccatgcacatgttctctgaaccccacaacctccttggaggctttgccttcattggcgagggcatccctgtcgccactggcgctgcctttgccgccaagtaccgccatgaggtgctcaagcagtctagccctgatgggcttgatgtcacacttgcattctttggggacggtacctgtaacaacggccagttctttgagtgcctgaacatggctcagctgtggaagcttccgattatttttgttgtggagaacaacctatgggcaatcgggatgtctcaccttaggtctacttcagatcccgagatctggaagaagggcccagcattcggaatgcctggggtacacgtcgatgggatggatgtcctgaaggtcagggaggtggctaaggaggcaattgacagggcaaggagaggtgaaggaccaactctagtggaatgtgaaacttaccggttcagaggccactctcttgctgatccagatgaactcaggaggcccgatgagaaatctcactacgccgcaagggaccccatcacctccctgaagaagtacatcatcgagcagaacctcgcgtccgaagccgagctgaagaacatcgagaagaagattgacgacgtcgtcgaagaggctgtggagtttgccgacgcgagcccgctgcccccacggagccagctgctggagaacgtgtttgccgatcccaagggcttcggcatcggccccgacggcaagtacaggtgcgaggaccccaagttcacccaaggcacggcgcaagtctaagggccgctgctgcagaagcagcttgtttacgcctcttttctcatgtactacctctctagctacctgcccctagttttgtcgatcccgccgtcgatttcttgtgttgttagaggtcacatatcactgtaattcattgctcgctgtgccaccgtgcggcgtctgatgcccccagttttttttacccaagaaatgttccccagtccagttgttgttctacagtaactctacatctgtctggtttgtagtaattggtacagatattggaagagatgtgaaacataatagtatctgttgt

SEQ ID NO: 13350 - protein, 480 aa, Triticum aestivum
  misc_feature (1)..(480): Ceres Seq. ID no. 15176123
PSAKPSPHPSSSCSPPLPFSPPILSSLYTPPPRALLPHSAALRRAHGQGRAGSGERAGDEMAAASFTAAKFLAPAAARSGGDRAPFPAPSAFSMRSLRHRPARRLSSVLAVSSDVLKAAPAAAAYPAVTREEALELYEDMILGRNFEDMCAQMYYRGKMFGFVHLYNGQEAVSTGFIKQLNQPDCVVSTYRDHVHALSKGVPARAVMAELFGKATGCCRGQGGSMHMFSEPHNLLGGFAFIGEGIPVATGAAFAAKYRHEVLKQSSPDGLDVTLAFFGDGTCNNGQFFECLNMAQLWKLPIIFVVENNLWAIGMSHLRSTSDPEIWKKGPAFGMPGVHVDGMDVLKVREVAKEAIDRARRGEGPTLVECETYRFRGHSLADPDELRRPDEKSHYAARDPITSLKKYIIEQNLASEAELKNIEKKIDDVVEEAVEFADASPLPPRSQLLENVFADPKGFGIGPDGKYRCEDPKFTQGTAQV

SEQ ID NO: 13351 - protein, 420 aa, Triticum aestivum
  misc_feature (1)..(420): Ceres Seq. ID no. 15176124
MAAASFTAAKFLAPAAARSGGDRAPFPAPSAFSMRSLRHRPARRLSSVLAVSSDVLKAAPAAAAYPAVTREEALELYEDMILGRNFEDMCAQMYYRGKMFGFVHLYNGQEAVSTGFIKQLNQPDCVVSTYRDHVHALSKGVPARAVMAELFGKATGCCRGQGGSMHMFSEPHNLLGGFAFIGEGIPVATGAAFAAKYRHEVLKQSSPDGLDVTLAFFGDGTCNNGQFFECLNMAQLWKLPIIFVVENNLWAIGMSHLRSTSDPEIWKKGPAFGMPGVHVDGMDVLKVREVAKEAIDRARRGEGPTLVECETYRFRGHSLADPDELRRPDEKSHYAARDPITSLKKYIIEQNLASEAELKNIEKKIDDVVEEAVEFADASPLPPRSQLLENVFADPKGFGIGPDGKYRCEDPKFTQGTAQV

SEQ ID NO: 13352 - protein, 387 aa, Triticum aestivum
  misc_feature (1)..(387): Ceres Seq. ID no. 15176125
MRSLRHRPARRLSSVLAVSSDVLKAAPAAAAYPAVTREEALELYEDMILGRNFEDMCAQMYYRGKMFGFVHLYNGQEAVSTGFIKQLNQPDCVVSTYRDHVHALSKGVPARAVMAELFGKATGCCRGQGGSMHMFSEPHNLLGGFAFIGEGIPVATGAAFAAKYRHEVLKQSSPDGLDVTLAFFGDGTCNNGQFFECLNMAQLWKLPIIFVVENNLWAIGMSHLRSTSDPEIWKKGPAFGMPGVHVDGMDVLKVREVAKEAIDRARRGEGPTLVECETYRFRGHSLADPDELRRPDEKSHYAARDPITSLKKYIIEQNLASEAELKNIEKKIDDVVEEAVEFADASPLPPRSQLLENVFADPKGFGIGPDGKYRCEDPKFTQGTAQV

SEQ ID NO: 13353 - DNA, 1765 bp, Triticum aestivum
  misc_feature (1)..(1765): Ceres Seq. ID no. 15176787
acttacccgaggcacgaccacaactatttccaccttttgccagtgccagtgccacctgcaaaacatattctgaaaacattgcagtccacccactttgcttaggttcgagatgaagcagaccgtggtgatgtaccccggcgccggcgtcggccacgttggccccgtgacggagctcgccaacgtcttcctcaagcacggctacgacgtcaccgtggtgctcgtcgagccgcctttcaagtcgacagactccgccgccaccgccatcgagcgcatcgccgcctccaaccctttcatctccttccatgtcctcccgcccctccctgcgccagactttgccgcctccggcaagcaccctttcctactcatgctccagctcttgcacgattataacgagcggtcggaagcgttcctccgtggcatcccccggaagagcttgcactctgttatcctcgacatgttctgcgtccacgccaccgacgtctgcgtgaagctcggcgtcccggtctacacgttcttcgtcgggggcgcctcgtgcctgtcggtcctaacccaggtcccggcagtgatcgccggcaggcagacgggcttgaaggaactcggggacatgcccctcgatttcctcggcgtcccgccgatgccagcgtctcatctcatcaaggagctgctggagcaccccgaggatgagatgtgcaaggccatgacagacgtctggaagcgcaacacggagaccatgggcgttatggtgaacacgtttgagtcattggagagccgggcggtgcagtctctcatggacctccccggcaggaagctgcgtccgatctactgcgtcgggccgttggtcagcaagggcgccaaggatgcctccgacaaagcagagaggaacgagtgccttgagtggctcgatgcgcagcccgaccgcagcgtcgtgttcctctgtttcgggagcatgggcacgctctcggcggagcagctcaaggagatggccgttgggttggagcggtctgggcagcggttcctatggtccgtgcgcaacccggccggaagcaacaacccgaagaaatacttggaggtgcgccccgagccggaccttgacgcgctgcttcctcaagggttcctggagcggaccaagggcaggggcctcgtcgtcaagtcatgggcgccgcaggcgaacgtgctccgccaccgcgcgacgggcgcgttcgtgacgcactgcggatggaactcggtgctggaggccgttgcggccggggtgccgatgctgtgcctgccgctggaggcggagcagaagatgaacaaggtgtgcgtgacggaggacatgggcgtcgccgtggagctggagggatacatggcaggttttgtcaaggcagaggaggtggaggccaaggtgaggctggtgattgagggcggggatgggaggcagctcagggcccgggcggctgctcgcagggaagaggccgaggcggcgctgggggaagggggctcgtcgcgggcgtcgtttgcccagtttctgttggacgtggacaatctcggaaagcagctcggcgagtgacgcactacttgcaaattgcgactgctctttgccttctacgtatatgttgctagtccaagttgccctcttgtttatattttacttgcattgcatgctcaatcacttaacttactagtaagtgtgtgtgtgtgtagcaccatcttaataaatcggctatgtaagtgccaggtaccgcagttacctccacatatatttatgatgttttctcttcctggc

SEQ ID NO: 13354 - protein, 479 aa, Triticum aestivum
  misc_feature (1)..(479): Ceres Seq. ID no. 15176788
MKQTVVMYPGAGVGHVGPVTELANVFLKHGYDVTVVLVEPPFKSTDSAATAIERIAASNPFISFHVLPPLPAPDFAASGKHPFLLMLQLLHDYNERSEAFLRGIPRKSLHSVILDMFCVHATDVCVKLGVPVYTFFVGGASCLSVLTQVPAVIAGRQTGLKELGDMPLDFLGVPPMPASHLIKELLEHPEDEMCKAMTDVWKRNTETMGVMVNTFESLESRAVQSLMDLPGRKLRPIYCVGPLVSKGAKDASDKAERNECLEWLDAQPDRSVVFLCFGSMGTLSAEQLKEMAVGLERSGQRFLWSVRNPAGSNNPKKYLEVRPEPDLDALLPQGFLERTKGRGLVVKSWAPQANVLRHRATGAFVTHCGWNSVLEAVAAGVPMLCLPLEAEQKMNKVCVTEDMGVAVELEGYMAGFVKAEEVEAKVRLVIEGGDGRQLRARAAARREEAEAALGEGGSSRASFAQFLLDVDNLGKQLGE

SEQ ID NO: 13355 - protein, 473 aa, Triticum aestivum
  misc_feature (1)..(473): Ceres Seq. ID no. 15176789
MYPGAGVGHVGPVTELANVFLKHGYDVTVVLVEPPFKSTDSAATAIERIAASNPFISFHVLPPLPAPDFAASGKHPFLLMLQLLHDYNERSEAFLRGIPRKSLHSVILDMFCVHATDVCVKLGVPVYTFFVGGASCLSVLTQVPAVIAGRQTGLKELGDMPLDFLGVPPMPASHLIKELLEHPEDEMCKAMTDVWKRNTETMGVMVNTFESLESRAVQSLMDLPGRKLRPIYCVGPLVSKGAKDASDKAERNECLEWLDAQPDRSVVFLCFGSMGTLSAEQLKEMAVGLERSGQRFLWSVRNPAGSNNPKKYLEVRPEPDLDALLPQGFLERTKGRGLVVKSWAPQANVLRHRATGAFVTHCGWNSVLEAVAAGVPMLCLPLEAEQKMNKVCVTEDMGVAVELEGYMAGFVKAEEVEAKVRLVIEGGDGRQLRARAAARREEAEAALGEGGSSRASFAQFLLDVDNLGKQLGE

SEQ ID NO: 13356 - protein, 394 aa, Triticum aestivum
  misc_feature (1)..(394): Ceres Seq. ID no. 15176790
MLQLLHDYNERSEAFLRGIPRKSLHSVILDMFCVHATDVCVKLGVPVYTFFVGGASCLSVLTQVPAVIAGRQTGLKELGDMPLDFLGVPPMPASHLIKELLEHPEDEMCKAMTDVWKRNTETMGVMVNTFESLESRAVQSLMDLPGRKLRPIYCVGPLVSKGAKDASDKAERNECLEWLDAQPDRSVVFLCFGSMGTLSAEQLKEMAVGLERSGQRFLWSVRNPAGSNNPKKYLEVRPEPDLDALLPQGFLERTKGRGLVVKSWAPQANVLRHRATGAFVTHCGWNSVLEAVAAGVPMLCLPLEAEQKMNKVCVTEDMGVAVELEGYMAGFVKAEEVEAKVRLVIEGGDGRQLRARAAARREEAEAALGEGGSSRASFAQFLLDVDNLGKQLGE

SEQ ID NO: 13357 - DNA, 2018 bp, Triticum aestivum
  misc_feature (1)..(2018): Ceres Seq. ID no. 15176862
cccattggccgcgcccacggacgcaggccgacagtttcccgtcctgcccctccctcgtcgctagtcgttgcttgctccgattttccacccacaatccggggcaaaacacccggggagcgaagcaagaaaccgagggctctcctcccaggcgcggatctaccagcctaccagggcgcggaccgcgcgaggctctggccttccgctcctccagcatgaggggaaaaaagatgatatatggattctccatttcccttatcctcatcaacctggcttccataatggagcgggctgatgagaatctcctccccgctgtttacaaggaagtcagtgccgccttcgatgctggtcctactgatctggggtaccttacgtttataatgaactttctgaagtccatagcatctcccttggcaggtgtccttgctcttcagtatgatcgccccactattcttgcggtcggaactgtcttctgggctctatcaacaggggccgttggtgtcagccagtattttcagcaggttgcattctggagaggtgtaaatggtgttggacttgccattgtcataccatcacttcagtccttcattgctgatagctacagagagggcacccgtggcgccggatttggtttgttgagtctcattggctcaataggtggtataggaggaagtattgtggcgacagttatggctggaagggattattggggatttcctggatggcggtttgcatttattgtggtcgcgtttgcaagcttgttgattgggcttcttgtttacttttacaccgttgatcctagaaaaacatctccagggaattttggtgacgacgacacccatgagaggtcacgtttggttggtaacagtgttttccctccactgtccatctggaaggattcatggataacagcaagatctgtcatgaaagtgcggacatttcaaatcatcgtcctgcaaggcatagtcggctccttgccatggactgctgtcgttttcttcacaatgtggtttgagctaattggtttcgataacaaaagctcggcggggttaaacagcctattcgccatcggctgcgcgagtgggtcatttcttggtggagtaattgcagaccgcgtgtcaagacactacccggattcaggccgcatcatgtgtgctcagttcagtgccttcatgtgcatccctttcacatggatcctcctcacggtcatcccgcagtcggtcgactactggtacagctacgccgtcacgctgttcctgatggggctcaccataagttggtgcgccacctgcgcaaacaacccgatgttcgcggaggtggtccctcccaagcaccgcaccatgatctacgcgtttgaccgcgcgttcgagggctccttctcctcgctggccgctcctgccgtcggcatggtgaccgagagggtatatggctacaacgcaaagacggtgaatctagcggacgggtcggtggcaggggcgtatgcgctctcgagagggctgctgaccatgatgattgttccttttggtctgtgctgcctgttctacaccccgctgtactttgtgttcaagcgcgaccgtgagaacgcgaggttggcggccagtgccaaggatctggagctaatgtgatgctccgcggtttttttttatcagctgcagtgttcgttaatgcggttagttgattcagcttggggttgaaatggtgcagttgacagaatactacaggtttcaccttcttcagacagatgagaagtacaccttcagacaaatgaaaagaaatacacgagtacaccttcagacagatgacaagatatacacgggtagagtcggtgattttaattttgtcaattagagaggatatatattgtactaatacattgtgtaggtaaataaatggcagctgtcatgttcaatctcaccgcaattaggatttattttttcttttgtcgcctgtaatcctgagctgaatttttggatgaagatggcattgcccctgatcctgaagtaatgaactaaacttggttc

SEQ ID NO: 13358 - protein, 539 aa, Triticum aestivum
  misc_feature (1)..(539): Ceres Seq. ID no. 15176863
HWPRPRTQADSFPSCPSLVASRCLLRFSTHNPGQNTRGAKQETEGSPPRRGSTSLPGRGPREALAFRSSSMRGKKMIYGFSISLILINLASIMERADENLLPAVYKEVSAAFDAGPTDLGYLTFIMNFLKSIASPLAGVLALQYDRPTILAVGTVFWALSTGAVGVSQYFQQVAFWRGVNGVGLAIVIPSLQSFIADSYREGTRGAGFGLLSLIGSIGGIGGSIVATVMAGRDYWGFPGWRFAFIVVAFASLLIGLLVYFYTVDPRKTSPGNFGDDDTHERSRLVGNSVFPPLSIWKDSWITARSVMKVRTFQIIVLQGIVGSLPWTAVVFFTMWFELIGFDNKSSAGLNSLFAIGCASGSFLGGVIADRVSRHYPDSGRIMCAQFSAFMCIPFTWILLTVIPQSVDYWYSYAVTLFLMGLTISWCATCANNPMFAEVVPPKHRTMIYAFDRAFEGSFSSLAAPAVGMVTERVYGYNAKTVNLADGSVAGAYALSRGLLTMMIVPFGLCCLFYTPLYFVFKRDRENARLAASAKDLELM

SEQ ID NO: 13359 - protein, 469 aa, Triticum aestivum
  misc_feature (1)..(469): Ceres Seq. ID no. 15176864
MRGKKMIYGFSISLILINLASIMERADENLLPAVYKEVSAAFDAGPTDLGYLTFIMNFLKSIASPLAGVLALQYDRPTILAVGTVFWALSTGAVGVSQYFQQVAFWRGVNGVGLAIVIPSLQSFIADSYREGTRGAGFGLLSLIGSIGGIGGSIVATVMAGRDYWGFPGWRFAFIVVAFASLLIGLLVYFYTVDPRKTSPGNFGDDDTHERSRLVGNSVFPPLSIWKDSWITARSVMKVRTFQIIVLQGIVGSLPWTAVVFFTMWFELIGFDNKSSAGLNSLFAIGCASGSFLGGVIADRVSRHYPDSGRIMCAQFSAFMCIPFTWILLTVIPQSVDYWYSYAVTLFLMGLTISWCATCANNPMFAEVVPPKHRTMIYAFDRAFEGSFSSLAAPAVGMVTERVYGYNAKTVNLADGSVAGAYALSRGLLTMMIVPFGLCCLFYTPLYFVFKRDRENARLAASAKDLELM

SEQ ID NO: 13360 - protein, 464 aa, Triticum aestivum
  misc_feature (1)..(464): Ceres Seq. ID no. 15176865
MIYGFSISLILINLASIMERADENLLPAVYKEVSAAFDAGPTDLGYLTFIMNFLKSIASPLAGVLALQYDRPTILAVGTVFWALSTGAVGVSQYFQQVAFWRGVNGVGLAIVIPSLQSFIADSYREGTRGAGFGLLSLIGSIGGIGGSIVATVMAGRDYWGFPGWRFAFIVVAFASLLIGLLVYFYTVDPRKTSPGNFGDDDTHERSRLVGNSVFPPLSIWKDSWITARSVMKVRTFQIIVLQGIVGSLPWTAVVFFTMWFELIGFDNKSSAGLNSLFAIGCASGSFLGGVIADRVSRHYPDSGRIMCAQFSAFMCIPFTWILLTVIPQSVDYWYSYAVTLFLMGLTISWCATCANNPMFAEVVPPKHRTMIYAFDRAFEGSFSSLAAPAVGMVTERVYGYNAKTVNLADGSVAGAYALSRGLLTMMIVPFGLCCLFYTPLYFVFKRDRENARLAASAKDLELM

SEQ ID NO: 13361 - DNA, 1763 bp, Triticum aestivum
  misc_feature (1)..(1763): Ceres Seq. ID no. 15178236
cccaacgcgccctaaatcccccccaccactctgccgccggcgcgtccatcagcccccctaccgcctctctccctcgcgcgcgcgtcgccgccgccgccgtccttcctccccggggcaccgcgctcccgccgccccgtccgcgttgctcggccattgagcctccctcgaggtggtaatttttgtcaaggttgttgttaccatggaggtcaacggtcgtcacaagcctacaagagagtatatcgacagagggtgcaatggtgtaaaatcgcccaataatttcggcgaagttgatccctggaccgcgtgggcgtacagaccacggaccatctcgttgttactcatgggaacctgctttttaatttgggcaagtggtgctcttaatccagaaggaagcttctctgctgaccgtgtctcatctgtaaaaaggggtgtctttgcgatgattgctgttttcttggcttattcttttattcaggcaccttcaactgtgctcatcagaccacatcctgcaatttggcggctggtccatgggatggcagttgtttaccttgtggccctcacatttttgcttttccagactcgtgatgatgctaggcagttcatgaagtaccttcaccctgaccttggtgttgaattacctgaaagatcctatggaaccgactgccgtatatatgtacctgatcatccgaaaagcaggtttaacaatgtttatgacatcctttttgacgagtttgttattgcccatatccttggatggtggggaaaggctataatgatacgaaaccaaccacttctatgggtgttatcaattggctttgagttaatggagctaacttttcgacatatgttgccaaattttaacgaatgctggtgggatagcattgttctagacatattgatctgcaattggtttggtatctgggctggtatgaagactgtgagatattttgatgggaggacatatgaatgggttggcttgagtcgccagcccaatattatgagtaaggtgaaaaggacactaggtcagttcacaccagcacagtgggacaaggatgagtggtaccctctgctcggcccttggagattcatccaagtgctaagcctgtgcgtaattttcatgaccatcgaacttaacacattctttcttaagttctgcctctggattcctccccggaatcccttgattgtctaccgactggtcctttggtggttgattgcgataccaaccatccgcgaatacaacacctatttgcaggacaggaactctgtgaagaaggtggggtctttctgttggctttcgctggctatatgcatcatagagcttctgatctgcatcaagtttggccatggtctcttcccgaagtcgatgccgtcgtggctgatcatattctggacgacggtggccacgcttctcacgatgttcctttttgtgtggacatggaaaatttaccgaacaatgattagaaaaaggttgtgattgcaaccaaagccattgttttctctggcccacaccattcttttctcctccgattcaatattgccgtgtaaatatccattcaaattgtgtacatgtagcagtaggccattaatcggtgaccgcgtgaaggtcagccttagaaatttcttgtcgatccaccagcagaataagccccccttccttccgttcattcatgtaccgtgtcaatcaactccgaaactctgaaattcatttggtccgacctacttcgatttaatgaaagtaatgaaataaggttattctgtcc

SEQ ID NO: 13362 - protein, 425 aa, Triticum aestivum
  misc_feature (1)..(425): Ceres Seq. ID no. 15178237
MEVNGRHKPTREYIDRGCNGVKSPNNFGEVDPWTAWAYRPRTISLLLMGTCFLIWASGALNPEGSFSADRVSSVKRGVFAMIAVFLAYSFIQAPSTVLIRPHPAIWRLVHGMAVVYLVALTFLLFQTRDDARQFMKYLHPDLGVELPERSYGTDCRIYVPDHPKSRFNNVYDILFDEFVIAHILGWWGKAIMIRNQPLLWVLSIGFELMELTFRHMLPNFNECWWDSIVLDILICNWFGIWAGMKTVRYFDGRTYEWVGLSRQPNIMSKVKRTLGQFTPAQWDKDEWYPLLGPWRFIQVLSLCVIFMTIELNTFFLKFCLWIPPRNPLIVYRLVLWWLIAIPTIREYNTYLQDRNSVKKVGSFCWLSLAICIIELLICIKFGHGLFPKSMPSWLIIFWTTVATLLTMFLFVWTWKIYRTMIRKRL

SEQ ID NO: 13363 - protein, 378 aa, Triticum aestivum
  misc_feature (1)..(378): Ceres Seq. ID no. 15178238
MGTCFLIWASGALNPEGSFSADRVSSVKRGVFAMIAVFLAYSFIQAPSTVLIRPHPAIWRLVHGMAVVYLVALTFLLFQTRDDARQFMKYLHPDLGVELPERSYGTDCRIYVPDHPKSRFNNVYDILFDEFVIAHILGWWGKAIMIRNQPLLWVLSIGFELMELTFRHMLPNFNECWWDSIVLDILICNWFGIWAGMKTVRYFDGRTYEWVGLSRQPNIMSKVKRTLGQFTPAQWDKDEWYPLLGPWRFIQVLSLCVIFMTIELNTFFLKFCLWIPPRNPLIVYRLVLWWLIAIPTIREYNTYLQDRNSVKKVGSFCWLSLAICIIELLICIKFGHGLFPKSMPSWLIIFWTTVATLLTMFLFVWTWKIYRTMIRKRL

SEQ ID NO: 13364 - protein, 345 aa, Triticum aestivum
  misc_feature (1)..(345): Ceres Seq. ID no. 15178239
MIAVFLAYSFIQAPSTVLIRPHPAIWRLVHGMAVVYLVALTFLLFQTRDDARQFMKYLHPDLGVELPERSYGTDCRIYVPDHPKSRFNNVYDILFDEFVIAHILGWWGKAIMIRNQPLLWVLSIGFELMELTFRHMLPNFNECWWDSIVLDILICNWFGIWAGMKTVRYFDGRTYEWVGLSRQPNIMSKVKRTLGQFTPAQWDKDEWYPLLGPWRFIQVLSLCVIFMTIELNTFFLKFCLWIPPRNPLIVYRLVLWWLIAIPTIREYNTYLQDRNSVKKVGSFCWLSLAICIIELLICIKFGHGLFPKSMPSWLIIFWTTVATLLTMFLFVWTWKIYRTMIRKRL

SEQ ID NO: 13365 - DNA, 1246 bp, Triticum aestivum
  misc_feature (1)..(1246): Ceres Seq. ID no. 15178266
agtcccacgcactcgagagtcgagggggtctgtcccatccttatctccgctagctagctcgctataggcccctggtctttactcttcaggccaaacagaagcagctactaggcgaaggacacatccgcattatccatcgatcggccttgtcctgtccgcgggtggcgccggacgccggtgacaaccgacagggcagcaagcgtggatcatccgagcggaagcggaagcgctcctcctccggctccggggcaccgtcgcgacagcagaggcccgccgccatcacctcgtccgccgccgccgccgccgccgccgccggcgcaacaacgaggtgaccaccatgggcatggagagccggaggtcgtcggggaggaggctgctggcgttggcgttgcgacgacgagctaccagcaccagcagtacgagctcgccgtcatggtggcggcgctcacccacgtcatcagctccactcgaccgggaccggcggccgccgccggtgcaaccgcgcccgggcagcaagctgtgacccgccaacacagcgctcctctggccgtggcggcgacgtcgtcgtcatcaacggcgtcggagcagcagcagcagcgtccgcggtaccgtggcgtacggcagcggccgtggggcaagtgggcggcggagatccgcgaccccgtgaaggcggcgcgcgtatggctgggcaccttcgacacggccgaggacgccgcacgcgcctacgacgccgccgcgctccgcttcaagggcgccaaggccaagctcaacttccctggcgccggcggtgcgcctgcgccaccccgccatgccgtcggccagctcctggcgcccggaggcggggcatcgccgtcgatgcggcagcagcagcgacccgtggtggtggccttccgtccgcagattaactccctggcagccgttgctcgggaggagttcccggacctccaccggtatgcgcacatactgcagagcggtgacgtggacctgcgggctgttgcagccggcgggaacacaccggggcagtcgtcttcgtcgacgccggcgcacgactcgaggtcgccgccccggccggatgatcgcggatatggcgagagaagtgcaggccctggctgctaactgagtagtactcttactgaatacgtactgatcgacgtgtacatgagaaaaacaagttctgtttcttttcatctttttgtttgcgtatttccttatttatttttggtaaaatgaatagacacaacactac

SEQ ID NO: 13366 - protein, 227 aa, Triticum aestivum
  misc_feature (1)..(227): Ceres Seq. ID no. 15178267
MVAALTHVISSTRPGPAAAAGATAPGQQAVTRQHSAPLAVAATSSSSTASEQQQQRPRYRGVRQRPWGKWAAEIRDPVKAARVWLGTFDTAEDAARAYDAAALRFKGAKAKLNFPGAGGAPAPPRHAVGQLLAPGGGASPSMRQQQRPVVVAFRPQINSLAAVAREEFPDLHRYAHILQSGDVDLRAVAAGGNTPGQSSSSTPAHDSRSPPRPDDRGYGERSAGPGC

SEQ ID NO: 13367 - DNA, 891 bp, Triticum aestivum
  misc_feature (1)..(891): Ceres Seq. ID no. 15178385
agatccaccagaccagaccaaccattaaaaaaccccaccatacacacccgcgaggctcaatcatcgcaccgctcgatcggcaggcacagcagcaatggcggaagccaccggaggcggcggcagcagcacggaggaggggctgacgctgctggggttctggacgaggggctctacggcgggagcacggccgatgagcgggcgggggcggcgagggaggtcatcgccgtgctggaggcgttcgagggggagctcggggacagggacttcttcggcgggggcggcgtggggctggtggacgtggcgctcggcgggttcatcgggtggctgcgcgcgtccgaggccatgtgcggcgtgcggaccatcgacccggccaggacgccgcggctggcggcgtgggcggagcggttcggggcgctggacggcgtgagggagatcgtgccggaggcggcgccgctggtggagtacaacctcatgaagcgggctcgccgcggcctgccgtatctgccgccgcaccagacgcggtaaaaaaaccggtagtaaattccaaggcgtgtagctggatccatcgcgcgcagaggaggaactgaactgaatttgaatctgatcccttaagccggtggattctttagttatcctactgcagtatagagtaataagtctttgttcttgtttggaactctgaatttgggcgatggatcgaaccacgtattccagaaatgtagccagagaactgccttctccaatggagtagtaccatcttgtacacggtggtgttggttggttcggggtgtacgttgtccaacagtacagaggaagaaaaaaacaggaaaaaatatggggcattccgagaattgaactcgggacctctcgcaccctaagcgagaatcaaag

SEQ ID NO: 13368 - protein, 174 aa, Triticum aestivum
  misc_feature (1)..(174): Ceres Seq. ID no. 15178386
RSTRPDQPLKNPTIHTREAQSSHRSIGRHSSNGGSHRRRRQQHGGGADAAGVLDEGLYGGSTADERAGAAREVIAVLEAFEGELGDRDFFGGGGVGLVDVALGGFIGWLRASEAMCGVRTIDPARTPRLAAWAERFGALDGVREIVPEAAPLVEYNLMKRARRGLPYLPPHQTR

SEQ ID NO: 13369 - protein, 110 aa, Triticum aestivum
  misc_feature (1)..(110): Ceres Seq. ID no. 15178387
MAEATGGGGSSTEEGLTLLGFWTRGSTAGARPMSGRGRRGRSSPCWRRSRGSSGTGTSSAGAAWGWWTWRSAGSSGGCARPRPCAACGPSTRPGRRGWRRGRSGSGRWTA

SEQ ID NO: 13370 - DNA, 509 bp, Triticum aestivum
  misc_feature (1)..(509): Ceres Seq. ID no. 15178412
attcgtgttcttgtgcttaatggagctgacttctttgatgatgaaggaatgatggtactttcatcctcaccattcctggagacactcgagcttgcggtgaacgatcaggtaactgatgctgggatgcattccattgcgcgcaccccttgcttgaggagtctgacactccggttgtgtagtcaggtgactgatgctggattaaccgaactggtacattcacagaagttggattctctgaccatcgaaggctgtgcttgcatctctccgcaagttgcccaaggcgcagctagatcagttcactactctctggagtcagcaagcaggagccgtctcagtagaatctaaacataatgctattggtcaagtagttaaagttattttcggttgtgcctcatttgtggatgtcgctgtcattgaccctgctatcgttttcatcatttcttagaacctgtgtctaatggtcaactttggatccaatgcggtgaatgaagactttaaaattgtctgtt

SEQ ID NO: 13371 - protein, 114 aa, Triticum aestivum
  misc_feature (1)..(114): Ceres Seq. ID no. 15178413
IRVLVLNGADFFDDEGMMVLSSSPFLETLELAVNDQVTDAGMHSIARTPCLRSLTLRLCSQVTDAGLTELVHSQKLDSLTIEGCACISPQVAQGAARSVHYSLESASRSRLSRI

SEQ ID NO: 13372 - protein, 98 aa, Triticum aestivum
  misc_feature (1)..(98): Ceres Seq. ID no. 15178414
MMVLSSSPFLETLELAVNDQVTDAGMHSIARTPCLRSLTLRLCSQVTDAGLTELVHSQKLDSLTIEGCACISPQVAQGAARSVHYSLESASRSRLSRI

SEQ ID NO: 13373 - protein, 97 aa, Triticum aestivum
  misc_feature (1)..(97): Ceres Seq. ID no. 15178415
MVLSSSPFLETLELAVNDQVTDAGMHSIARTPCLRSLTLRLCSQVTDAGLTELVHSQKLDSLTIEGCACISPQVAQGAARSVHYSLESASRSRLSRI

SEQ ID NO: 13374 - DNA, 936 bp, Triticum aestivum
  misc_feature (1)..(936): Ceres Seq. ID no. 15178534
gaaatcgcacaatctcagaggccaaaaccctcgcccccaaacaccccaccgccggcgatctcctcctcctcctccgatggatctctcagctgtccacgccgcgctctccgccaagtcctactccgccatcgccaccctctgcgacgacctcctcctccaggttgcgtcccggggcgtcgccaccgacgactggccttacgccgttcatctcctcgcccatctctacctcaacgacctgaacagcgcgaggtttctatggaaaacggtgccgcaggaggtgaaggaagctcatccggagctgggcgccatctggaagattggccagtgcctctggaaccgtgactatgctggggtctatacttccgcacaggggttcgagtgggggcctgaaatcgctgattttgtggccggcttcctagaaagctacagaaagaggatatttgagctgttgacttctgcgtataccacaatcagcattgcagatgtggctcacttcatggggatgagcgaggaggatgctactaactatgcggtgcaaaatggttggagtctggatgtggcaaccaagatgcttactgtcagaaaacagaagccccagactaaccagaagcttgatgcaagcaaactgcagcgtttgaccgaatgtgttttccacctggagcactgatgccatccgttccgcttttaaggcgcctattaatcgtacatggtggtagcttaatactgcacggctagattgtgttttggctggaaaggagagatcgctctgtactgaatatgcgtcttctggttgagcgagcttgccatttctgtcttgtttgcttgttaacaaggagtgcgtgtattgaagttaagcgaatgattactgtgcctatgttgaacctattagttgttttaagtgatgtgaagtttgaaattagaaaaaaaaaaaaaaaa

SEQ ID NO: 13375 - protein, 221 aa, Triticum aestivum
  misc_feature (1)..(221): Ceres Seq. ID no. 15178535
KSHNLRGQNPRPQTPHRRRSPPPPPMDLSAVHAALSAKSYSAIATLCDDLLLQVASRGVATDDWPYAVHLLAHLYLNDLNSARFLWKTVPQEVKEAHPELGAIWKIGQCLWNRDYAGVYTSAQGFEWGPEIADFVAGFLESYRKRIFELLTSAYTTISIADVAHFMGMSEEDATNYAVQNGWSLDVATKMLTVRKQKPQTNQKLDASKLQRLTECVFHLEH

SEQ ID NO: 13376 - protein, 196 aa, Triticum aestivum
  misc_feature (1)..(196): Ceres Seq. ID no. 15178536
MDLSAVHAALSAKSYSAIATLCDDLLLQVASRGVATDDWPYAVHLLAHLYLNDLNSARFLWKTVPQEVKEAHPELGAIWKIGQCLWNRDYAGVYTSAQGFEWGPEIADFVAGFLESYRKRIFELLTSAYTTISIADVAHFMGMSEEDATNYAVQNGWSLDVATKMLTVRKQKPQTNQKLDASKLQRLTECVFHLEH

SEQ ID NO: 13377 - protein, 113 aa, Triticum aestivum
  misc_feature (1)..(113): Ceres Seq. ID no. 15178537
EIAQSQRPKPSPPNTPPPAISSSSSDGSLSCPRRALRQVLLRHRHPLRRPPPPGCVPGRRHRRLALRRSSPRPSLPQRPEQREVSMENGAAGGEGSSSGAGRHLEDWPVPLEP

SEQ ID NO: 13378 - DNA, 1462 bp, Triticum aestivum
  misc_feature (1)..(1462): Ceres Seq. ID no. 15178668
ggttaccgcatcgtcgccaggacaagccgccagccagcccaacccaaaccaccggaccggagcagcagccgacgcctcacaaccgccgccgcgcaggcagacgagccagcgggagggagccatggatcggtaccagagggtggagaagccgcgggaggaggtgcccatcaaggagaacgagatccgcatcaccacccagggcaggatgcgcaactacatcacctacgccaccaccctcttccaggataagggttgcgatgaagttgtattcaaggcgatgggaagggccataaacaaaactgtgatgattgcagaattgatcaagaggagaattgtgggtctccatcaaaacactgccactgaatccactgatattactgacacatgggagccactggaggaaggcctacttccgcttgagacaacaaggcatgtgtctatgattactataactctttcaaagaaggagctggacacgtcatctgtcggataccaatctcctctgcctgctgacaaggtgaagccgtttgttgaatacgagaatgaagaagatgcgcactcacctcctgggcgaggaagaggccgtggccgaggccgtggaaggggaatgggaaggggtagagatgcacgtgggaatggatacatggagtatgctgatggtggatgggaaaatgagcatgctcctacctatgcaggcaatgggtatgctgaccatggtccagcttatgagggtaatgggtatgctcgtggtagaggccgtggtttcaggggccgtggcagaagaggtggctatggtggtcagcctgattatcagcatgatggagggtattatgatgaggcaccagcgccaccccgaggtgggggccgtggtttcagggggcgtggcaggagaggcggctatggtggtggccagcctgattatcagcaagacggaggttattacgaggaggctccttttcctgcaccagctggaggtcgtggtcgaggccgtggccgtgggagaggcggcccagctcggggcagagggcgcggtggcaatgccaatggcaacatggtgtatgccgccgcttcgggcgcataagcagtccgcagctcgctgccgtcgttagttggatgcctgctccaagcatgaatatgtatcatctgtgttgtttatctgtgatgacatatatactttgtataagcctgtcattcgttgggaatgaggccagattttgatctttgactagatttgtaggggtagcaccgttatgattgtgctttgttttctcaaagtagatgtcagactaattgtagctaccagttggtaaaggtttagagcagggcattctttcaatttttacataaacgaagtctttgttctctgttacattgtgccaatttcgtttggtgtcctgtctttgaaatgtaagttcaatttagtgggtacttacaatttgatttctgaaaaaaaaaaaaaaaa

SEQ ID NO: 13379 - protein, 359 aa, Triticum aestivum
  misc_feature (1)..(359): Ceres Seq. ID no. 15178669
VTASSPGQAASQPNPNHRTGAAADASQPPPRRQTSQREGAMDRYQRVEKPREEVPIKENEIRITTQGRMRNYITYATTLFQDKGCDEVVFKAMGRAINKTVMIAELIKRRIVGLHQNTATESTDITDTWEPLEEGLLPLETTRHVSMITITLSKKELDTSSVGYQSPLPADKVKPFVEYENEEDAHSPPGRGRGRGRGRGRGMGRGRDARGNGYMEYADGGWENEHAPTYAGNGYADHGPAYEGNGYARGRGRGFRGRGRRGGYGGQPDYQHDGGYYDEAPAPPRGGGRGFRGRGRRGGYGGGQPDYQQDGGYYEEAPFPAPAGGRGRGRGRGRGGPARGRGRGGNANGNMVYAAASGA

SEQ ID NO: 13380 - protein, 319 aa, Triticum aestivum
  misc_feature (1)..(319): Ceres Seq. ID no. 15178670
MDRYQRVEKPREEVPIKENEIRITTQGRMRNYITYATTLFQDKGCDEVVFKAMGRAINKTVMIAELIKRRIVGLHQNTATESTDITDTWEPLEEGLLPLETTRHVSMITITLSKKELDTSSVGYQSPLPADKVKPFVEYENEEDAHSPPGRGRGRGRGRGRGMGRGRDARGNGYMEYADGGWENEHAPTYAGNGYADHGPAYEGNGYARGRGRGFRGRGRRGGYGGQPDYQHDGGYYDEAPAPPRGGGRGFRGRGRRGGYGGGQPDYQQDGGYYEEAPFPAPAGGRGRGRGRGRGGPARGRGRGGNANGNMVYAAASGA

SEQ ID NO: 13381 - protein, 291 aa, Triticum aestivum
  misc_feature (1)..(291): Ceres Seq. ID no. 15178671
MRNYITYATTLFQDKGCDEVVFKAMGRAINKTVMIAELIKRRIVGLHQNTATESTDITDTWEPLEEGLLPLETTRHVSMITITLSKKELDTSSVGYQSPLPADKVKPFVEYENEEDAHSPPGRGRGRGRGRGRGMGRGRDARGNGYMEYADGGWENEHAPTYAGNGYADHGPAYEGNGYARGRGRGFRGRGRRGGYGGQPDYQHDGGYYDEAPAPPRGGGRGFRGRGRRGGYGGGQPDYQQDGGYYEEAPFPAPAGGRGRGRGRGRGGPARGRGRGGNANGNMVYAAASGA

SEQ ID NO: 13382 - DNA, 1687 bp, Triticum aestivum
  misc_feature (1)..(1687): Ceres Seq. ID no. 15178681
aatcgaataatccgtcgactgttctggagagtgagcaggatcggattgttattctattgttgtccgcggcggccatggcgttcttcgaggagacggagtcgtactacgtcccctacctccgcgcccacctgcaccaattcgcagcgtcggtctccgcggcgagctgcgaggagggggcgggcgacgacgaggagtgccgcgacgaggcggccgcgctcaggctcaagatggtggccgtcgccgccatcctcatcgccggcgcggtcggcgtcgccatcccgctcgtcggccggaggcggcgcggcgggggcggcggcggcgagggcgggtcctccggcggcgggatgttcgtgctcgccaaggcgttcgcggcgggggtcatcctcgccacggggttcgtgcacatgatgcacgacgccgaggagaagttcgccgacccgtgcctcccggccatgccgtggcgccggttccccttcccgggcttcatcgccatgctcgccgcgctgggcacgctcgtcatggagttcgtcggcacccgcttctacgagcgcaggcacggcgaggaggccgctgcagccgcggccacagccgcgcgtgacgacaccacggcgctgctcgaggacggctccctgtcagggatggctgccgccgcgatgagcggcgacgatgagaagcaggacgccatgcacatcgtgggcatgcgcgcgcacgcggcggcgcaccagcacagccatgcgcatggccatgacgcgtgcgatggtggagccgtgtacgacgcccatgcacacgcccacgcccagggccatggccatgaccatgggcatgggagcgaggagaggccgtcccaagctcatcatgtggttgtctcgcagattctggagacggggattgtatctcattcggtgatcatcgggctatccttgggcgtttcgcaaagcccatgtaccattaaacctcttgttgccgccctctccttccaccagttcttcgagggttttgccttgggtggctgcatttctgaggcgcagttcaagaatttctctgcactcctgatggctttcttctttgctatcacaacacctgctgggatcaccgtgggggcggggatcgcgtcattctacaatgccaacagccccagggcattggtggtggaaggcattctggattcaatgtcatctggtatactggtctatatggcattagtggatctcattgctgctgatttcctgagccggaggatgagctgcaatccgaggctgcaagtgtgctcatacgttgccttgtttgtcggggctattgccatgtcatcactggctatctgggcttagtgccagtgaggattattgaagcttgggacgggctgcttggtgatcaatgcactacgacttgttgcctagctaccattaactgagtaagatgggaggcttttcctttcgctgtccattcttttgtttgttcttccatggtgctgggccgtgtaacgtcctcttttggtcatagaaaaggaagtccctctttgggtacattgtggtggtacagaattgggacaagttagttagggaataaagagtttaggagtcccaccagtctttgcagatgtacagttcatcctcggtgttagataagaggccttgtctgttctcaagtataatcttgcacgtacatcaatgtggatctcctgaaagcc

SEQ ID NO: 13383 - protein, 441 aa, Triticum aestivum
  misc_feature (1)..(441): Ceres Seq. ID no. 15178682
SNNPSTVLESEQDRIVILLLSAAAMAFFEETESYYVPYLRAHLHQFAASVSAASCEEGAGDDEECRDEAAALRLKMVAVAAILIAGAVGVAIPLVGRRRRGGGGGGEGGSSGGGMFVLAKAFAAGVILATGFVHMMHDAEEKFADPCLPAMPWRRFPFPGFIAMLAALGTLVMEFVGTRFYERRHGEEAAAAAATAARDDTTALLEDGSLSGMAAAAMSGDDEKQDAMHIVGMRAHAAAHQHSHAHGHDACDGGAVYDAHAHAHAQGHGHDHGHGSEERPSQAHHVVVSQILETGIVSHSVIIGLSLGVSQSPCTIKPLVAALSFHQFFEGFALGGCISEAQFKNFSALLMAFFFAITTPAGITVGAGIASFYNANSPRALVVEGILDSMSSGILVYMALVDLIAADFLSRRMSCNPRLQVCSYVALFVGAIAMSSLAIWA

SEQ ID NO: 13384 - protein, 417 aa, Triticum aestivum
  misc_feature (1)..(417): Ceres Seq. ID no. 15178683
MAFFEETESYYVPYLRAHLHQFAASVSAASCEEGAGDDEECRDEAAALRLKMVAVAAILIAGAVGVAIPLVGRRRRGGGGGGEGGSSGGGMFVLAKAFAAGVILATGFVHMMHDAEEKFADPCLPAMPWRRFPFPGFIAMLAALGTLVMEFVGTRFYERRHGEEAAAAAATAARDDTTALLEDGSLSGMAAAAMSGDDEKQDAMHIVGMRAHAAAHQHSHAHGHDACDGGAVYDAHAHAHAQGHGHDHGHGSEERPSQAHHVVVSQILETGIVSHSVIIGLSLGVSQSPCTIKPLVAALSFHQFFEGFALGGCISEAQFKNFSALLMAFFFAITTPAGITVGAGIASFYNANSPRALVVEGILDSMSSGILVYMALVDLIAADFLSRRMSCNPRLQVCSYVALFVGAIAMSSLAIWA

SEQ ID NO: 13385 - protein, 366 aa, Triticum aestivum
  misc_feature (1)..(366): Ceres Seq. ID no. 15178684
MVAVAAILIAGAVGVAIPLVGRRRRGGGGGGEGGSSGGGMFVLAKAFAAGVILATGFVHMMHDAEEKFADPCLPAMPWRRFPFPGFIAMLAALGTLVMEFVGTRFYERRHGEEAAAAAATAARDDTTALLEDGSLSGMAAAAMSGDDEKQDAMHIVGMRAHAAAHQHSHAHGHDACDGGAVYDAHAHAHAQGHGHDHGHGSEERPSQAHHVVVSQILETGIVSHSVIIGLSLGVSQSPCTIKPLVAALSFHQFFEGFALGGCISEAQFKNFSALLMAFFFAITTPAGITVGAGIASFYNANSPRALVVEGILDSMSSGILVYMALVDLIAADFLSRRMSCNPRLQVCSYVALFVGAIAMSSLAIWA

SEQ ID NO: 13386 - DNA, 1838 bp, Triticum aestivum
  misc_feature (1)..(1838): Ceres Seq. ID no. 15178685
atactctctatcgctttgtcccctcgctccaaacccgccgccgccgccgccgccgcccacgctagggttcgctcgcacgccgccgtcgccgccccctaaccccacagcacgtcgccgatagccagccagcaatggaaaatctccccgatgaattgctcgcggacatcctccgcagttttcctccacggagtctcgcggtgtgccggagcgtctgcaagcactggtgcgctgtcgtcgatgcccgcgggctgctcctcgcggtcgcgcgtcaagttccgtgctctctgcacggcatctacgttaactacgccatgatgcgaaggtcctgattcttctcccgcgtcgctccgcggactactagcccaatcgatggcatgctcagtttcctgcctggccagctgatgcgctatcgtagcgtcctggaccaccgcaacggtctcctcctgtacgaaaacagtcaggggatgtatgtgtgcaacccagcgacacgacggtgggcgaccctgtcggagccgccgcgcacggaaacttcctacagccacctgtttttctaccgccatcgtatgtatctaatgttcgatccaactatgtctctgcactacaatgtattattcttccctgatgtgcctgagaagccaaagccaccccatcttcaacctggtgagtcacaaatttcaagagcagattacgagcatgagcgtaactctttgggatcaatggaatggccaccatacatctacccactgcaagtgttctcgtcaaaaactgggcggtgggaagagaaacaatttattcgtgaaggtgatgcagcagttactgtgtcggatgtgtggttagatgcattggcaccaagtagcagccgcaactcgcttcaacgacatgcagtccactggcgagcttcgttttatgtacattgtgactctggtttcatcatgaggttgttattggaaaaacaaaactatctagtgatcaaaacccccaaactagataccactgggtttggtgtcgatgcaactgggcgcgagacacatcttacgacatacgggtatttgggtaaatccaagcatggtgtctattacaccactttgtgtggatacacacttcaagtgtgggtattgtgcaaaacattagaatcatgtcaaacaccggagtgggagctgaagcatcaagctaaccttacaaatttaaatctacaccatgaccaacacttaagaggagaaaggtatgaaaagtgctggatcttaaatggtcggagtgaagaatccgagcatggatgggattctagtgatgacagtgccattgatttagaaggagggtcggacatggattacaaagattatcactttgccgtggacttcttgggataccatccttacaaagaaattgctttcttgggcaaccgctttcaaggatttgcttactacctggaaaactccaagttaaagtacttgggatcaccttatccaccatacctaggcaactgtgattatggtttgcgacccatactcgagtcattcatctacactccttgcatggatgatctgcttcctattcagaatgatgcatgatgagctgatacttcacttaatttgatattaagtgggcaatataggttcaaggtgggataataaccgtgcggtcgttgggatgctattttgatgattgaataatgttcttttcaacacatggacaatttggttgttgttacgttttcttttaggttctccgtattgttatgtgaacttctgagtgatgtgtttggtttcaggagttgtaaaagtcaattaatattttggttgaaacatgttaatacatacagtataattttttattgctcc

SEQ ID NO: 13387 - protein, 397 aa, Triticum aestivum
  misc_feature (1)..(397): Ceres Seq. ID no. 15178686
MLSFLPGQLMRYRSVLDHRNGLLLYENSQGMYVCNPATRRWATLSEPPRTETSYSHLFFYRHRMYLMFDPTMSLHYNVLFFPDVPEKPKPPHLQPGESQISRADYEHERNSLGSMEWPPYIYPLQVFSSKTGRWEEKQFIREGDAAVTVSDVWLDALAPSSSRNSLQRHAVHWRASFYVHCDSGFIMRLLLEKQNYLVIKTPKLDTTGFGVDATGRETHLTTYGYLGKSKHGVYYTTLCGYTLQVWVLCKTLESCQTPEWELKHQANLTNLNLHHDQHLRGERYEKCWILNGRSEESEHGWDSSDDSAIDLEGGSDMDYKDYHFAVDFLGYHPYKEIAFLGNRFQGFAYYLENSKLKYLGSPYPPYLGNCDYGLRPILESFIYTPCMDDLLPIQNDA

SEQ ID NO: 13388 - protein, 388 aa, Triticum aestivum
  misc_feature (1)..(388): Ceres Seq. ID no. 15178687
MRYRSVLDHRNGLLLYENSQGMYVCNPATRRWATLSEPPRTETSYSHLFFYRHRMYLMFDPTMSLHYNVLFFPDVPEKPKPPHLQPGESQISRADYEHERNSLGSMEWPPYIYPLQVFSSKTGRWEEKQFIREGDAAVTVSDVWLDALAPSSSRNSLQRHAVHWRASFYVHCDSGFIMRLLLEKQNYLVIKTPKLDTTGFGVDATGRETHLTTYGYLGKSKHGVYYTTLCGYTLQVWVLCKTLESCQTPEWELKHQANLTNLNLHHDQHLRGERYEKCWILNGRSEESEHGWDSSDDSAIDLEGGSDMDYKDYHFAVDFLGYHPYKEIAFLGNRFQGFAYYLENSKLKYLGSPYPPYLGNCDYGLRPILESFIYTPCMDDLLPIQNDA

SEQ ID NO: 13389 - protein, 367 aa, Triticum aestivum
  misc_feature (1)..(367): Ceres Seq. ID no. 15178688
MYVCNPATRRWATLSEPPRTETSYSHLFFYRHRMYLMFDPTMSLHYNVLFFPDVPEKPKPPHLQPGESQISRADYEHERNSLGSMEWPPYIYPLQVFSSKTGRWEEKQFIREGDAAVTVSDVWLDALAPSSSRNSLQRHAVHWRASFYVHCDSGFIMRLLLEKQNYLVIKTPKLDTTGFGVDATGRETHLTTYGYLGKSKHGVYYTTLCGYTLQVWVLCKTLESCQTPEWELKHQANLTNLNLHHDQHLRGERYEKCWILNGRSEESEHGWDSSDDSAIDLEGGSDMDYKDYHFAVDFLGYHPYKEIAFLGNRFQGFAYYLENSKLKYLGSPYPPYLGNCDYGLRPILESFIYTPCMDDLLPIQNDA

SEQ ID NO: 13390 - DNA, 1232 bp, Triticum aestivum
  misc_feature (1)..(1232): Ceres Seq. ID no. 15178699
cattccaatcaagaaaggcatcaagccactccagtattcctcctttgcccgtgagtgtgtcctctcagtacgtgggtgtgtgtgagttcatctgtacgtgagtgagagtgagagcagcttgtgtgcagccgctggttttagctaggcttcctctgattagtacaaagtgagagctagctatttgtagtttcgggctaacaattggcatcagagcctcaggttatgccgaagcatatgccgaaggaaggcgtcgccggcgacggctccaagaccgccgggcagagctcggctgaggacacccgtgcggtggacgcgctcgcgctgcgaggcaggccgggaggtgagctgggtgcgccacgctccgtgcgagacgtgggcatgtccagtacctccttccctctcctcacgcggaccaactaccccagttggtccatcatgacaaatgtcatcatggagacgaggcatatgtggaaagccgtggaaaccgacgatgtcgagtacaaggaggaccggcgggcgatggaagcgatcttgcggtccgtcccagaggagatggtgctcacccttggcgccaaggagacggccaaggaagcatgggagaccatcaagactctgcgcatcggcgtggagcgcgtacgggagtcgaaggcccagaccttgcgcctctagtacgaggaaatccggttcaaggccggtgaacaagtcgacgacttcgccttgtggctgcaaggtctcgtcaacgagctcggaacactcggagatcccatcgacaacaagatggtcattctcaagttcctccgcgtcgtccccaggcagtacaagcaactggcctggtccatcgagagtttggtggatctctccaccatgacgatcgaggagctggtagggcggctgaaggttgtcgaggggcgcggcgacgaagccgacaatcgtgttggcggtgaactactgctcaccaaggagtagtgggacgcgcagcttcagcagtgcggctgcgacggctcttccggcagagggggaggagcccccacaggaagcagaggtcgcggaagaggcggaggccgcacccagagcgctggcggcaaccgcggtgcgcaagccaaggcgggcagggcgaggcgctggcaactactatataattgcatgtgatgtttattatgtttatgcatcttgtttacttagaacgacggtagtaaataagatgatcccttacagcaaaaaaaaaaaaaaaa

SEQ ID NO: 13391 - protein, 148 aa, Triticum aestivum
  misc_feature (1)..(148): Ceres Seq. ID no. 15178700
MPKHMPKEGVAGDGSKTAGQSSAEDTRAVDALALRGRPGGELGAPRSVRDVGMSSTSFPLLTRTNYPSWSIMTNVIMETRHMWKAVETDDVEYKEDRRAMEAILRSVPEEMVLTLGAKETAKEAWETIKTLRIGVERVRESKAQTLRL

SEQ ID NO: 13392 - protein, 144 aa, Triticum aestivum
  misc_feature (1)..(144): Ceres Seq. ID no. 15178701
MPKEGVAGDGSKTAGQSSAEDTRAVDALALRGRPGGELGAPRSVRDVGMSSTSFPLLTRTNYPSWSIMTNVIMETRHMWKAVETDDVEYKEDRRAMEAILRSVPEEMVLTLGAKETAKEAWETIKTLRIGVERVRESKAQTLRL

SEQ ID NO: 13393 - protein, 141 aa, Triticum aestivum
  misc_feature (1)..(141): Ceres Seq. ID no. 15178702
MSSWRRGICGKPWKPTMSSTRRTGGRWKRSCGPSQRRWCSPLAPRRRPRKHGRPSRLCASAWSAYGSRRPRPCASSTRKSGSRPVNKSTTSPCGCKVSSTSSEHSEIPSTTRWSFSSSSASSPGSTSNWPGPSRVWWISPP

SEQ ID NO: 13394 - DNA, 1305 bp, Triticum aestivum
  misc_feature (1)..(1305): Ceres Seq. ID no. 15179764
aaagccggtcagacgacgtctgaagcagaggaggaggagacaggattgaggaacccgcgagacgaagcaggaagccagaggcgctctccaatccaagcatgtaagcgagctaatcgatcctcttccgttcttccgcgcatcctgcgattaaccctcacgctgtcttacccatgtgccatccagtccgccggtgtttctatttctcaagaatttgcgttctttttgttcttgttggcaggaggtcgtcgattaaccggccgccgacgccgaacgatgacgacgaggaggaggaggaggtagggaaggaggcttctctcggagacatcatcaacctcaagttggtggagagcggcgagaaggagcggctgatggagcttctccgggagcggctcgtagagtgcggctggagggatgacatgaaggctctctgcagggcttatgcaaggaaaaagggaagaaataatgtaacattagatgatcttattcatgttattactccaaaaggaagaggtcagtgattttcatttgtccagttaatttatttctggttgcaagaggtatgttacttagttccagcgcacattagatacgagttggaagaattgttataaaataatataaccatggcttgcatatgtccatctttgcgtaagtgtcaagcaagggaaaaagtagtgcctaaactcccaagtcaattgcttccttactgtaacaggatctgggacaaaattttggagaacgttctttttttgcacctgcttctcgcctcctatgtttgccatagatttgtgcattttttgtcaataacaatgatgctaagccctaagcaaatgtttctttcatttgtgttggttcttgttgcacgattatcattttctcctgcttctgaaacagcctcggtgcccgatgcggtgaaggcagagctgctgcagcgcatccgatcctttctcatgtcttcctcgctttggtagcccatgaatcacgccgatcggaaggcacgtgtaggaagcttgaagcatcgatcttgaacgcgtgacacttcagagaagcagcaaatatcgacataaaacggatctggtgctgtggatgtgtttcctggtcaggcatgtggttggccctgttctctgactgcaccatcaccacactgtatttgtagcgctacagtgcgcggtctcttcgatgccacttggtaatcttaattagagaactcagaatcaatgcgtctggtagtactcgcgtatctcatgtcaaacctgattgagtgatcctcatgagggaccaacaagaacagacgccacttttgtc

SEQ ID NO: 13395 - protein, 115 aa, Triticum aestivum
  misc_feature (1)..(115): Ceres Seq. ID no. 15179765
MACICPSLRKCQAREKVVPKLPSQLLPYCNRIWDKILENVLFLHLLLASYVCHRFVHFLSITMMLSPKQMFLSFVLVLVARLSFSPASETASVPDAVKAELLQRIRSFLMSSSLW

SEQ ID NO: 13396 - protein, 115 aa, Triticum aestivum
  misc_feature (1)..(115): Ceres Seq. ID no. 15179766
MCHPVRRCFYFSRICVLFVLVGRRSSINRPPTPNDDDEEEEEVGKEASLGDIINLKLVESGEKERLMELLRERLVECGWRDDMKALCRAYARKKGRNNVTLDDLIHVITPKGRGQ

SEQ ID NO: 13397 - protein, 99 aa, Triticum aestivum
  misc_feature (1)..(99): Ceres Seq. ID no. 15179767
KAGQTTSEAEEEETGLRNPRDEAGSQRRSPIQACKRANRSSSVLPRILRLTLTLSYPCAIQSAGVSISQEFAFFLFLLAGGRRLTGRRRRTMTTRRRRR

SEQ ID NO: 13398 - DNA, 1592 bp, Triticum aestivum
  misc_feature (1)..(1592): Ceres Seq. ID no. 15179824
accaatcatttcctcttcactctcgctcctccttttctgccttgcaaccaaagccccatcccttgattcgatcgatcgttcgggatcctcctctcgcgcgcttctaggacctgtccctcgaagcttcttcttcttctccttggacttgtgcttggtatggcgcagacgaccgtggtggtgccggaggtgggcatgactgcggccgcgcccacggcgtgctcctgccctggttcgctgttcccctacccgccgccgcgtgccgggatggccgtgagccgcaagtgcctgcgggcggcgcaggcggagcttggcgccgggatgctcagtggcctggtcgagtccatgcgggcgtcctcccccacgcacgccagggccgccgccgccctctccgccggcgtcgacgacgagcacgccgcctggatggcgaggcacccgtccgccctgggaaagttcgaggagatcgtggccgcgtccaaggggaagcagatcgtcatgttcctggactacgacggcacgctgtcccccatcgtcgatgaccccgacgccgccttcatgagcgagacgatgcggatggcagtgcgcagcgtggccaagcacttcccgacggcgatcgtcagcggtcggtgccgcgacaaggtgtttgatttcgtgaagctggcggagctctactacgccggcagccacggcatggacatcaagggcccggccaaatcctcaaagtccaaggccaaaggagttctcttccaaccggcaagcgagttcctgcccatgatagaagaggtgcatcaacggctgatagaggagacgaagcacgtagccggggccaaggtggagaacaacaagttctgcgtgtcagttcacttcagatgcgtcgacgaaaagagctggggcgcgctggcggagacggtgaagggcgtgatgcgggagtaccccaagctgcgcatgtcgcaggggcggatggtgttcgaggtgcggcccaccatcaagtgggacaagggcaaggccctcgagttcctgctcgagtcgctgggcttcgccgactgccccaacgtgctgcccgtctacatcggcgacgaccgcaccgacgaggacgccttcaaggtgctgcgccggcggggccagggcgtcgggatcctcgtctccaagcaccccaaggacaccagcgcctccttctcgctgcaggagccggccgaggtcatggagttcctgctccgcctcgtcgagtggaagcagctctccaaggcgcgcctcaggctgcggcgacaggccgacgcctgatcggacgacaaggatcggccggccggcgccggcgggctggactaattatttcactgctacgtgtagcttagctagttaatgaatcccctgctcgtccgaacaaagccaaaggctacgtacgtggatgggaagaaggaacgtactatggcgaacctgtggctgtggagcattgttgcgccacatgttgtcttctaattaaccgcccttctttttgtggggatgtataccgtacctaccgattatgcatgcatgtaaattacctttgtccacgtacaaggggaggaaccatggaataaagaaagagaaacatgagc

SEQ ID NO: 13399 - protein, 373 aa, Triticum aestivum
  misc_feature (1)..(373): Ceres Seq. ID no. 15179825
MAQTTVVVPEVGMTAAAPTACSCPGSLFPYPPPRAGMAVSRKCLRAAQAELGAGMLSGLVESMRASSPTHARAAAALSAGVDDEHAAWMARHPSALGKFEEIVAASKGKQIVMFLDYDGTLSPIVDDPDAAFMSETMRMAVRSVAKHFPTAIVSGRCRDKVFDFVKLAELYYAGSHGMDIKGPAKSSKSKAKGVLFQPASEFLPMIEEVHQRLIEETKHVAGAKVENNKFCVSVHFRCVDEKSWGALAETVKGVMREYPKLRMSQGRMVFEVRPTIKWDKGKALEFLLESLGFADCPNVLPVYIGDDRTDEDAFKVLRRRGQGVGILVSKHPKDTSASFSLQEPAEVMEFLLRLVEWKQLSKARLRLRRQADA

SEQ ID NO: 13400 - protein, 361 aa, Triticum aestivum
  misc_feature (1)..(361): Ceres Seq. ID no. 15179826
MTAAAPTACSCPGSLFPYPPPRAGMAVSRKCLRAAQAELGAGMLSGLVESMRASSPTHARAAAALSAGVDDEHAAWMARHPSALGKFEEIVAASKGKQIVMFLDYDGTLSPIVDDPDAAFMSETMRMAVRSVAKHFPTAIVSGRCRDKVFDFVKLAELYYAGSHGMDIKGPAKSSKSKAKGVLFQPASEFLPMIEEVHQRLIEETKHVAGAKVENNKFCVSVHFRCVDEKSWGALAETVKGVMREYPKLRMSQGRMVFEVRPTIKWDKGKALEFLLESLGFADCPNVLPVYIGDDRTDEDAFKVLRRRGQGVGILVSKHPKDTSASFSLQEPAEVMEFLLRLVEWKQLSKARLRLRRQADA

SEQ ID NO: 13401 - protein, 337 aa, Triticum aestivum
  misc_feature (1)..(337): Ceres Seq. ID no. 15179827
MAVSRKCLRAAQAELGAGMLSGLVESMRASSPTHARAAAALSAGVDDEHAAWMARHPSALGKFEEIVAASKGKQIVMFLDYDGTLSPIVDDPDAAFMSETMRMAVRSVAKHFPTAIVSGRCRDKVFDFVKLAELYYAGSHGMDIKGPAKSSKSKAKGVLFQPASEFLPMIEEVHQRLIEETKHVAGAKVENNKFCVSVHFRCVDEKSWGALAETVKGVMREYPKLRMSQGRMVFEVRPTIKWDKGKALEFLLESLGFADCPNVLPVYIGDDRTDEDAFKVLRRRGQGVGILVSKHPKDTSASFSLQEPAEVMEFLLRLVEWKQLSKARLRLRRQADA

SEQ ID NO: 13402 - DNA, 942 bp, Triticum aestivum
  misc_feature (1)..(942): Ceres Seq. ID no. 15179828
acctacccccgttcccccaaaacccaggtacccaggctttccctctgcgagccccccgagccctaagctccagcgagcccctatggcggcgcaggagatcaaggacgccgtgcaggcttacacgggcctctcacccgcggccgccttcaccgtgctggctctcatgctcgccacctacctcatcgtctccaccctcttcgtcgccccagacgccgccgcttccgcaccggcggctcatccccagccgcctcagcagcagaagcaggtgacggaggcggaggcggaggcggaggagccgttcgtgccgctgtttccggaccctgtgcaggtgggcgagatcacgctcgagcagctcagggcgtatgacggcaaggatccagccaagtccatcctcatcgccatccgcggtcaggtctacgacgtctcgcgcgggaggctgttttatggacctcaaggaccatactccttgtttgccgggagggatgcatctcgggccctggcattgatgtcatttgaccttaatgacctgactggagacttggaaggcctgagcccagacgaactggaggttttacaagactgggaagagaagtttaaagagaggtaccctgtggtgggccatcttccttgtgagaaaggcaacagctgatgctcagcctgatcacgaggaagagaaggcctaactctgtgtctgggttcttgtctcgttgcctgtaagttcttgtgtcttttactactggactgcgagcggtagagagatctaatgcgctgacaggtgatgttgtttgtatgtgtgctgcatgagtgtgtgtgactaatgcacctgctttactactactactttggttggtgtgtgtcagtgtgtgggaggaattttgagtgacagagaaaccttggcgctgaaaggccgtgctttagattcgtgccataatccaattcacc

SEQ ID NO: 13403 - protein, 215 aa, Triticum aestivum
  misc_feature (1)..(215): Ceres Seq. ID no. 15179829
PTPVPPKPRYPGFPSASPPSPKLQRAPMAAQEIKDAVQAYTGLSPAAAFTVLALMLATYLIVSTLFVAPDAAASAPAAHPQPPQQQKQVTEAEAEAEEPFVPLFPDPVQVGEITLEQLRAYDGKDPAKSILIAIRGQVYDVSRGRLFYGPQGPYSLFAGRDASRALALMSFDLNDLTGDLEGLSPDELEVLQDWEEKFKERYPVVGHLPCEKGNS

SEQ ID NO: 13404 - protein, 188 aa, Triticum aestivum
  misc_feature (1)..(188): Ceres Seq. ID no. 15179830
MAAQEIKDAVQAYTGLSPAAAFTVLALMLATYLIVSTLFVAPDAAASAPAAHPQPPQQQKQVTEAEAEAEEPFVPLFPDPVQVGEITLEQLRAYDGKDPAKSILIAIRGQVYDVSRGRLFYGPQGPYSLFAGRDASRALALMSFDLNDLTGDLEGLSPDELEVLQDWEEKFKERYPVVGHLPCEKGNS

SEQ ID NO: 13405 - protein, 161 aa, Triticum aestivum
  misc_feature (1)..(161): Ceres Seq. ID no. 15179831
MLATYLIVSTLFVAPDAAASAPAAHPQPPQQQKQVTEAEAEAEEPFVPLFPDPVQVGEITLEQLRAYDGKDPAKSILIAIRGQVYDVSRGRLFYGPQGPYSLFAGRDASRALALMSFDLNDLTGDLEGLSPDELEVLQDWEEKFKERYPVVGHLPCEKGNS

SEQ ID NO: 13406 - DNA, 935 bp, Triticum aestivum
  misc_feature (1)..(935): Ceres Seq. ID no. 15179844
caaaatcaaactattcatacaacaacagctagaggaacactaggttacatgtccccagagtccctacgaggtgatatcacacctatgtctgacatattcagtttgggtgtaataatcttggaggtaataacagggcacaggggctacccatatgatattggaacatcttccaaggacttcattgagctagagcttcaaaaatggagaaataggttgcaaaatgaaccgtggtctagatcactagaaacagattgccaacaaataaaaaaatgcattcagataggtctaatctgcgtgaatcctgagcggaccaaaagacctacaatgaagaaaattattgatatgcttgaaggcttggaaagtacggatttgtacattaacaatcagttatcaagccatgaaatccaagcggagctatagctattgaaggaggtcaccatgtatccgctgcggcttccatcttcttgacatatgcagtactacctacggacatggttgcggcaaaaggatgaaaggcatcaaagtctttgggagctggtgtaactcaattatcagcgcctgttaattaggcccagagtcggaacaagaaatcagtagacaggggaacaagaaatctattgccggtgttgtacataatagtggttaatccaatacctttggactttggtatatgcatagtctgtaagtaacaaacattttatctcgctagaagtaatcgctgcaccgaatcaaaacccccatctgccaggtcacctagatgttctagcccatcagacctgaacctgggtcgccgtcgtgtgggtgccggtgctgttgtgcgtgatcatggcagattttattcttggacgggctgtagctgctcgctactcttttgagaacgtctgtatcattgatcatgttgaagcctgggcggtatggtatgctgtactttttgc

SEQ ID NO: 13407 - protein, 139 aa, Triticum aestivum
  misc_feature (1)..(139): Ceres Seq. ID no. 15179845
QNQTIHTTTARGTLGYMSPESLRGDITPMSDIFSLGVIILEVITGHRGYPYDIGTSSKDFIELELQKWRNRLQNEPWSRSLETDCQQIKKCIQIGLICVNPERTKRPTMKKIIDMLEGLESTDLYINNQLSSHEIQAEL

SEQ ID NO: 13408 - protein, 123 aa, Triticum aestivum
  misc_feature (1)..(123): Ceres Seq. ID no. 15179846
MSPESLRGDITPMSDIFSLGVIILEVITGHRGYPYDIGTSSKDFIELELQKWRNRLQNEPWSRSLETDCQQIKKCIQIGLICVNPERTKRPTMKKIIDMLEGLESTDLYINNQLSSHEIQAEL

SEQ ID NO: 13409 - protein, 111 aa, Triticum aestivum
  misc_feature (1)..(111): Ceres Seq. ID no. 15179847
MSDIFSLGVIILEVITGHRGYPYDIGTSSKDFIELELQKWRNRLQNEPWSRSLETDCQQIKKCIQIGLICVNPERTKRPTMKKIIDMLEGLESTDLYINNQLSSHEIQAEL

SEQ ID NO: 13410 - DNA, 990 bp, Triticum aestivum
  misc_feature (1)..(990): Ceres Seq. ID no. 15179852
tgtatccagccgcagccgttgccaactactcctcctctcgaatcgcggcaaggcaatcaaccggggccggcgggtcggttgaggaaggaggccgggggcgcggcatggactgcggcggtgaggagcaggcgaggcagaacggccatgccggcgacggcggcgacccggcggagtggaagaaggtggccgagctccgggccgtggtggaggcgcaggaccccgcagccaaggaggaggacgacttcatgctgcgccggttcctgcgcgcccgagaccacaacatcagcaaggcgtcggcgatgttcctcaagtacctgagttggaagcgcggcgccaagcctcgcggctccatcaccgaggccgaggtgcgcggcgagctcgtgcaggacaagctctacattcagggcttcgacaagacgggccgccccatgatctacctcttcggcaaccgccacttcgccgccaagcgagaccttgaggagttcaagcgatacgtcatctacatccttgacaacacctgcaccaagttgccggtagggcaggagaagtttgcgtcggtggtggatctcaaggggtgggggtacgcgaattgcgacatccgggcgaagctggcggcgttggagatcatgcagaactactacccggagcggctgggccgggtgttcttgatccacgtgccttacgtgttcatggcggcgtggaagatggtctaccccttcatcgacgacaacaccaagaagaagtttgtctttgttgcagacaaggaccttgacggcacgcttcgggacgccatcgacttgtcccagctgcccgagcagtacggcggcaagctcagactcgagggatacaagagctcgtcgacaacgctatagtcaacgtgtgactgatttggtttattaagggtgtccagttgtgtgaaagtatgctacattgccccgcttgataagcaagtaatactcatcctttcatctatgcagggccgtttaactc

SEQ ID NO: 13411 - protein, 289 aa, Triticum aestivum
  misc_feature (1)..(289): Ceres Seq. ID no. 15179853
YPAAAVANYSSSRIAARQSTGAGGSVEEGGRGRGMDCGGEEQARQNGHAGDGGDPAEWKKVAELRAVVEAQDPAAKEEDDFMLRRFLRARDHNISKASAMFLKYLSWKRGAKPRGSITEAEVRGELVQDKLYIQGFDKTGRPMIYLFGNRHFAAKRDLEEFKRYVIYILDNTCTKLPVGQEKFASVVDLKGWGYANCDIRAKLAALEIMQNYYPERLGRVFLIHVPYVFMAAWKMVYPFIDDNTKKKFVFVADKDLDGTLRDAIDLSQLPEQYGGKLRLEGYKSSSTTL

SEQ ID NO: 13412 - protein, 255 aa, Triticum aestivum
  misc_feature (1)..(255): Ceres Seq. ID no. 15179854
MDCGGEEQARQNGHAGDGGDPAEWKKVAELRAVVEAQDPAAKEEDDFMLRRFLRARDHNISKASAMFLKYLSWKRGAKPRGSITEAEVRGELVQDKLYIQGFDKTGRPMIYLFGNRHFAAKRDLEEFKRYVIYILDNTCTKLPVGQEKFASVVDLKGWGYANCDIRAKLAALEIMQNYYPERLGRVFLIHVPYVFMAAWKMVYPFIDDNTKKKFVFVADKDLDGTLRDAIDLSQLPEQYGGKLRLEGYKSSSTTL

SEQ ID NO: 13413 - protein, 208 aa, Triticum aestivum
  misc_feature (1)..(208): Ceres Seq. ID no. 15179855
MLRRFLRARDHNISKASAMFLKYLSWKRGAKPRGSITEAEVRGELVQDKLYIQGFDKTGRPMIYLFGNRHFAAKRDLEEFKRYVIYILDNTCTKLPVGQEKFASVVDLKGWGYANCDIRAKLAALEIMQNYYPERLGRVFLIHVPYVFMAAWKMVYPFIDDNTKKKFVFVADKDLDGTLRDAIDLSQLPEQYGGKLRLEGYKSSSTTL

SEQ ID NO: 13414 - DNA, 696 bp, Triticum aestivum
  misc_feature (1)..(696): Ceres Seq. ID no. 15179877
accagcaccagccctccttttcaaatcgctttcaaacaggaacacatcgccgcctcctcctccccttcctccgctccctcccccatccatccagtgatccatggccgccgcctcgcccgagttcttcaacccggcggacgccttctcgccgcgcatgcacctcctctccgccggcgctggagacggcggctgtggcgacggcgacgaatactaccgctgctgcaggacgcccacgggcgccgggatcggctgcctgggccaggcggccacctgcccgccggcgccgcggaagccgcgcgcgcagcccgacgcggcctgccggaagcgcctcttcgacgtccaggtcatcagcctccgcttcgacgacctcgacgccatcttccgcccctcgccgccgccgccctgccacgaccgcaacaacaagcagcagcagcggcggcagcggagccgccgcgtgctcggcaggctcgccgctggctccaccggccggcgcagccgcgccagcttaaattaagtgcctgccattagcagtcagtacccagtagttgagttgagttgacacttgtgtggatggatgattgagttatcagccatcttcaggtaaaaacagtagtggtagccacgacccatacttcgctttgcacacccatcctctgtaatcatccgtcataataatattattatttctactgtcat

SEQ ID NO: 13415 - protein, 175 aa, Triticum aestivum
  misc_feature (1)..(175): Ceres Seq. ID no. 15179878
TSTSPPFQIAFKQEHIAASSSPSSAPSPIHPVIHGRRLARVLQPGGRLLAAHAPPLRRRWRRRLWRRRRILPLLQDAHGRRDRLPGPGGHLPAGAAEAARAARRGLPEAPLRRPGHQPPLRRPRRHLPPLAAAALPRPQQQAAAAAAAEPPRARQARRWLHRPAQPRQLKLSACH

SEQ ID NO: 13416 - protein, 168 aa, Triticum aestivum
  misc_feature (1)..(168): Ceres Seq. ID no. 15179879
QHQPSFSNRFQTGTHRRLLLPFLRSLPHPSSDPWPPPRPSSSTRRTPSRRACTSSPPALETAAVATATNTTAAAGRPRAPGSAAWARRPPARRRRGSRARSPTRPAGSASSTSRSSASASTTSTPSSAPRRRRPATTATTSSSSGGSGAAACSAGSPLAPPAGAAAPA

SEQ ID NO: 13417 - protein, 137 aa, Triticum aestivum
  misc_feature (1)..(137): Ceres Seq. ID no. 15179880
MAAASPEFFNPADAFSPRMHLLSAGAGDGGCGDGDEYYRCCRTPTGAGIGCLGQAATCPPAPRKPRAQPDAACRKRLFDVQVISLRFDDLDAIFRPSPPPPCHDRNNKQQQRRQRSRRVLGRLAAGSTGRRSRASLN

SEQ ID NO: 13418 - DNA, 898 bp, Triticum aestivum
  misc_feature (1)..(898): Ceres Seq. ID no. 15179885
agtctgctgtctgctctgtgcgccgacccacgcttgtctttctccccaatctccaaactctctctagtccccaccacaacccgctccccatggcgacggccgccgccaccgccgccaagccggcggcgaggacgacggtgaacgtggccggggccgtgtaccgcgtgcagctggccctcctcgacggcgcagcggcctccaacgagcccctcctccacgcggccgccgctatcctctcccgcgccgactacgacgacgtcgtcaccgagcgctccatcgccgaggcgtgcggccacccagcgtgcaccagctccctccccgaccccgccaaccccaaggcggcgccgcggttccacatctccctccgcgagcaccgcgtctacgacctcgaggaggcccgcaagttctgctccgagcgctgcctcgtcgcctccgcggccttcgccgcctcgctcccgcccgaccgccccttcgggatcccgcccaacaggctggacgccctggtcgcgctcttcgagggcagcggggacggtccggggctagggtttcggtcggacggtgggaagaaggaggacgaggggaggaaggtggagattgtggagaaggagacgcctgggcctggggaggtgacgctgcaggagtggattgggccgtcgggcgccatcgagggctatgtgccccgccatcaccccattcatgaaggtgattgtttcatactgaactctgttatttactttgacaattttgtagtctggatattcattcttgcatttgattatgttgccattggttgactggaggacactaggattgttgagaatagctgaggcattttactgtctttgtgtgctgggaattttatgtggattgatctgaataactgagaaattttatcgtc

SEQ ID NO: 13419 - protein, 263 aa, Triticum aestivum
  misc_feature (1)..(263): Ceres Seq. ID no. 15179886
SAVCSVRRPTLVFLPNLQTLSSPHHNPLPMATAAATAAKPAARTTVNVAGAVYRVQLALLDGAAASNEPLLHAAAAILSRADYDDVVTERSIAEACGHPACTSSLPDPANPKAAPRFHISLREHRVYDLEEARKFCSERCLVASAAFAASLPPDRPFGIPPNRLDALVALFEGSGDGPGLGFRSDGGKKEDEGRKVEIVEKETPGPGEVTLQEWIGPSGAIEGYVPRHHPIHEGDCFILNSVIYFDNFVVWIFILAFDYVAIG

SEQ ID NO: 13420 - protein, 234 aa, Triticum aestivum
  misc_feature (1)..(234): Ceres Seq. ID no. 15179887
MATAAATAAKPAARTTVNVAGAVYRVQLALLDGAAASNEPLLHAAAAILSRADYDDVVTERSIAEACGHPACTSSLPDPANPKAAPRFHISLREHRVYDLEEARKFCSERCLVASAAFAASLPPDRPFGIPPNRLDALVALFEGSGDGPGLGFRSDGGKKEDEGRKVEIVEKETPGPGEVTLQEWIGPSGAIEGYVPRHHPIHEGDCFILNSVIYFDNFVVWIFILAFDYVAIG

SEQ ID NO: 13421 - DNA, 1113 bp, Triticum aestivum
  misc_feature (1)..(1113): Ceres Seq. ID no. 15224290
gagccgcagagacgttcgcaccaactcctctgaactctgaagcctgaacggagcggcggagaggaaggggagagatcacccaccggcggcgaggggagatggccggaggcgaggaagggtggaggaggagcggcatcgaggtgagcaccctgcagttcggctacgacggggaggcgccgctcttcgcgcgcttcaacctccgcgtcgcccccggctcgcgctgcctcctcgtcggcgccaacggatccggcaagactactctcttgaagattcttgcaggaaaacatatggttggaggaaaggatgttgtccgtgttcttaatggttctgcttttcatgacacacaattcgtgtgcagtggtgacctttcctacttgggtggttcttggagtcggaatgtcagttcagttggtgatgttccactacaaggcgatttctctgctgagcacatgatatttggagttgatggggttgatcctgttaggcgagagaagctgattgatctactggatattgatctgcaatggcgcatgcataaagtttcagatggacagcgccgcagggtacaaatttgcatgggtcttcttcatccatacaaggtactcttactcgatgagatcaccgtggatctcgatgtcgtgaccaggatggatctcctcgacttcttcaaggaagaatgcgagcagagggaagccacgatcgtctacgccacccacatattcgacgggctggagacatgggccaccgacatcgcgtacatccaagagggcgagctgaaaaagtcggcgaaatactcggacatcgaagagctgaagacggccaagaacctgctgtcggtcgttgagtcatggctgaaatccgagaccaagctcccgaagaaagaacccgcccgcgtcgagagccagcccaggcgcccttccccgttcgacgcctcccctttccgggcgtcgcgccacatggcctactaccgatgatgaccgtgtaaaacctctgcacccattccggtgccatgcaactctggagtctgtatcttccttttttttgttccccatccatccctgtatacggcaatgtatctatctaaatctaaataataaacaagtcgagcgtgcc

SEQ ID NO: 13422 - protein, 291 aa, Triticum aestivum
  misc_feature (1)..(291): Ceres Seq. ID no. 15224291
MAGGEEGWRRSGIEVSTLQFGYDGEAPLFARFNLRVAPGSRCLLVGANGSGKTTLLKILAGKHMVGGKDVVRVLNGSAFHDTQFVCSGDLSYLGGSWSRNVSSVGDVPLQGDFSAEHMIFGVDGVDPVRREKLIDLLDIDLQWRMHKVSDGQRRRVQICMGLLHPYKVLLLDEITVDLDVVTRMDLLDFFKEECEQREATIVYATHIFDGLETWATDIAYIQEGELKKSAKYSDIEELKTAKNLLSVVESWLKSETKLPKKEPARVESQPRRPSPFDASPFRASRHMAYYR

SEQ ID NO: 13423 - protein, 228 aa, Triticum aestivum
  misc_feature (1)..(228): Ceres Seq. ID no. 15224292
MVGGKDVVRVLNGSAFHDTQFVCSGDLSYLGGSWSRNVSSVGDVPLQGDFSAEHMIFGVDGVDPVRREKLIDLLDIDLQWRMHKVSDGQRRRVQICMGLLHPYKVLLLDEITVDLDVVTRMDLLDFFKEECEQREATIVYATHIFDGLETWATDIAYIQEGELKKSAKYSDIEELKTAKNLLSVVESWLKSETKLPKKEPARVESQPRRPSPFDASPFRASRHMAYYR

SEQ ID NO: 13424 - protein, 174 aa, Triticum aestivum
  misc_feature (1)..(174): Ceres Seq. ID no. 15224293
MIFGVDGVDPVRREKLIDLLDIDLQWRMHKVSDGQRRRVQICMGLLHPYKVLLLDEITVDLDVVTRMDLLDFFKEECEQREATIVYATHIFDGLETWATDIAYIQEGELKKSAKYSDIEELKTAKNLLSVVESWLKSETKLPKKEPARVESQPRRPSPFDASPFRASRHMAYYR

SEQ ID NO: 13425 - DNA, 527 bp, Triticum aestivum
  misc_feature (1)..(527): Ceres Seq. ID no. 15224346
caaaaccatggatgaaattaatgacaatatggagaacatgaggcagatccaggatctactgtctgcgcctatgggagcagcaagtgatttcgatgaagatgagctggaagctgaacttgcggatttggagggcgaggagttggaggcacagctactagcaccaaccacaagtgctcctatgactgctccagcgcgtgtacctcagcagtcgagtcggcccactgctcagagtagtaaaaccgaagatgatgagctggcagctttacaagcagagatggctatgtaattagtttgcaggacttgggcgtgggcatgtttagagaccagattgtgcaaatatatttgggaccacggtattttcatggaggtcttcctgggaagacgtcagaagtgcacacagaaactagttgcatctcaccctgatgatctcttatgtatatcttatcatgttacttctgtaatcaaacatctaagatgcgctgttgagcgcattatcagctaataaagggcatctgccatcattgtat

SEQ ID NO: 13426 - protein, 94 aa, Triticum aestivum
  misc_feature (1)..(94): Ceres Seq. ID no. 15224347
KTMDEINDNMENMRQIQDLLSAPMGAASDFDEDELEAELADLEGEELEAQLLAPTTSAPMTAPARVPQQSSRPTAQSSKTEDDELAALQAEMAM

SEQ ID NO: 13427 - protein, 92 aa, Triticum aestivum
  misc_feature (1)..(92): Ceres Seq. ID no. 15224348
MDEINDNMENMRQIQDLLSAPMGAASDFDEDELEAELADLEGEELEAQLLAPTTSAPMTAPARVPQQSSRPTAQSSKTEDDELAALQAEMAM

SEQ ID NO: 13428 - protein, 85 aa, Triticum aestivum
  misc_feature (1)..(85): Ceres Seq. ID no. 15224349
MENMRQIQDLLSAPMGAASDFDEDELEAELADLEGEELEAQLLAPTTSAPMTAPARVPQQSSRPTAQSSKTEDDELAALQAEMAM

SEQ ID NO: 13429 - DNA, 884 bp, Triticum aestivum
  misc_feature (1)..(884): Ceres Seq. ID no. 15224386
agctcttcctctgcccacccaacaaccacagactcagaccagcagctcagctctcaactgccgtcgatggcgagatgcagcaagatccacaacatcgtcttgctccggcagaccctgcagcggtggcggtcccgtgccgcggcgcgcgctgctacgggtgacagcatggtgtcggtgccggcggggcacgtggcggtgtgcgtgggcggcgcgtcgcggcggttcgtcgtgcgggcggcgcacctgaaccaccccgtgttccgggagctgctccggcaggcggaggaggagtacgggttcccctccggcgcgtgcggccccatcgcgctcccctgcgacgaggaccgcttccgggacgtcctccgccgcgtctcctccgaggagcgcctcggcgtggcggccgtcagcagctgcgacatcgcgacgcggccgttgctgcagaggatggcggcggaggagctcgtgtggtgaccggtcgatggaaacaacacgcataagccattcggcatacgtgctctgttctcacataaggtagccctggcgatttgactccggcgacggcagccgtggcatcagcaagtggtcttccgtacgcggaaatggcgaaatcatgtcgccgctgggaagactccgcccgcccaccggcgcgcacggcaagcgcccgaggaccgaatgtcttattgacggacgttgtccggtgtccggtgtagccgtcagcggcgccccgaaacacgaatcggggacggtgccgcgcgtgagcaaccgagcctctgtacgacttgaaaagttagactgtagttagaagaaatttgtagtgattagttcaagatgaagatgacgaattttgtgattgtcgtaattaatcgattgcattccttgccgcc

SEQ ID NO: 13430 - protein, 156 aa, Triticum aestivum
  misc_feature (1)..(156): Ceres Seq. ID no. 15224387
SSSSAHPTTTDSDQQLSSQLPSMARCSKIHNIVLLRQTLQRWRSRAAARAATGDSMVSVPAGHVAVCVGGASRRFVVRAAHLNHPVFRELLRQAEEEYGFPSGACGPIALPCDEDRFRDVLRRVSSEERLGVAAVSSCDIATRPLLQRMAAEELVW

SEQ ID NO: 13431 - protein, 134 aa, Triticum aestivum
  misc_feature (1)..(134): Ceres Seq. ID no. 15224388
MARCSKIHNIVLLRQTLQRWRSRAAARAATGDSMVSVPAGHVAVCVGGASRRFVVRAAHLNHPVFRELLRQAEEEYGFPSGACGPIALPCDEDRFRDVLRRVSSEERLGVAAVSSCDIATRPLLQRMAAEELVW

SEQ ID NO: 13432 - protein, 101 aa, Triticum aestivum
  misc_feature (1)..(101): Ceres Seq. ID no. 15224389
MVSVPAGHVAVCVGGASRRFVVRAAHLNHPVFRELLRQAEEEYGFPSGACGPIALPCDEDRFRDVLRRVSSEERLGVAAVSSCDIATRPLLQRMAAEELVW

SEQ ID NO: 13433 - DNA, 1002 bp, Triticum aestivum
  misc_feature (1)..(1002): Ceres Seq. ID no. 15224408
tctagcatcgctactgaaactgaatttatcttctgaatctttgacttcaattcccatacaacaatggtcatctctactgcgcctggatgtttggaactgtagcaaattaacaacagttgacttcactcctcgttccttaccagcagtaaaagtaatcacaattcgaaattgtgaagctttattgtctctacctggcgaaacgtttgtggagttctgttgtctagaggaattgatgatacgtgaatgtccaaatattgagtggagaggcttgacatttcctatatcgcttcgggagctgtacctcaatgactgtggagacatctcaccatgggttccgaactcactggagcacctcaaccacttaacccatctggcgttgatgaacctcaagtacatcaaatctatctctgcacaaatatgggcacagagtttgtcaaagctggaattcttgcagatctgtgagtgtcctcatctgcaagcgattggtggtcccaaaggaattgcaggcattactaatgcatttgttgaatcgtgtgacaagctaaagggtataaagcaacctttccggagaggtagaatggcccacttcggccacttttgacacatgttagctcctgcaggtggagtcgaaccagagagaaggcgtgaagtgccaaagtgaccctgaacctcctgaagcctgaagagggttaaacccctgtgacttgttactctgctttcttgctttggtggtccgagaggtgagagcaaatggcttaacaaacatgaagcctgacgttttttttccttggttttcttttggcgaagcaaagagcaccgtagcaggcaggcaatttccccgtaactgatactcttgcgttcctgcgctgtgatgtctggtggtgagtttaggacctttcccctgtgttgagcatatgcgctttggcccgcccaaaggtgatgacgcttttgctgttatggcaattggcaagtggtagcaaattgatgaactatttgtccttt

SEQ ID NO: 13434 - protein, 199 aa, Triticum aestivum
  misc_feature (1)..(199): Ceres Seq. ID no. 15224409
LASLLKLNLSSESLTSIPIQQWSSLLRLDVWNCSKLTTVDFTPRSLPAVKVITIRNCEALLSLPGETFVEFCCLEELMIRECPNIEWRGLTFPISLRELYLNDCGDISPWVPNSLEHLNHLTHLALMNLKYIKSISAQIWAQSLSKLEFLQICECPHLQAIGGPKGIAGITNAFVESCDKLKGIKQPFRRGRMAHFGHF

SEQ ID NO: 13435 - protein, 122 aa, Triticum aestivum
  misc_feature (1)..(122): Ceres Seq. ID no. 15224410
MIRECPNIEWRGLTFPISLRELYLNDCGDISPWVPNSLEHLNHLTHLALMNLKYIKSISAQIWAQSLSKLEFLQICECPHLQAIGGPKGIAGITNAFVESCDKLKGIKQPFRRGRMAHFGHF

SEQ ID NO: 13436 - DNA, 1812 bp, Triticum aestivum
  misc_feature (1)..(1812): Ceres Seq. ID no. 15224473
taattcactacgccgctatttattttactattaattgccccgactccgtctccgtccccgtccccgtcccccgtccccgccccctccgccgtcgccaccccaaattcccacgcaaaccctaagccagccagccagccagctagctcgacagcccagcccagcccaatggcggaggacgccggcgacagggaccagcagcagcagcagcagcccgccgcggccgcgggggccggagcagggcacgaggacgggggcggcagggacgagagctccgtcaagctcttcgtcggccaggtgcccaagctcatgaccgaggccgagctggccgccatgttccgcgacgtcgccgtcgtcgacgaggtcaccgtcatccgcgacaaggccaccaaggcgtcccgaggttgctgcttcctgatctgcccatcaagggaggaggctgacaaagcagtgaatgcatatcacaacaaacgcacgcttcctggggccccaagtccattgcaagtaaaatatgccgatggagagttggaaaggctggagcacaaacttttcattggaatgctacccaaaaatgtgacagatactgaaatgactgatttattttcacaatatggaaatatcaaggatttgcagattttgagaggttcacaacagacgagcaaagctggttgcgcctttctgaagtatgaaacaaaagagcaggctgtggcagctatcgaagctctaaatgggaagcacaaaatagagggttcaagtgtgcctttggttgtaaaatgggctgacacagaaaaggaaaggcaggctcgaaaagcacaaaaggctcaatttccgcagtctaatatgtcaaatgcaaatgccatgcaacaaagttcattatttggtgctttacagatgggatatgtgcctccgtataatggatttggctaccagccacaaggaacctatggacttatgcagtaccctttatctccgatgcaaaatcaagcaggcttcccgaatatggttcagcctgtcaatcaaggaagctcaatacggggcgttaattctgaattatcccctaattcacttcctaggtcattcaattcaatgcagttgggcagcccttatccagctgggcctggtatgcagtatcctgggtcatatgctggtggtggcatcaatagtcgtccttacatgaactctcataattcagtcaataaagttccgaatgcaaatgctacatctcccacatcttcaagcaccagcagcaacactggtcctcagctagagggtcctcctggagccaacttgtttatctatcacatcccgcaagaatttggcgaccaagatctagcaaatgcatttcagagttttggtagagtattgagtgccaaagtgtttgtagacaaaacgaccggtgctagtaaatgcttcggttttgtaagctacgattctcctgctcctgcgcaggcagccataagtatgatgaatgggttccaattaggtggcaaaaagctgaaagtacaactcaagagagacaacagcaagcacaataaactttattgacagcgcccagtcgataccttccaacacgatcaggaaaaaccggtacatatgtgtcgcacaattgatcgtttgtcccattgtttcttctggcctccaccatgtgtcgtcgtcggtgggggcttgtgtatcttggctcaattcaattcaacattcttgaaaactgctaaagtgtgtatttcgtcgcagcatagttgtagcatctgtaccatcagattcagacccattgtacatcagacattgattcattcaattgctcccttttttctaccg

SEQ ID NO: 13437 - protein, 458 aa, Triticum aestivum
  misc_feature (1)..(458): Ceres Seq. ID no. 15224474
MAEDAGDRDQQQQQQPAAAAGAGAGHEDGGGRDESSVKLFVGQVPKLMTEAELAAMFRDVAVVDEVTVIRDKATKASRGCCFLICPSREEADKAVNAYHNKRTLPGAPSPLQVKYADGELERLEHKLFIGMLPKNVTDTEMTDLFSQYGNIKDLQILRGSQQTSKAGCAFLKYETKEQAVAAIEALNGKHKIEGSSVPLVVKWADTEKERQARKAQKAQFPQSNMSNANAMQQSSLFGALQMGYVPPYNGFGYQPQGTYGLMQYPLSPMQNQAGFPNMVQPVNQGSSIRGVNSELSPNSLPRSFNSMQLGSPYPAGPGMQYPGSYAGGGINSRPYMNSHNSVNKVPNANATSPTSSSTSSNTGPQLEGPPGANLFIYHIPQEFGDQDLANAFQSFGRVLSAKVFVDKTTGASKCFGFVSYDSPAPAQAAISMMNGFQLGGKKLKVQLKRDNSKHNKLY

SEQ ID NO: 13438 - protein, 411 aa, Triticum aestivum
  misc_feature (1)..(411): Ceres Seq. ID no. 15224475
MTEAELAAMFRDVAVVDEVTVIRDKATKASRGCCFLICPSREEADKAVNAYHNKRTLPGAPSPLQVKYADGELERLEHKLFIGMLPKNVTDTEMTDLFSQYGNIKDLQILRGSQQTSKAGCAFLKYETKEQAVAAIEALNGKHKIEGSSVPLVVKWADTEKERQARKAQKAQFPQSNMSNANAMQQSSLFGALQMGYVPPYNGFGYQPQGTYGLMQYPLSPMQNQAGFPNMVQPVNQGSSIRGVNSELSPNSLPRSFNSMQLGSPYPAGPGMQYPGSYAGGGINSRPYMNSHNSVNKVPNANATSPTSSSTSSNTGPQLEGPPGANLFIYHIPQEFGDQDLANAFQSFGRVLSAKVFVDKTTGASKCFGFVSYDSPAPAQAAISMMNGFQLGGKKLKVQLKRDNSKHNKLY

SEQ ID NO: 13439 - protein, 403 aa, Triticum aestivum
  misc_feature (1)..(403): Ceres Seq. ID no. 15224476
MFRDVAVVDEVTVIRDKATKASRGCCFLICPSREEADKAVNAYHNKRTLPGAPSPLQVKYADGELERLEHKLFIGMLPKNVTDTEMTDLFSQYGNIKDLQILRGSQQTSKAGCAFLKYETKEQAVAAIEALNGKHKIEGSSVPLVVKWADTEKERQARKAQKAQFPQSNMSNANAMQQSSLFGALQMGYVPPYNGFGYQPQGTYGLMQYPLSPMQNQAGFPNMVQPVNQGSSIRGVNSELSPNSLPRSFNSMQLGSPYPAGPGMQYPGSYAGGGINSRPYMNSHNSVNKVPNANATSPTSSSTSSNTGPQLEGPPGANLFIYHIPQEFGDQDLANAFQSFGRVLSAKVFVDKTTGASKCFGFVSYDSPAPAQAAISMMNGFQLGGKKLKVQLKRDNSKHNKLY

SEQ ID NO: 13440 - DNA, 1467 bp, Triticum aestivum
  misc_feature (1)..(1467): Ceres Seq. ID no. 15224513
cccggccgtcatggcgtcggcggacgaagcgaatgcggcggccgaaggtacggaggggaagaattggcagcggaaggggaagcacaagaaggagaagccgtgggacgatgaccccaacatcgaccgctggacggtggagaagttcgacccctcctggaacgagggcggcctgctggaagtcagctccttctccaccctcttcccccagtaccgagagaagtacctgcaggagacatggccgatcgtcaagggcgcactgaaggagtttggagtctcatgcgagctcaatttggtggaaggatccatgacggtttccaccaccaggaagaccagggacccctacattattcttaaggccagggacctgataaagctcttgtcgcgaagtgtccctgcaccccaagcaattaaagtgctcaatgatgagatgaactgtgatattgtcaagattggtagcatcataagaaacaaggaaagatttgtcaaaaggagagaacgccttttgggccctaacctgtccacccttaaggctatagagattttgactggctgctacatcttagtacagggaaatactgtggctgccatgggttcctttaagggactgaaacaggtccggaagattgtagaggattgcataaagaacataaagcatccagtgtaccacattaaggaactccttattaaacgtgagctggctaaaaatcctgccctagccactgaaagttgggacaggtttctaccgaactttaagaaaaagaatgtcaagcaaaagaagcccaatactaaggagaagaaacaatacacaccctttccgccgcctcagcagcctagcaagattgatcttgaactggagagtggtgagtatttcatgagtgacaagaagaagtcagctaagaaatggcaagagaagctagataagcaatcagagaaatcagaagaaaagaaaagaaagagagaagctgcatttgttccaccaaaggagaacactgctggtctatctgaatctgccaaaagtactaatgacaacgagattgctgatatcacaaaatccttaaagaaaaaggcaaagaaattcagaaatagtgaagctgaggaaaatgtgaaaatcgagtcatatgttgcgagcaacgaagaatcacgctccaaaaagaagcgcagatcgtcatccaagtaaccgcaatatgtcagctactgggatgacaattttaattgtttcaagtagttgaacacctgccattgaagtaggttttcaagcttcaagctttagtggtgaaacagacaaaccttcaaccttaagtggtgaacattgtagtctgtttgttggctactgccgtctgattactccaggagtattgcagctttcctgcatagtccacggcttctaatttacaagatcagatccgtcagcagtctttttagaaacatatgaagagcagttaatgataagtccgttaattcttcttt

SEQ ID NO: 13441 - protein, 391 aa, Triticum aestivum
  misc_feature (1)..(391): Ceres Seq. ID no. 15224514
PAVMASADEANAAAEGTEGKNWQRKGKHKKEKPWDDDPNIDRWTVEKFDPSWNEGGLLEVSSFSTLFPQYREKYLQETWPIVKGALKEFGVSCELNLVEGSMTVSTTRKTRDPYIILKARDLIKLLSRSVPAPQAIKVLNDEMNCDIVKIGSIIRNKERFVKRRERLLGPNLSTLKAIEILTGCYILVQGNTVAAMGSFKGLKQVRKIVEDCIKNIKHPVYHIKELLIKRELAKNPALATESWDRFLPNFKKKNVKQKKPNTKEKKQYTPFPPPQQPSKIDLELESGEYFMSDKKKSAKKWQEKLDKQSEKSEEKKRKREAAFVPPKENTAGLSESAKSTNDNEIADITKSLKKKAKKFRNSEAEENVKIESYVASNEESRSKKKRRSSSK

SEQ ID NO: 13442 - protein, 388 aa, Triticum aestivum
  misc_feature (1)..(388): Ceres Seq. ID no. 15224515
MASADEANAAAEGTEGKNWQRKGKHKKEKPWDDDPNIDRWTVEKFDPSWNEGGLLEVSSFSTLFPQYREKYLQETWPIVKGALKEFGVSCELNLVEGSMTVSTTRKTRDPYIILKARDLIKLLSRSVPAPQAIKVLNDEMNCDIVKIGSIIRNKERFVKRRERLLGPNLSTLKAIEILTGCYILVQGNTVAAMGSFKGLKQVRKIVEDCIKNIKHPVYHIKELLIKRELAKNPALATESWDRFLPNFKKKNVKQKKPNTKEKKQYTPFPPPQQPSKIDLELESGEYFMSDKKKSAKKWQEKLDKQSEKSEEKKRKREAAFVPPKENTAGLSESAKSTNDNEIADITKSLKKKAKKFRNSEAEENVKIESYVASNEESRSKKKRRSSSK

SEQ ID NO: 13443 - protein, 290 aa, Triticum aestivum
  misc_feature (1)..(290): Ceres Seq. ID no. 15224516
MTVSTTRKTRDPYIILKARDLIKLLSRSVPAPQAIKVLNDEMNCDIVKIGSIIRNKERFVKRRERLLGPNLSTLKAIEILTGCYILVQGNTVAAMGSFKGLKQVRKIVEDCIKNIKHPVYHIKELLIKRELAKNPALATESWDRFLPNFKKKNVKQKKPNTKEKKQYTPFPPPQQPSKIDLELESGEYFMSDKKKSAKKWQEKLDKQSEKSEEKKRKREAAFVPPKENTAGLSESAKSTNDNEIADITKSLKKKAKKFRNSEAEENVKIESYVASNEESRSKKKRRSSSK

SEQ ID NO: 13444 - DNA, 1386 bp, Triticum aestivum
  misc_feature (1)..(1386): Ceres Seq. ID no. 15224695
cggaagcaaacggcagcccagcacaaattcctagcggcagccagcagccgggcgccggaagcgagcaagatggcggcggcggctgtggcggcgcgggcgtacgaggcagcggcgcggtccgcgctggcggcgctggagcgcaacctgctgccggacgcggtcacccggcggctcacgcgcctcctgctcgcgcagcgcctccgcctcggctacctcccctccgcgccgctccagctgcaggacctcatcctcttcgcccactcacttgaaggcatgcccattgccatcgaaacggacacagctaaaacccagcactacgagctgccgaccacattcttcaagctagtgctcggaaaaaacctcaaatacagctcatgttacttccctgatgattcaagcaccctagaagatgccgaggttgcaatgttggagttgtactgtgagagggcgcagctgcaagatggccaaagcgttctcgatgttggatgtggatggggatccctctctgtatacatagcaaagaaatataggaactgcaatatcacggggatatgcaactcaacaactcaaaaggcttttatagaagagcagtgtagggagaatgagctatccaatgttgagatcattgtagcagacatcagcaagtttgagatggagcgttcttttgacaggatcatatcgatagagatgtttgagcacatgaaaaactacaaggcacttcttaagaagatatccagatggatgaaagaggattccttattgtttgttcactacttctgccacaagacatttgcgtatcacttcgaggacaagaatgacgatgattggatcacaaggtatttctttactggaggaacaatgccatcagcaaacctccttctgtactttcaggaagatgtatctgtggtcaatcattggcttgtcagtggcacacattatgctagaactagcgaggagtggctgaaacgcatggacaagaacatcgctgccataaggccaatctttgagaagacttatgggagggaatcagctaccaaatggatagcttattggaggacattcttcatctcagtagctgaactttttggatataacaatggtgatgaatggatggttgcacatcacctgttccgaaagaagtagaagtgccgctggacatttctggagcaaagtagaattgtatgttgagaatcatccatcacacaggctatgcctagttatataattatttttgtgtgtgttgagctgttatcctcctttttttttttgaagagaggcaaaagatttgcctcattcattaaataagaggaatagagtttatgttcgtgttacaacagtgacagcgccgcaacacccgaaataaaggtgaccaactactctcgcgtc

SEQ ID NO: 13445 - protein, 380 aa, Triticum aestivum
  misc_feature (1)..(380): Ceres Seq. ID no. 15224696
RKQTAAQHKFLAAASSRAPEASKMAAAAVAARAYEAAARSALAALERNLLPDAVTRRLTRLLLAQRLRLGYLPSAPLQLQDLILFAHSLEGMPIAIETDTAKTQHYELPTTFFKLVLGKNLKYSSCYFPDDSSTLEDAEVAMLELYCERAQLQDGQSVLDVGCGWGSLSVYIAKKYRNCNITGICNSTTQKAFIEEQCRENELSNVEIIVADISKFEMERSFDRIISIEMFEHMKNYKALLKKISRWMKEDSLLFVHYFCHKTFAYHFEDKNDDDWITRYFFTGGTMPSANLLLYFQEDVSVVNHWLVSGTHYARTSEEWLKRMDKNIAAIRPIFEKTYGRESATKWIAYWRTFFISVAELFGYNNGDEWMVAHHLFRKK

SEQ ID NO: 13446 - protein, 357 aa, Triticum aestivum
  misc_feature (1)..(357): Ceres Seq. ID no. 15224697
MAAAAVAARAYEAAARSALAALERNLLPDAVTRRLTRLLLAQRLRLGYLPSAPLQLQDLILFAHSLEGMPIAIETDTAKTQHYELPTTFFKLVLGKNLKYSSCYFPDDSSTLEDAEVAMLELYCERAQLQDGQSVLDVGCGWGSLSVYIAKKYRNCNITGICNSTTQKAFIEEQCRENELSNVEIIVADISKFEMERSFDRIISIEMFEHMKNYKALLKKISRWMKEDSLLFVHYFCHKTFAYHFEDKNDDDWITRYFFTGGTMPSANLLLYFQEDVSVVNHWLVSGTHYARTSEEWLKRMDKNIAAIRPIFEKTYGRESATKWIAYWRTFFISVAELFGYNNGDEWMVAHHLFRKK

SEQ ID NO: 13447 - protein, 289 aa, Triticum aestivum
  misc_feature (1)..(289): Ceres Seq. ID no. 15224698
MPIAIETDTAKTQHYELPTTFFKLVLGKNLKYSSCYFPDDSSTLEDAEVAMLELYCERAQLQDGQSVLDVGCGWGSLSVYIAKKYRNCNITGICNSTTQKAFIEEQCRENELSNVEIIVADISKFEMERSFDRIISIEMFEHMKNYKALLKKISRWMKEDSLLFVHYFCHKTFAYHFEDKNDDDWITRYFFTGGTMPSANLLLYFQEDVSVVNHWLVSGTHYARTSEEWLKRMDKNIAAIRPIFEKTYGRESATKWIAYWRTFFISVAELFGYNNGDEWMVAHHLFRKK

SEQ ID NO: 13448 - DNA, 1898 bp, Triticum aestivum
  misc_feature (1)..(1898): Ceres Seq. ID no. 15224862
acttttccttgcggacggacgtgccaaccgtttccttccgaaaacaagaaccggcggccgccgcccgagctcgaactcgacagccatggcctcccaactagggccgccgacggcgagatatgccccacctgctcccagcaccatcacttctataggcgacgaccttctccgcgagatcttcctccatctcccctccctcccgagcctcgtccgcgccgcccttgcctgccgcaccttcctccacgctgtccgttcgtcccccgtcttccgccggggattccggtcgctccacccatccccattccttggcctctttatcgagtcctacagctgttccctcccttctttcgtccccctccgccgccggtccgacccggacctcgccgccgcaatacgcggcggcgatctcttcctcactcgactcccggaggacaacgacgacccctctcccgggtgggagatccagggctgccaagacggctacgtcgtcctgctcaaccggagcaccgagcagattgccgcctacaaccccctcacactggctctggatttcctccctccactgccccatgagatgtcccgctcccgctccctcgagatccacgtcgtcttctcccaagagggccaggggtcgttccgtgcggtctgcgtccgccacggcaggtccctgcggcgggcgcgggcgcgcatcgccgtcttctcatcggacgacaggggcaaggggtggctggttatgccggcggtggacaccgcgacgccacagcctggggatggtggagttgacaagcccatgtttcacactggcaccctggtgaatggattcatctattggaagcgcaagacccaagcctgcatgctcgtgctcaacactgcgacattgcagttctctgaaatggatttgccgcagcccctaaaagggaaacactccacaaacttcaggcttggtcagaccaaggatggcgagctctgtatcgtttgcgcagacgactcccgtgcaaaggagtggacgcttgctgtttggttctggagagccgacgatggcggtgtcaagagatggatggagaagaggtttccgttgcacaagtttgttgagttcaccgagtgttcaggagaagatcatgtcgtggtgaacagtttggcagttgtcgacggctttgtgtacctgtctagttactgtcacgcaagtactgaatctcctgagtggtttctatccttctgccttgaaacagcggagcttatcaaactcttccggggtacatttgacagccctctccatccctacatcatggcctggccaccttctttggtatgcaacaaggaggattcagagaccaaagtaactggggccaatgttgtagaagatggtttgtaagcacagagaaatttccctctgttctcgtcagtgttgcagtcatgcaaagaagctttggttagtgatgatggggcaaaatttgcagagatagaggcctttttactttctagggtgagaagaagtctgagcaaaatggctgctctacatacagaattgacaactgcgaggagtcacatcttgaggataggtgttcttcgatagctacagggaatagacagaagcagagagctgatgatcaatttacaaggagaggcagtggagaacctgtgaccacttatttgccagttgaacttgcctctttggaatggtcaccgcgtatttcttctgttgagatgatcggcgtatttcttctgttgagatgagcttttattcagcgtgcctagctcccaagagaccgagtgagcttttatcttgatcttcattgaggtttctgtattgctgtctatgattgagtttgttgttgcacttgatccatcttacagcactttatgtccatcctaatattttagtttaaacagttcttctc

SEQ ID NO: 13449 - protein, 456 aa, Triticum aestivum
  misc_feature (1)..(456): Ceres Seq. ID no. 15224863
LFLADGRANRFLPKTRTGGRRPSSNSTAMASQLGPPTARYAPPAPSTITSIGDDLLREIFLHLPSLPSLVRAALACRTFLHAVRSSPVFRRGFRSLHPSPFLGLFIESYSCSLPSFVPLRRRSDPDLAAAIRGGDLFLTRLPEDNDDPSPGWEIQGCQDGYVVLLNRSTEQIAAYNPLTLALDFLPPLPHEMSRSRSLEIHVVFSQEGQGSFRAVCVRHGRSLRRARARIAVFSSDDRGKGWLVMPAVDTATPQPGDGGVDKPMFHTGTLVNGFIYWKRKTQACMLVLNTATLQFSEMDLPQPLKGKHSTNFRLGQTKDGELCIVCADDSRAKEWTLAVWFWRADDGGVKRWMEKRFPLHKFVEFTECSGEDHVVVNSLAVVDGFVYLSSYCHASTESPEWFLSFCLETAELIKLFRGTFDSPLHPYIMAWPPSLVCNKEDSETKVTGANVVEDGL

SEQ ID NO: 13450 - protein, 428 aa, Triticum aestivum
  misc_feature (1)..(428): Ceres Seq. ID no. 15224864
MASQLGPPTARYAPPAPSTITSIGDDLLREIFLHLPSLPSLVRAALACRTFLHAVRSSPVFRRGFRSLHPSPFLGLFIESYSCSLPSFVPLRRRSDPDLAAAIRGGDLFLTRLPEDNDDPSPGWEIQGCQDGYVVLLNRSTEQIAAYNPLTLALDFLPPLPHEMSRSRSLEIHVVFSQEGQGSFRAVCVRHGRSLRRARARIAVFSSDDRGKGWLVMPAVDTATPQPGDGGVDKPMFHTGTLVNGFIYWKRKTQACMLVLNTATLQFSEMDLPQPLKGKHSTNFRLGQTKDGELCIVCADDSRAKEWTLAVWFWRADDGGVKRWMEKRFPLHKFVEFTECSGEDHVVVNSLAVVDGFVYLSSYCHASTESPEWFLSFCLETAELIKLFRGTFDSPLHPYIMAWPPSLVCNKEDSETKVTGANVVEDGL

SEQ ID NO: 13451 - protein, 265 aa, Triticum aestivum
  misc_feature (1)..(265): Ceres Seq. ID no. 15224865
MSRSRSLEIHVVFSQEGQGSFRAVCVRHGRSLRRARARIAVFSSDDRGKGWLVMPAVDTATPQPGDGGVDKPMFHTGTLVNGFIYWKRKTQACMLVLNTATLQFSEMDLPQPLKGKHSTNFRLGQTKDGELCIVCADDSRAKEWTLAVWFWRADDGGVKRWMEKRFPLHKFVEFTECSGEDHVVVNSLAVVDGFVYLSSYCHASTESPEWFLSFCLETAELIKLFRGTFDSPLHPYIMAWPPSLVCNKEDSETKVTGANVVEDGL

SEQ ID NO: 13452 - DNA, 1139 bp, Triticum aestivum
  misc_feature (1)..(1139): Ceres Seq. ID no. 15224904
gctagcttcctgagtagtacatcctcttgacgttgaccattcgctttcccatcgcagaggatcatgtccatgttcacctccagcagctccggcgtgccgtccccgtctccggaggcgggcagcagcatggtcagaacggcgcggcagccccagcgccaggcgtttgactacttcgtggttctagacttcgaggcgacgtgcgagaaaggcgcgcagatctacccgcaggagatcatcgagttcccctccgtgctcgtcgacggcgccaccggcgacctcgactccgccgagttccgcacctacgtgcgcccgcagcaccaccccgcgctgaccgacttctgcagggacctcaccggcatccggcaggcggacgtcgacggcggcgtgcagctggccgaggcgctccgcctgcacgccgcgtggctgcaggactcggcgtgggccaggagcggcggctgcttcgccgtcgtcacgtggggggactgggacctccgcaccatgctggagacggagtgccgcttcaaagacctcgccaagccgccctgcttcaaccactggatcaacctcaagatccccttcgccgcggcgatgggcggaggtcggtgggctgctctgcggtcggccgtcgaagcggcggggctccagtgggagggccgcgcgcactgcggcctcgacgacgctcgtaacacggcgcggcttctcgtggagctgatgcggcgcggcgtccagctcagcatcacgacctcgaccccatcgcctcaggtaactgtaactccatacggtggcgccgccgcggcgtgctactgctactgcggggtggcgagcagaggtggcgtggtggccgtgccggggccgatgcaggggagatgcttctacggttgcggtaactggacgccgtccatgggagcagcgtgctcctacttcacgtgggcagattaattgctactcaatccatgggtttggatttggagaatacgctataaattatatgtgcgagtatcactccagctctttgatttctcttgtcaacacagtgttgacaacactcttttgagcttggttttcttaacaacttgaatcctattgcgtggtgtatttgattttgtcatgaacttcaaattctatacatgtttgagtac

SEQ ID NO: 13453 - protein, 291 aa, Triticum aestivum
  misc_feature (1)..(291): Ceres Seq. ID no. 15224905
MSMFTSSSSGVPSPSPEAGSSMVRTARQPQRQAFDYFVVLDFEATCEKGAQIYPQEIIEFPSVLVDGATGDLDSAEFRTYVRPQHHPALTDFCRDLTGIRQADVDGGVQLAEALRLHAAWLQDSAWARSGGCFAVVTWGDWDLRTMLETECRFKDLAKPPCFNHWINLKIPFAAAMGGGRWAALRSAVEAAGLQWEGRAHCGLDDARNTARLLVELMRRGVQLSITTSTPSPQVTVTPYGGAAAACYCYCGVASRGGVVAVPGPMQGRCFYGCGNWTPSMGAACSYFTWAD

SEQ ID NO: 13454 - protein, 289 aa, Triticum aestivum
  misc_feature (1)..(289): Ceres Seq. ID no. 15224906
MFTSSSSGVPSPSPEAGSSMVRTARQPQRQAFDYFVVLDFEATCEKGAQIYPQEIIEFPSVLVDGATGDLDSAEFRTYVRPQHHPALTDFCRDLTGIRQADVDGGVQLAEALRLHAAWLQDSAWARSGGCFAVVTWGDWDLRTMLETECRFKDLAKPPCFNHWINLKIPFAAAMGGGRWAALRSAVEAAGLQWEGRAHCGLDDARNTARLLVELMRRGVQLSITTSTPSPQVTVTPYGGAAAACYCYCGVASRGGVVAVPGPMQGRCFYGCGNWTPSMGAACSYFTWAD

SEQ ID NO: 13455 - protein, 270 aa, Triticum aestivum
  misc_feature (1)..(270): Ceres Seq. ID no. 15224907
MVRTARQPQRQAFDYFVVLDFEATCEKGAQIYPQEIIEFPSVLVDGATGDLDSAEFRTYVRPQHHPALTDFCRDLTGIRQADVDGGVQLAEALRLHAAWLQDSAWARSGGCFAVVTWGDWDLRTMLETECRFKDLAKPPCFNHWINLKIPFAAAMGGGRWAALRSAVEAAGLQWEGRAHCGLDDARNTARLLVELMRRGVQLSITTSTPSPQVTVTPYGGAAAACYCYCGVASRGGVVAVPGPMQGRCFYGCGNWTPSMGAACSYFTWAD

SEQ ID NO: 13456 - DNA, 1194 bp, Triticum aestivum
  misc_feature (1)..(1194): Ceres Seq. ID no. 15224924
cccgttccgttcccgaccccttccccgccacggacaaaaacccagcgagccgcgagccgcgcgcctccggaccctcctcgccggcatggcctgcacccacctcgccgccgcctcgtcaccggcgaccaccgccgccgcgctgcgtgcacgggcgacggcccccgccgccggtttcgcgcgccttcctgccaccctccatcctgagaacggtgggctggccctcaggggtaggagggcggtcacgcccgtggtcctcgccgccgggccggccgccgcggcgccggtggccgaccgtgacggaacaccggccgcggtgaagcagcccatcatcgtcatcgacaactatgatagctttacctacaacctgtgccagtatatgggggagcttggattaaattttgaggtgtaccgtaatgatgaacttaccatagaggaggtaaagaggatgaaaccacgaggaatacttatttcaccagggcctggtgaaccgcaagattcaggtatatcattgcagactgttctggaacttgggccaaccatcccaatattcggagtttgcatgggtctgcagtgcattggagaggcatttggagggaagattatccgcgttccttctggtgtgatgcatggaaaaagctctccagtttactatgacgaagttctaggaaagtccatattcgagggcttgtcaaacccttttaccgccgcaagatatcatagcttggtcatcgaggaggaaaccttcccgcacgatgaactggaagtcacggcatggactgaagatggacttgtcatggctgctcgccacaagaagtacacgcatatccagggtgttcagttccacccagagagcatcatcacccctgaaggcaagaaaatcatcctcaactttgcgagatatgtcgaggagtttgagaagcagacctccgaggggaagtagaggattcaggaagcagagcagttagaggaagtagagactattgttgagagatcaggcaggcaggaaggggcctaaaagccaagcagatttaggggaaatgaataagggaaaaagagcttttccattgccattcgtttggttcattgtaatatatcattgtggatctagatcccgtatgaacttcattcggtcaattatgttcgtcgtggtgctctttctcaaataataaatcggtggaagcagaagctgttagc

SEQ ID NO: 13457 - protein, 312 aa, Triticum aestivum
  misc_feature (1)..(312): Ceres Seq. ID no. 15224925
PFRSRPLPRHGQKPSEPRAARLRTLLAGMACTHLAAASSPATTAAALRARATAPAAGFARLPATLHPENGGLALRGRRAVTPVVLAAGPAAAAPVADRDGTPAAVKQPIIVIDNYDSFTYNLCQYMGELGLNFEVYRNDELTIEEVKRMKPRGILISPGPGEPQDSGISLQTVLELGPTIPIFGVCMGLQCIGEAFGGKIIRVPSGVMHGKSSPVYYDEVLGKSIFEGLSNPFTAARYHSLVIEEETFPHDELEVTAWTEDGLVMAARHKKYTHIQGVQFHPESIITPEGKKIILNFARYVEEFEKQTSEGK

SEQ ID NO: 13458 - protein, 284 aa, Triticum aestivum
  misc_feature (1)..(284): Ceres Seq. ID no. 15224926
MACTHLAAASSPATTAAALRARATAPAAGFARLPATLHPENGGLALRGRRAVTPVVLAAGPAAAAPVADRDGTPAAVKQPIIVIDNYDSFTYNLCQYMGELGLNFEVYRNDELTIEEVKRMKPRGILISPGPGEPQDSGISLQTVLELGPTIPIFGVCMGLQCIGEAFGGKIIRVPSGVMHGKSSPVYYDEVLGKSIFEGLSNPFTAARYHSLVIEEETFPHDELEVTAWTEDGLVMAARHKKYTHIQGVQFHPESIITPEGKKIILNFARYVEEFEKQTSEGK

SEQ ID NO: 13459 - protein, 187 aa, Triticum aestivum
  misc_feature (1)..(187): Ceres Seq. ID no. 15224927
MGELGLNFEVYRNDELTIEEVKRMKPRGILISPGPGEPQDSGISLQTVLELGPTIPIFGVCMGLQCIGEAFGGKIIRVPSGVMHGKSSPVYYDEVLGKSIFEGLSNPFTAARYHSLVIEEETFPHDELEVTAWTEDGLVMAARHKKYTHIQGVQFHPESIITPEGKKIILNFARYVEEFEKQTSEGK

SEQ ID NO: 13460 - DNA, 745 bp, Triticum aestivum
  misc_feature (1)..(745): Ceres Seq. ID no. 15224932
attaagtgtccgcggctgctagctcctcctccctctgtggtacgatcatcctcctctgctacgttgaccaagatggccgcgcgccttgcgcttgtggcgacgctcctgtgcgccggagccgcggccgccgcggcgcagcaggcgagcaacgtccgcgcgacctaccactactaccgcccggccgagaacggctgggacctgggcgcccctgccgtgagcgcctactgctccacctgggacgccggcaagccgtactcgtggcggtccaagtacggctggacggccttctgcggccccgccggcccccgcggccaggcgtcgtgcgggaggtgcatccgggtgaccaacacggggacgggggcgcagatcacggccaggatcgtggaccagtgcgccaacggcgggctggacctcgactgggacaccgtgttcgtcaagatcgataccgatggcatggggtaccagaggggccacctcatcgtcaactacgagttcgtcgactgcggcgacaaccacatcaacttccatggaaagaacgagacgctaccggccagcactggtgctgttgagtaagtaaaagctagtagcacatgcatgcattgatgttgcattgttgcgctgtacgcaaacatgtatgcatgcatggcacggaagttgaataagtcaaacgggaagttggaatgaatttcatgtatgaatcttatgattgtaacagcggaaagtgaaataaatctcagaagttgac

SEQ ID NO: 13461 - protein, 190 aa, Triticum aestivum
  misc_feature (1)..(190): Ceres Seq. ID no. 15224933
IKCPRLLAPPPSVVRSSSSATLTKMAARLALVATLLCAGAAAAAAQQASNVRATYHYYRPAENGWDLGAPAVSAYCSTWDAGKPYSWRSKYGWTAFCGPAGPRGQASCGRCIRVTNTGTGAQITARIVDQCANGGLDLDWDTVFVKIDTDGMGYQRGHLIVNYEFVDCGDNHINFHGKNETLPASTGAVE

SEQ ID NO: 13462 - protein, 166 aa, Triticum aestivum
  misc_feature (1)..(166): Ceres Seq. ID no. 15224934
MAARLALVATLLCAGAAAAAAQQASNVRATYHYYRPAENGWDLGAPAVSAYCSTWDAGKPYSWRSKYGWTAFCGPAGPRGQASCGRCIRVTNTGTGAQITARIVDQCANGGLDLDWDTVFVKIDTDGMGYQRGHLIVNYEFVDCGDNHINFHGKNETLPASTGAVE

SEQ ID NO: 13463 - DNA, 488 bp, Triticum aestivum
  misc_feature (1)..(488): Ceres Seq. ID no. 15224952
cgccaaatccaccaaatccgccggagccagagatcggagagggagaagatggtgcgggtggcgaccttcttcgggatgaccttcggcgcgttcctcttctgggagtccatggacaaggtccacgtctggatcgccctccaccaggacgagaagcaagaaaggatggaaagggagatggagataaagaagatgcaagcagacctaattgctcaagcaaaagagagtgaatcatgattgtcttttcgccaatggtttcaactagttgctttgtcatgtttttactttccaagtgataagccttggctgatgtatgcttcacacctctaataaaccaagttgttataactttgttgaatccaagaggcaatgctcatggtaaatcatgttcagtttataaaacagcacaacccagcttcactgccttggttatgaggtgttgttttgaatagcttatgcaatattttgtaatgaaggtgctatttttcttt

SEQ ID NO: 13464 - protein, 77 aa, Triticum aestivum
  misc_feature (1)..(77): Ceres Seq. ID no. 15224953
RQIHQIRRSQRSEREKMVRVATFFGMTFGAFLFWESMDKVHVWIALHQDEKQERMEREMEIKKMQADLIAQAKESES

SEQ ID NO: 13465 - protein, 74 aa, Triticum aestivum
  misc_feature (1)..(74): Ceres Seq. ID no. 15224954
PNPPNPPEPEIGEGEDGAGGDLLRDDLRRVPLLGVHGQGPRLDRPPPGREARKDGKGDGDKEDASRPNCSSKRE

SEQ ID NO: 13466 - protein, 61 aa, Triticum aestivum
  misc_feature (1)..(61): Ceres Seq. ID no. 15224955
MVRVATFFGMTFGAFLFWESMDKVHVWIALHQDEKQERMEREMEIKKMQADLIAQAKESES

SEQ ID NO: 13467 - DNA, 605 bp, Triticum aestivum
  misc_feature (1)..(605): Ceres Seq. ID no. 15224958
aggctttgagtccattttgggaccggttcaggggatagatacagcagcaagtccaacaacggtagtagtaacaaagatggaggagtaccaggggcagcacggtcacgccgtcgacgagtacggcgaccccgtggccgggcacggcaaccctgtggcaccctccgccgccggcgcgttcacgggcgccggcgggcagctccagcacggcagggaggagcacaagaccggcgggatactgcaccgctccggcagctccagctccagctcgtcttctgaggacgacggcatgggcgggaggaggaagaagggcgtcaaggagaagctcccgggtggccacaaagacaaccagcagcacatggccgcgggaactggagctggcggggcttatgggcagcacacggccgcgggaactggggccggcggagactacggccagcatgggcacgcaggaatggccggcgccggcgccggcgagaagaagggactcgtggacaagatcaaggagaagctgcccggacagcactgagctgccggccccggctggctgtccgctgcctactagtcctcttgagctaaggctcgagctgaataaaaacaaattgagg

SEQ ID NO: 13468 - protein, 174 aa, Triticum aestivum
  misc_feature (1)..(174): Ceres Seq. ID no. 15224959
GFESILGPVQGIDTAASPTTVVVTKMEEYQGQHGHAVDEYGDPVAGHGNPVAPSAAGAFTGAGGQLQHGREEHKTGGILHRSGSSSSSSSSEDDGMGGRRKKGVKEKLPGGHKDNQQHMAAGTGAGGAYGQHTAAGTGAGGDYGQHGHAGMAGAGAGEKKGLVDKIKEKLPGQH

SEQ ID NO: 13469 - protein, 149 aa, Triticum aestivum
  misc_feature (1)..(149): Ceres Seq. ID no. 15224960
MEEYQGQHGHAVDEYGDPVAGHGNPVAPSAAGAFTGAGGQLQHGREEHKTGGILHRSGSSSSSSSSEDDGMGGRRKKGVKEKLPGGHKDNQQHMAAGTGAGGAYGQHTAAGTGAGGDYGQHGHAGMAGAGAGEKKGLVDKIKEKLPGQH

SEQ ID NO: 13470 - DNA, 1192 bp, Triticum aestivum
  misc_feature (1)..(1192): Ceres Seq. ID no. 15225038
cttcgctttccctctggccgccctctcccccgcggaagaaacccaaccctagcctccgccgtgcgtctccggcgacccttcagcagcaccgccgggcggcctcgcgggctctcctggagcggttccgctgcaaatctgaagcgcgagcgttgaggaggaggaggtgttggtcggcgatttactgatttggggggcggaggaggatggggtcgtcgtcgaaggtggtgcggccggaggaggtgctggagtcgctgaagaacgacggcaccgtcgacgcgctccgcatgaagatcatggcccagctcaaggccgacgaggacatgaagaaaaatactatgatgatggtggaacaaagcaaagttctgaagactcctggagctgagaaaaagaccaagagggagctgtttgatgctcttagacaagaattggaaactccggttcttgagaaagtctcaaaggcagtttgggagctgatactcgacaatggtggactagggaaagagatcaccgagacagttgagaaagtcttctgccggctcagcggaattgatgtgatgccacctccagcttcaacatccggtgctcctcaagagaaacagacaaacatggctgtagaggaggatcagaaggatatggaaatggatgcctctgaaccatcgtcttcctcaaggaagaggcctttcagtgacatcagtgtgaaaggagcaggtgctataccaaacggtggcgctacataccagcatgacgatcatgaggacgggaactaggagatctgggcgtgtcgtggacaagcattcgggtgatcctggggagagcgtgtgctcaattgcatcagtggaaaaccttatgcgtcggggatcaatcagtgctactgcggcgctgtctcctgcacattgcatgggaggaggcaccaaggctggtgcgaataagggactagatggactcatgctcaaggcgcacactggatgatctctccctcctgcgtgaggatgtcattctgtaataggatagaccttacttagatcccttgctgcgcgctggatgtgttgccgaaccaattgctcttagtagttgtagtttgcatatagtctggcctgctactttggtgaggctcgagtgctaccattatatttcggtttgctgttctccgttttatgcaataaaatggagagggggaaaccccttttgttac

SEQ ID NO: 13471 - protein, 187 aa, Triticum aestivum
  misc_feature (1)..(187): Ceres Seq. ID no. 15225039
MGSSSKVVRPEEVLESLKNDGTVDALRMKIMAQLKADEDMKKNTMMMVEQSKVLKTPGAEKKTKRELFDALRQELETPVLEKVSKAVWELILDNGGLGKEITETVEKVFCRLSGIDVMPPPASTSGAPQEKQTNMAVEEDQKDMEMDASEPSSSSRKRPFSDISVKGAGAIPNGGATYQHDDHEDGN

SEQ ID NO: 13472 - protein, 160 aa, Triticum aestivum
  misc_feature (1)..(160): Ceres Seq. ID no. 15225040
MKIMAQLKADEDMKKNTMMMVEQSKVLKTPGAEKKTKRELFDALRQELETPVLEKVSKAVWELILDNGGLGKEITETVEKVFCRLSGIDVMPPPASTSGAPQEKQTNMAVEEDQKDMEMDASEPSSSSRKRPFSDISVKGAGAIPNGGATYQHDDHEDGN

SEQ ID NO: 13473 - protein, 157 aa, Triticum aestivum
  misc_feature (1)..(157): Ceres Seq. ID no. 15225041
MAQLKADEDMKKNTMMMVEQSKVLKTPGAEKKTKRELFDALRQELETPVLEKVSKAVWELILDNGGLGKEITETVEKVFCRLSGIDVMPPPASTSGAPQEKQTNMAVEEDQKDMEMDASEPSSSSRKRPFSDISVKGAGAIPNGGATYQHDDHEDGN

SEQ ID NO: 13474 - DNA, 1194 bp, Triticum aestivum
  misc_feature (1)..(1194): Ceres Seq. ID no. 15225069
agtacttcgacgacccacctcagagcaggaccgcatcgccttcctcctcgtccccgcgcctcccacccgccggccggaaggggagacgaaggcgaagcgcagccaagatgccgcagcggcactcgaagaacaacaacgacctcgccttcttcacctacgaggagaagcggaagctcgggtacggcacccagcgggagcggctcggcaaggactccatcaagcccttcgatgcctgctgcctctgcctcaagccgctcatcgacccgctcgcctgccccaagggccacaccttctgcaaggagtgcatcctcgagtgcctcctcgcgcagaagaaggacatcaagcgcaagcttatagctcatgactcccagaaaaagcaagagaaggaagaggaggaggagaagctggtgctgcaaaagtccaaggaattggatgcttttgatcagcagaatcatggagcagtcccccagtactatgatcgcagcggttcccaagacaagaatggttttcatggagccaacagtgtgaagactacctccttcgaagaggaagccctacgcaccatgaaggcgttctggcttccgtcagctacacccgaagctactgtcaaggtagatgctccttctactgacacaatctgtcccgaggggcaggagaagctcaagctgaaatcactcttccctatttctttcaccgaggagaacgctcgtcagaagagcaataagtcagtggagaaaagctacatctgccccagctgcaagtccaatctcacaaacacaatgtccctggtggcgatcagcacctgtggccatgtcttctgcaagaagtgctcggacaagttcatagcaacagataaggtctgcttaatgtgcagcaaaccgtgcaaagagaggaatttgattaatttagagaaaggaggaacgggtttcgctgcacacgatgaccacctagaggcaaagaacttcaagcatttagggagtggttctggactaggattggtgaagcctgctcctaaggcatagccttcaattatgtaactgttgttgtataatgctgtcagtcatcgttgtggcacgaatatatgtaacctggattttttaaatgttttgatatcttttgatatgtatgatctggaacaaacgatactcaggtttttcatccaagtgataatgtgcttgcggttttgctccatgc

SEQ ID NO: 13475 - protein, 339 aa, Triticum aestivum
  misc_feature (1)..(339): Ceres Seq. ID no. 15225070
YFDDPPQSRTASPSSSSPRLPPAGRKGRRRRSAAKMPQRHSKNNNDLAFFTYEEKRKLGYGTQRERLGKDSIKPFDACCLCLKPLIDPLACPKGHTFCKECILECLLAQKKDIKRKLIAHDSQKKQEKEEEEEKLVLQKSKELDAFDQQNHGAVPQYYDRSGSQDKNGFHGANSVKTTSFEEEALRTMKAFWLPSATPEATVKVDAPSTDTICPEGQEKLKLKSLFPISFTEENARQKSNKSVEKSYICPSCKSNLTNTMSLVAISTCGHVFCKKCSDKFIATDKVCLMCSKPCKERNLINLEKGGTGFAAHDDHLEAKNFKHLGSGSGLGLVKPAPKA

SEQ ID NO: 13476 - protein, 304 aa, Triticum aestivum
  misc_feature (1)..(304): Ceres Seq. ID no. 15225071
MPQRHSKNNNDLAFFTYEEKRKLGYGTQRERLGKDSIKPFDACCLCLKPLIDPLACPKGHTFCKECILECLLAQKKDIKRKLIAHDSQKKQEKEEEEEKLVLQKSKELDAFDQQNHGAVPQYYDRSGSQDKNGFHGANSVKTTSFEEEALRTMKAFWLPSATPEATVKVDAPSTDTICPEGQEKLKLKSLFPISFTEENARQKSNKSVEKSYICPSCKSNLTNTMSLVAISTCGHVFCKKCSDKFIATDKVCLMCSKPCKERNLINLEKGGTGFAAHDDHLEAKNFKHLGSGSGLGLVKPAPKA

SEQ ID NO: 13477 - DNA, 452 bp, Triticum aestivum
  misc_feature (1)..(452): Ceres Seq. ID no. 15225127
ccctaccgaccgatgaacagccttgggatggcccggttctgcacgtcgccgtttggcaagatgagcttcgagcaggccacgaggttcatcatggaggcggcctaccatggggaggtggacaacctcacgggcccttcggcgaccgtgtccctggggaaaccggccaagaccgggaccggtgccttcgggctgatgcagaatatcaccctggaggagcgggcggtgatgtaagagcgccctactcggaccttgctttggcatagatgacaagaatcggttgctgcgtgtccagccatcacttgtgtgttttgaaggaactagtcatgtgaataacatttttgtgcttgctaagagcaaagcgatgtcattctcacctgtttgtatctactactttctatctatttggtacgatagatgcatccgttgcattgcagttagcttaattttctttc

SEQ ID NO: 13478 - protein, 86 aa, Triticum aestivum
  misc_feature (1)..(86): Ceres Seq. ID no. 15225128
LPTDEQPWDGPVLHVAVWQDELRAGHEVHHGGGLPWGGGQPHGPFGDRVPGETGQDRDRCLRADAEYHPGGAGGDVRAPYSDLALA

SEQ ID NO: 13479 - protein, 76 aa, Triticum aestivum
  misc_feature (1)..(76): Ceres Seq. ID no. 15225129
PYRPMNSLGMARFCTSPFGKMSFEQATRFIMEAAYHGEVDNLTGPSATVSLGKPAKTGTGAFGLMQNITLEERAVM

SEQ ID NO: 13480 - protein, 72 aa, Triticum aestivum
  misc_feature (1)..(72): Ceres Seq. ID no. 15225130
MNSLGMARFCTSPFGKMSFEQATRFIMEAAYHGEVDNLTGPSATVSLGKPAKTGTGAFGLMQNITLEERAVM

SEQ ID NO: 13481 - DNA, 702 bp, Triticum aestivum
  misc_feature (1)..(702): Ceres Seq. ID no. 15225154
ccaccactactcatcctcctcacgcacgcgcttactctttcttgcttccatcaagagacccacagagagccgagcatagttaggcagccggccagccaagaacctgccagcgcccatgtccgtgcaggtagcggcgccggcgacgacggcgtggtcgtacgtggaatacatggcgcggtgggagcggcaggtggagcggcggcagctgttcctccggagctaccacttctcccgcgacgccgacgtctcgccgcgcgtgcgcacgcgccgcgtcgtctgggcaggggtgcgacgcctgcgtcgggccgccgccaaagggctccgacgcctccgggcgcgcatccgcctctgcttcggctgggccgcgcccgcgctccgccgccgctcctggccccgccgggccggctacgggttccgctacggccgcatcccccgcgccacgaaggccgcaaacgccgcgtccgtttgcttctggtaggcaggtcgtgagcgcaaaacgtgggagcgcacttgttggcttctatgttgaacttgggacgctgtaaaaaatagtactgagaataggaacaagaatgagcatcacaaattcagtgcgagtactcagctagtttagctaatgtgccgagcacaagcgggattcagtggtattttaactgcgtttggagaagctgggcgccactaacacgcaaagatttttatctg

SEQ ID NO: 13482 - protein, 162 aa, Triticum aestivum
  misc_feature (1)..(162): Ceres Seq. ID no. 15225155
PPLLILLTHALTLSCFHQETHREPSIVRQPASQEPASAHVRAGSGAGDDGVVVRGIHGAVGAAGGAAAAVPPELPLLPRRRRLAARAHAPRRLGRGATPASGRRQRAPTPPGAHPPLLRLGRARAPPPLLAPPGRLRVPLRPHPPRHEGRKRRVRLLLVGRS

SEQ ID NO: 13483 - protein, 120 aa, Triticum aestivum
  misc_feature (1)..(120): Ceres Seq. ID no. 15225156
MSVQVAAPATTAWSYVEYMARWERQVERRQLFLRSYHFSRDADVSPRVRTRRVVWAGVRRLRRAAAKGLRRLRARIRLCFGWAAPALRRRSWPRRAGYGFRYGRIPRATKAANAASVCFW

SEQ ID NO: 13484 - protein, 102 aa, Triticum aestivum
  misc_feature (1)..(102): Ceres Seq. ID no. 15225157
MARWERQVERRQLFLRSYHFSRDADVSPRVRTRRVVWAGVRRLRRAAAKGLRRLRARIRLCFGWAAPALRRRSWPRRAGYGFRYGRIPRATKAANAASVCFW

SEQ ID NO: 13485 - DNA, 1351 bp, Triticum aestivum
  misc_feature (1)..(1351): Ceres Seq. ID no. 15225236
acctcattgatttgttttttcttccagctgttcgacactcgtctgtcacggcgacgggatgaactgacgctgcacggatctcagagaggaaccggatcccttcctccctccgaacggcagctcggcagctcaactcaacccaacccagcccagccgtcgtcgacccgagagaatctgcgaggagcagcagcggagaggaagaagacggtggtctctctccgccatggccagctcgtctgccgacccggagaagctcatggccaaggccgacaaactaaccaaactgagctttacaagatggaatgctgattggaagagtgctaccgccttgtacgaacaagctgcaattgcttatagattcagaaaggacaatgagaaagcaaaggatgcatttgagaaggcttcaaaaggacaagaaatgatctcatcaccgtgggatgctgctaagcatatggaaaatgctggtgctttagcaaaggagcttggactatggaatgaagtttcggacttttatcgcagagcatcagaattttaccgtgaatgtggaagatcacaacctgcctctgatgctcttgcaaagggtgccagtgccttggaagataaagctccagaagaagcaactaaattgtatgatgacgcttgcacacttctagaagaagatggaaaggagcagatggcttttgacttgtaccgtgctgctgcaagtttatatgtgaagcttgagaagtactcggatgccgctgcattccatttaagacttggttcagctgctgataagtgcaatgccgtcaacagccaatgcaaggcctatctgagtgcaatcattatctacctttatgcacatgattttcaacaagctcagaaatgctacaatgattgctcagaggttcaaggcttcctgagtagtgaccagaatcgatgtgcaatgaaactgttgtctgcttatgaggaaggtgatgctgaagaaatcaagcgtgctgctcaatcaagtgccattaatcacctcgaccatgtggtaattcggctcgcaaggaagctaccaacaggtgacctgcaggccatcaagaaagatgtaggaggcgacgacggggattccttggacgaggatgacctaacctgatcccaaactggctggcgagatgcagagagaaccacaatcaatcgagtgactacgccattgatgaacaggaaaggttgtaaaaacacattctggaatcgcatagaaagttgtaggcttcatctgtatcatggatttcgatccccttgttttcgttgtttcggatctgtgcacatacaccctacatctgtactgctggattgctgttgttgcgatattcttattggtttggtt

SEQ ID NO: 13486 - protein, 298 aa, Triticum aestivum
  misc_feature (1)..(298): Ceres Seq. ID no. 15225237
MASSSADPEKLMAKADKLTKLSFTRWNADWKSATALYEQAAIAYRFRKDNEKAKDAFEKASKGQEMISSPWDAAKHMENAGALAKELGLWNEVSDFYRRASEFYRECGRSQPASDALAKGASALEDKAPEEATKLYDDACTLLEEDGKEQMAFDLYRAAASLYVKLEKYSDAAAFHLRLGSAADKCNAVNSQCKAYLSAIIIYLYAHDFQQAQKCYNDCSEVQGFLSSDQNRCAMKLLSAYEEGDAEEIKRAAQSSAINHLDHVVIRLARKLPTGDLQAIKKDVGGDDGDSLDEDDLT

SEQ ID NO: 13487 - protein, 287 aa, Triticum aestivum
  misc_feature (1)..(287): Ceres Seq. ID no. 15225238
MAKADKLTKLSFTRWNADWKSATALYEQAAIAYRFRKDNEKAKDAFEKASKGQEMISSPWDAAKHMENAGALAKELGLWNEVSDFYRRASEFYRECGRSQPASDALAKGASALEDKAPEEATKLYDDACTLLEEDGKEQMAFDLYRAAASLYVKLEKYSDAAAFHLRLGSAADKCNAVNSQCKAYLSAIIIYLYAHDFQQAQKCYNDCSEVQGFLSSDQNRCAMKLLSAYEEGDAEEIKRAAQSSAINHLDHVVIRLARKLPTGDLQAIKKDVGGDDGDSLDEDDLT

SEQ ID NO: 13488 - protein, 233 aa, Triticum aestivum
  misc_feature (1)..(233): Ceres Seq. ID no. 15225239
MISSPWDAAKHMENAGALAKELGLWNEVSDFYRRASEFYRECGRSQPASDALAKGASALEDKAPEEATKLYDDACTLLEEDGKEQMAFDLYRAAASLYVKLEKYSDAAAFHLRLGSAADKCNAVNSQCKAYLSAIIIYLYAHDFQQAQKCYNDCSEVQGFLSSDQNRCAMKLLSAYEEGDAEEIKRAAQSSAINHLDHVVIRLARKLPTGDLQAIKKDVGGDDGDSLDEDDLT

SEQ ID NO: 13489 - DNA, 1741 bp, Triticum aestivum
  misc_feature (1)..(1741): Ceres Seq. ID no. 15225244
acctaccgcaaacccccaaagccacagcgaactcgagctccccccaatggcagctccgcccatctccggccacccccattcctccgtcgactcgccgctccccaccgacgccctcctcgcgcacccccaactcccctccgcccccgcgccccaggcccccaccgcctcccgcttcctcatcatcctcaccgccgccctcgccgtctccacctcctacctcctcctcctccgcccgcccttctccgccgtgtccgccgccgcctccacctcatccttcgcacggcctctatccaagctcccgaagccggtggtcctcctcatatcctccgatggcttccgcttcggctaccaccacaaggcccccaccccgcacatccgccgcctcatcgccaatggcacctccgccgccgagggcctcatccccgtcttccccaccctcaccttccccaaccactactccatcgtcaccggccttcacccttcctcccacggcatcatcaacaacttcttccccgaccccatctcgggggacaacttcaacatgggctcccacgagcccaagtggtggctcggggagcccctctgggtcaccgccgccgaccagggggtccaggcctccacgttcttctggccgggctcggaggtgaagaagggctcctgggactgccccgataagtattgccgccactataatggctctgtgccattcgaggacagggttgacgccgtccttggttactttgatctcccggttgatgaaatgccgcagtttctgacactgtactttgaggatccagatcaccaggggcaccaggttggtcctgatgacccagccatcaccgatgctgtgacgcacattgacgagatgatcgggaggctcattgctggtttggaagctaggggggtgttcgaggatgtgaacatcatattggttggggatcatgggatggttgggacctgcgaccagaagctactgtttctcgaggaattggctccatggattgaggtgaaggctgattgggttctgtcgaggacaccattgctggcaatcaggccaccagatggtatatccccgtcagaggtcgtggccaagatgaatgaagggctgagctctgggaaggtgaagaatgggcaatatctgaagatgtacttgaaggaggatttgccttctcgcctgcattactcggaaagctataggataccaccaattattgggctggtagctgaaggttataaggtagagatgaaagtatcaaagaaaaatgagtgtggaggggcgcacgggtatgacaatgccttcttctcaatgaggaccatattcatcgcacatgggcctcgtttcgaagagggtaaaattgtgccctcatttgtgaatgtggagatatacaatgccattgcttccattctcagtttgaagccagctccaaacaatggctccagttctttccctgaaacagttcttttaccgagtgaatgatcatcggtgtatgtgagggctttggttctggaggaggaaagcccacactgatggtattatcttctggttgtagttgtatttgtacactattttagttcaaattctgccatgtgcagctattcgctactgataatactgcaagcagagtttctttttccttaaggatgtaatttgccaatgcaaatcacatctaacttttgatcttctgtgatgaatgtataatgctacttcttttaagtgccatgtgtttctacttgagttgat

SEQ ID NO: 13490 - protein, 491 aa, Triticum aestivum
  misc_feature (1)..(491): Ceres Seq. ID no. 15225245
PTANPQSHSELELPPMAAPPISGHPHSSVDSPLPTDALLAHPQLPSAPAPQAPTASRFLIILTAALAVSTSYLLLLRPPFSAVSAAASTSSFARPLSKLPKPVVLLISSDGFRFGYHHKAPTPHIRRLIANGTSAAEGLIPVFPTLTFPNHYSIVTGLHPSSHGIINNFFPDPISGDNFNMGSHEPKWWLGEPLWVTAADQGVQASTFFWPGSEVKKGSWDCPDKYCRHYNGSVPFEDRVDAVLGYFDLPVDEMPQFLTLYFEDPDHQGHQVGPDDPAITDAVTHIDEMIGRLIAGLEARGVFEDVNIILVGDHGMVGTCDQKLLFLEELAPWIEVKADWVLSRTPLLAIRPPDGISPSEVVAKMNEGLSSGKVKNGQYLKMYLKEDLPSRLHYSESYRIPPIIGLVAEGYKVEMKVSKKNECGGAHGYDNAFFSMRTIFIAHGPRFEEGKIVPSFVNVEIYNAIASILSLKPAPNNGSSSFPETVLLPSE

SEQ ID NO: 13491 - protein, 476 aa, Triticum aestivum
  misc_feature (1)..(476): Ceres Seq. ID no. 15225246
MAAPPISGHPHSSVDSPLPTDALLAHPQLPSAPAPQAPTASRFLIILTAALAVSTSYLLLLRPPFSAVSAAASTSSFARPLSKLPKPVVLLISSDGFRFGYHHKAPTPHIRRLIANGTSAAEGLIPVFPTLTFPNHYSIVTGLHPSSHGIINNFFPDPISGDNFNMGSHEPKWWLGEPLWVTAADQGVQASTFFWPGSEVKKGSWDCPDKYCRHYNGSVPFEDRVDAVLGYFDLPVDEMPQFLTLYFEDPDHQGHQVGPDDPAITDAVTHIDEMIGRLIAGLEARGVFEDVNIILVGDHGMVGTCDQKLLFLEELAPWIEVKADWVLSRTPLLAIRPPDGISPSEVVAKMNEGLSSGKVKNGQYLKMYLKEDLPSRLHYSESYRIPPIIGLVAEGYKVEMKVSKKNECGGAHGYDNAFFSMRTIFIAHGPRFEEGKIVPSFVNVEIYNAIASILSLKPAPNNGSSSFPETVLLPSE

SEQ ID NO: 13492 - protein, 311 aa, Triticum aestivum
  misc_feature (1)..(311): Ceres Seq. ID no. 15225247
MGSHEPKWWLGEPLWVTAADQGVQASTFFWPGSEVKKGSWDCPDKYCRHYNGSVPFEDRVDAVLGYFDLPVDEMPQFLTLYFEDPDHQGHQVGPDDPAITDAVTHIDEMIGRLIAGLEARGVFEDVNIILVGDHGMVGTCDQKLLFLEELAPWIEVKADWVLSRTPLLAIRPPDGISPSEVVAKMNEGLSSGKVKNGQYLKMYLKEDLPSRLHYSESYRIPPIIGLVAEGYKVEMKVSKKNECGGAHGYDNAFFSMRTIFIAHGPRFEEGKIVPSFVNVEIYNAIASILSLKPAPNNGSSSFPETVLLPSE

SEQ ID NO: 13493 - DNA, 1275 bp, Triticum aestivum
  misc_feature (1)..(1275): Ceres Seq. ID no. 15225252
attcaaacatttttgtctcagacaaaagcatctgaacacactcaagaacatatatacatccccaccaaacaaacaaaaataaccatggaagtaaatcaagaagcttcatcaatgccagtagttcccatagatagtttctcttacagttgggtagttaactgtccttctttagaagattccattgatgattatcatcaaacctacgaagattcttcttcttccttcatagagatggatccaagattgcctccttcgagaagattcttcatcaacaaatcccatgaaagtagcttcaagttcgataacttcgtctctttctccgacgaagatcactctttagttcacgccgacgagcttttccgcgacggctacgtcatgccttatctatcaaaagccacgtcagcagctacggaagaagaatatgagccgttggacaagaaaacggagaagaagatggagacacgtgacattaagagcaagtctccttcttcttgtagaaagttgagaagagtttcgaaatgggttttgttgttattgacgccactgtgtaagagattaaggagatgtagaaccgctggatcatccggaggtatcggtatcgactctaggatccgtgtaacgacgttgtctagaagcagagttcattctgatgaaatgacttcgtcgccaagaataagtgttgcagatgattattattggagaaggtcttgtgactcagagagctccatttacgaagccgttcttcattgcaagaaatctttcgagaaatgagacttaagaatccatggaaaaggagcgggtagagtagagatggagaatattaagaagaataagcaaattacattacacgttactcatggagtgggaaagagagagcaacttgtgttgtgtctttttgttgtttctctctcttgaattaaagagattgatgtgatgattccatgtgaatgtgtcatctgatttgaatctagaacttttttttacatgagtgggcacatatatagggcagctagcagaatcaagaaaatattttcagattttcttggctattatggtttcttttcatatatgtaatcctatatgtatcttatatgtgcctacccatgttttactttctggtccaattgtgttttgaatattcttactttttgtgaaaattttgtcttttattgtctttataaatcatatgtggatgtcatcatatatatgcatatgattgaactccttttcttatcataattgtaattcaaatcaattaaatctaacaaagagaag

SEQ ID NO: 13494 - protein, 256 aa, Triticum aestivum
  misc_feature (1)..(256): Ceres Seq. ID no. 15225253
IQTFLSQTKASEHTQEHIYIPTKQTKITMEVNQEASSMPVVPIDSFSYSWVVNCPSLEDSIDDYHQTYEDSSSSFIEMDPRLPPSRRFFINKSHESSFKFDNFVSFSDEDHSLVHADELFRDGYVMPYLSKATSAATEEEYEPLDKKTEKKMETRDIKSKSPSSCRKLRRVSKWVLLLLTPLCKRLRRCRTAGSSGGIGIDSRIRVTTLSRSRVHSDEMTSSPRISVADDYYWRRSCDSESSIYEAVLHCKKSFEK

SEQ ID NO: 13495 - protein, 228 aa, Triticum aestivum
  misc_feature (1)..(228): Ceres Seq. ID no. 15225254
MEVNQEASSMPVVPIDSFSYSWVVNCPSLEDSIDDYHQTYEDSSSSFIEMDPRLPPSRRFFINKSHESSFKFDNFVSFSDEDHSLVHADELFRDGYVMPYLSKATSAATEEEYEPLDKKTEKKMETRDIKSKSPSSCRKLRRVSKWVLLLLTPLCKRLRRCRTAGSSGGIGIDSRIRVTTLSRSRVHSDEMTSSPRISVADDYYWRRSCDSESSIYEAVLHCKKSFEK

SEQ ID NO: 13496 - protein, 219 aa, Triticum aestivum
  misc_feature (1)..(219): Ceres Seq. ID no. 15225255
MPVVPIDSFSYSWVVNCPSLEDSIDDYHQTYEDSSSSFIEMDPRLPPSRRFFINKSHESSFKFDNFVSFSDEDHSLVHADELFRDGYVMPYLSKATSAATEEEYEPLDKKTEKKMETRDIKSKSPSSCRKLRRVSKWVLLLLTPLCKRLRRCRTAGSSGGIGIDSRIRVTTLSRSRVHSDEMTSSPRISVADDYYWRRSCDSESSIYEAVLHCKKSFEK

SEQ ID NO: 13497 - DNA, 1266 bp, Triticum aestivum
  misc_feature (1)..(1266): Ceres Seq. ID no. 15225256
gtctttcttcacatcctcaaacccaccctaatactcctcaaattatcactctcttagattagggatccaagtcggaaccctaatttgaatcgtcttgatttcgatcagttgtgtgcaaagggaggaaacatggattccgactcaaccgtgccactgagcgagcgcccggagtggtctgacgttgtcccgttgactcaggacgatggtccgaacccggtggttcggatcgcttacaaggaagacttccgcgagacgatggattacttccgggcgatttaccgctccgacgagcgttctgctcgcgcgctgcgactcacggaagaagctctccgcttaaactcgggcaactacaccgtaactgatccttcttcttttgccctagtactactgttcttaaagagttggatttgattagattgtaactttttgaaggtgtggcacttcaggcgcttagtactcgaggagcttaataacgacttgtatgaagagctcaagttcatcgaaagcattgctgaggataactctaagaactaccagttgtggcatcatcgacgatgggttgcagagaaactgggtcctgatgttgcaggaaaggaacttgagtttactcggagggtactatcacttgatgccaagcattatcatgcttggtcacataggcagtgggcgctacaagcattaggaggatgggaaaatgagcttaactactgccacgagctccttgaagctgacgtctttaacaactctgcatggaatcagaggtattacgttataactagatcaccttcgttgggaggcctagaagccatgagagaatctgaagtaagctacacagtcaaagccattttagcaaatcccgggaacgagagctcttggaggtacctgaaagccctttacaaagacgacacagagtcttggattagtgatccaagtgtttcctcagtctgtttgaaagttctctcacgcacggactgcttccatggattcgctctgagcacccttttggatcttctgtgcgatgggttgagaccaaccaacgagcatagagactcggtgaaagctctagctaatgaagaaccagagactaacttggccaatttggtgtgtaccattctgtgtcgtgttgatcctataagagctaactattgggcatggaggaagagcaagattacagtggcaatataaccacacttgagaaagttatttatttttacgttttaatctactgcttttttcatgaaacatgatgcatcaaaacaaatctcg

SEQ ID NO: 13498 - protein, 125 aa, Triticum aestivum
  misc_feature (1)..(125): Ceres Seq. ID no. 15225257
MRESEVSYTVKAILANPGNESSWRYLKALYKDDTESWISDPSVSSVCLKVLSRTDCFHGFALSTLLDLLCDGLRPTNEHRDSVKALANEEPETNLANLVCTILCRVDPIRANYWAWRKSKITVAI

SEQ ID NO: 13499 - protein, 93 aa, Triticum aestivum
  misc_feature (1)..(93): Ceres Seq. ID no. 15225258
MDSDSTVPLSERPEWSDVVPLTQDDGPNPVVRIAYKEDFRETMDYFRAIYRSDERSARALRLTEEALRLNSGNYTVTDPSSFALVLLFLKSWI

SEQ ID NO: 13500 - protein, 66 aa, Triticum aestivum
  misc_feature (1)..(66): Ceres Seq. ID no. 15225259
MKSSSSSKALLRITLRTTSCGIIDDGLQRNWVLMLQERNLSLLGGYYHLMPSIIMLGHIGSGRYKH

SEQ ID NO: 13501 - DNA, 1072 bp, Triticum aestivum
  misc_feature (1)..(1072): Ceres Seq. ID no. 15225398
cccactgccactgtacccgtgacgagctgctgctgctaagggacacgcgcgcgcgcgtacacgcgaacagcagtgtcacgagcacgaccgacggccatggcgagcggcgacccgaagccggacgaaaactactcctccgatggcggtgacaccaccgacgccgagtcctccgacgagtccccgcatcagccgcggaggggcccccgcgccaaccccatactgacgcgcctctccgtgtcgcggaatccgagcccgctctccgccgccaccgcggcgcctggggtctgcctcctccgcttcgcctgggagtcggccgccggttccctcgtcggcgccgtcgttggatatggaaaaggtttggttactacaaaagggtttaaaggctcatttgctgacgctgcctcttctgctaagatatttgctgttcttgccggcgttcaaagcttggtttcttgctctttgagaaagctacgtggcaaagatgacgttattaacgcaggagttgcaggctgttgcactggccttgctttgagttttccaggtgcaccgcaaactctgattcagagctgtctggcctttggaactttctcgtacatcatagaaaagctcaataggcagcaacctgcgcttgcgctaccgtcagccgctggcctgaaggatctgaaggctggcccgagtgttcttccccccttcacgcttaacatgccgcacgatgcgatggaaggtttttcttcgtttcaaaactttttgtcaaagttccgagaaagctgaaggacctgggggcatgatactttgatatctgtccatgtaaatgcatcgagctgagctttttgtttccagtttagtgtatcgcgaaggatgatcattctactctgcctttgaacagttttgcaaattaccctccagaaggaaatcagcttagctggtgtccaacctgatgaataatcgtgtataacctgggcagcagattgcctgaacctttgtgatagtcctttactagcgaatgctcttgtatatgacgggtactcggtaatgtttcatcaggtctcagaataagactagactgataact

SEQ ID NO: 13502 - protein, 224 aa, Triticum aestivum
  misc_feature (1)..(224): Ceres Seq. ID no. 15225399
MASGDPKPDENYSSDGGDTTDAESSDESPHQPRRGPRANPILTRLSVSRNPSPLSAATAAPGVCLLRFAWESAAGSLVGAVVGYGKGLVTTKGFKGSFADAASSAKIFAVLAGVQSLVSCSLRKLRGKDDVINAGVAGCCTGLALSFPGAPQTLIQSCLAFGTFSYIIEKLNRQQPALALPSAAGLKDLKAGPSVLPPFTLNMPHDAMEGFSSFQNFLSKFRES

SEQ ID NO: 13503 - DNA, 1535 bp, Triticum aestivum
  misc_feature (1)..(1535): Ceres Seq. ID no. 15225423
cactgaattttgttggcgttgagttggaggcgccattggccttttcttgccctctctcatggtgtccattgtgcagctgcagagaaggcgaacagaagcagcagcgtcagcgagaggcatccttccggacagggaggagaggatggatctttctgtgccccgaggcgagttcccgatcccaatgcacgccgccgcctcgccctacgggggcatcggcggcgggggcgtcgccgtcgccgaccatgccatggagctccaccatgaccacgccaaccacaacggccagtcccagtcccaggcgcaggacatgccgtcgcctcccgctgctgtgtctgaggacagctccgggaagaagcgcgcggcggccattgccggcggagcgggagggccggcggtcaagtaccgggagtgcctcaagaaccacgcggcggccatcggcggcaacgccaccgacgggtgcggcgagttcatgcccagcggcgaggagggctcgctggaggcgctcaagtgctccgcctgcggctgccaccgcaatttccaccgcaaggagctcgacgacttcgacggcgacagctgcgcctcgcacggctacggctacggccaccacgccgtccgccgcctgctcggccccgccgtgccgcaccaccacaagagcagcgggggcctcctcgtcaccgcggaccactacggcgcctacgccgcggcgcgcgcgctccctccgccgccgcccccgccgctgggacaccaccaccagatcatcatgccgctcaacatgatccagacgtccgagtcggacgagatggacggcagcggcggcggcggtatcatgggcgacggcagaggcgggctagcctcaggcggcggcggcggctcctcctcgtccaagaagcgcttccgcaccaagttcaccgccgagcagaaggggcgcatgctggagttcgcggagaacgtggggtggcgtctccagaagctggacgacgccatggtgcagcacttctgccaggagatcggcgtcaagcgccgggtcctcaaggtctggatgcacaacaacaagcacaacctcgccagcaggccgctccctacctcgcctgcgcagccgcagtcacagtcgatgccgctggcgatgtcaatgccgatgccgatgcaagtgccgccgtcgcagcccgggccttcgggccaccgcggccccagctccccgcatgcgcagggggagctcaagctcgactgacggcacaaagaagccctggtgtctgtcaacggcgccatggtggctgattctgctagcgttagtaagccgcattgccattaatttcactgttccatcggagcgatcgatcgaagcagagagaagagaagagaaccaaaaaacaaacccgagtctatcaccatctccatttttttcctttctctgtttatcttgtcataaggttggggagcaagcatgagaggggggacataggcgaaccggactgagctccactcaatttcaatttatttttcctggacctagtttttttcgaaaaaaaaaaaaaaaa

SEQ ID NO: 13504 - protein, 389 aa, Triticum aestivum
  misc_feature (1)..(389): Ceres Seq. ID no. 15225424
MVSIVQLQRRRTEAAASARGILPDREERMDLSVPRGEFPIPMHAAASPYGGIGGGGVAVADHAMELHHDHANHNGQSQSQAQDMPSPPAAVSEDSSGKKRAAAIAGGAGGPAVKYRECLKNHAAAIGGNATDGCGEFMPSGEEGSLEALKCSACGCHRNFHRKELDDFDGDSCASHGYGYGHHAVRRLLGPAVPHHHKSSGGLLVTADHYGAYAAARALPPPPPPPLGHHHQIIMPLNMIQTSESDEMDGSGGGGIMGDGRGGLASGGGGGSSSSKKRFRTKFTAEQKGRMLEFAENVGWRLQKLDDAMVQHFCQEIGVKRRVLKVWMHNNKHNLASRPLPTSPAQPQSQSMPLAMSMPMPMQVPPSQPGPSGHRGPSSPHAQGELKLD

SEQ ID NO: 13505 - protein, 361 aa, Triticum aestivum
  misc_feature (1)..(361): Ceres Seq. ID no. 15225425
MDLSVPRGEFPIPMHAAASPYGGIGGGGVAVADHAMELHHDHANHNGQSQSQAQDMPSPPAAVSEDSSGKKRAAAIAGGAGGPAVKYRECLKNHAAAIGGNATDGCGEFMPSGEEGSLEALKCSACGCHRNFHRKELDDFDGDSCASHGYGYGHHAVRRLLGPAVPHHHKSSGGLLVTADHYGAYAAARALPPPPPPPLGHHHQIIMPLNMIQTSESDEMDGSGGGGIMGDGRGGLASGGGGGSSSSKKRFRTKFTAEQKGRMLEFAENVGWRLQKLDDAMVQHFCQEIGVKRRVLKVWMHNNKHNLASRPLPTSPAQPQSQSMPLAMSMPMPMQVPPSQPGPSGHRGPSSPHAQGELKLD

SEQ ID NO: 13506 - protein, 348 aa, Triticum aestivum
  misc_feature (1)..(348): Ceres Seq. ID no. 15225426
MHAAASPYGGIGGGGVAVADHAMELHHDHANHNGQSQSQAQDMPSPPAAVSEDSSGKKRAAAIAGGAGGPAVKYRECLKNHAAAIGGNATDGCGEFMPSGEEGSLEALKCSACGCHRNFHRKELDDFDGDSCASHGYGYGHHAVRRLLGPAVPHHHKSSGGLLVTADHYGAYAAARALPPPPPPPLGHHHQIIMPLNMIQTSESDEMDGSGGGGIMGDGRGGLASGGGGGSSSSKKRFRTKFTAEQKGRMLEFAENVGWRLQKLDDAMVQHFCQEIGVKRRVLKVWMHNNKHNLASRPLPTSPAQPQSQSMPLAMSMPMPMQVPPSQPGPSGHRGPSSPHAQGELKLD

SEQ ID NO: 13507 - DNA, 1065 bp, Triticum aestivum
  misc_feature (1)..(1065): Ceres Seq. ID no. 15225478
atcacctcgcgatccccagatcccacacgggaaaaatgtgcacagtggagaagcgcggccgcgtccacctcatcaccctcaccggcgccggtgagcaccgactcagcccatccctcatctcggccctccgcacagccgtggccaccgtccgcgcctcccccggtgccggtgccctcgtgctggccgccgagggcaagtacttctccaacggcttcgaccaagcctgggcgcgcacggtcccgccccacctccacgactccatgagaggagccttccgcgccctcgtggccgacctcctcgcgctgcccatgcccaccgtggccgccgtcacgggccacgcagccgccgccggctgcgcgctggccctcgcgcacgactccgtcgtcatgcgcgcctcccgcgggttcctgtacatgagcgaggtcgacgtcggcctcaagttcgccgactacttcggggagctactccggcagaaggtccccaacgcagcggccaggagggacatggtcctcggggggaagaagatgacggcggctgaggcggtgcggctgggcatcgtggacgcggccgcggacggcggcgtcgaagacgtggtggccgcgggcgtcgcggcagccgaggtgctcgcgacgaggggttgggacggggagatcgtggccgagatccggaaggcgatgtggcccgccgtgtggggcaaggtcaaggaccacggcgccgaggcagcggcagcgcggccgcgtctgtaggctccggtatatcgtacgaggccactccttgtgctcgagcattcgcgtagcctgaagaattgctctggatccacggcatgccgtggatctgggaacttcagctgagaacagagtaatgttcaggaactgctcgaacagaatcgtgtcgccaagaagatccgcaccggcgacatgtgatgagcgcaccgtgctggtggttttccttgtactcctattgatcttcgcatcgggtttcattgactgttgttactctgacggaagctcgttgctgatagacttctgaacttctgaagcatgactgaatgaagagatgaagatg

SEQ ID NO: 13508 - protein, 247 aa, Triticum aestivum
  misc_feature (1)..(247): Ceres Seq. ID no. 15225479
HLAIPRSHTGKMCTVEKRGRVHLITLTGAGEHRLSPSLISALRTAVATVRASPGAGALVLAAEGKYFSNGFDQAWARTVPPHLHDSMRGAFRALVADLLALPMPTVAAVTGHAAAAGCALALAHDSVVMRASRGFLYMSEVDVGLKFADYFGELLRQKVPNAAARRDMVLGGKKMTAAEAVRLGIVDAAADGGVEDVVAAGVAAAEVLATRGWDGEIVAEIRKAMWPAVWGKVKDHGAEAAAARPRL

SEQ ID NO: 13509 - protein, 236 aa, Triticum aestivum
  misc_feature (1)..(236): Ceres Seq. ID no. 15225480
MCTVEKRGRVHLITLTGAGEHRLSPSLISALRTAVATVRASPGAGALVLAAEGKYFSNGFDQAWARTVPPHLHDSMRGAFRALVADLLALPMPTVAAVTGHAAAAGCALALAHDSVVMRASRGFLYMSEVDVGLKFADYFGELLRQKVPNAAARRDMVLGGKKMTAAEAVRLGIVDAAADGGVEDVVAAGVAAAEVLATRGWDGEIVAEIRKAMWPAVWGKVKDHGAEAAAARPRL

SEQ ID NO: 13510 - protein, 161 aa, Triticum aestivum
  misc_feature (1)..(161): Ceres Seq. ID no. 15225481
MRGAFRALVADLLALPMPTVAAVTGHAAAAGCALALAHDSVVMRASRGFLYMSEVDVGLKFADYFGELLRQKVPNAAARRDMVLGGKKMTAAEAVRLGIVDAAADGGVEDVVAAGVAAAEVLATRGWDGEIVAEIRKAMWPAVWGKVKDHGAEAAAARPRL

SEQ ID NO: 13511 - DNA, 1517 bp, Triticum aestivum
  misc_feature (1)..(1517): Ceres Seq. ID no. 15225493
gataaaaaaaggaagaagaggatgatacgtaacggcgtgacggaaagaaaaagcgggagcgaatagacagagagggggcccggccgtcacgtcgtcttcctcctcgctccattagagccgagctctcgggtctccgcctctgctcgcctcccactgttatcggaggcgctgcggacgaagcagcggcactatgcgtccgtccctctgtcatgttccttttcttcttctgctactattacatgtggtcattgctagaccattctttccactgccaagtaagaccagtaatgaagagaagaagcccatacagacatttcgaccgtataacattgctcaccgtggctcaaacggggaaatcccagaggaaacaagtgctgcttacctgagggctattgaagaaggtgcagattttatagagactgacatccttgctagcaaagatggtgcattgatctgctttcatgatgtaacacttgatgatacaactgatatttccggccgtaaggaattcgccaatcgaaggagaacctatgaggtggaatgggccaacgttactggctggtttgtagtggatttcacgcttgaggaacttaaaacacttaaagtgaagcagcgatactcattcagagatcaacaatataatgatgcaagcagaaccgttggaatatatccagagataaaagatccagtttttatcaacaagcatgtaaagtgggcagatggaaagaagtttgaggacaaatttgtggataccttactaaagtatggatacaggggtcaatatatgtccgaaaattggctaaaacagccattgtttatacaatcatttgctccctcttcccttgtacatgtatcaaatttgacagactctccgaagatctttctgattgatgataccacagtgagaactcaagacacaaaccagtcatactgggaaatcacttcagatgactaccttgcatatattagtaactatgttgtcggcctcggtccatggaaagatactattgttccagttgcaaaaaactatttgctggaaccaactgatcttgttgcaagagcgcatgctcataatctccaggtacacccttacacatacaggaacgagaaccagtttctgcacttcgactttcatcaggatccctatgccgagttcgatttctggataaatacgatgggggttgacggattattcacagatttcgctggaagcgtacacaagtaccaagaactgaaatctccacacccgaaggacgcaaccgcgaacagcctcctagtaaaaattgctcagttgatcgcggcatacgaaggccactgaataagtctgttccagcaaaatcactgccattttcagtgatgatgcgcaagacccaaatgagttgacatttgacgacccgcagtgacctggaaaggtcactaatagatgttggtttacgctgttatatagtgttaacacgagttcatgtatacctcttcattgaacccctgaatctcaagggggagatctttattatcgc

SEQ ID NO: 13512 - protein, 375 aa, Triticum aestivum
  misc_feature (1)..(375): Ceres Seq. ID no. 15225494
MRPSLCHVPFLLLLLLHVVIARPFFPLPSKTSNEEKKPIQTFRPYNIAHRGSNGEIPEETSAAYLRAIEEGADFIETDILASKDGALICFHDVTLDDTTDISGRKEFANRRRTYEVEWANVTGWFVVDFTLEELKTLKVKQRYSFRDQQYNDASRTVGIYPEIKDPVFINKHVKWADGKKFEDKFVDTLLKYGYRGQYMSENWLKQPLFIQSFAPSSLVHVSNLTDSPKIFLIDDTTVRTQDTNQSYWEITSDDYLAYISNYVVGLGPWKDTIVPVAKNYLLEPTDLVARAHAHNLQVHPYTYRNENQFLHFDFHQDPYAEFDFWINTMGVDGLFTDFAGSVHKYQELKSPHPKDATANSLLVKIAQLIAAYEGH

SEQ ID NO: 13513 - DNA, 1106 bp, Triticum aestivum
  misc_feature (1)..(1106): Ceres Seq. ID no. 15225495
aacatttcgtctccgcacgcgcgccagaggaagaagaccgcggaggaggagagaaagcgcgcgcgagaggaggaagaacatgttcatccagaaggcatggaggacggcagcgttcgggctctatggcttcacccagttcaccaaatccggcttcgtggaacacgccaagaaatttagagaggaggatatgcagatccggttggatgggaaaaattgcctggtaactggagcaaattctggcctaggttatgcgacagctcagggcttggcttctcatggcgccactgtctatatgctttgccgtaacaaagaaaggggagagactgctctgaatgaaataagatccaaaactggcaatatgaatgttcatctggagatatgtgacctttcatcaattaacgaagtcaagacatttgccacaaaattctcttcattggagaagccacttcatgtccttgttaacaacgccggcttactagagcacaagcgtacgactacatcggaaggtttggagctcaattttgctgtgaatgtggcagcaacatacactttaacagagctagtgatgccactgttggaaaaagcagcacctgatgctcgtgtcattacagttgcttcaggagggatgtacactgagccactgaacacgaatttacaatacagcgaaagcgaatttgacgggacaaaacaatatgctcgtaacaagagagttcaggttgctctcaccgaatggtgggctgagaaatacagcaacaagggagtgggtttctactccatgcatccaggatgggctgatacacctggagtctcgaagagcttgccgggactatcagagaagctatcaggaaacctgagatcgaacgaagaaggggctgacacagtggtctggttggctttgcaacccaaggagaagttagtcccaggggctttctacttcgaccgggccgaagcgcaaaaacatttgaagtatgctgggactgcagcatcccatgagcagataggttcgattgttgacagcattcgctccatctgtaacctacctgctaacccacaagtttatcagtgaagggatggaagtcctggacaaaaataaaattgaaattctg

SEQ ID NO: 13514 - protein, 354 aa, Triticum aestivum
  misc_feature (1)..(354): Ceres Seq. ID no. 15225496
TFRLRTRARGRRPRRRRESARERRKNMFIQKAWRTAAFGLYGFTQFTKSGFVEHAKKFREEDMQIRLDGKNCLVTGANSGLGYATAQGLASHGATVYMLCRNKERGETALNEIRSKTGNMNVHLEICDLSSINEVKTFATKFSSLEKPLHVLVNNAGLLEHKRTTTSEGLELNFAVNVAATYTLTELVMPLLEKAAPDARVITVASGGMYTEPLNTNLQYSESEFDGTKQYARNKRVQVALTEWWAEKYSNKGVGFYSMHPGWADTPGVSKSLPGLSEKLSGNLRSNEEGADTVVWLALQPKEKLVPGAFYFDRAEAQKHLKYAGTAASHEQIGSIVDSIRSICNLPANPQVYQ

SEQ ID NO: 13515 - protein, 328 aa, Triticum aestivum
  misc_feature (1)..(328): Ceres Seq. ID no. 15225497
MFIQKAWRTAAFGLYGFTQFTKSGFVEHAKKFREEDMQIRLDGKNCLVTGANSGLGYATAQGLASHGATVYMLCRNKERGETALNEIRSKTGNMNVHLEICDLSSINEVKTFATKFSSLEKPLHVLVNNAGLLEHKRTTTSEGLELNFAVNVAATYTLTELVMPLLEKAAPDARVITVASGGMYTEPLNTNLQYSESEFDGTKQYARNKRVQVALTEWWAEKYSNKGVGFYSMHPGWADTPGVSKSLPGLSEKLSGNLRSNEEGADTVVWLALQPKEKLVPGAFYFDRAEAQKHLKYAGTAASHEQIGSIVDSIRSICNLPANPQVYQ

SEQ ID NO: 13516 - protein, 292 aa, Triticum aestivum
  misc_feature (1)..(292): Ceres Seq. ID no. 15225498
MQIRLDGKNCLVTGANSGLGYATAQGLASHGATVYMLCRNKERGETALNEIRSKTGNMNVHLEICDLSSINEVKTFATKFSSLEKPLHVLVNNAGLLEHKRTTTSEGLELNFAVNVAATYTLTELVMPLLEKAAPDARVITVASGGMYTEPLNTNLQYSESEFDGTKQYARNKRVQVALTEWWAEKYSNKGVGFYSMHPGWADTPGVSKSLPGLSEKLSGNLRSNEEGADTVVWLALQPKEKLVPGAFYFDRAEAQKHLKYAGTAASHEQIGSIVDSIRSICNLPANPQVYQ

SEQ ID NO: 13517 - DNA, 734 bp, Triticum aestivum
  misc_feature (1)..(734): Ceres Seq. ID no. 15225568
ctttataaatcattctcccctcaaccaacccctcttgtagtctccgctcatccaccctcccttttctgttctcgacttgtgcagcgcagttgcataaagaaatggcgacttttcaaatctcttccactagcatgaccaccaaggcggttcttagaagccagccgaccaacaagctcatcgctaacaagagccagcaagtctcagttggatccgtcaagaaagtctcgagatcctttggcttgaaatgctcagccaattctggtgccactatgtcagctgtatacaaggtcaagctcataggacccgaaggcgaagaacacgagttcgaggttcaggacgaccagttcatattggacgcagctgaagaggcaggagttgacttgccttactcttgcagagccggagcctgttccacctgcgccggtcagatcgtgaaaggccaagttgaccagtctgaaggttcgtttcttgaggatgatcacttggagaaaggttttgtcttgacatgtgtggcttacccgcagtcggactgtgtgatccatacccacaaggaaactgaactcttctaagtcacggtggtagtgatgcccaattgtcatttgagttattgttattattgttatcagtttccttctacgaatttgggtgtgtttaattgtatgcttttgtatggaaacgtctcaggatatgccttttagtgttcatcagtcttcaccgggttgcaactggttaat

SEQ ID NO: 13518 - protein, 155 aa, Triticum aestivum
  misc_feature (1)..(155): Ceres Seq. ID no. 15225569
MATFQISSTSMTTKAVLRSQPTNKLIANKSQQVSVGSVKKVSRSFGLKCSANSGATMSAVYKVKLIGPEGEEHEFEVQDDQFILDAAEEAGVDLPYSCRAGACSTCAGQIVKGQVDQSEGSFLEDDHLEKGFVLTCVAYPQSDCVIHTHKETELF

SEQ ID NO: 13519 - protein, 145 aa, Triticum aestivum
  misc_feature (1)..(145): Ceres Seq. ID no. 15225570
MTTKAVLRSQPTNKLIANKSQQVSVGSVKKVSRSFGLKCSANSGATMSAVYKVKLIGPEGEEHEFEVQDDQFILDAAEEAGVDLPYSCRAGACSTCAGQIVKGQVDQSEGSFLEDDHLEKGFVLTCVAYPQSDCVIHTHKETELF

SEQ ID NO: 13520 - protein, 99 aa, Triticum aestivum
  misc_feature (1)..(99): Ceres Seq. ID no. 15225571
MSAVYKVKLIGPEGEEHEFEVQDDQFILDAAEEAGVDLPYSCRAGACSTCAGQIVKGQVDQSEGSFLEDDHLEKGFVLTCVAYPQSDCVIHTHKETELF

SEQ ID NO: 13521 - DNA, 894 bp, Triticum aestivum
  misc_feature (1)..(894): Ceres Seq. ID no. 15225572
acacacacaatggttggtatggctgtggttggtcaatggactctctgtgtcgcctcgccgtcgccgagagtaaagtcggcaacttgcaattcaaactcttgtccaaccaccgttaacttacgctctgagctgtctgcatttcgtcctcagttccggctcttctctcgtgtttctccgacacgccgccgccgtctttgcgcttccagctccgccgattcgggaatcttcctccctcaccttgtcgcttctatggagcaagttgaggagacttacattatggtcaaaccagacggcatccaacgaggccttgttggagaaatcatctctcgttttgagaagaaggggtttaaactgattggacttaagatgttccaatgcccaaaagaattggctcaggaacattataaggatcttagtgctaagtctttctttcctagcctgattgagtacatcacttctggcccagttgtgtgtatggcttgggaaggtgttggtgtggttgcttcagtcaggaagctgatagggaaaactgatcctcttcaagctgaacctggtaccattagaggagatcttgctgtacaaaccggaaggaacatcgtgcatggtagtgacagtcctgaaaacggaaagcgtgagattgctctgtggttcaaagaaggcgagctgtgcgggtgggattcagctctagctaaatggctaagggagtgatccttgagaagacaaattcaattctttttccttgttactgagtgcgaatgggctttggtcctttgttttgtttttgtttttgtttttgttttggcggcgtgtacgtggacttgttgatctttctggcatctttaatcacacttgtcatgtaatgaaatgagttgaatagattcaccttttctctgc

SEQ ID NO: 13522 - protein, 235 aa, Triticum aestivum
  misc_feature (1)..(235): Ceres Seq. ID no. 15225573
THTMVGMAVVGQWTLCVASPSPRVKSATCNSNSCPTTVNLRSELSAFRPQFRLFSRVSPTRRRRLCASSSADSGIFLPHLVASMEQVEETYIMVKPDGIQRGLVGEIISRFEKKGFKLIGLKMFQCPKELAQEHYKDLSAKSFFPSLIEYITSGPVVCMAWEGVGVVASVRKLIGKTDPLQAEPGTIRGDLAVQTGRNIVHGSDSPENGKREIALWFKEGELCGWDSALAKWLRE

SEQ ID NO: 13523 - protein, 232 aa, Triticum aestivum
  misc_feature (1)..(232): Ceres Seq. ID no. 15225574
MVGMAVVGQWTLCVASPSPRVKSATCNSNSCPTTVNLRSELSAFRPQFRLFSRVSPTRRRRLCASSSADSGIFLPHLVASMEQVEETYIMVKPDGIQRGLVGEIISRFEKKGFKLIGLKMFQCPKELAQEHYKDLSAKSFFPSLIEYITSGPVVCMAWEGVGVVASVRKLIGKTDPLQAEPGTIRGDLAVQTGRNIVHGSDSPENGKREIALWFKEGELCGWDSALAKWLRE

SEQ ID NO: 13524 - protein, 229 aa, Triticum aestivum
  misc_feature (1)..(229): Ceres Seq. ID no. 15225575
MAVVGQWTLCVASPSPRVKSATCNSNSCPTTVNLRSELSAFRPQFRLFSRVSPTRRRRLCASSSADSGIFLPHLVASMEQVEETYIMVKPDGIQRGLVGEIISRFEKKGFKLIGLKMFQCPKELAQEHYKDLSAKSFFPSLIEYITSGPVVCMAWEGVGVVASVRKLIGKTDPLQAEPGTIRGDLAVQTGRNIVHGSDSPENGKREIALWFKEGELCGWDSALAKWLRE

SEQ ID NO: 13525 - DNA, 1495 bp, Triticum aestivum
  misc_feature (1)..(1495): Ceres Seq. ID no. 15225627
tcgccccctcctccctattactctcccacctgctctccccgccgctccagaatcgccgccaccttgctgcgctcaccaacggcacgcgcatcccccctcagatccctccctcacgcattccgccttctcccgaggctcgtagctgctagcacggacgatggccccttgtgcaaccgccggcgcgcagatgctggccgcacgcccctgcgtctcggcctctcagagcatgctcacctcgaggccggccgtctcacggatcgacctgacgctcgtcgctggtagcttcgcgaactgtcccagaatctcctgctccaggtctcttggttcttcccggagcggcgctgtcgccgtaagagcggtgtcaggagaaggtagctcttctgggctgcccatcgatcttagagggaaaagggcatttattgctggggttgctgatgataacggctatggctgggcaattgcaaaggctcttgccgcagctggtgctgaaattcttgttggtacatgggtgcctgcacttaacatatttgagacaagcctgaggcgtggaaaatttgacgaatcacggaagctgcctgatggatctcttatggagattgttaaagtctatccactggatgctgtctatgattccccggaggatgttcctgaagatgtcaaaacaaacaaaaggtacgcaggatcgtcaaattggactgtgaaggaagctgccgaattagttaagaaggaatatggcagcattgacattcttgtgcattctcttgctaatggtcctgaggttacaaaacctttgctggaaacctcaagaagtgggtatcttgctgcaatttcagcatccagttactcctttgtttctttacttaagcacttccttcctattatgaatccaggtggtgctagcatctcgctaacatatattgcatctgaaaggacaattcctggatatggtggtggcatgagttcagctaaagcagctcttgagagtgatacaaaagtacttgcttttgaagctggacgcaaaggcaaaatccgagttaacaccatatctgcaggtcctctgggcagcagagctgccaaggcaattggattcattgagaagatgatcgagtactcttatgtcaatgcaccattgcagaaggagcttctggcagatgaagtcgggaacacggcagcattcctggtgtctcctttggcttctgccatcactggctcgactgtttacgtcgacaacggacttaacaccatgggtcttgcggttgacagccccacagtatcttcattgttgtgattccggtaggcggacctatttttcctgattcaccgcggcttgattgttgaataaggagcttagttagttagtactgtaagaagctcttgctaagagctgagggcaggagaaaaaagagaagggggtggctgttgaaaatgactttttaagcagtccagtacctcctctttggcccatttctaatattatctcaaatgttgttgttgc

SEQ ID NO: 13526 - protein, 376 aa, Triticum aestivum
  misc_feature (1)..(376): Ceres Seq. ID no. 15225628
MAPCATAGAQMLAARPCVSASQSMLTSRPAVSRIDLTLVAGSFANCPRISCSRSLGSSRSGAVAVRAVSGEGSSSGLPIDLRGKRAFIAGVADDNGYGWAIAKALAAAGAEILVGTWVPALNIFETSLRRGKFDESRKLPDGSLMEIVKVYPLDAVYDSPEDVPEDVKTNKRYAGSSNWTVKEAAELVKKEYGSIDILVHSLANGPEVTKPLLETSRSGYLAAISASSYSFVSLLKHFLPIMNPGGASISLTYIASERTIPGYGGGMSSAKAALESDTKVLAFEAGRKGKIRVNTISAGPLGSRAAKAIGFIEKMIEYSYVNAPLQKELLADEVGNTAAFLVSPLASAITGSTVYVDNGLNTMGLAVDSPTVSSLL

SEQ ID NO: 13527 - protein, 366 aa, Triticum aestivum
  misc_feature (1)..(366): Ceres Seq. ID no. 15225629
MLAARPCVSASQSMLTSRPAVSRIDLTLVAGSFANCPRISCSRSLGSSRSGAVAVRAVSGEGSSSGLPIDLRGKRAFIAGVADDNGYGWAIAKALAAAGAEILVGTWVPALNIFETSLRRGKFDESRKLPDGSLMEIVKVYPLDAVYDSPEDVPEDVKTNKRYAGSSNWTVKEAAELVKKEYGSIDILVHSLANGPEVTKPLLETSRSGYLAAISASSYSFVSLLKHFLPIMNPGGASISLTYIASERTIPGYGGGMSSAKAALESDTKVLAFEAGRKGKIRVNTISAGPLGSRAAKAIGFIEKMIEYSYVNAPLQKELLADEVGNTAAFLVSPLASAITGSTVYVDNGLNTMGLAVDSPTVSSLL

SEQ ID NO: 13528 - protein, 353 aa, Triticum aestivum
  misc_feature (1)..(353): Ceres Seq. ID no. 15225630
MLTSRPAVSRIDLTLVAGSFANCPRISCSRSLGSSRSGAVAVRAVSGEGSSSGLPIDLRGKRAFIAGVADDNGYGWAIAKALAAAGAEILVGTWVPALNIFETSLRRGKFDESRKLPDGSLMEIVKVYPLDAVYDSPEDVPEDVKTNKRYAGSSNWTVKEAAELVKKEYGSIDILVHSLANGPEVTKPLLETSRSGYLAAISASSYSFVSLLKHFLPIMNPGGASISLTYIASERTIPGYGGGMSSAKAALESDTKVLAFEAGRKGKIRVNTISAGPLGSRAAKAIGFIEKMIEYSYVNAPLQKELLADEVGNTAAFLVSPLASAITGSTVYVDNGLNTMGLAVDSPTVSSLL

SEQ ID NO: 13529 - DNA, 728 bp, Triticum aestivum
  misc_feature (1)..(728): Ceres Seq. ID no. 15225732
atcagaatcctcgctccgcacgattccgcgcctcctcgccgcaagcgccgacgacagagcctcctacgcgatggccatggaccgccgcgcccgcgcagccccgcgcgcggacgaggagcgcccgagccacggccggttcctccgccccggcgcgctagcccggctccgggactccaggatcgtcgcccgctccctccggtcggcggcggcgcgcctcccgatcccgtccgcccctccgtcccccgcgccggagcagcagcggcaggacggcatgccgcacttcctggtggggcccacgaggggcctctgtggcgcggcgcggtacccgctcaggaggaggatggccgcggcgaggtgcgtggtgttcttgccgccgccggaggcgttcttggacgcgcccgcgccgtcgtggggcctcgccaccgcgcgctgacgggggccgggatcagccgcggccgtgcgtttagattcgcaagtagttagaactctgtgcagatggctcgctggactttcttccgttcaacagttttaggatctgatgcgactgttttagatctgctacctttccggtctaattttgtgtcgtagaattgatccaaatttacaagtttgtgacttgcatctgtagctgggtgcgttggttttccttctgttatatagctttcttagtttcttattttcatataataaatttgcatagaccggttttggcaaaaaaaaaaaaaaaa

SEQ ID NO: 13530 - protein, 160 aa, Triticum aestivum
  misc_feature (1)..(160): Ceres Seq. ID no. 15225733
IRILAPHDSAPPRRKRRRQSLLRDGHGPPRPRSPARGRGAPEPRPVPPPRRASPAPGLQDRRPLPPVGGGAPPDPVRPSVPRAGAAAAGRHAALPGGAHEGPLWRGAVPAQEEDGRGEVRGVLAAAGGVLGRARAVVGPRHRALTGAGISRGRAFRFASS

SEQ ID NO: 13531 - protein, 143 aa, Triticum aestivum
  misc_feature (1)..(143): Ceres Seq. ID no. 15225734
SESSLRTIPRLLAASADDRASYAMAMDRRARAAPRADEERPSHGRFLRPGALARLRDSRIVARSLRSAAARLPIPSAPPSPAPEQQRQDGMPHFLVGPTRGLCGAARYPLRRRMAAARCVVFLPPPEAFLDAPAPSWGLATAR

SEQ ID NO: 13532 - protein, 120 aa, Triticum aestivum
  misc_feature (1)..(120): Ceres Seq. ID no. 15225735
MAMDRRARAAPRADEERPSHGRFLRPGALARLRDSRIVARSLRSAAARLPIPSAPPSPAPEQQRQDGMPHFLVGPTRGLCGAARYPLRRRMAAARCVVFLPPPEAFLDAPAPSWGLATAR

SEQ ID NO: 13533 - DNA, 922 bp, Triticum aestivum
  misc_feature (1)..(922): Ceres Seq. ID no. 15225738
aaggttcttgatttgtggtacagactagaaagctttatcctgccatgtcagggacctctttcaccggcgcgccggcgtcagatgcccccctggctccgtacccgcggcagcagaactacagcttcaacgggcgcgtcctgcttatggccgccttcctccttttcgggctcaccatcttcttcaccctcatccgcttcttgctgtacgtgttagtggcgcggtctggcggccgccgtcgccgcggcagcttcaccgccggcatcctgcggtccatcaactcgtttggcggaactagcggccggcgtgggctggacgcctccgcgctctccgcgctgccggtcaccgcgtaccggaaggagggcgccgccaccgccggggctgactgcgccgtgtgcctgtcggagctcgccgacggagaaaaggtgcgggagctgcccaactgcgggcactcgttccacgtggagtgcgtcgacgcatggctgcgctccaggacgacctgccctctctgccgcgccgaggctgagctgcccaaggggaacggcaaggcggaggtggcggcgcagtcgtcgtcgtcctccccctcatcctctgccagggagccgccgcaacaggcgttgttcgtgggaggaggaaccttgatcgtgaccgtgcaaggtggcttcccggatacgcaaaggggcgtgcgtgggtcaacatcggggtaggaggtcagtccggatcttcctattcctaaattgcagcgaagtttcgaagaaggctacagcgacagatgcatatactgtaggttagaccgttgttcacggcgtgcacaagttggatacaatcatacaaaacacctctgtttgagcgaaagtcacccatttgtttgtttgtttgttgtatttcgaggagagcatataagaaactcatatgttgttaattc

SEQ ID NO: 13534 - protein, 219 aa, Triticum aestivum
  misc_feature (1)..(219): Ceres Seq. ID no. 15225739
MSGTSFTGAPASDAPLAPYPRQQNYSFNGRVLLMAAFLLFGLTIFFTLIRFLLYVLVARSGGRRRRGSFTAGILRSINSFGGTSGRRGLDASALSALPVTAYRKEGAATAGADCAVCLSELADGEKVRELPNCGHSFHVECVDAWLRSRTTCPLCRAEAELPKGNGKAEVAAQSSSSSPSSSAREPPQQALFVGGGTLIVTVQGGFPDTQRGVRGSTSG

SEQ ID NO: 13535 - protein, 186 aa, Triticum aestivum
  misc_feature (1)..(186): Ceres Seq. ID no. 15225740
MAAFLLFGLTIFFTLIRFLLYVLVARSGGRRRRGSFTAGILRSINSFGGTSGRRGLDASALSALPVTAYRKEGAATAGADCAVCLSELADGEKVRELPNCGHSFHVECVDAWLRSRTTCPLCRAEAELPKGNGKAEVAAQSSSSSPSSSAREPPQQALFVGGGTLIVTVQGGFPDTQRGVRGSTSG

SEQ ID NO: 13536 - DNA, 1539 bp, Triticum aestivum
  misc_feature (1)..(1539): Ceres Seq. ID no. 15225826
tttttcgccacagatattcccaaagcatctcctttctttccccgttgctctcctcctcggattcctcttcccctgccccctcctccctcctactctgctcctacccgcccgtattattcttcccttccccctctctctctgcttttccctcgtgcccgatcttcccaccagcactccagcagagcgccagttctgccaaggaaacgccggaggcgggccggcatgcgcgtggacgacgccgacaagcccgattctgcagacgccggagcggagaagcccgccgagctcccctcgcctcatatggagagtgtttgcgagaacaccacaactgctgatttcaagcagagtaactttggaaatttccttccaaatgttagatcaggcggttggtcagatattggaagtcgccagtacatggaagatacccatgtgtgtattgccgatctagctaaaaactttggttatccaacagtggataaagaagttgtttccttttatggggtctttgatgggcatggtggaaaagatgctgcccatttcgttcgcgataatctgccaagggtcattgtggaagatgctgattttcctctggagcttgagaaagtagtgagcagatcctttgtgcagattgatagtcagtttgccgataaatgctctcaccagagaactctgtcgtccggcacaacggcacttacagcaatgatttttggaaggtcccttctggtcgcgaacgctggtgattgcagagcagtactttcccggtgtggcatcgcaatggagatgtcgatggaccacaggccctgcagcctcagcgaaaagctgcgggtcgagtcgctcggtggctacgtggacgacggctacctgaacggtctgctgggagtcaccagagccctcggcgactggcacctcgagggaatgaaggaggccagcaggcccgggggaggccccctgagcgcggagccggagatcaagctgaccacgctgaccaaggacgacgagttcctggtgatcggcagcgacgggctgtgggacgtcttctcgaaccagaacgccgtggacttcgcccggcggcgcctccaggagcacaacgacgtgaagcgctgctgcagggagatcgtcgaggaggcgataaggcgcggagccacagacaatttaacagcagtgctggtctcattccacctggtggcgcctcctcagatcagagtgaatcagccacgtagggtggcgcggagcatctcggccgacgggctcaacagcctcaggatactcctgggaagccaatgacggcgctcttctcgtgccgccgtgatcaggtgctgtgccggtgcttgctgagctctaattgtatgtagtcgtgtccgtgcttcgttgttgatgttgttagctgctgttatgttaccccattgttgttgaggcagtggctgttattcttgttggtaattaagccaacgaacatgtgagctcatagttgtgagcatttcttagctgctggaaactaggcatgtcctggtgaagaggctgcgtgccttgctgtgctgt

SEQ ID NO: 13537 - protein, 427 aa, Triticum aestivum
  misc_feature (1)..(427): Ceres Seq. ID no. 15225827
FFATDIPKASPFFPRCSPPRIPLPLPPPPSYSAPTRPYYSSLPPLSLLFPRARSSHQHSSRAPVLPRKRRRRAGMRVDDADKPDSADAGAEKPAELPSPHMESVCENTTTADFKQSNFGNFLPNVRSGGWSDIGSRQYMEDTHVCIADLAKNFGYPTVDKEVVSFYGVFDGHGGKDAAHFVRDNLPRVIVEDADFPLELEKVVSRSFVQIDSQFADKCSHQRTLSSGTTALTAMIFGRSLLVANAGDCRAVLSRCGIAMEMSMDHRPCSLSEKLRVESLGGYVDDGYLNGLLGVTRALGDWHLEGMKEASRPGGGPLSAEPEIKLTTLTKDDEFLVIGSDGLWDVFSNQNAVDFARRRLQEHNDVKRCCREIVEEAIRRGATDNLTAVLVSFHLVAPPQIRVNQPRRVARSISADGLNSLRILLGSQ

SEQ ID NO: 13538 - protein, 353 aa, Triticum aestivum
  misc_feature (1)..(353): Ceres Seq. ID no. 15225828
MRVDDADKPDSADAGAEKPAELPSPHMESVCENTTTADFKQSNFGNFLPNVRSGGWSDIGSRQYMEDTHVCIADLAKNFGYPTVDKEVVSFYGVFDGHGGKDAAHFVRDNLPRVIVEDADFPLELEKVVSRSFVQIDSQFADKCSHQRTLSSGTTALTAMIFGRSLLVANAGDCRAVLSRCGIAMEMSMDHRPCSLSEKLRVESLGGYVDDGYLNGLLGVTRALGDWHLEGMKEASRPGGGPLSAEPEIKLTTLTKDDEFLVIGSDGLWDVFSNQNAVDFARRRLQEHNDVKRCCREIVEEAIRRGATDNLTAVLVSFHLVAPPQIRVNQPRRVARSISADGLNSLRILLGSQ

SEQ ID NO: 13539 - protein, 327 aa, Triticum aestivum
  misc_feature (1)..(327): Ceres Seq. ID no. 15225829
MESVCENTTTADFKQSNFGNFLPNVRSGGWSDIGSRQYMEDTHVCIADLAKNFGYPTVDKEVVSFYGVFDGHGGKDAAHFVRDNLPRVIVEDADFPLELEKVVSRSFVQIDSQFADKCSHQRTLSSGTTALTAMIFGRSLLVANAGDCRAVLSRCGIAMEMSMDHRPCSLSEKLRVESLGGYVDDGYLNGLLGVTRALGDWHLEGMKEASRPGGGPLSAEPEIKLTTLTKDDEFLVIGSDGLWDVFSNQNAVDFARRRLQEHNDVKRCCREIVEEAIRRGATDNLTAVLVSFHLVAPPQIRVNQPRRVARSISADGLNSLRILLGSQ

SEQ ID NO: 13540 - DNA, 818 bp, Triticum aestivum
  misc_feature (1)..(818): Ceres Seq. ID no. 15225989
cccctcccattccgcctcctgttgcttcgaactatggcagcagcagctgccggtgctgcatcggccgccgccgcgccagctacgcatcacgccgaccactccatgaacgccctccgctccaccgccttccgccgctccaccctccattgggacgccgccgcggccttcttttccccgcccttccgctctcgccgctgccaccgacgtgtcttgctccctcctgccgcggcgctgcccgcgaagtcccgctccagggccaaggctaagctcctggcggacgcgggggctgtggacccctggctcgcctccctctccctgctccccgccggcggcggcggctacggcggccagcgcggcggtggcggaggctacggcggcggcggcggctacggaggcggcggcggctacggcggtggtggcggctacggcggccagcgcggcggtggcggcggcgactccggcggccagtggaggaactgagcctcgaatctcccagttatcgatctatctaccgtgtcgtcgtcgtcgtcgtcgtcttcgtcagcaagttatcttcggtgtcgtcgtgttcctgtgtcagtctgagtcgtcgtgtgtgtggtgtttttgatcgcgagctcgagtgtcgctctgtccggggttaattagagctggttacgcgaggaagaaacaacatgtgttactatctttcagtcggtcggtcggtcggtcagtcggtgatgcagcaatccccttctgtcatggattgggatgtgatgttggaatatcctatgtttgaacaagtttaaatggatgaagaaaatgcaagtcatagctgc

SEQ ID NO: 13541 - protein, 159 aa, Triticum aestivum
  misc_feature (1)..(159): Ceres Seq. ID no. 15225990
PLPFRLLLLRTMAAAAAGAASAAAAPATHHADHSMNALRSTAFRRSTLHWDAAAAFFSPPFRSRRCHRRVLLPPAAALPAKSRSRAKAKLLADAGAVDPWLASLSLLPAGGGGYGGQRGGGGGYGGGGGYGGGGGYGGGGGYGGQRGGGGGDSGGQWRN

SEQ ID NO: 13542 - protein, 148 aa, Triticum aestivum
  misc_feature (1)..(148): Ceres Seq. ID no. 15225991
MAAAAAGAASAAAAPATHHADHSMNALRSTAFRRSTLHWDAAAAFFSPPFRSRRCHRRVLLPPAAALPAKSRSRAKAKLLADAGAVDPWLASLSLLPAGGGGYGGQRGGGGGYGGGGGYGGGGGYGGGGGYGGQRGGGGGDSGGQWRN

SEQ ID NO: 13543 - protein, 125 aa, Triticum aestivum
  misc_feature (1)..(125): Ceres Seq. ID no. 15225992
MNALRSTAFRRSTLHWDAAAAFFSPPFRSRRCHRRVLLPPAAALPAKSRSRAKAKLLADAGAVDPWLASLSLLPAGGGGYGGQRGGGGGYGGGGGYGGGGGYGGGGGYGGQRGGGGGDSGGQWRN

SEQ ID NO: 13544 - DNA, 1232 bp, Triticum aestivum
  misc_feature (1)..(1232): Ceres Seq. ID no. 15226126
gaaagaatccaccttattgcccagtgcatcgttttttgactagtcctcgtcgtggttaacaccgcaccaaccaagctgaggagttgaagttcgagacattctcgactgccggctgccgccccctcttctacggctccacttccaagtgccaaagcggccacgccacaaccacaacaatggcgcttccagcgacctcgtggctgctcatctccctcctcctcgccgtgacgccagcccctagcacctgtgaggagagcgtgcgcatcgcgggcgcaggcggcttgctgcagtgctacccggcgccggcgctcaccaacgccactaacggcacggcgtttcgcgccaccctgctcccgctcctcggctctctcccctccgccgccgcgcccacgggcttcgcctccctacggtccgtcactcgcggggagcgcgcgttggcgcgggggctctgcttcggcaactccacggtgccgtccgagtgcgcccggtgcctgtccgccgcggctgggaacctcacagctggctgcggcgccaccagccggcgccccggcatctggagcgaccggtgcttcgtcggctacgccgacaccaacgcatcctcgtcaaacgaagacggcttccgcgcgcgcgtcctcctcccgggcgacgacgccgtccctcgctctgtggccagcaccaaatccttctactacgcccacctgcacgatgtactcgtcgccatggagaaggacgtggcgcggcgcgcggccgcgaacatctccgggccgcggatgctggccacagcggaggagaccaactccgacagcgcggtgagcagaacagtgcacgttctggcgcagtgcgggagggaccgcacggcggcggcctgcgtccggtgcctacagaactcggtgcaggccgtgcactgggacctcaacgctgcccgcgtcgacggtggcgtggcggccgcggtggtgggcttcaactgctacatgcggtttgaggtctccactgcagtgggtggcgacactatcactggcgttatgctactggtggcattcgtgctatgtatatttacaggaggcgcatgtgggtgtttgtgtcctgtaccctgatgaagttgagaaagaaggataaaattcgttgcaacgatatcagagatcaggaacgcaataaaaccttatgttccaattaagtttcttattgcatactctgtatatcttaatgggaaacgcttcctctcagtagtctgc

SEQ ID NO: 13545 - protein, 305 aa, Triticum aestivum
  misc_feature (1)..(305): Ceres Seq. ID no. 15226127
MALPATSWLLISLLLAVTPAPSTCEESVRIAGAGGLLQCYPAPALTNATNGTAFRATLLPLLGSLPSAAAPTGFASLRSVTRGERALARGLCFGNSTVPSECARCLSAAAGNLTAGCGATSRRPGIWSDRCFVGYADTNASSSNEDGFRARVLLPGDDAVPRSVASTKSFYYAHLHDVLVAMEKDVARRAAANISGPRMLATAEETNSDSAVSRTVHVLAQCGRDRTAAACVRCLQNSVQAVHWDLNAARVDGGVAAAVVGFNCYMRFEVSTAVGGDTITGVMLLVAFVLCIFTGGACGCLCPVP

SEQ ID NO: 13546 - DNA, 1496 bp, Triticum aestivum
  misc_feature (1)..(1496): Ceres Seq. ID no. 15226198
gactttctcgcccgaccgctccttttgcgccgccgccaccgccgcatccgcgaaaacctcgcccccactcccgccgccgtctccgccgcagctccggacccctagaatccgagcggcgatggcctcctccatactctccgactgctcctcctgcgccacctcccgcctcctccccctccgccgcgccctccacccgccgccgccccgcttccgcccctcccccgccccggcgccgttgccgaggaggcctctcctcgccgccgccgcctcgctcccgctcctcccccgcgcgcgccgcatggccgcgctcgccgccgcctcttccgccgactcagccactgttttggctgatgcatctgccaagatcatcgacggcaagctggtggcaaagcaaataagggaggaggtcggcgttgagatcgccaggatgaaggacacgatcggagtggtgcctgggctggcggtcatcctagtcggctcgaggaaggattcccagacatacgtgcggaacaagaagaaggcgtgcgatgcggtcggtatcaagtcgtatgaggttaatttgccagaggacgcttccgagtacgaggtcatcaagcacatagcaaccttcaacgatgatccgtcggtgcatggcatcttggttcagctgcccttacctcgccatatgaacgacgagaacatattgaatgctgttagtattgaaaaggacgttgatggctttcatccagtgaacattggacgacttgcaatgcaaggtcgggatccattctttgttccatgcacccctaaaggatgcatggagctgctacacagatctggagttgaaataaaagggaagagagctgttgtaattggaaggagcaatattgtggggacgcctgctgctttactcttacaaaaagcaaatgcaacagtgagtattgtacattcaaaaaccaagaaccccgaggaaataacaagacaagcagatattataatcgcggctgttggagttgctaacctggtcagagggagttggataaagcctggagctgctattattgatgttggcatcaatccggttgatgatccagcaagccctcgaggttaccggctagttggagatgtctgctttgaggaggcctccaaggttgcaggagccatcacaccagttcccggcggtgtcgggccaatgacaattgcgatgcttctgtcgaacacactggattcagctaaaagaatccacaagttcaagtaaccggacaaccctgtactcagaacttgggagagcgcttaacctttggtttagtctaccaggcaaggtattgccaactgtttgatgcgccttttgttggaccagaaaaggtcaacaagagccgtgaaataaatttttgacaggggtgagaaatttaccccggcttcaaactgtaccgtattcgctaatgttccatgaaatcccagttcaatctgtggcacaacttaggtcaattgagatctcagttaagcttggacgaacc

SEQ ID NO: 13547 - protein, 411 aa, Triticum aestivum
  misc_feature (1)..(411): Ceres Seq. ID no. 15226199
TFSPDRSFCAAATAASAKTSPPLPPPSPPQLRTPRIRAAMASSILSDCSSCATSRLLPLRRALHPPPPRFRPSPAPAPLPRRPLLAAAASLPLLPRARRMAALAAASSADSATVLADASAKIIDGKLVAKQIREEVGVEIARMKDTIGVVPGLAVILVGSRKDSQTYVRNKKKACDAVGIKSYEVNLPEDASEYEVIKHIATFNDDPSVHGILVQLPLPRHMNDENILNAVSIEKDVDGFHPVNIGRLAMQGRDPFFVPCTPKGCMELLHRSGVEIKGKRAVVIGRSNIVGTPAALLLQKANATVSIVHSKTKNPEEITRQADIIIAAVGVANLVRGSWIKPGAAIIDVGINPVDDPASPRGYRLVGDVCFEEASKVAGAITPVPGGVGPMTIAMLLSNTLDSAKRIHKFK

SEQ ID NO: 13548 - protein, 372 aa, Triticum aestivum
  misc_feature (1)..(372): Ceres Seq. ID no. 15226200
MASSILSDCSSCATSRLLPLRRALHPPPPRFRPSPAPAPLPRRPLLAAAASLPLLPRARRMAALAAASSADSATVLADASAKIIDGKLVAKQIREEVGVEIARMKDTIGVVPGLAVILVGSRKDSQTYVRNKKKACDAVGIKSYEVNLPEDASEYEVIKHIATFNDDPSVHGILVQLPLPRHMNDENILNAVSIEKDVDGFHPVNIGRLAMQGRDPFFVPCTPKGCMELLHRSGVEIKGKRAVVIGRSNIVGTPAALLLQKANATVSIVHSKTKNPEEITRQADIIIAAVGVANLVRGSWIKPGAAIIDVGINPVDDPASPRGYRLVGDVCFEEASKVAGAITPVPGGVGPMTIAMLLSNTLDSAKRIHKFK

SEQ ID NO: 13549 - protein, 312 aa, Triticum aestivum
  misc_feature (1)..(312): Ceres Seq. ID no. 15226201
MAALAAASSADSATVLADASAKIIDGKLVAKQIREEVGVEIARMKDTIGVVPGLAVILVGSRKDSQTYVRNKKKACDAVGIKSYEVNLPEDASEYEVIKHIATFNDDPSVHGILVQLPLPRHMNDENILNAVSIEKDVDGFHPVNIGRLAMQGRDPFFVPCTPKGCMELLHRSGVEIKGKRAVVIGRSNIVGTPAALLLQKANATVSIVHSKTKNPEEITRQADIIIAAVGVANLVRGSWIKPGAAIIDVGINPVDDPASPRGYRLVGDVCFEEASKVAGAITPVPGGVGPMTIAMLLSNTLDSAKRIHKFK

SEQ ID NO: 13550 - DNA, 1493 bp, Triticum aestivum
  misc_feature (1)..(1493): Ceres Seq. ID no. 15226223
tccgatgcatgccatggcggagcccggcggcgcgctcgacccccctcctcccccctctccggctgcgccgaccccgccggtccagtggcccaaggacggctcgctcgacccgcctccttccccctctccggtcgcgcagcccccgccggtcgagtggcccgaggacggcgtgctgacgcgggactgggtggccagcttcaccgcggcgctggactggtgctcgcggagcatcccgccggaccagctcccctcggtgctctccgcggatttcgtgcggcggctcgtcgtcgccgcggccgtcatcctccaccgcgagcccaacatcgtccgcgtcgacccgcggcccgaccagtccgtcgtcgtcgtgggggacgtccacggccagctccacgatgtcatgttcctgctccgggacgccgggttcccctcggaggagcgaatctttgtctttaacggggattacgtggatcgcggcgcttggggcctcgagaccttgctcctcctcctggcttggaaggtattccttccaaattgtgtgtttcttctccgaggaaatcatgaatccaagtactgcacgtcagtatatggtttcgaacaggaggtaatggttaaatataaaggtcaaggcactcaagtttatcggaagtttttaagatgttttgaagatctccctctagcatcaataatagcaggatgtgtgtatactgctcatggagggatttttcgtggggcggttgtactaccgttgaaaaggtcgaaaagggcaaagaaaggtcacaaatataaggcgggtcctactgatgactctactactttgaagcttggatccctggacgaattgttaaaagcaaggagaactgttcttgacaccccgtatgagggttcaaacttgattcctggagatgtgctttggtctgatccttccttagataagggtctttccctgaataatgaaaggggcattggtttgctttggggtctagatatcactcaacagtttctatatacaaataatctgaagttaatcatcagatcacatgaaggcccagatgcaagagataagcggcatgatctattagcaatggacagtggatatacaatcgaccatcatgtcgcatgcggaaagttaataactctcttcagtgccccagactatccacaatttcaggcctcagtggaccgttacaacaattctggagcatatattgtcctcagtccccctgattttgctacccctgatttccatacttttcaagctgtaaagcctcggcctaaggcgcatccctactatgattttgaagacgtaattgattctgatgaagagttaaatctaggcgccatggacactggcacgtcgagcagttgatcacaacctgtattgtaattgtacttagcatgcgaattgtcaccgcgaactggagaagtggtaacgagtagttcttttgattggtactaacattgcagacttcgtaactaatattttgtcacgtcct

SEQ ID NO: 13551 - protein, 454 aa, Triticum aestivum
  misc_feature (1)..(454): Ceres Seq. ID no. 15226224
PMHAMAEPGGALDPPPPPSPAAPTPPVQWPKDGSLDPPPSPSPVAQPPPVEWPEDGVLTRDWVASFTAALDWCSRSIPPDQLPSVLSADFVRRLVVAAAVILHREPNIVRVDPRPDQSVVVVGDVHGQLHDVMFLLRDAGFPSEERIFVFNGDYVDRGAWGLETLLLLLAWKVFLPNCVFLLRGNHESKYCTSVYGFEQEVMVKYKGQGTQVYRKFLRCFEDLPLASIIAGCVYTAHGGIFRGAVVLPLKRSKRAKKGHKYKAGPTDDSTTLKLGSLDELLKARRTVLDTPYEGSNLIPGDVLWSDPSLDKGLSLNNERGIGLLWGLDITQQFLYTNNLKLIIRSHEGPDARDKRHDLLAMDSGYTIDHHVACGKLITLFSAPDYPQFQASVDRYNNSGAYIVLSPPDFATPDFHTFQAVKPRPKAHPYYDFEDVIDSDEELNLGAMDTGTSSS

SEQ ID NO: 13552 - protein, 453 aa, Triticum aestivum
  misc_feature (1)..(453): Ceres Seq. ID no. 15226225
MHAMAEPGGALDPPPPPSPAAPTPPVQWPKDGSLDPPPSPSPVAQPPPVEWPEDGVLTRDWVASFTAALDWCSRSIPPDQLPSVLSADFVRRLVVAAAVILHREPNIVRVDPRPDQSVVVVGDVHGQLHDVMFLLRDAGFPSEERIFVFNGDYVDRGAWGLETLLLLLAWKVFLPNCVFLLRGNHESKYCTSVYGFEQEVMVKYKGQGTQVYRKFLRCFEDLPLASIIAGCVYTAHGGIFRGAVVLPLKRSKRAKKGHKYKAGPTDDSTTLKLGSLDELLKARRTVLDTPYEGSNLIPGDVLWSDPSLDKGLSLNNERGIGLLWGLDITQQFLYTNNLKLIIRSHEGPDARDKRHDLLAMDSGYTIDHHVACGKLITLFSAPDYPQFQASVDRYNNSGAYIVLSPPDFATPDFHTFQAVKPRPKAHPYYDFEDVIDSDEELNLGAMDTGTSSS

SEQ ID NO: 13553 - protein, 450 aa, Triticum aestivum
  misc_feature (1)..(450): Ceres Seq. ID no. 15226226
MAEPGGALDPPPPPSPAAPTPPVQWPKDGSLDPPPSPSPVAQPPPVEWPEDGVLTRDWVASFTAALDWCSRSIPPDQLPSVLSADFVRRLVVAAAVILHREPNIVRVDPRPDQSVVVVGDVHGQLHDVMFLLRDAGFPSEERIFVFNGDYVDRGAWGLETLLLLLAWKVFLPNCVFLLRGNHESKYCTSVYGFEQEVMVKYKGQGTQVYRKFLRCFEDLPLASIIAGCVYTAHGGIFRGAVVLPLKRSKRAKKGHKYKAGPTDDSTTLKLGSLDELLKARRTVLDTPYEGSNLIPGDVLWSDPSLDKGLSLNNERGIGLLWGLDITQQFLYTNNLKLIIRSHEGPDARDKRHDLLAMDSGYTIDHHVACGKLITLFSAPDYPQFQASVDRYNNSGAYIVLSPPDFATPDFHTFQAVKPRPKAHPYYDFEDVIDSDEELNLGAMDTGTSSS

SEQ ID NO: 13554 - DNA, 1056 bp, Triticum aestivum
  misc_feature (1)..(1056): Ceres Seq. ID no. 15226227
gaggaacttttcgttggatccttcgcttttggggacgaaggaggagaaggtctctgtccctctccacccccacctccacctccgcctcccttcttggctggagaggagcaggaggaggagatgttcccccctggcctgatccaccaccgcacggacggccccgggcccggcgaggtgccgcgctccggcggcgcccccagcctcgtgctcacggcggaccccaagccccgcctccgctggacggccgacctccacgagcgcttcgtcgacgccgtcgcccagctcggcgggcccgagaaagcaacaccaaaaactatcttaaggacaatgggtgtaaagggactaacgcttttccacttgaagagtcatcttcagaaatacagaatgggaaaacaaactgggaaggagacgccggagcaatctaaagatgggtcctaccttcttgatgctcaaggtggaatgagcctgtctcccagagtttctactcaagatgcgaaagaaagccaagaagttaaagaagccctgagagcacagatggagatgcaacgaagcctgcatgaacaagtggaggttcagaagcatgtggacatcaggatggacgcgtacacgacgtacatcaacaccctgctggagaaggcctgcaagatcgtctcagagcagttcgcctcgagcggcttcagcgtctccgaccagagcctcccggagctgtcctccggcggtatcatgtgcggcaccgccaccgacgcgctgagctcctccgtgttccaccagctctccgtcagctcgatcaacatgcacagcccagggggcaagccttctccctcgggcatggaaggccagctgcttctccagaggtcacccgagttcaaacgcaagtcatcctgctgagtccaaaaatctgggtggaaaagttagcttaatcgtctgctgtagacatgtcgaatctcggccaatctgtaaactgacgccaatctgtaaactgactcttgtttctcttgccactgcatgccaagaagcaaggttttttatcgattaatcgtcgacctatgtttatac

SEQ ID NO: 13555 - protein, 295 aa, Triticum aestivum
  misc_feature (1)..(295): Ceres Seq. ID no. 15226228
EELFVGSFAFGDEGGEGLCPSPPPPPPPPPFLAGEEQEEEMFPPGLIHHRTDGPGPGEVPRSGGAPSLVLTADPKPRLRWTADLHERFVDAVAQLGGPEKATPKTILRTMGVKGLTLFHLKSHLQKYRMGKQTGKETPEQSKDGSYLLDAQGGMSLSPRVSTQDAKESQEVKEALRAQMEMQRSLHEQVEVQKHVDIRMDAYTTYINTLLEKACKIVSEQFASSGFSVSDQSLPELSSGGIMCGTATDALSSSVFHQLSVSSINMHSPGGKPSPSGMEGQLLLQRSPEFKRKSSC

SEQ ID NO: 13556 - protein, 255 aa, Triticum aestivum
  misc_feature (1)..(255): Ceres Seq. ID no. 15226229
MFPPGLIHHRTDGPGPGEVPRSGGAPSLVLTADPKPRLRWTADLHERFVDAVAQLGGPEKATPKTILRTMGVKGLTLFHLKSHLQKYRMGKQTGKETPEQSKDGSYLLDAQGGMSLSPRVSTQDAKESQEVKEALRAQMEMQRSLHEQVEVQKHVDIRMDAYTTYINTLLEKACKIVSEQFASSGFSVSDQSLPELSSGGIMCGTATDALSSSVFHQLSVSSINMHSPGGKPSPSGMEGQLLLQRSPEFKRKSSC

SEQ ID NO: 13557 - protein, 186 aa, Triticum aestivum
  misc_feature (1)..(186): Ceres Seq. ID no. 15226230
MGVKGLTLFHLKSHLQKYRMGKQTGKETPEQSKDGSYLLDAQGGMSLSPRVSTQDAKESQEVKEALRAQMEMQRSLHEQVEVQKHVDIRMDAYTTYINTLLEKACKIVSEQFASSGFSVSDQSLPELSSGGIMCGTATDALSSSVFHQLSVSSINMHSPGGKPSPSGMEGQLLLQRSPEFKRKSSC

SEQ ID NO: 13558 - DNA, 1345 bp, Triticum aestivum
  misc_feature (1)..(1345): Ceres Seq. ID no. 15226238
atacaactactgtcaaaggtgtgcgtgcgtgcgtgagagagaacctgctttgcttttgcgtgagctgcagtgcagggcatacgggtcgggactgacccggggtggtggtggtgtatataaccagtcgtcacgcacaagaatcatcctagcccctctctctctctctgagcttctctctgcttcatcaagcgagcgaacgacccaccgctagtctgctcggaagaacggaaaggaaaagaaaagaagatggccgtctctgtccgcctcggctcctccccatccatccttctgctcccgctcctcttcctcttcaccatcccgtcgctcgcctccgcctgcgaccgctgcgcgcgccactccaaggccgcctactacacctcctcgctcaccctcgccgccggctcctgcgggtacggcacggcggccgcctccttcaacggcggcctgctcgccgccgccggcccggccctgtaccggggcggcgtcggctgcggcgcctgcttccaggtgaggtgcaaggacaagaagctctgcagcggcgccggcgccagggtcgtggtgacggaccgcgccaggatgaggacgaaccgcacggacctggtgctgagcagcccggcgttcgccgccatggcccgccccggcatggccgcgcggctcaccaagctccgcgccgtcgatgtcgagtacaagagggtgccgtgcgagtacaggggcaagaacctctcggtgcgggtggaggagcggagccgcgcgcccagcgagctcgccgtccggttcctctaccagggcggccagaccgacatcgtcgccgtcgacgtcgcgcaggtcgggtcgtcgagctggaagttcatgacgcgggagcacgggccggcgtggagcacgcggcaggcgccggcggggccgctgcagttcagggtggtggtgaccggcgggtacgacgggaagtgggtgtgggccgaccgggaggtgctgcccagccggtggcgcgccggcgaggtctacgacacgggggtccagatcaccgacgtcgcgcaggagggctgctttccatgcgacacgcaggagtggaggtgaaagcaggcaggctagtaaacaaacaaagagccaaagaagaagctgatggctcctcgttttggccgggctatgcatcacagcacaaggccacaccacaccagagatgattagtttagtctaacagttaacaccagatgatgactcatagggtcctcctgatgatccatcggccacttttgctgccgccgctcgttttcttttctctttgttttgtgagccttctgtatgtacatgagctgctgacgtgaatcaagataagtaaattaagtag

SEQ ID NO: 13559 - protein, 275 aa, Triticum aestivum
  misc_feature (1)..(275): Ceres Seq. ID no. 15226239
MAVSVRLGSSPSILLLPLLFLFTIPSLASACDRCARHSKAAYYTSSLTLAAGSCGYGTAAASFNGGLLAAAGPALYRGGVGCGACFQVRCKDKKLCSGAGARVVVTDRARMRTNRTDLVLSSPAFAAMARPGMAARLTKLRAVDVEYKRVPCEYRGKNLSVRVEERSRAPSELAVRFLYQGGQTDIVAVDVAQVGSSSWKFMTREHGPAWSTRQAPAGPLQFRVVVTGGYDGKWVWADREVLPSRWRAGEVYDTGVQITDVAQEGCFPCDTQEWR

SEQ ID NO: 13560 - protein, 165 aa, Triticum aestivum
  misc_feature (1)..(165): Ceres Seq. ID no. 15226240
MRTNRTDLVLSSPAFAAMARPGMAARLTKLRAVDVEYKRVPCEYRGKNLSVRVEERSRAPSELAVRFLYQGGQTDIVAVDVAQVGSSSWKFMTREHGPAWSTRQAPAGPLQFRVVVTGGYDGKWVWADREVLPSRWRAGEVYDTGVQITDVAQEGCFPCDTQEWR

SEQ ID NO: 13561 - protein, 148 aa, Triticum aestivum
  misc_feature (1)..(148): Ceres Seq. ID no. 15226241
MARPGMAARLTKLRAVDVEYKRVPCEYRGKNLSVRVEERSRAPSELAVRFLYQGGQTDIVAVDVAQVGSSSWKFMTREHGPAWSTRQAPAGPLQFRVVVTGGYDGKWVWADREVLPSRWRAGEVYDTGVQITDVAQEGCFPCDTQEWR

SEQ ID NO: 13562 - DNA, 1578 bp, Triticum aestivum
  misc_feature (1)..(1578): Ceres Seq. ID no. 15226250
aaaatgcgcggagccgaaactagctcatggatgaagcagctcgcgagctcttcccggcaaggtcgccacggccacgccctccacctctttttcacccgcctgagcctccaagccagcatcggcggcacggttgatccctaccctgcttccgtgcccaccgctctacgcgcctgcgcacacctcgccgattccggccgcctcatccacgcgctcgtgctcacacgccccgccctcgcctcggacaaagtcatcgcgaccgcgctgctcgacatgtacgccaagtgcggcctcattccaagcgcccgcaaggtgttcgacgaaacgccggcgagggacctcgtcgtctggaatgcgctgctcgcgggctacgcgcggcacgggcttccagagcacgcgctggcgctggctgtcaagatgcggggcctcggcctgagccccgatctggtcacctggaatgctgccgtgtcgggctttgccatggccggcgatggcagaatggccagcgatttggtcggcgccatgcaagaggaggggttccagccagatgtggtgacatggacatcgctcgtctctggctcggtgctgaacttccagtatgggagagcgcgaaccctgttccgggaaatggtggccggtggcgcccgtgtcctgccaagctcggccacgattagtagcatcttgccagcatttgccggagtcggtgacacaaagcatgggaatgaggtccacggctacgctgtcgtgaccggtgtcgagcaggagctcacggtgagcagcgcgctcgtcgacatgttcgccaagtccgggcttgtgcacgaggcgtgccgcttgttcgacaaaatgtcagaaaggagcaccgtgacatggaattccatgatcttcgggctggcgaattccggccactgccgggaagcagtcagcctcttcgaccggatgctggacgaagaagcgacgccggaccacctgacgttcacggccgttctgacagcttgtggctacggtggcatggtcgagaccgggaaggccctgtaccagcgcatgcaagaggagcacggcatcgtggcgaggctggagcactacgcctgcatggtgcatttgcttggccgagccgggaggctcgtcgaggctcacgatttcatcagggcgatgcccatcgagcccgactgcttcgtctggggggcgctgctcggtgcctgccggagccacgggaacgtcgagctcgcggagctggcggcgtcccgcgtgcgcaccgtcgagccagaaaacgccgcgagctacgtgctgctctcgggagcgctggcagatgccggcaagcagaacgacgttttcaagatcaaaaggttggtgaagagacggcggctgaagaggcttgacggttgcagctggctagagacgtcctagctatggtgacgataagcaggctaacatcatgtgcactgtcgagcagtagcacaattgtgtgatcatggcgtgggaagatgtgcactgtcgagctctggttagttcatttgccccgtcacctcctttccacaaaacctacataatgacttctgcaagatttattggtaattatggttc

SEQ ID NO: 13563 - protein, 466 aa, Triticum aestivum
  misc_feature (1)..(466): Ceres Seq. ID no. 15226251
KMRGAETSSWMKQLASSSRQGRHGHALHLFFTRLSLQASIGGTVDPYPASVPTALRACAHLADSGRLIHALVLTRPALASDKVIATALLDMYAKCGLIPSARKVFDETPARDLVVWNALLAGYARHGLPEHALALAVKMRGLGLSPDLVTWNAAVSGFAMAGDGRMASDLVGAMQEEGFQPDVVTWTSLVSGSVLNFQYGRARTLFREMVAGGARVLPSSATISSILPAFAGVGDTKHGNEVHGYAVVTGVEQELTVSSALVDMFAKSGLVHEACRLFDKMSERSTVTWNSMIFGLANSGHCREAVSLFDRMLDEEATPDHLTFTAVLTACGYGGMVETGKALYQRMQEEHGIVARLEHYACMVHLLGRAGRLVEAHDFIRAMPIEPDCFVWGALLGACRSHGNVELAELAASRVRTVEPENAASYVLLSGALADAGKQNDVFKIKRLVKRRRLKRLDGCSWLETS

SEQ ID NO: 13564 - protein, 465 aa, Triticum aestivum
  misc_feature (1)..(465): Ceres Seq. ID no. 15226252
MRGAETSSWMKQLASSSRQGRHGHALHLFFTRLSLQASIGGTVDPYPASVPTALRACAHLADSGRLIHALVLTRPALASDKVIATALLDMYAKCGLIPSARKVFDETPARDLVVWNALLAGYARHGLPEHALALAVKMRGLGLSPDLVTWNAAVSGFAMAGDGRMASDLVGAMQEEGFQPDVVTWTSLVSGSVLNFQYGRARTLFREMVAGGARVLPSSATISSILPAFAGVGDTKHGNEVHGYAVVTGVEQELTVSSALVDMFAKSGLVHEACRLFDKMSERSTVTWNSMIFGLANSGHCREAVSLFDRMLDEEATPDHLTFTAVLTACGYGGMVETGKALYQRMQEEHGIVARLEHYACMVHLLGRAGRLVEAHDFIRAMPIEPDCFVWGALLGACRSHGNVELAELAASRVRTVEPENAASYVLLSGALADAGKQNDVFKIKRLVKRRRLKRLDGCSWLETS

SEQ ID NO: 13565 - protein, 456 aa, Triticum aestivum
  misc_feature (1)..(456): Ceres Seq. ID no. 15226253
MKQLASSSRQGRHGHALHLFFTRLSLQASIGGTVDPYPASVPTALRACAHLADSGRLIHALVLTRPALASDKVIATALLDMYAKCGLIPSARKVFDETPARDLVVWNALLAGYARHGLPEHALALAVKMRGLGLSPDLVTWNAAVSGFAMAGDGRMASDLVGAMQEEGFQPDVVTWTSLVSGSVLNFQYGRARTLFREMVAGGARVLPSSATISSILPAFAGVGDTKHGNEVHGYAVVTGVEQELTVSSALVDMFAKSGLVHEACRLFDKMSERSTVTWNSMIFGLANSGHCREAVSLFDRMLDEEATPDHLTFTAVLTACGYGGMVETGKALYQRMQEEHGIVARLEHYACMVHLLGRAGRLVEAHDFIRAMPIEPDCFVWGALLGACRSHGNVELAELAASRVRTVEPENAASYVLLSGALADAGKQNDVFKIKRLVKRRRLKRLDGCSWLETS

SEQ ID NO: 13566 - DNA, 1508 bp, Triticum aestivum
  misc_feature (1)..(1508): Ceres Seq. ID no. 15226269
cccgagtccagtcctcccggcggcgccgcctctgcgcgctttgggcaggaggccgacgccaccattgccggagacctcgcaccccttcggacccaagtaggagtccagtgtctttactctggagagcgatggattctccagaaattccgccctctgaccgcagagaagagcggccgccagcgtcgctgccgctgccggcggcctttctcgagttcctcggcgagaatggcctggaccccgcgctctactccaaggcggacaccatcccgcgctacatcaggttaaaaccaggcatggagtccagtgtggtgacagagatcgaaagcgagctcaagtgtgatctcatgagggtgtcgtggctgccggacttctatgcgatcccgcctgaaattcagattgctggatccaaggcttatcagcaagggaagatctatgggattgatgcagcttctggagctgccatcttagcactcgatgttcaatcaggagaccatgttcttgacctctgtgctgcaccaggtgcaaagctttgcatgcttgcagatatgcttggtagctcaggttctttgactggtgttgatgttgcaaagcaccgtcttgcagcctgtcgtacgatgttgcagaagtattctcttggagatcgtagtcgactctttgttgctgatgggacttcgttttccatattgcctgtgaactccaatctggggagcatggaagcttttgttggaattgaggataatggaagcatattctcagaatggacttcaaagagatcatggaaagacagacagaagtctaaaaaggcaaaagcagccggttcacctcatctaccatcaacttccgaacctgaactgatatactatggcaaagattcaggattagttggattgcaaaaacgttatgttcttcacccatcaactgatgctgctgcctgtacatctgggtatgataaggtcctagtggatgcagaatgtactcatgatggatcgataaaacacattcagaagtttgagttctggggatggaaaacattagaccgccgtgtactcaacgtagaaagaactggcaacctacttcatcttcagttagggcttctcacaaatggttttaaattattgaaaacaggcggatcacttgtctatagtacttgcagcttgactgttgcacaaaacgagaatgtggttcagcaattcctctcaaaacatccttcagcagagctgctaaagatcaatccagccgatagctggccctgcagaagcggcggcatccagaaaaccttgcggttcgatcccgcgacgtcacaaactagtggacttttcgttgccaagttcgtcaagttgtgatgttctttatgagatgctcgcaacttcgtataagttaatttcatatgaaaccaggatgtcgtgagtaaattttgctaggttttactctagttctttaaacaacaggttgtcgaagtctgcttgttgtttatttattttactctaatttgaaataagcttcttggg

SEQ ID NO: 13567 - protein, 446 aa, Triticum aestivum
  misc_feature (1)..(446): Ceres Seq. ID no. 15226270
RVQSSRRRRLCALWAGGRRHHCRRPRTPSDPSRSPVSLLWRAMDSPEIPPSDRREERPPASLPLPAAFLEFLGENGLDPALYSKADTIPRYIRLKPGMESSVVTEIESELKCDLMRVSWLPDFYAIPPEIQIAGSKAYQQGKIYGIDAASGAAILALDVQSGDHVLDLCAAPGAKLCMLADMLGSSGSLTGVDVAKHRLAACRTMLQKYSLGDRSRLFVADGTSFSILPVNSNLGSMEAFVGIEDNGSIFSEWTSKRSWKDRQKSKKAKAAGSPHLPSTSEPELIYYGKDSGLVGLQKRYVLHPSTDAAACTSGYDKVLVDAECTHDGSIKHIQKFEFWGWKTLDRRVLNVERTGNLLHLQLGLLTNGFKLLKTGGSLVYSTCSLTVAQNENVVQQFLSKHPSAELLKINPADSWPCRSGGIQKTLRFDPATSQTSGLFVAKFVKL

SEQ ID NO: 13568 - protein, 404 aa, Triticum aestivum
  misc_feature (1)..(404): Ceres Seq. ID no. 15226271
MDSPEIPPSDRREERPPASLPLPAAFLEFLGENGLDPALYSKADTIPRYIRLKPGMESSVVTEIESELKCDLMRVSWLPDFYAIPPEIQIAGSKAYQQGKIYGIDAASGAAILALDVQSGDHVLDLCAAPGAKLCMLADMLGSSGSLTGVDVAKHRLAACRTMLQKYSLGDRSRLFVADGTSFSILPVNSNLGSMEAFVGIEDNGSIFSEWTSKRSWKDRQKSKKAKAAGSPHLPSTSEPELIYYGKDSGLVGLQKRYVLHPSTDAAACTSGYDKVLVDAECTHDGSIKHIQKFEFWGWKTLDRRVLNVERTGNLLHLQLGLLTNGFKLLKTGGSLVYSTCSLTVAQNENVVQQFLSKHPSAELLKINPADSWPCRSGGIQKTLRFDPATSQTSGLFVAKFVKL

SEQ ID NO: 13569 - protein, 349 aa, Triticum aestivum
  misc_feature (1)..(349): Ceres Seq. ID no. 15226272
MESSVVTEIESELKCDLMRVSWLPDFYAIPPEIQIAGSKAYQQGKIYGIDAASGAAILALDVQSGDHVLDLCAAPGAKLCMLADMLGSSGSLTGVDVAKHRLAACRTMLQKYSLGDRSRLFVADGTSFSILPVNSNLGSMEAFVGIEDNGSIFSEWTSKRSWKDRQKSKKAKAAGSPHLPSTSEPELIYYGKDSGLVGLQKRYVLHPSTDAAACTSGYDKVLVDAECTHDGSIKHIQKFEFWGWKTLDRRVLNVERTGNLLHLQLGLLTNGFKLLKTGGSLVYSTCSLTVAQNENVVQQFLSKHPSAELLKINPADSWPCRSGGIQKTLRFDPATSQTSGLFVAKFVKL

SEQ ID NO: 13570 - DNA, 1017 bp, Triticum aestivum
  misc_feature (1)..(1017): Ceres Seq. ID no. 15226273
cacagactcagagcgaagggacgacgagacgcacctgccaggtctacacgcgccgccgcctccaggaccctctgcccctcgccgccgcctccaggaccccctgcccctcgccgccgcaggcaccgcgccgcctccgtcctccactgcagcaggcagcagattgaagttatggccctggttaataagcttggtaatctgctcaagaaggccaccagctcgaacccgactctctatcaggcgataagatgcatgtcatcctcgaagctcttcgtaggagggctttcctttaacacagacgagggcagtctgagagatgctttttcccattatggggaaattattgatgctaagattatcgtagaccgcgacactggcaggtctagaggttttggctttataacttatgcagcagaagaacaggcttcatctgccatcatggccttggatggaaaggatctacatggacgcaacctacgggttagtgctgccactgagaggaccgctggcttccgtaatggtgctggttatggaggtggtggtggcggctttggaggaggaggatatggcggtggtggctatggaggaggtggttatggtagcaacagtggtggtggcggcgacaactttgctgccggcaactttggtggtgccagtggcttcggtggaaacccagctggaaaccatggtgctcctgcaggttccaccggtggtgatgagttctccctcggcacccctggttccacctttgaaagcaccaagaatgacgatgtcatggacgacctcttcaaggatgatgaacctgacaagtacgccagcaagaatgtctagggctccagtctgcatctccttctgcaagtccctagttatgtaccttggataagtgtgaggtgaatgatcctccagaccagagactactttcttgatgactgtctagagaccaaaataacttatgcgttgaggtgacaatgagaatgcacgttcagtttacctgatttagctttttttttctctcttcac

SEQ ID NO: 13571 - protein, 275 aa, Triticum aestivum
  misc_feature (1)..(275): Ceres Seq. ID no. 15226274
HRLRAKGRRDAPARSTRAAASRTLCPSPPPPGPPAPRRRRHRAASVLHCSRQQIEVMALVNKLGNLLKKATSSNPTLYQAIRCMSSSKLFVGGLSFNTDEGSLRDAFSHYGEIIDAKIIVDRDTGRSRGFGFITYAAEEQASSAIMALDGKDLHGRNLRVSAATERTAGFRNGAGYGGGGGGFGGGGYGGGGYGGGGYGSNSGGGGDNFAAGNFGGASGFGGNPAGNHGAPAGSTGGDEFSLGTPGSTFESTKNDDVMDDLFKDDEPDKYASKNV

SEQ ID NO: 13572 - protein, 219 aa, Triticum aestivum
  misc_feature (1)..(219): Ceres Seq. ID no. 15226275
MALVNKLGNLLKKATSSNPTLYQAIRCMSSSKLFVGGLSFNTDEGSLRDAFSHYGEIIDAKIIVDRDTGRSRGFGFITYAAEEQASSAIMALDGKDLHGRNLRVSAATERTAGFRNGAGYGGGGGGFGGGGYGGGGYGGGGYGSNSGGGGDNFAAGNFGGASGFGGNPAGNHGAPAGSTGGDEFSLGTPGSTFESTKNDDVMDDLFKDDEPDKYASKNV

SEQ ID NO: 13573 - protein, 192 aa, Triticum aestivum
  misc_feature (1)..(192): Ceres Seq. ID no. 15226276
MSSSKLFVGGLSFNTDEGSLRDAFSHYGEIIDAKIIVDRDTGRSRGFGFITYAAEEQASSAIMALDGKDLHGRNLRVSAATERTAGFRNGAGYGGGGGGFGGGGYGGGGYGGGGYGSNSGGGGDNFAAGNFGGASGFGGNPAGNHGAPAGSTGGDEFSLGTPGSTFESTKNDDVMDDLFKDDEPDKYASKNV

SEQ ID NO: 13574 - DNA, 979 bp, Triticum aestivum
  misc_feature (1)..(979): Ceres Seq. ID no. 15226347
aataataataaaattcaacggaggccgccttcccttcaccggatcaccttccttcctttggatctatcttcccattccgacggttcttcgtttctcagagtatcaatctaccttggaacaatgactgaagtgtttaacggctacgagcgccaatactgcgacctctccgccaatctctccaagaaatgctcctctgctcttgcccttgacggagaacaaaagaagcagaagctctctgagataagatctggcctcgataatgctgaagcattgattaggaaaatggatgttgaggcgaggagccttccaccgagcattaggaccagcctccttgttaaactaagagagttcaagtctgatctcaacaacttcaaaagcgaagtcaagaggatcacatctgctaacttgaacgctgctgctcgcgacgagctgcttgaagctggtctggctgacacaaagacggcttcggctgatcaaagagcgagattgatgatgtcaaccgatcgattgggtcgaactactgacagaatcaaggacagtcgaagaatgatgattgagactgaagagcttggcgtttctgtcctccaagacttgcacagtcagagacagtctctccttcgcactggcgacacgcttagtggagtagacgaaaatgtcggaaagagcaagaagatcttgacaggcatgaccaggaggatgaacaggaacaagtggaccattggagccattatcaccgctttggtcgcggctattatcctcatcttgtacttcaaactcaccaagtaatccctctgtatctaaactctttgtcgctgaacaaatggtgtgcatcttttatttaatccttttctggctttctgtgtgataagttatgtctttgccaccttttctattatcacgttctcttgtttgcgtttgcgattacatttgtgtattttcatactaaatgatgcaaattgttttgttttattattattag

SEQ ID NO: 13575 - protein, 261 aa, Triticum aestivum
  misc_feature (1)..(261): Ceres Seq. ID no. 15226348
NNNKIQRRPPSLHRITFLPLDLSSHSDGSSFLRVSIYLGTMTEVFNGYERQYCDLSANLSKKCSSALALDGEQKKQKLSEIRSGLDNAEALIRKMDVEARSLPPSIRTSLLVKLREFKSDLNNFKSEVKRITSANLNAAARDELLEAGLADTKTASADQRARLMMSTDRLGRTTDRIKDSRRMMIETEELGVSVLQDLHSQRQSLLRTGDTLSGVDENVGKSKKILTGMTRRMNRNKWTIGAIITALVAAIILILYFKLTK

SEQ ID NO: 13576 - protein, 221 aa, Triticum aestivum
  misc_feature (1)..(221): Ceres Seq. ID no. 15226349
MTEVFNGYERQYCDLSANLSKKCSSALALDGEQKKQKLSEIRSGLDNAEALIRKMDVEARSLPPSIRTSLLVKLREFKSDLNNFKSEVKRITSANLNAAARDELLEAGLADTKTASADQRARLMMSTDRLGRTTDRIKDSRRMMIETEELGVSVLQDLHSQRQSLLRTGDTLSGVDENVGKSKKILTGMTRRMNRNKWTIGAIITALVAAIILILYFKLTK

SEQ ID NO: 13577 - protein, 167 aa, Triticum aestivum
  misc_feature (1)..(167): Ceres Seq. ID no. 15226350
MDVEARSLPPSIRTSLLVKLREFKSDLNNFKSEVKRITSANLNAAARDELLEAGLADTKTASADQRARLMMSTDRLGRTTDRIKDSRRMMIETEELGVSVLQDLHSQRQSLLRTGDTLSGVDENVGKSKKILTGMTRRMNRNKWTIGAIITALVAAIILILYFKLTK

SEQ ID NO: 13578 - DNA, 971 bp, Triticum aestivum
  misc_feature (1)..(971): Ceres Seq. ID no. 15226351
aaaccttaggggataacttagaaacaagaaaacggcgtcggtttgacccgacggaggaaccatgtcgtcgtctcttcttctctcaggctctacagtatcttcttcattcattgctccttcgaagctttatctcttacggaatcaaaatcaatcactgtcactatctcggaacgtttcgagaaccttcaaaccccttaggtgctcctccgctgattctccatacggaggcaacgtgcccacgttccctcgaaccagggtctgggacccatacaagcgtctagggataagcccctacgcctccgaggaagagatctgggcctcgcgcaacttcctcttggagcagtacgcgggacacgagaggagccaagagtctatagaaggcgcattcgagaagcttctcatgtctagttttgtgaagaggaagaagactaaaatcaacctcaagacgaggttgaagaagaaagttgaggagtctcctccgtggcttaaagctcttcttgatttcgttgagatgcctcccatggatactgttttcagaagactctttcttttcgctttcatgggtggttggagtatcatgaactctgcagaaggcggtcctgcctttcaggtggcggtgtcgttggcggcttgcgtatatttccttaatgagaagacgaagagcttggggagagcttgcttaatcgggtttggtgcattaacagtcgggtggttctgcggttcgctagtcattcccatgattccgacggctttcattaacccgacatggaccctggagcttctaacgtcactggttgcttatgtgtttttgtttctttcttgtactttcctcaagtaggttgttgcacttttatccagactttgtgtttctttcttgtacctgttctcgccggaaaattgaacttgagttctacaacattggttaactcttgttaaagtatggaatcaagttgatcaggatcttaccaacc

SEQ ID NO: 13579 - protein, 258 aa, Triticum aestivum
  misc_feature (1)..(258): Ceres Seq. ID no. 15226352
MSSSLLLSGSTVSSSFIAPSKLYLLRNQNQSLSLSRNVSRTFKPLRCSSADSPYGGNVPTFPRTRVWDPYKRLGISPYASEEEIWASRNFLLEQYAGHERSQESIEGAFEKLLMSSFVKRKKTKINLKTRLKKKVEESPPWLKALLDFVEMPPMDTVFRRLFLFAFMGGWSIMNSAEGGPAFQVAVSLAACVYFLNEKTKSLGRACLIGFGALTVGWFCGSLVIPMIPTAFINPTWTLELLTSLVAYVFLFLSCTFLK

SEQ ID NO: 13580 - protein, 145 aa, Triticum aestivum
  misc_feature (1)..(145): Ceres Seq. ID no. 15226353
MSSFVKRKKTKINLKTRLKKKVEESPPWLKALLDFVEMPPMDTVFRRLFLFAFMGGWSIMNSAEGGPAFQVAVSLAACVYFLNEKTKSLGRACLIGFGALTVGWFCGSLVIPMIPTAFINPTWTLELLTSLVAYVFLFLSCTFLK

SEQ ID NO: 13581 - DNA, 1539 bp, Triticum aestivum
  misc_feature (1)..(1539): Ceres Seq. ID no. 15226382
ttcctccgtccggccgtccccctttcccctttcacaccgcaagaaaaccctcgcccaaatctacagcaaccaacgcccccgtttcatctacgagagctgcgagctcacaattccgcggagcagctcggccatggcgtcctccgtcgccggcgggttgccgtcgaggtccgccatcgtggccgacacgaccagcgggcaccaccttctcaccatccacggctactcccgcaccaaggacatacccaccggagagcgcgtcaagtctcaccctttcatcatcggcggccatcgctggcggatcgactactaccccggcggcgtgcgcccggaggtcgcggactacgtgtccctctccctgatactagaggaagatggcccggcgccggtgaaggcccagtacgacatctgcctcgttaccaaggaggaggaggcggagcaagccgcgtcgatggcgtcggcaccggtcgacgagttcgctccccggaagggctgggagtactccaagttcgtcaggagggtggagctggagagctcaaagtatctcaccaacgattcgttcaccgtccggtgcgatatcgttgtcgtccatggttaccgcgccgcggccggcatggcggccttggtctctgtgcccccatgtgacctgcgtgagaaccttggcaggctcctcgacaccgggatgggcgccgacgtggtgtttgaggtcggcggcgagaccgtcgcggcacaccggtgcgtgctcgcggcctgctctccggtgtttgccgcccaactctttggacccatgaaggagggtaatgccggcgtcgtgcgcgtggaagacatggacgcggaggtgttcaaggcgttgctccgtttcacatacgccggcttgctgccggagacgttcaaggaagacgcagtcgtatgccagcatctgctcgttgctgcggacaggtatggcatggggcggctaaagctgatctgcgagcagaagctgtgcgagtacatcgacatcggcacggcagcaaccatcctgacgctggccgagcagcaccgctgtgaggggctgaagaaggcctgcttcgattttctcgccgctccaccaaatctgagggaagtcgtggccaccgacggcttccagcatctgatcgcgagctgcccttctcttatggtcgagctcatggctatgtcccctacacattagccaagtgatggatatgcatgcctctgagtgttgtagcaatggtgaaacatggtttctaggctcatgtactaatctgggtacctctcttggtgtatccgtggctctacctagttaacaaccgagatgcaaaaattagcctcatttcgcccctgttttatcagttcattgcatctctaactgtgcctattaaccaggacgtgcgttggaatcagaggtgataaaatgctcaggtttttaggcaatggtagcttgtggtttcaggtctttgttatctgatattgcgcttgtggttccatggtttctgaaccttattgagataatactattatgttcttattatcacctactgtgct

SEQ ID NO: 13582 - protein, 394 aa, Triticum aestivum
  misc_feature (1)..(394): Ceres Seq. ID no. 15226383
SSVRPSPFPLSHRKKTLAQIYSNQRPRFIYESCELTIPRSSSAMASSVAGGLPSRSAIVADTTSGHHLLTIHGYSRTKDIPTGERVKSHPFIIGGHRWRIDYYPGGVRPEVADYVSLSLILEEDGPAPVKAQYDICLVTKEEEAEQAASMASAPVDEFAPRKGWEYSKFVRRVELESSKYLTNDSFTVRCDIVVVHGYRAAAGMAALVSVPPCDLRENLGRLLDTGMGADVVFEVGGETVAAHRCVLAACSPVFAAQLFGPMKEGNAGVVRVEDMDAEVFKALLRFTYAGLLPETFKEDAVVCQHLLVAADRYGMGRLKLICEQKLCEYIDIGTAATILTLAEQHRCEGLKKACFDFLAAPPNLREVVATDGFQHLIASCPSLMVELMAMSPTH

SEQ ID NO: 13583 - protein, 351 aa, Triticum aestivum
  misc_feature (1)..(351): Ceres Seq. ID no. 15226384
MASSVAGGLPSRSAIVADTTSGHHLLTIHGYSRTKDIPTGERVKSHPFIIGGHRWRIDYYPGGVRPEVADYVSLSLILEEDGPAPVKAQYDICLVTKEEEAEQAASMASAPVDEFAPRKGWEYSKFVRRVELESSKYLTNDSFTVRCDIVVVHGYRAAAGMAALVSVPPCDLRENLGRLLDTGMGADVVFEVGGETVAAHRCVLAACSPVFAAQLFGPMKEGNAGVVRVEDMDAEVFKALLRFTYAGLLPETFKEDAVVCQHLLVAADRYGMGRLKLICEQKLCEYIDIGTAATILTLAEQHRCEGLKKACFDFLAAPPNLREVVATDGFQHLIASCPSLMVELMAMSPTH

SEQ ID NO: 13584 - protein, 245 aa, Triticum aestivum
  misc_feature (1)..(245): Ceres Seq. ID no. 15226385
MASAPVDEFAPRKGWEYSKFVRRVELESSKYLTNDSFTVRCDIVVVHGYRAAAGMAALVSVPPCDLRENLGRLLDTGMGADVVFEVGGETVAAHRCVLAACSPVFAAQLFGPMKEGNAGVVRVEDMDAEVFKALLRFTYAGLLPETFKEDAVVCQHLLVAADRYGMGRLKLICEQKLCEYIDIGTAATILTLAEQHRCEGLKKACFDFLAAPPNLREVVATDGFQHLIASCPSLMVELMAMSPTH

SEQ ID NO: 13585 - DNA, 1320 bp, Triticum aestivum
  misc_feature (1)..(1320): Ceres Seq. ID no. 15226612
ctttttgcagtgtctggccgtcgcgctctcgccgtctcgctgccggctgccggctgcccctccccctcgccgcgcccgatttctccgccaactcccatacccaagttctagggaaagatacactgctccgatggcggtcagagttccgtccatggagctgaaccgctccccgccgctcctctccggcggcagaggcaaaacatgccttcagaagcctttcattgtccaagcaaagagatcaggtggattggagaaagcaaatactagcaggtcacgaggaccgcaagcttctgaaaaactcaagaaaagagaacccctgactcgtgggactgttagtgcgcctcttccggtaccaggacacatacctcgacctccttacgttggatcaaacaaaatgcccgagatatcgagtgagagacaaatgcaggacaaagacaccatcgtgcacatgaaagctgcatgtgagcttgctgctcgtgttcttcaaaatgcagggaaattagtcaaaccctctgtaacaacagacgaaattgataaagcagtgcacaagatgatcattgatgctggagcctatccatccccgcttggatacggtgggtttccaaaaagtgtatgcacatcagtgaacgaatgcatgtgccatggtattcctgattcacgagaactaaaggatggagacataattaacatcgatgtcactgtctacttgaacggttttcatggggatacctctaaaacgtttttctgtggagaagttgacgaagctgctaaaagacttgtgaaggttactgaagagtgcatgcttaggggcatatcatcctgcaaacacggtgtgagctttaagaaaatcggcagaagaataagcgagcatgctgagaggaatggatttggtgtcgtggagcaatttgttgggcatggagttggcagagtttttcattcacaaccaattatatatcaccagcgcaacaacatgccagggcagatggttgaaggccagacgttcacaatagagccgatcctgaccatgggaagcaacagcaacagcatcgagtgcgacatgtgggaggacggctggacggcggtgacgacggacggcagcctggcggcgcagttcgagcacaccatcctcatcaccaggaccggcgcagagatcctaaccaaatgctagcaaagccagcgctgaaggcgtacggatcctgaccgcgtagatcacgtgatttcttcttatgttgtatgccaaagcatcactggaacagctgcttacgtataaccgatgatttttggcagcggcaaagagctccaggcttcctctggcacact

SEQ ID NO: 13586 - protein, 388 aa, Triticum aestivum
  misc_feature (1)..(388): Ceres Seq. ID no. 15226613
FLQCLAVALSPSRCRLPAAPPPRRARFLRQLPYPSSRERYTAPMAVRVPSMELNRSPPLLSGGRGKTCLQKPFIVQAKRSGGLEKANTSRSRGPQASEKLKKREPLTRGTVSAPLPVPGHIPRPPYVGSNKMPEISSERQMQDKDTIVHMKAACELAARVLQNAGKLVKPSVTTDEIDKAVHKMIIDAGAYPSPLGYGGFPKSVCTSVNECMCHGIPDSRELKDGDIINIDVTVYLNGFHGDTSKTFFCGEVDEAAKRLVKVTEECMLRGISSCKHGVSFKKIGRRISEHAERNGFGVVEQFVGHGVGRVFHSQPIIYHQRNNMPGQMVEGQTFTIEPILTMGSNSNSIECDMWEDGWTAVTTDGSLAAQFEHTILITRTGAEILTKC

SEQ ID NO: 13587 - protein, 345 aa, Triticum aestivum
  misc_feature (1)..(345): Ceres Seq. ID no. 15226614
MAVRVPSMELNRSPPLLSGGRGKTCLQKPFIVQAKRSGGLEKANTSRSRGPQASEKLKKREPLTRGTVSAPLPVPGHIPRPPYVGSNKMPEISSERQMQDKDTIVHMKAACELAARVLQNAGKLVKPSVTTDEIDKAVHKMIIDAGAYPSPLGYGGFPKSVCTSVNECMCHGIPDSRELKDGDIINIDVTVYLNGFHGDTSKTFFCGEVDEAAKRLVKVTEECMLRGISSCKHGVSFKKIGRRISEHAERNGFGVVEQFVGHGVGRVFHSQPIIYHQRNNMPGQMVEGQTFTIEPILTMGSNSNSIECDMWEDGWTAVTTDGSLAAQFEHTILITRTGAEILTKC

SEQ ID NO: 13588 - protein, 338 aa, Triticum aestivum
  misc_feature (1)..(338): Ceres Seq. ID no. 15226615
MELNRSPPLLSGGRGKTCLQKPFIVQAKRSGGLEKANTSRSRGPQASEKLKKREPLTRGTVSAPLPVPGHIPRPPYVGSNKMPEISSERQMQDKDTIVHMKAACELAARVLQNAGKLVKPSVTTDEIDKAVHKMIIDAGAYPSPLGYGGFPKSVCTSVNECMCHGIPDSRELKDGDIINIDVTVYLNGFHGDTSKTFFCGEVDEAAKRLVKVTEECMLRGISSCKHGVSFKKIGRRISEHAERNGFGVVEQFVGHGVGRVFHSQPIIYHQRNNMPGQMVEGQTFTIEPILTMGSNSNSIECDMWEDGWTAVTTDGSLAAQFEHTILITRTGAEILTKC

SEQ ID NO: 13589 - DNA, 1627 bp, Triticum aestivum
  misc_feature (1)..(1627): Ceres Seq. ID no. 15226673
aagaacgtgacatgggcgcacattgacattaggctgctgctgccattccttcctctttcccctccttccacatcccagtcttctccacccacgccaccaaacccccgagatcacgcgagctatatatactgcatattctcccggccctgcaaagcgaggcctctattacttactgatatccccgccgaaatcaagatggggctgcggacctgcggcgccatggaaggcgagcacgttgtcgcctcgcctttcttcgagtggttgaagccgccgccggcgtcgccgtcctcgtcgagatcgtcgtcgactttctcgtcctcctcgtcgtctatggcgtctgggcaccaagaggatcgcagcagcgtggcatgcttgcccctgctccgcatgctcgaggaggggaagggggctggtggtgaccatgatcaccctgcacctccagtcaaggaagagatcatgggcagcggcgcggccgaggtgctggggcctggcgtggatctgaatatcggcttgccggttggtggatcttgcgatgatgacatcatggaggaggagagccaggaggaagatgatgaccacgactgtgacgaagaggaggaggaagagatggatgagttggaacctaaccatggcggttgcaaggtggaggcagaggagaaagagaagcacggcgagccggtggtctcggtggaaggatcaaacagcgtcagcatgccggaattcggcgtgctcggagcagagagcggcgtgcccatgagctgcgggtactggatcccgacgccggcgcagatcctcgtcggcccggtgcagtttgtctgccatgtctgtaacaagagcttcaacagatacaataacatgcagatgcacatgtggggccacgggcgcgagtaccgcaagggcccggagtcgctcaagggcacgcagacgctggcgctcctgaagctgccgtgctactgctgcgccgccgggtgccggaacagcgtggcccacccgcgcgcgcggccgctcaaggacttccgcaccctgcagacgcactacaagcgcaagcacggcgccaggcccttccgctgccgccgctgcgccaagcccttcgccgtcaagggcgactggcgcacgcacgagaagaactgcggcaagcgctggttctgcgcctgcggctccgacttcaagcacaagcgctcgctcaacgaccacgtccgctcattcggcggcgaccacctccccgtcgccctcgacggcgcccccgcccccgcccccgcccccgtcgaggaccgccgcatcatacgcttccaacggtgagatcgtacgtcgaccgagctagctgatcgtactacatagatcatatatatgcatgcatgcatgcagtgcatgctagggtgcatgcaggaggagcaacgaggtaagtgatagcgcaataagggggttctcgaccagttgctaaaagctgtgaagtagctgaattttcttcagccggactgtgggagctgcaggcagtgctattagctaggctgtcaatgcagctttgtaatggagaaaatttatcagcttcacaggctaactaaactggtatttggacctagtactgtatacatagcattttgaacatgagacatagcaatttatgagc

SEQ ID NO: 13590 - protein, 432 aa, Triticum aestivum
  misc_feature (1)..(432): Ceres Seq. ID no. 15226674
KNVTWAHIDIRLLLPFLPLSPPSTSQSSPPTPPNPRDHASYIYCIFSRPCKARPLLLTDIPAEIKMGLRTCGAMEGEHVVASPFFEWLKPPPASPSSSRSSSTFSSSSSSMASGHQEDRSSVACLPLLRMLEEGKGAGGDHDHPAPPVKEEIMGSGAAEVLGPGVDLNIGLPVGGSCDDDIMEEESQEEDDDHDCDEEEEEEMDELEPNHGGCKVEAEEKEKHGEPVVSVEGSNSVSMPEFGVLGAESGVPMSCGYWIPTPAQILVGPVQFVCHVCNKSFNRYNNMQMHMWGHGREYRKGPESLKGTQTLALLKLPCYCCAAGCRNSVAHPRARPLKDFRTLQTHYKRKHGARPFRCRRCAKPFAVKGDWRTHEKNCGKRWFCACGSDFKHKRSLNDHVRSFGGDHLPVALDGAPAPAPAPVEDRRIIRFQR

SEQ ID NO: 13591 - protein, 367 aa, Triticum aestivum
  misc_feature (1)..(367): Ceres Seq. ID no. 15226675
MGLRTCGAMEGEHVVASPFFEWLKPPPASPSSSRSSSTFSSSSSSMASGHQEDRSSVACLPLLRMLEEGKGAGGDHDHPAPPVKEEIMGSGAAEVLGPGVDLNIGLPVGGSCDDDIMEEESQEEDDDHDCDEEEEEEMDELEPNHGGCKVEAEEKEKHGEPVVSVEGSNSVSMPEFGVLGAESGVPMSCGYWIPTPAQILVGPVQFVCHVCNKSFNRYNNMQMHMWGHGREYRKGPESLKGTQTLALLKLPCYCCAAGCRNSVAHPRARPLKDFRTLQTHYKRKHGARPFRCRRCAKPFAVKGDWRTHEKNCGKRWFCACGSDFKHKRSLNDHVRSFGGDHLPVALDGAPAPAPAPVEDRRIIRFQR

SEQ ID NO: 13592 - protein, 359 aa, Triticum aestivum
  misc_feature (1)..(359): Ceres Seq. ID no. 15226676
MEGEHVVASPFFEWLKPPPASPSSSRSSSTFSSSSSSMASGHQEDRSSVACLPLLRMLEEGKGAGGDHDHPAPPVKEEIMGSGAAEVLGPGVDLNIGLPVGGSCDDDIMEEESQEEDDDHDCDEEEEEEMDELEPNHGGCKVEAEEKEKHGEPVVSVEGSNSVSMPEFGVLGAESGVPMSCGYWIPTPAQILVGPVQFVCHVCNKSFNRYNNMQMHMWGHGREYRKGPESLKGTQTLALLKLPCYCCAAGCRNSVAHPRARPLKDFRTLQTHYKRKHGARPFRCRRCAKPFAVKGDWRTHEKNCGKRWFCACGSDFKHKRSLNDHVRSFGGDHLPVALDGAPAPAPAPVEDRRIIRFQR

SEQ ID NO: 13593 - DNA, 912 bp, Triticum aestivum
  misc_feature (1)..(912): Ceres Seq. ID no. 15226744
attcaccgacagtctctgactctcttgtcttaataacccccctgccatcctaggaagaatcgaaagagcgagaaaatgatcagaacgtttttcctcttccttgtcttcttcatcatatggacgcaagtccacgcgcagctaattccaccgtcgaagcccgatggtttcgtatacccaccgggtcgccgtgttgacccggattctatactgatcgaggcgttttatgacccggtgtgcccgtacagtagagactcttggccgccgctaaagcaagcgcttaaacactacggatctcgcgtttccttgctcctccacctacttccgttaccgtaccatgacaatgcgtatgtaacctctcgtgctttacacatagtgaatattcacaacgctaatgctaccttcagtttgctggaagggttctttaagcatcaggcaatgttctatggtgcgcaaacacaactcctgactagacctgaagttgtgggaagaattgtcaagcttggaacagccacgttgggaaactcttatcatcatgttcttaaatctggattcaacgacacaaagtcggaacgtgcaaccagagtttcattcaagtatagcgcttcaagaggtgtgtatggaacaccaaccttctccgtgaatgggttcgcattgccagatgctgatgatccctcagattttggaggatggaaaaaaattattgattctctggttcaaccacacaaagtacaaggtagctagagatgcaagatgatctcgtttcctttatttgacgatcgctagtactttaccttttttcacatctatataatgtaaaaataagagtgctattgctgtgtgatgtgacaatatgcactgtatatataatttgtcaaaacctttttatcgtacaaatgaaacatatattcattg

SEQ ID NO: 13594 - protein, 221 aa, Triticum aestivum
  misc_feature (1)..(221): Ceres Seq. ID no. 15226745
MIRTFFLFLVFFIIWTQVHAQLIPPSKPDGFVYPPGRRVDPDSILIEAFYDPVCPYSRDSWPPLKQALKHYGSRVSLLLHLLPLPYHDNAYVTSRALHIVNIHNANATFSLLEGFFKHQAMFYGAQTQLLTRPEVVGRIVKLGTATLGNSYHHVLKSGFNDTKSERATRVSFKYSASRGVYGTPTFSVNGFALPDADDPSDFGGWKKIIDSLVQPHKVQGS

SEQ ID NO: 13595 - DNA, 1374 bp, Triticum aestivum
  misc_feature (1)..(1374): Ceres Seq. ID no. 15226831
tagaacatcctaatcgaaaaaaaagaaagctctagctagctagctacttcgcaaattttgcgtgcatcgatcgacgatggctgacttctcgtccagcaacggcgtcccgccggggttccggttccaccctaccgacgaggagctgctgctctactacctcaagaagaagatcggcttcgaaaagttcgacctcgaggtcatcagggaggtcgacctcaacaagatcgagccatgggacctccaagagagatgccggatcgggtctgcgccgcagaacgagtggtacttcttcagccacaaggaccgcaagtacccgacggggtcgcggacgaaccgcgcgacgacggccgggttctggaaggcaacggggagggacaagtgcatccgcaccagctaccgcaagatcgggatgcgcaagacgctcgtcttctaccgcggccgcgccccacacggccagaagtccgactggatcatgcacgagtaccgcctcgaggaaatcgacgaagcccagggcggcaccagcgaggatggatgggtggtgtgccgcgtgttcaagaagaagtgtttcttcaagatcgccggaggcggcgaggggagctcgagccagagcgcggacgccggcggcggccacatggccgtgtcctcgccgctgggtggccacgaccacgctgacagggccgccatggcatcccactacatgcacgggatgcacccgcagtaccacccccagcacgcctcttccttctactactcccagatgcaaccaccggaggcggcctactcgcaccacgtgcaggtccaggacctcctcaccaaccaccggccggccgccgacgcagctggcggcgggtatgatttctccagcctgccggtcgagcaccctggcctggacgtcggcagcagcgacggcgtcgcggcggatgggctggccgaaggaagagatcagacaaacggtgcagccgatcagcagtggcagccgatggacgggttcagcaacggcgggggcgccgctgcagtacagcagatgagcgccatgaactccgggcaacgaggtggggagatggatttgtggggatatgggaggtaaattcaacatcaccaagacatgagaaagtgcatccgcatgcatgaatgttgcatgcaagtgggaaggaggatcctgaaaatactggtaatgttgttggagagttatcattggtttttggtgtactgtatatgttgtgttattaatttatcccaatttattgttgtctaatgtaataagaactacggatacatatcggtatgtaagattgtaagtggtgatttgtgcgtgtacatgtgtttgcaaagagaaaaacacaagaatttaagtttgtgattttcttgccatgt

SEQ ID NO: 13596 - protein, 336 aa, Triticum aestivum
  misc_feature (1)..(336): Ceres Seq. ID no. 15226832
MADFSSSNGVPPGFRFHPTDEELLLYYLKKKIGFEKFDLEVIREVDLNKIEPWDLQERCRIGSAPQNEWYFFSHKDRKYPTGSRTNRATTAGFWKATGRDKCIRTSYRKIGMRKTLVFYRGRAPHGQKSDWIMHEYRLEEIDEAQGGTSEDGWVVCRVFKKKCFFKIAGGGEGSSSQSADAGGGHMAVSSPLGGHDHADRAAMASHYMHGMHPQYHPQHASSFYYSQMQPPEAAYSHHVQVQDLLTNHRPAADAAGGGYDFSSLPVEHPGLDVGSSDGVAADGLAEGRDQTNGAADQQWQPMDGFSNGGGAAAVQQMSAMNSGQRGGEMDLWGYGR

SEQ ID NO: 13597 - protein, 225 aa, Triticum aestivum
  misc_feature (1)..(225): Ceres Seq. ID no. 15226833
MRKTLVFYRGRAPHGQKSDWIMHEYRLEEIDEAQGGTSEDGWVVCRVFKKKCFFKIAGGGEGSSSQSADAGGGHMAVSSPLGGHDHADRAAMASHYMHGMHPQYHPQHASSFYYSQMQPPEAAYSHHVQVQDLLTNHRPAADAAGGGYDFSSLPVEHPGLDVGSSDGVAADGLAEGRDQTNGAADQQWQPMDGFSNGGGAAAVQQMSAMNSGQRGGEMDLWGYGR

SEQ ID NO: 13598 - protein, 204 aa, Triticum aestivum
  misc_feature (1)..(204): Ceres Seq. ID no. 15226834
MHEYRLEEIDEAQGGTSEDGWVVCRVFKKKCFFKIAGGGEGSSSQSADAGGGHMAVSSPLGGHDHADRAAMASHYMHGMHPQYHPQHASSFYYSQMQPPEAAYSHHVQVQDLLTNHRPAADAAGGGYDFSSLPVEHPGLDVGSSDGVAADGLAEGRDQTNGAADQQWQPMDGFSNGGGAAAVQQMSAMNSGQRGGEMDLWGYGR

SEQ ID NO: 13599 - DNA, 927 bp, Triticum aestivum
  misc_feature (1)..(927): Ceres Seq. ID no. 15226980
atttccattcgcatccccggctagccaaccctgttctcccgctcgcgcatctcaggctcctgcgttgcaggaaggaactcactcaagtatggacgccctctcctgctttgcgccgcctgcgatgctctcccggtcctttgcggacgcggccatcgcgcgcgcgctccacttctctccctcggccggctgctcccccgtcccggagccgtccatcgtcgccgacctcggcgcctgcagcgcggcagccacgacggcctcgtcctcctcctgcggccccgtggcgatgcttcccccggcggcaccgtccgcgcgttgcaggctgggacccgcgggcggccgcgcggggaagcgccggccgcggccgtccaagcgcgtgcccaccacgtacataaacaccgacgcggcaaccttccgtctcatggtgcagcacgtcaccggcgccgaggccgagccgcaggtcgacgccgacgccggcctcggtgtcctcctgtcgcccttcgactttgatcacttgctaccgtcggaccctgcggcggccgcggcccaagtcgccgcgtacgcccttccggcggcggcggcagagcagccgtgcttcccgacgctggactcgtggaacgtcatgtacgacaagaactaggtgactttgggtcgaaactgaagctctaggctctgtataaacatcatgcagcaagatgaaggcgccgttgcgtctggcttgtgatgtattgctccctttggtcgttgcagagcagtaggagaggattagagatgtagtagtagtgctgtatgcaagtgcgagtaccaccagactaccagtatagcacgcactagcagtgtaggaatgcagaggtgctccttggtctcctcgccggttgcactcgctgcttcaacttaggtagttcaatctgcctgttcttggttcttgcc

SEQ ID NO: 13600 - protein, 211 aa, Triticum aestivum
  misc_feature (1)..(211): Ceres Seq. ID no. 15226981
FPFASPASQPCSPARASQAPALQEGTHSSMDALSCFAPPAMLSRSFADAAIARALHFSPSAGCSPVPEPSIVADLGACSAAATTASSSSCGPVAMLPPAAPSARCRLGPAGGRAGKRRPRPSKRVPTTYINTDAATFRLMVQHVTGAEAEPQVDADAGLGVLLSPFDFDHLLPSDPAAAAAQVAAYALPAAAAEQPCFPTLDSWNVMYDKN

SEQ ID NO: 13601 - protein, 182 aa, Triticum aestivum
  misc_feature (1)..(182): Ceres Seq. ID no. 15226982
MDALSCFAPPAMLSRSFADAAIARALHFSPSAGCSPVPEPSIVADLGACSAAATTASSSSCGPVAMLPPAAPSARCRLGPAGGRAGKRRPRPSKRVPTTYINTDAATFRLMVQHVTGAEAEPQVDADAGLGVLLSPFDFDHLLPSDPAAAAAQVAAYALPAAAAEQPCFPTLDSWNVMYDKN

SEQ ID NO: 13602 - protein, 171 aa, Triticum aestivum
  misc_feature (1)..(171): Ceres Seq. ID no. 15226983
MLSRSFADAAIARALHFSPSAGCSPVPEPSIVADLGACSAAATTASSSSCGPVAMLPPAAPSARCRLGPAGGRAGKRRPRPSKRVPTTYINTDAATFRLMVQHVTGAEAEPQVDADAGLGVLLSPFDFDHLLPSDPAAAAAQVAAYALPAAAAEQPCFPTLDSWNVMYDKN

SEQ ID NO: 13603 - DNA, 902 bp, Triticum aestivum
  misc_feature (1)..(902): Ceres Seq. ID no. 15227083
aaaaaaaaacacatgcgccgtaatggcccttaggtgcgcggccggcggcggcggcggcggcggcgcctacctgacgccgcggaggagcagatgctgcggcgtcggctctgcgcgaccctcagccacgaccagggggacacgagggctcagcctcctcctgaggatcccgtcctcacaatactccgaagctccatgggcgttgcgctgctcgcctgattcccctcctctggagggtgaccagcattcagatcgaactggggcgctgggggcgctgaaggccatggtgtgcgacatgttcaggcccctggcgcgcaacatctcggatatccgatcccttcgcactgtctttgacctcgaggattatcaagtcggcatgctgtttggtgcttttcttggctgcgtcgggtgctaccagctgtggaaggctgctccttccatctttgttgatgctgcccttgcctatgcattctataaactgagcgttatgtcctcggaggtgcgccggcagggcaaatgcaatgatttgctgactcgcttgaaatttggtattgtggttattatggctactaaggacttcaggaagaactatgaactcttggatattgtcaagatgcctgttttctttctttatctttcgacattcatctttgatgtggcacgcatgaagaaatatgcaaagcattatctgattctcacagttaatttattgagaatgaagggcggagctcaagaattgttcagaataatgttttatccgagctatacatctccatatgatgattgcttccgtaggaaataaaatgtagacccctgagattgtgtggatctgtttatgtgagatttttatataagaatttttagtataatgtgtaataacatttatgtaatgctagtttacttgc

SEQ ID NO: 13604 - protein, 265 aa, Triticum aestivum
  misc_feature (1)..(265): Ceres Seq. ID no. 15227084
KKNTCAVMALRCAAGGGGGGGAYLTPRRSRCCGVGSARPSATTRGTRGLSLLLRIPSSQYSEAPWALRCSPDSPPLEGDQHSDRTGALGALKAMVCDMFRPLARNISDIRSLRTVFDLEDYQVGMLFGAFLGCVGCYQLWKAAPSIFVDAALAYAFYKLSVMSSEVRRQGKCNDLLTRLKFGIVVIMATKDFRKNYELLDIVKMPVFFLYLSTFIFDVARMKKYAKHYLILTVNLLRMKGGAQELFRIMFYPSYTSPYDDCFRRK

SEQ ID NO: 13605 - protein, 258 aa, Triticum aestivum
  misc_feature (1)..(258): Ceres Seq. ID no. 15227085
MALRCAAGGGGGGGAYLTPRRSRCCGVGSARPSATTRGTRGLSLLLRIPSSQYSEAPWALRCSPDSPPLEGDQHSDRTGALGALKAMVCDMFRPLARNISDIRSLRTVFDLEDYQVGMLFGAFLGCVGCYQLWKAAPSIFVDAALAYAFYKLSVMSSEVRRQGKCNDLLTRLKFGIVVIMATKDFRKNYELLDIVKMPVFFLYLSTFIFDVARMKKYAKHYLILTVNLLRMKGGAQELFRIMFYPSYTSPYDDCFRRK

SEQ ID NO: 13606 - protein, 172 aa, Triticum aestivum
  misc_feature (1)..(172): Ceres Seq. ID no. 15227086
MVCDMFRPLARNISDIRSLRTVFDLEDYQVGMLFGAFLGCVGCYQLWKAAPSIFVDAALAYAFYKLSVMSSEVRRQGKCNDLLTRLKFGIVVIMATKDFRKNYELLDIVKMPVFFLYLSTFIFDVARMKKYAKHYLILTVNLLRMKGGAQELFRIMFYPSYTSPYDDCFRRK

SEQ ID NO: 13607 - DNA, 1123 bp, Triticum aestivum
  misc_feature (1)..(1123): Ceres Seq. ID no. 15227147
acgaaatctatcaacccctccaccagttgcaagaaaatcattttcgaagtcttcctcccctgatcctgtgaagccaccccagagagctgcctcgatcgccgcaatgtctgcttctttcgagcggcctagacaaactctgataccaaagtcaattaaagcgagtcctgaggtaaagaaaccacaatctgaagcaagcaaacctaagccagaggaagacgccaaagaaagtacccctgctgcgaaggatgggcaaactgtgactccgacaatacaggaagatgtaaaggaggatcaacccgaagacgaggaagggcttcctacatatccgtatgatcgcttgaggacatcttcaagcaatcctgtcacagacattgatagtaccaggcgtgagacgtatctatcttcggcagagttcagggagaagtttggcatgacaaaggaggcttttgcaaagctaccaaagtggaagcagaataggctcaagatcgctcttcagctcttttaaaatcttatgctgtcaaatatgcagtagttatgtctgcttgttggtgaaagcaaggacggcgagattggttttcaaaggcaaatctcagacatgaagatctctctcgcacacgtcgcaatgttaagaagagacatcggtaagtgtaagcctatctgggtcaaggggaccctcagtaggcgtctgaggggctggagcagtgagttttgagctgcccatgcccccaaattgtgtgttgtccactgacgaattctccatgtcgtgtgccgggtcgctgcattggcggtcctggtcacacaccctaattttttcctttccaaggtcaccggtttggttgtgagcttgcaatgctttttcctcgccctctttgaaacctcaccatttgtttcattctttcatgctgtgtatggtttcctgacaaataattatgttacatatatggtgtaagaagttaggtgatgggatgggtcgggatgaacgccccttatgttggaaaatccaggcgatgtacgggagacgggcgtcttgccctcggaatttgatcttttaagtggtaattagttattcatgcgtgcaaattttgtaatcagatttacagtaagcctctgttctcgtaagtac

SEQ ID NO: 13608 - protein, 167 aa, Triticum aestivum
  misc_feature (1)..(167): Ceres Seq. ID no. 15227148
RNLSTPPPVARKSFSKSSSPDPVKPPQRAASIAAMSASFERPRQTLIPKSIKASPEVKKPQSEASKPKPEEDAKESTPAAKDGQTVTPTIQEDVKEDQPEDEEGLPTYPYDRLRTSSSNPVTDIDSTRRETYLSSAEFREKFGMTKEAFAKLPKWKQNRLKIALQLF

SEQ ID NO: 13609 - protein, 133 aa, Triticum aestivum
  misc_feature (1)..(133): Ceres Seq. ID no. 15227149
MSASFERPRQTLIPKSIKASPEVKKPQSEASKPKPEEDAKESTPAAKDGQTVTPTIQEDVKEDQPEDEEGLPTYPYDRLRTSSSNPVTDIDSTRRETYLSSAEFREKFGMTKEAFAKLPKWKQNRLKIALQLF

SEQ ID NO: 13610 - DNA, 826 bp, Triticum aestivum
  misc_feature (1)..(826): Ceres Seq. ID no. 15227203
rcgagmccattmcctagaacatcmtaatagaaaaaaaaacaagccccgctccctttctgtccccccgcaaaaccctagctccgtacccgcgccgcggcctccaccatgaagggcaaggccgacacctccaagaaaggcgagggcaggctcaaggccgccggcggcgccagcaagaggaagaaggacgccgctgccgctggcaagcccaagcgcccgccctccgccttcttcgtcttcatgtctgagttcaggcagcagtacaacgcggagaaccccaacaacaagagcgtcgccaacgtgagcaaggcggcgggtgagaagtggagagctatgtctgataaggacaaagcaccttatgtggaaaaggctgaacagaagaagaaggactatgagaagaccaaagccacctttgataacaaggagagtgcgacttccaagaaggccaagactcagaacgatgaggaggtcaaatctgaggtcgaagatgagggtagcgatgaggaaaatgaggacgatgatgagtaaatagtgtatcagatcatgaggtagcaaattgggtgttgggtccccgcttagtgtactagtttgctatcctgctatcctcggtgttagatgatgagatttggaagtagatgtgcgttgtgtgttaagggggcccttttagacttgtggactcatggtttgagaagttgcttagtagtgtattagcagagaggaagctgagaatgctaccagctgttccaatgcttttctcttgctaaccacctgkgkaagaacttgttttcattcgctaatctgatgactgcccagccattggttcttggtt

SEQ ID NO: 13611 - protein, 139 aa, Triticum aestivum
  misc_feature (1)..(139): Ceres Seq. ID no. 15227204
MKGKADTSKKGEGRLKAAGGASKRKKDAAAAGKPKRPPSAFFVFMSEFRQQYNAENPNNKSVANVSKAAGEKWRAMSDKDKAPYVEKAEQKKKDYEKTKATFDNKESATSKKAKTQNDEEVKSEVEDEGSDEENEDDDE

SEQ ID NO: 13612 - protein, 95 aa, Triticum aestivum
  misc_feature (1)..(95): Ceres Seq. ID no. 15227205
MSEFRQQYNAENPNNKSVANVSKAAGEKWRAMSDKDKAPYVEKAEQKKKDYEKTKATFDNKESATSKKAKTQNDEEVKSEVEDEGSDEENEDDDE

SEQ ID NO: 13613 - DNA, 897 bp, Triticum aestivum
  misc_feature (1)..(897): Ceres Seq. ID no. 12614309
acatcccgacgaattattttcctgaacctaattattcgcggcgctcggtcccacttcgcggcagaagaacaccgccgccgccgccgccgccgccgccgccgtcacaggaattccttgccatggagggcgttggcgcgcggttagggcgctcgtcggcccgttacggccccgcgatgacgttcaccgggcctgttaggaagtggcggaaggaatgggtcaccatctccgccgccacggccacggccacctccgccgcggcctcctccaccgggactggatctcgtggaaataacctcatcctgttcaagtggaccccgctgaacggcgccaacgaacgagatgaggagcagacggcaccggcgaagacggccacgagaaggcggctgtacgtgccggtttctgtagttcaagatcaaaggcaagaatctgccaaatctgatgatgagaacaaggctaatgatggagaaccttcatctacggaaactgagcagtctattgggaaaactaatatggatgatatacttatggatgagtcccaggcatcagatgaggttcgagattctggaaatttcgttggtggaactgatctaaatctgaacttaggtccaaaagaccccgacggtgaagatgaaggtgatacaggtgagcaacacgaggttcgaacagaacacagattgaagaggaaatctgttacccctgacctcgagatgagaatgtaacaggcggcttcatttattccttggattctttattattacagtttcccttttgggccatttatgtaattttcttgacatactgtatacgtggagagacaagtcaacagaatcacaactacatagtgaaacgcgcattgtgttgccaaataacgttaatgaaacttttctttcgttttgc

SEQ ID NO: 13614 - protein, 238 aa, Triticum aestivum
  misc_feature (1)..(238): Ceres Seq. ID no. 12614310
IPTNYFPEPNYSRRSVPLRGRRTPPPPPPPPPPSQEFLAMEGVGARLGRSSARYGPAMTFTGPVRKWRKEWVTISAATATATSAAASSTGTGSRGNNLILFKWTPLNGANERDEEQTAPAKTATRRRLYVPVSVVQDQRQESAKSDDENKANDGEPSSTETEQSIGKTNMDDILMDESQASDEVRDSGNFVGGTDLNLNLGPKDPDGEDEGDTGEQHEVRTEHRLKRKSVTPDLEMRM

SEQ ID NO: 13615 - protein, 199 aa, Triticum aestivum
  misc_feature (1)..(199): Ceres Seq. ID no. 12614311
MEGVGARLGRSSARYGPAMTFTGPVRKWRKEWVTISAATATATSAAASSTGTGSRGNNLILFKWTPLNGANERDEEQTAPAKTATRRRLYVPVSVVQDQRQESAKSDDENKANDGEPSSTETEQSIGKTNMDDILMDESQASDEVRDSGNFVGGTDLNLNLGPKDPDGEDEGDTGEQHEVRTEHRLKRKSVTPDLEMRM

SEQ ID NO: 13616 - protein, 181 aa, Triticum aestivum
  misc_feature (1)..(181): Ceres Seq. ID no. 12614312
MTFTGPVRKWRKEWVTISAATATATSAAASSTGTGSRGNNLILFKWTPLNGANERDEEQTAPAKTATRRRLYVPVSVVQDQRQESAKSDDENKANDGEPSSTETEQSIGKTNMDDILMDESQASDEVRDSGNFVGGTDLNLNLGPKDPDGEDEGDTGEQHEVRTEHRLKRKSVTPDLEMRM

SEQ ID NO: 13617 - DNA, 673 bp, Triticum aestivum
  misc_feature (1)..(673): Ceres Seq. ID no. 12619502
atcacataggatagacctttagactttccgtccagagagtgtaggagagtctactttgcacttggagcgtgtgcaatcgacgccggctgatcgacagagcggagatggggaggccgtcttcgacggcgaagctggtgtgcgtggccctggcggcgctggccgtgctgtcgccgctgtacatggaccgggacctcgaggcggaggaggaggaggaggaggagggctggggcctactgctgccgtcggcgctgtggctgccggcgctgctggtggtgctcatcctggccatcaacgtggcgtgcttcgtggaccggagggtcgtcaggttcgacccctactggatccaccgcgtcgggggctcctcctgcggcctcatggccacgctgctgctgctcggcttcgtcctcaagtgcaagggctaggctccccgagcgagccacccggcctgctgtggctgtgggtcgtctccgtctctccattttctttcatctcagatgaggaatcgatctcatagcagctcctctgattggccagttctctctctgctcctttatcttgactgaatcgtgttcttgagcgcaccgctatgcagtgtatagtgtttctggtgctagcaaaaggaattccgtaatgtccatggttacaaagaggtctgagctctctctgactgtcc

SEQ ID NO: 13618 - protein, 105 aa, Triticum aestivum
  misc_feature (1)..(105): Ceres Seq. ID no. 12619503
MGRPSSTAKLVCVALAALAVLSPLYMDRDLEAEEEEEEEGWGLLLPSALWLPALLVVLILAINVACFVDRRVVRFDPYWIHRVGGSSCGLMATLLLLGFVLKCKG

SEQ ID NO: 13619 - protein, 80 aa, Triticum aestivum
  misc_feature (1)..(80): Ceres Seq. ID no. 12619504
MDRDLEAEEEEEEEGWGLLLPSALWLPALLVVLILAINVACFVDRRVVRFDPYWIHRVGGSSCGLMATLLLLGFVLKCKG

SEQ ID NO: 13620 - DNA, 1316 bp, Triticum aestivum
  misc_feature (1)..(1316): Ceres Seq. ID no. 13583089
gatttccccccctcgagggtttcctccgccgccaggttgcagcccctgcgtcgcccgtacctctcctactccctccgacgaccggcgccatccccgccaccccgcaggagccggcgagcgcggccccacgctcccatctcgccggcacaagcattcatccgtcccgcctcctccccctcccgacggccccgacgcgcccatcccgccggccacccccttcctccgccgtccccaacgagccgatcccgccggtcgcagctcttcttgcaccgcttcctgatggcgtcatgcgaaaccttgagggcaagacctcagagatatttcccacagatttgtctgacatatgaccatatggatcatatggtgaagtttcatggccggactggtctcaagaggtctgaagaagtggaggactattttgatattcagtttctaactgctgaagacgccaaccgtgcctttaaccatctcaagggcaaggtaccaaacatggagttcagttgggcgccgaggaacattatcaaagacaagccaccaactggagtggtggatacttcattcgtcccaccaaaatgtgatctcgattgctttagtgagctgccttccctgcccattcctgccaatcagccattccccacattctggaagttgccgcctccacagcataaacggaagagaggtcgacagtctccagagcctccacgttccgcagagcggtatcccccaagtagtgttcagatggatgaagtcgacccacgccctccattcacagcgcgctactgggcgcaacttcgtccgatatacagtaccaacatatgagtgagtggctaggagggtgccgatggacatgatttagtagctgtactaatcatgatttctcttgatatgggggcacccgttccaagcattcattttttttttggtaggacagggatttggatggaacctctggttagcctagaagacagaacaaaagtttttgctgagcaaactatgtgcattggatccacgtgatgctcattcttccacaagaaccccaagtgaactttttgtaggccaaagctggatgacaaaggtcgaaggaacatatgtcattttttttgagaatcacacaaacctgatcaaacaggctgggtacaatctttactcagagtctctctaagctcatttggcacatccgccaacttaaaaagtctgcccagtctagatgcacgagcagccaggtcattggccagcttgttttggttcctcttcacgtaggcactcttgtgagaactgaaaatgttcaatgttgagttgatgttagctatgattgg

SEQ ID NO: 13621 - protein, 272 aa, Triticum aestivum
  misc_feature (1)..(272): Ceres Seq. ID no. 13583090
DFPPSRVSSAARLQPLRRPYLSYSLRRPAPSPPPRRSRRARPHAPISPAQAFIRPASSPSRRPRRAHPAGHPLPPPSPTSRSRRSQLFLHRFLMASCETLRARPQRYFPQICLTYDHMDHMVKFHGRTGLKRSEEVEDYFDIQFLTAEDANRAFNHLKGKVPNMEFSWAPRNIIKDKPPTGVVDTSFVPPKCDLDCFSELPSLPIPANQPFPTFWKLPPPQHKRKRGRQSPEPPRSAERYPPSSVQMDEVDPRPPFTARYWAQLRPIYSTNI

SEQ ID NO: 13622 - protein, 179 aa, Triticum aestivum
  misc_feature (1)..(179): Ceres Seq. ID no. 13583091
MASCETLRARPQRYFPQICLTYDHMDHMVKFHGRTGLKRSEEVEDYFDIQFLTAEDANRAFNHLKGKVPNMEFSWAPRNIIKDKPPTGVVDTSFVPPKCDLDCFSELPSLPIPANQPFPTFWKLPPPQHKRKRGRQSPEPPRSAERYPPSSVQMDEVDPRPPFTARYWAQLRPIYSTNI

SEQ ID NO: 13623 - protein, 155 aa, Triticum aestivum
  misc_feature (1)..(155): Ceres Seq. ID no. 13583092
MDHMVKFHGRTGLKRSEEVEDYFDIQFLTAEDANRAFNHLKGKVPNMEFSWAPRNIIKDKPPTGVVDTSFVPPKCDLDCFSELPSLPIPANQPFPTFWKLPPPQHKRKRGRQSPEPPRSAERYPPSSVQMDEVDPRPPFTARYWAQLRPIYSTNI

SEQ ID NO: 13624 - DNA, 482 bp, Triticum aestivum
  misc_feature (1)..(482): Ceres Seq. ID no. 13584435
atgcctccttccctcctcacgccgccacccacccaccgcctcctccctaccacagctcgctgccgacggcctcccctctcccatccgcttccctcccaccccagacggattgcccctctcctctcctgcaacccccctctctctctctccccacacttcacagtgacagcaggcactcccagatccatccggatgccggacatggaggagtccgcgcagcccaagcccgccaacccctcggaaccggagctctcctcggacccgcccaagggcgcggggacgaacgcggatggctggcggcgaggccgccgccaggagatccgacttcgccgacgggaatggggccggatccgccacgcccgagcgctccatcctcgtcgacagggacgactacatcctagtaggtcagagcgctccatctggtgggtccgagcgctccatcctcaacagggacgacggggacgactacatcctcgacaggg

SEQ ID NO: 13625 - protein, 160 aa, Triticum aestivum
  misc_feature (1)..(160): Ceres Seq. ID no. 13584436
MPPSLLTPPPTHRLLPTTARCRRPPLSHPLPSHPRRIAPLLSCNPPLSLSPHFTVTAGTPRSIRMPDMEESAQPKPANPSEPELSSDPPKGAGTNADGWRRGRRQEIRLRRREWGRIRHARALHPRRQGRLHPSRSERSIWWVRALHPQQGRRGRLHPRQ

SEQ ID NO: 13626 - protein, 132 aa, Triticum aestivum
  misc_feature (1)..(132): Ceres Seq. ID no. 13584437
ASFPPHAATHPPPPPYHSSLPTASPLPSASLPPQTDCPSPLLQPPSLSLPTLHSDSRHSQIHPDAGHGGVRAAQARQPLGTGALLGPAQGRGDERGWLAARPPPGDPTSPTGMGPDPPRPSAPSSSTGTTTS

SEQ ID NO: 13627 - protein, 96 aa, Triticum aestivum
  misc_feature (1)..(96): Ceres Seq. ID no. 13584438
MPDMEESAQPKPANPSEPELSSDPPKGAGTNADGWRRGRRQEIRLRRREWGRIRHARALHPRRQGRLHPSRSERSIWWVRALHPQQGRRGRLHPRQ

SEQ ID NO: 13628 - DNA, 983 bp, Triticum aestivum
  misc_feature (1)..(983): Ceres Seq. ID no. 13585554
aggaataggattcaggcccgggcggccgcgtcaaaatcgtctctttgctcctcctcctgtccgtccgtctccgtccgtccgcccgcccgccccgaagcgtctcgccgccccctccaccggagaaccccctcgaaggcgagcacccgccctccccttcctcccggattcttgtctgccatgggtgactacacaatccggataagcaccagcttgatcgagcagctcgcgcgcgatgacgagaagcagatgaagaggaggaccaggaaacccaagccgaggaaggtcgtggagcaaccagaggagcctcaggacaatggcagggaacttccaactgaacccaagagcagccctgctcctgttttgccttttccgccacccatgtacctgccagtgacccccgctcctccaccgcccccgcccgtgatccaggaggtggaagccatacgcgccgtggttgtggagagcgagaaggtgctggagaagctgcagaagaaggaggcgacgatgcgcgaggagctcaccaagagggccaaggagctgcacgacaaggagttcaagctgccctaccagaacccctcgccgtgcaccgacgagagggcaggctgcgctgagtgctacaggagcaacgtgcaggacccgctcaagtgcgccgaggcggtcaagaggttcgaggcgtgcgttcgcatggcgattcggggcggtaccaccatgggagctgctcagtaggcagtggcgctgggagtcggggctgagtgagcgaggtgtcgagcacacgattttgcttctgtcgggatgattgattgaataacctgcctggatttttgtttggtgagacctgaaacaccatcagttgtagattaattctggtaacgggttgctactggtgttggcaacaagaggccatgagtgtccttgaatttaggggagtggctccatgctacttgcatacatattacaaaatgagacatgaaatttgcagggtc

SEQ ID NO: 13629 - protein, 241 aa, Triticum aestivum
  misc_feature (1)..(241): Ceres Seq. ID no. 13585555
RNRIQARAAASKSSLCSSSCPSVSVRPPARPEASRRPLHRRTPSKASTRPPLPPGFLSAMGDYTIRISTSLIEQLARDDEKQMKRRTRKPKPRKVVEQPEEPQDNGRELPTEPKSSPAPVLPFPPPMYLPVTPAPPPPPPVIQEVEAIRAVVVESEKVLEKLQKKEATMREELTKRAKELHDKEFKLPYQNPSPCTDERAGCAECYRSNVQDPLKCAEAVKRFEACVRMAIRGGTTMGAAQ

SEQ ID NO: 13630 - protein, 182 aa, Triticum aestivum; identical to SEQ ID NO: 8581
  misc_feature (1)..(182): Ceres Seq. ID no. 13585556

SEQ ID NO: 13631 - protein, 159 aa, Triticum aestivum; identical to SEQ ID NO: 8582
  misc_feature (1)..(159): Ceres Seq. ID no. 13585557

SEQ ID NO: 13632 - DNA, 1487 bp, Triticum aestivum
  misc_feature (1)..(1487): Ceres Seq. ID no. 13596167
cccccctcccgttccaactttattgtgtttaaacatccatcgcttcttccccgaggaagaaaggaaccgccatggcggaggagtgctgcagcgcggacctgctggagtggatcggccctgacgtctcagcatgcgtcttcggccgccttgaccaccccgccgaccttgtccgcgccgccgctgtctccagaacctggcgcagatgcgtggtcgagagcggcttgagcaagagcctttgcctgcggctgtgccccgaggtcgccaccgtcgccgcggcggcagaggtgaccagatcgccgccttcaaccgcctcccccgagtcaggccacgagagggactacaggatatactccaacctcgccggcgcctacgtctccgactccggcgagccctccgcggaatgcatcttgcactgtatcggcgcctcaagcaccgacgacttcccaattgagaccatggagaacaccctcgacgaggaggagataatcaatttccgcccgtcctattggtcgagcggcggggcggacgaccccgaggcgccggagagccttacctacaggctcaactctgacatctgcattgtcgatgaggttcgggtgcgaccgtaccaagccttttttcaggatggtgaccctatatactcttcaaagatggtgcgatttcggatgggccattacaagcttccgcgaggatcagagacgtttgtaatggatgattatgagaataagatggtaaatactgatgaaaaatatatgtggacttacacttcgccagagttccctatgttacagaaaaacgaactacaatccttcaagctcccacgcccagtcctttgcattggtggtgtggtgatgattgaactcttgggcagagtacagaaacaagaagcagatgatatgtactacatatgtgtttgccatgctgaagtgatggggcgttcactctcaccacttttcatggttgacatctcggatcctgaaggttattcaatcctcaagtacttaccgggtgccaaagacctatccatcgatgactttttgcaagatgataccaaagactcgccggagtggcactatcttgttgatagatacaggcagatgaatcacagagcagtagtagtgagtgcacttctggagcctgtacattacatgcatgatgtaggtggcatctcagacgatgatcatgaggatgatgtaggtggcatctcagacgatgattatcttgagtagatttgcgtgctggactgcagctacaactctgccgtggttttactctttgtagtttagtgaacacctctgaactctgcaagcctttgttgcaaacatttctgaagcctcggttctcgaacctagaggacctgatcgagacaagttgcgcttatggtttgcaactctgctcaagcttgcttgtgttttctcttgtgtttttcgtttagtggtgaatatttgtcatatactacttttcaaataaatgccgtttgcggatgg

SEQ ID NO: 13633 - protein, 385 aa, Triticum aestivum
  misc_feature (1)..(385): Ceres Seq. ID no. 13596168
MAEECCSADLLEWIGPDVSACVFGRLDHPADLVRAAAVSRTWRRCVVESGLSKSLCLRLCPEVATVAAAAEVTRSPPSTASPESGHERDYRIYSNLAGAYVSDSGEPSAECILHCIGASSTDDFPIETMENTLDEEEIINFRPSYWSSGGADDPEAPESLTYRLNSDICIVDEVRVRPYQAFFQDGDPIYSSKMVRFRMGHYKLPRGSETFVMDDYENKMVNTDEKYMWTYTSPEFPMLQKNELQSFKLPRPVLCIGGVVMIELLGRVQKQEADDMYYICVCHAEVMGRSLSPLFMVDISDPEGYSILKYLPGAKDLSIDDFLQDDTKDSPEWHYLVDRYRQMNHRAVVVSALLEPVHYMHDVGGISDDDHEDDVGGISDDDYLE

SEQ ID NO: 13634 - protein, 257 aa, Triticum aestivum
  misc_feature (1)..(257): Ceres Seq. ID no. 13596169
MENTLDEEEIINFRPSYWSSGGADDPEAPESLTYRLNSDICIVDEVRVRPYQAFFQDGDPIYSSKMVRFRMGHYKLPRGSETFVMDDYENKMVNTDEKYMWTYTSPEFPMLQKNELQSFKLPRPVLCIGGVVMIELLGRVQKQEADDMYYICVCHAEVMGRSLSPLFMVDISDPEGYSILKYLPGAKDLSIDDFLQDDTKDSPEWHYLVDRYRQMNHRAVVVSALLEPVHYMHDVGGISDDDHEDDVGGISDDDYLE

SEQ ID NO: 13635 - protein, 192 aa, Triticum aestivum
  misc_feature (1)..(192): Ceres Seq. ID no. 13596170
MVRFRMGHYKLPRGSETFVMDDYENKMVNTDEKYMWTYTSPEFPMLQKNELQSFKLPRPVLCIGGVVMIELLGRVQKQEADDMYYICVCHAEVMGRSLSPLFMVDISDPEGYSILKYLPGAKDLSIDDFLQDDTKDSPEWHYLVDRYRQMNHRAVVVSALLEPVHYMHDVGGISDDDHEDDVGGISDDDYLE

SEQ ID NO: 13636 - DNA, 968 bp, Triticum aestivum
  misc_feature (1)..(968): Ceres Seq. ID no. 13596277
ctttttttcccctcctcccgttgcctccacgcctccgagccagccagacacgcgagagggtagaccgcggcggcgaggcctcctgctttgcgcctagggttttgattcgatcccccccgccgccgccgccgcctgccggatggccatggagagggagctcatggagaccttcgaggccgccaagaaggccgccgacgccgccgccgaggaggccgacggctcctcccccgaggccgagcgctgcctcgacgccctgcgccgcctccgcgagttccgcgtcaacaccgacgtcctcgtctccacgcaggttggcaaacgtcttcggtacctgacgaagcaccctaactcagacatacaggcggtggctgcagacctttttgggtactggaagaaggttgttattgaagagacaggaaagaaaaacggcacaccagcaaatggaaaatcaaacaactctgcagctaaggctgagaaacctcagcccatgaaggttgaaaggaagtcagcgaacgtgaaggttgaaaagaactctacgtcgacgactgtgaagactgaaaagaatgcaactgtgaagactgaaaaggattctatgtcggcaagtgtgaagattgagaagactgtgaatagtgattccaaagtccaagttaaggtagagaaggtttcaaaggaagttagcagaacatctgaaacaaagaaaccatcttctgttccaaatggtcccccaaagctgacatcccttgtcagatgcaacgatgctgctcgagataaatacagggagcttcttgttgacgccttcgtcaaggtttccaaggaaactagtgatgatgacagagaggaaataagagatctcctggaccaggtaaatgcatgcgacccatatagagttgctgtgacagtggagtcggcgctgtttgagaggatagggcgttccaccgggacccacaaggtgaaatacaggtcgatactgt

SEQ ID NO: 13637 - protein, 276 aa, Triticum aestivum
  misc_feature (1)..(276): Ceres Seq. ID no. 13596278
MAMERELMETFEAAKKAADAAAEEADGSSPEAERCLDALRRLREFRVNTDVLVSTQVGKRLRYLTKHPNSDIQAVAADLFGYWKKVVIEETGKKNGTPANGKSNNSAAKAEKPQPMKVERKSANVKVEKNSTSTTVKTEKNATVKTEKDSMSASVKIEKTVNSDSKVQVKVEKVSKEVSRTSETKKPSSVPNGPPKLTSLVRCNDAARDKYRELLVDAFVKVSKETSDDDREEIRDLLDQVNACDPYRVAVTVESALFERIGRSTGTHKVKYRSIL

SEQ ID NO: 13638 - protein, 274 aa, Triticum aestivum
  misc_feature (1)..(274): Ceres Seq. ID no. 13596279
MERELMETFEAAKKAADAAAEEADGSSPEAERCLDALRRLREFRVNTDVLVSTQVGKRLRYLTKHPNSDIQAVAADLFGYWKKVVIEETGKKNGTPANGKSNNSAAKAEKPQPMKVERKSANVKVEKNSTSTTVKTEKNATVKTEKDSMSASVKIEKTVNSDSKVQVKVEKVSKEVSRTSETKKPSSVPNGPPKLTSLVRCNDAARDKYRELLVDAFVKVSKETSDDDREEIRDLLDQVNACDPYRVAVTVESALFERIGRSTGTHKVKYRSIL

SEQ ID NO: 13639 - protein, 269 aa, Triticum aestivum
  misc_feature (1)..(269): Ceres Seq. ID no. 13596280
METFEAAKKAADAAAEEADGSSPEAERCLDALRRLREFRVNTDVLVSTQVGKRLRYLTKHPNSDIQAVAADLFGYWKKVVIEETGKKNGTPANGKSNNSAAKAEKPQPMKVERKSANVKVEKNSTSTTVKTEKNATVKTEKDSMSASVKIEKTVNSDSKVQVKVEKVSKEVSRTSETKKPSSVPNGPPKLTSLVRCNDAARDKYRELLVDAFVKVSKETSDDDREEIRDLLDQVNACDPYRVAVTVESALFERIGRSTGTHKVKYRSIL

SEQ ID NO: 13640 - DNA, 1517 bp, Triticum aestivum
  misc_feature (1)..(1517): Ceres Seq. ID no. 13597753
gaccactgactgaccgccggccgctttctcctctacggcgacgcccggccgcccagctgctcaccgccggcgctctcgccgacggcgatgtcgtcttcggagccgcggccgcgccccgccgcctccttctccggcgacctgcccgaggacgcgctgtacgaggtcctcctccgcatcccggccaaggagctctgccgcctccgcgccgtctgcccggcctggcacgccctcacctccgatccgcccttcgtcgcggctcacaagtccacccaccgcacggcgcccccgctcctcgccattgcctaccgcgacgacagtgaggtcaacggcgttgcgatttcggatctgtcgggcaacgtcgtgaggcggattccagtcaccgggtatgagattgttatggtgaacgagtcgggcgatgccgttcaccggagctcaagcaaggaggagcatgatagcatctgtgttgtgcgcagccggctagacctcgtgtgcttccactggaatgtgtactctaggaccttctgcgtgctgaacccggtcactggagctactctcgacttaccgatgggccactcaaaggaattggagcatgagctggaggtacagggaagaaaatggggctgccatgtcgagtggtgcgcttttgggaaggtctcctctaccagagagtacaaggcgctccgcatctgtagcattcgtgaccggcaggtatgtgaggttatcacctttgatgacaccaaccatggaagctggaggaggaagcaggaccctccgccccgtatctgtaccggtcgtcagatgagatgcgtggtcgtcgatggggtggtgtacttcttgatggattttcactacacatactttgaaaccggggttataaccattgagcctggtagcatagcttcattcaacctcgaggcggaggagtggggtgttctacctggtcccggacaggtcaagaggtttgtgcaagagaacaagaaatacagttactcacagcttgagctccagttatcattggctgagttgaacggctgcttagttctggttcataatattcataaggtatctatggacttgtggtttttgacagattttgagaaaggtatctgggtcaagaaatacagcttgccttcacatgttgctaggcttttttggtatccttttctcatgttagatgatgggagaattttcttcagtgggatggattgtctggaaggtatattaagtggtggagagcaaggagagggattcctgcaaagttatgatccaagaaatgacacttatgctgatgcactagaactgagagatcccagatcaatttgcatttacacaggaagcgtgctgagtttatagcatagctgtcactgatgaggtcaggaatgatacatcgtactggctgttcaccttatgttctaaatgtgaacaattagtgagataatgttctgatgcatgcatctttgaaaaagtacctttgtgccttcaaagtatattatgttaatctccaatacattttgcgc

SEQ ID NO: 13641 - protein, 421 aa, Triticum aestivum
  misc_feature (1)..(421): Ceres Seq. ID no. 13597754
MSSSEPRPRPAASFSGDLPEDALYEVLLRIPAKELCRLRAVCPAWHALTSDPPFVAAHKSTHRTAPPLLAIAYRDDSEVNGVAISDLSGNVVRRIPVTGYEIVMVNESGDAVHRSSSKEEHDSICVVRSRLDLVCFHWNVYSRTFCVLNPVTGATLDLPMGHSKELEHELEVQGRKWGCHVEWCAFGKVSSTREYKALRICSIRDRQVCEVITFDDTNHGSWRRKQDPPPRICTGRQMRCVVVDGVVYFLMDFHYTYFETGVITIEPGSIASFNLEAEEWGVLPGPGQVKRFVQENKKYSYSQLELQLSLAELNGCLVLVHNIHKVSMDLWFLTDFEKGIWVKKYSLPSHVARLFWYPFLMLDDGRIFFSGMDCLEGILSGGEQGEGFLQSYDPRNDTYADALELRDPRSICIYTGSVLSL

SEQ ID NO: 13642 - protein, 318 aa, Triticum aestivum
  misc_feature (1)..(318): Ceres Seq. ID no. 13597755
MVNESGDAVHRSSSKEEHDSICVVRSRLDLVCFHWNVYSRTFCVLNPVTGATLDLPMGHSKELEHELEVQGRKWGCHVEWCAFGKVSSTREYKALRICSIRDRQVCEVITFDDTNHGSWRRKQDPPPRICTGRQMRCVVVDGVVYFLMDFHYTYFETGVITIEPGSIASFNLEAEEWGVLPGPGQVKRFVQENKKYSYSQLELQLSLAELNGCLVLVHNIHKVSMDLWFLTDFEKGIWVKKYSLPSHVARLFWYPFLMLDDGRIFFSGMDCLEGILSGGEQGEGFLQSYDPRNDTYADALELRDPRSICIYTGSVLSL

SEQ ID NO: 13643 - protein, 262 aa, Triticum aestivum
  misc_feature (1)..(262): Ceres Seq. ID no. 13597756
MGHSKELEHELEVQGRKWGCHVEWCAFGKVSSTREYKALRICSIRDRQVCEVITFDDTNHGSWRRKQDPPPRICTGRQMRCVVVDGVVYFLMDFHYTYFETGVITIEPGSIASFNLEAEEWGVLPGPGQVKRFVQENKKYSYSQLELQLSLAELNGCLVLVHNIHKVSMDLWFLTDFEKGIWVKKYSLPSHVARLFWYPFLMLDDGRIFFSGMDCLEGILSGGEQGEGFLQSYDPRNDTYADALELRDPRSICIYTGSVLSL

SEQ ID NO: 13644 - DNA, 1156 bp, Triticum aestivum
  misc_feature (1)..(1156): Ceres Seq. ID no. 13597761
aatcaaagagagaaaaaaaaactcatcgcagagccgccgacgaccgtagcacagcggcagagaagtgcggcaagcggccatggacttctgcccggcgtgcgggatgctgctgcagatccagccggccaccggcggccaccgcctgcgcctcttctgccccacctgcccgtacgtctgccccatcaaaaacaagatcgtgaagaaggcgaggctggtcaagagggaggtggagtccgcggaatctgcccccaagactgacggtgagcccaaggaatcggcccccaagactgacggcgagcccaaggccgatggtcagctcaagcaatctgcccccaagactgagggtacatgaccaaattgacacaatggagaaacatacttttggcagatgcagattcgattagtacaatatctacaagcattgtgaaacttaagagtatctggacatgcgaacatgtggagcttctttgatcaaattatgttacagcacacaacttgccaaaagccaccaatcttgtgcaaagtaaagtgatatacatctgacagtgcagaagccggagaagctcacttcaatgttagtttgttaattggacacttcctttatgtgacattgcaggctttttggtatggagatgtttttgtgtgtgtgtgagcgtgcgctagaggtgttgatttgctgtatgaatactcttcttattcaaccagcacaagaatgggtatgattttgagtccttgcatagcttccattctccatccttgaaacttgtatgaatttaggttaggggtcgagaagacaatgaaggcaaggggatcagcgggcccacaatggcactctggtcccctgttgacaaatactcgctccatatcaaaatataagacgtttttcaaggctacagcagacacatgggcccgctccaccacagctctgacttcaaagcaaccaagcaacccatggaagagcaactcggacacgctgtgaagaaccgactattgaagtccacgccgcgacccgagcttctgtggatgtattctactttgcatgtaaatttttatgcgagctacacaaaaatctagcacatgtactattcacttcactataaaagtacatgatgtttttgtgtacagctcatatgaaaacaaaatttattttacaccc

SEQ ID NO: 13645 - protein, 90 aa, Triticum aestivum
  misc_feature (1)..(90): Ceres Seq. ID no. 13597762
MDFCPACGMLLQIQPATGGHRLRLFCPTCPYVCPIKNKIVKKARLVKREVESAESAPKTDGEPKESAPKTDGEPKADGQLKQSAPKTEGT

SEQ ID NO: 13646 - protein, 85 aa, Triticum aestivum
  misc_feature (1)..(85): Ceres Seq. ID no. 13597763
NQREKKKLIAEPPTTVAQRQRSAASGHGLLPGVRDAAADPAGHRRPPPAPLLPHLPVRLPHQKQDREEGEAGQEGGGVRGICPQD

SEQ ID NO: 13647 - protein, 82 aa, Triticum aestivum
  misc_feature (1)..(82): Ceres Seq. ID no. 13597764
MLLQIQPATGGHRLRLFCPTCPYVCPIKNKIVKKARLVKREVESAESAPKTDGEPKESAPKTDGEPKADGQLKQSAPKTEGT

SEQ ID NO: 13648 - DNA, 1408 bp, Triticum aestivum
  misc_feature (1)..(1408): Ceres Seq. ID no. 13598248
gccattccccagccaccaccgaacccgaaagcccatccacccacccggaccgggcgacgaccggggcggaggcggcggcggcggatcgagggacggacggacggatgggcggcggcgggcagtaggacggcggcgggacgcggcgggacgcggcggcaccaccatgtctgcggtagtctgcggcaagaggtcctcctccatcttcgcggacgacctgctgctccaacaggcctcctcttcccctccctcctcccaccacagcagccccgcggccaagaggtcccgctacgcgcaccaccaccaccgccgggacggccgggacgcgctcctcaaccacctccgggccgccttccccgccatggacccccagctgcttgagagagcccttgaagcgtctggagatgatttggatgatgcaataaagagtctgaaggagctgcacctgatggagtcaaatcaggctaacctgtcggccactggttccgcattkgaaaacgggccgactgcagttcagccgtctgttgaaggcattgttaccagcggcggtgtggacacagctactgaacaccaacctcctgcagatggccaacagccaggtaatagtggccctgaatgggttgatctttttgtgagggagatgtcaaatgcttctgacatggatgacgcgcgggcccgtgcgtcaagagctcttgaagccttgacgaagtccatcctggagggtgcaggagctgaagcagcgcagagcttgcatcaggaaaacatgatgctcaaggagcagatgacggccgtcctgtcgcagaacgcggtcctgaagcgcgcggtggcgatccagcacgagcggcagaaggagttcgacgagcggagccacgaggtgcagggcctgaagcagctcgtcctgcagtaccaggagcagctgaggactctcgagatcaacaactacgcgctgcagatgcatctgaagcaggcccagcagagcagctccatgcccgggcgctacaacccggacgtcttctaatttggcctcagggcgatgatgatgagccctggcccttggggattgagagttgagactagtggtgccctgccgtatgatgatgatgaagatgactagaaaatgttgttgtctgggatagttgggtggatgttggtttgctgaccaccccgttggccgtgggatggggcgcaaggctcccatgatagatcatgtgttggttcaaacgtgtcgcgtttaaacgatttttcgtatttgatatatacacaaaacaatcccgattctttgcatgattgtcattcagtcaaaaaaaaaaaaaaaaaaaaaaaaaaaaaaaaaaaaaaaaaaaaaaaaaaaaaaaagaaaaaaaaaaaaaaaaaagcttatcrataccgtcracctcragggggggcccgg

SEQ ID NO: 13649 - protein, 337 aa, Triticum aestivum
  misc_feature (1)..(337): Ceres Seq. ID no. 15222276
  misc_feature (163)..(163): Xaa is any aa, unknown or other
PFPSHHRTRKPIHPPGPGDDRGGGGGGGSRDGRTDGRRRAVGRRRDAAGRGGTTMSAVVCGKRSSSIFADDLLLQQASSSPPSSHHSSPAAKRSRYAHHHHRRDGRDALLNHLRAAFPAMDPQLLERALEASGDDLDDAIKSLKELHLMESNQANLSATGSAXENGPTAVQPSVEGIVTSGGVDTATEHQPPADGQQPGNSGPEWVDLFVREMSNASDMDDARARASRALEALTKSILEGAGAEAAQSLHQENMMLKEQMTAVLSQNAVLKRAVAIQHERQKEFDERSHEVQGLKQLVLQYQEQLRTLEINNYALQMHLKQAQQSSSMPGRYNPDVF

SEQ ID NO: 13650 - protein, 283 aa, Triticum aestivum
  misc_feature (1)..(283): Ceres Seq. ID no. 15222277
  misc_feature (109)..(109): Xaa is any aa, unknown or other
MSAVVCGKRSSSIFADDLLLQQASSSPPSSHHSSPAAKRSRYAHHHHRRDGRDALLNHLRAAFPAMDPQLLERALEASGDDLDDAIKSLKELHLMESNQANLSATGSAXENGPTAVQPSVEGIVTSGGVDTATEHQPPADGQQPGNSGPEWVDLFVREMSNASDMDDARARASRALEALTKSILEGAGAEAAQSLHQENMMLKEQMTAVLSQNAVLKRAVAIQHERQKEFDERSHEVQGLKQLVLQYQEQLRTLEINNYALQMHLKQAQQSSSMPGRYNPDVF

SEQ ID NO: 13651 - protein, 218 aa, Triticum aestivum
  misc_feature (1)..(218): Ceres Seq. ID no. 15222278
  misc_feature (44)..(44): Xaa is any aa, unknown or other
MDPQLLERALEASGDDLDDAIKSLKELHLMESNQANLSATGSAXENGPTAVQPSVEGIVTSGGVDTATEHQPPADGQQPGNSGPEWVDLFVREMSNASDMDDARARASRALEALTKSILEGAGAEAAQSLHQENMMLKEQMTAVLSQNAVLKRAVAIQHERQKEFDERSHEVQGLKQLVLQYQEQLRTLEINNYALQMHLKQAQQSSSMPGRYNPDVF

SEQ ID NO: 13652 - DNA, 1092 bp, Triticum aestivum
  misc_feature (1)..(1092): Ceres Seq. ID no. 13654590
ggacgaccccgacgcgccaccacctgctcctcccggcggctgcctgctcgactcgattccccaaccgcagcagggtcaacgacagaacctatcgcgcgatgggcttgggactgagattgccgttcttcctactcctcttgctgctggtcagcctgggagccgcacaaggccggagcacagtttttcttgatatccaggaggaggctcgaggctctggtcaaatcatcaaggatcaactaactttgagcaaaattcccgtgcgtgttgagaggggcagcccactatgcccagcttgtgagaagtttacagaggaagctcttagctatcttagtcagaaacaatcacaagataagatgatggaggtccttcatgaagcttgttctcagacattctcgttggaaaagaagtgtgttgagtttgtggactcctatgcaactctcttatttgccaagatcgctgagatcaagccagaagagttctgcaaacgaaatggcctctgcagggacaatgctcttctgtctggtgtgagaagtgagagcacatgcgtgttttgccaccacctcatggatgaagttttgtccaaactgaaggatcctgatgctgagtttgagataattcaaattctcctcaaggagtgcaagaagatcgaaggtcatgaacagcagtgcaaacgactggtcctgcaatacatccctctcatcctggtgaacggagagaagttcctcgagaagaacgatatatgtaccattgtccaagcgtgcgatgctggcaaaaagacaatggtcgggccattctccgaggagggtttgttgcgtgatgcatgaaggtagaaagaccacaccaggctgcgtaaacccagacgaaacattatgcactagttcttccttgttgtacataggtgtccaaaaattcgtctggcttttgccttgtactgctgctcctgcattctgtggatgctttgtattataaagggagcggcatgacaaacagtttattatgtcaacttgaagccgtgttgtacttattacttcgtcagtgtttaatttgtaatgacatttgaacaactgtagatactaaatcgagtttcagtcg

SEQ ID NO: 13653 - protein, 273 aa, Triticum aestivum
  misc_feature (1)..(273): Ceres Seq. ID no. 13654591
TTPTRHHLLLPAAACSTRFPNRSRVNDRTYRAMGLGLRLPFFLLLLLLVSLGAAQGRSTVFLDIQEEARGSGQIIKDQLTLSKIPVRVERGSPLCPACEKFTEEALSYLSQKQSQDKMMEVLHEACSQTFSLEKKCVEFVDSYATLLFAKIAEIKPEEFCKRNGLCRDNALLSGVRSESTCVFCHHLMDEVLSKLKDPDAEFEIIQILLKECKKIEGHEQQCKRLVLQYIPLILVNGEKFLEKNDICTIVQACDAGKKTMVGPFSEEGLLRDA

SEQ ID NO: 13654 - protein, 241 aa, Triticum aestivum
  misc_feature (1)..(241): Ceres Seq. ID no. 13654592
MGLGLRLPFFLLLLLLVSLGAAQGRSTVFLDIQEEARGSGQIIKDQLTLSKIPVRVERGSPLCPACEKFTEEALSYLSQKQSQDKMMEVLHEACSQTFSLEKKCVEFVDSYATLLFAKIAEIKPEEFCKRNGLCRDNALLSGVRSESTCVFCHHLMDEVLSKLKDPDAEFEIIQILLKECKKIEGHEQQCKRLVLQYIPLILVNGEKFLEKNDICTIVQACDAGKKTMVGPFSEEGLLRDA

SEQ ID NO: 13655 - protein, 156 aa, Triticum aestivum
  misc_feature (1)..(156): Ceres Seq. ID no. 13654593
MMEVLHEACSQTFSLEKKCVEFVDSYATLLFAKIAEIKPEEFCKRNGLCRDNALLSGVRSESTCVFCHHLMDEVLSKLKDPDAEFEIIQILLKECKKIEGHEQQCKRLVLQYIPLILVNGEKFLEKNDICTIVQACDAGKKTMVGPFSEEGLLRDA

SEQ ID NO: 13656 - DNA, 942 bp, Triticum aestivum
  misc_feature (1)..(942): Ceres Seq. ID no. 13656912
agattagccatgtctctcgcgcctcctctgctccgcctccgcgccccccgccccgacgccgccctctccgccgccgtcccgtcccgccctctccctggatgcctcgccatcgggcggggtctcggctccggccgcgcctactgcctcttctccggcgccggcgccggccgccggaagcaggaggaagctaggagagggctggagagtgccgtagaccagaacaagacggggttcgggacatggggcgtggaaactgttacaaggcggctaagagaccggcgtggtggccctgctcctgctgtcggtggcggtggcaggggaaggtctggaggaggaggtggtggaggtggaggtggttggttcaggtggtttagcagtggaggcttctgggacgctgcgaagcagactgttctgacgatcctcggcattattgcagcggtcttcctcatcgcgaatttcaacgtgcttctgggggctgccgtctacccgttgctggtcgtgctgcggcaaataaggcgcgcactcacctttgcggcttattgtgtttctcgggccatgtcggcacccgcttccaggccgaaaccaactcctgtagacagcgctgaagtggtggccgcagcgcctgtcaaagaaagagccagaatgtctgcaagagaaagagttgttgcgaaatggcgtttggactgaattagaggacatttcaatgccttgtttttttggccggtcggatagttttcaaaccatgactgtataagttctatttcttttcttcgttggcaggagcctttaaattagaagtagatggtgttacagctatttacaggtggccatttgaatggttcagttataagcactatttgtgtggaagataccttggaaataccacatttaattgcagtctggacttgatcggcaatatatatggttatacaggcagctttc

SEQ ID NO: 13657 - protein, 228 aa, Triticum aestivum
  misc_feature (1)..(228): Ceres Seq. ID no. 13656913
RLAMSLAPPLLRLRAPRPDAALSAAVPSRPLPGCLAIGRGLGSGRAYCLFSGAGAGRRKQEEARRGLESAVDQNKTGFGTWGVETVTRRLRDRRGGPAPAVGGGGRGRSGGGGGGGGGGWFRWFSSGGFWDAAKQTVLTILGIIAAVFLIANFNVLLGAAVYPLLVVLRQIRRALTFAAYCVSRAMSAPASRPKPTPVDSAEVVAAAPVKERARMSARERVVAKWRLD

SEQ ID NO: 13658 - protein, 225 aa, Triticum aestivum
  misc_feature (1)..(225): Ceres Seq. ID no. 13656914
MSLAPPLLRLRAPRPDAALSAAVPSRPLPGCLAIGRGLGSGRAYCLFSGAGAGRRKQEEARRGLESAVDQNKTGFGTWGVETVTRRLRDRRGGPAPAVGGGGRGRSGGGGGGGGGGWFRWFSSGGFWDAAKQTVLTILGIIAAVFLIANFNVLLGAAVYPLLVVLRQIRRALTFAAYCVSRAMSAPASRPKPTPVDSAEVVAAAPVKERARMSARERVVAKWRLD

SEQ ID NO: 13659 - DNA, 769 bp, Triticum aestivum
  misc_feature (1)..(769): Ceres Seq. ID no. 13661117
atcgaaaaacccacatacgacaagaaaactgcaccagtgcacaccagtgctagtgtgtgacacgccaccatgaggtctctgcaggctgtgctcgtggcggtcctcgtcctgctcgccgtcgccgcgacgacagacgccgcgtgggcgccgataccggaccgcgacctgaacggcatggtggtgcagcaggcgggccggttcgccgtgctcgtgcatgacatcacgcaccggacgaccctggtgttcgtcaaggtggagcgcggcgagatggagcggccggtcggcggcggcaacggcaccaactaccggctcgtggtgaccgcggcgagggcgcccggcgggaacaagggccagtacgagtgcgtcgtgtggggcgtgcccggctcgcgcaccagcacctggaagctcctcagcttcaaggcgctctagctgcatgcatggccactgagcactcgtacgtgtgagtgtgatggtccgaggcaaagccgcgcgcgtactccgctgaataatctgcatatagtatgtgcatgggttttttaagtactggtacacgtcctttaatttgtaacccgcgtaggcacggcaaatacctgtctgcgtgcagtccgcacacactagcgccggaataagtaagttgtgactatcacccagtatacttcttttttgtcatcactgcccgaatgatgtatgttggtgattttataagagtcttgatactatgatcgttccctactakgakgggggtcttgatactatgatcgttcccttg

SEQ ID NO: 13660 - protein, 119 aa, Triticum aestivum
  misc_feature (1)..(119): Ceres Seq. ID no. 15220071
MRSLQAVLVAVLVLLAVAATTDAAWAPIPDRDLNGMVVQQAGRFAVLVHDITHRTTLVFVKVERGEMERPVGGGNGTNYRLVVTAARAPGGNKGQYECVVWGVPGSRTSTWKLLSFKAL

SEQ ID NO: 13661 - protein, 84 aa, Triticum aestivum
  misc_feature (1)..(84): Ceres Seq. ID no. 15220072
MVVQQAGRFAVLVHDITHRTTLVFVKVERGEMERPVGGGNGTNYRLVVTAARAPGGNKGQYECVVWGVPGSRTSTWKLLSFKAL

SEQ ID NO: 13662 - DNA, 688 bp, Triticum aestivum
  misc_feature (1)..(688): Ceres Seq. ID no. 13662405
cactttccccacctctcaggccaagcaaacgcacaccaggcgaggcaacgcaaagaagcaggcaggcagccatgtcgtactacgaccggcgcggggagtcgtcggtgctggaggcgttcacgctgtcgccgctgccgtacccggtgatcctgatcctgatgatggtgacgctgctgctgggggcgtcgtggttcttctcgtacgaggacttcatggaggaggcgtcggagcagttcagctggttcctgctgggcgtgcccatcgcgctcgtcctcctcatccgctggatctcctccgtcgacaccttcgagggctacttcgggttctaccccaccgagagccgctggagggggtacccggccgcgccctccgagggcagctccccctggggcgtcgccatggtcgtcgtcctcctgctcctcctcgccagcttccactccaccttccaggacatgtggaagccttgatggaatgatcgatgctccgatccatacctcgtatgtacgtgtatgtgtgtatgtatgtaattccatcgtatcgatctgtagtacacctacgaatgattgttgcttccaccttccaggcggttgctgcacctgcacgtatgtgtgccttgcttttcctcctgtactgtacatagatgaaggttatattctgctagctgaaaaactatagagcttgagtgtcg

SEQ ID NO: 13663 - protein, 157 aa, Triticum aestivum
  misc_feature (1)..(157): Ceres Seq. ID no. 13662406
TFPTSQAKQTHTRRGNAKKQAGSHVVLRPARGVVGAGGVHAVAAAVPGDPDPDDGDAAAGGVVVLLVRGLHGGGVGAVQLVPAGRAHRARPPHPLDLLRRHLRGLLRVLPHREPLEGVPGRALRGQLPLGRRHGRRPPAPPRQLPLHLPGHVEALME

SEQ ID NO: 13664 - protein, 154 aa, Triticum aestivum
  misc_feature (1)..(154): Ceres Seq. ID no. 13662407
LSPPLRPSKRTPGEATQRSRQAAMSYYDRRGESSVLEAFTLSPLPYPVILILMMVTLLLGASWFFSYEDFMEEASEQFSWFLLGVPIALVLLIRWISSVDTFEGYFGFYPTESRWRGYPAAPSEGSSPWGVAMVVVLLLLLASFHSTFQDMWKP

SEQ ID NO: 13665 - protein, 131 aa, Triticum aestivum
  misc_feature (1)..(131): Ceres Seq. ID no. 13662408
MSYYDRRGESSVLEAFTLSPLPYPVILILMMVTLLLGASWFFSYEDFMEEASEQFSWFLLGVPIALVLLIRWISSVDTFEGYFGFYPTESRWRGYPAAPSEGSSPWGVAMVVVLLLLLASFHSTFQDMWKP

SEQ ID NO: 13666 - DNA, 856 bp, Triticum aestivum
  misc_feature (1)..(856): Ceres Seq. ID no. 13662695
cagctgccaccctgcccagttgctgttgcgcagcctccttcctctagtctcccctcttctccccctgttgccatctccaacctaatctttctcttctcgcggtctgcccgacggattccaaaagggctcgctcattcgggggaaaagctgttcgccgtggctcccagtctcatccatttcttgtctcttccaggaatctgtgaaattttgtgcctttaaaggcaatccagggtctggtcctgagctgtcggggctctatgtctaagtgggaacctgtcacatttgaggaatctcttagctttgttaagagagttaaggcccgtgactacttgttatacctgtcactgctcaatgtgctcacccggagtgatcagatccctctggaagcttacaacgagcttttacttcttttccgggatcacggagacctgctagaggagctagggaagttcagacccctcccctctttcccaagcactgtgtacagccacaacacaatctggatgttcatattccttatgccctttctgctcctgagccttctcctcgcgtttgagaagccgttggatagcttccttctccgataacccgtcgcgagctaaagatcagcactacgatgaaaatgaccggacacggaatgcgtgcatggactgctgtcttgtgatatcccctcagagcccattgccttattggtgcttttgtgatcatgttcatccttttgtgatccgcccgcataccggtgcgcggatagtatctctgaatctctcggaaggacagactaaatcgattgttttggcttgttcaagacaaacttcagtgtacaattgacaaactaaatgaaagagtttagttttac

SEQ ID NO: 13667 - protein, 109 aa, Triticum aestivum
  misc_feature (1)..(109): Ceres Seq. ID no. 13662696
MSKWEPVTFEESLSFVKRVKARDYLLYLSLLNVLTRSDQIPLEAYNELLLLFRDHGDLLEELGKFRPLPSFPSTVYSHNTIWMFIFLMPFLLLSLLLAFEKPLDSFLLR

SEQ ID NO: 13668 - protein, 72 aa, Triticum aestivum
  misc_feature (1)..(72): Ceres Seq. ID no. 13662697
QLPPCPVAVAQPPSSSLPSSPPVAISNLIFLFSRSARRIPKGLAHSGEKLFAVAPSLIHFLSLPGICEILCL

SEQ ID NO: 13669 - protein, 60 aa, Triticum aestivum
  misc_feature (1)..(60): Ceres Seq. ID no. 13662698
MDCCLVISPQSPLPYWCFCDHVHPFVIRPHTGARIVSLNLSEGQTKSIVLACSRQTSVYN

SEQ ID NO: 13670 - DNA, 496 bp, Triticum aestivum
  misc_feature (1)..(496): Ceres Seq. ID no. 13663935
aaaaacctccaaaacaattccaattcctcccctcccacagttccactccatccctcgcccccgcccctcctcgctccggagcctcctcccgggccaccgccatgctgcccgcgcgcttcctcaagctctcgctgctacgccgcctcggcaccgcccgtgcggccggagtgcccccgccgtggcagaccaggcaatttccggtgcggggttaccagcctcgaggttattctaccggaggaagctccaagtatgatagaccgatgagacagtttgctgaagataacgagtcaaattctcagccactaatatattacattgtcccatctgccattctagcctttgttggactagccacttatgttcactataatgatgagaggcgtgcagttcccttaggtaaacaagcacagcagaccagtattcccaaaaggtgcactaccaacagacctgcaatcggaggaccatttaagctctatgatacagaaaacaatgtggt

SEQ ID NO: 13671 - protein, 164 aa, Triticum aestivum
  misc_feature (1)..(164): Ceres Seq. ID no. 13663936
KPPKQFQFLPSHSSTPSLAPAPPRSGASSRATAMLPARFLKLSLLRRLGTARAAGVPPPWQTRQFPVRGYQPRGYSTGGSSKYDRPMRQFAEDNESNSQPLIYYIVPSAILAFVGLATYVHYNDERRAVPLGKQAQQTSIPKRCTTNRPAIGGPFKLYDTENNV

SEQ ID NO: 13672 - protein, 131 aa, Triticum aestivum
  misc_feature (1)..(131): Ceres Seq. ID no. 13663937
MLPARFLKLSLLRRLGTARAAGVPPPWQTRQFPVRGYQPRGYSTGGSSKYDRPMRQFAEDNESNSQPLIYYIVPSAILAFVGLATYVHYNDERRAVPLGKQAQQTSIPKRCTTNRPAIGGPFKLYDTENNV

SEQ ID NO: 13673 - protein, 87 aa, Triticum aestivum
  misc_feature (1)..(87): Ceres Seq. ID no. 13663938
KNLQNNSNSSPPTVPLHPSPPPLLAPEPPPGPPPCCPRASSSSRCYAASAPPVRPECPRRGRPGNFRCGVTSLEVILPEEAPSMIDR

SEQ ID NO: 13674 - DNA, 1762 bp, Triticum aestivum
  misc_feature (1)..(1762): Ceres Seq. ID no. 13664123
cgtattgaggtgatgcgttccctctgcaaggttttggactcaaacttcgaagataagttaaaagaactgggtcaatggaggagcttgacgagggaacgatagaatggaaaacggtcgagagcagattagagcggacgatacagacgctacttgaggtcagagatgagagatataagcagctgaaagagtgtgggactaaggtcatacaacagtggaaatcaaacgatgcaccagcatcaagaatcgttgatttttcagaagccttagcattttatgatgctgcatcggcaacagagtcatccacacagctcactggaagcaaagctctcaacatcgattcaattaagaatataaataaggaaattcttttgcaaaactcactagagctgaagaaattgaaaggaaagtttgacaggctcaagaataagttgttttctctgattcacaagaaccatcttcagttgagtctggcggattttgtttttgaaatgaaagttgagtcgaataaagattatttttctgcatgcaagaagttgaaagaggcgatctcaaatgtcaaagctcaggttgttaagaggaaggaaataattatgagaacagagatgctgaaattggctatagatcaatcaatgcccctggcaaatatcgaagggttcatccaagtgatcaaaagacaggtggatgtgttggttcaggatgaagggaaaccttacatttatgattgtgaagatataaattcaattctcgataagctccaatctattgcttctgagaagaaggctccgcaaaattcaggttccaagctgagaataaaagaacttgttccggaaaagggaatgcaggagaaagcttcaggaacctcaagagcaagttttagtctgtctgctgctaatgcgggtaaggaatctcgagagaagcccgcagcatgtctgagatcaagctcaaggctcaaggagaagcgaactcaaccggaactgcgaggaacaatgagtctgtctgtccaagtccttccacagcaggaatcatcaagctcccaaagtggagaagaagatcactcaggggaaacctcaagagcgagttccagtctgtctgctgctaatgcgttcaaggaatctggtgctgctgctcaaaagaagcccgcagctggtctgagatcaagttcgaggctcaaggagaagcaagctcaaccaaaactgcaaagaaagacgagagtgtctgtccaagtctttccacagcaggaatcatcaagctcccaaagtggagaagaagatcactcaggggaaagctcgctgcctgttgaaccgcaattgatagcttcattgccaccacatccaaggcagcccaggactcgaagagtggaaataccacctggtgaaggatgacaaaagctgacaaggtccgcaacttgatggaagtgaacatccaaaataaggggccagggctaggcgtaaggaattaaaaagcaacaaaaaacagagtgaatccaccagagtgagtgaatcggtagaagagggggcaataacatgaataacatacaagatccagaagcaagtctgttgtaggaatcttttgccaacaaacagaagattttgcgctgtaggaatcatgtagcgatcagatcagatgcagtagtcaaaattttgccaacagtagccaaaaattttctacttttttttgttgctcgcctgatttttcmcatatatggtcagatgcagtggggatttttttcgaaagtttttgccctgcagttgatttactgccc

SEQ ID NO: 13675 - protein, 435 aa, Triticum aestivum
  misc_feature (1)..(435): Ceres Seq. ID no. 15220727
MEELDEGTIEWKTVESRLERTIQTLLEVRDERYKQLKECGTKVIQQWKSNDAPASRIVDFSEALAFYDAASATESSTQLTGSKALNIDSIKNINKEILLQNSLELKKLKGKFDRLKNKLFSLIHKNHLQLSLADFVFEMKVESNKDYFSACKKLKEAISNVKAQVVKRKEIIMRTEMLKLAIDQSMPLANIEGFIQVIKRQVDVLVQDEGKPYIYDCEDINSILDKLQSIASEKKAPQNSGSKLRIKELVPEKGMQEKASGTSRASFSLSAANAGKESREKPAACLRSSSRLKEKRTQPELRGTMSLSVQVLPQQESSSSQSGEEDHSGETSRASSSLSAANAFKESGAAAQKKPAAGLRSSSRLKEKQAQPKLQRKTRVSVQVFPQQESSSSQSGEEDHSGESSLPVEPQLIASLPPHPRQPRTRRVEIPPGEG

SEQ ID NO: 13676 - protein, 297 aa, Triticum aestivum
  misc_feature (1)..(297): Ceres Seq. ID no. 15220728
MKVESNKDYFSACKKLKEAISNVKAQVVKRKEIIMRTEMLKLAIDQSMPLANIEGFIQVIKRQVDVLVQDEGKPYIYDCEDINSILDKLQSIASEKKAPQNSGSKLRIKELVPEKGMQEKASGTSRASFSLSAANAGKESREKPAACLRSSSRLKEKRTQPELRGTMSLSVQVLPQQESSSSQSGEEDHSGETSRASSSLSAANAFKESGAAAQKKPAAGLRSSSRLKEKQAQPKLQRKTRVSVQVFPQQESSSSQSGEEDHSGESSLPVEPQLIASLPPHPRQPRTRRVEIPPGEG

SEQ ID NO: 13677 - protein, 263 aa, Triticum aestivum
  misc_feature (1)..(263): Ceres Seq. ID no. 15220729
MRTEMLKLAIDQSMPLANIEGFIQVIKRQVDVLVQDEGKPYIYDCEDINSILDKLQSIASEKKAPQNSGSKLRIKELVPEKGMQEKASGTSRASFSLSAANAGKESREKPAACLRSSSRLKEKRTQPELRGTMSLSVQVLPQQESSSSQSGEEDHSGETSRASSSLSAANAFKESGAAAQKKPAAGLRSSSRLKEKQAQPKLQRKTRVSVQVFPQQESSSSQSGEEDHSGESSLPVEPQLIASLPPHPRQPRTRRVEIPPGEG

SEQ ID NO: 13678 - DNA, 754 bp, Triticum aestivum
  misc_feature (1)..(754): Ceres Seq. ID no. 13664390
ggtgcgccgtccccctgagccactccccgccatggagtccaacgatggcgcatatccttgatccattggattaatccaccactggaagcagcagcctagtcaccattcctactctgacatcccctcaacgtgaagctggtgagataccagtatcacaggctgagcccatgaatatagaatcagttgtcatagaggaagacagcgaagaagatgaagcaaaagcggaagaaaatgaagcagaagaagtagtcgttcgtcctaggaggaagttgacatctcctgtttggaaggagtttaagaaagtaaaagtgatgaacagaatgaaggccaagtgtaactggtgctcaaagaagcttggaggggaaccaagaaatggaacgaagcatctccttgaccatttaaagattgtacatggaaagaaggtttagagcgcatcacactatagaggcggttccttctgtacttactacaagtcagctcaacttcaacaaataatgatgccgaacacataccaaggctgtagctgttagcttgctacctctgcaatacttttgcgcatgatcatgtttaccttaagttagttatggtcacatggaaccttatgttggagtcaataaattatgtcaagtgagccagacaaatttcgtagtcaataaattatgtcaaatgagtcggacaaaattttgtccttattaaatgtggtgtttgtatgaatactctcttcaagcgtgtgctcaagctattcaatattttt

SEQ ID NO: 13679 - protein, 86 aa, Triticum aestivum
  misc_feature (1)..(86): Ceres Seq. ID no. 13664391
MNIESVVIEEDSEEDEAKAEENEAEEVVVRPRRKLTSPVWKEFKKVKVMNRMKAKCNWCSKKLGGEPRNGTKHLLDHLKIVHGKKV

SEQ ID NO: 13680 - DNA, 1396 bp, Triticum aestivum
  misc_feature (1)..(1396): Ceres Seq. ID no. 14301514
gttgattaccaaagactagtcctggtgttgccgcttttcactttccccctcccccctctcatcggatctggactctggagaggagacgagattcgccggcgatggcagaggagtcgtgggaggagggtcgggggttggacttcctcgagagcctgggcccggacatctccgccaccgtcttcagcctgctcgacgaccccgccgacctcgcgcgcgccaccaccgtctcccgctcctggcgccgattcgttattgcaaaccagttcagcaagatcctgtgcctgcgggtttatccggaggtgtccaacttcacacgtgttgagttgagcagcatcagcagtgcacaccgaaatgctggatcaagtgcttgtgctgggctggagaagctcgggagggatcatagggtgtatatgcatcttagccatggccttctctcgccgtacgaccccaaggattgcatcagtcactgcatgggcgcatccagcactgatcgtttccctgaggaggccatagaaaataccattgaaccggttgatcgtcaggagagtaaactgtcttattggtcgagtggtggccagaaagatcctgctgtgccagaatgcctgatatatagccttcagtcagagctgtgtcttgttgatgaaatcaggatacggccattaaaagcattttttcgatatggtcatccgatatattcagcaaaacacgtccggttccgcttgggctatctaaaaccaccccactggtctgaaacacatgtatatgttgaaagtgatgcggagctgattgatgatagcaactatatctggacgtacacatctccagaatttccaatgctacaggaaaatgtgatgcagtcttttaagctaccacactcagttctatgtattggtggagtggtgaagattgagcttcttggcagggtccacaaggacacgtttgatggtcggtactacatatgtgtgtctcatgtccaactagtcgggaagccactgtcagaagattttggggtcgccccgagcaaaaatgatgtagttctcagttactatctggattatcgtagattcgggggacgatcacagcaaagtacatgactttgcgatgaggatctggcacttcggtatgtcttgagggataggagaactgaaccatgagtgttagcacgctgtcctgtgggtacataaaagagatgcaacagaggagaagcttccatacaagtgaagcatatctcgtcgagctcgtgtctatcggtttcgaataaaagaagtcctttgtgatcccgtgggaaactgaaaatgtatttgtttgtgtaactgacaaggacgaaagagacgcatgattgactcgcttgttataaaatcactgctaatattattaagatcgagtgagtccatct

SEQ ID NO: 13681 - protein, 330 aa, Triticum aestivum
  misc_feature (1)..(330): Ceres Seq. ID no. 14301515
MAEESWEEGRGLDFLESLGPDISATVFSLLDDPADLARATTVSRSWRRFVIANQFSKILCLRVYPEVSNFTRVELSSISSAHRNAGSSACAGLEKLGRDHRVYMHLSHGLLSPYDPKDCISHCMGASSTDRFPEEAIENTIEPVDRQESKLSYWSSGGQKDPAVPECLIYSLQSELCLVDEIRIRPLKAFFRYGHPIYSAKHVRFRLGYLKPPHWSETHVYVESDAELIDDSNYIWTYTSPEFPMLQENVMQSFKLPHSVLCIGGVVKIELLGRVHKDTFDGRYYICVSHVQLVGKPLSEDFGVAPSKNDVVLSYYLDYRRFGGRSQQST

SEQ ID NO: 13682 - protein, 227 aa, Triticum aestivum
  misc_feature (1)..(227): Ceres Seq. ID no. 14301516
MHLSHGLLSPYDPKDCISHCMGASSTDRFPEEAIENTIEPVDRQESKLSYWSSGGQKDPAVPECLIYSLQSELCLVDEIRIRPLKAFFRYGHPIYSAKHVRFRLGYLKPPHWSETHVYVESDAELIDDSNYIWTYTSPEFPMLQENVMQSFKLPHSVLCIGGVVKIELLGRVHKDTFDGRYYICVSHVQLVGKPLSEDFGVAPSKNDVVLSYYLDYRRFGGRSQQST

SEQ ID NO: 13683 - protein, 207 aa, Triticum aestivum
  misc_feature (1)..(207): Ceres Seq. ID no. 14301517
MGASSTDRFPEEAIENTIEPVDRQESKLSYWSSGGQKDPAVPECLIYSLQSELCLVDEIRIRPLKAFFRYGHPIYSAKHVRFRLGYLKPPHWSETHVYVESDAELIDDSNYIWTYTSPEFPMLQENVMQSFKLPHSVLCIGGVVKIELLGRVHKDTFDGRYYICVSHVQLVGKPLSEDFGVAPSKNDVVLSYYLDYRRFGGRSQQST

SEQ ID NO: 13684 - DNA, 710 bp, Triticum aestivum
  misc_feature (1)..(710): Ceres Seq. ID no. 14301711
catttcgtcatccccaaccccccctacacactgactcgccacaagcggagcagagaggccgcgccatggcccgcatctagggaccgaggaggaggagaagcagcccagtagacgcaggcaggatggggcgcgcgttcgtgtacgtcgtccttggcggcggcgtggccgcgggctacgcggcgctcgagttcgcccgccgcggcggctactcccgcggcgagctctgcatcatctccgaagaggccgtgagcgctcccttccccgtcccgagttcggtcccctcctgtagtattttgtcagcttcagaactccctctgtaatcgagtcgtagttgtccgtcagtggataggacggcgccaccggtgcttcggattggtgggtttcttgcgcttccaactgtattaggaaggatttatttgtggttgcttcagccgacaagccaggaatgcttacgttttgttgccttcgagacgatgtatggcttattagagccttgatttgcctggataattttgtcacgaccctagcagggtgctatttagggacacacatagtagcctgcactgcagttcggtaactgaaaaatggcgactgaggtagcaatgggggaaaatgggttagttttgatcctctgtctgacctctaaggaatcatgtatgttccaactatgcattttgtgcctagtttgtaggaatttcccttcaaggagc

SEQ ID NO: 13685 - protein, 65 aa, Triticum aestivum
  misc_feature (1)..(65): Ceres Seq. ID no. 14301712
MGRAFVYVVLGGGVAAGYAALEFARRGGYSRGELCIISEEAVSAPFPVPSSVPSCSILSASELPL

SEQ ID NO: 13686 - protein, 43 aa, Triticum aestivum
  misc_feature (1)..(43): Ceres Seq. ID no. 14301713
MLTFCCLRDDVWLIRALICLDNFVTTLAGCYLGTHIVACTAVR

SEQ ID NO: 13687 - protein, 42 aa, Triticum aestivum
  misc_feature (1)..(42): Ceres Seq. ID no. 14301714
MATEVAMGENGLVLILCLTSKESCMFQLCILCLVCRNFPSRS

SEQ ID NO: 13688 - DNA, 1461 bp, Triticum aestivum
  misc_feature (1)..(1461): Ceres Seq. ID no. 14313350
aagagaccacacacgaccgtccaacgcatcccctctctacccctcaaaagatggccggctggacctccatcccggcggagctactcgcggaaatctccggccgcctgccaggtgacgcggaccggatccacatccatcaggtatgctcccactggcgcgcatccacttcccggctggccgcctgccgtccatggatcatcgccggccgcgaaccatggagcctggttggcccggtcggcgaacactcgttttggctgccccttggcggccgacggatctacttgggcacgcccacgccggcgggcctaccatattgctgcggcacgccccttggctggcttgctctcatggacaacctgcaatccccaacgcggtttgtcctctgggagcccctctctgaagctgagatctttctgccctgtttgcccgccgttgtccaagtcttcctctcaggagacccgctcacctcgcctgactggatggcgattgcaagccagaagctctacagcactggcacttgcatgggccagacgctcttcttctggcggcctggagatgccgcatggactatgcagctcgagcggccaaacggcagaatcgatagctcagcattccatcaggggaaattctacttcaccgacatcgggtggacccttcacgtctatgatcttgaccgctcccctcccaagcttgtccggagcacgtacctttacagtgctctgcgagagcgccatggatttcggcagttccctggcggtggcaggccggcgtggtatgtggtcgcattcaatggcgagttgctgcttgttgtgatgtaccgtgcgcccaacataaaggctgtcgaagtttaccgcccggattgggcagcggagcgcctggagctgcgggacaaggtcacggatctcggcgagtactcgctcttcttgggccgcggtgatgcgtttgccctctgtgcaaaggacttcactatgatcaggagaaattgtctctactttgtagagcacgatacagtcaagcatcaagattgggctattgtgttagacttggggtcaaatgttttccaacaaattccatatcccggagagcagatggagggcacgggcagaaataatcactggacggcgtattcgtggttctgtctcagaagacccttcttgaagggtgaagcccagtaaggtggtagatcttcactgaccatcttattatatgaaagtaaccgaatcagtattggagcagcaacagagcttcccatgtttgaatgatctaaacaccacaccaacaccagcacgtatgtcttgtcacttcagattattcctcccatgaatccttgttgaatcatggactccaacagcccaattactaaccctttggcatagaagtgttaagagctgatttatactcctagatagcaccattgttgtatctctatttctcttgctactaatataactgtcattatac

SEQ ID NO: 13689 - protein, 390 aa, Triticum aestivum
  misc_feature (1)..(390): Ceres Seq. ID no. 14313351
ETTHDRPTHPLSTPQKMAGWTSIPAELLAEISGRLPGDADRIHIHQVCSHWRASTSRLAACRPWIIAGREPWSLVGPVGEHSFWLPLGGRRIYLGTPTPAGLPYCCGTPLGWLALMDNLQSPTRFVLWEPLSEAEIFLPCLPAVVQVFLSGDPLTSPDWMAIASQKLYSTGTCMGQTLFFWRPGDAAWTMQLERPNGRIDSSAFHQGKFYFTDIGWTLHVYDLDRSPPKLVRSTYLYSALRERHGFRQFPGGGRPAWYVVAFNGELLLVVMYRAPNIKAVEVYRPDWAAERLELRDKVTDLGEYSLFLGRGDAFALCAKDFTMIRRNCLYFVEHDTVKHQDWAIVLDLGSNVFQQIPYPGEQMEGTGRNNHWTAYSWFCLRRPFLKGEAQ

SEQ ID NO: 13690 - protein, 374 aa, Triticum aestivum
  misc_feature (1)..(374): Ceres Seq. ID no. 14313352
MAGWTSIPAELLAEISGRLPGDADRIHIHQVCSHWRASTSRLAACRPWIIAGREPWSLVGPVGEHSFWLPLGGRRIYLGTPTPAGLPYCCGTPLGWLALMDNLQSPTRFVLWEPLSEAEIFLPCLPAVVQVFLSGDPLTSPDWMAIASQKLYSTGTCMGQTLFFWRPGDAAWTMQLERPNGRIDSSAFHQGKFYFTDIGWTLHVYDLDRSPPKLVRSTYLYSALRERHGFRQFPGGGRPAWYVVAFNGELLLVVMYRAPNIKAVEVYRPDWAAERLELRDKVTDLGEYSLFLGRGDAFALCAKDFTMIRRNCLYFVEHDTVKHQDWAIVLDLGSNVFQQIPYPGEQMEGTGRNNHWTAYSWFCLRRPFLKGEAQ

SEQ ID NO: 13691 - protein, 275 aa, Triticum aestivum
  misc_feature (1)..(275): Ceres Seq. ID no. 14313353
MDNLQSPTRFVLWEPLSEAEIFLPCLPAVVQVFLSGDPLTSPDWMAIASQKLYSTGTCMGQTLFFWRPGDAAWTMQLERPNGRIDSSAFHQGKFYFTDIGWTLHVYDLDRSPPKLVRSTYLYSALRERHGFRQFPGGGRPAWYVVAFNGELLLVVMYRAPNIKAVEVYRPDWAAERLELRDKVTDLGEYSLFLGRGDAFALCAKDFTMIRRNCLYFVEHDTVKHQDWAIVLDLGSNVFQQIPYPGEQMEGTGRNNHWTAYSWFCLRRPFLKGEAQ

SEQ ID NO: 13692 - DNA, 680 bp, Triticum aestivum
  misc_feature (1)..(680): Ceres Seq. ID no. 15174078
aacaaccctagtaccatctaacatccacggatcgccgccacctctcctctaggaccgacaaagtccgccggtcctaacctcctgaccccgccttgccgtgggcgctggcgttggggagacctgctccggcgttattcctccacagcggccacctagcacgacgggtcgacgagcagggttgtcaccggatctggcgactccaagaatgaccgccagcggatctggtgagtcatgaagcccacgaccagatgtgtccacccccgagccgtgacaagcatgatggttgaagagcaacgacgattgctcttcttctggacctccgtcgagtatctgccatttgacggtttccgcgggctagaccttggcagtggtctagtcatatcaaaagcatcatcgaagatctcggagcatctcccttcatcgtccacctgcatttaccaactgaacctaccaatgtatacctccttcgccatgatgttgagccggctacagaagatcacccaggagcatgtgagcaacagctttggtgagatatgatcttcggtgatgatcttctccgggaaagaactcaaaaggtgttcacatgcatttgcagactaaattaagagtgaatttttgtttttcccctaaattgacagttgtgacattactcatccctttagtataatttcattcggtat

SEQ ID NO: 13693 - protein, 101 aa, Triticum aestivum
  misc_feature (1)..(101): Ceres Seq. ID no. 15174079
MKPTTRCVHPRAVTSMMVEEQRRLLFFWTSVEYLPFDGFRGLDLGSGLVISKASSKISEHLPSSSTCIYQLNLPMYTSFAMMLSRLQKITQEHVSNSFGEI

SEQ ID NO: 13694 - protein, 86 aa, Triticum aestivum
  misc_feature (1)..(86): Ceres Seq. ID no. 15174080
MMVEEQRRLLFFWTSVEYLPFDGFRGLDLGSGLVISKASSKISEHLPSSSTCIYQLNLPMYTSFAMMLSRLQKITQEHVSNSFGEI

SEQ ID NO: 13695 - protein, 85 aa, Triticum aestivum
  misc_feature (1)..(85): Ceres Seq. ID no. 15174081
MVEEQRRLLFFWTSVEYLPFDGFRGLDLGSGLVISKASSKISEHLPSSSTCIYQLNLPMYTSFAMMLSRLQKITQEHVSNSFGEI

SEQ ID NO: 13696 - DNA, 855 bp, Triticum aestivum
  misc_feature (1)..(855): Ceres Seq. ID no. 15178538
tcctctcttatcccgattcacccctcgtctccctcccatcccacgctaccgccgcccaccaccccggcgacctccccactggcgatccccggcctctccctctccttctcccctgcatcttcctccgaggcgcggcaaggggaggccgccgtcgtcgccgccgccgcgcgcgatccgggagggcaagaggggaggcggacgcgggcgaggagatggcatcggaggacgtggtggggaagagcaggggcggcacggccatcaacaccatcgtcaacctggctgaggaggccaagctcgcgcgcgagggcgtcaagggccccggccaccaggtcctcaccgtctgcaagtccctcttcgccggaggcgtcgccggcggcctttcattgatgacagccaagggttcatgctcggaaacgactacatcttgctctacgttgtcggctcagctagagtccttaatcatgaggagatgggacacgtcgattgttagagtacacttgacaggggtgaccgacgctgactagcgcagccggtgggcgttgtgctcttcaaccactcagaggcggacttctccgtgaagctggtggccatgtcgcatagatgattgtccaggtgatttcaacgccggaggtcgccgaggtggtggacctcgacgccaccgtccgggggagggaggattcgggtccaccgacgtctaagctccgagccttggtagatacatctagggaagttgtctgtttaggttgatgatggaacaccagggaaggtacccacctttcgatgatcattgtgtgtgtctgaagttaaatggaatcttgagaatgttatgtgatgttggcaaaaaaaaaaaaaaaa

SEQ ID NO: 13697 - protein, 173 aa, Triticum aestivum
  misc_feature (1)..(173): Ceres Seq. ID no. 15178539
LSYPDSPLVSLPSHATAAHHPGDLPTGDPRPLPLLLPCIFLRGAARGGRRRRRRRARSGRARGEADAGEEMASEDVVGKSRGGTAINTIVNLAEEAKLAREGVKGPGHQVLTVCKSLFAGGVAGGLSLMTAKGSCSETTTSCSTLSAQLESLIMRRWDTSIVRVHLTGVTDAD

SEQ ID NO: 13698 - protein, 128 aa, Triticum aestivum
  misc_feature (1)..(128): Ceres Seq. ID no. 15178540
SSLIPIHPSSPSHPTLPPPTTPATSPLAIPGLSLSFSPASSSEARQGEAAVVAAAARDPGGQEGRRTRARRWHRRTWWGRAGAARPSTPSSTWLRRPSSRARASRAPATRSSPSASPSSPEASPAAFH

SEQ ID NO: 13699 - protein, 103 aa, Triticum aestivum
  misc_feature (1)..(103): Ceres Seq. ID no. 15178541
MASEDVVGKSRGGTAINTIVNLAEEAKLAREGVKGPGHQVLTVCKSLFAGGVAGGLSLMTAKGSCSETTTSCSTLSAQLESLIMRRWDTSIVRVHLTGVTDAD

SEQ ID NO: 13700 - DNA, 1580 bp, Triticum aestivum
  misc_feature (1)..(1580): Ceres Seq. ID no. 15224517
gactttcgtgcaaacatccattcttcctctcagccttaagcgaaaaaaccctagcactggacgacctccaaaaccctagagccgtccccaatggcgagccacgaaaccgacccgtcccctgccgccccctccaagaagaagaagaggcactccaagaagcgcaaggccatcgaagtcactgtagatgcctcctttcctggcgccgccgcccccgtcgtcggctactttccgacgggctacgacccccttgcggccgcagagcccccacgtgcgcggttgttccgccacgagaagcaccataaccgcgtcgagctagtggtccgcgcccctggtggaggccccgacttcgtcggccggagctacgccggcgaggccgctgcgccgcagctctgcggctacgccctcggcgtcctcgacaaggccaccagcactctgaagattgtccccatcgcctccaacaagattttgaggctagagccacactttgaagtgcagcaaccggctcattcacaacagtcagcagcagaagcaggttcttctgtagcagatactgaattgaacagacaagatcttacccaggcttatgggaccaagaaagataaggataaggataataagtggaagtcactaaaagaacaaaggaatgacccttctgcttatttggaccttgatcttggagagtccaagaccactgcagatgccactgatagtcaggcatcaatggaagttcgcaacattccaccttatgatcctgctgcagatacatctgaaaaggcatatctttttgatgagatcattccaaaaaatatacggccacaccttcttgatattgtgggacactttgaatcgggagaatttggtttgaaaggctatgggagttttgtctcgaatcgtgtgaataagttgcaggaacttcagggtgaagatcaggaaaggcttgcttggatactatcctatatcacacatctcctgtccttgttggcgcgcaacagctccatgtccaagcagaaaagaaaagaaaaagaccagaccatccgtggaccaatgatcccacaggcggtgcaccgcaagctgttgctgatgttcacggagccagggtcttcttccttgtcgacagagaaacacgagcttctgatcaattacattttagtactcacactttttgctgatgacttcagatctgaacctacggatatatgtgcggacttgaaaatgaaccgccagatgcttaaaccatattatgaccagctgggatgcaagtccgtgtcaacaggtgcttttaaaccagtttttatgacacttccagcacccctcaagttcccacaacaagtcacaaggagaaggcggcgaaaataaccatcttagttattggtttccatttgatatggttgtgataggaaaggtatgcattgccaccgtcgaacctatgtgccctcagctcagtttcaccaatgtagtggagaaaatgatgaaggtggttgttctgtttttgttttctattgtcacttgggaattgctacgagaggaaccatattactgatatataatttgcttgctaccgaaatttgttttttgatgct

SEQ ID NO: 13701 - protein, 421 aa, Triticum aestivum
  misc_feature (1)..(421): Ceres Seq. ID no. 15224518
MASHETDPSPAAPSKKKKRHSKKRKAIEVTVDASFPGAAAPVVGYFPTGYDPLAAAEPPRARLFRHEKHHNRVELVVRAPGGGPDFVGRSYAGEAAAPQLCGYALGVLDKATSTLKIVPIASNKILRLEPHFEVQQPAHSQQSAAEAGSSVADTELNRQDLTQAYGTKKDKDKDNKWKSLKEQRNDPSAYLDLDLGESKTTADATDSQASMEVRNIPPYDPAADTSEKAYLFDEIIPKNIRPHLLDIVGHFESGEFGLKGYGSFVSNRVNKLQELQGEDQERLAWILSYITHLLSLLARNSSMSKQKRKEKDQTIRGPMIPQAVHRKLLLMFTEPGSSSLSTEKHELLINYILVLTLFADDFRSEPTDICADLKMNRQMLKPYYDQLGCKSVSTGAFKPVFMTLPAPLKFPQQVTRRRRRK

SEQ ID NO: 13702 - protein, 211 aa, Triticum aestivum
  misc_feature (1)..(211): Ceres Seq. ID no. 15224519
MEVRNIPPYDPAADTSEKAYLFDEIIPKNIRPHLLDIVGHFESGEFGLKGYGSFVSNRVNKLQELQGEDQERLAWILSYITHLLSLLARNSSMSKQKRKEKDQTIRGPMIPQAVHRKLLLMFTEPGSSSLSTEKHELLINYILVLTLFADDFRSEPTDICADLKMNRQMLKPYYDQLGCKSVSTGAFKPVFMTLPAPLKFPQQVTRRRRRK

SEQ ID NO: 13703 - DNA, 595 bp, Triticum aestivum
  misc_feature (1)..(595): Ceres Seq. ID no. 15225794
cccaagcatgagctcctctcccccgctctcctccacccctcccatggccgcccccagctcctgggcctccccgttccacgaaaagagagcttagcgctgccgagccctccgtcctctccacttcccggctgctttctccgtccgtccggtcgtcaatcttcgtcgagcagagagagggagggaggaggtcgtcagattcgcgcgagatccatggggaagtacgtggagctgctggacatgggggtgcgcatcgccgcgcggttccactcccactgcccgcagacggcccgcatgtactaccacccccccgcctcctcctccgccgcccccggcgccggcgacggcggccggatggtgcccggagaaggcgccgtggccatggccatgatgaagaggcagcagcgggccgccatcgacgccacggagatcatcctctacaccgtcgtctaggccggccggttgctgctgcgctcatccggatttatcgtaccattgaagggagagagagatgctatcttattttattgttacctttgttttattttcgaatcgaggagagggaaatgaaagacgggagtgaatgttcgattgattg

SEQ ID NO: 13704 - protein, 149 aa, Triticum aestivum
  misc_feature (1)..(149): Ceres Seq. ID no. 15225795
PKHELLSPALLHPSHGRPQLLGLPVPRKESLALPSPPSSPLPGCFLRPSGRQSSSSREREGGGRQIRARSMGKYVELLDMGVRIAARFHSHCPQTARMYYHPPASSSAAPGAGDGGRMVPGEGAVAMAMMKRQQRAAIDATEIILYTVV

SEQ ID NO: 13705 - protein, 79 aa, Triticum aestivum
  misc_feature (1)..(79): Ceres Seq. ID no. 15225796
MGKYVELLDMGVRIAARFHSHCPQTARMYYHPPASSSAAPGAGDGGRMVPGEGAVAMAMMKRQQRAAIDATEIILYTVV

SEQ ID NO: 13706 - DNA, 457 bp, Zea mays subsp. mays
  misc_feature (1)..(457): Ceres Seq. ID no. 2790016
gccgcctccacctcttcctacgcttccttgtctccaccgcgagcgacctccatacaacggtgtcagcggcctccctacgccaccgtcctcatccgccgccgtcgtccactacaccgccacggtcgtcctcggtcgcgacgcgcccttcgttctcatccagcgccacggtctagggcatgacctattgatcaggaaagttgtagcagacacgttcgtcgtcgcgaacatcgtcgagccgtgtggctactgcgctggccggtgagcatcgtcaagtcgtgtggctgctgcccctgaccagcacgatgcgtctctggtctcccatgatgattagatggcacctgatcaccgcgtctctgaacacctgatcaccgggagctcttcatatttaagaaggcatggaacatcagtgcttcacaagagtttatggtgtctacacattattatgacattgaagaag

SEQ ID NO: 13707 - protein, 86 aa, Zea mays subsp. mays
  misc_feature (1)..(86): Ceres Seq. ID no. 2790017
PPPPLPTLPCLHRERPPYNGVSGLPTPPSSSAAVVHYTATVVLGRDAPFVLIQRHGLGHDLLIRKVVADTFVVANIVEPCGYCAGR

SEQ ID NO: 13708 - protein, 59 aa, Zea mays subsp. mays
  misc_feature (1)..(59): Ceres Seq. ID no. 2790018
AASTSSYASLSPPRATSIQRCQRPPYATVLIRRRRPLHRHGRPRSRRALRSHPAPRSRA

SEQ ID NO: 13709 - protein, 56 aa, Zea mays subsp. mays
  misc_feature (1)..(56): Ceres Seq. ID no. 2790019
RLHLFLRFLVSTASDLHTTVSAASLRHRPHPPPSSTTPPRSSSVATRPSFSSSATV

SEQ ID NO: 13710 - DNA, 478 bp, Zea mays subsp. mays
  misc_feature (1)..(478): Ceres Seq. ID no. 3625774
tcaatgctccacatgtagatcaacraattactgcttcagatacaagctcactttcaaggcatcagatggaactgaagaagctgaaatgtttgcattcgacaatgttgctaggacaattattgggaaaccatgtccaacagttgttgcatcctttcctgatgcatcagctatcccacctgaaattgcagcaatagtttcacggaaatacacattcattatagaattcaacagccagtcattcagatttctagaaaaaacattgctcatcaaaggaattgtagcatcatatggaagaatgacatcactaccaatagtacaagaaaaagatgatgtgcaacttcctctcactccaacaaaaaacaaactgataacaacagctgccgaatctccttctacacccatgtctagactttccacagcagactcaccaagcatgccccgaaagctgacatattctccagcaaagaataagccttag

SEQ ID NO: 13711 - protein, 158 aa, Zea mays subsp. mays
  misc_feature (1)..(158): Ceres Seq. ID no. 3625775
  misc_feature (8)..(8): Xaa is any aa, unknown or other
QCSTCRSXNYCFRYKLTFKASDGTEEAEMFAFDNVARTIIGKPCPTVVASFPDASAIPPEIAAIVSRKYTFIIEFNSQSFRFLEKTLLIKGIVASYGRMTSLPIVQEKDDVQLPLTPTKNKLITTAAESPSTPMSRLSTADSPSMPRKLTYSPAKNKP

SEQ ID NO: 13712 - protein, 130 aa, Zea mays subsp. mays
  misc_feature (1)..(130): Ceres Seq. ID no. 3625776
MFAFDNVARTIIGKPCPTVVASFPDASAIPPEIAAIVSRKYTFIIEFNSQSFRFLEKTLLIKGIVASYGRMTSLPIVQEKDDVQLPLTPTKNKLITTAAESPSTPMSRLSTADSPSMPRKLTYSPAKNKP

SEQ ID NO: 13713 - DNA, 328 bp, Zea mays subsp. mays
  misc_feature (1)..(328): Ceres Seq. ID no. 5682557
ggcacagcgccgtcgagtgcgtcgaccagtccccgccgccgcccgaggaggctgcascggcgaggtccgcggaggaggcgacggcgccaccgccggggctgggaggtgtgcggcggtttgcgtcggggaggcgagcggcggagtgggcggccaaggtggaggacgacgggcgcgtggcgagatctgggccgttgtagcagcaccgtgcaggcagaggcagcggtggttgaggtgtggctttcggtttggttgcgcccgtgctttagttgtagttgagctgtgtacatacgtgcttctgttcaaatccgtagaaatttgatgcttgggc

SEQ ID NO: 13714 - protein, 105 aa, Zea mays subsp. mays
  misc_feature (1)..(105): Ceres Seq. ID no. 5682558
  misc_feature (19)..(19): Xaa is any aa, unknown or other
AQRRRVRRPVPAAARGGCXGEVRGGGDGATAGAGRCAAVCVGEASGGVGGQGGGRRARGEIWAVVAAPCRQRQRWLRCGFRFGCARALVVVELCTYVLLFKSVEI

SEQ ID NO: 13715 - protein, 91 aa, Zea mays subsp. mays
  misc_feature (1)..(91): Ceres Seq. ID no. 5682559
  misc_feature (19)..(19): Xaa is any aa, unknown or other
GTAPSSASTSPRRRPRRLXRRGPRRRRRRHRRGWEVCGGLRRGGERRSGRPRWRTTGAWRDLGRCSSTVQAEAAVVEVWLSVWLRPCFSCS

SEQ ID NO: 13716 - protein, 64 aa, Zea mays subsp. mays
  misc_feature (1)..(64): Ceres Seq. ID no. 5682560
  misc_feature (19)..(19): Xaa is any aa, unknown or other
HSAVECVDQSPPPPEEAAXARSAEEATAPPPGLGGVRRFASGRRAAEWAAKVEDDGRVARSGPL

SEQ ID NO: 13717 - DNA, 412 bp, Zea mays subsp. mays
  misc_feature (1)..(412): Ceres Seq. ID no. 5685314
acttaatgattgtaggattgattgtgtacttaggtgtaggaattgtttgaaaccctagttgcatgatctcaggaatccttttgagatgaatactagcatgacaggtcgagtagttgctttatttaatcaggatctcggtagaagacgagtgatttttctagcactcgcgcgagattaggaaattgattgtacccactttcacactgtcatgatactaattggtggacaacaatccatggggattggttgttcacgagatggaaaatggaataaggattaacgtgcggatacctgtgtcaagcgtttgaacgtactgaacacataccgagaaatatggtaaatcggtaagcctagtacctgagtgaacctgcccgcagattgccctcctcacgcgacctgagacgaggtctcc

SEQ ID NO: 13718 - protein, 30 aa, Zea mays subsp. mays
  misc_feature (1)..(30): Ceres Seq. ID no. 5685315
MNTSMTGRVVALFNQDLGRRRVIFLALARD

SEQ ID NO: 13719 - DNA, 544 bp, Zea mays subsp. mays
  misc_feature (1)..(544): Ceres Seq. ID no. 5697138
cgtacgcgggcacggcgagctcgcgggtcacgtcgagcagcsccgtgcagaagaagtccataacgmccgctgccmccggggaagccaggctggagatasccgccctgacgtggggcgcgtgcagctgtaccagcctggagatgaactcctcgatgccgtggaagtccgtcgggggctgaacggcggggaggcggacgaagcggacgtcgaggcccgatgcctcctccctgcgtatgtgggcgtcgagatcggccgcgagctgctccgtgggcgctcgcatgacgagcacggtgagcgagagcgcgcgacccccgcgggtgagcagccgcttgccggcgtcgagcatggacatgaggtggccagcaccccacacgggcagtaagacgacggtaggggctgccatggatggatcgggacggggtaggaagatgctaggatttgtttgaggaagttgggagaagttaaagccctgtaggttccacgagtggctgtcgtccacgatgccaaacgttattaaagaaaaataggtgagatttcaattcgc

SEQ ID NO: 13720 - protein, 126 aa, Zea mays subsp. mays
  misc_feature (1)..(126): Ceres Seq. ID no. 5697139
  misc_feature (14)..(14): Xaa is any aa, unknown or other
  misc_feature (22)..(22): Xaa is any aa, unknown or other
  misc_feature (25)..(25): Xaa is any aa, unknown or other
  misc_feature (33)..(33): Xaa is any aa, unknown or other
VRGHGELAGHVEQXRAEEVHNXRCXRGSQAGDXRPDVGRVQLYQPGDELLDAVEVRRGLNGGEADEADVEARCLLPAYVGVEIGRELLRGRSHDEHGERERATPAGEQPLAGVEHGHEVASTPHGQ

SEQ ID NO: 13721 - protein, 70 aa, Zea mays subsp. mays
  misc_feature (1)..(70): Ceres Seq. ID no. 5697140
MWASRSAASCSVGARMTSTVSESARPPRVSSRLPASSMDMRWPAPHTGSKTTVGAAMDGSGRGRKMLGFV

SEQ ID NO: 13722 - DNA, 434 bp, Zea mays subsp. mays
  misc_feature (1)..(434): Ceres Seq. ID no. 11028050
caccgttgtagcaagttctcccatctagcaacaccataatcgcaggagaatcgctgctccaccagactcggtttcctcttgcttcagcgtcaaaatcatggccgcagctggcaagtcgtcgtcggccatggaggagacggttgcggcgacggccgccgcgcgggggcggcgcgggattgaccggcaggccgtcgacaggggcatcgcctacctgctcatggtggccgccctcgtcgccacctacgcgcttcactagattttgatctgctccggcgcgggcagacctcacaggaaggaaggcttttgtgcgcttctgcttcccgccggcctcagcctcttcagagttcccctgcaccaaacttcattcgttcgtcttccaaccttgtattgtatggagaaactyggagatggagatgcatgtgtctgtgtgctac

SEQ ID NO: 13723 - protein, 52 aa, Zea mays subsp. mays
  misc_feature (1)..(52): Ceres Seq. ID no. 11028051
MAAAGKSSSAMEETVAATAAARGRRGIDRQAVDRGIAYLLMVAALVATYALH

SEQ ID NO: 13724 - protein, 42 aa, Zea mays subsp. mays
  misc_feature (1)..(42): Ceres Seq. ID no. 11028052
MEETVAATAAARGRRGIDRQAVDRGIAYLLMVAALVATYALH

SEQ ID NO: 13725 - DNA, 1404 bp, Zea mays subsp. mays
  misc_feature (1)..(1404): Ceres Seq. ID no. 12340650
  misc_feature (1021)..(1021): n is a, c, t, g, unknown, or other
agggaaatatctacatctcgtctgcgccgccgctgggatttattagggttctacttctagcccgggccgactccactccaatccaatcctggggcgagcgactgcctccttccctcgatctattccccatcttgtcctccctttgctaaaaataacgaggcagaggcatcttcgatttgacgtgcgcttcctcttcctcgctcgctctcggtcgcagtgatggctgatgtcgacgagtaccgttgcttcattgggaacctgtcctggtcaacgactgatgaaagcctcaaggatgcgttcagcaaattcggcaacctcactgaggcaaaggtggttcttgacaaattttcaggacgttctcgtggtttcggctttgtaacttttgatgagaagcaagccatggaggatgctattgagggaatgaatggactggacttggacgggaggaacatcactgttgataaagctcagccacaaggacctggtagagaccgtaatggtgaccgtgattatgaccgcgagcgtggatctcgttatgaacgtggtcgtgactatggtggtgggcgtgcaccgcgaggtggtggtggtggtggtggtggtggtggtgactgcttcaagtgtgggaaacctggtcattttgctagagagtgcccatctggggatggtgggagaggggacagatatggtgggagagatgacaggtatggtggcggtggcggtggcggtcgttcctgatgaagtggttcaagtggacggtggcccagttcgagcgcctcaacaacttcgacaactgcgagttcagggtcatgcagctgggccccggcggggagtactccctcctcgttcaccacacccaggaggagctccagcagtggggcatgtcgccggagatgatcgccgaccagcagtggcgcgcctccgccaaccgccgctgctgggccgaggagtgctcctccttcatcgacaccttcttcgaggagcctacggctcgtcggagacctcctcctcggacgaagacgangcagaggacaaggaggaggagaccaagctgctggagcaactataactggtttcatccacatccaatccacccattcgcctcgtcctttgaaattctctccattggattggatcttataccatgtgggaagagcggagcagtgatgctgcattcagtcatcgctgatccctctcttattcgaaaacagtctgtagcatgttcataatagctattagctagaactagaaatgattcgagggcaatttcagaaaatgctaaagaaacatatgctgtatctcaaggttttagctctgacatgattctgtatgttcctagatataagaacgcatacattctctattcaaaataaaatgctcagaggagataaatttgtctcgatcgct

SEQ ID NO: 13726 - protein, 213 aa, Zea mays subsp. mays
  misc_feature (1)..(213): Ceres Seq. ID no. 12340651
  misc_feature (199)..(199): Xaa is any aa, unknown or other
MDWTWTGGTSLLIKLSHKDLVETVMVTVIMTASVDLVMNVVVTMVVGVHREVVVVVVVVVVTASSVGNLVILLESAHLGMVGEGTDMVGEMTGMVAVAVAVVPDEVVQVDGGPVRAPQQLRQLRVQGHAAGPRRGVLPPRSPHPGGAPAVGHVAGDDRRPAVARLRQPPLLGRGVLLLHRHLLRGAYGSSETSSSDEDXAEDKEEETKLLEQL

SEQ ID NO: 13727 - protein, 189 aa, Zea mays subsp. mays
  misc_feature (1)..(189): Ceres Seq. ID no. 12340652
  misc_feature (175)..(175): Xaa is any aa, unknown or other
MVTVIMTASVDLVMNVVVTMVVGVHREVVVVVVVVVVTASSVGNLVILLESAHLGMVGEGTDMVGEMTGMVAVAVAVVPDEVVQVDGGPVRAPQQLRQLRVQGHAAGPRRGVLPPRSPHPGGAPAVGHVAGDDRRPAVARLRQPPLLGRGVLLLHRHLLRGAYGSSETSSSDEDXAEDKEEETKLLEQL

SEQ ID NO: 13728 - protein, 184 aa, Zea mays subsp. mays
  misc_feature (1)..(184): Ceres Seq. ID no. 12340653
  misc_feature (170)..(170): Xaa is any aa, unknown or other
MTASVDLVMNVVVTMVVGVHREVVVVVVVVVVTASSVGNLVILLESAHLGMVGEGTDMVGEMTGMVAVAVAVVPDEVVQVDGGPVRAPQQLRQLRVQGHAAGPRRGVLPPRSPHPGGAPAVGHVAGDDRRPAVARLRQPPLLGRGVLLLHRHLLRGAYGSSETSSSDEDXAEDKEEETKLLEQL

SEQ ID NO: 13729 - DNA, 1243 bp, Zea mays subsp. mays
  misc_feature (1)..(1243): Ceres Seq. ID no. 12341642
ttccgagcgtgtgcttggtcaactgggccaccgcgcacaaaacccattgcagttgtagcagggactctttccccgtgccacggacgacaatgactgccgacgcggcgctcctcgccatcatcgtgccttcctcctcccgctacgcctcgtctccctcggcctcagcctggcgtccgggcgtcacggtactagctccagacgcgtccgccgttcctgtgccgctttggccgtcgcagccgcgctcctcgcagtcatcttcgccctcccgcgtgaccacgtccgggagtgcgccgctccgatcgcttctgtctccagtgccggggatgatgacggcggtttccgcgaggagctgcggttggaggtcgagcagcttaagcagcagctggcgcggcttgaatctctttgggatagtaaatcgaaagctgtggatgataaacttgattctttagaggaggataatggccgtgtaatgagagcaatggcactcgatgtccagtctctgatcaatgagcgggaaaatatcaagattcaggaatcattatgcagctcatattttggtaacagtatcaaggaaatggaaaatgaggttcaaattctaaaagatgggtcaagaaagatgaattctgatatatcatcagtagcaaaggacacgacagaaaaggtcgaagttttgcattcagctatcgagaaggttcaagttatagctgatgaatgggtcaagatgaactatactattaacagaatatggtcattcactaaggagacagagaaaagggtggaaggtctatattcagatttaatgaagggcttcaagcagacgaagagaaaagtgccgttctggagagactgatgatgctgtggacctgatgtttgaccactgtcattgacgacccgcttggaattgacacaccgaagctgctagcaacttaatccgcttccatccagtgtttatattttcgcgtccttagtgcttgtgagacgtcagtgcaaggttgtggttgatgagaccttgtgcgacccgacttgctaactgtttgcatgccgtcatggccccataatgggactatctctatctatagcagcttatctataattatatttaaattacactgtacaaataatacaatacagcccaaaacggtgtaaaacggtgtttttgtgaccatatggtgcaatgctgacattataatgtttgtagactgtaatttgaatatgagtaaagctcgagatagttttatgcgcc

SEQ ID NO: 13730 - protein, 148 aa, Zea mays subsp. mays
  misc_feature (1)..(148): Ceres Seq. ID no. 12341643
PSVCLVNWATAHKTHCSCSRDSFPVPRTTMTADAALLAIIVPSSSRYASSPSASAWRPGVTVLAPDASAVPVPLWPSQPRSSQSSSPSRVTTSGSAPLRSLLSPVPGMMTAVSARSCGWRSSSLSSSWRGLNLFGIVNRKLWMINLIL

SEQ ID NO: 13731 - protein, 126 aa, Zea mays subsp. mays
  misc_feature (1)..(126): Ceres Seq. ID no. 12341644
MRAMALDVQSLINERENIKIQESLCSSYFGNSIKEMENEVQILKDGSRKMNSDISSVAKDTTEKVEVLHSAIEKVQVIADEWVKMNYTINRIWSFTKETEKRVEGLYSDLMKGFKQTKRKVPFWRD

SEQ ID NO: 13732 - protein, 123 aa, Zea mays subsp. mays
  misc_feature (1)..(123): Ceres Seq. ID no. 12341645
MALDVQSLINERENIKIQESLCSSYFGNSIKEMENEVQILKDGSRKMNSDISSVAKDTTEKVEVLHSAIEKVQVIADEWVKMNYTINRIWSFTKETEKRVEGLYSDLMKGFKQTKRKVPFWRD

SEQ ID NO: 13733 - DNA, 561 bp, Zea mays subsp. mays
  misc_feature (1)..(561): Ceres Seq. ID no. 12344923
aatagatccaggaaactgtgtgaaagctaagcttgatcccatgagtatgaaacaggccataaaaacctaggtattattatgcgcttgttaatactcgaacataattctttttgcgtgttcaaaaggatccaatatgttgtttgcatacatgttttagggagagagacccagtcaatgagaatcaaacaggtgacggaagggtaaatattacttaccaaaggatcaaacggattgccaactgtttccacaactcctacacccaaatatcttagcgtttcaactaactgcttgtatatgccttgatagcttgtgctgaccatttgctccttctcagtccctggggtgttctctaaattcgttttctcaaaactatcaaccagaggtaacaggctctggacaacttccacccgtatatttgatgtaaacttggcaccgtccttttcagcctgtttccggaaattctccagatcggcatttaagcgaataaatttttccttcccagaagttatttcagttgtaatactttcaagttgataagctactctactgttcactttttcc

SEQ ID NO: 13734 - protein, 41 aa, Zea mays subsp. mays
  misc_feature (1)..(41): Ceres Seq. ID no. 12344924
MRLLILEHNSFCVFKRIQYVVCIHVLGRETQSMRIKQVTEG

SEQ ID NO: 13735 - DNA, 1580 bp, Zea mays subsp. mays
  misc_feature (1)..(1580): Ceres Seq. ID no. 12345160
ctgtcgcgtccctgtcttcttccctgggttgacgccgcggctgtgccattcttaattgggtacgatccagtgttaggaattcgtcgtggcgtcgagtggtgaggagatgggaagtaggtcagtcttcggtcagatccgatggtgtaacagcaaggcccgtgcgacacttgctaaatgtctgatagaaagcctgaaccaaaaatcatcaccgatctcgtggtttcgagtttgatttaattatggtacgctagctgagaatcgtatgaagcaaaggacaaggatcaaagctaagtcgaccacaagatgttgttaagcgtgggcttctttgcatggtgatactggtaggcaaacctgaagatggatagacggagcaagtatcagaacaaaggctgatcatcaagtgatcgatgtcaaacaacactaacctagtgttcttccaggcaagccccggtgcatgcaaccccttccttgtgtttttaaatgatttttacacactttaagtctagcgaaatgtgcattaggtttatatgagttgcttggaaaccctttaatgcattggctaccttgaaatccaatccttttatagataattctggtgaagtatcaaatattgtttacaaaaattgcttagccctgcgtagaggtaaatcttgcggatagagtttgtcctttgcactaatgcctagctcaggtttatcctgaggaaggatggcttctacctgcaagaatattttcattgcgagcgtggtgggatcttactgcaaagttccctataatggtcttttcatcctcaggaacacaaacaattctaagggtggaagtacttaaatcgagacttgggctaggaacaggtgatgttctacccaggttgattaaggattatagagaatgtaggcctgatgatcgaggaccttttaactggtcacatgcctcatcatgggtaagctttgcctcgggcagactaataccagaaaggccaacacacaatgggagtggagagatggcgagagtagcgtgtaccctccatggcaagaggctggactgcgatgtatctatgctctcggttggcgtgaacccaatctggtcttaagaaacccggtggcgagttgacatatgcaagggttaagtgctacatatgtcgggtgattggagatccccagccgggtattaattgattcggatcgttgttacttctcggatatgaagacttggtcactgacttgcaatctaagtcattgatggaatcataatgagcaaaaatcatgttgtattgattaaagtgatgatgaaattagactagatgcaaacaaggtttattaatacttaatctaacattaaaatgttgaaagtaaggattcattttagtaagctttctgcaaactattaatgttgattcttgctaaaagcctttccttgatctccaaatccagcatatccttgagagtctttttttttagtcgggtaagtcttgctgagtacttgcgtacttaggcttttattcccattgttgctggaggttacgagtcactttgattgtgattggtattaagcgccagtgggcatggccttcttataagact

SEQ ID NO: 13736 - protein, 104 aa, Zea mays subsp. mays
  misc_feature (1)..(104): Ceres Seq. ID no. 12345161
MVFSSSGTQTILRVEVLKSRLGLGTGDVLPRLIKDYRECRPDDRGPFNWSHASSWVSFASGRLIPERPTHNGSGEMARVACTLHGKRLDCDVSMLSVGVNPIWS

SEQ ID NO: 13737 - protein, 57 aa, Zea mays subsp. mays
  misc_feature (1)..(57): Ceres Seq. ID no. 12345162
MGKLCLGQTNTRKANTQWEWRDGESSVYPPWQEAGLRCIYALGWREPNLVLRNPVAS

SEQ ID NO: 13738 - DNA, 544 bp, Zea mays subsp. mays
  misc_feature (1)..(544): Ceres Seq. ID no. 12346815
aggcttgggagctagcgcaaccttacatggatgattacgctgaagcacaacgacgagtaggagagagagagaatagagccattgcgaccacgcctcgcgttcaccatcgcccagcctctcgatcgctgggggatcgggcgagatcaccaagtcgtgcagatggtgcatgtggtcagcagagcaaggaagttggcgggggagacgaattgcttgccggtgattggccgaatcctcaccgggaatcctcgggcggcactgcagcgtcgaccggccgcatcgtcgtcttctcgagtgcgtgaggatacgtgtcatccgaagagcaagttggtacctggaatctcaagtcccaggtcaagagcaggtaccacaggatgaggcgcatggaggatgctgcgatgagttcgtgagagatctaggccgtcgtctcccagtcaacttttgggttgctgcaccgttgtctccttataatgtaattatttatttattttgtatagaactcctgttatatagtaaagatgtgacattcgatcctgtgccatgattc

SEQ ID NO: 13739 - protein, 98 aa, Zea mays subsp. mays
  misc_feature (1)..(98): Ceres Seq. ID no. 12346816
AWELAQPYMDDYAEAQRRVGERENRAIATTPRVHHRPASRSLGDRARSPSRADGACGQQSKEVGGGDELLAGDWPNPHRESSGGTAASTGRIVVFSSA

SEQ ID NO: 13740 - protein, 90 aa, Zea mays subsp. mays
  misc_feature (1)..(90): Ceres Seq. ID no. 12346817
MDDYAEAQRRVGERENRAIATTPRVHHRPASRSLGDRARSPSRADGACGQQSKEVGGGDELLAGDWPNPHRESSGGTAASTGRIVVFSSA

SEQ ID NO: 13741 - protein, 71 aa, Zea mays subsp. mays
  misc_feature (1)..(71): Ceres Seq. ID no. 12346818
MVHVVSRARKLAGETNCLPVIGRILTGNPRAALQRRPAASSSSRVREDTCHPKSKLVPGISSPRSRAGTTG

SEQ ID NO: 13742 - DNA, 1063 bp, Zea mays subsp. mays
  misc_feature (1)..(1063): Ceres Seq. ID no. 12353114
acagccccttgctcattggctagggcggggaaggaaattgcgggaggatgcgaagccattggtgtattgcatatggtggcaccaagcatgaggcaggaactgcattacttgcaagaaagtcacaagtacactgcattacttgcaagaaagtcacaagctcattccaatctgattctctaaactttggaggtctcttacacctaggcctgaaagctcctctcccattagttgcctacaacattggaaaagagtttctcacattatcgtagaatccattgcaagatcatacttgtggctttcttgcaagttgtgcagttgttgcctcaagcttgctgcctccctttgccagagctatcggtaaaacaggaagtccctggaaaggaaaatcgtgatttggaaaggaaattcatcaacaaacctgagtcggaaggatgcttaggaagcgggtactccctatgttccagattatagttcatttagatttgatgattcaatcaattatttctggggtggtctacagccaatgcatagtctctatctgtgtgtgtgtttgtgtttcccgtgcactctattcctttcgagaggcactctatgtcaggtgcctggaatatggtttagcttcaggcaatgaagtggacgtcggatggagatcagagtgtccacgatgacagagaccggcttttgaatctctcgtctctccatctctcatgcgttccaaacttccaactccaatgccgtccccgctggctgatcagtgatcacctctgaccctctctggtgatgtgtacccattgttatctctccaatgaagctaccctgcctgaccaggcccacaggctgtctcctgcatacggtggcaacacaccaacactgctgccctgccctaaggccacctcttcgccttgcctccacagctccactggatcccagctgtccgcagcacgctgaaaccctccattgaaacttcagatcgcttgttttctagcggcgatggacggtggttgtcgaacgctggcatgaaggtgtgagctcccaactggcacgtgtccaacaagaaccaagg

SEQ ID NO: 13743 - protein, 78 aa, Zea mays subsp. mays
  misc_feature (1)..(78): Ceres Seq. ID no. 12353115
MLRKRVLPMFQIIVHLDLMIQSIISGVVYSQCIVSICVCVCVSRALYSFREALYVRCLEYGLASGNEVDVGWRSECPR

SEQ ID NO: 13744 - protein, 73 aa, Zea mays subsp. mays
  misc_feature (1)..(73): Ceres Seq. ID no. 12353116
MRSHWCIAYGGTKHEAGTALLARKSQVHCITCKKVTSSFQSDSLNFGGLLHLGLKAPLPLVAYNIGKEFLTLS

SEQ ID NO: 13745 - protein, 70 aa, Zea mays subsp. mays
  misc_feature (1)..(70): Ceres Seq. ID no. 12353117
MFQIIVHLDLMIQSIISGVVYSQCIVSICVCVCVSRALYSFREALYVRCLEYGLASGNEVDVGWRSECPR

SEQ ID NO: 13746 - DNA, 1259 bp, Zea mays subsp. mays
  misc_feature (1)..(1259): Ceres Seq. ID no. 12354552
aaagggcaaaggcccaaacccagccggccagtcccccaccccccagcagccatggagttcggcttccgcgcaggaaaccgcacgcagcgccgcccttcccccgatcgacgcttcacagcacagcaagccggacccttccacggcgaccacccgcagccctcgccgttgcagtgggaggatgcggcccggcgcgagcggatcaaacgcgaggtggagcgccggctcatcgaggaggaggtccgcctggagctcgcccttgagcgcgcccgcctccacggtggttttggccccgccccgttcctcgggaccgacggctccgtcgtgccggtgcagccaccacctccacctccaggccggttctccagggccgacggcccatcgatgacgccggcaatgtcgtgggacgacagccctcggcggctcgcgagatttgagcaaccgatgctcctcagcgagacgggaacgtggtccctgctgccgaagccgaggcatacgctcctgctgcgcgagatcgcgcccagcgagagctccgaggttctttcatcagcaacaaaggcttctggcgtgaagaggaaagcagcagctgcgatttccgcaacaacgactgaacaacaaccaacgggagtacaagacccgagttccgggcaatggagctgcgcaatctgccaggtgagcgcgaccagcgaggccaacctgaacgagcacctccaagggaaaaagcacagggcaaagctggcccgatgcggagcgacgaccaaggcgacgacggatcctcctcctaacagaagcggcgatggcgcagtagcactagcagcaggcccgagcgacgcgccgaagaggatccagatcctggtcgacggggaggcgcaccaggtcgtccagaggagcagctgcgtgtggtgcgagcgctgcagggtcggctgcaccaacgccgccgccatggtcgaccatctgcggggcaagaggcacagcctgtcgaacaaggtctggacggcgataaaggccgtgaggaggagcagctaatacggcgataaaggccgtgaccgtgaggaggaggccgtggtgaggtgaggaggcacaatcttgtcgaatacggttgagcagggcctgtgttgagctttggaaagaaagggcacagatactagttgtttgacaactaatgaagtgtgggttttcatagatcctcttaatttagcagcggaaagaaagacggtatattccttgcttgttatcacttatcagacaatcacttattcccc

SEQ ID NO: 13747 - protein, 340 aa, Zea mays subsp. mays
  misc_feature (1)..(340): Ceres Seq. ID no. 12354553
KGQRPKPSRPVPHPPAAMEFGFRAGNRTQRRPSPDRRFTAQQAGPFHGDHPQPSPLQWEDAARRERIKREVERRLIEEEVRLELALERARLHGGFGPAPFLGTDGSVVPVQPPPPPPGRFSRADGPSMTPAMSWDDSPRRLARFEQPMLLSETGTWSLLPKPRHTLLLREIAPSESSEVLSSATKASGVKRKAAAAISATTTEQQPTGVQDPSSGQWSCAICQVSATSEANLNEHLQGKKHRAKLARCGATTKATTDPPPNRSGDGAVALAAGPSDAPKRIQILVDGEAHQVVQRSSCVWCERCRVGCTNAAAMVDHLRGKRHSLSNKVWTAIKAVRRSS

SEQ ID NO: 13748 - protein, 323 aa, Zea mays subsp. mays
  misc_feature (1)..(323): Ceres Seq. ID no. 12354554
MEFGFRAGNRTQRRPSPDRRFTAQQAGPFHGDHPQPSPLQWEDAARRERIKREVERRLIEEEVRLELALERARLHGGFGPAPFLGTDGSVVPVQPPPPPPGRFSRADGPSMTPAMSWDDSPRRLARFEQPMLLSETGTWSLLPKPRHTLLLREIAPSESSEVLSSATKASGVKRKAAAAISATTTEQQPTGVQDPSSGQWSCAICQVSATSEANLNEHLQGKKHRAKLARCGATTKATTDPPPNRSGDGAVALAAGPSDAPKRIQILVDGEAHQVVQRSSCVWCERCRVGCTNAAAMVDHLRGKRHSLSNKVWTAIKAVRRSS

SEQ ID NO: 13749 - protein, 213 aa, Zea mays subsp. mays
  misc_feature (1)..(213): Ceres Seq. ID no. 12354555
MTPAMSWDDSPRRLARFEQPMLLSETGTWSLLPKPRHTLLLREIAPSESSEVLSSATKASGVKRKAAAAISATTTEQQPTGVQDPSSGQWSCAICQVSATSEANLNEHLQGKKHRAKLARCGATTKATTDPPPNRSGDGAVALAAGPSDAPKRIQILVDGEAHQVVQRSSCVWCERCRVGCTNAAAMVDHLRGKRHSLSNKVWTAIKAVRRSS

SEQ ID NO: 13750 - DNA, 978 bp, Zea mays subsp. mays
  misc_feature (1)..(978): Ceres Seq. ID no. 12354728
agtattagcatatatatacacgtagtaatgcagaacagatgggagtaccttaagcaagacacaatctgcagccgggatagactcgaacatgtcgccggcgatgaacttcaccgtgccatcatcaggtgccccgctgaccacctgctcgaggtccaacacgctgcaccggatgtgcgggaaggccctagcgatggccatcgcagcggcgccgtggccgccgccgacgtcgacgagcgagccgagcccgcggaatatacccgcggcccggggctctctcaggagcgtgtccatggcgaagttgctgtccgccgcgcacccgtcgttcaaggtcttgttgtacagggcgtcgttcttcgtcaagctccacggggacatgccgtgcgccacctcgaagagcgtggcggtggcgccggcgtccttgaaccactcttccaggctgaagtaggtggcgaccgacgtagtggggcgcatcagaaggtccagcatcggcgatatgtcgcacgaggtcggtgcccccgcgccgcttacgaggaggcgggacgccggagtgagcttgtaaacagtactgtcgtcgctctcatctgtgcctgtggtgcccaagatgctggagacggtaagcacgcgcatgagccgtcggagatacgggagcttcgacgggtcgacgccggtctcggtgatgatgtccgagattgttgctgccccacctcggcggtggatggcgctagggatgcctagctggatcgcgcacccgatcgccatggtcttcacgtaggagagactgtaattgtagagctccacgtaaccttggagcatgtcctgtgtgttattaagctcctcctggacagaggacatggtggtgttgtaaatggcaggggcgcagggcttgttgcattggctgcgctgggatgctacttttataagggaatggggaggcaaagaagatatcgacgacaaaggaagggcctgcactttttatgc

SEQ ID NO: 13751 - protein, 244 aa, Zea mays subsp. mays
  misc_feature (1)..(244): Ceres Seq. ID no. 12354729
SISIYIHVVMQNRWEYLKQDTICSRDRLEHVAGDELHRAIIRCPADHLLEVQHAAPDVREGPSDGHRSGAVAAADVDERAEPAEYTRGPGLSQERVHGEVAVRRAPVVQGLVVQGVVLRQAPRGHAVRHLEERGGGAGVLEPLFQAEVGGDRRSGAHQKVQHRRYVARGRCPRAAYEEAGRRSELVNSTVVALICACGAQDAGDGKHAHEPSEIRELRRVDAGLGDDVRDCCCPTSAVDGARDA

SEQ ID NO: 13752 - protein, 235 aa, Zea mays subsp. mays
  misc_feature (1)..(235): Ceres Seq. ID no. 12354730
MQNRWEYLKQDTICSRDRLEHVAGDELHRAIIRCPADHLLEVQHAAPDVREGPSDGHRSGAVAAADVDERAEPAEYTRGPGLSQERVHGEVAVRRAPVVQGLVVQGVVLRQAPRGHAVRHLEERGGGAGVLEPLFQAEVGGDRRSGAHQKVQHRRYVARGRCPRAAYEEAGRRSELVNSTVVALICACGAQDAGDGKHAHEPSEIRELRRVDAGLGDDVRDCCCPTSAVDGARDA

SEQ ID NO: 13753 - DNA, 910 bp, Zea mays subsp. mays
  misc_feature (1)..(910): Ceres Seq. ID no. 12355936
acgagtcagacggccacacttgtcagcaaagcgccggaaaccaaaccacgcaccgccgcctcggctagctaacacgtacactagcagtgatccccatggcaatgctgccgcgtccaacggcgctcgtcgcagcggtggtggtggcgtcggcgctggtgctcgggatggcgtcggcgcaggggccggccgccgcgcccgcgccgggcccggcgcccgggatcagcgacgagtgcttcaacgcggtgctgaacatgtcggactgcctgacgtacgtgacggcgggcagcaaggcgcggcacccggacacgccctgctgcccggagctggccggggctgctcgagtcccaccccgtctgcctctgccagctgctgggcggcggcgccgagtcctacggcgtcagcgtcgactacaagcgcgcgctcgcgctcccggggatctgccgcctcaccgcgccgcccgttagcgcctgcgcagctttcggattccctatccccgagggattggtgcctactgcggcgcccatggcaggcctctctccatcttctatcggcccagatgtgcctgccaacacgccgacgggctcagccaagtcccccgcgggacgcgtcaccgccgccggaggcctcgtcgccctcgccgcgctacccgtcgccgtcgcggccgggatcatgttctagagcatctaccggtcgtcttagactttgtgatttcttcgtcatcattcttcttacagcacacacatgtttgtgcattatggtactagttcgttaattcacgtacaaacagctagctgttccaggcacgagattcttccggatttgtttccttgtaataattccccttgagcgtgtgtttggtatgtttctacaattctactacggagcactgtatgcatgcagttcaatctcc

SEQ ID NO: 13754 - protein, 256 aa, Zea mays subsp. mays
  misc_feature (1)..(256): Ceres Seq. ID no. 12355937
RVRRPHLSAKRRKPNHAPPPRLANTYTSSDPHGNAAASNGARRSGGGGVGAGARDGVGAGAGRRARAGPGARDQRRVLQRGAEHVGLPDVRDGGQQGAAPGHALLPGAGRGCSSPTPSASASCWAAAPSPTASASTTSARSRSRGSAASPRRPLAPAQLSDSLSPRDWCLLRRPWQASLHLLSAQMCLPTRRRAQPSPPRDASPPPEASSPSPRYPSPSRPGSCSRASTGRLRLCDFFVIILLTAHTCLCIMVLVR

SEQ ID NO: 13755 - DNA, 768 bp, Zea mays subsp. mays
  misc_feature (1)..(768): Ceres Seq. ID no. 12360608
atcaatggacgacgcaaacgcaaacttctttgctgctcgctctagttttcgagctgtgtgtgcatcggtttgtgttcaaagcttaatttttcattgggaaaaacttattagagcagcagcgaacgcgcgcaccttgacgctgatggagtagaggacaagggcgtccagcgtggtgacgctgaggtggagcacggcgaggcggagcgcctggagcgcggtgaccaggcagacgagctgcccgggcctccgcgccgtcatcacgcggatgctaccgtgcgcctccaccaaggccacctcgacgtcggccacccccaaccgccggccgtcctcctcctcctccgctgccgccgccgcagcagcaccgcgcgccgagtggcaccacaggtactgcgggtacgtgaagaaccgcgcgaacggggccggccgcgcgtggcccgccgcgtcctccgtcacgctgctgctgctgctgcagttgctcgtcgacgccgccgcggaatccacgcggatcttggtgctgctgctgctggcgtgcgctggcgtcgcgtcaggcttcgccgccgccggaacgtgcagcagcttccgcttctgcgcctcgaggcactgcagctgctgctccagctccctcacgaacacgattgcccctcccacgatggaagcttggtccccctgcgaacgttttcgaaaccgttagttttgccaggatttgccgatttattatctggactatggacagacatgcagtgacattatttgccgatttaattaact

SEQ ID NO: 13756 - protein, 141 aa, Zea mays subsp. mays
  misc_feature (1)..(141): Ceres Seq. ID no. 12360609
MLPCASTKATSTSATPNRRPSSSSSAAAAAAAPRAEWHHRYCGYVKNRANGAGRAWPAASSVTLLLLLQLLVDAAAESTRILVLLLLACAGVASGFAAAGTCSSFRFCASRHCSCCSSSLTNTIAPPTMEAWSPCERFRNR

SEQ ID NO: 13757 - DNA, 587 bp, Zea mays subsp. mays
  misc_feature (1)..(587): Ceres Seq. ID no. 12361683
cagatcaccagccataccacacgaccgcagaggagtagcaagagcccgggggagaaatgagcgcggcggcgggcgggctgcggcgggctgctggcggcggcggcaacggcgggagccgcggaggtgcgggcgtccatcttcggccacgcgttgaaccctacgggaaggcgcgcggcgacgaagctcctgcggaagaagatggtcggcgaccaggtggcgcagtgggtacccctacgacatcaagcgcgacgacccgctcgtcatggcgcgcgaggagaaggagcgtctggctaaactggaaatgctgaagcgtcgtggcaagggcccgccgaagaagggtcagggaaggcgtgccgtcaagaggagcaagtagtcgagctgtgctaccctatcaatgctcatctctgtttctggagcttgccttgttcttacatgctgtaacgtactaccagtgatttgtcgggtgagtgggcgacgacagatgcaaaaaaaaaccccgccttttctatcaagtttagcttacagatgttttttttttttcatcaaattgcaatgaaaccgccttctatgttggatggctgatgtgc

SEQ ID NO: 13758 - protein, 83 aa, Zea mays subsp. mays
  misc_feature (1)..(83): Ceres Seq. ID no. 12361684
MSAAAGGLRRAAGGGGNGGSRGGAGVHLRPRVEPYGKARGDEAPAEEDGRRPGGAVGTPTTSSATTRSSWRARRRSVWLNWKC

SEQ ID NO: 13759 - protein, 53 aa, Zea mays subsp. mays
  misc_feature (1)..(53): Ceres Seq. ID no. 12361685
MLISVSGACLVLTCCNVLPVICRVSGRRQMQKKTPPFLSSLAYRCFFFFIKLQ

SEQ ID NO: 13760 - protein, 50 aa, Zea mays subsp. mays
  misc_feature (1)..(50): Ceres Seq. ID no. 12361686
RSPAIPHDRRGVARARGRNERGGGRAAAGCWRRRQRREPRRCGRPSSATR

SEQ ID NO: 13761 - DNA, 2271 bp, Zea mays subsp. mays
  misc_feature (1)..(2271): Ceres Seq. ID no. 12361733
gcacgagaccattacctagaacatcctaatcgaaaagtttgttttcgtcgtaaatctccgtcccgctgggcgcgctgccggagtcgccgtcgcccagcccccagccgattattcttattctctttgcttcgcctcgcctcctgtcgtcgtcgtcatcatcatcgcccccggctgctaaacaccaacaagtgcccttgccccacatggccacccggccacattaccccacaaccggcagggcacgggcaacttgacatgcatggcaacgacgcacagcagcttgctcgatcgctcggtgtcactgcgtgtgttcgtgtggtgcttgcctctgtactactgcactgcacgcacacacgcagggatgcagagggccactcccactcgcatcgcatgcgtgtgtgtggccttcttttttcccctgctgtgctgggtgctgctgccacccaaaagcaaagctaagaacggccatgccatgcgtatatatataacccaaatagcacattagcagaaccgtcaaagcacatatatacatgcctgccgtcgtgctacagtactacaccgcagtggggcatggtggcgctggcgcgcgagggagagtgagggccagcgcgccatgcccgcgcgacacgcactggcactgccggcagtggcacaggcacaccccggccccacgatctccccacctgggtcctgggctccacagctgcctcgctcgccagtcgccaccaccatggaacggacggctacggtggtcttgtttgctctctttgactcggtgcctgcctcgggaaacgtggtcctggatgctcgtcggtggcgtatggagcgtcggaggagatcggcccgttccggatcaaaccaaacgggacaggcctgttcctcaacaagtactcatggaacagagaggcaaaccttctgttcctcgagtcgcccgcgggagtcggcttctcctacgccaacaccacctcggacctcaagacgtcgggcgacgagaggaccgctcaagacgcgctgcagttcctggtcagctggatgtcacggttcccgcagtaccggcaccgagatttctacatcgccggagaaagctacgcgggccactacgtcccccagttggcaaggaagatcgtcgagtacaacgaggcctcgcctcaccccttcatcaacctcaagggaatccttgtgagtatcgtatctatgcatgctgctgccaaacacgagcaggccgccggccggccggctccagtctaatcttaacccctccaaaaaaaaaacaccgatcaggtgggcaacgcggtgaccgacaactactacgacaacatcggcacggtcacctactggtggacgcacgccatgatctccgaccgcacctacaaggccatcctcaggtggtgcaacttcagcagcagcagcatctcgcgcccctgcaaccgcgccatgagctacgccatgaaccacgagttcggggacatcgaccagtacagcatctacacgccgtcgtgcgccgccgccgcggccagggccaacgccaccgtgctcaggttcaagaacaccctcgtccgccgccgccgctcctccggctacgacccctgcacggagacctacgccgagaggtactacaacaggatggacgtgcagagggcgatgcacgccaacaccacggggatcccctacagatggactgcctgcagtgatgtgctgatcaagacatggcaagattcagagttctccatgctgccgacgtacaagaagctgatgaaagcaggactgaggatatgggtgttcagcggcgacacagattcagtcgtcccggtgaccgcgacgaggttcgccatcagtcatctcggtctgaagatcaagacccgctggtatccgtggtactcagctggacaggtaggaggatggtctgaggtgtacgaagggctcacgtttgcgtcggtgagaggcgcagggcatgaggtgccgttgttccagccccggagggcgttcaggatgttccggtcgttcttggccggggagccattgcccaagtcctgaaggttcctcacatgtgactgaggccatgcatgcctacctgatcatgtctagctacggtcctgacgggtgagaaggtgacgttccccaggtagagaatgacttgttgataggcgcgcagttcatagctgaggagtgattgattggtctcgggagaaggatgtagagaataataaggatggctatgttatgccatggaaacccatgagcattgcaatgattagcgaataattttcagtt

SEQ ID NO: 13762 - protein, 386 aa, Zea mays subsp. mays
  misc_feature (1)..(386): Ceres Seq. ID no. 12361734
MPAVVLQYYTAVGHGGAGARGRVRASAPCPRDTHWHCRQWHRHTPAPRSPHLGPGLHSCLARQSPPPWNGRLRWSCLLSLTRCLPRETWSWMLVGGVWSVGGDRPVPDQTKRDRPVPQQVLMEQRGKPSVPRVARGSRLLLRQHHLGPQDVGRREDRSRRAAVPGQLDVTVPAVPAPRFLHRRRKLRGPLRPPVGKEDRRVQRGLASPLHQPQGNPCEYRIYACCCQTRAGRRPAGSSLILTPPKKKHRSGGQRGDRQLLRQHRHGHLLVDARHDLRPHLQGHPQVVQLQQQQHLAPLQPRHELRHEPRVRGHRPVQHLHAVVRRRRGQGQRHRAQVQEHPRPPPPLLRLRPLHGDLRREVLQQDGRAEGDARQHHGDPLQMDCLQ

SEQ ID NO: 13763 - protein, 295 aa, Zea mays subsp. mays
  misc_feature (1)..(295): Ceres Seq. ID no. 12361735
MLVGGVWSVGGDRPVPDQTKRDRPVPQQVLMEQRGKPSVPRVARGSRLLLRQHHLGPQDVGRREDRSRRAAVPGQLDVTVPAVPAPRFLHRRRKLRGPLRPPVGKEDRRVQRGLASPLHQPQGNPCEYRIYACCCQTRAGRRPAGSSLILTPPKKKHRSGGQRGDRQLLRQHRHGHLLVDARHDLRPHLQGHPQVVQLQQQQHLAPLQPRHELRHEPRVRGHRPVQHLHAVVRRRRGQGQRHRAQVQEHPRPPPPLLRLRPLHGDLRREVLQQDGRAEGDARQHHGDPLQMDCLQ

SEQ ID NO: 13764 - protein, 265 aa, Zea mays subsp. mays
  misc_feature (1)..(265): Ceres Seq. ID no. 12361736
MEQRGKPSVPRVARGSRLLLRQHHLGPQDVGRREDRSRRAAVPGQLDVTVPAVPAPRFLHRRRKLRGPLRPPVGKEDRRVQRGLASPLHQPQGNPCEYRIYACCCQTRAGRRPAGSSLILTPPKKKHRSGGQRGDRQLLRQHRHGHLLVDARHDLRPHLQGHPQVVQLQQQQHLAPLQPRHELRHEPRVRGHRPVQHLHAVVRRRRGQGQRHRAQVQEHPRPPPPLLRLRPLHGDLRREVLQQDGRAEGDARQHHGDPLQMDCLQ

SEQ ID NO: 13765 - DNA, 1004 bp, Zea mays subsp. mays
  misc_feature (1)..(1004): Ceres Seq. ID no. 12363503
gcacgagaccattacctagaacatcctaatcgaaaactgtgcacccccccagtcgccgcctcatcctcccatcgccatccacctagatcctcccatcacctcctcctcgtagggcgcccataggtagttcacagagcacggccggcgagcgtcgaggcagagccacgacttacccttgccgctccagtgaaggaggttgatatggccctgatggagaccccgacagcggccctcgacgttgtcgccgccgagcccgtgctggttccaccagtggtccaccacccagatgtggcccgcaaagacgagcaggaacggcggcagcgaggcgaggtggtagatccagcaccgctttggcacggccatccattcctccacccagagcgtgtacccaggcctgcctctcctcgaggaacgccgtcgaggtcgttcggctggagcagaaggcggcgtcgctcagcaagctggtcgaggagcagtgcgagagcatagacgatctcaagtccaaggctagtgctgatctccttccccgatttatgaactgcattgagtcgcgtgcgagtttcagttgttgataatttattcatggtggtaactagtgttggaaaactaaagtttacccccaccttttctgctgcatctacggacgaaaggatgaatctgcgacgcggagaaacagttactgcaggccacatcaataaaactgacaagcaaatataaggtggtgaaagtctctgctactttacaaggttcagtatgtaattaaaaaaagaatgatctggatatggatgtactgtctgtacataaactgctcgtcttggttccttcaggaatcataaaagcatatggaggaactatgtataggctacaaagaagcataagaagcatttttatagcagaagccaagtgttttgatgattttgtttttttcaattgtgttttctgttattggttcagcatgcacatatattgacatgatttatggcatggcatctgccatctttgtc

SEQ ID NO: 13766 - protein, 95 aa, Zea mays subsp. mays
  misc_feature (1)..(95): Ceres Seq. ID no. 12363504
MALMETPTAALDVVAAEPVLVPPVVHHPDVARKDEQERRQRGEVVDPAPLWHGHPFLHPERVPRPASPRGTPSRSFGWSRRRRRSASWSRSSARA

SEQ ID NO: 13767 - protein, 92 aa, Zea mays subsp. mays
  misc_feature (1)..(92): Ceres Seq. ID no. 12363505
METPTAALDVVAAEPVLVPPVVHHPDVARKDEQERRQRGEVVDPAPLWHGHPFLHPERVPRPASPRGTPSRSFGWSRRRRRSASWSRSSARA

SEQ ID NO: 13768 - protein, 62 aa, Zea mays subsp. mays
  misc_feature (1)..(62): Ceres Seq. ID no. 12363506
MDVLSVHKLLVLVPSGIIKAYGGTMYRLQRSIRSIFIAEAKCFDDFVFFNCVFCYWFSMHIY

SEQ ID NO: 13769 - DNA, 1156 bp, Zea mays subsp. mays
  misc_feature (1)..(1156): Ceres Seq. ID no. 12368537
atcacgcactctgccagagaccaaactattcgtatcgtgcgtaggtgttgcttgctgttgcaacggaccatccatctagtgcttgcattgctgtcgcactcgctcagctatctccaccgctattggttgttgtttggttacccacgccctgctctctgataccagttgatagcagcagcagctagctataggttgtcagcaggatcgaccagatagatagcgcgcgcggatcggagttaacagcgctgcaggatggtgaagagcacgacgacgatgggggcggcgagctgcggcggcggcgtgctgccgctggcagtcgctgaaccacatcagcatcgtgtgccggtcggtggaggcgtcgctgcgcttctacacggatgtgctcggcttcgtccccatccgccgccccggctctttcgacttcggcggcgcctggctgttcaactacgggatcggcatccacctgctgcagtcggaggaccccggcagcctcccgccggagaagggagagatcaaccccaaggacaaccatatctccttccagtgcgagagcatggtggcggtggagcggcggctgaaggagatcggcatcccgtacgtgcagcgctgcgtggaggagggcggcatcaacgtggaccagatcttcttccacgaccccgacggcttcatgatcgagatctgcaactgcgacaacctccccgtcgtcccgctcgccggcgaccagcagcgcgcgccggccgcttgcaggcgggctccggcggcggtcaataccgtcaagcagcagcagcagggcagcgtggtgcctgcttcttccgctccggtcacgacggcggcggcgcagtgcatgccgtcggcggccacggcggcgcaagccatccgcgtcgccgaggagtcgtcgtcgcacatttcgtgcgcgtgattactagcttgttgacgacgacgccagcgcaaggattcggcgcggacggtgacgaagcaggcacgatggatcgacgagcgccgagtcacggccacaagaggcgtctctgtacatgcgcgtgcgtgcgtgcgtgggtgtaggtgctgtatgtgcagtgcactcaaactgcctagcttttttttagtaaagaataaacccatggtacggtgggagtgaagagactagtgcgtccactcc

SEQ ID NO: 13770 - protein, 268 aa, Zea mays subsp. mays
  misc_feature (1)..(268): Ceres Seq. ID no. 12368538
MVKSTTTMGAASCGGGVLPLAVAEPHQHRVPVGGGVAALLHGCARLRPHPPPRLFRLRRRLAVQLRDRHPPAAVGGPRQPPAGEGRDQPQGQPYLLPVREHGGGGAAAEGDRHPVRAALRGGGRHQRGPDLLPRPRRLHDRDLQLRQPPRRPARRRPAARAGRLQAGSGGGQYRQAAAAGQRGACFFRSGHDGGGAVHAVGGHGGASHPRRRGVVVAHFVRVITSLLTTTPAQGFGADGDEAGTMDRRAPSHGHKRRLCTCACVRAWV

SEQ ID NO: 13771 - protein, 261 aa, Zea mays subsp. mays
  misc_feature (1)..(261): Ceres Seq. ID no. 12368539
MGAASCGGGVLPLAVAEPHQHRVPVGGGVAALLHGCARLRPHPPPRLFRLRRRLAVQLRDRHPPAAVGGPRQPPAGEGRDQPQGQPYLLPVREHGGGGAAAEGDRHPVRAALRGGGRHQRGPDLLPRPRRLHDRDLQLRQPPRRPARRRPAARAGRLQAGSGGGQYRQAAAAGQRGACFFRSGHDGGGAVHAVGGHGGASHPRRRGVVVAHFVRVITSLLTTTPAQGFGADGDEAGTMDRRAPSHGHKRRLCTCACVRAWV

SEQ ID NO: 13772 - DNA, 1399 bp, Zea mays subsp. mays
  misc_feature (1)..(1399): Ceres Seq. ID no. 12368873
acccatggcactggcatccccctctctccctctccccaccacaccacctccctcctcacaagccatagccgccgcctctttctgtgcttgccctctcgccatcttcgagtacgacgagaaggcggtgatggagctggacgagcaggccttcctggaggagatcctctccctgcggagggacgcctgggactgcaatgccatgggggacttcttcgccccggccgccatggactgcaccttccaggaccgccaccaccaggcgcccaccgtcagcgtcctccccaccttcaccgcctcctacgcccagccgcagccgcagccggcggcggcgcccggcttcgactgcctcagcgaggtctacggcgccgccgcgttcggcgggcccaatgctggtgactacggcggcgagatggggttccttgacgtcgtcgagcccaaggcggcgtcggcggcactggtggacggcgccgcgggcctcggggcctgcaaggtggagcccggcctggcggagagcggcggcgcgttcggcgctggcagctggcgctgcgccgccgccggccctggcgtccaagaagaagagggtcgaggggatgccgtccaagaacctgatggccgagcgccgccgccgcaagcgcctcaacgaccgcctctccatgctacgctccgtcgtgcccaagatcagcaagatggaccggacgtcgatcctgggcgacacgatcgactacatgaaggagctgctggagaggatcaagctgctgcaggaagagatcgggcagcagcaggaggaggcgccaggcatgctcagcgtcttccgggagctcaaccccaacgagatggtggccaggaacacccccaagttcgacgtggagcggaaggagggcggcgacacccgggtggagatctactgcgccgccaagccggggctgctgctgtccacggtgagcacgctggacacgctagggctcgacatccagcagtgcgtcgtcagctgcttcaacgacttcggcatgcacgcctcctgctccgagatgcagagggaaatgatcagcgccgacgcgataaagcaggagctgttcaagaacgctggctatggcggaggctgcttgtagaggggcatgtcatcatggcatgggaggaagaagaagaagaggcagcaataaattaatcttaagcagctgtgggagcagcagtagtagtatcagttcaggtccagtagcggaaaaggcaggcagggcaaagatttgggaggcctttttgcaatccatctcccccatcataacccacttcgatctatccatgttagcagtacgtgtccgtccgtcctatagcatcatgcaggatgcaaaggttgccctgtgctgctgaatctttctcctatatactattctatttaattaac

SEQ ID NO: 13773 - protein, 387 aa, Zea mays subsp. mays
  misc_feature (1)..(387): Ceres Seq. ID no. 12368874
PMALASPSLPLPTTPPPSSQAIAAASFCACPLAIFEYDEKAVMELDEQAFLEEILSLRRDAWDCNAMGDFFAPAAMDCTFQDRHHQAPTVSVLPTFTASYAQPQPQPAAAPGFDCLSEVYGAAAFGGPNAGDYGGEMGFLDVVEPKAASAALVDGAAGLGACKVEPGLAESGGAFGAGSWRCAAAGPGVQEEEGRGDAVQEPDGRAPPPQAPQRPPLHATLRRAQDQQDGPDVDPGRHDRLHEGAAGEDQAAAGRDRAAAGGGARHAQRLPGAQPQRDGGQEHPQVRRGAEGGRRHPGGDLLRRQAGAAAVHGEHAGHARARHPAVRRQLLQRLRHARLLLRDAEGNDQRRRDKAGAVQERWLWRRLLVEGHVIMAWEEEEEEAAIN

SEQ ID NO: 13774 - protein, 386 aa, Zea mays subsp. mays
  misc_feature (1)..(386): Ceres Seq. ID no. 12368875
MALASPSLPLPTTPPPSSQAIAAASFCACPLAIFEYDEKAVMELDEQAFLEEILSLRRDAWDCNAMGDFFAPAAMDCTFQDRHHQAPTVSVLPTFTASYAQPQPQPAAAPGFDCLSEVYGAAAFGGPNAGDYGGEMGFLDVVEPKAASAALVDGAAGLGACKVEPGLAESGGAFGAGSWRCAAAGPGVQEEEGRGDAVQEPDGRAPPPQAPQRPPLHATLRRAQDQQDGPDVDPGRHDRLHEGAAGEDQAAAGRDRAAAGGGARHAQRLPGAQPQRDGGQEHPQVRRGAEGGRRHPGGDLLRRQAGAAAVHGEHAGHARARHPAVRRQLLQRLRHARLLLRDAEGNDQRRRDKAGAVQERWLWRRLLVEGHVIMAWEEEEEEAAIN

SEQ ID NO: 13775 - protein, 345 aa, Zea mays subsp. mays
  misc_feature (1)..(345): Ceres Seq. ID no. 12368876
MELDEQAFLEEILSLRRDAWDCNAMGDFFAPAAMDCTFQDRHHQAPTVSVLPTFTASYAQPQPQPAAAPGFDCLSEVYGAAAFGGPNAGDYGGEMGFLDVVEPKAASAALVDGAAGLGACKVEPGLAESGGAFGAGSWRCAAAGPGVQEEEGRGDAVQEPDGRAPPPQAPQRPPLHATLRRAQDQQDGPDVDPGRHDRLHEGAAGEDQAAAGRDRAAAGGGARHAQRLPGAQPQRDGGQEHPQVRRGAEGGRRHPGGDLLRRQAGAAAVHGEHAGHARARHPAVRRQLLQRLRHARLLLRDAEGNDQRRRDKAGAVQERWLWRRLLVEGHVIMAWEEEEEEAAIN

SEQ ID NO: 13776 - DNA, 803 bp, Zea mays subsp. mays
  misc_feature (1)..(803): Ceres Seq. ID no. 12372455
accaacctcacctactgttctgggttgaaatcttgcggaaagtctgccaaaacaaaaaacaaaagtccttgcaggtggtttggcaggctaaacttgacgtttgcgttggcaggaagccgtggctgctgtaatctaatctgctgctgcaatctccgacccgtctcccagacttgactgtacctgaaaccactattgaaacaatcggtgagagcgagagagaaaattaaagagaaacccgacaaaaaccaaccaaccaagcagctctccgttccatatagccgctgcatcagatccattcaagaactagagccaagccaccaacaataaattcctctggccggcctgcctcatcagctcggttcaaaaaaaacaaaaaaaaaagaagtcgcagcggcagtagtaaactgcagtgacatacggagcactactgtactgtactgtagtaacatactactactgctgctgctcacagcaagaacaaggatacgataaaaaagaaccaaggcaaaaagctaaggtcctgtttgggaacaaagtttttgaaaaccacagtttttgaaatactatactatactttagttataacaataccgtagtttataataccgcagttttgaaaactgaggtccagagctaagtttagaatgccttaaaacaactatagtatttgcaatacttcagttttgaaaacagagattttacctagcttgccaaacaccattatgtatataatactgcagtatttgagaatactgcagtattcttccaaaactgcagaaaaactttgttcccaaacaccccct

SEQ ID NO: 13777 - protein, 57 aa, Zea mays subsp. mays
  misc_feature (1)..(57): Ceres Seq. ID no. 12372456
TNLTYCSGLKSCGKSAKTKNKSPCRWFGRLNLTFALAGSRGCCNLICCCNLRPVSQT

SEQ ID NO: 13778 - protein, 42 aa, Zea mays subsp. mays
  misc_feature (1)..(42): Ceres Seq. ID no. 12372457
QPHLLFWVEILRKVCQNKKQKSLQVVWQAKLDVCVGRKPWLL

SEQ ID NO: 13779 - DNA, 1870 bp, Zea mays subsp. mays
  misc_feature (1)..(1870): Ceres Seq. ID no. 12375150
acgatccttctagacacttcgacgcgcccgttataaaggccggcgcatccgggccatgaccacacagccccttggctcattggctagggcggggaaggaaattgcgggaggatgcgaagccattggtgtattgcatatggtggcaccaagcatgaggcaggaactgcattacttgcaagaaagtcacaagctcattccaatctgattctctaaactttggaggtctcttacacctaggcctgaaagctcctctcccattagttgcctacaacattggaaaagagtttctcacattatcttagaatccattgcaagatcatacttgtggctttcttgcaagttgtgcagttgttgcctcaagcttgctgcctccctttgccagagctatcggtaaaacaggaagtactgtcagtttccgagctacaaacaagctataagtttagaaaaataatttagaaatgtacaacaaagtctagtaatacattgctaaagataaatcaatactcaataagttcctcatgctttggatttggggataacatacctgttttatttacatgctaatatttggaccaacaaaaaataccttaggaacagccatttgagaaaaaaacaaagccttttagtcctaagcaagttagcatagcctagagttgcaacttctacatgagcacaataaacagaaaagaaagagaaaaggaaaataaatatatatggcaccaaaagctattaccatgttataatataaatttaatgaccgaaattataaacatttttacaatcttagcaaacctctcaacgtgtagtctgaatcgacagaacatcagtagagtaatttttgttacatttatagtccccaatgtcgtttcaaggcaaagtttgtttggtttctctgttttcctaaacactggcttctcaattgcattctcaatgtgcatctgtactagtttgacatctgtggctattgtgattcttcctggaatatcatctgtccatcacctttaaagcataacattaccctgatggccatgtgatctgtaggtccctagaaaggaaaatcgtgatttggaaaggaaattcatcaacaaacctgagtcggaaggatgcttaggaagcgggtactccctatgttccagattatagttcatttagatttgatgattcaatcaattatttctggggtggtctacagccaatgcatagtctctctctgtgtgtgtttgtgtttcccgtgcactctattcctttcgagaggcactctatgtcaggtgcctgaaatttggtttagcttcaggcaatgaagtggacgtcggatggagatccgagtgtccacgatgacagagaccggcttttgaatctctcgtctctccatctctcatgcgttccaaacttccaactccagtgtcgtccccgctgactgatcagtgatcacctctgaccctctctggtgatgtgtacccattgttaatctctccaatgaagctaccctgcttgaccaggcccacaggctgtctcctgcatacggtggcaacacaccagcactgctgccctgtcctaaggccacctcttcgccttgcctccactggatcccagctgtcagcagcacgctgaaaccctccatttgtgaaacttcagatcgcttgttttctagcggcgatggacggtggtggtcggcctttgaacttcgcagccacgtattcagattttttttgagttattgtaatttatttacattccctctagatatgtgattatcaagacgtatgtcagaagacatgaatattccttgtttggattggcgtgtttgatccagaaacagtctgtcattgctaattgtttcattattgctacaaatcttggtcgaggcgtg

SEQ ID NO: 13780 - protein, 112 aa, Zea mays subsp. mays
  misc_feature (1)..(112): Ceres Seq. ID no. 12375151
MSTINRKEREKENKYIWHQKLLPCYNINLMTEIINIFTILANLSTCSLNRQNISRVIFVTFIVPNVVSRQSLFGFSVFLNTGFSIAFSMCICTSLTSVAIVILPGISSVHHL

SEQ ID NO: 13781 - protein, 83 aa, Zea mays subsp. mays
  misc_feature (1)..(83): Ceres Seq. ID no. 12375152
MTEIINIFTILANLSTCSLNRQNISRVIFVTFIVPNVVSRQSLFGFSVFLNTGFSIAFSMCICTSLTSVAIVILPGISSVHHL

SEQ ID NO: 13782 - protein, 65 aa, Zea mays subsp. mays
  misc_feature (1)..(65): Ceres Seq. ID no. 12375153
MLRKRVLPMFQIIVHLDLMIQSIISGVVYSQCIVSLCVCLCFPCTLFLSRGTLCQVPEIWFSFRQ

SEQ ID NO: 13783 - DNA, 797 bp, Zea mays subsp. mays
  misc_feature (1)..(797): Ceres Seq. ID no. 12375291
gcacgagaccattacctagaacatcctaatcgaaaactcacagttcttcagtagattgattaccacaggcgagtggcgccgctcgccaatgaccacgccccacggatggccgatgaaccagccataaatcagtcggtgggcttgcggtggaagccatcgtcgggggagaccggttcagcgggggagggtacaacagcggtgacgacggcggcgggcgggccgacggggatccgccgggacaccatctcgtccaccttgtccgggtccccggagagtagcgcctccacggtgccgtcgcggcggttgcggacccacccggcgagccccagggagcgcgccatctccacggtccagtcccggaagaagacgccctgcacgcgtcccttcaccaccacgcgcaccgccttggtgggagaagactgctgcatcggcgggtcgcttggggcgcccgtgcatgccgccatggcacggcggggtgcggtggcggtgaaggggcgaaggaagcgggggccggtggcggagctggaggggaacattctggagcaggcgagcagcaggaagaatgcgatgctggttggaaccacggactcactcggaggctcggagccagtccgagtctgacggtctggtgggcgcctgggcggtggctgtggaccgaaggccgagccaacattcgagttgggctaaaacccagacgtgaatactcgtggaccgcgtagagatctgagaggatcgttgtattttctcgcccgttaggatttggcaatttttatttatactaataattactcttttcg

SEQ ID NO: 13784 - protein, 171 aa, Zea mays subsp. mays
  misc_feature (1)..(171): Ceres Seq. ID no. 12375292
MADEPAINQSVGLRWKPSSGETGSAGEGTTAVTTAAGGPTGIRRDTISSTLSGSPESSASTVPSRRLRTHPASPRERAISTVQSRKKTPCTRPFTTTRTALVGEDCCIGGSLGAPVHAAMARRGAVAVKGRRKRGPVAELEGNILEQASSRKNAMLVGTTDSLGGSEPVRV

SEQ ID NO: 13785 - DNA, 960 bp, Zea mays subsp. mays
  misc_feature (1)..(960): Ceres Seq. ID no. 12376701
gcacgagaccattacctagaacatcctaatcgaaaagaaactcgaaagggaagcatgcagcgttcttatatgagatgtgcaagttctacagagattggcatgccaagtctgatggttttcatggtatttgaaattaataatatactactgttatatgcttttgccaattaccatcaaatatgagaagaaacacgcttctgacagaaaatcgctttctgttcaggaattttccttcatgatcctgtgagcttcactgccgtacttcatccagagtacttcacattcaagaagggtgtggtgagagtagagacccagggcatttgcactggccacactttgatggatcagggattgaaaaagtatgtttttttttctctctgagtaactcataaaagattgacccgtctgatgttttttagtttcagcattcttacatacaccacattgatatgacataaatctcaccaaattactttataacttttggagtaagcaaaccaaggcaaaagttaccccacatgatctatatgtttcagcagatttcacacttgtttcttcttgttcctcctatgctgcaggtggaattcagagaacccatggtcagggtataaaccgatttcagttgcatggacggttgatgtgccaaaggtcatcagctttataaagaagctgctcatggcaccatgagcaaagtacaaccatttaacgacgtgtcgacatcagcgctctctgatgtccaagaaaatttgacgagtacagatgctctttctcagttgcactgtaattagttcctggacctaggatgattcctattcctccaatagtaagaggaacctttcattgtgaaaggtcatgcagcagtctcgaataccatgaagcaaattctggcatacgacatcatgtctcacacatttgtatcaatacatttcgaatcaataaagtttccctcactctttactc

SEQ ID NO: 13786 - protein, 60 aa, Zea mays subsp. mays
  misc_feature (1)..(60): Ceres Seq. ID no. 12376702
ARDHYLEHPNRKETRKGSMQRSYMRCASSTEIGMPSLMVFMVFEINNILLLYAFANYHQI

SEQ ID NO: 13787 - protein, 52 aa, Zea mays subsp. mays
  misc_feature (1)..(52): Ceres Seq. ID no. 12376703
MIPIPPIVRGTFHCERSCSSLEYHEANSGIRHHVSHICINTFRINKVSLTLY

SEQ ID NO: 13788 - protein, 42 aa, Zea mays subsp. mays
  misc_feature (1)..(42): Ceres Seq. ID no. 12376704
MQRSYMRCASSTEIGMPSLMVFMVFEINNILLLYAFANYHQI

SEQ ID NO: 13789 - DNA, 397 bp, Zea mays subsp. mays
  misc_feature (1)..(397): Ceres Seq. ID no. 12378430
ggagatccgagtgtccacgatgacagagaccggcttttgaatctctcgtctctccatctctcatgcgttccaaacttccaactccagtgtcgtccccgctgactcatcagtgatcacctctgaccctctctggtgatgtgtacccattgttaatctctccaatgaagctaccctgcttgaccaggcccacaggctgtctcctgcatacggtggcaacacaccagcactgctgccctgtcctaaggccacctcttcgccttgcctccactggatcccagctgtcagcagcacgctgaaaccctccatttgtgaaacttcaggtgcgcgtagtttaggaggttagattttacttaatcggcatttgcattggataatatgcctaacatggtggctttag

SEQ ID NO: 13790 - protein, 44 aa, Zea mays subsp. mays
  misc_feature (1)..(44): Ceres Seq. ID no. 12378431
MKLPCLTRPTGCLLHTVATHQHCCPVLRPPLRLASTGSQLSAAR

SEQ ID NO: 13791 - protein, 33 aa, Zea mays subsp. mays
  misc_feature (1)..(33): Ceres Seq. ID no. 12378432
GDPSVHDDRDRLLNLSSLHLSCVPNFQLQCRPR

SEQ ID NO: 13792 - DNA, 1075 bp, Zea mays subsp. mays
  misc_feature (1)..(1075): Ceres Seq. ID no. 12381021
aagaaccaaagatatgacttcgtatgtcctcctactgctcccttcagatcgacgccgccccctccctcagcctcatcttcagccaccgccgaccccatggcgtgctcgcacaaactccacctccagtgcgcccctctgttctgctccaaccccttctccacgctgatgtctcctcccatggctatcccaaaccctagccgagatcccctcctgtgttggccaccgtctccttcaccaggcgccctccgctatcctcttgctgtcagcacatggcgagctcaccccctatgccagtcgagttcatcacttcccctagagcaacaccttcatccatggtgcccagctgctccttggagcctatggtggtgatctctaaatccctttgttgttttactagttcttgttaataccctgctgatgtgatattttatgtgtgttgatgtgtgcgatatggagtaaaatccctagagaattaggtggagaagaaggttaagttcaacgctccttaggtgttcgatgatatgctcgaactggtggccgtcttcgctcttgctaaaattgagtcggagcatgatgtgtttccttcggtctgcaggttcttccctttggtgccaaaaaatctaaatacccatatcacagaggctcgtggagttggtgagcaggaccaccaccctccatcacaacctgataatggtacgttaattaatcacgtgatgtggagggcaagagttggattaatctcaaggtgatggtgacgattgaacctgaagatttgacgatctgatcaagtaccaggaggagagatgctcaccaagtggtcgtcttttaacaacactaacgtagtgattattccaggttataattttgttctgttgtggatgatgctaaatgccggtgggctcggccttcttatataagtgtatcccatctttagcttctttattgagaattatcatttaagctagcatttattttaaaacttataaatgtttcatacattcaaattgtaatctttttgaatcaatttcttttgtaatcaactccgatgatatatattgtaattttgttataacct

SEQ ID NO: 13793 - protein, 122 aa, Zea mays subsp. mays
  misc_feature (1)..(122): Ceres Seq. ID no. 12381022
KNQRYDFVCPPTAPFRSTPPPPSASSSATADPMACSHKLHLQCAPLFCSNPFSTLMSPPMAIPNPSRDPLLCWPPSPSPGALRYPLAVSTWRAHPLCQSSSSLPLEQHLHPWCPAAPWSLWW

SEQ ID NO: 13794 - protein, 90 aa, Zea mays subsp. mays
  misc_feature (1)..(90): Ceres Seq. ID no. 12381023
MACSHKLHLQCAPLFCSNPFSTLMSPPMAIPNPSRDPLLCWPPSPSPGALRYPLAVSTWRAHPLCQSSSSLPLEQHLHPWCPAAPWSLWW

SEQ ID NO: 13795 - protein, 75 aa, Zea mays subsp. mays
  misc_feature (1)..(75): Ceres Seq. ID no. 12381024
MLELVAVFALAKIESEHDVFPSVCRFFPLVPKNLNTHITEARGVGEQDHHPPSQPDNGTLINHVMWRARVGLISR

SEQ ID NO: 13796 - DNA, 1420 bp, Zea mays subsp. mays
  misc_feature (1)..(1420): Ceres Seq. ID no. 12382051
aacaattattctcaacgcctcttgaactttcttgactaggtattccctctctctctcgtcaactgcgctcaccctgcgctccggaacctggtagctgtcgcccgttccgtcggctcttcctcccagcgcactgcgcggccccaagctacagatcttgctcttagcgccctgcgcggccctgagctacaggttcttctccactgtcgcctgttccgtcagctattcctcctagcgcactgcgcggccccgagctacagatcttcctcctagcgccctgcgcggccccgagctacaggctatttgtgttgacgacatcttcagaaccttggtgaagctttgaagaattagtggcctatacaagaccaaggaatcttgtcctttctttgcgacatgagtacgcgcaacagttatcatctacccaccacctatccaaggagattatatgttctacaggtgccaaaggttcatctataactataccagatcgactgtccggaataccgtagattattccggacaggagaagctttttggaaaaacaggccaagcgcggaccgtccgggcccttgcggcggaccgtccgcgacacaaggatgcccttcggacagaaccaatgcaaaaacacaagtttccactacggactgtccggaggaaaagcaaagaccgtccgagcccacgcgcggaccgtccggcctcaggcgcggaccgtccggtcggtaagaaaccgaaaaacccgaaggtaacgggttcggagaaatgaattataggggcctcgcggaccgtccggggtgctcgaccggaccgtccgcgactggctctgtctgacatctgacgccgcattaaatgcaatatagccgttgatatagccgttactgctgaccgttgcattttcagccgttgatctacagggggcggaccgtccgcaccaggagggcggaccgtccgcgctcagcagaaaggcccaacggctaggaagtggttggtggctataaatacaaccccaaccacctccattcacttcatccaagcattccaaccttcaacattcaatacaagagctagcaatccattccaagacacattcaaagcctccatctctccaagtttcataattgagaaaagagatcattagtgattagtagcttgagagagaaagtgatccgtgtgttgtttgtcgctcttgtcgcttggctttttcaatcgtgctttcttgattctttcattgggatcaatctcacttgtaattgatacaagagacaccaaacttgtggtggtccttgtgagaactttgtgttccaagtgattaagaagagaaagctcactcggtcgagggaccgtttgagagagggaagggttgaaagagacccggcctttgtggcctcctcaacggggagtaggtttgcaagaaccgaacctcggt

SEQ ID NO: 13797 - protein, 105 aa, Zea mays subsp. mays
  misc_feature (1)..(105): Ceres Seq. ID no. 12382052
MFYRCQRFIYNYTRSTVRNTVDYSGQEKLFGKTGQARTVRALAADRPRHKDALRTEPMQKHKFPLRTVRRKSKDRPSPRADRPASGADRPVGKKPKNPKVTGSEK

SEQ ID NO: 13798 - DNA, 900 bp, Zea mays subsp. mays
  misc_feature (1)..(900): Ceres Seq. ID no. 12382783
gcacgagaccattacctagaacatcctaatcgaaaatatatgtacgagttgagttggataccatggtaaggttgctaaacatgaatatgctttcgaaaaaaggatgttaagtaacttagtgactctgcttaacactgtaggatttgaggctgccatagtatgctctctgaccgtgctaacgggaggaaggagatgatttaagttctccatgtttataaccagaaagaggaggatagtccaatcatggtaactaaatagtaggtagtaatgtttcacggtaaatcacagttctcgaatgtgatatgatctttgactcggagtattgaagactaatttagtttgagtttgagattagttgtttttgtcattaataaactcacattagcgtctggttacgagctcactactagattttagatctccatttttggtgtacttctgctgcatgtgcctcccatagttgcggatttgcaggtaaacatgaatacaaggctggcttgatctggcaagtgctcgccattctatgggcccatcacacttttcgagtacactgtttgatcatgaagagcagtctgctgccactaaacttgaggttgttgatcatgattgtctgaaaatttatcggggatatgccttgggatggagaaatgtcacagaacacaggatgaagacgattccaagaatccacccatgtcaggactagaagacgccttcacatcacggagtagagctctcagcaacaacagtgcaacgatgtttggacttttgttcacatatgggagtgcaccaccatgtaaaatagacaaggcggtgcttttgcaaacatgatgctgccacgagacccgaacttatgtatggccaaacatgttaacatattttgtatgtcatgggctgttccag

SEQ ID NO: 13799 - protein, 62 aa, Zea mays subsp. mays
  misc_feature (1)..(62): Ceres Seq. ID no. 12382784
MEKCHRTQDEDDSKNPPMSGLEDAFTSRSRALSNNSATMFGLLFTYGSAPPCKIDKAVLLQT

SEQ ID NO: 13800 - protein, 59 aa, Zea mays subsp. mays
  misc_feature (1)..(59): Ceres Seq. ID no. 12382785
MGPSHFSSTLFDHEEQSAATKLEVVDHDCLKIYRGYALGWRNVTEHRMKTIPRIHPCQD

SEQ ID NO: 13801 - protein, 45 aa, Zea mays subsp. mays
  misc_feature (1)..(45): Ceres Seq. ID no. 12382786
MSGLEDAFTSRSRALSNNSATMFGLLFTYGSAPPCKIDKAVLLQT

SEQ ID NO: 13802 - DNA, 568 bp, Zea mays subsp. mays
  misc_feature (1)..(568): Ceres Seq. ID no. 12382795
agtaagtatctcctgccgggtatcaagactgaagaacaaaggtcagatctcgcgtatgctcgtttgtagcagtgtggatctgatacaggtaattgaaacctttagatggtggtagggctagtagtgagcagtagacgacaactagtcctggcagccagttgtagtgaggtgacatggctgcatacagacatccaaccaaaggaaacagagggtgtggtgtggaaagaaggggagagtggacaaaagccagaccggacagacatggctggcgctgctgctgctgcacaggcacagggaaaggtgatgagacgagaggggtggggtggtactctgctgggaccggcgcactcacgggtgcggagaatcagcttcgcctcacgagcgatgcagcagcggagacacagacacctctcgtctgcgtactgtttcgcccatgctcttgtcttgtacgcatccagcagcgttccttgtcctttggctccttcgatgtattacctgctcttcttttcaactaggagtttagcggacaaagaaatgaaaaagtaattagcagtcatttatcttggtc

SEQ ID NO: 13803 - protein, 146 aa, Zea mays subsp. mays
  misc_feature (1)..(146): Ceres Seq. ID no. 12382796
MVVGLVVSSRRQLVLAASCSEVTWLHTDIQPKETEGVVWKEGESGQKPDRTDMAGAAAAAQAQGKVMRREGWGGTLLGPAHSRVRRISFASRAMQQRRHRHLSSAYCFAHALVLYASSSVPCPLAPSMYYLLFFSTRSLADKEMKK

SEQ ID NO: 13804 - protein, 113 aa, Zea mays subsp. mays
  misc_feature (1)..(113): Ceres Seq. ID no. 12382797
MAAYRHPTKGNRGCGVERRGEWTKARPDRHGWRCCCCTGTGKGDETRGVGWYSAGTGALTGAENQLRLTSDAAAETQTPLVCVLFRPCSCLVRIQQRSLSFGSFDVLPALLFN

SEQ ID NO: 13805 - protein, 94 aa, Zea mays subsp. mays
  misc_feature (1)..(94): Ceres Seq. ID no. 12382798
MAGAAAAAQAQGKVMRREGWGGTLLGPAHSRVRRISFASRAMQQRRHRHLSSAYCFAHALVLYASSSVPCPLAPSMYYLLFFSTRSLADKEMKK

SEQ ID NO: 13806 - DNA, 1338 bp, Zea mays subsp. mays
  misc_feature (1)..(1338): Ceres Seq. ID no. 12386460
agtgcaagccaagcattctcctcacacacgtacttccgccagcgcagctagctagctgttctcttcttgccatcatctctcgtctgtgatcgaacgccggcgcgcggccagcatggagatgatcgacgcggagctgcgtcttggcccgcccgggagcaacaacagcgacgtcgtcgtcaccgtcgtgccgcctgcagcggcgaggaagccggcggcgccgcgcgccggcgccggcttcggcggcgaaacggccgtcctcgtcggtggtgaagagcgacgcgtccgggacgggcgaccatgacgacgacgccgcaccggcctccaaggtgcgggcggtggggtggccgccggtaagagcgtaccggaagaacgcgttccacgcggcggcggaggcggcgaggaggaccaataataagggcgaggagctgcagggaggcggccgcctgtacgtgaaggtgagcatggacggggcgccctacctccgcaaggtcgacctgcggacctacggcggctaccgggagctgagggacgcgctggacgcgctcttcggctgcttctcctcctcctcctcctcggccgacggcggcagccagttcgccgtcgcctacgaggacaaggacggcgacctcatgctcgccggcgacgtgccctgggagatgttcatctgctcctgcaagaagctgaggatcatgagggggtccgaagcaagataaccaacgcagcgaggatgcaaagaacatgttggatgcatggcatgcatggaggtccagctagctatggtccgtccaactcatgcatgggacagagcacagagggagagagagagacagaaaaaaaagggaggtctttatatcggccatccaatggaattggaggcgcggcgtagggtatatacctgcacagggatcggaggccccatgcatgcatgcgcgcgtcgtcgtgttctacggccagcccagccggctcataccatacacaccatggacatgcacatgatcagatggagcatggaggtgatggttcaaggatcacggcggcgtagtacgcgtcacgccgtgtctcccgccatcagtcaggcggacgtgctgctgtggacggctgactgggacgtgcatgcatggcagatcggagattattcagccaagtagtagcatcggtgaaaagctactaccacctaggattttttttttttgtgctgtgcacgctagttagctcatatgctgtagtttcatagctagcttgtgcttgctagcctatctgtaactttgagttcctcttttgtaagtgacctgggcccatgtatattagttcattctaggggtacgtgcagccgcaccc

SEQ ID NO: 13807 - protein, 132 aa, Zea mays subsp. mays
  misc_feature (1)..(132): Ceres Seq. ID no. 12386461
MACMEVQLAMVRPTHAWDRAQRERERQKKKGGLYIGHPMELEARRRVYTCTGIGGPMHACARRRVLRPAQPAHTIHTMDMHMIRWSMEVMVQGSRRRSTRHAVSPAISQADVLLWTADWDVHAWQIGDYSAK

SEQ ID NO: 13808 - protein, 129 aa, Zea mays subsp. mays
  misc_feature (1)..(129): Ceres Seq. ID no. 12386462
MEVQLAMVRPTHAWDRAQRERERQKKKGGLYIGHPMELEARRRVYTCTGIGGPMHACARRRVLRPAQPAHTIHTMDMHMIRWSMEVMVQGSRRRSTRHAVSPAISQADVLLWTADWDVHAWQIGDYSAK

SEQ ID NO: 13809 - protein, 123 aa, Zea mays subsp. mays
  misc_feature (1)..(123): Ceres Seq. ID no. 12386463
MVRPTHAWDRAQRERERQKKKGGLYIGHPMELEARRRVYTCTGIGGPMHACARRRVLRPAQPAHTIHTMDMHMIRWSMEVMVQGSRRRSTRHAVSPAISQADVLLWTADWDVHAWQIGDYSAK

SEQ ID NO: 13810 - DNA, 1383 bp, Zea mays subsp. mays
  misc_feature (1)..(1383): Ceres Seq. ID no. 12387170
atcggcatcggaatcggcgttgccacttccaccgcttctgctccccttcgccctgcttcatgttccgcgattcccttcgcacaccctcccgctgccgccgctgttctcctaccacccgtcctcccgcgctgggtagcggtactaatttaggatctgatacactttctgtgcggaagcgcggtcctgctaaatccgtgtgccggggttccagattgcaggagcttgccttgtagcgtcgggttatgctggttgcagcgagtggctaagcagagatccagtcgcggcgcgctgcttgcttgcttccaaccctgggtgcttgtgctactctttcaagctcgtgatctcatcatgggcaatgcagcatgctcgttcttactagttactaagtttatttatccatacaacccatgttataagttgggtcaggaactcaggatacggatactgttatgcagctgtgcaggcagggccacagaacaagtttgtttgtacacagactcaagaaatggaaaacaaattcttgttatttgggaaaacaacttcttgttatttgcgtttgcacaccattttgagttgatttcatccactgaagactaaagagtgaagtaataaggtcgtgtacacttgattttcccctcctctggttggttgcacaggaccatgatctggtcgttgagccgaggtcattcaccggttccactcagcccagcagaccggatgtaaggccatcgtcttcatcgtccagcgataatgccagggcacataattcaggtaaagtatgtatgttgtggacatccatcattttcttctgtcacagttgctgcactacctgtgctttgctgggcacttgataatgttgccagattccgaaggcttaactttgccggatcctctttctataggagatacctggaagagccttgtctttggctgggtaaacacaaataatactacgctgagcctcctcagttcaaatgctgaaagcgccttgggttttcttcactgttctcgtggcgcggtagcataattcagacattcatgtactgggagctgagggattagtacgaggccatttatgctgttttgctgcatgcgttgaagccgatgtatcatgctgctcccgtgacatccagacgccccgttcctccttccagacgcccatttctgggatccaaatatggtggctctggtagggtggtttaagatcatgtatctgctgctgaatagctgagctgcccgggttgtctgcacagaacttagcacagccgctgtgttcttatgtaatgctgcagcagtgcgcgggataagttttctgcagaaaaatagcattcattgtatttgtctggaacgtatgatcccaatttgataactgtagcttctgct

SEQ ID NO: 13811 - protein, 82 aa, Zea mays subsp. mays
  misc_feature (1)..(82): Ceres Seq. ID no. 12387171
MGNAACSFLLVTKFIYPYNPCYKLGQELRIRILLCSCAGRATEQVCLYTDSRNGKQILVIWENNFLLFAFAHHFELISSTED

SEQ ID NO: 13812 - protein, 82 aa, Zea mays subsp. mays
  misc_feature (1)..(82): Ceres Seq. ID no. 12387172
MYVVDIHHFLLSQLLHYLCFAGHLIMLPDSEGLTLPDPLSIGDTWKSLVFGWVNTNNTTLSLLSSNAESALGFLHCSRGAVA

SEQ ID NO: 13813 - protein, 76 aa, Zea mays subsp. mays
  misc_feature (1)..(76): Ceres Seq. ID no. 12387173
RHRNRRCHFHRFCSPSPCFMFRDSLRTPSRCRRCSPTTRPPALGSGTNLGSDTLSVRKRGPAKSVCRGSRLQELAL

SEQ ID NO: 13814 - DNA, 1002 bp, Zea mays subsp. mays
  misc_feature (1)..(1002): Ceres Seq. ID no. 12387989
aatcttttgaagcaaccttctccagcttcagatgggcaaaagctcttctcctaccagcaggatattccctactaaccgccgccgtctttgccggtcatgtcatgtgaccctgatggtccccagaaagggcgtcctctgcggcggcggcggcggcggcggcagcgatggccccatctggacctgctgctggtgctcgctctgccgggcggtcgagatcttcagctccaggtccggcgccaggccaccagcctttgccgccgtcagcgacgaagaagggtggctgtgtttcggcggcgccagggccaggctcggcgccgtgcggccaattcccgccgagcaccgcggcagctgcagggacagcaggctgctcggaggcagcgcggcgtggtcgggcctcgctggtggcctgccgacgccgagcgacagggccggcgggagctgtgccgtcgtcccggttccgggttctgcggagccagtcgcggtcgcggtcgtgatggcgtccttgagccgcaggcgctccatgcccttgatggagctcgtcgccgccctctcggcgttctccacctgaaacggaagaggttcgcgaatcagacacgcacacgccagggctggtacagcacgtctcgcatggagggagcgtggcgacggacggacgggacgggacgggacgtaacgtaccacgtcgaagaggctggacctgcgcttcttgtgcgtcaggctgctctgccggaggaagtacttctgggcgtggctggccacctgcgtcggggtccgcgtcgtcacgaagtgccgggagatgcctcgccagtcgcccttcccgagcttctccaggcccgccaggaatcgcctgtgctcgtcctccgtccatggaacgcctggtgatacccagacaagaaggcgaggagagttttttttttagaatcagacttgcttagctcaaacaagctgccgggaacaggagtattgttgttctattctgttctgttctatataaaagatttg

SEQ ID NO: 13815 - protein, 261 aa, Zea mays subsp. mays
  misc_feature (1)..(261): Ceres Seq. ID no. 12387990
MSCDPDGPQKGRPLRRRRRRRQRWPHLDLLLVLALPGGRDLQLQVRRQATSLCRRQRRRRVAVFRRRQGQARRRAANSRRAPRQLQGQQAARRQRGVVGPRWWPADAERQGRRELCRRPGSGFCGASRGRGRDGVLEPQALHALDGARRRPLGVLHLKRKRFANQTRTRQGWYSTSRMEGAWRRTDGTGRDVTYHVEEAGPALLVRQAALPEEVLLGVAGHLRRGPRRHEVPGDASPVALPELLQARQESPVLVLRPWNAW

SEQ ID NO: 13816 - protein, 178 aa, Zea mays subsp. mays
  misc_feature (1)..(178): Ceres Seq. ID no. 12387991
MGKSSSPTSRIFPTNRRRLCRSCHVTLMVPRKGVLCGGGGGGGSDGPIWTCCWCSLCRAVEIFSSRSGARPPAFAAVSDEEGWLCFGGARARLGAVRPIPAEHRGSCRDSRLLGGSAAWSGLAGGLPTPSDRAGGSCAVVPVPGSAEPVAVAVVMASLSRRRSMPLMELVAALSAFST

SEQ ID NO: 13817 - protein, 151 aa, Zea mays subsp. mays
  misc_feature (1)..(151): Ceres Seq. ID no. 12387992
MVPRKGVLCGGGGGGGSDGPIWTCCWCSLCRAVEIFSSRSGARPPAFAAVSDEEGWLCFGGARARLGAVRPIPAEHRGSCRDSRLLGGSAAWSGLAGGLPTPSDRAGGSCAVVPVPGSAEPVAVAVVMASLSRRRSMPLMELVAALSAFST

SEQ ID NO: 13818 - DNA, 1263 bp, Zea mays subsp. mays
  misc_feature (1)..(1263): Ceres Seq. ID no. 12391490
  misc_feature (1009)..(1009): n is a, c, t, g, unknown, or other
agacatttcgtcgagcatcggctagacgacgcgcagcgatgccagcgtctgcgcgagcgtgtcgtcctccccgagccgcggctggtcgccttgaggacgcgtctcctcgtcagtcatccctcatctccctgggagaaggcgcgggccacgctgtggcagccttcctgtcgaccaccgcatcatggccgtcggggtggagcttccacgcagcagcggtgcacctggcctcggtcgcgacattcgcaaccgagcgctcgagccagcagaaggaccacggcctcgaagactacgacggcctcgatgtcgcacgggcagaggcatccagtccgccgccctcgatgtcggcgagctgttccagccaccgctccaagctgcagccatgaggtggtggtacatcaacatcacgcgcaaggcgctcgacaaaatgctcaagtccctgtgaagctataaaggactgttctgatcgcaatgtgcaagcgcaacaacttgagggcagagtgttggcggcagctcgctcggctcgactcagtttacggctgggaaggctttctgggcctgtgctgctcggcttccacgcgcaattgaggcccattgggccgccgcctcagacccctttcgccaaccccctcctcctcgagccgccgtcgccagatctcccccagggacgcgctcatccttttgcctcccaactgtgctgtgcaggaacctgcggggaaggcggtcgctcgctcgctgagaggatgcctctggggctgacgctgggctcgctggggcggtcgatgcgccggaagcggctgtcctcgctcgacatcctctcctccaagcgggcgccgcgggattactacaagggcaagaactgcaagcccaccgggttccacacccgcaaaggtggatatgtgattgttgatgaaaagttgccaagatttgtggtccctgacttgactgatttcaagctgaaggcatacgtgtcacaatgcgccagggacctcacagcgtcgacagcatcctntacttcagcagaaagtactgaaagcaagagctgatctgatctttgcttgcggggaggcagcccaactctgaagttatgtttccctagactgcccatgttccgaggattagcatcagcattctagctacaaacatttcagatatctttcttgtaagggcaaacattatggcatacctagattcacttttcctgcttgtaattttgatcttcattttgaagtaataagtacttgagttaaggggacatttcttgtg

SEQ ID NO: 13819 - protein, 149 aa, Zea mays subsp. mays
  misc_feature (1)..(149): Ceres Seq. ID no. 12391491
RHFVEHRLDDAQRCQRLRERVVLPEPRLVALRTRLLVSHPSSPWEKARATLWQPSCRPPHHGRRGGASTQQRCTWPRSRHSQPSARASRRTTASKTTTASMSHGQRHPVRRPRCRRAVPATAPSCSHEVVVHQHHAQGARQNAQVPVKL

SEQ ID NO: 13820 - protein, 126 aa, Zea mays subsp. mays
  misc_feature (1)..(126): Ceres Seq. ID no. 12391492
TFRRASARRRAAMPASARACRPPRAAAGRLEDASPRQSSLISLGEGAGHAVAAFLSTTASWPSGWSFHAAAVHLASVATFATERSSQQKDHGLEDYDGLDVARAEASSPPPSMSASCSSHRSKLQP

SEQ ID NO: 13821 - protein, 114 aa, Zea mays subsp. mays
  misc_feature (1)..(114): Ceres Seq. ID no. 12391493
MPASARACRPPRAAAGRLEDASPRQSSLISLGEGAGHAVAAFLSTTASWPSGWSFHAAAVHLASVATFATERSSQQKDHGLEDYDGLDVARAEASSPPPSMSASCSSHRSKLQP

SEQ ID NO: 13822 - DNA, 904 bp, Zea mays subsp. mays
  misc_feature (1)..(904): Ceres Seq. ID no. 12400256
gaaaaacatctcacgccacgcctgctgcagcacctcgctctccgctccgttggccccatggagtccgtcgcgtccgccgcgatcgccaccacctcccgctctctcccgctccccttctcttctaccccggtccaccgccggcgccgtgccgccttcctccccgttgccgcctccaagcgtcacgacgacgacaaggaggccgcgaaagggtccggctcggaaccacggcgcgagcctaccagcctcgcgccgtacggactctccatctcgccactctccaaggacgcggccatggggctggtggtgaggcgctgccacggggagcggctggacgacgggatcggggatggagagcccgccgacggcgagcaaagccggtggggctggcaggccggaggtgtcgacgctgccttggtccctcttcacgaaatcaccgcggcggcgcatgcgggtggccttcacctgcaacgtgtgcgggcagcgtacgaccagggccatcaatcctcatgcctacaccgatggaactgtgtttgttcagtgctgcggttgcaacgtgttccataagttgtcgacaacctgaacctgtttcatgagatgaagtgctatgttggcccagatttccgctacgaaggggatgctccattcaactaccttgacagaaacgaggatggcgacagtatcttccctcgctaaagcctaaagcctcccttatgttgcagacttgcagtacccaaaaaaatgatcggtcctgttctaatttgttcgtgtagctgtacttaataagcagatgtaccttcatgaacctgtaagactagtttatcatacgcatagatgaccagtcactagaatctacactggagttgtaatgtcggtgaccagttagtgtaattttctattgcctgtc

SEQ ID NO: 13823 - protein, 196 aa, Zea mays subsp. mays
  misc_feature (1)..(196): Ceres Seq. ID no. 12400257
KTSHATPAAAPRSPLRWPHGVRRVRRDRHHLPLSPAPLLFYPGPPPAPCRLPPRCRLQASRRRQGGRERVRLGTTARAYQPRAVRTLHLATLQGRGHGAGGEALPRGAAGRRDRGWRARRRRAKPVGLAGRRCRRCLGPSSRNHRGGACGWPSPATCAGSVRPGPSILMPTPMELCLFSAAVATCSISCRQPEPVS

SEQ ID NO: 13824 - protein, 187 aa, Zea mays subsp. mays
  misc_feature (1)..(187): Ceres Seq. ID no. 12400258
EKHLTPRLLQHLALRSVGPMESVASAAIATTSRSLPLPFSSTPVHRRRRAAFLPVAASKRHDDDKEAAKGSGSEPRREPTSLAPYGLSISPLSKDAAMGLVVRRCHGERLDDGIGDGEPADGEQSRWGWQAGGVDAALVPLHEITAAAHAGGLHLQRVRAAYDQGHQSSCLHRWNCVCSVLRLQRVP

SEQ ID NO: 13825 - protein, 168 aa, Zea mays subsp. mays
  misc_feature (1)..(168): Ceres Seq. ID no. 12400259
MESVASAAIATTSRSLPLPFSSTPVHRRRRAAFLPVAASKRHDDDKEAAKGSGSEPRREPTSLAPYGLSISPLSKDAAMGLVVRRCHGERLDDGIGDGEPADGEQSRWGWQAGGVDAALVPLHEITAAAHAGGLHLQRVRAAYDQGHQSSCLHRWNCVCSVLRLQRVP

SEQ ID NO: 13826 - DNA, 1065 bp, Zea mays subsp. mays
  misc_feature (1)..(1065): Ceres Seq. ID no. 12402437
agcagctagcatacctgcgcgacggttttccccctcgccttggctatcgcggcgagcacctcggagtccagcacggcgctgccctgcccgtcccagttctgccctcccagcggcgagtaggccgcgacgtggatgcccctgtcggcgcagtacgccctgagcgtccgctgctgccacgccgggttcagctccacctggttcaccgcgggcgggaccgtggcgacggccatgaccccgtcgaggtgcctggtggtgaagttgctcacgccgatcgccttggcgaggcccagccgctggcactcctccatggcgcgccacacgcccgcgaggtccagcggcacggcgttctccttcctggtcgggagctcgggcggccccggtttcaggcacaccggccagtggatcagcggcgatagggacggactagcggcttacttgagtgtttcccggagggacggcagcacgaggtccgggtggttctgcgagcaccacagcttggacgtcacgaacagatcctcccgggaccgcagggtcccgcgccggagcgcctcggccacggcgtcgcccagcggcttctcggtgccgtacatggaggccgtgtcgaagtggcggaaccccacctcgatggcggagagcacgccgtccttgacggcctcgtgcaccagagggaacgacgccgtgcccatgccgaccatcggcatcgccgtcctcgcgttgcccgaccgcagggccacctcgggcaccaccgccgtcgtccccgcggatgccatgttcatagggtcagatgtggtgcgctgccgctgcagtacaacgtctagactagatgcgagagactgcttgagcggtgatgagcccatgccggtcgatttatgcactagtattgcaaacggccaaacgtggtggtggactctggactggtggacaggcgatgtggactcgatcgcagtattctagagtttttggcgtcacgagttaggctatctacagcggaccagaggttacctctatttcttctcatcattttttgcatcactcatcaatattgtgtcccctactttttcatct

SEQ ID NO: 13827 - protein, 273 aa, Zea mays subsp. mays
  misc_feature (1)..(273): Ceres Seq. ID no. 12402438
MPLSAQYALSVRCCHAGFSSTWFTAGGTVATAMTPSRCLVVKLLTPIALARPSRWHSSMARHTPARSSGTAFSFLVGSSGGPGFRHTGQWISGDRDGLAAYLSVSRRDGSTRSGWFCEHHSLDVTNRSSRDRRVPRRSASATASPSGFSVPYMEAVSKWRNPTSMAESTPSLTASCTRGNDAVPMPTIGIAVLALPDRRATSGTTAVVPADAMFIGSDVVRCRCSTTSRLDARDCLSGDEPMPVDLCTSIANGQTWWWTLDWWTGDVDSIAVF

SEQ ID NO: 13828 - protein, 241 aa, Zea mays subsp. mays
  misc_feature (1)..(241): Ceres Seq. ID no. 12402439
MTPSRCLVVKLLTPIALARPSRWHSSMARHTPARSSGTAFSFLVGSSGGPGFRHTGQWISGDRDGLAAYLSVSRRDGSTRSGWFCEHHSLDVTNRSSRDRRVPRRSASATASPSGFSVPYMEAVSKWRNPTSMAESTPSLTASCTRGNDAVPMPTIGIAVLALPDRRATSGTTAVVPADAMFIGSDVVRCRCSTTSRLDARDCLSGDEPMPVDLCTSIANGQTWWWTLDWWTGDVDSIAVF

SEQ ID NO: 13829 - protein, 215 aa, Zea mays subsp. mays
  misc_feature (1)..(215): Ceres Seq. ID no. 12402440
MARHTPARSSGTAFSFLVGSSGGPGFRHTGQWISGDRDGLAAYLSVSRRDGSTRSGWFCEHHSLDVTNRSSRDRRVPRRSASATASPSGFSVPYMEAVSKWRNPTSMAESTPSLTASCTRGNDAVPMPTIGIAVLALPDRRATSGTTAVVPADAMFIGSDVVRCRCSTTSRLDARDCLSGDEPMPVDLCTSIANGQTWWWTLDWWTGDVDSIAVF

SEQ ID NO: 13830 - DNA, 926 bp, Zea mays subsp. mays
  misc_feature (1)..(926): Ceres Seq. ID no. 12404246
gccacgattgcagagccagagcgagacgcgactgcttttctgcttcatccacattggtagctagctagcttacacgttcacgcatcgctttccgggccgtctccggtggtttagctcagcagagcggggaaggaagaagatgacctccgtgagcgcgaggcccgttggcgtggggtactgcttcggcggggcgaggtgccagccacggtcgcgggtgcgggtttcggccgcggcctcggcagtggccgcgcccgcgcccgcgatggcggcgacgatgtacgagctgctcgccgtcgagnanangncggggcccnncnagatcaaggnggcgtaccggcgcgccgcgcgncggtggcacccgnacgcgtgccccggcggcagccgaccgcttcatggcggcgcgggaggcctacnaggtgctgtccgaccccgagcgcaggcgcggctacgacatccagctccgctgcggcgcccacttcggcgacgccgggtaccgcgcggcacgccgcgccgggttcgccgactgggaggcgcagctgaccgggctgcagtggcgcgcggcggggcggcgcgggcgcgccggcggggagacttggggcagcaggatgcgccaggcggccgcgcagccgtccttgtagcggcgtcgccggtggctggcctttgatagttcatacttcgtagtactagtgtactaccctaccttcccctttcctcttcgacaatcgaatggcccgagaagctttaattgcgctgttctgcagcgttttctcttgccaacacgtcatcctcgtcgcactgttcggagtgcagacgagcttgaagtctagaagcagtngacattttccccccctttgnagtgtagtactgtcaacttttagttcccantcggttacatncggttcgnancctatctcagnattnttttg

SEQ ID NO: 13831 - protein, 174 aa, Zea mays subsp. mays
  misc_feature (1)..(174): Ceres Seq. ID no. 12404247
  misc_feature (54)..(54): Xaa is any aa, unknown or other
  misc_feature (55)..(55): Xaa is any aa, unknown or other
  misc_feature (56)..(56): Xaa is any aa, unknown or other
  misc_feature (59)..(59): Xaa is any aa, unknown or other
  misc_feature (60)..(60): Xaa is any aa, unknown or other
  misc_feature (63)..(63): Xaa is any aa, unknown or other
  misc_feature (70)..(70): Xaa is any aa, unknown or other
  misc_feature (75)..(75): Xaa is any aa, unknown or other
  misc_feature (92)..(92): Xaa is any aa, unknown or other
MTSVSARPVGVGYCFGGARCQPRSRVRVSAAASAVAAPAPAMAATMYELLAVEXXXGPXXIKXAYRRAAXRWHPXACPGGSRPLHGGAGGLXGAVRPRAQARLRHPAPLRRPLRRRRVPRGTPRRVRRLGGAADRAAVARGGAARARRRGDLGQQDAPGGRAAVLVAASPVAGL

SEQ ID NO: 13832 - protein, 133 aa, Zea mays subsp. mays
  misc_feature (1)..(133): Ceres Seq. ID no. 12404248
  misc_feature (13)..(13): Xaa is any aa, unknown or other
  misc_feature (14)..(14): Xaa is any aa, unknown or other
  misc_feature (15)..(15): Xaa is any aa, unknown or other
  misc_feature (18)..(18): Xaa is any aa, unknown or other
  misc_feature (19)..(19): Xaa is any aa, unknown or other
  misc_feature (22)..(22): Xaa is any aa, unknown or other
  misc_feature (29)..(29): Xaa is any aa, unknown or other
  misc_feature (34)..(34): Xaa is any aa, unknown or other
  misc_feature (51)..(51): Xaa is any aa, unknown or other
MAATMYELLAVEXXXGPXXIKXAYRRAAXRWHPXACPGGSRPLHGGAGGLXGAVRPRAQARLRHPAPLRRPLRRRRVPRGTPRRVRRLGGAADRAAVARGGAARARRRGDLGQQDAPGGRAAVLVAASPVAGL

SEQ ID NO: 13833 - protein, 129 aa, Zea mays subsp. mays
  misc_feature (1)..(129): Ceres Seq. ID no. 12404249
  misc_feature (9)..(9): Xaa is any aa, unknown or other
  misc_feature (10)..(10): Xaa is any aa, unknown or other
  misc_feature (11)..(11): Xaa is any aa, unknown or other
  misc_feature (14)..(14): Xaa is any aa, unknown or other
  misc_feature (15)..(15): Xaa is any aa, unknown or other
  misc_feature (18)..(18): Xaa is any aa, unknown or other
  misc_feature (25)..(25): Xaa is any aa, unknown or other
  misc_feature (30)..(30): Xaa is any aa, unknown or other
  misc_feature (47)..(47): Xaa is any aa, unknown or other
MYELLAVEXXXGPXXIKXAYRRAAXRWHPXACPGGSRPLHGGAGGLXGAVRPRAQARLRHPAPLRRPLRRRRVPRGTPRRVRRLGGAADRAAVARGGAARARRRGDLGQQDAPGGRAAVLVAASPVAGL

SEQ ID NO: 13834 - DNA, 802 bp, Zea mays subsp. mays
  misc_feature (1)..(802): Ceres Seq. ID no. 12404484
aacggcagtcgtcacaccacgaaagcagcagcaaagtcatcagcaacccacgatcggtcgatcgatcgggtacctgctagcgaattcgatcgatcgggtacctgctgctagcgatagcagcagcagccagcagatcccgtcgtcgccggcacgatggccagcccgtcgtcgtcgtcgtcgtcagctctggtctcctcgtggtggttctagccgcggcggtggcgtgctccgcgacgcgccccgtccccgcgcggcagcgggcggcggcggcggaggaggaggtgagacggccggacacgctgcacgagggcacggtgctgatcccggggatggggcgctacgagatcggcagccactacatcccggacatcggcgggctggaccacagcgtccccgccgccacccacgggcagtacatccccggcgccgacgacacctgggtgcccaaccccggcttcgaggtccccaaccccttccgccccggcgcggccactccatgaacacgtacgagtacgaccccccaacgccggagaactcgatcgatcatatcgtctcgcgccgcgctgaataacgctacactagccgtgcttgtgcttgtgcttggctgctgaatgcaagcatgtcctttgttgtgtggtttaatttgtcccacgtacgtctgtgcagtgtttttgcagtttgtgctccagtgaagaagtgtgcacgcgcgatgcgtagaaagcgcatcagaactttgcatggcccggttggtagcagctgcttgtttctcggtcactactgttacaaataaaatttgctggac

SEQ ID NO: 13835 - protein, 189 aa, Zea mays subsp. mays
  misc_feature (1)..(189): Ceres Seq. ID no. 12404485
TAVVTPRKQQQSHQQPTIGRSIGYLLANSIDRVPAASDSSSSQQIPSSPARWPARRRRRRQLWSPRGGSSRGGGVLRDAPRPRAAAGGGGGGGGETAGHAARGHGADPGDGALRDRQPLHPGHRRAGPQRPRRHPRAVHPRRRRHLGAQPRLRGPQPLPPRRGHSMNTYEYDPPTPENSIDHIVSRRAE

SEQ ID NO: 13836 - DNA, 1431 bp, Zea mays subsp. mays
  misc_feature (1)..(1431): Ceres Seq. ID no. 12408933
  misc_feature (398)..(398): n is a, c, t, g, unknown, or other
  misc_feature (901)..(901): n is a, c, t, g, unknown, or other
ctctacggaacacacaccgtgtcgttctagcgttctcatcctccatccgcttgctcctgctccctcgagtcaaagcagtggatatggtggcgcgagcagcgagctagggaggctaggtagcagactagtgtcgctattaatcgtaccacgccgccgccgggaaattgcccttctccgccactgccactgaagctatactgtcgcagagagagcgcccaccacccgcggaccagacatctgcgatgaccactctggcgacggacacggcggtcgtggacacgggaggaggacaaggcgttcgaagaacgcggtggcggccgccgcggcgccgccggccgacgggccgcctgatgatggctggttcacggcgctggtggcgagcgtgccggcgcggacgncggaggaggtgcggctgcactacgaggcgctggtggaggacgtggccgctatcgaggccggccgcatcccgctcccgcgctacgctggggaggagtcgtccgccgcgacgccctagggctccggtgccgccggcccctccacgcccaaggacggaggaggagggagcgggcaccgacgcgaagaacggaagggcggcgtcggcgctgacgcggggaagagttgctctaaggccgagcaggagcggcgcaagggcgtgccgtggacggaagaggagcacaggttgttcttgttgggtctggacaagttcggcaagggcgactggcggagcatctcgcgcaacttcgtcatctcgcggacgccgacgcaggtggcgagccacgcgcagaaatacttcatccgcctcaactcgatgaaccgggaccggcgccgctccagcatccacgacatcaccagcgtgaccgccggcgaggtggccgcggccggcgcgcccatcacgggcgtncggcccgaccgcggcgggggcaaatgccgatggggccgggcggcatgaagcaccaccacccggttccgccgatgggcatgtacggcatgcgcccatgggccacccggtcgctgggcacatggtggcgccggcggccgtcggcacgccggtcatgttcccgccgggccatcactcgccctatgtcctgccggtgggatacccggcgccaccgaccaagatgcaccagtgatcgtctacgaccggcatttgcgcatctgcacaactgcattcctttgctcgttctttcttgatttcgttgatgatcttgtgtagccaaagctatctatatccatcctttcctcatctcccgggtctttgatttttgacgtaacatatagatgacttgagcgagtgcagggcaggcaggcgaataatgagtatcgctacttacaggaaggctcaaggaatgtgtaattagtagcagccttcctgggtgcaaatattcatcatttgtgcaactggggactgacagaatcccatttcccggatgc

SEQ ID NO: 13837 - protein, 189 aa, Zea mays subsp. mays
  misc_feature (1)..(189): Ceres Seq. ID no. 12408934
  misc_feature (52)..(52): Xaa is any aa, unknown or other
MTTLATDTAVVDTGGGQGVRRTRWRPPRRRRPTGRLMMAGSRRWWRACRRGXRRRCGCTTRRWWRTWPLSRPAASRSRATLGRSRPPRRPRAPVPPAPPRPRTEEEGAGTDAKNGRAASALTRGRVALRPSRSGARACRGRKRSTGCSCWVWTSSARATGGASRATSSSRGRRRRWRATRRNTSSASTR

SEQ ID NO: 13838 - protein, 153 aa, Zea mays subsp. mays
  misc_feature (1)..(153): Ceres Seq. ID no. 12408935
  misc_feature (16)..(16): Xaa is any aa, unknown or other
MMAGSRRWWRACRRGXRRRCGCTTRRWWRTWPLSRPAASRSRATLGRSRPPRRPRAPVPPAPPRPRTEEEGAGTDAKNGRAASALTRGRVALRPSRSGARACRGRKRSTGCSCWVWTSSARATGGASRATSSSRGRRRRWRATRRNTSSASTR

SEQ ID NO: 13839 - protein, 152 aa, Zea mays subsp. mays
  misc_feature (1)..(152): Ceres Seq. ID no. 12408936
  misc_feature (15)..(15): Xaa is any aa, unknown or other
MAGSRRWWRACRRGXRRRCGCTTRRWWRTWPLSRPAASRSRATLGRSRPPRRPRAPVPPAPPRPRTEEEGAGTDAKNGRAASALTRGRVALRPSRSGARACRGRKRSTGCSCWVWTSSARATGGASRATSSSRGRRRRWRATRRNTSSASTR

SEQ ID NO: 13840 - DNA, 1032 bp, Zea mays subsp. mays
  misc_feature (1)..(1032): Ceres Seq. ID no. 12409749
aatgtcaaaagaacccgcagcagggaagactgagagtctgggagatagagagaggagagggagggtttcctcaaagagaacccgaacccaaacccaaaccgaagcagagcacactagcgttccctcaccagggcgtccatcccagcagccatggcgatggcgtacaagatggcgacggaggggatgaacgtgaaggaggagtgccagcgctggttcatggagatgaagtggaagaaggtgcaccgcttcgtggtgtacaagatcgacgagcggtcgcgcgccgtgctggtggacaaggtgggcggccccggggaagggtacgaggagctcgtggccgcgctgcccggcgacgactgccgctacgccgtcttcgacttcgacttcgtcaccgtcgacaactgccagaagagcaagatcttcttcatcgcctggtcaccggcggcgtcgaggatcagggccaagatcctgtacgcgacatcgaagcaaggcctgcggcggctgctggacggggtccactacgaggtgcaggccaccgacccctccgagatgggcttcgacgtcatcagaggccgcgcgcaatgaggcccccgctgcgctctgctcctatttacgtacttacctgtgcgtgggcgtgttctcctactactcactgctcagtagtcagtagtcatctgcgttcgtgtgtgtgtgtgtgtgatcggccggatgctaattggcgttggtgtgctcccgtagcgatcgatgctgccaatctgacgaggcttcgcgtgtgtttgctttgctattttcggttctcgggagagatggtgcaggcgtggtgtgttgatgttgatgggtggagtagaagctcaggggagtggcagcggactaatgaaacgtccacctctgcgacgtagaattccactgaaaaaaaaatgctccagtgtaccataagctgcttcagatttgatcgtgttttctctcccatggtggcgtttctacctacatttttcttagaaaacacatttctagttactcgttcagttctgaatt

SEQ ID NO: 13841 - protein, 297 aa, Zea mays subsp. mays
  misc_feature (1)..(297): Ceres Seq. ID no. 12409750
CQKNPQQGRLRVWEIERGEGGFPQREPEPKPKPKQSTLAFPHQGVHPSSHGDGVQDGDGGDEREGGVPALVHGDEVEEGAPLRGVQDRRAVARRAGGQGGRPRGRVRGARGRAARRRLPLRRLRLRLRHRRQLPEEQDLLHRLVTGGVEDQGQDPVRDIEARPAAAAGRGPLRGAGHRPLRDGLRRHQRPRAMRPPLRSAPIYVLTCAWACSPTTHCSVVSSHLRSCVCVCDRPDANWRWCAPVAIDAANLTRLRVCLLCYFRFSGEMVQAWCVDVDGWSRSSGEWQRTNETSTSAT

SEQ ID NO: 13842 - DNA, 1921 bp, Zea mays subsp. mays
  misc_feature (1)..(1921): Ceres Seq. ID no. 12410161
accagccaaccctagagcctctccagtctccactgctcggccgccgcctgccgcagcccgccgtccactggtcccgcctcccggcgtccgctccacgcctccactgctcccggcgtccgctccattgctaccatcgtccggcgttctgctcctgcgccctccctttgattcgttgccagttgtagtgtccgggcagatttgagctgtggcagcaagcaaggattgacgaagcgtgcgttcccatcgcaccaccatgggctacacagagatcgacatccacccctctgggagcggcaaggtaccgaccccctgcccttacaactcctagagctctacccctcacgctgaccttagggagacaggatggtttgctcgcctactagaggacatgctctgatggtggttccctctgctaccatttttagttcttgattgtaaagtgtatgttctacattttgaaatagaactggattgtgcatattttgttctacatgtaaagtgtatgttctacatgtaccttttagatcgcttgcaatatgatttattttaacacatatttgaaatagaactggattgtgcatattttgtaaagtgtatgttctacattttgtaattcgtattattcatttttcctttagtttttctctttctacaactcctgtctctttacaatcaaatttcagatgtgatagatattagtatgaaagataaaaactagaatgctatgcctgtcagaggagctttcttcagtttcaggtactgctctgctttattagtcatccagccgatggataatttctatacgtgtatcgcccctgcactttcaaacacatgttcattgtttccaatcacataatttttttcttctcttagatttactatgtggttgtggtctcagtttggtttgtaggttaatttgtatactcatgtgattttagtttttccgtgtattttatgttcatttagtatgtcttaatttagttactttcaattcttgatgctaataatatggatagattgcgacactactttctggcttgagcagaaatgagtttgttgtatatagcagaatatagttgtcgtagctggcaacaatgaccgctctttggatgatctgaaaactattctgtagtcaggtagttaaatatagctgaatatccattattatgttttattaatcttatttgttttttctgtcaaaagaacacacctctccatctttcggtgcttggtggatcaccgtctaaacgatccaccaccagaaccgcccaaccccaagatagctccatctcagtcgttgtacccgttcaatggcgagctggtggcagcgatgtaggagatgatccatgccgaggtgcacaagtacatgttagtggacggcacctgccaaagatacaccgtttctactgacaatccgtcttttttattgcttatggcgttgtgcattatacatgtccaccaattatatacaaataccatttgtgggttacctctggtgtgtttaggtgcgagctgcaatcaaagttaaggcattagtcatcatttgcttcacctcttctggacaggctgcaagggtgttctggacaaagaaagcttgtaccttaaaacaagaggatacaagaagctggagtggttgtctaaaggcttttgaactgcttgaagcattagtgtagctttggtgattttgtgactgatcagctctggagcagctagagtgatgtagttgtgggcttttgaacaatagctggagtgatatgaaacattagtgatgtggttgtgggcttttgaactgcttcaagctggagtgatgtcgctgtgttgcttttgtgactgatcatctctggagcttttgtgaatgatctaactagctatatgtaaatgatctagttgtgaatggtattataattgtgatgattttgtg

SEQ ID NO: 13843 - protein, 66 aa, Zea mays subsp. mays
  misc_feature (1)..(66): Ceres Seq. ID no. 12410162
PANPRASPVSTARPPPAAARRPLVPPPGVRSTPPLLPASAPLLPSSGVLLLRPPFDSLPVVVSGQI

SEQ ID NO: 13844 - protein, 62 aa, Zea mays subsp. mays
  misc_feature (1)..(62): Ceres Seq. ID no. 12410163
MIHAEVHKYMLVDGTCQRYTVSTDNPSFLLLMALCIIHVHQLYTNTICGLPLVCLGASCNQS

SEQ ID NO: 13845 - protein, 60 aa, Zea mays subsp. mays
  misc_feature (1)..(60): Ceres Seq. ID no. 12410164
QPTLEPLQSPLLGRRLPQPAVHWSRLPASAPRLHCSRRPLHCYHRPAFCSCALPLIRCQL

SEQ ID NO: 13846 - DNA, 1488 bp, Zea mays subsp. mays
  misc_feature (1)..(1488): Ceres Seq. ID no. 12411210
ccccctctcctcctctagcttctccttctctctctctccttcctggaccattctctctatctcctttctctctctacacatactcagacgagcagaagcagctagggacaccataggcaaactacttcagcaagaaattaaactatctcctacgcaagatcagaagaaactgtgtatggagcaagaagaggttggcctcgccctgggcctctccctcggctccggccaccaccaccaggagctcaagccccaacatccgtcgcatccgtgtgcggcgttgttggagccttctctgtcgctcagcggcccggcgaccaaggatgatggcccgaccgcaccggtgaggaggttcgctgccgtgaagagggagctgcagacgatggaggggaacgacgacgaggccaccggcaggggtacttgtctactcagtggcgtcgtcggcggtggttactgccgacgacgacgaagggtgcaacagcagccggaagaagctgaggctgtccaaggagcagtcggcgctgctggaggaccacttcaaggagcacagcaccctcaaccctaagcagaaggctgctttggccagacaactgaacctgagcccaaggcaagtggaggtttggttccaaaacagaagagccagaaccaagctgaagcagacagaagtggactgcgagattctcaagcgctgctgcgagacgttaacagaggagaaccggcgtctccaccgcgagctccagcagctccgcgccctcagccacccgcacccccacccggctgcctttttcatgcccaccgccgctgccgctgcgctctccatctgcccctcctgccagcgccttgttgccaccggagcatctgccgccgccgcaaccaccgccggtgcagataataagcctaaggcgggcggcccccggcggccgagcgccacacgtgttcagccctttcaccaattctgccgcctgctgaacacgcacacatatgtatatacatgcatgcgcacacatacatatatacgtatttttctttagcgctagccacgctctatcattcatcgatggtcatctactagctagatagtaattggttcactagatggcatatattcctgtcccctccccccttaattcattagctttgttttttcacaagctaattaatgaattgatagcggcgtcgcgtgaggacgatggagcaccacgcatgcatatgattctagtagcaaaaacaagagatatatgtcttgtttaatttggtgttgcttctgcttagtatagtgcccactgctggtgctgtagctgtagctttaattagtaggtgttcctgatggatttcctcttgtattagttaactgtcagtcagggaatagtaatgatgacagcatgacaccacatacacatcccagtttatttggatgtggatccatgtatatatgcacatgccacatgacggatctgtttcaacaattaaatactatattgatttgtctcc

SEQ ID NO: 13847 - protein, 186 aa, Zea mays subsp. mays
  misc_feature (1)..(186): Ceres Seq. ID no. 12411211
PLSSSSFSFSLSPSWTILSISFLSLHILRRAEAARDTIGKLLQQEIKLSPTQDQKKLCMEQEEVGLALGLSLGSGHHHQELKPQHPSHPCAALLEPSLSLSGPATKDDGPTAPVRRFAAVKRELQTMEGNDDEATGRGTCLLSGVVGGGYCRRRRRVQQQPEEAEAVQGAVGAAGGPLQGAQHPQP

SEQ ID NO: 13848 - protein, 128 aa, Zea mays subsp. mays
  misc_feature (1)..(128): Ceres Seq. ID no. 12411212
MEQEEVGLALGLSLGSGHHHQELKPQHPSHPCAALLEPSLSLSGPATKDDGPTAPVRRFAAVKRELQTMEGNDDEATGRGTCLLSGVVGGGYCRRRRRVQQQPEEAEAVQGAVGAAGGPLQGAQHPQP

SEQ ID NO: 13849 - DNA, 1553 bp, Zea mays subsp. mays
  misc_feature (1)..(1553): Ceres Seq. ID no. 12414807
atgaagacaaacattcaccgagccgaccgttgccttccccccaactcccagccccagcgtcaactgactacactcgctgactcgctcccccggttccccttctctgctcgccatcttttgctctccgcttggctcgtcaatcacctcctacgctccacacgccgccggcanctacaactgcttctgccgtggttacagagaagaaggggttggggagaagacatcctaaatcaattggatctgggagtatcagatctaaaaagtcaggttttcatcaaggtagaaaaagaaacttttctgtccggtcatggctttcccaactgcagcagctgttttgcttaatgagaacatgcagattcataaaggaaacagggttgatgacaccaagtgccaaaccactgaaatcatcagccaaacctgagagaaaggctcttcaggatgtgtctaacattcctaaaggcactgctttaaagaacagatccacagtcaaagaggggtccgccttgaaagaaaggcctgcactccacaatgtgtctaacaacctcaaagagaggtccatccgaaagagaggcctcctcttcaggatgtgtctaacacccgcaatgagaggtccatcctgaaagagaaatctgccctgtgtagccatgaagctattaagaacccagtgaatatttttgctgatgacgaagagatcaaacggtgccatgaatgggctaaggatgggatggagggcactcacttcactggaaatgattctcagaagttggataaagatgtgcaacacaaacgtatcaagaagaaagtggcgaaagttacgtcagcattgtatggctggtcacatgaggtatatggtcatgtgatgtttatggctatggttcccaagttttctgaagaatcgaaagagctggagctggaaccagagattcttccagacatcactaggtgtatgtctacctcaggcaagagggatgatgcaccaagcgccaaacggctgaagcctaagcttcaagaaccgaaggctcttcaggttcaggatttgtctaacactgtcaaagggagcccttctctgtgcagccatgaagctgtgaagaacccagtgaaaatattcactgttgaagagaccaaaaagtgtcatgaatcggctaatgatgtgtcggagggcactcacttcacaggaaatgatcgtcagaagctggataaggatgtgcaaggtgacaaaacacagctggttgaagattctcctactgatgatgagcttgacgactacccatttttggacaacagtcctgttaagtttgagctgaaagatgagtcggtgattccagatattggagcaatctgaagtgatagtgtttgtgcgattgttctgtagcaatctatgtagtacgatgtttagtacatgttgtttgttctgtagcaaactatgtagtttgagctgaaagatgagtcagtgcctcatcgggtacttttgagtaccgtagcggttgtcaagtttcatgctctcctgaaacatccttcgcaactcgcaagtgaaactctggtttatgccctgg

SEQ ID NO: 13850 - protein, 205 aa, Zea mays subsp. mays
  misc_feature (1)..(205): Ceres Seq. ID no. 12414808
MEGTHFTGNDSQKLDKDVQHKRIKKKVAKVTSALYGWSHEVYGHVMFMAMVPKFSEESKELELEPEILPDITRCMSTSGKRDDAPSAKRLKPKLQEPKALQVQDLSNTVKGSPSLCSHEAVKNPVKIFTVEETKKCHESANDVSEGTHFTGNDRQKLDKDVQGDKTQLVEDSPTDDELDDYPFLDNSPVKFELKDESVIPDIGAI

SEQ ID NO: 13851 - protein, 160 aa, Zea mays subsp. mays
  misc_feature (1)..(160): Ceres Seq. ID no. 12414809
MFMAMVPKFSEESKELELEPEILPDITRCMSTSGKRDDAPSAKRLKPKLQEPKALQVQDLSNTVKGSPSLCSHEAVKNPVKIFTVEETKKCHESANDVSEGTHFTGNDRQKLDKDVQGDKTQLVEDSPTDDELDDYPFLDNSPVKFELKDESVIPDIGAI

SEQ ID NO: 13852 - protein, 158 aa, Zea mays subsp. mays
  misc_feature (1)..(158): Ceres Seq. ID no. 12414810
MAMVPKFSEESKELELEPEILPDITRCMSTSGKRDDAPSAKRLKPKLQEPKALQVQDLSNTVKGSPSLCSHEAVKNPVKIFTVEETKKCHESANDVSEGTHFTGNDRQKLDKDVQGDKTQLVEDSPTDDELDDYPFLDNSPVKFELKDESVIPDIGAI

SEQ ID NO: 13853 - DNA, 651 bp, Zea mays subsp. mays
  misc_feature (1)..(651): Ceres Seq. ID no. 12415050
acttcgagaggaactgggtcagatgttcggcattaagggtcagttggacgaccctgatagatcaggctggcagcttgtatttgtcgacagggagaacgatgtgcttctccttggagacgacccgtgggagtcatttgtgaatagtgtatggtacatcaagatactttcacctgaggatgtgcataagatgggaaagccaggaaacgatccacgctacctatcttaaatcgatacatggagctctttctggctcccatgacgattctgcggcacactgcagcactgttcacgacggcctgctctactgtgctcgcatgttcgcccgtgtcatctctactctctagcatgcacaccgtgctcgtcttcagaagacgaactccccgtcgcttgtatccggtgcaggtcaccgctcctggactgatattttgtaggttccacgtaggaatcagtatcagcaactctatcctagtttgtggtaggctcgcgcggcgctcgttcctgtgtcgcatcaggatcttcggactaaaatgcgtagtcgaaaccgttctcgtgattcgtaagctattcatgtatttgaggattcctcgacatgctttcgacgatgaactgcaataatctgaatgcaggaggattgtttgagatttgtacttc

SEQ ID NO: 13854 - protein, 126 aa, Zea mays subsp. mays
  misc_feature (1)..(126): Ceres Seq. ID no. 12415051
MELFLAPMTILRHTAALFTTACSTVLACSPVSSLLSSMHTVLVFRRRTPRRLYPVQVTAPGLIFCRFHVGISISNSILVCGRLARRSFLCRIRIFGLKCVVETVLVIRKLFMYLRIPRHAFDDELQ

SEQ ID NO: 13855 - protein, 119 aa, Zea mays subsp. mays
  misc_feature (1)..(119): Ceres Seq. ID no. 12415052
MTILRHTAALFTTACSTVLACSPVSSLLSSMHTVLVFRRRTPRRLYPVQVTAPGLIFCRFHVGISISNSILVCGRLARRSFLCRIRIFGLKCVVETVLVIRKLFMYLRIPRHAFDDELQ

SEQ ID NO: 13856 - protein, 89 aa, Zea mays subsp. mays
  misc_feature (1)..(89): Ceres Seq. ID no. 12415053
MHTVLVFRRRTPRRLYPVQVTAPGLIFCRFHVGISISNSILVCGRLARRSFLCRIRIFGLKCVVETVLVIRKLFMYLRIPRHAFDDELQ

SEQ ID NO: 13857 - DNA, 749 bp, Zea mays subsp. mays
  misc_feature (1)..(749): Ceres Seq. ID no. 12415361
agattcgcagtagtagtgcacgaatagaccgttcaagaccgcgcggcgagacgcgaacctgtcgcgggacgggggggtcagacggtgaacttgatctcgaagccggtggacggatccacgggctcggccgtggacgggacgacggcggtgacggtggcggctggggggccgacggggaggcggcgggttatcatgtcttcgatcttcgcggggtctccggagaggagggcctccacactgccgtcacggcggttgcggacccagccggcgaggccgagcgactcggccgtggacgcagtccagtcgcggaaccccacccccgtgacgcgccccttcaccaccacgcggactgcctttcgtgcgggctccggctgcggcgcggatggtggcgtggcggcatcgggatcggcggaggacgccatggcgcggtggtgctggtacggttgtggacttgtggaagcagcgagactggagaccggagacggagagggacgagacgagacgagacggctgaagcaaggaactgctggaacattttggaaagtcaaggcctgccctagtaggacaacccaagcccggcccaaaaaaaatcgtgaccctgcgcggctgggtcgcactcgcggctcgtggcagaggctgtgatgggctacagttgtgggctttttaaccttcttttaaaaatgtgttattatttttctatattcgtagtgtcccttttccatggttacttctctccagcattgctacat

SEQ ID NO: 13858 - protein, 185 aa, Zea mays subsp. mays
  misc_feature (1)..(185): Ceres Seq. ID no. 12415362
IRSSSARIDRSRPRGETRTCRGTGGSDGELDLEAGGRIHGLGRGRDDGGDGGGWGADGEAAGYHVFDLRGVSGEEGLHTAVTAVADPAGEAERLGRGRSPVAEPHPRDAPLHHHADCLSCGLRLRRGWWRGGIGIGGGRHGAVVLVRLWTCGSSETGDRRRRGTRRDETAEARNCWNILESQGLP

SEQ ID NO: 13859 - protein, 149 aa, Zea mays subsp. mays
  misc_feature (1)..(149): Ceres Seq. ID no. 12415363
MSSIFAGSPERRASTLPSRRLRTQPARPSDSAVDAVQSRNPTPVTRPFTTTRTAFRAGSGCGADGGVAASGSAEDAMARWCWYGCGLVEAARLETGDGEGRDETRRLKQGTAGTFWKVKACPSRTTQARPKKNRDPARLGRTRGSWQRL

SEQ ID NO: 13860 - DNA, 793 bp, Zea mays subsp. mays
  misc_feature (1)..(793): Ceres Seq. ID no. 12416305
aagtggcaacagacggagcaaacgcagtcctctcgtcactgctcggaccaggtgatgtccaccatgccgacgttctggtcgagtcccagggcgtcccacaccgccggcgaggcgtcgacgatgttgttgtcgcacggcggctcgaaggtgtgctcgtcgtcgcagccgtgcacggagtcgcactcgtccaccaccttggcgtacacggagttgccgttggcggcgctgatcttgatccggtggccgcagcgcgccatgttgctgaaccagcccgtggagagcgccaccaccttctcctggtcgctgtggtacgcgttgtcgcactccgagggggccgccgccgtccttgcccttctcgaagctgttgagcgtcagcacggccctggtgctcgccgtgaccggcggcgagcagcggtactgcgggtacatcttgccgtcctcgcagcagtccgggtcgttgctcttctcgcagttgccggagcggcccgggaggtacccgctggcgcggcacgtgccgaggctggcgccagggcggagagaggacnccgtgtggggtgcggagagcgcgaccaggaggaacatgaacatggcggcggctacagctcctacaccggccatctttgcttgcctgcagattttgtgctcgaggatcgagccccttctcactctgttctttttccttccttccttcctttctttctttctttctttctttcttgtgctctgctttgcttgatggttttgttagattacttgtgcatgggattatatatagtggccgtgccctcttgtt

SEQ ID NO: 13861 - protein, 264 aa, Zea mays subsp. mays
  misc_feature (1)..(264): Ceres Seq. ID no. 12416306
  misc_feature (182)..(182): Xaa is any aa, unknown or other
KWQQTEQTQSSRHCSDQVMSTMPTFWSSPRASHTAGEASTMLLSHGGSKVCSSSQPCTESHSSTTLAYTELPLAALILIRWPQRAMLLNQPVESATTFSWSLWYALSHSEGAAAVLALLEAVERQHGPGARRDRRRAAVLRVHLAVLAAVRVVALLAVAGAAREVPAGAARAEAGARAERGXRVGCGERDQEEHEHGGGYSSYTGHLCLPADFVLEDRAPSHSVLFPSFLPFFLSFFLSCALLCLMVLLDYLCMGLYIVAVPSC

SEQ ID NO: 13862 - protein, 246 aa, Zea mays subsp. mays
  misc_feature (1)..(246): Ceres Seq. ID no. 12416307
  misc_feature (164)..(164): Xaa is any aa, unknown or other
MSTMPTFWSSPRASHTAGEASTMLLSHGGSKVCSSSQPCTESHSSTTLAYTELPLAALILIRWPQRAMLLNQPVESATTFSWSLWYALSHSEGAAAVLALLEAVERQHGPGARRDRRRAAVLRVHLAVLAAVRVVALLAVAGAAREVPAGAARAEAGARAERGXRVGCGERDQEEHEHGGGYSSYTGHLCLPADFVLEDRAPSHSVLFPSFLPFFLSFFLSCALLCLMVLLDYLCMGLYIVAVPSC

SEQ ID NO: 13863 - protein, 243 aa, Zea mays subsp. mays
  misc_feature (1)..(243): Ceres Seq. ID no. 12416308
  misc_feature (161)..(161): Xaa is any aa, unknown or other
MPTFWSSPRASHTAGEASTMLLSHGGSKVCSSSQPCTESHSSTTLAYTELPLAALILIRWPQRAMLLNQPVESATTFSWSLWYALSHSEGAAAVLALLEAVERQHGPGARRDRRRAAVLRVHLAVLAAVRVVALLAVAGAAREVPAGAARAEAGARAERGXRVGCGERDQEEHEHGGGYSSYTGHLCLPADFVLEDRAPSHSVLFPSFLPFFLSFFLSCALLCLMVLLDYLCMGLYIVAVPSC

SEQ ID NO: 13864 - DNA, 540 bp, Zea mays subsp. mays
  misc_feature (1)..(540): Ceres Seq. ID no. 12417242
aagcacaaacacgcgcgatccgatctgggccggccaagcagccacccatccatggcgactagggtttggctcaccgccctcctgcttggtttcctcgtcgccgcctcccccttcaccagccgagttgctagagctgaatccgaggaagatgctgctgctgctgaggtggaaccggggagaccggggttggactatgcctgtttgttgctgcgcccagggccacggattgggttggacaggtggtggtaccgcaggtttccagtgatggacctttaagtcctgctcctggtgtagagacagtagttgtcttcccaaaaaatgctggcaaaattgtactagcaggtgaagaaactgaattactagttggtctgcaaaatgacggtgaatcaattttgaatgttgttgctgttcattcaactctccatcttccttttgaccacaatatgtatggncagaaccttactgttcagaatttcttcaattcatcagttcctgtttctgtgcaagcaaaccttncnctacaagttcgttgtgagcaag

SEQ ID NO: 13865 - protein, 91 aa, Zea mays subsp. mays
  misc_feature (1)..(91): Ceres Seq. ID no. 12417243
KHKHARSDLGRPSSHPSMATRVWLTALLLGFLVAASPFTSRVARAESEEDAAAAEVEPGRPGLDYACLLLRPGPRIGLDRWWYRRFPVMDL

SEQ ID NO: 13866 - protein, 87 aa, Zea mays subsp. mays
  misc_feature (1)..(87): Ceres Seq. ID no. 12417244
STNTRDPIWAGQAATHPWRLGFGSPPSCLVSSSPPPPSPAELLELNPRKMLLLLRWNRGDRGWTMPVCCCAQGHGLGWTGGGTAGFQ

SEQ ID NO: 13867 - protein, 74 aa, Zea mays subsp. mays
  misc_feature (1)..(74): Ceres Seq. ID no. 12417245
MATRVWLTALLLGFLVAASPFTSRVARAESEEDAAAAEVEPGRPGLDYACLLLRPGPRIGLDRWWYRRFPVMDL

SEQ ID NO: 13868 - DNA, 760 bp, Zea mays subsp. mays
  misc_feature (1)..(760): Ceres Seq. ID no. 12418043
tgattaagtactgataatatttgttgattttgcagatgtgaaggacataaagtgtgtgataaattatgattttccaacaactcttgaagattatattcacaggataggtcgaactggccgtgctggtgctagcggaactgcatttacttttttcacacacgcaaatgcaaagttctcaaggaatctagtgaagattctgcgagaagctggccaagtcgtgaatcctgccttagaatccatgtccaggtcttcgaactcaacgggaggaggcaatttccggtcgagaggcagaggtgggtttggtaaccggggccatatgtctggatcaaatacctttcctttaggaggaagaaggccatattgatgtgtgcaaaagaactgtgggagtatgggactatttgtatactactcggcattaagtgcattctttgggaaatttctgagaaatttcccctactaccaggattgataacaccatcgattttcgctacagtacctggagcttcttatatgaaagaacaacacatcaactatctagcaacagcatatgcattccattcagatatttcttttggaaggaccctgtcttgttttagtggagtccctgtgatcgtttaaagtcgtctgtatacttgtactgaacttcttgtggtgttactgttaggatttatggttgctctctattggtgtgcggtgttactgaacaaatttagttaagaagttaggcatttccatatttaatttgattctgaaataaact

SEQ ID NO: 13869 - protein, 84 aa, Zea mays subsp. mays
  misc_feature (1)..(84): Ceres Seq. ID no. 12418044
MCAKELWEYGTICILLGIKCILWEISEKFPLLPGLITPSIFATVPGASYMKEQHINYLATAYAFHSDISFGRTLSCFSGVPVIV

SEQ ID NO: 13870 - DNA, 2056 bp, Zea mays subsp. mays
  misc_feature (1)..(2056): Ceres Seq. ID no. 12418187
gcacgagaccattacctagaacatcctaatcgaaaaatgtggatgacgaggagggcctactcaatttactttattgcttggccggcgccggcgacgtcgcacgccaccgatggatcctatacagcgcactcactgctgcgctccggcggcggctgctgcctgcgccacgctcggcgacgcctggcgcttgacgagcttggtgaaggaggtgccctccacctcgaagtcgtcgtagcgccggaacagctcggccagcagcatgcacgccgtgtccaccaccacctccttggcggcgcactgcttgttcccgggcccgggctgcgccgtctccggcccgttggaccagaagaggtgctgcagcagcctggcgccgtcgtcgccgaggaagcgttccggcacgaactcctcgggccgctcgaacacctcggggtcccgcatcgccagcggctggtacccgcacagcacctcgcccgcggacacctggtacgcggcgccgccgtgggagcgcagcacgaagtccctgcgcgcgcgcccgaactgcagcggcacgggcggctgcatccgcagcatctcgtacaccgtcgaccgcaccagcggcatgccctcgcggacggtggcgaacccgaactcgccgtctttgcccaccatggcgcgccgcacctcgtcacgcaggcgctcgcgcagcgccgacgcgccgccgaccttggccacgaggaagggcaggaacacggagaagccgccgaaggcgttgaagccgagcacgaacaggatgttgttgatggcgtccttcttgccgatgccgtgctgcgcctcggcgtaggccacggcctcggcgccgtgcttctcgatgaagcggtagagcacgtagtagcccggccagatgaggaaggagggcagcgggaaggagtggatgagcagctcctccagcggctggacgaggccgatcttctgcgtgggcaggatctgcagcgccagccagatgtccaggatggtgaagccgaagttgtccaccagccagtcggcggacgggtcggcgcccacgaacgccttgcagaggaaccggaagatgcactgctgcagggggacgaggtagctggcggagggcttcttgtcgctgccgtcgtccttgccgaactccgcgtccacggcgtccagcatggcgccgacgctcgcgcggaagtcggcggaccaggtgcgggcggagcggtggaggaggtccatggcgaaggtcttgacgcgcgcgtgctcctcctcctgcgtgtcgaggtacacgccgacgcgcgtcccgccggtgaagccggcgcccgggttatagggcccgatgaggatgtcgcgcttgtccacgaggtccgggtcgaagagcgcggtgaaggcggcggcgtccacgatggcgaccacgcgcgggtccacgcccacgaagaaggggaaggtgggcgggatgttggtgcggaacacggtgctgcggtgtgccgccgcgcgcttccggaagaactcgtcctggctctggaaccagaagtagtcgagccggtcccgtagcgggcccagcaccggtggcccgtagctgcctggtatcggccgcggcggaggcgtcaccgaggccgcggcgctcgccgtcggcgacacgaaggacggcagcatggctagctagctgctgctaagtcgctgactggctggcttgctatgctagctatagctatctcccgtgtgtggtggtggtgagctcagctcagctcagctcacagctccatcgatggatcatcaccttccgatccgttatgtaatgtagccgggaaggagcgaggcaagagcgtgacagcgactacaacaagtgtccagcgtgtggaacgtgtgggacatccaagctaggcagcatacacaagcaacaaggagccggcacgttgccatattctgccgacgaggacagcgccaccatgctaggcagccatgtcattggtccacacctttcatatttgttttcattttaaaaaatagtggtatcacaatgctgcaagataaggtgtacttgctaggaaaaaacggcacatatttaagttgt

SEQ ID NO: 13871 - protein, 511 aa, Zea mays subsp. mays
  misc_feature (1)..(511): Ceres Seq. ID no. 12418188
ARDHYLEHPNRKMWMTRRAYSIYFIAWPAPATSHATDGSYTAHSLLRSGGGCCLRHARRRLALDELGEGGALHLEVVVAPEQLGQQHARRVHHHLLGGALLVPGPGLRRLRPVGPEEVLQQPGAVVAEEAFRHELLGPLEHLGVPHRQRLVPAQHLARGHLVRGAAVGAQHEVPARAPELQRHGRLHPQHLVHRRPHQRHALADGGEPELAVFAHHGAPHLVTQALAQRRRAADLGHEEGQEHGEAAEGVEAEHEQDVVDGVLLADAVLRLGVGHGLGAVLLDEAVEHVVARPDEEGGQREGVDEQLLQRLDEADLLRGQDLQRQPDVQDGEAEVVHQPVGGRVGAHERLAEEPEDALLQGDEVAGGGLLVAAVVLAELRVHGVQHGADARAEVGGPGAGGAVEEVHGEGLDARVLLLLRVEVHADARPAGEAGARVIGPDEDVALVHEVRVEERGEGGGVHDGDHARVHAHEEGEGGRDVGAEHGAAVCRRALPEELVLALEPEVVEPVP

SEQ ID NO: 13872 - protein, 499 aa, Zea mays subsp. mays
  misc_feature (1)..(499): Ceres Seq. ID no. 12418189
MWMTRRAYSIYFIAWPAPATSHATDGSYTAHSLLRSGGGCCLRHARRRLALDELGEGGALHLEVVVAPEQLGQQHARRVHHHLLGGALLVPGPGLRRLRPVGPEEVLQQPGAVVAEEAFRHELLGPLEHLGVPHRQRLVPAQHLARGHLVRGAAVGAQHEVPARAPELQRHGRLHPQHLVHRRPHQRHALADGGEPELAVFAHHGAPHLVTQALAQRRRAADLGHEEGQEHGEAAEGVEAEHEQDVVDGVLLADAVLRLGVGHGLGAVLLDEAVEHVVARPDEEGGQREGVDEQLLQRLDEADLLRGQDLQRQPDVQDGEAEVVHQPVGGRVGAHERLAEEPEDALLQGDEVAGGGLLVAAVVLAELRVHGVQHGADARAEVGGPGAGGAVEEVHGEGLDARVLLLLRVEVHADARPAGEAGARVIGPDEDVALVHEVRVEERGEGGGVHDGDHARVHAHEEGEGGRDVGAEHGAAVCRRALPEELVLALEPEVVEPVP

SEQ ID NO: 13873 - protein, 497 aa, Zea mays subsp. mays
  misc_feature (1)..(497): Ceres Seq. ID no. 12418190
MTRRAYSIYFIAWPAPATSHATDGSYTAHSLLRSGGGCCLRHARRRLALDELGEGGALHLEVVVAPEQLGQQHARRVHHHLLGGALLVPGPGLRRLRPVGPEEVLQQPGAVVAEEAFRHELLGPLEHLGVPHRQRLVPAQHLARGHLVRGAAVGAQHEVPARAPELQRHGRLHPQHLVHRRPHQRHALADGGEPELAVFAHHGAPHLVTQALAQRRRAADLGHEEGQEHGEAAEGVEAEHEQDVVDGVLLADAVLRLGVGHGLGAVLLDEAVEHVVARPDEEGGQREGVDEQLLQRLDEADLLRGQDLQRQPDVQDGEAEVVHQPVGGRVGAHERLAEEPEDALLQGDEVAGGGLLVAAVVLAELRVHGVQHGADARAEVGGPGAGGAVEEVHGEGLDARVLLLLRVEVHADARPAGEAGARVIGPDEDVALVHEVRVEERGEGGGVHDGDHARVHAHEEGEGGRDVGAEHGAAVCRRALPEELVLALEPEVVEPVP

SEQ ID NO: 13874 - DNA, 383 bp, Zea mays subsp. mays
  misc_feature (1)..(383): Ceres Seq. ID no. 12418226
atcaactcccgccgccgccccttcctctccgtcgctcgcctcgcgcctacgccaccacctctgccatggccccgaagaaggataaggccccgccgccgtcgtccaagccggggccatggcagaggtggtggcgtgctgcgcaggatgagcgggctctggaagaagagccccaagtgagtgagactgagatggggtggacggggtccgggatagccgtaggtgcgaggtgatgcaacagcagcagtatgagtaggtggtaggaagcatgatcgtctgtctgataacatttggctggtacttgagtgaacctcgtgtcgaggagcagctgcttttggctgcctgttctgtaccttactatgcttcattcagtcaaaaaaattccc

SEQ ID NO: 13875 - protein, 75 aa, Zea mays subsp. mays
  misc_feature (1)..(75): Ceres Seq. ID no. 12418227
QLPPPPLPLRRSPRAYATTSAMAPKKDKAPPPSSKPGPWQRWWRAAQDERALEEEPQVSETEMGWTGSGIAVGAR

SEQ ID NO: 13876 - protein, 58 aa, Zea mays subsp. mays
  misc_feature (1)..(58): Ceres Seq. ID no. 12418228
INSRRRPFLSVARLAPTPPPLPWPRRRIRPRRRRPSRGHGRGGGVLRRMSGLWKKSPK

SEQ ID NO: 13877 - protein, 54 aa, Zea mays subsp. mays
  misc_feature (1)..(54): Ceres Seq. ID no. 12418229
MAPKKDKAPPPSSKPGPWQRWWRAAQDERALEEEPQVSETEMGWTGSGIAVGAR

SEQ ID NO: 13878 - DNA, 815 bp, Zea mays subsp. mays
  misc_feature (1)..(815): Ceres Seq. ID no. 12423754
atcgccaaaccaaaacccacacgcatccagaggcaaagctggacaagaaaagcgccaggctgacagagagtccgttcctattctgcctggcgccatgatcatcgagaccctgaaagcgcgcatcctgcgcgtgctgaagccgccgacccgcccgccgccggcggcgcgggcgtggtgctgtacacgacgacgctgcgcggcgtgcggcgcacgttcgaggactgcaacggcgtgcgcgcgctgctggagagcctgggcgcgccgttccaggagcgcgacgtgtccatggaccgcggcctgcgcgaccagctgtgggccgcggccggggagaaggcggtgccgccgcgcctgttcgtgcgcgggcgcgacctcggcggcgcgggccaggtgctcgcgctccacgagcagggccgcctcgccccgctgctgccgtgcggagaggccggggcgagaagcaggtgcggcgcgtgcgccggggtcgggttcgtggtgtgcggcgcctgcgacggcagccggaaggcggggggagacggcggcgggcgctgccgcggcgggtgcaacgagaacggcctcgtcatgtgcccgctctgtctgtccatttagcggccgcgcagggcagggcagtggaaaccaccttcttcgtcgtctcgttctccgcttctgatcagtcgttattagaatttatgaagtgctccccttctcctcgcaggcggaagctgtgtccactccactgctgctggcctgggtcgatccatgtgtgtttcgagtgcttggttttgccatgtgtgtgatgtatatatatgctgctagtttgc

SEQ ID NO: 13879 - protein, 220 aa, Zea mays subsp. mays
  misc_feature (1)..(220): Ceres Seq. ID no. 12423755
SPNQNPHASRGKAGQEKRQADRESVPILPGAMIIETLKARILRVLKPPTRPPPAARAWCCTRRRCAACGARSRTATACARCWRAWARRSRSATCPWTAACATSCGPRPGRRRCRRACSCAGATSAARARCSRSTSRAASPRCCRAERPGREAGAARAPGSGSWCAAPATAAGRRGETAAGAAAAGATRTASSCARSVCPFSGRAGQGSGNHLLRRLVLRF

SEQ ID NO: 13880 - protein, 189 aa, Zea mays subsp. mays
  misc_feature (1)..(189): Ceres Seq. ID no. 12423756
MIIETLKARILRVLKPPTRPPPAARAWCCTRRRCAACGARSRTATACARCWRAWARRSRSATCPWTAACATSCGPRPGRRRCRRACSCAGATSAARARCSRSTSRAASPRCCRAERPGREAGAARAPGSGSWCAAPATAAGRRGETAAGAAAAGATRTASSCARSVCPFSGRAGQGSGNHLLRRLVLRF

SEQ ID NO: 13881 - DNA, 729 bp, Zea mays subsp. mays
  misc_feature (1)..(729): Ceres Seq. ID no. 12454766
aatctccctcctcctctccgccctcgccccctcgccctcgcccgcctgtttaaacctgactgtctataacttaccgccggtccgcacccgcccaccgtccctgtccccttccccgtctaagcactcggatcctctgccgccgcgatgagctactacggccagcagcagccgcccgtcagcgcgccgccggaagggtttatcccgggaaggacgcgtacccgccgccgggctacccgcccgcgggatatcctccgccggcgcagggctacccaccgcagggctacccgccgcagggctaccctccgcagcaggggtatccgcagcagggatacccgccgcagtactcgcagccgccgccgccgccccgccagcagcagagcagcgggccctctttcatggagggatgcttggccgccctttgttgctgctgcctattggaagcctgcttctgagatctaagctgcgcacaacttgttctagaaacaccacttcaatttgcacggttgatataactggggattggcttgttagcgaagaaccgaagataccatgggttcttatgcaaatcacagttctcctagttctttctatcgttctgattgtccgttgcgatgtttggtgtacctagtagtatcttaattatataccttacactgtttacctatccaatggaattcttggtctagctaacattgtgagattatgtcacttttctcgttctctgtagtg

SEQ ID NO: 13882 - protein, 104 aa, Zea mays subsp. mays
  misc_feature (1)..(104): Ceres Seq. ID no. 12454767
MSYYGQQQPPVSAPPEGFIPGRTRTRRRATRPRDILRRRRATHRRATRRRATLRSRGIRSRDTRRSTRSRRRRPASSRAAGPLSWRDAWPPFVAAAYWKPASEI

SEQ ID NO: 13883 - protein, 74 aa, Zea mays subsp. mays
  misc_feature (1)..(74): Ceres Seq. ID no. 12454768
MLGRPLLLLPIGSLLLRSKLRTTCSRNTTSICTVDITGDWLVSEEPKIPWVLMQITVLLVLSIVLIVRCDVWCT

SEQ ID NO: 13884 - DNA, 791 bp, Zea mays subsp. mays
  misc_feature (1)..(791): Ceres Seq. ID no. 12468710
taaagcacatgcgaaaggcgttcattcactctgtaaggcgttcttgttcttcacccaacgcttctcgcacgggggtcttctattgaccattgaagaaaaacatttgactggagatagcatctggaatatatgaatctagtataacgaactaggtctgaaaatctgggcaattccagattcgattctcatgtgagatgataaaaacgtcataattatcctgcgtactaaaaaatattcgctagttgagtcgttccggcatatacaaaattattagctacagttgttcctgcatgcgtgtaatgtccttcggtgaacttgtctgtcattatcatttaaaaacgtatctagatgcattacggaagatttttagtttcctttgttatatttgagaagttatatattgtatatacagagagatgcagctgtgtattatttgctgtagcttcgattgcgagacgcatggttgcagtcattttattgtagttagtttatatgatacgtcgttgtcaccgcatgaagattaactgctgtgccatatgaagacctcctgcctcatcacggtgtttgtatataagatcaactgcagtgcctacacggtggacggagtatttgtatgatgtgaaggtcactattcagcatcgtcagtatgaaatggctatggccttcaaagctttctttcttggtcaccggacagggaagaaatattctgctcaagctcacaattagatacaagacataactcagataagagcttgttcaacttgcactatagttcatttgagtatttacct

SEQ ID NO: 13885 - protein, 44 aa, Zea mays subsp. mays
  misc_feature (1)..(44): Ceres Seq. ID no. 12468711
MHYGRFLVSFVIFEKLYIVYTERCSCVLFAVASIARRMVAVILL

SEQ ID NO: 13886 - protein, 43 aa, Zea mays subsp. mays
  misc_feature (1)..(43): Ceres Seq. ID no. 12468712
KAHAKGVHSLCKAFLFFTQRFSHGGLLLTIEEKHLTGDSIWNI

SEQ ID NO: 13887 - protein, 35 aa, Zea mays subsp. mays
  misc_feature (1)..(35): Ceres Seq. ID no. 12468713
MQLCIICCSFDCETHGCSHFIVVSLYDTSLSPHED

SEQ ID NO: 13888 - DNA, 819 bp, Zea mays subsp. mays
  misc_feature (1)..(819): Ceres Seq. ID no. 12469329
agatcggagctagcaccggcgacctcgtaacgaactcagcgcgccaaggaaatctcgcgtggtcgttacgtgccgagctcgcctcctcgcgcctatataacctggccatctgttcctcctccttgtctcatgaggtcgcgatcgaagccaccatctaccgggagcagagggtgtcgccgccgatgaacttgcgatgggccaacgcagggaccccggcgtgctgctcggggggttttccggttccgagggtcgagaagggtgtcttcatgaagccgatgcagtggagcgccctgtggtggcttgattcctcaccggacttggtgtccgccgcggaaccgcgctccgccccagtaagctcctgaagccgttctggctggcgcactggacagagggcgacgcgcagaaggctcaggcggaagatgccaagcagaagctggcgctcctggaggcgcagctcgacgggaggaggttnttcgggggcgacaccatcggctacgtcgacatcgcagcctgcgtgctagctccttggctcagcgtcgtagaggaggtgactggagtggccgtggttgacgaaggtgagttccctgctntgcgccgttggtccagagagtacagctcctgcgaagctntcaagcagtgcgtcccggacagggaccagctcgtcgccttctatactgaaaggaaggaggcgtacaaagtgttcgctaatgcatggttgcagcagtagtttggttttgtgtgtggaataataatgtatggatcacagattgtctgtgctgaaataacagtaatgagcctagctagataagtaaataacct

SEQ ID NO: 13889 - protein, 119 aa, Zea mays subsp. mays
  misc_feature (1)..(119): Ceres Seq. ID no. 12469330
IGASTGDLVTNSARQGNLAWSLRAELASSRLYNLAICSSSLSHEVAIEATIYREQRVSPPMNLRWANAGTPACCSGGFPVPRVEKGVFMKPMQWSALWWLDSSPDLVSAAEPRSAPVSS

SEQ ID NO: 13890 - protein, 59 aa, Zea mays subsp. mays
  misc_feature (1)..(59): Ceres Seq. ID no. 12469331
MNLRWANAGTPACCSGGFPVPRVEKGVFMKPMQWSALWWLDSSPDLVSAAEPRSAPVSS

SEQ ID NO: 13891 - DNA, 567 bp, Zea mays subsp. mays
  misc_feature (1)..(567): Ceres Seq. ID no. 12469610
atatgatgacacatgtacgagctgcatcgatcagaatcctcagaccctggtgacccccttgggctcgccggccgcgccgccgacgccgtagtcgtggtcccggtagccaccgctgccgccgaagaggcccgtgtggagcatgagcacgtagaggagctgcgtgaaggcgaggatgatgacgaaggcctccagcacgcgcaggcgccagccgcggtgtccgccgatgtggatctccttgcaggccagcccgaaggcgagcgccgtgatggcccaggcgatgagcgacgacgcggcgttggtggccaggctgtcgtggcgccaggcgcgcacgtggtgcacgcccgccagcttggacgccgcgcccaccacgccggccaggatggcgaacaccaggaagtagaacgtcgcgccgttgccggccacgcctgcgtgcaatgcaacgcaatgcgcatcagaggcgcgccatgcatatcgatgcatgagtatatgcatgatgcgtgattactactggcctttcttacgtaccggggtagttggtctgcccgttgatgaagtggttcaggttcc

SEQ ID NO: 13892 - protein, 162 aa, Zea mays subsp. mays
  misc_feature (1)..(162): Ceres Seq. ID no. 12469611
MYELHRSESSDPGDPLGLAGRAADAVVVVPVATAAAEEARVEHEHVEELREGEDDDEGLQHAQAPAAVSADVDLLAGQPEGERRDGPGDERRRGVGGQAVVAPGAHVVHARQLGRRAHHAGQDGEHQEVERRAVAGHACVQCNAMRIRGAPCISMHEYMHDA

SEQ ID NO: 13893 - DNA, 676 bp, Zea mays subsp. mays
  misc_feature (1)..(676): Ceres Seq. ID no. 12548041
gtgtttatgtagatcgatagcttgtgcgaggacgggcaggtggtgttcgccgatggctcctcggtggtcgccgacgccatcgtctactgcaccgggtacgtctactcgttcccgttcctggacacgggaggcctggtcaccgtggacgacagctgcgtcggcccgctgttcgagcacacgttcccgccggcgctggcgccggcgctgtccttcgtcggcgtgcccaagaaggtggtggtgccgcggttctttgaggcgcaggcaaggtgggttgcgcaggtgctgtctggccgaaggtcgctgccgccggaggccgagatgctgcgctccgcggaggagaacaaccgcgcgagggggaagcacctggcgcacgacatcctcgacgactatgactactgcgacgacttctgggagaagcactgtgggttcccgcggctggagggctggaagaaggagctccgttggtcgtccctcgcgaggagacacgacagcacggagagcttccgtgacgtctaccacgacgacagcaacttgattcgggagggctttcaagcataggggtaggggctcaggctcgcagcacaaaattcttattccctccgttcttttttttgaagttttagtttaaaataanctgtccgncaacaaatattcgagaacgaagatattatttctt

SEQ ID NO: 13894 - protein, 177 aa, Zea mays subsp. mays
  misc_feature (1)..(177): Ceres Seq. ID no. 12548042
CLCRSIACARTGRWCSPMAPRWSPTPSSTAPGTSTRSRSWTREAWSPWTTAASARCSSTRSRRRWRRRCPSSACPRRWWCRGSLRRRQGGLRRCCLAEGRCRRRPRCCAPRRRTTARGGSTWRTTSSTTMTTATTSGRSTVGSRGWRAGRRSSVGRPSRGDTTARRASVTSTTTTAT

SEQ ID NO: 13895 - protein, 160 aa, Zea mays subsp. mays
  misc_feature (1)..(160): Ceres Seq. ID no. 12548043
MAPRWSPTPSSTAPGTSTRSRSWTREAWSPWTTAASARCSSTRSRRRWRRRCPSSACPRRWWCRGSLRRRQGGLRRCCLAEGRCRRRPRCCAPRRRTTARGGSTWRTTSSTTMTTATTSGRSTVGSRGWRAGRRSSVGRPSRGDTTARRASVTSTTTTAT

SEQ ID NO: 13896 - DNA, 1353 bp, Zea mays subsp. mays
  misc_feature (1)..(1353): Ceres Seq. ID no. 12566077
  misc_feature (965)..(965): n is a, c, t, g, unknown, or other
  misc_feature (979)..(979): n is a, c, t, g, unknown, or other
  misc_feature (982)..(982): n is a, c, t, g, unknown, or other
  misc_feature (1050)..(1050): n is a, c, t, g, unknown, or other
  misc_feature (1095)..(1095): n is a, c, t, g, unknown, or other
  misc_feature (1167)..(1167): n is a, c, t, g, unknown, or other
aaaaaatccggccgtccgcgttcttatccaccctaattaaaaatgacaaaaccaatacatttattgaaagaaaatagacgagtctcatagtagccggctaagagtggcgtaatggtgggcatggtagcggggtggtatacatgtcgaagaagatctggaggcgggaatcgaagctgttgtccgtgatctgctgccagatctcgcgcagctcctccttgttaattttgtcaacctgcacctgacggcggcggctcaatgtgtcaaacagctcgagcgcgaactctttcgattccgtcatccctgcacgtgtacatgcagctccccaatgtttcaacgacgaagggaaatggaggagaaagccgaggggaggcagcgcggcgtggtggtaccaatgcattccgcgaagtcggagcgggagaggaaaccctcggaagcgaggcggtcgaagttggcctgcacctccatccaggcgttgttggccttgttgctgctgatgaagcggaggccgcggagcgccttgtgcgcgccggagcgcgtgcggtcgagctgcgcgcgctgccgccgcgcggcgcgggcagcgagggccgactcgatgcctgacgacggctgctgctgctgcccctgcccttccgcgcggctttgggtgcggccgaagcgcttggtgaggtcctgcgagaactggcgcgcgatggacatggcctccgccttgagctcctgcgagaactgcaggagccggtgcgacgaggtccgcctgatcgncggcgacaaggaccgcgacgacgacgacgcgccgccggcatggtccccgcgcgcgcccagcggcagcgcggtggcgccccccgccgcggccggctcgacgctccgcagaatgatggtgtcgtcctcctgcaggtcgagcgtgacctcgaccagctcctccccgtcgtcggagctgcgttcggagccccgcggcgaggagcccgtgntgagtgaccgcggngtngtccccgccgagccgctccatcgctggtggcccggggcggcggcgcccctcatcgccgacccaatcanaagccgctttccagcgcggctcccggaacagtccaatgctcgaanaggagacgcgctcgacgactggatggatcgattttgtgggtggccttggaatctctggggaaaggcgcccgngacgcgtccgagcgggagctcaagccgatgaaagaggaagcgcaacgagacagcaatatatgaggatgagaaggcgagtacggtgggccgggccacgcaaatgcacaactctatttaattatccacattgtcatctactaatatgtaagcagactctacatgcatatgtgcaatcaattttccacc

SEQ ID NO: 13897 - protein, 290 aa, Zea mays subsp. mays
  misc_feature (1)..(290): Ceres Seq. ID no. 12566078
  misc_feature (145)..(145): Xaa is any aa, unknown or other
  misc_feature (214)..(214): Xaa is any aa, unknown or other
  misc_feature (218)..(218): Xaa is any aa, unknown or other
  misc_feature (219)..(219): Xaa is any aa, unknown or other
  misc_feature (242)..(242): Xaa is any aa, unknown or other
  misc_feature (257)..(257): Xaa is any aa, unknown or other
  misc_feature (281)..(281): Xaa is any aa, unknown or other
MFQRRREMEEKAEGRQRGVVVPMHSAKSERERKPSEARRSKLACTSIQALLALLLLMKRRPRSALCAPERVRSSCARCRRAARAARADSMPDDGCCCCPCPSARLWVRPKRLVRSCENWRAMDMASALSSCENCRSRCDEVRLIXGDKDRDDDDAPPAWSPRAPSGSAVAPPAAAGSTLRRMMVSSSCRSSVTSTSSSPSSELRSEPRGEEPVXSDRXXVPAEPLHRWWPGAAAPLIADPIXSRFPARLPEQSNARXGDALDDWMDRFCGWPWNLWGKAPXTRPSGSSSR

SEQ ID NO: 13898 - protein, 283 aa, Zea mays subsp. mays
  misc_feature (1)..(283): Ceres Seq. ID no. 12566079
  misc_feature (138)..(138): Xaa is any aa, unknown or other
  misc_feature (207)..(207): Xaa is any aa, unknown or other
  misc_feature (211)..(211): Xaa is any aa, unknown or other
  misc_feature (212)..(212): Xaa is any aa, unknown or other
  misc_feature (235)..(235): Xaa is any aa, unknown or other
  misc_feature (250)..(250): Xaa is any aa, unknown or other
  misc_feature (274)..(274): Xaa is any aa, unknown or other
MEEKAEGRQRGVVVPMHSAKSERERKPSEARRSKLACTSIQALLALLLLMKRRPRSALCAPERVRSSCARCRRAARAARADSMPDDGCCCCPCPSARLWVRPKRLVRSCENWRAMDMASALSSCENCRSRCDEVRLIXGDKDRDDDDAPPAWSPRAPSGSAVAPPAAAGSTLRRMMVSSSCRSSVTSTSSSPSSELRSEPRGEEPVXSDRXXVPAEPLHRWWPGAAAPLIADPIXSRFPARLPEQSNARXGDALDDWMDRFCGWPWNLWGKAPXTRPSGSSSR

SEQ ID NO: 13899 - protein, 268 aa, Zea mays subsp. mays
  misc_feature (1)..(268): Ceres Seq. ID no. 12566080
  misc_feature (123)..(123): Xaa is any aa, unknown or other
  misc_feature (192)..(192): Xaa is any aa, unknown or other
  misc_feature (196)..(196): Xaa is any aa, unknown or other
  misc_feature (197)..(197): Xaa is any aa, unknown or other
  misc_feature (220)..(220): Xaa is any aa, unknown or other
  misc_feature (235)..(235): Xaa is any aa, unknown or other
  misc_feature (259)..(259): Xaa is any aa, unknown or other
MHSAKSERERKPSEARRSKLACTSIQALLALLLLMKRRPRSALCAPERVRSSCARCRRAARAARADSMPDDGCCCCPCPSARLWVRPKRLVRSCENWRAMDMASALSSCENCRSRCDEVRLIXGDKDRDDDDAPPAWSPRAPSGSAVAPPAAAGSTLRRMMVSSSCRSSVTSTSSSPSSELRSEPRGEEPVXSDRXXVPAEPLHRWWPGAAAPLIADPIXSRFPARLPEQSNARXGDALDDWMDRFCGWPWNLWGKAPXTRPSGSSSR

SEQ ID NO: 13900 - DNA, 527 bp, Zea mays subsp. mays
  misc_feature (1)..(527): Ceres Seq. ID no. 12566612
attggccgggctccagtgctgggcgttgtatgagaggtgagcctcccggtggagcgtgggtggtgctgggtgccggggatgagctgcaacgggtgccgcgtgcttcgcaaggggtgcagcgacgcgtgcgtgctgcggccgtgcctgcagtggatcgacggcgccgaggcgcagggccacgccaccgtcttcgtcgccaagttcttcggccgcgccggcctcatgtccttcctcaccgccgtccccgagccgcagcgcccagcgtgttccagtcgttgatgtacgaagcggcggcgtcggcggcccggcacgccgtccatgacctccgaggagtccgtgacgacgacgagcggcggcggcggcggtggagggagggagcccgagctgctgaacccttttgtcttagactttagctacaccgacggcctggctaaaaggccagcggccgatcatgtttcatgtggcgcccctcggcgcgcggtgtgctgtatgcttgatctgatcccggcgaaaacgtctgtctagct

SEQ ID NO: 13901 - protein, 136 aa, Zea mays subsp. mays
  misc_feature (1)..(136): Ceres Seq. ID no. 12566613
WPGSSAGRCMRGEPPGGAWVVLGAGDELQRVPRASQGVQRRVRAAAVPAVDRRRRGAGPRHRLRRQVLRPRRPHVLPHRRPRAAAPSVFQSLMYEAAASAARHAVHDLRGVRDDDERRRRRWREGARAAEPFCLRL

SEQ ID NO: 13902 - protein, 127 aa, Zea mays subsp. mays
  misc_feature (1)..(127): Ceres Seq. ID no. 12566614
MRGEPPGGAWVVLGAGDELQRVPRASQGVQRRVRAAAVPAVDRRRRGAGPRHRLRRQVLRPRRPHVLPHRRPRAAAPSVFQSLMYEAAASAARHAVHDLRGVRDDDERRRRRWREGARAAEPFCLRL

SEQ ID NO: 13903 - protein, 68 aa, Zea mays subsp. mays
  misc_feature (1)..(68): Ceres Seq. ID no. 12566615
MTSEESVTTTSGGGGGGGREPELLNPFVLDFSYTDGLAKRPAADHVSCGAPRRAVCCMLDLIPAKTSV

SEQ ID NO: 13904 - DNA, 490 bp, Zea mays subsp. mays
  misc_feature (1)..(490): Ceres Seq. ID no. 13564932
cttggacccgaggtaagaccgcccatagaattttcatttcgccgcattattttttttcccttctcactccctccttcggtccttcgccttcctcatgtccccgactctccgatactagtcgagtagtccggtacatcacaccgcctcgcaccgcggccatgttgacaccgcgcgtcctcaaggcttcgctgctccgctgcttgcgcgctaccgccgagctgcctccgttgcggcgaccccggatcctacctgtgcgggtttaccattccagaggctattctagtgggggaagctccaagtatgataggccaatgagacagttttctgaacagaatgagtcaacctctcagccattaatatattacattgctccatctgctctgcttgcttttgctgggatagccacatttgttcattacaatgatgagaggcgtgcagttcccttcgctaaagtaccaggacagaccaatgttcccaaaagatgtactac

SEQ ID NO: 13905 - protein, 162 aa, Zea mays subsp. mays
  misc_feature (1)..(162): Ceres Seq. ID no. 13564933
WTRGKTAHRIFISPHYFFSLLTPSFGPSPSSCPRLSDTSRVVRYITPPRTAAMLTPRVLKASLLRCLRATAELPPLRRPRILPVRVYHSRGYSSGGSSKYDRPMRQFSEQNESTSQPLIYYIAPSALLAFAGIATFVHYNDERRAVPFAKVPGQTNVPKRCT

SEQ ID NO: 13906 - protein, 110 aa, Zea mays subsp. mays
  misc_feature (1)..(110): Ceres Seq. ID no. 13564934
MLTPRVLKASLLRCLRATAELPPLRRPRILPVRVYHSRGYSSGGSSKYDRPMRQFSEQNESTSQPLIYYIAPSALLAFAGIATFVHYNDERRAVPFAKVPGQTNVPKRCT

SEQ ID NO: 13907 - DNA, 670 bp, Zea mays subsp. mays
  misc_feature (1)..(670): Ceres Seq. ID no. 13565500
ccaacgccgctcctgccatcaccttcttcgatcgatcgccttcgtcgtccccccacatccttcttgattgttatttctccaactcccaggccggcaggtcggaggacatgagcaaccagccaaccatggcggcggcccccgtgcgcgcttgggtgctggtgctggcgctggcgctggcgtgcgggctgctccagctccggccgtccgacgccgcggcgccagcccagccggttgcggtggcggcaacgatggtgtcgtcgggcgccgcgaagcccaagtgcgtgcccggcgccaagaacgacaaggcgtgccgcgtcggtgccgtgcacgacccggagaaccaggaggaggagggctccagcgtcaccctcaaggcgcccgccgccgcgcccgacgacagcgacggcagcgactacaacgaccccgacgagcccaacgacaaccagctcatcgtcgtcggccactgaagctgccgcgcgccgacccatggatcatgcatggagattcgactgggtggatggagtggaccggccggttaacggatctctcggtgctaattcgtgatcttgaccggtggaagcagatggggtttgcatgtttgtttcattcttgcattgattgttcgttgttaactagtgtatgatgaatcggtcgttaacgcttattaatc

SEQ ID NO: 13908 - protein, 154 aa, Zea mays subsp. mays
  misc_feature (1)..(154): Ceres Seq. ID no. 13565501
NAAPAITFFDRSPSSSPHILLDCYFSNSQAGRSEDMSNQPTMAAAPVRAWVLVLALALACGLLQLRPSDAAAPAQPVAVAATMVSSGAAKPKCVPGAKNDKACRVGAVHDPENQEEEGSSVTLKAPAAAPDDSDGSDYNDPDEPNDNQLIVVGH

SEQ ID NO: 13909 - protein, 119 aa, Zea mays subsp. mays
  misc_feature (1)..(119): Ceres Seq. ID no. 13565502
MSNQPTMAAAPVRAWVLVLALALACGLLQLRPSDAAAPAQPVAVAATMVSSGAAKPKCVPGAKNDKACRVGAVHDPENQEEEGSSVTLKAPAAAPDDSDGSDYNDPDEPNDNQLIVVGH

SEQ ID NO: 13910 - protein, 113 aa, Zea mays subsp. mays
  misc_feature (1)..(113): Ceres Seq. ID no. 13565503
MAAAPVRAWVLVLALALACGLLQLRPSDAAAPAQPVAVAATMVSSGAAKPKCVPGAKNDKACRVGAVHDPENQEEEGSSVTLKAPAAAPDDSDGSDYNDPDEPNDNQLIVVGH

SEQ ID NO: 13911 - DNA, 483 bp, Zea mays subsp. mays
  misc_feature (1)..(483): Ceres Seq. ID no. 15169987
atctgaacagatgcaatctctgcattcagacaacaagggtgatgagatgaaagatgagaacgaaaccatttatatgcagaacagcaaaggtcggactcagactctatccaatgctgatgcatcagtactttccactaccgaggctgagaacacatccatcaagacttcccctgaaattgagctcaatggggatgatgtctgtattacaagcagcatagggaagaccaggaagtatagagcaaaattcactttgtttctgagcgtgatcgtgatctttttagcaatcatcaccatgctcatcaggatagagaatgatgatgattcagcgtaccttgtccccacttaatattttgtatgcttcattgctgtctgtttaaattcctatttttattttatcactatagagtggtttgtgttttgaacaattttgcagtcatctatccatgaatgacagcaaataattaaattagaattttcatgctc

SEQ ID NO: 13912 - protein, 114 aa, Zea mays subsp. mays
  misc_feature (1)..(114): Ceres Seq. ID no. 15169988
SEQMQSLHSDNKGDEMKDENETIYMQNSKGRTQTLSNADASVLSTTEAENTSIKTSPEIELNGDDVCITSSIGKTRKYRAKFTLFLSVIVIFLAIITMLIRIENDDDSAYLVPT

SEQ ID NO: 13913 - protein, 111 aa, Zea mays subsp. mays
  misc_feature (1)..(111): Ceres Seq. ID no. 15169989
MQSLHSDNKGDEMKDENETIYMQNSKGRTQTLSNADASVLSTTEAENTSIKTSPEIELNGDDVCITSSIGKTRKYRAKFTLFLSVIVIFLAIITMLIRIENDDDSAYLVPT

SEQ ID NO: 13914 - protein, 99 aa, Zea mays subsp. mays
  misc_feature (1)..(99): Ceres Seq. ID no. 16625536
MKDENETIYMQNSKGRTQTLSNADASVLSTTEAENTSIKTSPEIELNGDDVCITSSIGKTRKYRAKFTLFLSVIVIFLAIITMLIRIENDDDSAYLVPT

SEQ ID NO: 13915 - DNA, 665 bp, Zea mays subsp. mays
  misc_feature (1)..(665): Ceres Seq. ID no. 12588661
gcaatgattacagggcaacattataccaccagtcgcaaacaaatcgatggtgccatgtacagatagacggctgcctggcggcctggccccataacctgacttgttcttcatacaggctaacaggtcaaacgagtgaccatcagggcaaatacattgcacatttttggatacttaacaaagccgggacctaattgctcacgagtgttctgctgcgacaaagcacaggcacacagacatagcattgcggcagctcctcttcaggccttgatacagcactggaagtagctcaggaacttcttccctccctgcaccaacaaatttctgattagtaaccacgtacatggatcgtgggtctatgaccgaaatcaggttctgattctccatcatcacaactcacaagcaacgacgtaagaaaaggcattctggagaaccccaatgaactgatgcaaagtgttctgtacttgttggcagttaaagtctgcttcttcagccattctgctatctgtgatatatcacagcaacagcctgggcagagttgcttatcccctcacctggctaaaccccatcatcagtttccctaagatcctcctacggacagtgccacgtcaatacatccgttccgcgcagctttctgaaggcgtgtagatatggacagtatgataaag

SEQ ID NO: 13916 - protein, 62 aa, Zea mays subsp. mays
  misc_feature (1)..(62): Ceres Seq. ID no. 12588662
NDYRATLYHQSQTNRWCHVQIDGCLAAWPHNLTCSSYRLTGQTSDHQGKYIAHFWILNKAGT

SEQ ID NO: 13917 - protein, 45 aa, Zea mays subsp. mays
  misc_feature (1)..(45): Ceres Seq. ID no. 12588663
MQSVLYLLAVKVCFFSHSAICDISQQQPGQSCLSPHLAKPHHQFP

SEQ ID NO: 13918 - DNA, 824 bp, Zea mays subsp. mays
  misc_feature (1)..(824): Ceres Seq. ID no. 12589376
agaagctgaaatgtttgctttcgacactgttgcaaggacaattattgggaaaccatgtccaatggttgttgcatcatttccagatgcatcagctatcccacctgaaattactgcaatcgtttcacggaaatacacattcattgtagtgttcaacaaccaatcatacagatttctagaaaaagcattgctcataaaaggaattgtagcatcatatggaagaatgacatcactaccaagagttcaagaaaaacttgatgtgcaccttcctccggtcccaatccagccaaaaataaactgataacaacagctgctcaatctccctctacagtcatgtctagactttccacggcggactcaccaagtgtgagtcgaaagctaacctattctccagcaaaggataaacctgagacaaaccctcttgatgctgataaaaatagagctcctgcaacaacacttgaatcacctacaaaaaggatcaaacaagaccctaagaatcaacaagagtagacgttgtgtgcaacacagtaaggaatacttctgaacatcacgcccaaacttcaacaaacgaagcatattcctcactattttgtctataaatattatgtgtgccttcttctatgaagcaaaccttaccctcgatatgctatatatatataatatctatgtattgtcatgtaatataaccatctataaactcatcagttgctacaatatattctaagcaaaccttaccctcgatatgctatatataatatctatgtattgccatgtaatataaccatctataaactcatcagttgctacaacatattctcatgttatgc

SEQ ID NO: 13919 - protein, 98 aa, Zea mays subsp. mays
  misc_feature (1)..(98): Ceres Seq. ID no. 12589377
EAEMFAFDTVARTIIGKPCPMVVASFPDASAIPPEITAIVSRKYTFIVVFNNQSYRFLEKALLIKGIVASYGRMTSLPRVQEKLDVHLPPVPIQPKIN

SEQ ID NO: 13920 - protein, 95 aa, Zea mays subsp. mays
  misc_feature (1)..(95): Ceres Seq. ID no. 12589378
MFAFDTVARTIIGKPCPMVVASFPDASAIPPEITAIVSRKYTFIVVFNNQSYRFLEKALLIKGIVASYGRMTSLPRVQEKLDVHLPPVPIQPKIN

SEQ ID NO: 13921 - protein, 78 aa, Zea mays subsp. mays
  misc_feature (1)..(78): Ceres Seq. ID no. 12589379
MVVASFPDASAIPPEITAIVSRKYTFIVVFNNQSYRFLEKALLIKGIVASYGRMTSLPRVQEKLDVHLPPVPIQPKIN

SEQ ID NO: 13922 - protein, 58 aa, Zea mays subsp. mays
  misc_feature (1)..(58): Ceres Seq. ID no. 12589380
MSRLSTADSPSVSRKLTYSPAKDKPETNPLDADKNRAPATTLESPTKRIKQDPKNQQE

SEQ ID NO: 13923 - DNA, 743 bp, Zea mays subsp. mays
  misc_feature (1)..(743): Ceres Seq. ID no. 12589502
cagctacgtaggccccccccccttttattaatattgtataaacatatgattggaacaaatgcccatgtgagataagccttgtttagcctctgttgatacttggcgtcttctattaaagctgcacgctgaaaacaatcatgtaacacaaatacgagtgtttgtctgaatcgtatggatgttagaaattgttcccgtggatttattgtgatagtattaatcttgtttctggtctattttttgctgtggttaatcaattattgtttggaaattaatatgcactagcactatctatcccgatgtattcatttctaattatggtaaaaaaaaagactcttgagttaacgttactcacattttttgcttgcagcttcaaatcaacgaccaacgttttgaggatgcagaggaggaacaggagagccatgaaaataatggacattagaaacagagacatgttcctcgagagcatcatgtgatttattttgttgtaaatcactaccgatgcagctcggtttgcctactgtttcatctacactttctcttcctttttccttgatgttataggattaacatcactgggtgactttctggaattgcatcgatggttccttttggtgagaaaaggtcttgctgctggtcaagaatgtaacttgtagagcatgatgttgaatcgtgtgaaattagttcagtacttttgatctaacaaatagaaggtcgaattgggaaaggagataaaaaaaaaaaaa

SEQ ID NO: 13924 - protein, 58 aa, Zea mays subsp. mays
  misc_feature (1)..(58): Ceres Seq. ID no. 12589503
MYSFLIMVKKKTLELTLLTFFACSFKSTTNVLRMQRRNRRAMKIMDIRNRDMFLESIM

SEQ ID NO: 13925 - protein, 52 aa, Zea mays subsp. mays
  misc_feature (1)..(52): Ceres Seq. ID no. 12589504
MVKKKTLELTLLTFFACSFKSTTNVLRMQRRNRRAMKIMDIRNRDMFLESIM

SEQ ID NO: 13926 - protein, 36 aa, Zea mays subsp. mays
  misc_feature (1)..(36): Ceres Seq. ID no. 12589505
MDVRNCSRGFIVIVLILFLVYFLLWLINYCLEINMH

SEQ ID NO: 13927 - DNA, 1085 bp, Zea mays subsp. mays
  misc_feature (1)..(1085): Ceres Seq. ID no. 12590227
ccccccccctatgagctgtgatcttgcatttttctatagtttcagttaggatgccctgttactgtgatattagtggcaaacaataacatgtgaatacaatctatttaccttgtttcatttttcaattacatgcgatatacctacatacgctattacagatctaaagaacattttgagggtgcataaagcataattgcagcagatacttttgttgaagtagtcatctaatttgtactattctgcaagtactggttccgcttggaacagccggcagccccagcacaataaacagtgctgggcaggttttaaaagcagcaaaaactttagctttattccccagcagcttgtctatctccagcagccttatcacatctcctgtttcaagctctactatgtaaacaatgcagtctacagtgttttacacgactatatacatgacctgctgggcctacgcttacaaacagggccactgttttttgtgaatctctagtcgttggaacttcctcacggttcttcatagctatgtctagtttactactttatggacccaatcaagccaattcgcaagttggtgtaactgtcacaattaactcttttctggaaaacagaacagaaaacttccatttatattttctggtattatttcctttgtattttcttattaacggtgtgttcaaccatgtgttttggcgctcacaaaagccacttgagcttgccgccccatccactgttgctgcggcacaatcgacaggaactgccccaagaaaaccactcagattgaggttgacgactttggggaaaccgaagccagctgaaggaactacctgaatcgaattgcccaggagccaaaattacctagagttcgcttttccttgtattgagtcaaggatctgtggaagcgctttggcaccgcgagttcaaatgaaagggaaaatgaaaaaaaaaacggagaccacctgacgtaaatgagtgcaattgtaataaattgtgtgtagtacatagctgagttggcataaatgtacgctgtggtacgttttcttgacgacttagctacgcttgttaaacgggaatggatatcatcttcg

SEQ ID NO: 13928 - protein, 101 aa, Zea mays subsp. mays
  misc_feature (1)..(101): Ceres Seq. ID no. 12590228
MSSLLLYGPNQANSQVGVTVTINSFLENRTENFHLYFLVLFPLYFLINGVFNHVFWRSQKPLELAAPSTVAAAQSTGTAPRKPLRLRLTTLGKPKPAEGTT

SEQ ID NO: 13929 - DNA, 712 bp, Zea mays subsp. mays
  misc_feature (1)..(712): Ceres Seq. ID no. 12593905
gagtcttccgaggacggttcgaaggtgctgctcatggtccttgcgactcttggaatagatgaggatgtcgtcgataaaaaccacgacaaacttatccaattcttccataaataccttattcatgaggttcatgaaaaaggcgggtgcgttggttagtccaaatggcatcactgtgaattcatattgcccgtatctggtgacgaatgcagttttctgaatgtctgcttccttaatcctgagttggtgataccctgaccggaggtctatcttggagaagtacttggctccttgcagttggtcgaataggtcatcgatccggggaagagggtacttattcttgattgtaacctcgttcaaggatcgataatcaatacacatcctcatactcccatcctttttggtaacgaaaagaacgggtgctccctagggagacgaactgggacagatgtaccctttttgttgtagtttcgaaatctgaagcttcaattctgccaactcagtgggggccatgcggtatggtctctttgcgatgggtgcggtgccgggaatgagatctatatagaactctactcctctttccggtggcatcccgggcaactcttctgggaatacatcttcaaactccttgattacagacatgctttctactgccagattaaatatcattggatcttttgcgggcggttgggcttgacaggaaactggctttcct

SEQ ID NO: 13930 - protein, 52 aa, Zea mays subsp. mays
  misc_feature (1)..(52): Ceres Seq. ID no. 12593906
MRMSSIKTTTNLSNSSINTLFMRFMKKAGALVSPNGITVNSYCPYLVTNAVF

SEQ ID NO: 13931 - protein, 51 aa, Zea mays subsp. mays
  misc_feature (1)..(51): Ceres Seq. ID no. 12593907
ESSEDGSKVLLMVLATLGIDEDVVDKNHDKLIQFFHKYLIHEVHEKGGCVG

SEQ ID NO: 13932 - protein, 50 aa, Zea mays subsp. mays
  misc_feature (1)..(50): Ceres Seq. ID no. 12593908
MSSIKTTTNLSNSSINTLFMRFMKKAGALVSPNGITVNSYCPYLVTNAVF

SEQ ID NO: 13933 - DNA, 733 bp, Zea mays subsp. mays
  misc_feature (1)..(733): Ceres Seq. ID no. 12635643
gaaacgtttcacccagtttcactgtttatttatctttagtctttctttactactccaaaagtcaaaccaaaacgaagtaattgttgataacttagaaagaagcaaaactaaaagcatccaatgattaaaaagcaaacgcacatagacattttattcgtagaggaactctgaagctaaacggttggagaatagagaatcaatcacagctcgtcagctccatatgtgtcgtctacatcttcttcttcttgttcttgttctccaccagctggtttttcatttaccgcgataagctctgtgtcaaatatcagtgttgccccaccggggatggttggaggagagccctgttcaccatatccaagtttagcaggtatctttaacttcctcttctctcctacacacgcacctagcaatccttgatcccagcctttgataacctgaccacttcctaactcaaactcgaacggttcatccctttcaaagctcgaatcgaatactgttccatcagtaagtttccccctgtagtgcaccttgatcatatcacctttgtgagccttcacttcacacgttgctggcttaaacttaacaccgatctgcaattccgacacatctcctgtcttcttggcaaaaccttggagtgaaatgagagagaataagatcaagcaaagggagtaacggagacacatcttaactctctcgccaaaaaaatcgcttcgtttagttccgtttgattttt

SEQ ID NO: 13934 - protein, 40 aa, Zea mays subsp. mays
  misc_feature (1)..(40): Ceres Seq. ID no. 12635644
KRFTQFHCLFIFSLSLLLQKSNQNEVIVDNLERSKTKSIQ

SEQ ID NO: 13935 - protein, 30 aa, Zea mays subsp. mays
  misc_feature (1)..(30): Ceres Seq. ID no. 12635645
MVGGEPCSPYPSLAGIFNFLFSPTHAPSNP

SEQ ID NO: 13936 - DNA, 911 bp, Zea mays subsp. mays
  misc_feature (1)..(911): Ceres Seq. ID no. 12635907
ggcagagcagcatcagttgatctttgcgtttgagaagtccatctctggatgctgagacatgaacttcttgagaatgtcttgcttctgtagctcatcactcgttggaagacccatctgcttttgcctttgatcaaacatcatcttctcaacagtggagcgagtttcagggtcaaggtcagctaatttactgttctccggttcaaccttctgagtatcgatctcaggctcacctttcacacagcatttccaccactccatctgatcttgcttagtcaacagaatcgaaatcatcttttgatcctcgatattccagtagcagtcatcaggcttcacagatcggtagagttctccatcgatgattggatcctgtcccttgagaccaagcttaagacggttctttttgatctcgtatacaacagagcgtgctttagtgccagtaggaactggaatgttaacagtaacctcctggagagtctggacccatgagtagttctcaaggtcataaccatttcctttgttaggagcaatgggggaagcttcttgtttcttctcctccacttgaattggctctgagcttgaagcagccgtggctggcttcacgctctccttctccacaggcttcttcttctcaacactctccttctcagctttcttctcggcctttccaagcttctccttcgccgccctaaccgcggcggagatctcctcctcagcggagggtttcttgagaaaatcgctctgttcggcgagaaagtcgaacactttctccaagaaacttgatgggttcgaggaatcgagcgtcgccctgaagggcaggatcctggggcgggtgctgctttcgtcttcaacctcggagatgatcgccattgtggagggggttttcgtttctagggttttgctgttgaccagct

SEQ ID NO: 13937 - protein, 44 aa, Zea mays subsp. mays
  misc_feature (1)..(44): Ceres Seq. ID no. 12635908
MIGSCPLRPSLRRFFLISYTTERALVPVGTGMLTVTSWRVWTHE

SEQ ID NO: 13938 - DNA, 1195 bp, Zea mays subsp. mays
  misc_feature (1)..(1195): Ceres Seq. ID no. 12636774
gaggtcgacggtatcgataagcttttttttttttttttttgttgatcatctccttttggattaaattgctgctgaaattgcttaacttgataacaaaaggtacaaggtttagatcttcaaggtctcaatcattcttattcctttagagaagtgttctttgaccccctccaagaagtccgcctctgtaatcctcctgtaccttgccggacgcttctcatccagtaaaccggccgccggctgaagcacattgtcgcgttccaccgcatagagcatggccaacgagatcctctccttctctgcattcgtcacaaccctgtgcactgggctcttgaatatcccgttgctcattatctccaaggagtctcccaggttgatgaccagagtgtgaggaacgaacggaacattgaaccacgtgttctctctctgaacctgcagtccaccgacctcacgatcgaccagaagaaccgtgagaacggggccgtcagagtgagccttgatgcccaagacgagctccggcctcggacaaggagggtagtagttgaatctggcataggcttgagggctagcaccaagctgcttgatgaactcttcctcatcaagctccaagatcttggccatcgctcgcaagattctgtccctcatactcttggtttttgatgcgtactcgtgcagaagatccctgaaggattcagggtatttgggccactgagcaaggcttctttcgtcttcaggctccaccttcagctgcagacggtcgttccagtcaaggatatgatcctgcgccaccactgggtcactgccgtacccttcgagctggaagcgcgtgccttccctcaggttgctgtacttctgcctctcctggagcggctggtggaagaactcccgtgacgcctccatcagatcctccattagagacgcgtctatgccgtggttggtagccagaaaaagcccccaggtctgtagcgccgagcggagcttggctgcctcgtcggcggtcgacagcttgttgaggtcgacgatagggaggggatccggcatgtcagccgcgagcatcaggctgccagggcggtgctcctcccgctgcacgaaccggctcggcggctcgtccacgagggcggccagatctttcactggagtcggcaccgtccatgattcaacagccatcggtgcttgcttattactaccacacacgaag

SEQ ID NO: 13939 - protein, 91 aa, Zea mays subsp. mays
  misc_feature (1)..(91): Ceres Seq. ID no. 12636775
MPWLVARKSPQVCSAERSLAASSAVDSLLRSTIGRGSGMSAASIRLPGRCSSRCTNRLGGSSTRAARSFTGVGTVHDSTAIGACLLLPHTK

SEQ ID NO: 13940 - protein, 53 aa, Zea mays subsp. mays
  misc_feature (1)..(53): Ceres Seq. ID no. 12636776
MSAASIRLPGRCSSRCTNRLGGSSTRAARSFTGVGTVHDSTAIGACLLLPHTK

SEQ ID NO: 13941 - DNA, 1226 bp, Zea mays subsp. mays
  misc_feature (1)..(1226): Ceres Seq. ID no. 12636782
ggaatctaaaatttacaaacttaagcacacactacaagccgggttagcgttagaattaaatccgagtccgaaagagagggaaaacaagtcaaccaagaaataaagcggatgaacatggtgatttgttttaccgaggttcggttccaaagaacctagtccccgttgaggtggtcacaaagaccaggtctccttcaaccctttccctctctcaaacgtcacttagactgagtgagctttctccttaatcaaacgggtcacttagaccccgcaaggaccaccacacactttgtgtctcttgctttgattacaagtcacttgagaataagaatgggaaggaagaaagcacgaatgcaaaagccaagcaacaagagcgacaaataacacacaaatcactctctctcaagtcgctaatcactaatgatcacttgtctcaattgtggaacttggagagtttgaaagctttgattgtgtcttggaatggattgctagctcttgtattgaatgtgaaaggttggaatgcttgggtgaagtgaatggaggtggttggggttgtatttatagcccccaaccacttcctagccattgctccatttctgccaactgcggacggtccacgcccctggtccggatggtccgcccctgcacatcaacgactacaatcgcaatggtcagcagtaacggctatatcaacggctactatgcattaaatgtgtcgtcagatgtcagataaaggtagtcgcggacggtccggtcgtgcaccccggacggtccgtgaggacgctataattcattttaccgaacccgtcacctttgggtttttcggttctgcgccgatcgaatggtccgtgcctgaggccggacggtccgcgcttggtctcggacggtgcttgcttttccatcgaacggtccgtagtgtagacttgtgtttttgcattggttctgtccgaggctcaccctagtgtcgcggacggtccgccgcaagggcccggacggtccgcgcttaggtgattttccaaaaagcttctcctgtccggaataatctacgacattctggacagtcaatttagaatagttgtagatgaacttatgcacctgtggaatgatcaactagacaaactggttagtccatatgtttataatggtggtcaaacaccaaaatcgattataggaaatgttgacactatttccctttcagttatccaacgaaccagtccttacggagaggt

SEQ ID NO: 13942 - protein, 83 aa, Zea mays subsp. mays
  misc_feature (1)..(83): Ceres Seq. ID no. 12636783
MCRQMSDKGSRGRSGRAPRTVREDAIIHFTEPVTFGFFGSAPIEWSVPEAGRSALGLGRCLLFHRTVRSVDLCFCIGSVRGSP

SEQ ID NO: 13943 - protein, 79 aa, Zea mays subsp. mays
  misc_feature (1)..(79): Ceres Seq. ID no. 12636784
MSDKGSRGRSGRAPRTVREDAIIHFTEPVTFGFFGSAPIEWSVPEAGRSALGLGRCLLFHRTVRSVDLCFCIGSVRGSP

SEQ ID NO: 13944 - protein, 57 aa, Zea mays subsp. mays
  misc_feature (1)..(57): Ceres Seq. ID no. 12636785
MEVVGVVFIAPNHFLAIAPFLPTADGPRPWSGWSAPAHQRLQSQWSAVTAISTATMH

SEQ ID NO: 13945 - DNA, 655 bp, Zea mays subsp. mays
  misc_feature (1)..(655): Ceres Seq. ID no. 13586371
aacaaattatgggtgtagatctttgttctaacttcagatattcacaccaccatgattacgctgtactattcgcacttctgttttacttgaagtcatatgaaaccttccaattcttttcgacaaatcaagatggcaccacagctaccaaattatgcaaagtagcactgccagcagatggaactgtatcttgcttttgggctagaaggttggccattggaggtcacactggaggactaatttctgatactctccaagcgcccatataggaaatatgttgcgataagccatgtagcacaaggggccatttttcaagaaacttccgatcatttcctcctgtgggaagtcgccattgctgagctgcatactcatgataagccgtgcagctttgtgaagtggagtgggatctctttccgcctgtccagctttcatgagcgccaacattgcccacgcagtgttcactatgtgtgacttctccttatccagatttgtgtatgccttggttgtagatgaaagatgactctcaccccatccaccattctttagctgctttgctaagagaaacttgcaggccttctggatacaagtgctgttaccataactctgcccaacagctgatagaccatcaatagcaaaccatgtgccatatgtgaaacaa

SEQ ID NO: 13946 - protein, 87 aa, Zea mays subsp. mays
  misc_feature (1)..(87): Ceres Seq. ID no. 13586372
QIMGVDLCSNFRYSHHHDYAVLFALLFYLKSYETFQFFSTNQDGTTATKLCKVALPADGTVSCFWARRLAIGGHTGGLISDTLQAPI

SEQ ID NO: 13947 - protein, 85 aa, Zea mays subsp. mays
  misc_feature (1)..(85): Ceres Seq. ID no. 13586373
MGVDLCSNFRYSHHHDYAVLFALLFYLKSYETFQFFSTNQDGTTATKLCKVALPADGTVSCFWARRLAIGGHTGGLISDTLQAPI

SEQ ID NO: 13948 - DNA, 707 bp, Zea mays subsp. mays
  misc_feature (1)..(707): Ceres Seq. ID no. 13586574
atggcccccctctacctcctccaccttgccgtttgtggcctccgcaccgccccaacgtcgacacctccgtcctccccctctactcccagcgcaccaccgccgcgtatgcgctatcccacccgatggacgtgttgccgcctctgcagcacgccctgtcgctgccgaccccgcccagccatgcatttggagtttacaatgtggagacatggtttatccaccggacggcgaggttggtgcgcggatggcgagggaggacctccactgggcctactccacacctcttcctgtctaccgaggtcgagcacatggaggacctgctccgctgtcgggcactcctgagccagcgactacaaaatccactctgccgtgatggcatgggaggctggcaagtcgattctttgtatatagttagtagtacaaaactatatgctatgagggtccggagaaattgacgatgaggagcggatcatactgggcaagtttttttggtggagtgggctggccgtgactgtgactctgtgagtgtgtagcgaggagggtacctgggtactagaatggctatagtctactgctgtgccgtactcggctgcacatgtattttgtgatgtgtcgtattgtataccaaagtgccatgttgctgttaatgacgtgagagaaaaactgtaagtcaccatttggatcctttatttcagggctcgtttgtcggc

SEQ ID NO: 13949 - protein, 149 aa, Zea mays subsp. mays
  misc_feature (1)..(149): Ceres Seq. ID no. 15220797
GPPLPPPPCRLWPPHRPNVDTSVLPLYSQRTTAAYALSHPMDVLPPLQHALSLPTPPSHAFGVYNVETWFIHRTARLVRGWRGRTSTGPTPHLFLSTEVEHMEDLLRCRALLSQRLQNPLCRDGMGGWQVDSLYIVSSTKLYAMRVRRN

SEQ ID NO: 13950 - protein, 122 aa, Zea mays subsp. mays
  misc_feature (1)..(122): Ceres Seq. ID no. 15220798
WPPSTSSTLPFVASAPPQRRHLRPPPLLPAHHRRVCAIPPDGRVAASAARPVAADPAQPCIWSLQCGDMVYPPDGEVGARMAREDLHWAYSTPLPVYRGRAHGGPAPLSGTPEPATTKSTLP

SEQ ID NO: 13951 - protein, 112 aa, Zea mays subsp. mays
  misc_feature (1)..(112): Ceres Seq. ID no. 15220799
MAPLYLLHLAVCGLRTAPTSTPPSSPSTPSAPPPRMRYPTRWTCCRLCSTPCRCRPRPAMHLEFTMWRHGLSTGRRGWCADGEGGPPLGLLHTSSCLPRSSTWRTCSAVGHS

SEQ ID NO: 13952 - protein, 109 aa, Zea mays subsp. mays
  misc_feature (1)..(109): Ceres Seq. ID no. 15220800
MDVLPPLQHALSLPTPPSHAFGVYNVETWFIHRTARLVRGWRGRTSTGPTPHLFLSTEVEHMEDLLRCRALLSQRLQNPLCRDGMGGWQVDSLYIVSSTKLYAMRVRRN

SEQ ID NO: 13953 - DNA, 1031 bp, Zea mays subsp. mays
  misc_feature (1)..(1031): Ceres Seq. ID no. 13587596
caggaaaaacgaaattgatatatctatatatggtagtactgtacaagaggtagctagccgctcatgcagatagcaaacccaaaagactatatagctatcaaagtatatatgtttaagacaccactactatagtatatatattttacaaatatgaaacattatccaaatataaaacccacgagtaaccaccatctggtacgtcttgagacttgatgtgtaagtaactcacgaaccagtgggcccgcgcatcgactcgcttcgccacgtacactggcagctctcgatgcagctagcaacgaagtagctggtgcagggcgcacggcgtcatcgatcaacgagagttgaagagggacgacgaatcgacgacctgctggcgctgggcgccggcggagtcgatcatcatggtgggggacgaccaggcggccgtgtggtcccagatgccggcggcttcgtcgaacacctcgggaggcacctcctggaagccctgcaggccgaagtcctcagccttgggcagccgcgtcatgaagtcctcgaagtcatctgcctcctgatgcagaggagccgccgccagctcgcgcaacatctgctgatggcgctgcatcgccatcgtggtggtggtggtgtcgttgacgtggcagccctggacggcagccatcatcacgccgcacgaagacggcggcggcggcggcatttggaacgtcgtctggtggtgggtgtacgtgggcgaggttgccgcggccgccatggtcaccggcgacgagctggagttggagttggagtcggagttggacgacgacgcgtcggcggagcagcaggatgagtgcaccatcatcataggcgccgccatggagggctgctgctggtggacctgtgagtgatggacgaactgctgctgttgctgtcgatgcaccaccggcacctccacggcgacaggcggcgccaaccgatccatctggagtagcttcgtccacagatcgatatggcgaccggcgatggatgctaacaatgcaatccttgcctggtgtgtgcct

SEQ ID NO: 13954 - protein, 89 aa, Zea mays subsp. mays
  misc_feature (1)..(89): Ceres Seq. ID no. 13587597
MQRSRRQLAQHLLMALHRHRGGGGVVDVAALDGSHHHAARRRRRRRHLERRLVVGVRGRGCRGRHGHRRRAGVGVGVGVGRRRVGGAAG

SEQ ID NO: 13955 - protein, 76 aa, Zea mays subsp. mays
  misc_feature (1)..(76): Ceres Seq. ID no. 13587598
MALHRHRGGGGVVDVAALDGSHHHAARRRRRRRHLERRLVVGVRGRGCRGRHGHRRRAGVGVGVGVGRRRVGGAAG

SEQ ID NO: 13956 - protein, 49 aa, Zea mays subsp. mays
  misc_feature (1)..(49): Ceres Seq. ID no. 13587599
MVGDDQAAVWSQMPAASSNTSGGTSWKPCRPKSSALGSRVMKSSKSSAS

SEQ ID NO: 13957 - DNA, 636 bp, Zea mays subsp. mays
  misc_feature (1)..(636): Ceres Seq. ID no. 13599352
atactcctccggatccgtgttccatcacggctacaaaaatactccgcctgcatctccaaagcacacggctccctctggtttcccgcctcctcttcacctccttcgcgtcccgacgctccctcatggccgccgctgccgcagcagcagcagcagtttcctccccgattgctccacgcgctgtggccgccgcggcctcccgccgggggttcgtcacgtttggtggaggcgccgcccgctcctcgcccacgctgcggtccggccgcgggttctctggtgagggccccctctctgagctgatcgcttgtgtaccgtagcatggcgagcgaatgatgtgtttttcatactttcatattttgtgagctggaatgcttgcttggttgcttatgctgcctaggatccacgatcgctaggtgaaattttgtttagtatatgtggattaacgagctcatgttcagggttacttctgttttgctatatctgcgttactaagtagtaactggagcatcatgaattcgtgatggagttagtcaggttgtgtgtagacagtcttaaacaattcattttgtttttgaaatttgtagcttccatttccttagtgttacattttgttaaataaacatgaaaagtctgactcag

SEQ ID NO: 13958 - protein, 103 aa, Zea mays subsp. mays
  misc_feature (1)..(103): Ceres Seq. ID no. 13599353
TPPDPCSITATKILRLHLQSTRLPLVSRLLFTSFASRRSLMAAAAAAAAAVSSPIAPRAVAAAASRRGFVTFGGGAARSSPTLRSGRGFSGEGPLSELIACVP

SEQ ID NO: 13959 - protein, 98 aa, Zea mays subsp. mays
  misc_feature (1)..(98): Ceres Seq. ID no. 13599354
ILLRIRVPSRLQKYSACISKAHGSLWFPASSSPPSRPDAPSWPPLPQQQQQFPPRLLHALWPPRPPAGGSSRLVEAPPAPRPRCGPAAGSLVRAPSLS

SEQ ID NO: 13960 - protein, 91 aa, Zea mays subsp. mays
  misc_feature (1)..(91): Ceres Seq. ID no. 13599355
YSSGSVFHHGYKNTPPASPKHTAPSGFPPPLHLLRVPTLPHGRRCRSSSSSFLPDCSTRCGRRGLPPGVRHVWWRRRPLLAHAAVRPRVLW

SEQ ID NO: 13961 - protein, 63 aa, Zea mays subsp. mays
  misc_feature (1)..(63): Ceres Seq. ID no. 13599356
MAAAAAAAAAVSSPIAPRAVAAAASRRGFVTFGGGAARSSPTLRSGRGFSGEGPLSELIACVP

SEQ ID NO: 13962 - DNA, 1349 bp, Zea mays subsp. mays
  misc_feature (1)..(1349): Ceres Seq. ID no. 13599520
cagagaatgttacggtcttacggatatagaacaggttcatataacagagcagaacatatcacaaacattttgtgaaacttacgtttctccaaaagacaaactaatctcaggttgctaaggtttcaacttaagtaactacgctcatgttaatccacgatcagcatactaaattctgcgactcttagctgctttctcccatatatccgcaatgatactagggcattcccgtttcagttgctcataccctttactggccaccacatcaccaattatattagaagagttcataaactcaatgcaagcatctttgagctggctgcaatggtgctggtcggctagagccagcgtggtcgccacagtctcggcacaaagaacctcgcacagcttgctctcgcacatcaatttcatcctttccatggcatacctatctgcagcgacaagcaaatgcctaagcatttcttcatactcttcatcattcaggtcatccatcggaggcaacgaatccttgtagatgaagtgaagcagtcctctgaaagcagcaggctgcatatcttcaacagttatgttgtgcctttttttgtccctcattggcccgtagaactctgccctgaagaccgctgaacgcatcgcgaggattatcttatgagctgagaaaaccgcatgcttcacattgaaagatacatcagccccctctgtggcctccagcaagctactgagattatcaaacagatcggacggcggcacttggaccacaacattcgtcttggcgtcctccacctgcgcctccttgaacttgatcactgtaagattgcactggatgccaagaatgtcgtccacaatccactctccaagctcactcttcctccggaatttggtaaagccccagctcacggctgcattgtcacgggtgtcaaaaatcgacgggtctacctggctagggtttggccgggcataaggccgcggcggcggagccgctgtggcctggtcgactagccagatatcgtagagcaccctcacctccgtgttctcggtcttgagctcgaggtaggccgacacccagccattgctgtcttccctgtcgccgtcggggtagaagcggacgcaccagtcgtagccgccgacggcgaaggtagcggaccggatgaacttgccgacgccgaagcccctgtgcaggctgtacccgtcgatcttgaagacgtgcgacccgtgcgcagtctccggggcgcaggtcgaggcggtcctcgtcagtgagctctcggacgcggccatcgctggcctctggtggggcagcaactaagcgcggcggcggcggcggcggcgggatggggaaattttttggggctggggat

SEQ ID NO: 13963 - protein, 110 aa, Zea mays subsp. mays
  misc_feature (1)..(110): Ceres Seq. ID no. 13599521
MLHIERYISPLCGLQQATEIIKQIGRRHLDHNIRLGVLHLRLLELDHCKIALDAKNVVHNPLSKLTLPPEFGKAPAHGCIVTGVKNRRVYLARVWPGIRPRRRSRCGLVD

SEQ ID NO: 13964 - protein, 100 aa, Zea mays subsp. mays
  misc_feature (1)..(100): Ceres Seq. ID no. 13599522
MILGHSRFSCSYPLLATTSPIILEEFINSMQASLSWLQWCWSARASVVATVSAQRTSHSLLSHINFILSMAYLSAATSKCLSISSYSSSFRSSIGGNESL

SEQ ID NO: 13965 - protein, 71 aa, Zea mays subsp. mays
  misc_feature (1)..(71): Ceres Seq. ID no. 13599523
MQASLSWLQWCWSARASVVATVSAQRTSHSLLSHINFILSMAYLSAATSKCLSISSYSSSFRSSIGGNESL

SEQ ID NO: 13966 - DNA, 722 bp, Zea mays subsp. mays
  misc_feature (1)..(722): Ceres Seq. ID no. 13599549
agcttttttttttttttttttgaaaataaaaacgagtgtttcaacgcacacccgaatagtccattattattaagtcgagaagcaagagtatgcaacgatacattgaaaaagcaagaaacaataccaaaaacacacgaactttattgggaaccaacagagaaaagtagcgattcataaacctgatcatggatccagccatagtcccttatagaattaagtggatggtgcaaggagagggcgaatcaagttaggaacatgagcctggtgatcctcaagacgacccttaacactgtctccatcccagcgaacaagtgttggcactccagtgaccttgaagcgaggatcgactctccacggatgcatcggattcctccacgtcggcctatctcccgcgtaagcccgaataacattcacttcctccgctgattcctctagagtcttgtatatcacaggctcagctctaacgcaatcaggacaccagctgcggttggtggtgggatcattgttggcgaggaagaggatgaaattgattttgttacggtttgattcatcagatttcaattcttccaacaccttctccaaggttgagggatctgcgtccaccttcttcacactcatttttattcttttctctacaacactctcgatttcgatttcgatttcgatttctttaccaattttagttggactgctctccttaaattgaggcccgtgtttgattc

SEQ ID NO: 13967 - protein, 61 aa, Zea mays subsp. mays
  misc_feature (1)..(61): Ceres Seq. ID no. 13599550
MKLILLRFDSSDFNSSNTFSKVEGSASTFFTLIFILFSTTLSISISISISLPILVGLLSLN

SEQ ID NO: 13968 - protein, 58 aa, Zea mays subsp. mays
  misc_feature (1)..(58): Ceres Seq. ID no. 13599551
SFFFFFFENKNECFNAHPNSPLLLSREARVCNDTLKKQETIPKTHELYWEPTEKSSDS

SEQ ID NO: 13969 - protein, 56 aa, Zea mays subsp. mays
  misc_feature (1)..(56): Ceres Seq. ID no. 13599552
MSLVILKTTLNTVSIPANKCWHSSDLEARIDSPRMHRIPPRRPISRVSPNNIHFLR

SEQ ID NO: 13970 - DNA, 2130 bp, Zea mays subsp. mays
  misc_feature (1)..(2130): Ceres Seq. ID no. 13599656
aaacttcgcgcgccacaaacttctacgcctatactacgccatgcatatgcagttcattcacccaacgcttatcccgtaaggctataaagcacatgcgaaagacgttcattcactctgtaaggcgttcttgttcttcacccaacgcttctcgcacgggggtcttctattgaccattgaagaaaaacattgactggagatagcatctggaatatatgaatcgagtataaatgaaattagtcacgtatgttggtattcaatatttgttcagacgaactaggtctgaaaatctgggcaattccagattctcatgtgagatgataaaaacgtcataattatttgctaagtttaatgacctacgtcagtttctgcgtactaaaaactattcgctagttgagtcgttccggcatattcaaaattattagctacagttgttcctgcatgcgccagattctcatgtgagatgataaaaacgtcataattatttgctaagtttaatgacctacgtcagtttctgcgtactaaaaactattcgctagttgagtcgttccggcatattcaaaattattagctacagttgttcctgcatgcgtctaatgtccttcggtgaacttgtctgtcattatcatttaaaaacgtatctagatgcattatggaagatttttagtttcctttgttatatttgagaagttatatattgtatataccgagagatgcacctgtgtattatttgttgtagcttcgaatgcgagacgtatggttgcagtcattttattgtagttagtttaactgctgtgccatatgaagattaactgctctgccatattaactgcatgaagattaactgcatgtgccatatgaagacctcctgcctcatcacggtgtttgtatataagatcaactgcagtgcctacacggtggactgagtatttgtatgatgcgaaggtcactgttcagcatcgtcagtatgaaatggctatggccttcaaagctttctttcttggtcaccggacagggaagaaattttctgctcaagctcacaattagatactagacataactcagataagagcttgttcaacttgcactatagttcatttgagtacttacctattattgatctctcttgagttgaagctaggtttcaagtatctcctaaggtttataggtgaaaaccagggatttttttttgcactacaatctgtgacgttttaatacttgattactagttgttcatgcattgctattgtattcgcatatcccctaggtttaagagcaaggtttaagagcctttctaacaaggtgactcaatgatgtctcaaatttaaaatactacatttaaagtgttcaggtcgccaaaaacaaattgtgcttctacatttaagctttaatcatgtattttaggaagtaaattatattattagaaaaaatgtttagaatgatgtagaaaacatggatagagccttagtccgagagtagtatatttggatcttaatgtgcccgaaatttataaaatagggcactgttggagctgtttttactgatttgctctatattttaagatagggtactgatttaaagcacggttgtagttgttttaaatacaacatttcaaatttccacttatacacaatgttagcttatttttaccgtccgcgtggaagctgcattgacgttgaggctggcggcagtgcgggcggcagcgtgggcgagaagaggccgctgccgcccgcgcgcggacgaggcggacgagaggccagcaccgggcgatggcgctcgcgcccggcgagagcgagcagtatcgcctcgctctcgcccgcgctggagcgtccgtccgggtgagaggcgggcgagagggaggcgaggcactggcggggcgagagcgcgggtgagagcgacgtggcgtgatctgattggtccacgtgtcgcgatctgattggtccacgtgtgctagccgttgcaactagccgtttttgaccgtttggagtccaaaaatttcgaaaaaaattgcaaaaaatcacaaattttatccctaattcctctatatattatgttgtgtgttttctgagcgttgaaataaatccgcgtgaattaaaaaaaaaaaaaaaaaaaactcgagggggggcccggtac

SEQ ID NO: 13971 - protein, 69 aa, Zea mays subsp. mays
  misc_feature (1)..(69): Ceres Seq. ID no. 13599657
MLAYFYRPRGSCIDVEAGGSAGGSVGEKRPLPPARGRGGREASTGRWRSRPARASSIASLSPALERPSG

SEQ ID NO: 13972 - protein, 55 aa, Zea mays subsp. mays
  misc_feature (1)..(55): Ceres Seq. ID no. 13599658
TSRATNFYAYTTPCICSSFTQRLSRKAIKHMRKTFIHSVRRSCSSPNASRTGVFY

SEQ ID NO: 13973 - protein, 44 aa, Zea mays subsp. mays
  misc_feature (1)..(44): Ceres Seq. ID no. 13599659
MHYGRFLVSFVIFEKLYIVYTERCTCVLFVVASNARRMVAVILL

SEQ ID NO: 13974 - DNA, 1813 bp, Zea mays subsp. mays
  misc_feature (1)..(1813): Ceres Seq. ID no. 13599900
attattaagtcccatgacatttttttggcctgaatgcctgatacactttctaatagcattaaagctgccacaatatctaaggttgtaggttgatgattatctaaagttgatgagtctacttctcgtcaggttgttcaccatgccatgcccacacaatatcttctagtgccggtctcatgctttggttcataaagttatgatactcaaggatgtcaccattgattttcttgatctccacgagatgataatttggtgtgatttgaaatatctcagcatttatagacatcacaccttttattcctgatttggcagcttccatattcaacaatccaccagtttttgttataaccttcagatccaggctctttgcaacctccattagctttgtgataattgtcatagctgtgttggtagacataaatttagactccttgtttgagttctcaaatataccagagagatcaaacccgttagacagggagatgatatcaaaagcattcaaaatagtcagtttctctgccgctgaattacactcgaccatattgctatttaaggaattcaaagccaaatccatgtcactaggcacataatctctcgttgtagaatcaaacaatcttgcatcaagaccaattctaaaccaaggatgagtccttatttcttcaatagatattcgtctattagggtttggatgaaggatgcgccgcagaagctttcgaacatctgaagaaaaccaacttggccatttgagttctgctttgcaaattttcttatacatgtccatcatgttcttgtcttggaaaggaagatagcccgccaacaacacatagaggatcactccacaagcccatatgtcagcttttgcaccatcatatcctttttgactaattacttctggagcaacatatgcaggagtcccacaaattgtgtggagtaacccatcttttctcttgcagtttggaagtgcactcaaaccaaagtctgaaatctttaagttgtgacttccgtcaagaagaagattttcgggctttagatctctatgataaacttgtctagtatggcagaagtcaacagcactgatcaattgttggaaatatgtacgagcaacatcttcttttaaccttccacgttgaacctttttgaacaactctcctcccttgacatactctatcacaaaatatatcttggttttggtagccataacctcatacaattggacaatgtttggatgttttaccaacttcatcaccgaaatctcttgaattatttgatccataagaccacacttcttgatcttatctttgtcaatcaccttgatagcaacgctttctgaagtcttaacattgcgagcatggtaaactttggcaaaactcccttttccaagtaactttcccatctcatatctctgcattagaatattctctttctcagccatcttctcagtgttctactttcaaacttgaataagttggcgatgaacaacaatgacgtataagatgctggtaattataagtgaccagcaattttaaccatctccacctagaaagaaaccagagacgatggttgagctacaactcgcggccccattatgtgtgtgtgcatgaggcaattgttgtgcatatatttgcagtccaatgtcatcgagatcaagtaaagtacaactatgtttgtgtatcctgccaatttccaggcaaggtactccatcatgcaaccacatctttctgcatccctttgatattttggacctctgactggaagcaaaatactgatcccgggcgatccaggcaacgcggaggagccgctcccgaagtcagat

SEQ ID NO: 13975 - protein, 49 aa, Zea mays subsp. mays
  misc_feature (1)..(49): Ceres Seq. ID no. 13599901
MQESHKLCGVTHLFSCSLEVHSNQSLKSLSCDFRQEEDFRALDLYDKLV

SEQ ID NO: 13976 - protein, 38 aa, Zea mays subsp. mays
  misc_feature (1)..(38): Ceres Seq. ID no. 13599902
MSSRSSKVQLCLCILPISRQGTPSCNHIFLHPFDILDL

SEQ ID NO: 13977 - protein, 37 aa, Zea mays subsp. mays
  misc_feature (1)..(37): Ceres Seq. ID no. 13599903
MRRRSFRTSEENQLGHLSSALQIFLYMSIMFLSWKGR

SEQ ID NO: 13978 - DNA, 2050 bp, Zea mays subsp. mays
  misc_feature (1)..(2050): Ceres Seq. ID no. 13600268
ctttattgtgtttaaacagcgaattgggtaccgggccccccctcgagttttttttttttttttttttacaataatataattttcattcatatgaaaatatagaaagagtacatattacataactgggtgttcgagtgcagaacttattattacattaccgggaggcaaaacatcctccccaaataagtttagtgtttttcctcctaattgggcaccacctttgagcagaaacagcagaacttggttgtttcatcacctacaataacatgggttcgaaaaccatgaggtcaaagtgtacttttgcaagtcttacccgtgaaaggaaaagactatcaaggatatgctgccttttaggaatcaaggtaaagctcataaaaattcaaagactctgtttgcagaaaagcttactatgagtggatccttaaaaatccatttttattatcaggttaagtagttacctacatctagagttctttctatcctagatcaggcacttggcctatactagtcgtcttttatcatcccatcagttcactggattgctacatgtaagtcagtgaccaagtcttcatgttcgagaagtaacggcgatctgaatcgattaagacccagctggggatctccaaccgcatgatatatgtagcacttaacccttgcatatgtcaactcgccaccgggtttctcaaaaccagaatggattcacgccaaccaagagcacatatacaccaccgtccagcctcttgccacggagggtacacgctactctcaccatctctccactcctattgcatggtggcctttctggtattggtccgatcgaggaaaagcttacccatgacgaggcatgtggccagttaaaagatcctcgatcatcaagcctacatcgattcggtccttaatcaactcagacagagacactacaccgagacttccttctcgtgcaagtaacacacccggtctcgtctttatcatttacaacccaaagtttggtacctaacagaggtacatcttttcagatgttgaacccatcacggccatgatggattcaccgtcatcagtcttttctttgtaaaattcccatcctatatgaagcatcaccttttgtttaaaacaaaacattttgttttctacagcaaagctaagcattagaaaactttatgtaaatcaagtgacaaggaatggtaatcagttccaaggaagggaatgcatcaattgtttagcacacaactcctaccacctaatgcatcatataaggtgataaagtttttaaaacatcaaggaaaggggataatgcaccggggcttgccttgtgttgcaggaggttctgggtctactccacagatgtcgaagtagaagttattctcggctggaggattctcagcttgagcgacaacttcttcttcaatcacagtttcttcctcattttctatacatgacaatacatgtatatgaatgcttatgtgatgtcatgaatatgcagttacataatagaaacatactaagttgtatgttgaatacaactttgcttcatggtacacactaatcactagggtttcctaagttgatattctatcagtattaagcagataaacactaggaggctagttattgggtttgtgatcaaacagtgtccaaatcacttcaaacttcacccacagtcttcaatcatcatactaggcctacccaaaaagttttaccatttttggagttactaaattatttctaaaattctaaaaggcttggtttgaactcctttaaaggctacataattctaggtttgggataaaaatcttggaactatttttattaaatactatatgattttttggagtctggtaaagttggtctcatgattttaccaattttttactattttctacaaatctcctaatctgctagtaaaaagaaaaagagaaaacatgaatattgttgggccaattctggcccaaaccagcccgcgcacaggggaaacatgcgcgcgcccgcgctcgcggctttgcatagaggcctatggcgttttaaataactggtaaagaatccctaagcacta

SEQ ID NO: 13979 - protein, 79 aa, Zea mays subsp. mays
  misc_feature (1)..(79): Ceres Seq. ID no. 13600269
MSTRHRVSQNQNGFTPTKSTYTPPSSLLPRRVHATLTISPLLLHGGLSGIGPIEEKLTHDEACGQLKDPRSSSLHRFGP

SEQ ID NO: 13980 - protein, 75 aa, Zea mays subsp. mays
  misc_feature (1)..(75): Ceres Seq. ID no. 13600270
MIYVALNPCICQLATGFLKTRMDSRQPRAHIHHRPASCHGGYTLLSPSLHSYCMVAFLVLVRSRKSLPMTRHVAS

SEQ ID NO: 13981 - protein, 54 aa, Zea mays subsp. mays
  misc_feature (1)..(54): Ceres Seq. ID no. 13600271
MDSRQPRAHIHHRPASCHGGYTLLSPSLHSYCMVAFLVLVRSRKSLPMTRHVAS

SEQ ID NO: 13982 - DNA, 634 bp, Zea mays subsp. mays
  misc_feature (1)..(634): Ceres Seq. ID no. 13600609
atctttctttatctttttggttcattcaagcctcacaaaaggagagagaataggttacaaaagataaatgataatgcaacaaaaacacataacctattagataaatagcaaacctgcaacatcataagataaaacatttggccaaaactcattgacacataacctattagacacgggtctagagatagacgggctcatactccacaagggatagattgttgtcctctttaacagttatgtcatcagctggttcagtgacgacctcgatgcgaccaaatttgttaacagcaagccccatgaatccgtggaacatatttatctttgtattccggagattcacagtagttcctggcttcatcaagtccacttgatcgttgcgagcggtgaagatgatggaagcagtctcatctccaacgaggcactcagcgatccgaccaggtctaatgaaagaagtaactgaatactgatccacgaccttaaaggtcaaagtgtgaccgctcgtacctggtttaagctgattcaccttatgtttcttctttctccccggcggaggtccgtttctttgcttggaattacggctggtgtttgacgccataggagctgaagagatctctcaagaaagaaaactaatctc

SEQ ID NO: 13983 - protein, 44 aa, Zea mays subsp. mays
  misc_feature (1)..(44): Ceres Seq. ID no. 13600610
MSSAGSVTTSMRPNLLTASPMNPWNIFIFVFRRFTVVPGFIKST

SEQ ID NO: 13984 - protein, 35 aa, Zea mays subsp. mays
  misc_feature (1)..(35): Ceres Seq. ID no. 13600611
IFLYLFGSFKPHKRRENRLQKINDNATKTHNLLDK

SEQ ID NO: 13985 - protein, 34 aa, Zea mays subsp. mays
  misc_feature (1)..(34): Ceres Seq. ID no. 13600612
MRPNLLTASPMNPWNIFIFVFRRFTVVPGFIKST

SEQ ID NO: 13986 - DNA, 1728 bp, Zea mays subsp. mays
  misc_feature (1)..(1728): Ceres Seq. ID no. 13635680
agcgcgagtgccactggaaattcccgaaggtagcaagttcgtggtggagtcctctggtgcaccggacatgtccggtggtgcaccggacactgtccggtggcacaccggacagtccggtgcgccagaccagaggtgccttcggttggccctttttgctcctttgttgaatccaaaacttggtctttttattggctgagtgtgaacctttaacacctgtataatctatacacttgggcaaactagttagtccaattatttgtgttgggcaattcaaccaccaaaattatttaggaactcggtgaaagcctaattccctttcaatttccaccgcccactttgaaatcctacccgaggcctctcggcactggatgatctcccccagggggaaggatgacaccacagtcacagggtagtagtgttgcaacttccgccgcgtcagaatcaccgcgtacagcagcttctgaatttgtgggtagcggatcttggtctcggacagtacctcactgatgaagtagaccggcctctggacgggcaaagtatgcccttcttctcgtctctcaaccatgatcgcgacgctgaccacctgagtggtagcggcgacgtagatcaagagggcttctccggcagcggggggcagcaagatgggcgcgttcatgaggagcgccttcaggttcccaagggcttcctcggcctcaggggtccaagtgaagcactcggcctttcttaagaggcggtataggggtaggcctctttcgccgaggcgcgagatgaagcggcttagagccgcaaggcatcccatgaccctctatacgcctttcaagtccttgatgggccccatgttggtgatggccgtgattttctctgggttggcctcgatgccccgctcggagatgatgaaccccaagagcatgcctcgggggactccgaagacgcacttctcgggattgagttttaagcctttcgccttgagacaccggaatgtcgtttcaaggtcggaaaggaggtcggaggctttcctcgtcttgactacgatgtcatcgacgtaagcctcgaccgttcgaccaatgtgttcgccgaacacgtggttcatgcacctttggtacgtcgcacccgcattcctcaaaccaaatggcatagtaacgtagcagtacatgccaaaaggtgtgatgaaagaagtcgcgagctggtcggactctttcatcctgatttggtgataccctgagtaggcatcgaggaaagacagggtttcacacccagcagtggaatccatgatttgatcgatgcgaggcagagggtagggaaccttcggacatgctttatttagaccagtgtagtctacacacatccaccatttccctcctttctttctcacaagcacagggttggcaagccattcgggatggaatacctctttgatgaaccctgcagccatcagcttgtggatctcctcgcctatggctctacgtttttcttcgtcgaatcggcgcagaggctgcttcacgggtcgggctccagctcggatgtccagcaagtgctcggtgacttccctcggtatgccaggcatgtccgagggactccacgcaaagacttcgacgttcgtgcggagaaagtcgacgagcactacttcctatttggggtccagctcggagccgatccggatctgcttggaggtgtcgttgctggggtcgagagggatggatttgaccgtctccgctgggtcgaaattgc

SEQ ID NO: 13987 - protein, 134 aa, Zea mays subsp. mays
  misc_feature (1)..(134): Ceres Seq. ID no. 13635681
MGAFMRSAFRFPRASSASGVQVKHSAFLKRRYRGRPLSPRREMKRLRAARHPMTLYTPFKSLMGPMLVMAVIFSGLASMPRSEMMNPKSMPRGTPKTHFSGLSFKPFALRHRNVVSRSERRSEAFLVLTTMSST

SEQ ID NO: 13988 - protein, 130 aa, Zea mays subsp. mays
  misc_feature (1)..(130): Ceres Seq. ID no. 13635682
MRSAFRFPRASSASGVQVKHSAFLKRRYRGRPLSPRREMKRLRAARHPMTLYTPFKSLMGPMLVMAVIFSGLASMPRSEMMNPKSMPRGTPKTHFSGLSFKPFALRHRNVVSRSERRSEAFLVLTTMSST

SEQ ID NO: 13989 - protein, 109 aa, Zea mays subsp. mays
  misc_feature (1)..(109): Ceres Seq. ID no. 13635683
MEYLFDEPCSHQLVDLLAYGSTFFFVESAQRLLHGSGSSSDVQQVLGDFPRYARHVRGTPRKDFDVRAEKVDEHYFLFGVQLGADPDLLGGVVAGVERDGFDRLRWVEI

SEQ ID NO: 13990 - DNA, 982 bp, Zea mays subsp. mays
  misc_feature (1)..(982): Ceres Seq. ID no. 14305072
gtatcgagccttgtatctcgttgtctgtaaaccatatatacatgttttggttggaaaaaagaagaattatgttcttttgtttgtggagtgtagacttcttagctggataaaacaaaaaccttcattctttcagtttggctatcaggattcaggagtcagacctttggttctgcactgagagccatgttttttcttattctagaatttgattggttgacatttcgcttctcttgctctgctgttgtcattgtctgttacttgttagtttaaatagttagtgttgttcaaaggaaaaattctgcgtccagtggagaaatcaaggaaagatcctactgaaactgacaatgataaaagttaatcctatgctgattcactcctggcgtaagttgattcactttcatcaagggagcattttacgcccgctttattttgtatcctagggctgcatttcaagccaagccattgctaccaagcttaaatctgtcccaaaaccattggtcctcagttcagtatatgcctgcagtgtcaagcattggagatcttttatctaacgttctgaagtggcttcctgttataaaagggacattctgaaacggtagttgagatgcaccaataaccatatatgaatattatctcttatctgaagcctcactgtgttcgttgtgtaggctcctactgaagaggcagctggggacagtgaaggtcttctgatgggttgtagttataacttatagtaatagacagctagggagcccctgcaacaatggatcccctcaagctgtcaagcatcttcggatggtgtgctcacagctggtaaaatgacactggttcaatcttatgtatttgcagaacccggtgcgctagcacctggacatggtgggtgtatggtccacggaacccagccgtggcgcataatgtaatagagtttgtagtttgtactttgtaccatattttccctcttgaataaaggcatgtgttacgc

SEQ ID NO: 13991 - protein, 58 aa, Zea mays subsp. mays
  misc_feature (1)..(58): Ceres Seq. ID no. 14305073
YRALYLVVCKPYIHVLVGKKKNYVLLFVECRLLSWIKQKPSFFQFGYQDSGVRPLVLH

SEQ ID NO: 13992 - protein, 35 aa, Zea mays subsp. mays
  misc_feature (1)..(35): Ceres Seq. ID no. 14305074
IEPCISLSVNHIYMFWLEKRRIMFFCLWSVDFLAG

SEQ ID NO: 13993 - protein, 33 aa, Zea mays subsp. mays
  misc_feature (1)..(33): Ceres Seq. ID no. 14305075
MTLVQSYVFAEPGALAPGHGGCMVHGTQPWRIM

SEQ ID NO: 13994 - DNA, 1066 bp, Zea mays subsp. mays
  misc_feature (1)..(1066): Ceres Seq. ID no. 14305282
ttcacccttctcgctaaaatgtttggtttgcttttaagtaatgtagacttgccatggctaagctagagatgacatgtgtgtcttgttttataagttcctttatctagtgatgcgatataggagttccttagacattgacgcttatgtcctctatcaaatttgtgttatcagtgatgcttgtgtgtgatcaataggagaactaataaaaagtcgtgtccaaataaataaaatgtgcgtgcttgtgatgttatttttctgttgcgtaaatatataaaatgatgtcatctttttaatggtgttaatgttgatcgccgataaagcgtagataactaatgttaacgtgtagttgcctacggtgtcttccaatttaaatgtttagttcgccactatgtctttctatatctgtgctacttttgtgctcctttcattatattcatacatatgcaccttgcatctcatttaggactgagacaggatgatcgtgcaagtgatgtggtgccacccacaagatgcagtcggtggacgacctcaagaatggacttaaccagtggatgctcgccaagcgagtacctcccccagcaaacactatctaagtgtcaaattaaaggcaagccccggttttatgcataaccgttatatatgctattttactgcacttaatgattataggtttgtactgtgcacttaagtgtaggagttacctaaaaccctagttgcattaactcaggattccatttgagatggacactagtatgctaggtcgagtaggtgctttactaattagggatctcggtagaagtcgagtgatttttctagcactcgcgcgaggtcaggaattggtgtatccaattttatatcgtaatgatgatggtctgtggacaacgatccatggggatgcgttgtctacgagacggaaattggaataaggattaaggtgtggtaccgtgtgtcaagcgtttgaacgtactaaacatatgccgagaaatatggtaaatcggtaagcctagtacctgagtgaacctggcatcagattgccctcctcacgcgacctgagacgtggtctccc

SEQ ID NO: 13995 - protein, 62 aa, Zea mays subsp. mays
  misc_feature (1)..(62): Ceres Seq. ID no. 14305283
MHLASHLGLRQDDRASDVVPPTRCSRWTTSRMDLTSGCSPSEYLPQQTLSKCQIKGKPRFYA

SEQ ID NO: 13996 - protein, 61 aa, Zea mays subsp. mays
  misc_feature (1)..(61): Ceres Seq. ID no. 14305284
MDTSMLGRVGALLIRDLGRSRVIFLALARGQELVYPILYRNDDGLWTTIHGDALSTRRKLE

SEQ ID NO: 13997 - protein, 57 aa, Zea mays subsp. mays
  misc_feature (1)..(57): Ceres Seq. ID no. 14305285
MLGRVGALLIRDLGRSRVIFLALARGQELVYPILYRNDDGLWTTIHGDALSTRRKLE

SEQ ID NO: 13998 - DNA, 895 bp, Zea mays subsp. mays
  misc_feature (1)..(895): Ceres Seq. ID no. 14305293
aactttccccactcttcttgccccttgcctcccgcacctaccacctggctctatgaaatcgctgtcgccactactaaatcacgcgggggacacggtttaccgtcatgtttgcgccagatcctggctggagggagcggctaaccgtccggcagccacgctcctagctccagtcgttcgctctactgcgccagtggttttccgctcgctcccggcgatttctcgctattagccatcagtacgcggcgttttggtacccaaaaaccggagtttctagttttcgtatttagtgctatacatgaagatgatttatgtatgttagctgctatatgtgaaaatgatttattgttagatgctagttatatattagtattgttaatgtgtagatactagttatatatgttagtatagttaatattaagttatatatgtcagtattgttaatatttagttatatatgttagtattgttaatatttagttatatatgttagtattatttgctacttgttgggggccttcggcttccgaaggtcctcaaaaacataatttgacaatgttttccaagtgaaatatgtgaacaggcatcttcggaatcgggtcatgagtatacaagagcatggtcaggacgaagcctgagcgagacgtaaggcgattatgagtttatgacgaacgataaggtgatcacgaagatgtgtgtagaaaagcttcggcataacagcagagaaggggaaccgacttaaagatgaaaaggcaaattagacctcgaagaattattatagagttattgataaatgtaaagggcatgaatgtaattctatatgggctgcgtcccttgcctataaatagatgaacagtactcccgtactgttcacgctgactttgcattttgccctcac

SEQ ID NO: 13999 - protein, 75 aa, Zea mays subsp. mays
  misc_feature (1)..(75): Ceres Seq. ID no. 14305294
TFPTLLAPCLPHLPPGSMKSLSPLLNHAGDTVYRHVCARSWLEGAANRPAATLLAPVVRSTAPVVFRSLPAISRY

SEQ ID NO: 14000 - protein, 58 aa, Zea mays subsp. mays
  misc_feature (1)..(58): Ceres Seq. ID no. 14305295
MKSLSPLLNHAGDTVYRHVCARSWLEGAANRPAATLLAPVVRSTAPVVFRSLPAISRY

SEQ ID NO: 14001 - protein, 46 aa, Zea mays subsp. mays
  misc_feature (1)..(46): Ceres Seq. ID no. 14305296
NFPHSSCPLPPAPTTWLYEIAVATTKSRGGHGLPSCLRQILAGGSG

SEQ ID NO: 14002 - DNA, 652 bp, Zea mays subsp. mays
  misc_feature (1)..(652): Ceres Seq. ID no. 14306152
aaaaagaaagggcgtgggtggtctccagaggcgtcttcctcctgttcatcctcggcccgcgccgctgtgtccatggtccatgggccgcctccctcgcgctcccccgcacagtacggtcctctgggaggtcgccttcggtcgtggcccagggtgtcacgcgcgacgagtcggcgcgtggtggagggtcgtcttctgctgcttctggctggattcctgggctattcaacagagaaagagggagcaaaaaatggtggtccaaggaagcaagctaatccgaaagatagcaagtgaagcgtttggccgggcgtttgggtggtgcccgagagacaggcgaatttctgggtgatcaatgctggaatatggattctggagttggagatagcctttcttttggttgatgtcttgaatcagggccttttgttttgcgcctgtctgtcgtgatctggttgtaaataagaaagtcttatgctactagtcgcaggtcgaactttatcttctatcctaggccctctacttatctaggttgatagtgtaaggtgtctagatagggatctgacctagttgctatctgtcggatcgtttgatcacgatggatgtcgttgttctaaactttcgtatttcctaatgaaatagtgggcttcgccccttcgtc

SEQ ID NO: 14003 - protein, 114 aa, Zea mays subsp. mays
  misc_feature (1)..(114): Ceres Seq. ID no. 14306153
KRKGVGGLQRRLPPVHPRPAPLCPWSMGRLPRAPPHSTVLWEVAFGRGPGCHARRVGAWWRVVFCCFWLDSWAIQQRKREQKMVVQGSKLIRKIASEAFGRAFGWCPRDRRISG

SEQ ID NO: 14004 - protein, 96 aa, Zea mays subsp. mays
  misc_feature (1)..(96): Ceres Seq. ID no. 14306154
KKKGRGWSPEASSSCSSSARAAVSMVHGPPPSRSPAQYGPLGGRLRSWPRVSRATSRRVVEGRLLLLLAGFLGYSTEKEGAKNGGPRKQANPKDSK

SEQ ID NO: 14005 - protein, 89 aa, Zea mays subsp. mays
  misc_feature (1)..(89): Ceres Seq. ID no. 14306155
KERAWVVSRGVFLLFILGPRRCVHGPWAASLALPRTVRSSGRSPSVVAQGVTRDESARGGGSSSAASGWIPGLFNRERGSKKWWSKEAS

SEQ ID NO: 14006 - DNA, 490 bp, Zea mays subsp. mays
  misc_feature (1)..(490): Ceres Seq. ID no. 14312488
gatcttctcgcgtcgattgcttgcccagctcgcttcctcttcgtcttccttctcccccttctcctcgcctccggttaaccgccacagcctggattcgccttctcccgcggcggcgcggccggccgctgctgctgcgtcggcgcgtgagatggatgattgcggcggcggcggtcgtttgccgttccattcgtgctgctaatccaagcggtagaggttgtggtagatatcaacaaaaggaagaagaagaagaagagggggctttcggtttcccggcgtggggttcgtgtgtgtccgatccgatcattttgaggatcggatttgctgctagtcggtggacaagaacagattgttcttggctcattgctgcaaaattgccatatggtgatggcgattggagaataagaactgggcttgtttgtatatgcatctgatgtatcaaagattgatactgctgctagttcaactaatgtaaatacttaagtttggtgtg

SEQ ID NO: 14007 - protein, 142 aa, Zea mays subsp. mays
  misc_feature (1)..(142): Ceres Seq. ID no. 14312489
SSRVDCLPSSLPLRLPSPPSPRLRLTATAWIRLLPRRRGRPLLLRRRVRWMIAAAAVVCRSIRAANPSGRGCGRYQQKEEEEEEGAFGFPAWGSCVSDPIILRIGFAASRWTRTDCSWLIAAKLPYGDGDWRIRTGLVCICI

SEQ ID NO: 14008 - protein, 92 aa, Zea mays subsp. mays
  misc_feature (1)..(92): Ceres Seq. ID no. 16625509
MIAAAAVVCRSIRAANPSGRGCGRYQQKEEEEEEGAFGFPAWGSCVSDPIILRIGFAASRWTRTDCSWLIAAKLPYGDGDWRIRTGLVCICI

SEQ ID NO: 14009 - DNA, 723 bp, Zea mays subsp. mays
  misc_feature (1)..(723): Ceres Seq. ID no. 14312743
acggctctcgtttccgcccgcgccacccgccatgtcgtccccgccgcgggggcagcccgccaccgccgccgtgccggcggtcgcggccgccacgtccccgcagttgcccgccgcgtcccacacgctcccccgcgcgttcctcgccacatcctctccccgtgccatagtggcagcaccggcgcccccgcggcggggacgacatggcaggtgggatcggcggcggagacgtgagcagtttttttccactgattctgacagccggaatctatatatacatacaaacacaagagcaaatgaaaggccaaagggacgggaaacgaacgggaagaggtggtgcgtgctaactcctatgcatcgcattcctggatgttcattggtcaatcacgatgctgcactgctgcagctcgggtagtttttgctaagctggaggtgcagcagacaagacaacaagcaagaggatgcaactatatatactgatgccactagtccatcgtggagctcggttgaggaagctcatcgatctcgttgtaccgaactatctcaaaaaaacatagtgcctgtttgtctggatagctgctcggccacaggcacagctgtctggccccgggcaccatccaaacaatcccatatagagcgtgtttggacgcagattcgtaggcctgtaaagcaaacacgtcccaattatctgaactcgggattattgacgccttggcaagattcaac

SEQ ID NO: 14010 - protein, 136 aa, Zea mays subsp. mays
  misc_feature (1)..(136): Ceres Seq. ID no. 14312744
RLSFPPAPPAMSSPPRGQPATAAVPAVAAATSPQLPAASHTLPRAFLATSSPRAIVAAPAPPRRGRHGRWDRRRRREQFFSTDSDSRNLYIHTNTRANERPKGRETNGKRWCVLTPMHRIPGCSLVNHDAALLQLG

SEQ ID NO: 14011 - protein, 126 aa, Zea mays subsp. mays
  misc_feature (1)..(126): Ceres Seq. ID no. 14312745
MSSPPRGQPATAAVPAVAAATSPQLPAASHTLPRAFLATSSPRAIVAAPAPPRRGRHGRWDRRRRREQFFSTDSDSRNLYIHTNTRANERPKGRETNGKRWCVLTPMHRIPGCSLVNHDAALLQLG

SEQ ID NO: 14012 - protein, 76 aa, Zea mays subsp. mays
  misc_feature (1)..(76): Ceres Seq. ID no. 14312746
TALVSARATRHVVPAAGAARHRRRAGGRGRHVPAVARRVPHAPPRVPRHILSPCHSGSTGAPAAGTTWQVGSAAET

SEQ ID NO: 14013 - DNA, 726 bp, Zea mays subsp. mays; identical to SEQ ID NO: 111
  misc_feature (1)..(726): Ceres Seq. ID no. 15174447

SEQ ID NO: 14014 - protein, 75 aa, Zea mays subsp. mays; identical to SEQ ID NO: 112
  misc_feature (1)..(75): Ceres Seq. ID no. 15174448

SEQ ID NO: 14015 - protein, 71 aa, Zea mays subsp. mays; identical to SEQ ID NO: 113
  misc_feature (1)..(71): Ceres Seq. ID no. 15174449

SEQ ID NO: 14016 - protein, 50 aa, Zea mays subsp. mays; identical to SEQ ID NO: 114
  misc_feature (1)..(50): Ceres Seq. ID no. 15174450

SEQ ID NO: 14017 - DNA, 477 bp, Zea mays subsp. mays
  misc_feature (1)..(477): Ceres Seq. ID no. 15175809
ctcgcaccgcatccacctccaccgcgccgccgcgagagaggggaaggagggtttccgatggagaacggcgaggagacgttcgcctcccccactgccgccgccgccgcggacttcgagatctccatcaacggcggggacagcggcgtgctgcgcaggatgagcgggctctggaagaagagccccaagtgagtgagactgagatggggtggacggggtccgggatagccgtaggtgcgaggtgatgcaatagcagcagtatgagtaggagggatactggtgaatgctgcagggaagacgacgacgctctttctggacaagacacggagacacagctctagtctaggtggtaggaagcatgatcgtctctgtctgataacatttggctggtacttgagtgaacctcgtgtcgaggagcagctgcttttggctgcctgttctgtaccttactatgcttcattcagtcaaaaaaattcccac

SEQ ID NO: 14018 - protein, 79 aa, Zea mays subsp. mays
  misc_feature (1)..(79): Ceres Seq. ID no. 15175810
RTASTSTAPPRERGRRVSDGERRGDVRLPHCRRRRGLRDLHQRRGQRRAAQDERALEEEPQVSETEMGWTGSGIAVGAR

SEQ ID NO: 14019 - protein, 62 aa, Zea mays subsp. mays
  misc_feature (1)..(62): Ceres Seq. ID no. 15175811
LAPHPPPPRRRERGEGGFPMENGEETFASPTAAAAADFEISINGGDSGVLRRMSGLWKKSPK

SEQ ID NO: 14020 - protein, 52 aa, Zea mays subsp. mays
  misc_feature (1)..(52): Ceres Seq. ID no. 15175812
SHRIHLHRAAAREGKEGFRWRTARRRSPPPLPPPPRTSRSPSTAGTAACCAG

SEQ ID NO: 14021 - DNA, 912 bp, Zea mays subsp. mays
  misc_feature (1)..(912): Ceres Seq. ID no. 15178502
ttttttttttttttttttcgaagagtgaagacaacccccgctatcttttctgtttaaaaatcgaaaatggtacaataatttagcgcgtaatgtatacgttacacactgggtagatgctatataagattcaaatgttacaataagcttttggtgcctacagcaccttatggcgggttggagaaattgagggcatcaaactagtgtggtgctaaaactaattaatggttgaaccaaaaacttcatccggaggcaaccgcaggtctttcccggtctgcgcactcctctttatcgaactcatctatcagctccctctgcctttgcgtcacatccgtcggaaccctgatattgaagtgtacatactgattcccaaacactggcgagttcctcgcttttattcctttgccccggaggacgaccttctctccaggttgggtaccttgacgaaccttgactgtaacatttccagtgagggttggtaccgtgacagttccacctaggacagcctgagcaatgcttaaaacagaatcaacatgcacatggatgccttctcttcgaaaagtagggtcctctctgaccttgatagtaacataaaggtcaccaggcttatttcggtcaacatctgcaccacccttaccaaaaaccttcatgatgtcattatcgtcacttcctgcggctatatctagcttgactgacgttttccccttcactacctgttctcctttgcaagtcttgcaaaaactcttgacaattttcccgctcccattgcacagggagcaagtacattcgacagtaaatatacccttctgcatgtatatcgcgccagagcctttacatgttttacatgttttaggcacagttccaggggggacgccacttccattgcaagttccgggggggggcctacgtagctga

SEQ ID NO: 14022 - protein, 91 aa, Zea mays subsp. mays
  misc_feature (1)..(91): Ceres Seq. ID no. 15178503
MVEPKTSSGGNRRSFPVCALLFIELIYQLPLPLRHIRRNPDIEVYILIPKHWRVPRFYSFAPEDDLLSRLGTLTNLDCNISSEGWYRDSST

SEQ ID NO: 14023 - protein, 88 aa, Zea mays subsp. mays
  misc_feature (1)..(88): Ceres Seq. ID no. 15178504
MMSLSSLPAAISSLTDVFPFTTCSPLQVLQKLLTIFPLPLHREQVHSTVNIPFCMYIAPEPLHVLHVLGTVPGGTPLPLQVPGGGLRS

SEQ ID NO: 14024 - protein, 87 aa, Zea mays subsp. mays
  misc_feature (1)..(87): Ceres Seq. ID no. 15178505
MSLSSLPAAISSLTDVFPFTTCSPLQVLQKLLTIFPLPLHREQVHSTVNIPFCMYIAPEPLHVLHVLGTVPGGTPLPLQVPGGGLRS

SEQ ID NO: 14025 - protein, 50 aa, Zea mays subsp. mays
  misc_feature (1)..(50): Ceres Seq. ID no. 15178506
MHMDAFSSKSRVLSDLDSNIKVTRLISVNICTTLTKNLHDVIIVTSCGYI

SEQ ID NO: 14026 - DNA, 1055 bp, Zea mays subsp. mays
  misc_feature (1)..(1055): Ceres Seq. ID no. 15178624
gacctgatttctcctgtgctggctttcaaggtagaaaagaagtcttttgttccatcatggccttaccaactccagcgcctattttggttgacgagaaccaacagataaatagaggtaagagggccaatggaccaagggccaaagggctgaagccatccgagaatcctggcaatcaagggaggagagctcttaaggatttgtccaacttctctaaaggcactggtttgaaggacacttccaccctgaaagagaagtcccagcagaaaactcgtagtaatgtggccaacactattaaaggcaatgctttgaaggacaagcccatcctgaaagagaagtccacccaggaacagaggtcaaaagctcttaagaacccaatgaaaattttagttgatgaagagatcaaaatgtgccatgagtgggctaaggatggggtggagggatttcactcaacacaaaataattctcagaagttggataaggatctgctagacaaacgtgtcaagaagaaagtggcggcagtaaactcagccttgtgtggttggccagatacagtatttgattctctaatgtatccatctatggaggttgctgagcttttttatgaacaaaacgtgctggaggtggaacctgagattctcccggacatcagttggcgtctctctagttcagtagatggtaaagcaaagattgctgaaggccgtcttaccgatgatgagcttgaccagtaccattctttggagaacaatccaattatttttgagctgagagacgagccagcgatcccgcagctgggagtgtattgaagaatctgtgccagctggacagaaagctctgtttccttgctgcttgctctggagtctggagttgtctagtctagaatgctagtaggtcttgaccctggtgttttccccagctatgttctggtgatgtaggatttcagtttgagtactggtaccacttccagctgaagcgacagcgttatgcctgctgatgggtgatggttgtggaacagcggcgatataattataatattttcaacaaaaaaaaaaaaaaaa

SEQ ID NO: 14027 - protein, 266 aa, Zea mays subsp. mays
  misc_feature (1)..(266): Ceres Seq. ID no. 15178625
PDFSCAGFQGRKEVFCSIMALPTPAPILVDENQQINRGKRANGPRAKGLKPSENPGNQGRRALKDLSNFSKGTGLKDTSTLKEKSQQKTRSNVANTIKGNALKDKPILKEKSTQEQRSKALKNPMKILVDEEIKMCHEWAKDGVEGFHSTQNNSQKLDKDLLDKRVKKKVAAVNSALCGWPDTVFDSLMYPSMEVAELFYEQNVLEVEPEILPDISWRLSSSVDGKAKIAEGRLTDDELDQYHSLENNPIIFELRDEPAIPQLGVY

SEQ ID NO: 14028 - protein, 248 aa, Zea mays subsp. mays
  misc_feature (1)..(248): Ceres Seq. ID no. 15178626
MALPTPAPILVDENQQINRGKRANGPRAKGLKPSENPGNQGRRALKDLSNFSKGTGLKDTSTLKEKSQQKTRSNVANTIKGNALKDKPILKEKSTQEQRSKALKNPMKILVDEEIKMCHEWAKDGVEGFHSTQNNSQKLDKDLLDKRVKKKVAAVNSALCGWPDTVFDSLMYPSMEVAELFYEQNVLEVEPEILPDISWRLSSSVDGKAKIAEGRLTDDELDQYHSLENNPIIFELRDEPAIPQLGVY

SEQ ID NO: 14029 - protein, 142 aa, Zea mays subsp. mays
  misc_feature (1)..(142): Ceres Seq. ID no. 15178627
MKILVDEEIKMCHEWAKDGVEGFHSTQNNSQKLDKDLLDKRVKKKVAAVNSALCGWPDTVFDSLMYPSMEVAELFYEQNVLEVEPEILPDISWRLSSSVDGKAKIAEGRLTDDELDQYHSLENNPIIFELRDEPAIPQLGVY

SEQ ID NO: 14030 - DNA, 955 bp, Zea mays subsp. mays
  misc_feature (1)..(955): Ceres Seq. ID no. 15180428
atctgtttgtcgcatctggaatcttcttcctcctcggcaatggctaacgatggtggaggtgcgccaccgtcctagggtcgttacaaccggccaggcggccactccatcttccagtcatggacagcacctcccagccatctcccttccccatccgacgccctgctccatgggcacctcctccctccggccacctgctagcgagcgccccttccctttccagtttggtcacggacacacaggtccgaccctcctctgctctctgctcccttggaccctcgatgcccctgctccactccggtcgtcggcgcccagaagccatggacgagcctccggcgtgcatcgagctccccgcggtctggctccccttccttactgcgagccagcgactcctctaggccggtcttcatcctattgcgttggacgcggctcctcttccccggccaccatcgaacgtccgcacgtgccttggttctagcgcagtgagttacccagcgcgattcactactttaacttgccgtggatgagcagcagcgtcgatccgatctgcgcagccgtgctgatccacagcagcaaccccgcagcaaccccgcatcacacgtcctctgactcgatctgcagccccgaccacgatgtcgaaaaccctgcccttatcgtcgtcgcgccttgtgcatcgcttgatcgatggaagcctcactcgtgaacaacatgcgcgggcgataaactgggtcaagtagatcatggtgagatttttttgcatatttgcgagtgcttttgtgccttactgcacatgtatggacgctgcacttactattgtgcgcttttggttgtgaagcagtcgtagactttttttttgtttcagaagagatgcaccaggcgtttatcagtgtaccgtccgctggatgtgttatagtagacctgagctttggattctaatttgtttgacatttatcttttg

SEQ ID NO: 14031 - protein, 157 aa, Zea mays subsp. mays
  misc_feature (1)..(157): Ceres Seq. ID no. 15180429
SVCRIWNLLPPRQWLTMVEVRHRPRVVTTGQAATPSSSHGQHLPAISLPHPTPCSMGTSSLRPPASERPFPFQFGHGHTGPTLLCSLLPWTLDAPAPLRSSAPRSHGRASGVHRAPRGLAPLPYCEPATPLGRSSSYCVGRGSSSPATIERPHVPWF

SEQ ID NO: 14032 - protein, 141 aa, Zea mays subsp. mays
  misc_feature (1)..(141): Ceres Seq. ID no. 15180430
MVEVRHRPRVVTTGQAATPSSSHGQHLPAISLPHPTPCSMGTSSLRPPASERPFPFQFGHGHTGPTLLCSLLPWTLDAPAPLRSSAPRSHGRASGVHRAPRGLAPLPYCEPATPLGRSSSYCVGRGSSSPATIERPHVPWF

SEQ ID NO: 14033 - protein, 102 aa, Zea mays subsp. mays
  misc_feature (1)..(102): Ceres Seq. ID no. 15180431
MGTSSLRPPASERPFPFQFGHGHTGPTLLCSLLPWTLDAPAPLRSSAPRSHGRASGVHRAPRGLAPLPYCEPATPLGRSSSYCVGRGSSSPATIERPHVPWF

SEQ ID NO: 14034 - protein, 141 aa, Zea mays subsp. mays; identical to SEQ ID NO: 14032
  misc_feature (1)..(141): Ceres Seq. ID no. 16625638

SEQ ID NO: 14035 - DNA, 621 bp, Zea mays subsp. mays
  misc_feature (1)..(621): Ceres Seq. ID no. 15224531
gtaccgggccccccctcgagtcaactacgtaggcccccccccccccccggtgcgtcggtggacggcagaaggtgacaacacgcgatggcttggcggggtgacatcggcgtggctgacctttcagctttcttcttggtgctggcgatctacactgctctgctaggtcttcagaggaaactttgcttggtttgtaccaggcgggcggcgacgactttttgacgtcgtttctccttcttgaaggatgattctacatccaagttggaactggaaagaagatatgcagaggaaaacaagaagattcagaaagagctggatctcctccggaaaacaaaggcgtctcctcggggcttctctgcgtttgtgctgcttgtcttcttgttatcctcacttcttggatacctgatgttcggaagcagagcttagcaagttagcagctaatggctgcacatcatttgcggcaccggcagcggcacggctcttttagtacagtgtacagatatatacattaatagcgaagtagtcagtacataacagatatatagggctttcttgggtttcaagtgtccataggaatatatcttcagttttgaaatatgtgtgagtaaccgttcatgtttaaag

SEQ ID NO: 14036 - protein, 53 aa, Zea mays subsp. mays
  misc_feature (1)..(53): Ceres Seq. ID no. 15224532
MILHPSWNWKEDMQRKTRRFRKSWISSGKQRRLLGASLRLCCLSSCYPHFLDT

SEQ ID NO: 14037 - protein, 53 aa, Zea mays subsp. mays
  misc_feature (1)..(53): Ceres Seq. ID no. 15224533
YRAPPRVNYVGPPPPPVRRWTAEGDNTRWLGGVTSAWLTFQLSSWCWRSTLLC

SEQ ID NO: 14038 - protein, 44 aa, Zea mays subsp. mays
  misc_feature (1)..(44): Ceres Seq. ID no. 15224534
MAWRGDIGVADLSAFFLVLAIYTALLGLQRKLCLVCTRRAATTF

SEQ ID NO: 14039 - DNA, 735 bp, Zea mays subsp. mays
  misc_feature (1)..(735): Ceres Seq. ID no. 15225657
ttttttttttttttttagaaaaccatatttcaaatagacattttcattgtaataattgattataaccgctggctgaatcatacagagttatctcaaccaaacttaacaaagagctctccattgattaaagtaaagacagacagcaaaacaagcttcaattctactaaaaaccaagatgaattaacccaccaaacatccatcagtctctgcaactagatacctcaggcatagttcaacctgaatatgtcgttgaacacgtagtagtttccctgattcgataccaaatggaacatctggctgaacttgagagcgtgctgttcgcccgcgagctgaagattaccggagacaaagacgagcatgccggcggcgggaccagagggctggcaatcgacggtggtgatgttgtgcttgcactgctggaaaggaaggctggtgagcttggcgacgatgttctgagagccctggatcttctgcccttcgaaggtcagcatggatccttcttggtaaagagagaccaatcctccacgattcgaatcgaaggtggtgtagtagtgctccacgaaagccttcgctactgcgtctggatccatctctctcgtcttcctctctctttctctttctctttccgtcgtcctttcaaagagtctagagagagaaacgaaacggaaagggtgagatgataaaactgaaaatttccagtttttcgattaggatgttctaggtaatggtctcgtg

SEQ ID NO: 14040 - protein, 131 aa, Zea mays subsp. mays
  misc_feature (1)..(131): Ceres Seq. ID no. 15225658
MEHLAELESVLFARELKITGDKDEHAGGGTRGLAIDGGDVVLALLERKAGELGDDVLRALDLLPFEGQHGSFLVKRDQSSTIRIEGGVVVLHESLRYCVWIHLSRLPLSFSFSFRRPFKESRERNETERVR

SEQ ID NO: 14041 - DNA, 534 bp, Zea mays subsp. mays
  misc_feature (1)..(534): Ceres Seq. ID no. 15226958
ataaccagggttgggagctagcgcaaccttgcatggatgattacgctgaagcacagcgatgagtaggagagagagaatagagccgctgcgaccacgcctcgcgttcaccatcgcccagcctctcgatcgctggggaatcgggcgagatcaccaagtcgtgcagatcgtgcgtgtggtcagcagagcaaggaagttggcgggggagacgaattgcttgccggtgcttggccgaatcctcaccgggaatcctcgggcggcactacagcgtcgaccggccgcatcgacgtcttctcgagtgcagtgaggacacgagttacctgaagatcatcctggtacctggaatctcaagtcccaggtcaagaacaggtaccacaggatgaggcgcttggaggatgctgtgacaagttcgtgagaggtctaggtcgtcgtctcccagtcaactttgggttgctggaccgttgtctccatataatgtatttatttatttattttgtacaaaactccgattatatagtaaagatgtgacattcgacc

SEQ ID NO: 14042 - protein, 81 aa, Zea mays subsp. mays
  misc_feature (1)..(81): Ceres Seq. ID no. 15226959
MSRRERIEPLRPRLAFTIAQPLDRWGIGRDHQVVQIVRVVSRARKLAGETNCLPVLGRILTGNPRAALQRRPAASTSSRVQ

SEQ ID NO: 14043 - DNA, 1421 bp, Zea mays subsp. mays
  misc_feature (1)..(1421): Ceres Seq. ID no. 15226960
tttcattaaaaagggaggagctagagccattttgaaaaactctgagggcatgtttggcaacaatgttttacacatgataataccgtagttttggtagctccaaaaataacatggttttgagaaacattgtttggagacaatattataaaccatggtattaggcaaaagctagtcatgccataaaaactttgggttgtagtggaatctccaatactctaaaaatatcatggtatctataaacaatggttttgaaaacatagttttcaggagtgcaactaaacacctcatgacataaaatactacggtattgtccaaaaccatggtattgcatagaaactataaaaaaatatttcgctctcacagacccttaaactcttccagctcctccgaagaagctttgagaagccctaccaaacaaaagcctaataaagtttctccaggttgaaatgacaatcttatactgtctgtcatgttgtactataaatgccttggtttttccattgtttggtattttactgtcctgccaatagacaatttcactttgaattttaaaaagttttgacataaaaatttaaaatggacactctgccatagcaggtgttatcactgtgcatactctaaagcatggcggtttaagatagttaacaagcttggtgatattcaattaatcattgctgacgtattttgttgttaacaggattcaatcaattatttctggggtggtctacagccaatgcatagtctctctctgtgtgtgtttgtgtttcccgtgcactctattcctttcgagaggcactctatgtcaggtgcctgaaatttggtttagcttcaggcaatgaagtggacgtcggatggagatccgagtgtccacgatgacagagaccggcttttgaatctctcgtctctccatctctcatgcgttccaaacttccaactccagtgtcgtccccgctgactgatcagtgatcacctctgaccctctctggtgatgtgtacccattgttaatctctccaatgaagctaccctgcttgaccaggcccacaggctgtctcctgcatacggtggcaacacaccagcactgctgccctgtcctaaggccacctcttcgccttgcctccactggatcccagctgtcagcagcacgctgaaaccctccatttgtgaaacttcaggtgcgcgtagtttaggaggttagattttacttaatcggcatttgcattggataatatgcctaacatggtggctttagatcgcttgttttctagcggcgatggacggtggtggtcggcctttgaacttcgcagccacgtattcagatttttttgagttattgtaatttatttacattccctctagatatgtgattatcaagacgtatgtcagaagacatgaatattccttgtttggattggcgtgtttg

SEQ ID NO: 14044 - protein, 44 aa, Zea mays subsp. mays; identical to SEQ ID NO: 13790
  misc_feature (1)..(44): Ceres Seq. ID no. 15226961

SEQ ID NO: 14045 - protein, 41 aa, Zea mays subsp. mays
  misc_feature (1)..(41): Ceres Seq. ID no. 15226962
MVLHRNYKKIFRSHRPLNSSSSSEEALRSPTKQKPNKVSPG

SEQ ID NO: 14046 - protein, 39 aa, Zea mays subsp. mays
  misc_feature (1)..(39): Ceres Seq. ID no. 15226963
MKWTSDGDPSVHDDRDRLLNLSSLHLSCVPNFQLQCRPR

SEQ ID NO: 14047 - DNA, 756 bp, Zea mays subsp. mays
  misc_feature (1)..(756): Ceres Seq. ID no. 15227277
attacaatatgaccattacaatatgacatgtgttcactacagttatacttgcattcactttgcaaccaatatcttgttagttatttttaaaatggtctttgactaattccttcaatgttctactggtctactgcatctctgctaaccaataccattagtctttattaatttgactttgcctagaaacaacagatgtgtaggttatgcacaaaagcacttattgagttgagtggtaatatataccatcaactcctagggaatttgattttattcctcaacgtttatgcatttcatttactaccttcattctttttttttcaaaagtgtttagtgcatcaacattgtttttagtaaatgtctttgattgttgccttttattgctatatgctggaccgttttgttgcgttgttttgcacacaaatggagtgcatattgtggcggctacgaaggaccgatgtttctgtgtggcagtgacaacgacgtcgtggagccaagtcaatgccggcaagctgatttttagattggaatctgtggttcttttatgttctaggatcttaaaaaatatttgtcagaacgtaaacatttgttctgaggtcatttaggcctcaaacaaaatttcttgaacttattttgttgatgaagggaatgggacatctcgagatctaaatatgtatagaagatccaaatgtgtatagaacatatatttttttatgggtattaaatataattgtgcacggacatggtactataacaatg

SEQ ID NO: 14048 - protein, 52 aa, Zea mays subsp. mays
  misc_feature (1)..(52): Ceres Seq. ID no. 15227278
MCRLCTKALIELSGNIYHQLLGNLILFLNVYAFHLLPSFFFFQKCLVHQHCF

SEQ ID NO: 14049 - protein, 39 aa, Zea mays subsp. mays
  misc_feature (1)..(39): Ceres Seq. ID no. 15227279
MSLIVAFYCYMLDRFVALFCTQMECILWRLRRTDVSVWQ

SEQ ID NO: 14050 - protein, 34 aa, Zea mays subsp. mays
  misc_feature (1)..(34): Ceres Seq. ID no. 15227280
LQYDHYNMTCVHYSYTCIHFATNILLVIFKMVFD

SEQ ID NO: 14051 - DNA, 1848 bp, Zea mays subsp. mays
  misc_feature (1)..(1848): Ceres Seq. ID no. 15227301
tagtcccccccccccccccccataattggtataagagcaagtgtaataagataatataagtgtaatgtataagttgtcacattaaatttatgttgagacggagagaatgttaagacggaggacagaaaagataaataagctataaactcatagaaaaccaacacttcaactcgaagaaaataagatgcaccatatgttaatggttttatatgtaagactaatagtatacgagtaaattgctagattttttatatgagtgatatgatagtagcctataactaggggtggtaatgattcatggtccaaatagtttttcacgattttttgacctttaattaattttagttaaaaataaatagaaatagagctcgatctaaatacgatgtaatccttaaataaactttatagtgtaaaatttaaagactaactccacccttacatataataactagcaacctgctaaattattagccatcctctaacgttgttttccaacagcttaacaacaccattatgcgatatgtgacctacttttggggaaaaaaaagaaacatatctacgcctatgttcatattctcctccaaacataaaaagaaaggcaacgagataatgccgtcccacatggcatgggaccacccgtcattttcacaagcaaccttgaactgaagcgaaagtggcgaacccggagggcatatctggcattcctaattcttgtaggcccttgcttacgagcgcagccacccaatagcaaccacagctgaggctgcggcctctgtgccatccaggggtcggcatcagcctctctccctcgctctctctgactcgtcgcggcataaacaaacaaaccaaacaaagcaaagcaaaggcaaaaccccacctccaccacacctcgtcgtttgcttttcctcggtgcgggcggtgcggcacaagcccccagaccggttgcctccattactgagctgtgcgtgcgtggtggctgtctgccttgtggcggcgccggtcatggtgatggtggagatggacggtggcgtgggaggaggaggaggaggagggcagacgccggcgccacggcggtggcgcctggcggacgagcggtgtgacctgcgcgccatggagacggactacgtgcggcggtttcaccggcacgagccccgcgaacaccagtgctcctccgccgtcgccaagcacatcaaggcgcccgtccacctcgtgagcgcctgcctctcaacctccctctcgcgtgccgctgaatcaaatatcaatctccgctattgcttgctgccgctatgctttttctccgtgccgtgctgtatgtatccacgttccatggcggcgagcagggtgttcgtgccgttgcccagtcgatccgccgcagagacatcgtttccaccggttattggtttctccttttgtttggccccggcccgcccgcccgcccgccggtttcggattggtgatgcgctgctccttgattaggaaagacgccgacttgttacgagtcagcgagtcacccactcgtttggcccgtttcttctcagttgggaacatggatgcctgatttggagagagagaggccgtcttcaaccggccctgctcgtttctcttatcgccccttctttttttttttcacgcgattggttgggcggatccattgctgtgctgattgctcggaggacggacccacgtcgctttcgctcaaagctaagatttccatctcctgccaagaagcctgtgaattttttcctgcatccttcgtccgtccagcttttgctccagactgaggctttctctaagagatgaacatgggggatgcatgattggtggcaaaggcaaataatgcacacaaag

SEQ ID NO: 14052 - protein, 157 aa, Zea mays subsp. mays
  misc_feature (1)..(157): Ceres Seq. ID no. 15227302
MVMVEMDGGVGGGGGGGQTPAPRRWRLADERCDLRAMETDYVRRFHRHEPREHQCSSAVAKHIKAPVHLVSACLSTSLSRAAESNINLRYCLLPLCFFSVPCCMYPRSMAASRVFVPLPSRSAAETSFPPVIGFSFCLAPARPPARRFRIGDALLLD

SEQ ID NO: 14053 - protein, 155 aa, Zea mays subsp. mays
  misc_feature (1)..(155): Ceres Seq. ID no. 15227303
MVEMDGGVGGGGGGGQTPAPRRWRLADERCDLRAMETDYVRRFHRHEPREHQCSSAVAKHIKAPVHLVSACLSTSLSRAAESNINLRYCLLPLCFFSVPCCMYPRSMAASRVFVPLPSRSAAETSFPPVIGFSFCLAPARPPARRFRIGDALLLD

SEQ ID NO: 14054 - protein, 152 aa, Zea mays subsp. mays
  misc_feature (1)..(152): Ceres Seq. ID no. 15227304
MDGGVGGGGGGGQTPAPRRWRLADERCDLRAMETDYVRRFHRHEPREHQCSSAVAKHIKAPVHLVSACLSTSLSRAAESNINLRYCLLPLCFFSVPCCMYPRSMAASRVFVPLPSRSAAETSFPPVIGFSFCLAPARPPARRFRIGDALLLD

SEQ ID NO: 14055 - DNA, 500 bp, Zea mays subsp. mays
  misc_feature (1)..(500): Ceres Seq. ID no. 12637493
aaaacggccgtccctatctatcggattgcttccagttccagctcgagcactggggcttcgcaggcgagatgaagaggctgcttgctcgtggcaagtccggttgcccctcccggagtttggttggcagaatccctgccctgcctgtactttgcaacaacgttcttcccggccatagggtgagttcaccaatctgtcagtcactgctgctacttccccatgcatgttctttgaattttaagcaagcacaaggagagagtcgtgttgtacaaacgttttagataacagccccattccaatcgaagtggttggtcgtcgaatggtttttgccactcctaatctgtgcgtgtttgcaatcttctgttttttttttcctgtgaaactgacagtactatttcagccgagaaacacgatgacgacaccacgctaggtgagatcggggacaaggcaaggtcgacagccgaggagttcctgagggtggccaaggagaaaaccgacgacgt

SEQ ID NO: 14056 - protein, 91 aa, Zea mays subsp. mays
  misc_feature (1)..(91): Ceres Seq. ID no. 12637494
NGRPYLSDCFQFQLEHWGFAGEMKRLLARGKSGCPSRSLVGRIPALPVLCNNVLPGHRVSSPICQSLLLLPHACSLNFKQAQGESRVVQTF

SEQ ID NO: 14057 - protein, 69 aa, Zea mays subsp. mays
  misc_feature (1)..(69): Ceres Seq. ID no. 12637495
MKRLLARGKSGCPSRSLVGRIPALPVLCNNVLPGHRVSSPICQSLLLLPHACSLNFKQAQGESRVVQTF

SEQ ID NO: 14058 - protein, 57 aa, Zea mays subsp. mays
  misc_feature (1)..(57): Ceres Seq. ID no. 12637496
KRPSLSIGLLPVPARALGLRRRDEEAACSWQVRLPLPEFGWQNPCPACTLQQRSSRP

SEQ ID NO: 14059 - DNA, 1357 bp, Zea mays subsp. mays
  misc_feature (1)..(1357): Ceres Seq. ID no. 15180327
  misc_feature (706)..(706): n is a, c, t, g, unknown, or other
atggtcctctctcccatgcgctcggcctccagttctccgcgggagcacgcctagccgagcggctcttccccacggcgcccttctccctcatcgcgacgctccggctcagctcatccatggcggctcctctgtccggcgtttctccctcgcgcccagctcggagttcctccctgcgctcatctccatatcgagcgtctccagctcttgcgcctggctggatcttccctcggctcgccgcgcccctgtttccgccggcgttccttccacggccgcgcgcaatgtttttctgctcgtgcacgcccgtctcccatggccgcggcgccctgactcctgctctcctgcgtcgcgcccgagcaccctgcttcctgctcgccggccaccagaaagcttcctgcgcgcagggcgttctcgtctcgacctccttccccgcgcgcaactttttctttgccccttgcgcacagccgccaccagtcgagcttcatgtacgcgcccagcgcgcgcccagctgtgaatcttccctggcgcgctcgcccatgccgtgcacaaccaagatcgcctacgcgccccatctccctctggatcccctgcaagctccttgcgcgggccgcgttcctctgctcgggcatggccgcgcgccggcgctattctctgcgtgcgccctgcctttttccccgcgcgcagcttgtcccaatgccgagcttggccntgctctctgctccagctcgcagtcgctgcgttgccgagtccctggccgcgtctgctggttgtgtcctttcgtgggaacgctcactttgccgtggtcctgcgctttcttctcgatctggcatgggttttagttatcggtcaagcgcgcccccgttttctttgtcttgtcgttgtcgttcggtcaccccacctcgatgccggtccctacatgttgtctccgacttatgttcgcgctaataaaagaatcccaagaagatatagcgaagcaagccactggtcgatgcccaagtgctcggtgaaaggccaaaacaagaatcatcgccgtttatgcggagttctagttaatatggagagattccaagagttgtggatggaagagaaagtgaagctccgttcaatactcgtcacctgtttgatcgaagacttcaatccaagactgtcgtcgttcttccaataaattttatgatcgtgaaataagacgcttagtttgcgtatgaagtttaagttagaattacccgggatgcgaggtgtgcttcgaggagtttagttaccgagtatattcgaactagttctattttgcagagtgtagaatttcggtgacgcgtaggttaaatttagtattttatgcaattatcgataaatttatcgatgc

SEQ ID NO: 14060 - protein, 277 aa, Zea mays subsp. mays
  misc_feature (1)..(277): Ceres Seq. ID no. 15180328
  misc_feature (235)..(235): Xaa is any aa, unknown or other
GPLSHALGLQFSAGARLAERLFPTAPFSLIATLRLSSSMAAPLSGVSPSRPARSSSLRSSPYRASPALAPGWIFPRLAAPLFPPAFLPRPRAMFFCSCTPVSHGRGALTPALLRRARAPCFLLAGHQKASCAQGVLVSTSFPARNFFFAPCAQPPPVELHVRAQRAPSCESSLARSPMPCTTKIAYAPHLPLDPLQAPCAGRVPLLGHGRAPALFSACALPFSPRAACPNAELGXALCSSSQSLRCRVPGRVCWLCPFVGTLTLPWSCAFFSIWHGF

SEQ ID NO: 14061 - protein, 239 aa, Zea mays subsp. mays
  misc_feature (1)..(239): Ceres Seq. ID no. 15180329
  misc_feature (197)..(197): Xaa is any aa, unknown or other
MAAPLSGVSPSRPARSSSLRSSPYRASPALAPGWIFPRLAAPLFPPAFLPRPRAMFFCSCTPVSHGRGALTPALLRRARAPCFLLAGHQKASCAQGVLVSTSFPARNFFFAPCAQPPPVELHVRAQRAPSCESSLARSPMPCTTKIAYAPHLPLDPLQAPCAGRVPLLGHGRAPALFSACALPFSPRAACPNAELGXALCSSSQSLRCRVPGRVCWLCPFVGTLTLPWSCAFFSIWHGF

SEQ ID NO: 14062 - protein, 185 aa, Zea mays subsp. mays
  misc_feature (1)..(185): Ceres Seq. ID no. 15180330
  misc_feature (143)..(143): Xaa is any aa, unknown or other
MFFCSCTPVSHGRGALTPALLRRARAPCFLLAGHQKASCAQGVLVSTSFPARNFFFAPCAQPPPVELHVRAQRAPSCESSLARSPMPCTTKIAYAPHLPLDPLQAPCAGRVPLLGHGRAPALFSACALPFSPRAACPNAELGXALCSSSQSLRCRVPGRVCWLCPFVGTLTLPWSCAFFSIWHGF

SEQ ID NO: 14063 - protein, 153 aa, Zea mays subsp. mays
  misc_feature (1)..(153): Ceres Seq. ID no. 16625636
  misc_feature (76)..(76): Xaa is any aa, unknown or other
MYAPSARPAVNLPWRARPCRAQPRSPTRPISLWIPCKLLARAAFLCSGMAARRRYSLRAPCLFPRAQLVPMPSLAXLSAPARSRCVAESLAASAGCVLSWERSLCRGPALSSRSGMGFSYRSSAPPFSLSCRCRSVTPPRCRSLHVVSDLCSR

SEQ ID NO: 14064 - DNA, 468 bp, Zea mays subsp. mays
  misc_feature (1)..(468): Ceres Seq. ID no. 1320814
tatcggtggttggaaaccaggggagtagacgaagaaactttggttcaaactcttccaaaagatcttaggagggatatcaagcggcatctttgtttgggcttagtgaaaagggtgcctttgtttgaaaatatggatgaacgattgttggatgcaatatgtgagcggttaagacctgcactctacacagaaaatgagttcattttgagggaaggtgacccggtggatgagatgcactttattcttcatggttgtttggagagtgtaaccactgatggtggaaggagtgggttctttaacaaggttcagctaaaggaagggtcgttctgtggcgatgagttgctcacttgggcattggatcccaagtcagctgctaattttccagtttcgagcaggactgtccaggcactcaccgaggttgaggcgtttgccctatgtgcagaagagctgaaattcgtggccagtcagttt

SEQ ID NO: 14065 - protein, 156 aa, Zea mays subsp. mays
  misc_feature (1)..(156): Ceres Seq. ID no. 1320815
YRWLETRGVDEETLVQTLPKDLRRDIKRHLCLGLVKRVPLFENMDERLLDAICERLRPALYTENEFILREGDPVDEMHFILHGCLESVTTDGGRSGFFNKVQLKEGSFCGDELLTWALDPKSAANFPVSSRTVQALTEVEAFALCAEELKFVASQF

SEQ ID NO: 14066 - protein, 113 aa, Zea mays subsp. mays
  misc_feature (1)..(113): Ceres Seq. ID no. 1320816
MDERLLDAICERLRPALYTENEFILREGDPVDEMHFILHGCLESVTTDGGRSGFFNKVQLKEGSFCGDELLTWALDPKSAANFPVSSRTVQALTEVEAFALCAEELKFVASQF

SEQ ID NO: 14067 - protein, 80 aa, Zea mays subsp. mays
  misc_feature (1)..(80): Ceres Seq. ID no. 1320817
MHFILHGCLESVTTDGGRSGFFNKVQLKEGSFCGDELLTWALDPKSAANFPVSSRTVQALTEVEAFALCAEELKFVASQF

SEQ ID NO: 14068 - DNA, 497 bp, Zea mays subsp. mays
  misc_feature (1)..(497): Ceres Seq. ID no. 1351195
gatgaactgtagcgcgtgayagtgaggggatttggttggatccaatgtttggtcggtctgcttgcatcacctggtttcctggctataaagcgacggggcccttgckctgggcsggagactggagagggcgagagtcctcccatccacaagttcttagcttttgctgagattgagatccggctggggacagaccgacagaggaaggaggacagaaaaatggggattggagatggatcttcaaatgggaaccagcaaccggtgcataaggaaatacgagatgagaccacaccacttcttccagtcaaggtggaggaggacgaggggtttcatgagttcaatggagcttcattctctggggcagttttcaatctgtcgaccaccatagttggggctggaattatggctcttccagcaagtatcaagatgctgggcatcatcccggggattctgttgatcatccttgtggcactgctcacagaggcatccatcgacatgct

SEQ ID NO: 14069 - protein, 93 aa, Zea mays subsp. mays
  misc_feature (1)..(93): Ceres Seq. ID no. 1351196
MGIGDGSSNGNQQPVHKEIRDETTPLLPVKVEEDEGFHEFNGASFSGAVFNLSTTIVGAGIMALPASIKMLGIIPGILLIILVALLTEASIDM

SEQ ID NO: 14070 - protein, 51 aa, Zea mays subsp. mays
  misc_feature (1)..(51): Ceres Seq. ID no. 1351197
MDLQMGTSNRCIRKYEMRPHHFFQSRWRRTRGFMSSMELHSLGQFSICRPP

SEQ ID NO: 14071 - protein, 47 aa, Zea mays subsp. mays
  misc_feature (1)..(47): Ceres Seq. ID no. 1351198
MGTSNRCIRKYEMRPHHFFQSRWRRTRGFMSSMELHSLGQFSICRPP

SEQ ID NO: 14072 - DNA, 473 bp, Zea mays subsp. mays
  misc_feature (1)..(473): Ceres Seq. ID no. 1424194
atcgattcttggcatcgcctctctctaaaccccaactcctcgactcgagcaatccctaggtctccgcgcgaggcgtggcggctgtgaggggattttgattgatttggctcgagatggcggaggacaaggtgcggcggatcttcgtcggcgggttgtcctggaagaccacggagcgcacgctcgagcgcaccttcggtcagtacggcaatgtcatcgaggcacaggttgtagtgaaaagggaaacaggccgctcgaggggatttggatttgtcacattctcagaacctcgggctgtggatgctgccattcgtggaatgcataatgcggaactggatggccgtaatatttctgtgaacaaagctcatcctaggattgctgacgatgactatggctatggtggtggtggtggtggtggttactcgtctggtgctagaggtggatatcgtagtggcggtgatgtagttccagcagtg

SEQ ID NO: 14073 - protein, 120 aa, Zea mays subsp. mays
  misc_feature (1)..(120): Ceres Seq. ID no. 1424195
MAEDKVRRIFVGGLSWKTTERTLERTFGQYGNVIEAQVVVKRETGRSRGFGFVTFSEPRAVDAAIRGMHNAELDGRNISVNKAHPRIADDDYGYGGGGGGGYSSGARGGYRSGGDVVPAV

SEQ ID NO: 14074 - DNA, 469 bp, Zea mays subsp. mays
  misc_feature (1)..(469): Ceres Seq. ID no. 1439681
ctcggtaaggaatccccttttaagggttgctcgggttcctcttcctgctgcgattcatcccgttcttgccccctacggttcaccccggagcgcgtttcctggtcaactaaggccggcatgaagggctgctcagagcgcttgctgtttctgctgctgctgctggcatcgtcgtcgttactgtccgctgtgattgccgcgcasagaacttgccccgccgacctcgacagcaaatgcgatggtggcgcgtctgatgatgattgggagggggagttcttccccggcgtcccgaaaatcaagtatgagggtccaacaagcaagaaccctcttgcttataagtggtataacaaggaggaagtgattctcggtaagaagatgaaggattggatgcgcttcagtgttgcgttctggcacacgttccgcggtactggcgctgatcctttcggtgctcctacaaakacttggccttggg

SEQ ID NO: 14075 - protein, 156 aa, Zea mays subsp. mays
  misc_feature (1)..(156): Ceres Seq. ID no. 1439682
  misc_feature (67)..(67): Xaa is any aa, unknown or other
  misc_feature (152)..(152): Xaa is any aa, unknown or other
LGKESPFKGCSGSSSCCDSSRSCPLRFTPERVSWSTKAGMKGCSERLLFLLLLLASSSLLSAVIAAXRTCPADLDSKCDGGASDDDWEGEFFPGVPKIKYEGPTSKNPLAYKWYNKEEVILGKKMKDWMRFSVAFWHTFRGTGADPFGAPTXTWPW

SEQ ID NO: 14076 - protein, 117 aa, Zea mays subsp. mays
  misc_feature (1)..(117): Ceres Seq. ID no. 1439683
  misc_feature (28)..(28): Xaa is any aa, unknown or other
  misc_feature (113)..(113): Xaa is any aa, unknown or other
MKGCSERLLFLLLLLASSSLLSAVIAAXRTCPADLDSKCDGGASDDDWEGEFFPGVPKIKYEGPTSKNPLAYKWYNKEEVILGKKMKDWMRFSVAFWHTFRGTGADPFGAPTXTWPW

SEQ ID NO: 14077 - DNA, 481 bp, Zea mays subsp. mays
  misc_feature (1)..(481): Ceres Seq. ID no. 1546227
ctccccggccagcgccgctgcccggtacaaatctcacgcatcttcgatttcactctctaaagtcgctgcttctgatttggtgcgttggtgatctggtcgcccccagtgagttcgtgaagaagaactatggtgacatcaaggcccgcaacccctccctccccttccattgtccgcgagtgctccggtgtcccgccccagctctgggcgcgctacgatatgggtgtggagagatgcgtgaacttggatggcctgacggaagcacagattgataaaaagctggaggagcttgccaaggccggcgagtctcttaaaaccaaatagttttggaactctatcctgccatgtttaactttcccaaataaatgataccatatgggtgagcaattgttactctatcgttatctgtagttgtgcctggaattaagtctttaattggctcaactttgtgaaataatcactactcttttacttgccatgcatt

SEQ ID NO: 14078 - protein, 88 aa, Zea mays subsp. mays
  misc_feature (1)..(88): Ceres Seq. ID no. 1546228
PRPAPLPGTNLTHLRFHSLKSLLLIWCVGDLVAPSEFVKKNYGDIKARNPSLPFHCPRVLRCPAPALGALRYGCGEMRELGWPDGSTD

SEQ ID NO: 14079 - protein, 64 aa, Zea mays subsp. mays
  misc_feature (1)..(64): Ceres Seq. ID no. 1546229
MVTSRPATPPSPSIVRECSGVPPQLWARYDMGVERCVNLDGLTEAQIDKKLEELAKAGESLKTK

SEQ ID NO: 14080 - DNA, 500 bp, Zea mays subsp. mays
  misc_feature (1)..(500): Ceres Seq. ID no. 1548123
gagtcaggcccaggcctaacctcagttcatccgagcagccgaacacgcccgccgccattctacgccctgctgcccaggtcggacggaccctttgccggagacgagcacacgccacagcagagcagcgcgaagcgagagatccaatggcggcggcggaggggcagtgggtgctcatggcaacggggcggacgccgactaacattgcggtgatcaagtactgggggaagcgggacgaggcgctcatcctccccatcaacgacagcatcagcgtaacgctcgaccctgaccatctctccgccaccaccactgtcgccgtcagcccctcattcccttccgaccgcatgtggctcaatggcaaggagatctcgctattaggaggaaggtttcagagctgcctcagagaaatcagaaagcgtgctcgtgactttgaggacaaggagaagggcgtcaagatcaagaaagaggactgggacaagttgcatgttcacatagcctcgtac

SEQ ID NO: 14081 - protein, 166 aa, Zea mays subsp. mays
  misc_feature (1)..(166): Ceres Seq. ID no. 1548124
VRPRPNLSSSEQPNTPAAILRPAAQVGRTLCRRRAHATAEQREARDPMAAAEGQWVLMATGRTPTNIAVIKYWGKRDEALILPINDSISVTLDPDHLSATTTVAVSPSFPSDRMWLNGKEISLLGGRFQSCLREIRKRARDFEDKEKGVKIKKEDWDKLHVHIASY

SEQ ID NO: 14082 - protein, 119 aa, Zea mays subsp. mays
  misc_feature (1)..(119): Ceres Seq. ID no. 1548125
MAAAEGQWVLMATGRTPTNIAVIKYWGKRDEALILPINDSISVTLDPDHLSATTTVAVSPSFPSDRMWLNGKEISLLGGRFQSCLREIRKRARDFEDKEKGVKIKKEDWDKLHVHIASY

SEQ ID NO: 14083 - protein, 109 aa, Zea mays subsp. mays
  misc_feature (1)..(109): Ceres Seq. ID no. 1548126
MATGRTPTNIAVIKYWGKRDEALILPINDSISVTLDPDHLSATTTVAVSPSFPSDRMWLNGKEISLLGGRFQSCLREIRKRARDFEDKEKGVKIKKEDWDKLHVHIASY

SEQ ID NO: 14084 - DNA, 520 bp, Zea mays subsp. mays
  misc_feature (1)..(520): Ceres Seq. ID no. 1556286
  misc_feature (8)..(8): n is a, c, t, g, unknown, or other
gggcaggngctcgtgtcgaacactcgaacagaaccaccgccattctagaggcatccagtattccagcccaatcctatctttgtattcctctccctcgtctcggaagtctggttcgccgaacagtcccgaacccccgattcactgccgctgccccgtctcgtcctcttcgccagcgaaaaccctagtctaggggacgggagcgcaatccacgcacggcaacatggacgccatccgcaagcagctcgaccagctcatgggggccaaccgcaacggcgatgtacgggaggtcagccgcaagtactatgatcgcgacgtctgccgcctctacctcgccggcctctgcccccacgacctcttccagcttaccaagatggacatgggcccgtgcccgaagctgcactcgctgcaactgcgcaaagaatatgaagaagccaaagccaaaggtactgataactatgaccgtgaattggaagaaaccattgaaagactaattgttgagtgtgaaaggagatcmgagagc

SEQ ID NO: 14085 - protein, 100 aa, Zea mays subsp. mays
  misc_feature (1)..(100): Ceres Seq. ID no. 1556287
  misc_feature (98)..(98): Xaa is any aa, unknown or other
MDAIRKQLDQLMGANRNGDVREVSRKYYDRDVCRLYLAGLCPHDLFQLTKMDMGPCPKLHSLQLRKEYEEAKAKGTDNYDRELEETIERLIVECERRXES

SEQ ID NO: 14086 - protein, 89 aa, Zea mays subsp. mays
  misc_feature (1)..(89): Ceres Seq. ID no. 1556288
  misc_feature (87)..(87): Xaa is any aa, unknown or other
MGANRNGDVREVSRKYYDRDVCRLYLAGLCPHDLFQLTKMDMGPCPKLHSLQLRKEYEEAKAKGTDNYDRELEETIERLIVECERRXES

SEQ ID NO: 14087 - protein, 71 aa, Zea mays subsp. mays
  misc_feature (1)..(71): Ceres Seq. ID no. 1556289
MYGRSAASTMIATSAASTSPASAPTTSSSLPRWTWARARSCTRCNCAKNMKKPKPKVLITMTVNWKKPLKD

SEQ ID NO: 14088 - DNA, 487 bp, Zea mays subsp. mays
  misc_feature (1)..(487): Ceres Seq. ID no. 1667110
acgcagttcctgctcggtcccggcgtcatggtgtccccggtcctcgagcagggcgccacttcggtgagcgccatgttcccgccgggcacctggtacaacctgttcgacatgagtaaggtggtggtgtccaggagcggggccccagtgaagctggacgcgccgctgaacgagatcaacgtgcacgtgtaccagaacacgatcctgccgatgcagcgcggcgggttcgtctccaaggacgcacgggcgacgccgttcacgctcgtggtcgcgttcctgttcggggcgacgcaggccgacgcggagggcgcggtgtacgtggacgacgacgagcgcccggagatggtgctcgccgaagggcaggcgtcgtacgtgcgcttccacgcgagcgtgcgcggtaaggctgtgacggtgcggtcggaggtgctgatgggaagctacagcctgcacaaggggctggtcgtcgagaagctctcggtgctgggtctgg

SEQ ID NO: 14089 - protein, 162 aa, Zea mays subsp. mays
  misc_feature (1)..(162): Ceres Seq. ID no. 1667111
TQFLLGPGVMVSPVLEQGATSVSAMFPPGTWYNLFDMSKVVVSRSGAPVKLDAPLNEINVHVYQNTILPMQRGGFVSKDARATPFTLVVAFLFGATQADAEGAVYVDDDERPEMVLAEGQASYVRFHASVRGKAVTVRSEVLMGSYSLHKGLVVEKLSVLGL

SEQ ID NO: 14090 - protein, 153 aa, Zea mays subsp. mays
  misc_feature (1)..(153): Ceres Seq. ID no. 1667112
MVSPVLEQGATSVSAMFPPGTWYNLFDMSKVVVSRSGAPVKLDAPLNEINVHVYQNTILPMQRGGFVSKDARATPFTLVVAFLFGATQADAEGAVYVDDDERPEMVLAEGQASYVRFHASVRGKAVTVRSEVLMGSYSLHKGLVVEKLSVLGL

SEQ ID NO: 14091 - protein, 138 aa, Zea mays subsp. mays
  misc_feature (1)..(138): Ceres Seq. ID no. 1667113
MFPPGTWYNLFDMSKVVVSRSGAPVKLDAPLNEINVHVYQNTILPMQRGGFVSKDARATPFTLVVAFLFGATQADAEGAVYVDDDERPEMVLAEGQASYVRFHASVRGKAVTVRSEVLMGSYSLHKGLVVEKLSVLGL

SEQ ID NO: 14092 - DNA, 496 bp, Zea mays subsp. mays
  misc_feature (1)..(496): Ceres Seq. ID no. 1668035
aagagaccggccggacgatggcagcagagcgcgaccgcgagcgatggatcctgcccgacgcgacggcgctggtcaccggcgggagcaaggggatcgggcacgcgatcgtggaggagctggcggcgctgggcgcgcgcgtgcacacgtgctcccgcaacgccgcggagctggaggagtgccgccggaggtgggcagagaagggcggcggccgcctgctgcagcaggtgaccgtctccgtctgcgacgtcgccgtgcgcgccgacagggaggcgctcatggccaccgtcagggacgtcttcggcgtcaagctggacatcctcgtgaataacgcggcgcaggtggtcttcaagccggcggtggagtgcaccggggaggagtacgcgcggatcatggcgaccaacctggagtcctgcttccacctcagccagctcgcgcacccgctgctccgcaacgcctccctcgccggcggcgggagcgttgtgcacatctcctccac

SEQ ID NO: 14093 - protein, 108 aa, Zea mays subsp. mays
  misc_feature (1)..(108): Ceres Seq. ID no. 1668036
RDRPDDGSRARPRAMDPARRDGAGHRREQGDRARDRGGAGGAGRARAHVLPQRRGAGGVPPEVGREGRRPPAAAGDRLRLRRRRARRQGGAHGHRQGRLRRQAGHPRE

SEQ ID NO: 14094 - protein, 164 aa, Zea mays subsp. mays
  misc_feature (1)..(164): Ceres Seq. ID no. 1668037
ETGRTMAAERDRERWILPDATALVTGGSKGIGHAIVEELAALGARVHTCSRNAAELEECRRRWAEKGGGRLLQQVTVSVCDVAVRADREALMATVRDVFGVKLDILVNNAAQVVFKPAVECTGEEYARIMATNLESCFHLSQLAHPLLRNASLAGGGSVVHISS

SEQ ID NO: 14095 - protein, 159 aa, Zea mays subsp. mays
  misc_feature (1)..(159): Ceres Seq. ID no. 1668038
MAAERDRERWILPDATALVTGGSKGIGHAIVEELAALGARVHTCSRNAAELEECRRRWAEKGGGRLLQQVTVSVCDVAVRADREALMATVRDVFGVKLDILVNNAAQVVFKPAVECTGEEYARIMATNLESCFHLSQLAHPLLRNASLAGGGSVVHISS

SEQ ID NO: 14096 - DNA, 493 bp, Zea mays subsp. mays
  misc_feature (1)..(493): Ceres Seq. ID no. 1671328
cggtgtctgctaatatattcatattaacaaaggtctgtctgctgtttattggtatttacacttgtgtcaccagcttctttacaaatacgctcattctgcctacaataaatggaccaacggagggcctgatgctgatctatgtatcacatttgtttacattttttactggcgctgaatggtgggcacaggattttcggaaatcactaccctttttcggttggattccacttccatttctttctgaaattgaaattcctttatatgttcttgtgctgattcttatgatcgtatgtgctgttatacctactgttagatccaatgtcagtaatgtccaagaggtagttgaggcacgaaaaggaagcatggcattagcattagccatgatccttccttttattgtactgttagctggagttgctatctggtgttatctttctccttcaagtataatgaggaaccagccacatttgctcgtgattggaactggcttaat

SEQ ID NO: 14097 - protein, 163 aa, Zea mays subsp. mays
  misc_feature (1)..(163): Ceres Seq. ID no. 1671329
VSANIFILTKVCLLFIGIYTCVTSFFTNTLILPTINGPTEGLMLIYVSHLFTFFTGAEWWAQDFRKSLPFFGWIPLPFLSEIEIPLYVLVLILMIVCAVIPTVRSNVSNVQEVVEARKGSMALALAMILPFIVLLAGVAIWCYLSPSSIMRNQPHLLVIGTGL

SEQ ID NO: 14098 - protein, 121 aa, Zea mays subsp. mays
  misc_feature (1)..(121): Ceres Seq. ID no. 1671330
MLIYVSHLFTFFTGAEWWAQDFRKSLPFFGWIPLPFLSEIEIPLYVLVLILMIVCAVIPTVRSNVSNVQEVVEARKGSMALALAMILPFIVLLAGVAIWCYLSPSSIMRNQPHLLVIGTGL

SEQ ID NO: 14099 - DNA, 477 bp, Zea mays subsp. mays
  misc_feature (1)..(477): Ceres Seq. ID no. 1671513
agagcagaagcaaagcgagcaacagagcaaagctaagcacagagctagcaagtgaccgaccgagagcaaacaggcaaggcaagatggtgcaacagcaagccgcgaaggaggtgatcccgctgctgacgccttacaagatggggcagttcgagctctctcaccgggtggtgctggcgccgctgacgaggtgccgctcctacggcaacgtgccgcagccacacgccgccgtgtactactcgcagcgcgccaccaggggtggcctgctcatcgcggaggccacgggggtgtcggccaccgcgcaggggttcccggagtctcctggcatctggacgcaggagcaggtcgaggcgtggaagcccatcgtcgacgccgtccaccgcaagggcgccatcttcgtctgccagatctggcatgtgggcagggtctccaccaacgagctccagcccaacggcgacgcgccctatctcgagcacggac

SEQ ID NO: 14100 - protein, 158 aa, Zea mays subsp. mays
  misc_feature (1)..(158): Ceres Seq. ID no. 1671514
SRSKASNRAKLSTELASDRPRANRQGKMVQQQAAKEVIPLLTPYKMGQFELSHRVVLAPLTRCRSYGNVPQPHAAVYYSQRATRGGLLIAEATGVSATAQGFPESPGIWTQEQVEAWKPIVDAVHRKGAIFVCQIWHVGRVSTNELQPNGDAPYLEHG

SEQ ID NO: 14101 - protein, 131 aa, Zea mays subsp. mays
  misc_feature (1)..(131): Ceres Seq. ID no. 1671515
MVQQQAAKEVIPLLTPYKMGQFELSHRVVLAPLTRCRSYGNVPQPHAAVYYSQRATRGGLLIAEATGVSATAQGFPESPGIWTQEQVEAWKPIVDAVHRKGAIFVCQIWHVGRVSTNELQPNGDAPYLEHG

SEQ ID NO: 14102 - protein, 113 aa, Zea mays subsp. mays
  misc_feature (1)..(113): Ceres Seq. ID no. 1671516
MGQFELSHRVVLAPLTRCRSYGNVPQPHAAVYYSQRATRGGLLIAEATGVSATAQGFPESPGIWTQEQVEAWKPIVDAVHRKGAIFVCQIWHVGRVSTNELQPNGDAPYLEHG

SEQ ID NO: 14103 - DNA, 478 bp, Zea mays subsp. mays
  misc_feature (1)..(478): Ceres Seq. ID no. 1671848
attggccgggctccagtgctgggcgttgtatgagaggtgagcctcccggtggagcgtgggtggtgctgggtgccggggatgagctgcaacgggtgccgcgtgcttcgcaaggggtgcagcgacgcgtgcgtgctgcggccgtgcctgcagtggatcgacggcgccgaggcgcagggccacgccaccgtcttcgtcgccaagttcttcggccgcgccggcctcatgtccttcctcaccgccgtccccgagccgcagcgcccagcggtgttccagtcgttgatgtacgaggcggccgggcggacgatcaaccctgtgagcggcgccgtggggctgctcggcgcgggcagctggcagctgtgccaggcggcggtggagacggtgcttcggggcggcgccatcgggccgctgcccgagttcgacgggggccgcgacaatacgtttgctctggcggcgacggcgaggcgggccgtggggtgct

SEQ ID NO: 14104 - protein, 158 aa, Zea mays subsp. mays
  misc_feature (1)..(158): Ceres Seq. ID no. 1671849
WPGSSAGRCMRGEPPGGAWVVLGAGDELQRVPRASQGVQRRVRAAAVPAVDRRRRGAGPRHRLRRQVLRPRRPHVLPHRRPRAAAPSGVPVVDVRGGRADDQPCERRRGAARRGQLAAVPGGGGDGASGRRHRAAARVRRGPRQYVCSGGDGEAGRGV

SEQ ID NO: 14105 - protein, 149 aa, Zea mays subsp. mays
  misc_feature (1)..(149): Ceres Seq. ID no. 1671850
MRGEPPGGAWVVLGAGDELQRVPRASQGVQRRVRAAAVPAVDRRRRGAGPRHRLRRQVLRPRRPHVLPHRRPRAAAPSGVPVVDVRGGRADDQPCERRRGAARRGQLAAVPGGGGDGASGRRHRAAARVRRGPRQYVCSGGDGEAGRGV

SEQ ID NO: 14106 - protein, 133 aa, Zea mays subsp. mays
  misc_feature (1)..(133): Ceres Seq. ID no. 1671851
MSCNGCRVLRKGCSDACVLRPCLQWIDGAEAQGHATVFVAKFFGRAGLMSFLTAVPEPQRPAVFQSLMYEAAGRTINPVSGAVGLLGAGSWQLCQAAVETVLRGGAIGPLPEFDGGRDNTFALAATARRAVGC

SEQ ID NO: 14107 - DNA, 505 bp, Zea mays subsp. mays
  misc_feature (1)..(505): Ceres Seq. ID no. 1673146
ctaaacccaatccccttccacaccattcacacgtaccggcggagaaggaaggaattggtcgccgccgcctgcctctctcctcctcctccgtcagtggcggtggccacgccagtgctaagctaagctaagctaagcttgcgcaagtgacaagttctttggttggttggaggcagagccgccacatggcatcgtcgtcgcggctggatctcccgccggggttccgcttccaccccaccgacgaggaggtggtgtcgcactacctgacccacaaggcgctggacagccgcttctcctgcgtcgtcatcgccgacgccgacctcaacaagatcgagccgtgggatctcccaagcaaggctaagatgggcgagaaggagtggttcttcttctgccacaaggaccgcaagtacccgacggggatgcgcaccaaccgcgccaccgccagcgggtactggaaggccacggggaaggacaaggagatcttccgcggcagtagcagtagtccccg

SEQ ID NO: 14108 - protein, 107 aa, Zea mays subsp. mays
  misc_feature (1)..(107): Ceres Seq. ID no. 1673147
MASSSRLDLPPGFRFHPTDEEVVSHYLTHKALDSRFSCVVIADADLNKIEPWDLPSKAKMGEKEWFFFCHKDRKYPTGMRTNRATASGYWKATGKDKEIFRGSSSSP

SEQ ID NO: 14109 - DNA, 457 bp, Zea mays subsp. mays
  misc_feature (1)..(457): Ceres Seq. ID no. 1674133
gtggtgttcatttgttctcactaaaattatgtgtgcagctgtagcttcgtcgcctgtatggacatgtttatttctgaaatcaagtggatattcaaatgcatcttctggcatgggagttgctcctaacattagggagacattcgttgagcttcaaatgaagaaggcattccgatatgttatcttcaaaatcgaagagaagcaaaagcaggtggttgtggagaagacaggggctactactgaaagctatgatgattttttggcctctctcccagagaatgactgccgatatgcgctgtatgattttgattttgttactggggagaatgtgcagaaaagcaagattttcttcattgcctggtccccatcgacatcccgcatacgtgctaagatgctgtactccacgtcgaaggaccgcatcaagtacgagcttgacgggttccactacgaaatccaggcg

SEQ ID NO: 14110 - protein, 152 aa, Zea mays subsp. mays
  misc_feature (1)..(152): Ceres Seq. ID no. 1674134
WCSFVLTKIMCAAVASSPVWTCLFLKSSGYSNASSGMGVAPNIRETFVELQMKKAFRYVIFKIEEKQKQVVVEKTGATTESYDDFLASLPENDCRYALYDFDFVTGENVQKSKIFFIAWSPSTSRIRAKMLYSTSKDRIKYELDGFHYEIQA

SEQ ID NO: 14111 - protein, 143 aa, Zea mays subsp. mays
  misc_feature (1)..(143): Ceres Seq. ID no. 1674135
MCAAVASSPVWTCLFLKSSGYSNASSGMGVAPNIRETFVELQMKKAFRYVIFKIEEKQKQVVVEKTGATTESYDDFLASLPENDCRYALYDFDFVTGENVQKSKIFFIAWSPSTSRIRAKMLYSTSKDRIKYELDGFHYEIQA

SEQ ID NO: 14112 - protein, 116 aa, Zea mays subsp. mays
  misc_feature (1)..(116): Ceres Seq. ID no. 1674136
MGVAPNIRETFVELQMKKAFRYVIFKIEEKQKQVVVEKTGATTESYDDFLASLPENDCRYALYDFDFVTGENVQKSKIFFIAWSPSTSRIRAKMLYSTSKDRIKYELDGFHYEIQA

SEQ ID NO: 14113 - DNA, 489 bp, Zea mays subsp. mays
  misc_feature (1)..(489): Ceres Seq. ID no. 1677695
acgaaaatctgacatctcatcttgatccatccagctttgcctcgatcgccggccggtagccatgtcccccacggaagaagccgctggtggtggtctcgacgactatgaccgcttgagcgagctgaaggcgttcgacgacagcaaggccggcgtcaagggcctcgtggacgctggcgtcacgaccatccctgccatcttccgcggccatctccttcaggaagggccgaagtcgcacgggaggaggtggtcgcccagtygaaggctgcagccgagacggtggggttcttccagctggtgaaccacggcgttcccagcgagctcctgtccgagatgctggcgtcggtgaggcggttcaacgaggagccccacgaggtgaagcggccctactacacgcgggacgcacgtcgcaaggtgcggttcaactccaacttcgatctgttccagtcgccggcggccaactggcgcgacacgctcttctgcgaggcagcg

SEQ ID NO: 14114 - protein, 78 aa, Zea mays subsp. mays
  misc_feature (1)..(78): Ceres Seq. ID no. 1677696
  misc_feature (66)..(66): Xaa is any aa, unknown or other
MSPTEEAAGGGLDDYDRLSELKAFDDSKAGVKGLVDAGVTTIPAIFRGHLLQEGPKSHGRRWSPSXRLQPRRWGSSSW

SEQ ID NO: 14115 - protein, 53 aa, Zea mays subsp. mays
  misc_feature (1)..(53): Ceres Seq. ID no. 1677697
MLASVRRFNEEPHEVKRPYYTRDARRKVRFNSNFDLFQSPAANWRDTLFCEAA

SEQ ID NO: 14116 - DNA, 475 bp, Zea mays subsp. mays
  misc_feature (1)..(475): Ceres Seq. ID no. 1680426
  misc_feature (469)..(469): n is a, c, t, g, unknown, or other
gtattctgtcgtaatcctgccattcatttccatccagacgaccagaggccagagggcgttgctgcgctgcgttccgctctcccttttctgctgcgacgacggctggtcgagcgccgccacactttgcagcttccttggctcttcgcaggtgacgagcgcccaccagtcagacatgggacaaggtggacaagagaagtcgttcaatttccttcaagttttgctagagggcagcatagctggaggaactgctggtgttgtggtggaaacagcactttacccgattgatactataaaaaccaggcttcaggctgctcgaggtggaagccggattgaatggaaaggcttgtattctggattagctggaaatctcactggcgtccttccggcctctgcgatatttgtcggggtgtatgagccaactaaaagamaattactggaaacccttcctgaaaatctgagtgcagttgcncatttt

SEQ ID NO: 14117 - protein, 94 aa, Zea mays subsp. mays
  misc_feature (1)..(94): Ceres Seq. ID no. 1680427
VFCRNPAIHFHPDDQRPEGVAALRSALPFLLRRRLVERRHTLQLPWLFAGDERPPVRHGTRWTREVVQFPSSFARGQHSWRNCWCCGGNSTLPD

SEQ ID NO: 14118 - protein, 158 aa, Zea mays subsp. mays
  misc_feature (1)..(158): Ceres Seq. ID no. 1680428
  misc_feature (143)..(143): Xaa is any aa, unknown or other
  misc_feature (156)..(156): Xaa is any aa, unknown or other
YSVVILPFISIQTTRGQRALLRCVPLSLFCCDDGWSSAATLCSFLGSSQVTSAHQSDMGQGGQEKSFNFLQVLLEGSIAGGTAGVVVETALYPIDTIKTRLQAARGGSRIEWKGLYSGLAGNLTGVLPASAIFVGVYEPTKRXLLETLPENLSAVXHF

SEQ ID NO: 14119 - protein, 101 aa, Zea mays subsp. mays
  misc_feature (1)..(101): Ceres Seq. ID no. 1680429
  misc_feature (86)..(86): Xaa is any aa, unknown or other
  misc_feature (99)..(99): Xaa is any aa, unknown or other
MGQGGQEKSFNFLQVLLEGSIAGGTAGVVVETALYPIDTIKTRLQAARGGSRIEWKGLYSGLAGNLTGVLPASAIFVGVYEPTKRXLLETLPENLSAVXHF

SEQ ID NO: 14120 - DNA, 476 bp, Zea mays subsp. mays
  misc_feature (1)..(476): Ceres Seq. ID no. 1681819
acataccggcacgggctcaaggctctggctcgcgcacccctggtccctgttccgcaccgcaccgcacacctagacgcacctccagctgcagcgcgccatacttgaccgcatcagcatggcatccacggggacgacatcggcggtgccggaggtgaccctgcggtcgggcaacgggaagccgatgccgatggtgggcatgggcacggcgtcgttccccgtggtgcacgaggccgtcagggacgccgtgctggcggccatcggggtggggttccgccacttcgacacggccttcctgtacggcaccgagaagccgctcggcgacgccgtggccgaggcgctgcggcgcggcctcctgcggtcccgggaggagctcttcgtcacgtccaagctgtggtgctcgcagacccacgcggacctcgtgctgccgtccctgcgggaaactctcaagaacctgcagatggagtacgtggacctgt

SEQ ID NO: 14121 - protein, 120 aa, Zea mays subsp. mays
  misc_feature (1)..(120): Ceres Seq. ID no. 1681820
MASTGTTSAVPEVTLRSGNGKPMPMVGMGTASFPVVHEAVRDAVLAAIGVGFRHFDTAFLYGTEKPLGDAVAEALRRGLLRSREELFVTSKLWCSQTHADLVLPSLRETLKNLQMEYVDL

SEQ ID NO: 14122 - protein, 98 aa, Zea mays subsp. mays
  misc_feature (1)..(98): Ceres Seq. ID no. 1681821
MPMVGMGTASFPVVHEAVRDAVLAAIGVGFRHFDTAFLYGTEKPLGDAVAEALRRGLLRSREELFVTSKLWCSQTHADLVLPSLRETLKNLQMEYVDL

SEQ ID NO: 14123 - protein, 96 aa, Zea mays subsp. mays
  misc_feature (1)..(96): Ceres Seq. ID no. 1681822
MVGMGTASFPVVHEAVRDAVLAAIGVGFRHFDTAFLYGTEKPLGDAVAEALRRGLLRSREELFVTSKLWCSQTHADLVLPSLRETLKNLQMEYVDL

SEQ ID NO: 14124 - DNA, 483 bp, Zea mays subsp. mays
  misc_feature (1)..(483): Ceres Seq. ID no. 1682030
acgacgccatggacgccgatgcccgcctcgtcatgcacgtcgtgctcagcgagtgccctgccgtcttccacggcctcgcttcgctcgtcgacgtcggcggcggccatggcacagccgcggctgccatcgccagggccttcccacacatcaagtgtaccgtcatggacctccctcacgttgtcgctgaggctcccgcgggcactggactgtgcttcctcgccggcgatatgttcgaccacatcccaccggctgacggtattctgctcaagtggattctgcatgattgggatgatgcgaagtgcattaagataatggaacggtgcaaggaagcaattggtggcaaagaaaggggagggaaagtcattataatcgacaccgtgattggatctaggccaaacgaggaagatatgatacgcagggaggctcaagtcctgtgtgatctaggtatgatgacaacgtcgaatggagctgagcgagaggagc

SEQ ID NO: 14125 - protein, 160 aa, Zea mays subsp. mays
  misc_feature (1)..(160): Ceres Seq. ID no. 1682031
DAMDADARLVMHVVLSECPAVFHGLASLVDVGGGHGTAAAAIARAFPHIKCTVMDLPHVVAEAPAGTGLCFLAGDMFDHIPPADGILLKWILHDWDDAKCIKIMERCKEAIGGKERGGKVIIIDTVIGSRPNEEDMIRREAQVLCDLGMMTTSNGAEREE

SEQ ID NO: 14126 - protein, 158 aa, Zea mays subsp. mays
  misc_feature (1)..(158): Ceres Seq. ID no. 1682032
MDADARLVMHVVLSECPAVFHGLASLVDVGGGHGTAAAAIARAFPHIKCTVMDLPHVVAEAPAGTGLCFLAGDMFDHIPPADGILLKWILHDWDDAKCIKIMERCKEAIGGKERGGKVIIIDTVIGSRPNEEDMIRREAQVLCDLGMMTTSNGAEREE

SEQ ID NO: 14127 - protein, 150 aa, Zea mays subsp. mays
  misc_feature (1)..(150): Ceres Seq. ID no. 1682033
MHVVLSECPAVFHGLASLVDVGGGHGTAAAAIARAFPHIKCTVMDLPHVVAEAPAGTGLCFLAGDMFDHIPPADGILLKWILHDWDDAKCIKIMERCKEAIGGKERGGKVIIIDTVIGSRPNEEDMIRREAQVLCDLGMMTTSNGAEREE

SEQ ID NO: 14128 - DNA, 466 bp, Zea mays subsp. mays
  misc_feature (1)..(466): Ceres Seq. ID no. 1682458
tagatgttccagatgaactccttgttgaaagggtggttggaaggcggcttgatcctgtaacagggaaaatatatcatttgaagtattctccgccagagaatgaagaaatcgcttcaaggcttacacaaagatttgacgatacagaagaaaaggttaagttgaggctggagacttattaccaaaatatcgagtccttgctatcaacatatgagaacattattgtcaaagtgcaaggagatgccacagtggatgctgtctttgctaagatcgacgagctgctgggttctatcctggagaagaaaaatgaaatggtttccagcacatgagcaaggtaaaaatgattgggtgcagtgcagatccgacaagttcatgtaatgcaagtcacctctcatgataggaacttctccaggggaatatatctgaagcacaggacgacacgtacaagtaatgtaagccagtctcacgt

SEQ ID NO: 14129 - protein, 107 aa, Zea mays subsp. mays
  misc_feature (1)..(107): Ceres Seq. ID no. 1682459
DVPDELLVERVVGRRLDPVTGKIYHLKYSPPENEEIASRLTQRFDDTEEKVKLRLETYYQNIESLLSTYENIIVKVQGDATVDAVFAKIDELLGSILEKKNEMVSST

SEQ ID NO: 14130 - protein, 55 aa, Zea mays subsp. mays
  misc_feature (1)..(55): Ceres Seq. ID no. 1682460
MRTLLSKCKEMPQWMLSLLRSTSCWVLSWRRKMKWFPAHEQGKNDWVQCRSDKFM

SEQ ID NO: 14131 - DNA, 417 bp, Zea mays subsp. mays
  misc_feature (1)..(417): Ceres Seq. ID no. 1682636
agtgaggagggactagggagacagggggagggaacaagccgggcgcagtcacggcatcaaacacgagccgcggcatgggcaacagcctgcggtgctgcctggcgtgcgtgctgccgtgcggcgcgctggacctggtgcggatcgtgcacctcagcggccgcgtcgacgagtacggccgcgccgtgtcggccggggaggtgctggcggcgcaccccaaccacgtgctcagctggccctgctcgtcgccgcagggggtcgtgcgcaggatcctcatcgtgtcgccggactcggagctcgagcgcggggagatctacttcctcatcccggccgcgtccgtgcccgacgccaagaagggcggcggcggggctagcacgccaggccgccacgtgcgcagcaagtccgaaggcagcgtcgtcg

SEQ ID NO: 14132 - protein, 139 aa, Zea mays subsp. mays
  misc_feature (1)..(139): Ceres Seq. ID no. 1682637
SEEGLGRQGEGTSRAQSRHQTRAAAWATACGAAWRACCRAARWTWCGSCTSAAASTSTAAPCRPGRCWRRTPTTCSAGPARRRRGSCAGSSSCRRTRSSSAGRSTSSSRPRPCPTPRRAAAGLARQAATCAASPKAASS

SEQ ID NO: 14133 - protein, 114 aa, Zea mays subsp. mays
  misc_feature (1)..(114): Ceres Seq. ID no. 1682638
MGNSLRCCLACVLPCGALDLVRIVHLSGRVDEYGRAVSAGEVLAAHPNHVLSWPCSSPQGVVRRILIVSPDSELERGEIYFLIPAASVPDAKKGGGGASTPGRHVRSKSEGSVV

SEQ ID NO: 14134 - DNA, 460 bp, Zea mays subsp. mays
  misc_feature (1)..(460): Ceres Seq. ID no. 1682755
agccgctcctgccattacacgtcccgagagcagcgcctgagcggagcccaggaggccaggacccatggccgtcaccgccgtcgcggcgtctatgtccgtggcgcaggggctcgggaagcccctctgcgccggcagcaacgcgacgtcgctccggggcgtcgcgctcgcgccccgtcgttcggcggcccggatggccgtcgtccgggcgtcgtccgcgcatcaggagcagcacccggccaaggagtgggcggccgcggcggcgtggcggcggcgctggtgctgccggaggtcgcaggccgcgcccgggatctcgccgtcgctcaagaacttcctcctcagcatcgtctccggaggcgtcgtgctcgtcgccatcgtcggcgccgtcgtcgctgtctctaacttcgatcccgtcaagcggcgctgagctcaagcaactacacgtgcacacatgcatgcagcg

SEQ ID NO: 14135 - protein, 132 aa, Zea mays subsp. mays
  misc_feature (1)..(132): Ceres Seq. ID no. 1682756
SRSCHYTSREQRLSGAQEARTHGRHRRRGVYVRGAGAREAPLRRQQRDVAPGRRARAPSFGGPDGRRPGVVRASGAAPGQGVGGRGGVAAALVLPEVAGRARDLAVAQELPPQHRLRRRRARRHRRRRRRCL

SEQ ID NO: 14136 - protein, 152 aa, Zea mays subsp. mays
  misc_feature (1)..(152): Ceres Seq. ID no. 1682757
PLLPLHVPRAAPERSPGGQDPWPSPPSRRLCPWRRGSGSPSAPAATRRRSGASRSRPVVRRPGWPSSGRRPRIRSSTRPRSGRPRRRGGGAGAAGGRRPRPGSRRRSRTSSSASSPEASCSSPSSAPSSLSLTSIPSSGAELKQLHVHTCMQ

SEQ ID NO: 14137 - protein, 119 aa, Zea mays subsp. mays
  misc_feature (1)..(119): Ceres Seq. ID no. 1682758
MAVTAVAASMSVAQGLGKPLCAGSNATSLRGVALAPRRSAARMAVVRASSAHQEQHPAKEWAAAAAWRRRWCCRRSQAAPGISPSLKNFLLSIVSGGVVLVAIVGAVVAVSNFDPVKRR

SEQ ID NO: 14138 - DNA, 502 bp, Zea mays subsp. mays
  misc_feature (1)..(502): Ceres Seq. ID no. 1683503
aggcccagagaaggctcgcgcagaacagagaggctgcccggaagagtcgcctgcggaagaaggcctacatccagcagctagagacaagccgcatgaagctgtcgcagctagagctggagcttcaacgggcgcggcagcagcagggtgcatatgcgaatagtggaagcatgggagactcggctctcggctacagatgcccgatagatccaggcgttgctgggttcgagatcgactacagccactgggtggacgagcagaagaggcacacaacggagctgacgtcggcgctccagggccagcagacgtcggagctggagctccgcctgctggtggagacggggctcagcaactacgagcgcctgttcaggatcaaggcggcggcggccaacgcggacgtgttctacgtcatgtcgggcttgtggaagacccccgccgagaggttcttcctctggatcggcgggttccggccgtcggaagtcctcaagatcctgagcccgcagct

SEQ ID NO: 14139 - protein, 166 aa, Zea mays subsp. mays
  misc_feature (1)..(166): Ceres Seq. ID no. 1683504
AQRRLAQNREAARKSRLRKKAYIQQLETSRMKLSQLELELQRARQQQGAYANSGSMGDSALGYRCPIDPGVAGFEIDYSHWVDEQKRHTTELTSALQGQQTSELELRLLVETGLSNYERLFRIKAAAANADVFYVMSGLWKTPAERFFLWIGGFRPSEVLKILSPQ

SEQ ID NO: 14140 - protein, 136 aa, Zea mays subsp. mays
  misc_feature (1)..(136): Ceres Seq. ID no. 1683505
MKLSQLELELQRARQQQGAYANSGSMGDSALGYRCPIDPGVAGFEIDYSHWVDEQKRHTTELTSALQGQQTSELELRLLVETGLSNYERLFRIKAAAANADVFYVMSGLWKTPAERFFLWIGGFRPSEVLKILSPQ

SEQ ID NO: 14141 - protein, 111 aa, Zea mays subsp. mays
  misc_feature (1)..(111): Ceres Seq. ID no. 1683506
MGDSALGYRCPIDPGVAGFEIDYSHWVDEQKRHTTELTSALQGQQTSELELRLLVETGLSNYERLFRIKAAAANADVFYVMSGLWKTPAERFFLWIGGFRPSEVLKILSPQ

SEQ ID NO: 14142 - DNA, 460 bp, Zea mays subsp. mays
  misc_feature (1)..(460): Ceres Seq. ID no. 1846112
acttctgtttatcttgttgggcagcggattgatatgcttccaaagcccctgactgaagatgtttgttcacttcgtgctgatgttgaacggttggcattctctgtcatttgggaaatgactccggatgctgatgttatatcaacgagatatacaaagagtgttatcaaatcttgtgctgcaatgtcttatgttgaagcccaggcaagaatggatgacagccgcttagttgatccactaactgtagacttgcggaacttaaattcattggcaaagatcatgcgacaacgccgttgtgaaagaggggctttgactcttgcttctgcagaagtaaaatttgagattgatagtgaaactcatgatcctcttgacataggaatttatcaaatccgtgagcaaatcaaatgattgaagaattttatgttggctgcaaatgtttctgttgctgagaagattttgaagc

SEQ ID NO: 14143 - protein, 134 aa, Zea mays subsp. mays
  misc_feature (1)..(134): Ceres Seq. ID no. 1846113
TSVYLVGQRIDMLPKPLTEDVCSLRADVERLAFSVIWEMTPDADVISTRYTKSVIKSCAAMSYVEAQARMDDSRLVDPLTVDLRNLNSLAKIMRQRRCERGALTLASAEVKFEIDSETHDPLDIGIYQIREQIK

SEQ ID NO: 14144 - protein, 123 aa, Zea mays subsp. mays
  misc_feature (1)..(123): Ceres Seq. ID no. 1846114
MLPKPLTEDVCSLRADVERLAFSVIWEMTPDADVISTRYTKSVIKSCAAMSYVEAQARMDDSRLVDPLTVDLRNLNSLAKIMRQRRCERGALTLASAEVKFEIDSETHDPLDIGIYQIREQIK

SEQ ID NO: 14145 - protein, 96 aa, Zea mays subsp. mays
  misc_feature (1)..(96): Ceres Seq. ID no. 1846115
MTPDADVISTRYTKSVIKSCAAMSYVEAQARMDDSRLVDPLTVDLRNLNSLAKIMRQRRCERGALTLASAEVKFEIDSETHDPLDIGIYQIREQIK

SEQ ID NO: 14146 - DNA, 465 bp, Zea mays subsp. mays
  misc_feature (1)..(465): Ceres Seq. ID no. 1846808
aattaattaattcttcaattgatcccatttgctctctggatgtgatttctcccttcaaagattcagattcagatatcggcccgcttgtcgaaaagattgatgatccaagcatggccaacgataaggatttactgcaggttgtccggttactggatgatgcttgcaaggaggccggattcttctatgtgaaaggccatggtattgatgagtcactgatgagggaagtcaggaatgtaacccgtgaattctttcagcttccttatgaggaaaaattaaaaattaagatgacacctcaaagtggatatagagggtatcaaaggataggggaaaatattaccaagggtaagcctgatatgcatgaagcaatcgattgttatactcctattagacctggcaaatatggagatctcgctaaaccaatggaaggatctaacttatggccaaaatacccatcaaattttgaag

SEQ ID NO: 14147 - protein, 154 aa, Zea mays subsp. mays
  misc_feature (1)..(154): Ceres Seq. ID no. 1846809
LINSSIDPICSLDVISPFKDSDSDIGPLVEKIDDPSMANDKDLLQVVRLLDDACKEAGFFYVKGHGIDESLMREVRNVTREFFQLPYEEKLKIKMTPQSGYRGYQRIGENITKGKPDMHEAIDCYTPIRPGKYGDLAKPMEGSNLWPKYPSNFE

SEQ ID NO: 14148 - protein, 118 aa, Zea mays subsp. mays
  misc_feature (1)..(118): Ceres Seq. ID no. 1846810
MANDKDLLQVVRLLDDACKEAGFFYVKGHGIDESLMREVRNVTREFFQLPYEEKLKIKMTPQSGYRGYQRIGENITKGKPDMHEAIDCYTPIRPGKYGDLAKPMEGSNLWPKYPSNFE

SEQ ID NO: 14149 - protein, 83 aa, Zea mays subsp. mays
  misc_feature (1)..(83): Ceres Seq. ID no. 1846811
MREVRNVTREFFQLPYEEKLKIKMTPQSGYRGYQRIGENITKGKPDMHEAIDCYTPIRPGKYGDLAKPMEGSNLWPKYPSNFE

SEQ ID NO: 14150 - DNA, 483 bp, Zea mays subsp. mays
  misc_feature (1)..(483): Ceres Seq. ID no. 1846912
gggattcattcgcgcacgtcccaggaaatattgcagggaatcaaaatggagacgttgcagtggatcaataccatcgctacaaggaagacgtcgatctcatgaaaagtttgaactttgatgcctaccggttctcaatctcatggtccaggatcttcccggatggcgaagggaaagtcaatccagaaggtgtagcgtattacaataatttgataaactatctgcttcagcaaggcatgactccttacatcaacctttaccactatgatcttcctcttgcgcttgagaagaaatatggagggtggttaagcgcgaagatggcggacttgtttacagactatgctgacttctgttttaagacctacggcgatcgcgtaaagcactggtttacattcaatgagccaaggatagtagcgctacttggctatgacacagggtcaaatcctcctcaaaggtgcacagatgcgctgctggtgggaattcagc

SEQ ID NO: 14151 - protein, 160 aa, Zea mays subsp. mays
  misc_feature (1)..(160): Ceres Seq. ID no. 1846913
DSFAHVPGNIAGNQNGDVAVDQYHRYKEDVDLMKSLNFDAYRFSISWSRIFPDGEGKVNPEGVAYYNNLINYLLQQGMTPYINLYHYDLPLALEKKYGGWLSAKMADLFTDYADFCFKTYGDRVKHWFTFNEPRIVALLGYDTGSNPPQRCTDALLVGIQ

SEQ ID NO: 14152 - protein, 128 aa, Zea mays subsp. mays
  misc_feature (1)..(128): Ceres Seq. ID no. 1846914
MKSLNFDAYRFSISWSRIFPDGEGKVNPEGVAYYNNLINYLLQQGMTPYINLYHYDLPLALEKKYGGWLSAKMADLFTDYADFCFKTYGDRVKHWFTFNEPRIVALLGYDTGSNPPQRCTDALLVGIQ

SEQ ID NO: 14153 - protein, 83 aa, Zea mays subsp. mays
  misc_feature (1)..(83): Ceres Seq. ID no. 1846915
MTPYINLYHYDLPLALEKKYGGWLSAKMADLFTDYADFCFKTYGDRVKHWFTFNEPRIVALLGYDTGSNPPQRCTDALLVGIQ

SEQ ID NO: 14154 - DNA, 475 bp, Zea mays subsp. mays
  misc_feature (1)..(475): Ceres Seq. ID no. 1847866
aaactccatctcccgtctctctctctctctacgaactccacctcgcgaacagccgctgcttgcctgccgcgttggagagaacggaaganaagcgagcgagggagagggacagcaactccctcggtcgctttcgacggcctggatctccccgcacgcggtatcgtacgaccggcacgctgttgtcgctttccaccgcttgggcaagtggtgctctcgatccagaacggagctcatctgctgatcgtgtttcgtcagtcaagaggggtgtatttgcgatgattgctgtttttttggcttactcttttcttcaggcgccttcaactgtactcattagaccacatcctgccatttggaggctagttcatgggatggcagttgtttaccttgtcgccctcactttcttgcttttccagactcgtgatgatgctaggcaattcatgaagtatcttcatcctgatcttggtgtcgaatttac

SEQ ID NO: 14155 - protein, 92 aa, Zea mays subsp. mays
  misc_feature (1)..(92): Ceres Seq. ID no. 1847867
  misc_feature (30)..(30): Xaa is any aa, unknown or other
KLHLPSLSLSTNSTSRTAAACLPRWRERKXSERGRGTATPSVAFDGLDLPARGIVRPARCCRFPPLGQVVLSIQNGAHLLIVFRQSRGVYLR

SEQ ID NO: 14156 - protein, 79 aa, Zea mays subsp. mays
  misc_feature (1)..(79): Ceres Seq. ID no. 1847868
  misc_feature (30)..(30): Xaa is any aa, unknown or other
NSISRLSLSLRTPPREQPLLACRVGENGRXASEGEGQQLPRSLSTAWISPHAVSYDRHAVVAFHRLGKWCSRSRTELIC

SEQ ID NO: 14157 - protein, 157 aa, Zea mays subsp. mays
  misc_feature (1)..(157): Ceres Seq. ID no. 1847869
  misc_feature (29)..(29): Xaa is any aa, unknown or other
TPSPVSLSLYELHLANSRCLPAALERTEXKRARERDSNSLGRFRRPGSPRTRYRTTGTLLSLSTAWASGALDPERSSSADRVSSVKRGVFAMIAVFLAYSFLQAPSTVLIRPHPAIWRLVHGMAVVYLVALTFLLFQTRDDARQFMKYLHPDLGVEF

SEQ ID NO: 14158 - protein, 66 aa, Zea mays subsp. mays
  misc_feature (1)..(66): Ceres Seq. ID no. 4902255
MIAVFLAYSFLQAPSTVLIRPHPAIWRLVHGMAVVYLVALTFLLFQTRDDARQFMKYLHPDLGVEF

SEQ ID NO: 14159 - DNA, 472 bp, Zea mays subsp. mays
  misc_feature (1)..(472): Ceres Seq. ID no. 1848109
catatctggtgttcctggtgcatatgttttgtggtatcgtcctctgtataatgcaatgaggactgatagtgcattgaagtttggattgttcttcttgctttacttgttccatattcttttctgcgtgtttgctgctgtggctcctcctgctgtatttgagggaaaatcattggcaggaattttgccagcaattgatcttatcagcgtaaatgctttggttgggatattctactttgttggatttggattgttttgtctggaatcgttgctcagcatctgggtcatccagcaagtgtacatgtacttccgtggaagtggaaaggctgcagagatgaagcgtgatgcgacaaggggtgcaatgagagccgcattttaagtggtatttttgtgatgatagtccaaagtcccaatcgcatacttccggtggataggttgtgccaacaaacagaggctggcatatgtttcttccttg

SEQ ID NO: 14160 - protein, 124 aa, Zea mays subsp. mays
  misc_feature (1)..(124): Ceres Seq. ID no. 1848110
ISGVPGAYVLWYRPLYNAMRTDSALKFGLFFLLYLFHILFCVFAAVAPPAVFEGKSLAGILPAIDLISVNALVGIFYFVGFGLFCLESLLSIWVIQQVYMYFRGSGKAAEMKRDATRGAMRAAF

SEQ ID NO: 14161 - protein, 106 aa, Zea mays subsp. mays
  misc_feature (1)..(106): Ceres Seq. ID no. 1848111
MRTDSALKFGLFFLLYLFHILFCVFAAVAPPAVFEGKSLAGILPAIDLISVNALVGIFYFVGFGLFCLESLLSIWVIQQVYMYFRGSGKAAEMKRDATRGAMRAAF

SEQ ID NO: 14162 - DNA, 489 bp, Zea mays subsp. mays
  misc_feature (1)..(489): Ceres Seq. ID no. 1850217
ctccctctgcaagtacaagttgtcctgtctttggtttagtttgcgcccctgtatttgttcagggttttggtcgcgtgttgaggaaagattcggggttcttaagtgaaacaaatggggtcatcaaggaatgtgccgcacaaagtgatgcaagatgagatcacacctcttctcccgatcaaagctgaggaggacgcagttcatgagttcgacggagcttctttctctggcgcggtcttcaatctgtcaacaaccattgtaggagctggaatcatggctctgcctgcgagtatcaagatgctaggccttatacctggtattctaatgatcatccttgtggcgctgctcaccgagacatccattgacatgctggtcaggtgcagccaccagggcaagattacatcctacggctggttgatgggtgacacatttggtcagtgggggagaattgcgctacaagcatcggtggtgataaacaatgtcggcgtgttg

SEQ ID NO: 14163 - protein, 126 aa, Zea mays subsp. mays
  misc_feature (1)..(126): Ceres Seq. ID no. 1850218
MGSSRNVPHKVMQDEITPLLPIKAEEDAVHEFDGASFSGAVFNLSTTIVGAGIMALPASIKMLGLIPGILMIILVALLTETSIDMLVRCSHQGKITSYGWLMGDTFGQWGRIALQASVVINNVGVL

SEQ ID NO: 14164 - protein, 115 aa, Zea mays subsp. mays
  misc_feature (1)..(115): Ceres Seq. ID no. 1850219
MQDEITPLLPIKAEEDAVHEFDGASFSGAVFNLSTTIVGAGIMALPASIKMLGLIPGILMIILVALLTETSIDMLVRCSHQGKITSYGWLMGDTFGQWGRIALQASVVINNVGVL

SEQ ID NO: 14165 - protein, 73 aa, Zea mays subsp. mays
  misc_feature (1)..(73): Ceres Seq. ID no. 1850220
MALPASIKMLGLIPGILMIILVALLTETSIDMLVRCSHQGKITSYGWLMGDTFGQWGRIALQASVVINNVGVL

SEQ ID NO: 14166 - DNA, 468 bp, Zea mays subsp. mays
  misc_feature (1)..(468): Ceres Seq. ID no. 1851208
atccccagaaccacacggataaaccctagctgcgcgagccccccggcgatgtcggtggccatccgctccggcgagctccttgcgtgccccgtcgcactccggcgggcgcccttggctgtgtctgtggtgtcggtgcggatgagggctaggggcgccgtggctgtgcgggcggaggcaacggccgagggggtagggaaagaggggaagaaggcggcggggaagaagaagccggcgagcgggatcaccaagccgaagcccatctctacagagctgcgggagttcgtcggcggcgcggcggagctgccccggactgaggccatcaagctggtatgggcgcacatcaagggcaacaacctccaggatccaaacaacaagaagataataatctgcgatgagaaactgaagaagaaggggcactcctactctgagatcatcaacgagagcgtgattgagtcggtggactcgctg

SEQ ID NO: 14167 - protein, 156 aa, Zea mays subsp. mays
  misc_feature (1)..(156): Ceres Seq. ID no. 1851209
IPRTTRINPSCASPPAMSVAIRSGELLACPVALRRAPLAVSVVSVRMRARGAVAVRAEATAEGVGKEGKKAAGKKKPASGITKPKPISTELREFVGGAAELPRTEAIKLVWAHIKGNNLQDPNNKKIIICDEKLKKKGHSYSEIINESVIESVDSL

SEQ ID NO: 14168 - protein, 140 aa, Zea mays subsp. mays
  misc_feature (1)..(140): Ceres Seq. ID no. 1851210
MSVAIRSGELLACPVALRRAPLAVSVVSVRMRARGAVAVRAEATAEGVGKEGKKAAGKKKPASGITKPKPISTELREFVGGAAELPRTEAIKLVWAHIKGNNLQDPNNKKIIICDEKLKKKGHSYSEIINESVIESVDSL

SEQ ID NO: 14169 - protein, 110 aa, Zea mays subsp. mays
  misc_feature (1)..(110): Ceres Seq. ID no. 1851211
MRARGAVAVRAEATAEGVGKEGKKAAGKKKPASGITKPKPISTELREFVGGAAELPRTEAIKLVWAHIKGNNLQDPNNKKIIICDEKLKKKGHSYSEIINESVIESVDSL

SEQ ID NO: 14170 - DNA, 439 bp, Zea mays subsp. mays
  misc_feature (1)..(439): Ceres Seq. ID no. 1923620
agtccaagatctctccctcccacggcccgctcggactccccggcgcaatggcgaccgacgcgatcctggagacgatcaagccgcggcggagcgaggagcagctcccggtgaccacggcggccgccgccggcaccaggctgcggcggcgcgtgtcctcgttctcggcgcacgtgaggccgccgccggggctgtcgtcctcggcggcagcggcgttccggcgcgcgaggtcgatgccgaccgccaaggcgctggcggcggcgggcgcgctgcggcggtggtgggagtgggtgacggcgccgttcgcgccccgcggcgacgacgacgacgaggcaaggccgctgggcggttgccgctgcgcctgcgccggcggaccgggcgggtggcgccacgtcctggtcaggctccgcgccggcgcgcgccgactgctgggccgcgacgg

SEQ ID NO: 14171 - protein, 146 aa, Zea mays subsp. mays
  misc_feature (1)..(146): Ceres Seq. ID no. 1923621
VQDLSLPRPARTPRRNGDRRDPGDDQAAAERGAAPGDHGGRRRHQAAAARVLVLGAREAAAGAVVLGGSGVPAREVDADRQGAGGGGRAAAVVGVGDGAVRAPRRRRRRGKAAGRLPLRLRRRTGRVAPRPGQAPRRRAPTAGPRR

SEQ ID NO: 14172 - protein, 145 aa, Zea mays subsp. mays
  misc_feature (1)..(145): Ceres Seq. ID no. 1923622
SKISPSHGPLGLPGAMATDAILETIKPRRSEEQLPVTTAAAAGTRLRRRVSSFSAHVRPPPGLSSSAAAAFRRARSMPTAKALAAAGALRRWWEWVTAPFAPRGDDDDEARPLGGCRCACAGGPGGWRHVLVRLRAGARRLLGRD

SEQ ID NO: 14173 - protein, 130 aa, Zea mays subsp. mays
  misc_feature (1)..(130): Ceres Seq. ID no. 1923623
MATDAILETIKPRRSEEQLPVTTAAAAGTRLRRRVSSFSAHVRPPPGLSSSAAAAFRRARSMPTAKALAAAGALRRWWEWVTAPFAPRGDDDDEARPLGGCRCACAGGPGGWRHVLVRLRAGARRLLGRD

SEQ ID NO: 14174 - DNA, 499 bp, Zea mays subsp. mays
  misc_feature (1)..(499): Ceres Seq. ID no. 1940669
acaccacgcgctgcagctgctcacacacagtgcaacagaccccctccacctccacgcgatcggacgacacgaagcggccatcggggatcccctccgctacgcctctcgatggtctcctccagcgcgccgccgccgcaggcccagtccgacgcggccgggtcgggggaggaagcgagcaagaaggtgcggaagccgtacacaatcaccaagtcccgggagagctggacggagcaggagcacgacaagttcctcgaggccctgcagctctttgatcgtgactggaagaagatagaggcttttgttggctccaagactgtcatccagattaggagccatgcacagaagtaccttttgaaggttcagaaaaatggaaccagcgaacatgtcccacctccacgaccaaagcgaaaagctgcncatccatatcctcagaaggcttccaagaatgttatgccagattttgcgggagtgtacagcttcttaggtagtgtttcgatcc

SEQ ID NO: 14175 - protein, 166 aa, Zea mays subsp. mays
  misc_feature (1)..(166): Ceres Seq. ID no. 1940670
  misc_feature (139)..(139): Xaa is any aa, unknown or other
TPRAAAAHTQCNRPPPPPRDRTTRSGHRGSPPLRLSMVSSSAPPPQAQSDAAGSGEEASKKVRKPYTITKSRESWTEQEHDKFLEALQLFDRDWKKIEAFVGSKTVIQIRSHAQKYLLKVQKNGTSEHVPPPRPKRKAXHPYPQKASKNVMPDFAGVYSFLGSVSI

SEQ ID NO: 14176 - protein, 96 aa, Zea mays subsp. mays
  misc_feature (1)..(96): Ceres Seq. ID no. 1940671
HHALQLLTHSATDPLHLHAIGRHEAAIGDPLRYASRWSPPARRRRRPSPTRPGRGRKRARRCGSRTQSPSPGRAGRSRSTTSSSRPCSSLIVTGRR

SEQ ID NO: 14177 - protein, 130 aa, Zea mays subsp. mays
  misc_feature (1)..(130): Ceres Seq. ID no. 1940672
  misc_feature (103)..(103): Xaa is any aa, unknown or other
MVSSSAPPPQAQSDAAGSGEEASKKVRKPYTITKSRESWTEQEHDKFLEALQLFDRDWKKIEAFVGSKTVIQIRSHAQKYLLKVQKNGTSEHVPPPRPKRKAXHPYPQKASKNVMPDFAGVYSFLGSVSI

SEQ ID NO: 14178 - DNA, 466 bp, Zea mays subsp. mays
  misc_feature (1)..(466): Ceres Seq. ID no. 1959522
tcagaacattgaagagtttacatggttaaactcaagctacagtccagtgctgaagcagttggaaacgcggtttatgattgattactacttcagaactgggcatgctaggcacgatgaaaatcccaagtttcggaaccccaagtacttgtcaattctcaaccatctgaggttctatctccctgagatcttcccaagacttaacaaggtgttatttctggatgatgatactgtagtgcagcgagacctaagtgcgctttggttggtagatctcaaaggcaaggttaatggtgctgtcgagacctgtagacaggacttccataggtttgataagtacctcaacttctcaaaccctcttattgccaagaattttgatccacatgcttgtggttgggcatatggcatgaacatgtttgatttgtccgactggagaaagcaaaacatcactgaggtctaccatacctggcag

SEQ ID NO: 14179 - protein, 155 aa, Zea mays subsp. mays
  misc_feature (1)..(155): Ceres Seq. ID no. 1959523
QNIEEFTWLNSSYSPVLKQLETRFMIDYYFRTGHARHDENPKFRNPKYLSILNHLRFYLPEIFPRLNKVLFLDDDTVVQRDLSALWLVDLKGKVNGAVETCRQDFHRFDKYLNFSNPLIAKNFDPHACGWAYGMNMFDLSDWRKQNITEVYHTWQ

SEQ ID NO: 14180 - protein, 131 aa, Zea mays subsp. mays
  misc_feature (1)..(131): Ceres Seq. ID no. 1959524
MIDYYFRTGHARHDENPKFRNPKYLSILNHLRFYLPEIFPRLNKVLFLDDDTVVQRDLSALWLVDLKGKVNGAVETCRQDFHRFDKYLNFSNPLIAKNFDPHACGWAYGMNMFDLSDWRKQNITEVYHTWQ

SEQ ID NO: 14181 - DNA, 447 bp, Zea mays subsp. mays
  misc_feature (1)..(447): Ceres Seq. ID no. 2120225
cccctctgtcccagaacgcgccccagcctcccacctagaactccgcgcccagcgctttccgtaaccaccacaaccrcagcggraacagtgacaggttgaggagacggccgccatgggagaggaaaagaagacgggcaagggcggcggcggcggcggcggcgacnagaagaaggacgccggcgctggggccgcgccgcagcccatcgtgttgaaggtcgacttgcattgcgccggctgcgccaacaaggtccgcaaggccatcaagcgcgcaccaggcgtggagtcggtgacgccggacatggcggcgggcaaggtggtcgtgaccggtccggcggacgcggtgcagctcaaggagcgcatcgaggctagggccaagaagcccgtgcagatcgtctccgccggcgccggttcgccaagaaggacaaggagaagwawgctgacggcggc

SEQ ID NO: 14182 - protein, 111 aa, Zea mays subsp. mays
  misc_feature (1)..(111): Ceres Seq. ID no. 2120226
  misc_feature (18)..(18): Xaa is any aa, unknown or other
  misc_feature (107)..(107): Xaa is any aa, unknown or other
  misc_feature (108)..(108): Xaa is any aa, unknown or other
MGEEKKTGKGGGGGGGDXKKDAGAGAAPQPIVLKVDLHCAGCANKVRKAIKRAPGVESVTPDMAAGKVVVTGPADAVQLKERIEARAKKPVQIVSAGAGSPRRTRRXXLTA

SEQ ID NO: 14183 - DNA, 442 bp, Zea mays subsp. mays
  misc_feature (1)..(442): Ceres Seq. ID no. 2121270
caagaaaaacggtttctcaagaccactcttgaaatgtgcagaagaggtcctactgaatggcgatgttgcaagtacatctgggaaatccattgcaagcttacaggtggaagcatctgatttggcaaacttccttaccatggatcggaatgggggttaccgaggttcacaaactcttctaagatctgtattatcagagaaacaagagctgtgcttctctgttgtctcattgctctggcagaagctcatagcttctcctgaaatgcagatgtctgcagaaagtacatcagctcaccaaggatggaggaaggttgttgatgcactttgtgatgtcgtttcagcctcaccaaccaaggcatcagctgctatcgttctccaggccgagaaggacttgcagccttggattgctagagatgacgaacaaggtcagaagatgtggagagtc

SEQ ID NO: 14184 - protein, 147 aa, Zea mays subsp. mays
  misc_feature (1)..(147): Ceres Seq. ID no. 2121271
KKNGFSRPLLKCAEEVLLNGDVASTSGKSIASLQVEASDLANFLTMDRNGGYRGSQTLLRSVLSEKQELCFSVVSLLWQKLIASPEMQMSAESTSAHQGWRKVVDALCDVVSASPTKASAAIVLQAEKDLQPWIARDDEQGQKMWRV

SEQ ID NO: 14185 - protein, 102 aa, Zea mays subsp. mays
  misc_feature (1)..(102): Ceres Seq. ID no. 2121272
MDRNGGYRGSQTLLRSVLSEKQELCFSVVSLLWQKLIASPEMQMSAESTSAHQGWRKVVDALCDVVSASPTKASAAIVLQAEKDLQPWIARDDEQGQKMWRV

SEQ ID NO: 14186 - DNA, 400 bp, Zea mays subsp. mays
  misc_feature (1)..(400): Ceres Seq. ID no. 2731917
gacctcgccgccttcatcgccgactgcatatacgaccaggacaaggccaacaaggtgctgcccattggcgggccggggaaggcgctcacgccgctggagcagggggagatgctgtttcggctgctcgggcgcgagcccaagttcatcaaggtgcccatacagatcatggacgccgttatctgggtgctcgatggattggccaagctgttcccggggttggaggacgccgccgagttcggcaagattggcaggtactatgcctcggagagcatgctgttgctggacccggagaccggggagtacagcgacgagaagacgcccagctacggcaaggacacgctcgagcagttcttccaaagagtgataagggaagggatggcggggcargagcttggcgagc

SEQ ID NO: 14187 - protein, 133 aa, Zea mays subsp. mays
  misc_feature (1)..(133): Ceres Seq. ID no. 2731918
  misc_feature (129)..(129): Xaa is any aa, unknown or other
DLAAFIADCIYDQDKANKVLPIGGPGKALTPLEQGEMLFRLLGREPKFIKVPIQIMDAVIWVLDGLAKLFPGLEDAAEFGKIGRYYASESMLLLDPETGEYSDEKTPSYGKDTLEQFFQRVIREGMAGXELGE

SEQ ID NO: 14188 - protein, 132 aa, Zea mays subsp. mays
  misc_feature (1)..(132): Ceres Seq. ID no. 2731919
  misc_feature (129)..(129): Xaa is any aa, unknown or other
PRRLHRRLHIRPGQGQQGAAHWRAGEGAHAAGAGGDAVSAARARAQVHQGAHTDHGRRYLGARWIGQAVPGVGGRRRVRQDWQVLCLGEHAVAGPGDRGVQRREDAQLRQGHARAVLPKSDKGRDGGAXAWR

SEQ ID NO: 14189 - protein, 120 aa, Zea mays subsp. mays
  misc_feature (1)..(120): Ceres Seq. ID no. 2731920
TSPPSSPTAYTTRTRPTRCCPLAGRGRRSRRWSRGRCCFGCSGASPSSSRCPYRSWTPLSGCSMDWPSCSRGWRTPPSSARLAGTMPRRACCCWTRRPGSTATRRRPATARTRSSSSSKE

SEQ ID NO: 14190 - DNA, 453 bp, Zea mays subsp. mays
  misc_feature (1)..(453): Ceres Seq. ID no. 2733380
atcgaacgatttgggggaggaggtgttctattacacaaaagaggcaaaaaacaaaagccgatcgcggcactcgccgccgttgaggaggaggtttccggcgctgcttccagcgccttgccgtcagcaccatgaggaagaagctggacacgcgtttccccgctcctcggattaaaaagatcatgcaaacagatgaagacgtcggcaagattgctcaagctgtacctgttctagtgtccaaagcattggagctatttctgcaagatttatgtgataggacatatgatattacaattcggaagggggtcaagactgtgggttcttcccatttgaaacaatgcatacaaacgtacaacgtctatgacttcttgagggaagtagtcagcaaagttccagacattggtccttctgatgttattgctgatgataagcttggcaaaaggaggaaagccgaag

SEQ ID NO: 14191 - protein, 108 aa, Zea mays subsp. mays
  misc_feature (1)..(108): Ceres Seq. ID no. 2733381
MRKKLDTRFPAPRIKKIMQTDEDVGKIAQAVPVLVSKALELFLQDLCDRTYDITIRKGVKTVGSSHLKQCIQTYNVYDFLREVVSKVPDIGPSDVIADDKLGKRRKAE

SEQ ID NO: 14192 - protein, 91 aa, Zea mays subsp. mays
  misc_feature (1)..(91): Ceres Seq. ID no. 2733382
MQTDEDVGKIAQAVPVLVSKALELFLQDLCDRTYDITIRKGVKTVGSSHLKQCIQTYNVYDFLREVVSKVPDIGPSDVIADDKLGKRRKAE

SEQ ID NO: 14193 - protein, 56 aa, Zea mays subsp. mays
  misc_feature (1)..(56): Ceres Seq. ID no. 2733383
SNDLGEEVFYYTKEAKNKSRSRHSPPLRRRFPALLPAPCRQHHEEEAGHAFPRSSD

SEQ ID NO: 14194 - DNA, 481 bp, Zea mays subsp. mays
  misc_feature (1)..(481): Ceres Seq. ID no. 2733452
ataaataagtaaatacaccatggaatgcgtcgtcgtgccggcctcgcctcgttatgctctgccgcctcctctgcctctgcctctgcccagatccacaggttgaccttcgcgacaggcacgcgttggtggacatcttctcgtcgcacaggttcgaggctgtcattcactttgctgggctcaaggctgttggggagagcgtgcacaagcccctgctttactacgacaacaacctggtcggcaccatcaccctcctggaggtgatggctgcgaatggctgcaagaagctggtgttctcgtcatctgcaactgtctatgggtggcccaaggaagtaccatgcaccgaagaattcccgctctgcgccaccaatccctatgggcggacaaagcttgtgattgaagacatctgccgcgacgtccaccgctccgacccggactggaagatcatactgctcaggtacttcaaccccgttggcgctcatcc

SEQ ID NO: 14195 - protein, 142 aa, Zea mays subsp. mays
  misc_feature (1)..(142): Ceres Seq. ID no. 2733453
MLCRLLCLCLCPDPQVDLRDRHALVDIFSSHRFEAVIHFAGLKAVGESVHKPLLYYDNNLVGTITLLEVMAANGCKKLVFSSSATVYGWPKEVPCTEEFPLCATNPYGRTKLVIEDICRDVHRSDPDWKIILLRYFNPVGAH

SEQ ID NO: 14196 - protein, 78 aa, Zea mays subsp. mays
  misc_feature (1)..(78): Ceres Seq. ID no. 2733454
MRRRAGLASLCSAASSASASAQIHRLTFATGTRWWTSSRRTGSRLSFTLLGSRLLGRACTSPCFTTTTTWSAPSPSWR

SEQ ID NO: 14197 - protein, 73 aa, Zea mays subsp. mays
  misc_feature (1)..(73): Ceres Seq. ID no. 2733455
MAANGCKKLVFSSSATVYGWPKEVPCTEEFPLCATNPYGRTKLVIEDICRDVHRSDPDWKIILLRYFNPVGAH

SEQ ID NO: 14198 - DNA, 401 bp, Zea mays subsp. mays
  misc_feature (1)..(401): Ceres Seq. ID no. 2786658
gaggccagatttcctcctgcggcgttgaattgcgcgctcgacctagggttttgtttcgtttcgcgggcgttgggaatccatccatggcgaggaagatgctcatcgacggggaggtggcggccgtcgcggatggtgggcactatgactacgatctcttcgtcatcggggcgggcagcggcggcgttcgcggctctcgcaccgccgcctccttcggagctaaggttgcgatttgtgagctcccattccaccccatcagctcagagtggctaggaggacatggtgggacttgcgtgatacgtggttgcgtacctaaaaagatactcgtgtatggtgcatcattccgtggagaatttgaggattcgaagaattttgggtgggagattwacggagatattaacttc

SEQ ID NO: 14199 - protein, 133 aa, Zea mays subsp. mays
  misc_feature (1)..(133): Ceres Seq. ID no. 2786659
  misc_feature (128)..(128): Xaa is any aa, unknown or other
GQISSCGVELRARPRVLFRFAGVGNPSMARKMLIDGEVAAVADGGHYDYDLFVIGAGSGGVRGSRTAASFGAKVAICELPFHPISSEWLGGHGGTCVIRGCVPKKILVYGASFRGEFEDSKNFGWEIXGDINF

SEQ ID NO: 14200 - protein, 106 aa, Zea mays subsp. mays
  misc_feature (1)..(106): Ceres Seq. ID no. 2786660
  misc_feature (101)..(101): Xaa is any aa, unknown or other
MARKMLIDGEVAAVADGGHYDYDLFVIGAGSGGVRGSRTAASFGAKVAICELPFHPISSEWLGGHGGTCVIRGCVPKKILVYGASFRGEFEDSKNFGWEIXGDINF

SEQ ID NO: 14201 - protein, 102 aa, Zea mays subsp. mays
  misc_feature (1)..(102): Ceres Seq. ID no. 2786661
  misc_feature (97)..(97): Xaa is any aa, unknown or other
MLIDGEVAAVADGGHYDYDLFVIGAGSGGVRGSRTAASFGAKVAICELPFHPISSEWLGGHGGTCVIRGCVPKKILVYGASFRGEFEDSKNFGWEIXGDINF

SEQ ID NO: 14202 - DNA, 407 bp, Zea mays subsp. mays
  misc_feature (1)..(407): Ceres Seq. ID no. 2787041
aaaaaatcaatcgcccacaaaggagagccaggcagccagccaaatcttccacctcctccatttccagccccgtccccacaccagctcgcgtaacctcctgcccatggctggaggcggcggcgcaggcgcgggctcgtcgtccggcggcggcggagggggcggcagggagggcgactgggactgcggcagctgcggcaaccgcaactacgccttccgctcgctctgcaaccgctgcaagcagccgcgcctcctcgtcgaccccaacaccccgcgcgactccaagtggctaccccgcgccggggactggatctgcaccggttgcagtaacaataattatgcatccagaaagaactgcaaaaagtgtggcttgcccaaggaggaagcagcaatgccagcattgcaaatgg

SEQ ID NO: 14203 - protein, 135 aa, Zea mays subsp. mays
  misc_feature (1)..(135): Ceres Seq. ID no. 2787042
KNQSPTKESQAASQIFHLLHFQPRPHTSSRNLLPMAGGGGAGAGSSSGGGGGGGREGDWDCGSCGNRNYAFRSLCNRCKQPRLLVDPNTPRDSKWLPRAGDWICTGCSNNNYASRKNCKKCGLPKEEAAMPALQM

SEQ ID NO: 14204 - protein, 135 aa, Zea mays subsp. mays
  misc_feature (1)..(135): Ceres Seq. ID no. 2787043
KINRPQRRARQPAKSSTSSISSPVPTPARVTSCPWLEAAAQARARRPAAAEGAAGRATGTAAAAATATTPSARSATAASSRASSSTPTPRATPSGYPAPGTGSAPVAVTIIMHPERTAKSVACPRRKQQCQHCKW

SEQ ID NO: 14205 - protein, 101 aa, Zea mays subsp. mays
  misc_feature (1)..(101): Ceres Seq. ID no. 2787044
MAGGGGAGAGSSSGGGGGGGREGDWDCGSCGNRNYAFRSLCNRCKQPRLLVDPNTPRDSKWLPRAGDWICTGCSNNNYASRKNCKKCGLPKEEAAMPALQM

SEQ ID NO: 14206 - DNA, 461 bp, Zea mays subsp. mays
  misc_feature (1)..(461): Ceres Seq. ID no. 2787617
gaaacaaattgcgcattttcttctcctgcggtccttccttcgcttccccgttcttccagaatcctgtcgagacctgaatccaccctcacccagcggtccccatggcctccggcgaaggtgtagctaccagctgcacgatctaagcgaggtggagatcccacccacgctggaggaggtcgacctcaccgccaaccgcctctcttctgttgatcctcgcatcggccaactcccccatctccgcaagctctcattccgccagaacctcctcgacgatgacgccgtcgcgccactcacgtcctgggaggctattgccgggttgaaggagttcgtccttagagataacaaacttacaaggattcctgatgctggcatattcaaggatcttctggtgttcgatgtatctttcaatgagatatcttctttgactggtctgtccaaggtttccatcaaattgaaggaac

SEQ ID NO: 14207 - protein, 153 aa, Zea mays subsp. mays
  misc_feature (1)..(153): Ceres Seq. ID no. 2787618
KQIAHFLLLRSFLRFPVLPESCRDLNPPSPSGPHGLRRRCSYQLHDLSEVEIPPTLEEVDLTANRLSSVDPRIGQLPHLRKLSFRQNLLDDDAVAPLTSWEAIAGLKEFVLRDNKLTRIPDAGIFKDLLVFDVSFNEISSLTGLSKVSIKLKE

SEQ ID NO: 14208 - DNA, 464 bp, Zea mays subsp. mays
  misc_feature (1)..(464): Ceres Seq. ID no. 2789088
gacttccctgggcgcgtccgtgcaggtcgggatggagttctgggcgcggtgggcgcaccgggcgctatggcacgcctccctgtggcacatgcacgagtcgcaccaccggtcgtgcgagggcccattcgagctcaacgacgtgttcgccatcgtcaacgccgtgccggccatctccctcctcggtgacgtcgcgagcagatacaccatatggacaattttgagggcgtcccgtatgggctcttcctgggaccaaaggagctggaggaggtcggtggcctggacgagctggaaaaggagctcgcgcgaatcggccagaccatctgatggatttgtccggattccggcgcggcgatctccgctccgctccgtgattccggcgcagcctcatggttggggagccgacgaccagaacctccagaagggatttggtttggatgcgcgagcgtagatcttgacctgcattt

SEQ ID NO: 14209 - protein, 148 aa, Zea mays subsp. mays
  misc_feature (1)..(148): Ceres Seq. ID no. 2789089
TSLGASVQVGMEFWARWAHRALWHASLWHMHESHHRSCEGPFELNDVFAIVNAVPAISLLGDVASRYTIWTILRASRMGSSWDQRSWRRSVAWTSWKRSSRESARPSDGFVRIPARRSPLRSVIPAQPHGWGADDQNLQKGFGLDARA

SEQ ID NO: 14210 - protein, 138 aa, Zea mays subsp. mays
  misc_feature (1)..(138): Ceres Seq. ID no. 2789090
MEFWARWAHRALWHASLWHMHESHHRSCEGPFELNDVFAIVNAVPAISLLGDVASRYTIWTILRASRMGSSWDQRSWRRSVAWTSWKRSSRESARPSDGFVRIPARRSPLRSVIPAQPHGWGADDQNLQKGFGLDARA

SEQ ID NO: 14211 - protein, 119 aa, Zea mays subsp. mays
  misc_feature (1)..(119): Ceres Seq. ID no. 2789091
MHESHHRSCEGPFELNDVFAIVNAVPAISLLGDVASRYTIWTILRASRMGSSWDQRSWRRSVAWTSWKRSSRESARPSDGFVRIPARRSPLRSVIPAQPHGWGADDQNLQKGFGLDARA

SEQ ID NO: 14212 - DNA, 516 bp, Zea mays subsp. mays
  misc_feature (1)..(516): Ceres Seq. ID no. 2789482
caagttatcgagacactatctaaacaaggaattagtgtatatatgttatctggggacaaggaaagtgctgctatgaatgtggcttcagttgtcggtatccaggcagacaaggttcttgctgaagttaaaccacataagaaaaagaagttcatatctgaactccagaaagagcacaaggtagtcgccatggttggtgacggcattaatgatgccgcagcactagcttcagctgatgttggaatcgctatgggtggaggtgttggggcagctagtgatgtatcttcagttgtacttatgggcaacaggttatcccagcttctcgatgctttagagttgagtaaagagaccatgaagacggtgaagcaaaatctttggtgggctttcctatataacattgttggactacccattgctgctggagcattgcttccagctacggggacgatactgacaccatcaatagctggagctctgatgggttttagttcggtcggtgtgatggccaactcgttgctt

SEQ ID NO: 14213 - protein, 172 aa, Zea mays subsp. mays
  misc_feature (1)..(172): Ceres Seq. ID no. 2789483
QVIETLSKQGISVYMLSGDKESAAMNVASVVGIQADKVLAEVKPHKKKKFISELQKEHKVVAMVGDGINDAAALASADVGIAMGGGVGAASDVSSVVLMGNRLSQLLDALELSKETMKTVKQNLWWAFLYNIVGLPIAAGALLPATGTILTPSIAGALMGFSSVGVMANSLL

SEQ ID NO: 14214 - protein, 158 aa, Zea mays subsp. mays
  misc_feature (1)..(158): Ceres Seq. ID no. 2789484
MLSGDKESAAMNVASVVGIQADKVLAEVKPHKKKKFISELQKEHKVVAMVGDGINDAAALASADVGIAMGGGVGAASDVSSVVLMGNRLSQLLDALELSKETMKTVKQNLWWAFLYNIVGLPIAAGALLPATGTILTPSIAGALMGFSSVGVMANSLL

SEQ ID NO: 14215 - protein, 148 aa, Zea mays subsp. mays
  misc_feature (1)..(148): Ceres Seq. ID no. 2789485
MNVASVVGIQADKVLAEVKPHKKKKFISELQKEHKVVAMVGDGINDAAALASADVGIAMGGGVGAASDVSSVVLMGNRLSQLLDALELSKETMKTVKQNLWWAFLYNIVGLPIAAGALLPATGTILTPSIAGALMGFSSVGVMANSLL

SEQ ID NO: 14216 - DNA, 488 bp, Zea mays subsp. mays
  misc_feature (1)..(488): Ceres Seq. ID no. 2789959
acgggcacgaccatctcctacacccgcgggcaaaagttccctgtcccccgtacacattccaccccaaaatggcactcgcgccatcacccccagcgctgccgcccaacccggcgctccctttgccgtggtgggggcgggccggccgcggtgcgctcgtccgcgcccgcgcccgcgccgtccgcgcggcgctacggccccgagccagtggtccgtcgggagctggcggggccgcccggcgcagcagcwgcccgagtacccggacaaggcggacctggaagacgtgctgcggacggtgggaacgttcccgcccatcgtcttcgccggcgaggcgcgcaccctcgaggagcgcctcgcggaggccgccgtcggccgggccttcctcctccagggcggcgactgcgccgagagcttcaaggagttcaacgccaacaacatcagggacacttccgcgtcctcctgcaaatgtccgttgtgctcatgttcggagg

SEQ ID NO: 14217 - protein, 162 aa, Zea mays subsp. mays
  misc_feature (1)..(162): Ceres Seq. ID no. 2789960
  misc_feature (82)..(82): Xaa is any aa, unknown or other
RARPSPTPAGKSSLSPVHIPPQNGTRAITPSAAAQPGAPFAVVGAGRPRCARPRPRPRRPRGATAPSQWSVGSWRGRPAQQXPEYPDKADLEDVLRTVGTFPPIVFAGEARTLEERLAEAAVGRAFLLQGGDCAESFKEFNANNIRDTSASSCKCPLCSCSE

SEQ ID NO: 14218 - protein, 162 aa, Zea mays subsp. mays
  misc_feature (1)..(162): Ceres Seq. ID no. 2789961
  misc_feature (82)..(82): Xaa is any aa, unknown or other
GHDHLLHPRAKVPCPPYTFHPKMALAPSPPALPPNPALPLPWWGRAGRGALVRARARAVRAALRPRASGPSGAGGAARRSSXPSTRTRRTWKTCCGRWERSRPSSSPARRAPSRSASRRPPSAGPSSSRAATAPRASRSSTPTTSGTLPRPPANVRCAHVRR

SEQ ID NO: 14219 - protein, 162 aa, Zea mays subsp. mays
  misc_feature (1)..(162): Ceres Seq. ID no. 2789962
  misc_feature (82)..(82): Xaa is any aa, unknown or other
TGTTISYTRGQKFPVPRTHSTPKWHSRHHPQRCRPTRRSLCRGGGGPAAVRSSAPAPAPSARRYGPEPVVRRELAGPPGAAXARVPGQGGPGRRAADGGNVPAHRLRRRGAHPRGAPRGGRRRPGLPPPGRRLRRELQGVQRQQHQGHFRVLLQMSVVLMFG

SEQ ID NO: 14220 - DNA, 437 bp, Zea mays subsp. mays
  misc_feature (1)..(437): Ceres Seq. ID no. 2790081
aaccttaaaagtggaattggttccaatctcacccccccgcgcgctgcagtgtgcaggccctgccgtctgccgcaaaagagagcactaggaaaagaagtgctgcggcgttgcgaggtgggggacgaggacgaggccagaacgccccaaaaccaaaaacccccagaaccccgacctagggttacgccatcgccatgggatctgttgcctccgccgctgtgccaccacctcctcctcaatcagcgctgcctcaggcgggcgcgccgccctacgggcccgggctcgccgggatcctcccgcagatgtcgaagggggaggagaagaaggatgagaaggtggactacctcaacctcccctgccccgtgcccttcgaggagatccagcgcgaggctctcatgtctttgaagcctgaactttttgaaggattgaggtttgacttc

SEQ ID NO: 14221 - protein, 133 aa, Zea mays subsp. mays
  misc_feature (1)..(133): Ceres Seq. ID no. 2790082
NLKSGIGSNLTPPRAAVCRPCRLPQKRALGKEVLRRCEVGDEDEARTPQNQKPPEPRPRVTPSPWDLLPPPLCHHLLLNQRCLRRARRPTGPGSPGSSRRCRRGRRRRMRRWTTSTSPAPCPSRRSSARLSCL

SEQ ID NO: 14222 - protein, 82 aa, Zea mays subsp. mays
  misc_feature (1)..(82): Ceres Seq. ID no. 2790083
MGSVASAAVPPPPPQSALPQAGAPPYGPGLAGILPQMSKGEEKKDEKVDYLNLPCPVPFEEIQREALMSLKPELFEGLRFDF

SEQ ID NO: 14223 - DNA, 481 bp, Zea mays subsp. mays
  misc_feature (1)..(481): Ceres Seq. ID no. 2790117
aaggagcgtggggaggaagacttggctagccactagcactaggtgtgagagtttgagtcgtggtggtgtataaagcagtcgtcaagcacaagctcctcctctccctcgtctcgcctgagcagccaagcccatccatcgttccacccacctccgcgatacgatggccgtccctcctgcccgcctcgccgcgtcctcgctcccgctgctcctcgtctggctccagctccagctgctcctcgcgtccgcctgcgaccgctgcgtgcgccactccaaggccgcctactacacctccgcgctcaccctcgcgggcggctcctgtgggtacggcaccgacgccgcctccttgagcgccgggttcctcgccgccgccgccagccccgcgctgtaccgcgccggcgtcggctgcggcgcctgcttccaggtgcggtgcaaggacaagaagctgtgcgccgcggcgggcgccagggtggtggtcacggac

SEQ ID NO: 14224 - protein, 107 aa, Zea mays subsp. mays
  misc_feature (1)..(107): Ceres Seq. ID no. 2790118
MAVPPARLAASSLPLLLVWLQLQLLLASACDRCVRHSKAAYYTSALTLAGGSCGYGTDAASLSAGFLAAAASPALYRAGVGCGACFQVRCKDKKLCAAAGARVVVTD

SEQ ID NO: 14225 - DNA, 470 bp, Zea mays subsp. mays
  misc_feature (1)..(470): Ceres Seq. ID no. 2790787
cagggtaaatggaaggcacctatgattgacaacccagatttcaaggatgatccgtacatttatgcatttgacagcctgaaatacattggcattgagctgtggcaggttaaatcaggcactttgtttgacaacatcatcatcactgatgatcctgcgttggccaagacttttgcagaggagacatggggcaagcacaaggaggcagagaagactgctttcgatgaggctgagaaaaagaaggaagaagaggaagccgccaagggtggcgatgatgacgatgatgacctagaggatgaggcagacgatgacaaggcagacgatgacaaggccgactctgatgccgaggatgacaaggactctgaggagcacgacgagctctagatgatgagtatgatagaggtggccactgacattggtgccgttggcctggatttatcagctcttccattttgttctccttttctgttatc

SEQ ID NO: 14226 - protein, 126 aa, Zea mays subsp. mays
  misc_feature (1)..(126): Ceres Seq. ID no. 2790788
QGKWKAPMIDNPDFKDDPYIYAFDSLKYIGIELWQVKSGTLFDNIIITDDPALAKTFAEETWGKHKEAEKTAFDEAEKKKEEEEAAKGGDDDDDDLEDEADDDKADDDKADSDAEDDKDSEEHDEL

SEQ ID NO: 14227 - protein, 119 aa, Zea mays subsp. mays
  misc_feature (1)..(119): Ceres Seq. ID no. 2790789
MIDNPDFKDDPYIYAFDSLKYIGIELWQVKSGTLFDNIIITDDPALAKTFAEETWGKHKEAEKTAFDEAEKKKEEEEAAKGGDDDDDDLEDEADDDKADDDKADSDAEDDKDSEEHDEL

SEQ ID NO: 14228 - DNA, 442 bp, Zea mays subsp. mays
  misc_feature (1)..(442): Ceres Seq. ID no. 2817268
aatggcagaattccaattttctctccacaccaggccacgccacacacaggatagcgagcgggagcgacggcggcggcggaggagctagggttttgatccggcctcgccggctaggctgcgccgccccgacgccgaagccatggacagggagcttctagagacgtttgacgtggccaagaaggcggccgacgcggcggcaggggacggcaactcgccggaggctggccgctgcctcgacgcgctgcggcggctgcgcgacattcgcgtcaacaccgacatcctcgtctcgacgcaggttggcaaacgccttcgaccccttactaagcatcctcactcaggcattcaagcagttgctgcagacctttttgggtactggaaaaaggttgtccttgaagagtcaggaaagaaaaatggcggctcagagaatgaaagatcaagtgac

SEQ ID NO: 14229 - protein, 101 aa, Zea mays subsp. mays
  misc_feature (1)..(101): Ceres Seq. ID no. 2817269
MDRELLETFDVAKKAADAAAGDGNSPEAGRCLDALRRLRDIRVNTDILVSTQVGKRLRPLTKHPHSGIQAVAADLFGYWKKVVLEESGKKNGGSENERSSD

SEQ ID NO: 14230 - protein, 51 aa, Zea mays subsp. mays
  misc_feature (1)..(51): Ceres Seq. ID no. 2817270
WQNSNFLSTPGHATHRIASGSDGGGGGARVLIRPRRLGCAAPTPKPWTGSF

SEQ ID NO: 14231 - DNA, 488 bp, Zea mays subsp. mays
  misc_feature (1)..(488): Ceres Seq. ID no. 2817291
actacacgccaaccaaacgccacccgataataaaaacacgagcggcagcagcgatgcttcaggttcgcgcgtccccggccttcctcccctccacctcctccccgccatcgtcgtcgcaggcgccaccgcgttcccgctctcggggaagagccagcggcgccgcggcgggctggtcgcggtgccgcaggcgagccgcgtggctaggcggtccgtgatggcagcggcgggggcagccgcagccgccccggcggcggccaagctcgaggacgccgacgcgctcatcgactctgtggagaccttcatcttcgactgcgacggtgtgatctggaagggcgacaagctgatcgacggcgtgctggagactctcgacctgctccgatcaaagggcaagcggctggtgttcgtgaccaacaactccaccaagtcgaggaagcagtacggcaggaagttcgagacgctggggctgagcgtcgacgaggaagagatct

SEQ ID NO: 14232 - protein, 162 aa, Zea mays subsp. mays
  misc_feature (1)..(162): Ceres Seq. ID no. 2817292
LHANQTPPDNKNTSGSSDASGSRVPGLPPLHLLPAIVVAGATAFPLSGKSQRRRGGLVAVPQASRVARRSVMAAAGAAAAAPAAAKLEDADALIDSVETFIFDCDGVIWKGDKLIDGVLETLDLLRSKGKRLVFVTNNSTKSRKQYGRKFETLGLSVDEEEI

SEQ ID NO: 14233 - protein, 91 aa, Zea mays subsp. mays
  misc_feature (1)..(91): Ceres Seq. ID no. 2817293
MAAAGAAAAAPAAAKLEDADALIDSVETFIFDCDGVIWKGDKLIDGVLETLDLLRSKGKRLVFVTNNSTKSRKQYGRKFETLGLSVDEEEI

SEQ ID NO: 14234 - DNA, 467 bp, Zea mays subsp. mays
  misc_feature (1)..(467): Ceres Seq. ID no. 2870806
tacatagttaatgagagtcttgggattatcgccaatgcgcatgtggtctttgcagatcaggaacgtatgawagctgagagtccaccgtgcgttcaactggccaagctcttctctatagctgtcgatttcccaaagactggagtgccggctctgattccacatgagctacgtgtcaaggagtatcctgacttcatggagaaactcgacaaagtcacctatgaatcaaagggtgtgatcgggaagctctatagggaaataaagaagcacacaccacacataaagcacttcacgagggaagtggcaaggcggtcttatgacaccgatttgattgttgatggctatgaagattacattactgaggctatagagttcaaggaagagtacgatttcaggctgggtaatcttatggaccactatggcataaaaagtgaagctgagataataagtggatgtattctaaagatggc

SEQ ID NO: 14235 - protein, 155 aa, Zea mays subsp. mays
  misc_feature (1)..(155): Ceres Seq. ID no. 2870807
  misc_feature (24)..(24): Xaa is any aa, unknown or other
YIVNESLGIIANAHVVFADQERMXAESPPCVQLAKLFSIAVDFPKTGVPALIPHELRVKEYPDFMEKLDKVTYESKGVIGKLYREIKKHTPHIKHFTREVARRSYDTDLIVDGYEDYITEAIEFKEEYDFRLGNLMDHYGIKSEAEIISGCILKM

SEQ ID NO: 14236 - protein, 133 aa, Zea mays subsp. mays
  misc_feature (1)..(133): Ceres Seq. ID no. 2870808
  misc_feature (2)..(2): Xaa is any aa, unknown or other
MXAESPPCVQLAKLFSIAVDFPKTGVPALIPHELRVKEYPDFMEKLDKVTYESKGVIGKLYREIKKHTPHIKHFTREVARRSYDTDLIVDGYEDYITEAIEFKEEYDFRLGNLMDHYGIKSEAEIISGCILKM

SEQ ID NO: 14237 - protein, 91 aa, Zea mays subsp. mays
  misc_feature (1)..(91): Ceres Seq. ID no. 2870809
MEKLDKVTYESKGVIGKLYREIKKHTPHIKHFTREVARRSYDTDLIVDGYEDYITEAIEFKEEYDFRLGNLMDHYGIKSEAEIISGCILKM

SEQ ID NO: 14238 - DNA, 432 bp, Zea mays subsp. mays
  misc_feature (1)..(432): Ceres Seq. ID no. 2899074
acagatagaggaggtttgcccctgcacaccgctgcgctactgggaggagcacaagtgtatcgctgtggctgcggcgcccggcagtccgccacaagcacacgcgcacacaggggccaagcgcctacacctacaganganagacaaggtctgccgtccgcgcgtgcgcggaagangggacggaggaagaaggctgccagcaatcagagatggaggtggggttcttgggtctgggcatcatgggcaaggcaatggcgaccaacctcctccgccacggcttccgcgtcaccgtctggaacaggaccctcgccaagtgccaagagctcgccgcgctcggcgccaccgtcggggagacgcctgcctccgtcgtctccaagtgcagatacaccatcgccatgctctccgancccagcgccgccctatcagtcgtcttcg

SEQ ID NO: 14239 - protein, 144 aa, Zea mays subsp. mays
  misc_feature (1)..(144): Ceres Seq. ID no. 2899075
  misc_feature (45)..(45): Xaa is any aa, unknown or other
  misc_feature (46)..(46): Xaa is any aa, unknown or other
  misc_feature (58)..(58): Xaa is any aa, unknown or other
  misc_feature (135)..(135): Xaa is any aa, unknown or other
TDRGGLPLHTAALLGGAQVYRCGCGARQSATSTRAHRGQAPTPTXXRQGLPSARARKXGRRKKAASNQRWRWGSWVWASWARQWRPTSSATASASPSGTGPSPSAKSSPRSAPPSGRRLPPSSPSADTPSPCSPXPAPPYQSSS

SEQ ID NO: 14240 - protein, 143 aa, Zea mays subsp. mays
  misc_feature (1)..(143): Ceres Seq. ID no. 2899076
  misc_feature (45)..(45): Xaa is any aa, unknown or other
  misc_feature (46)..(46): Xaa is any aa, unknown or other
  misc_feature (58)..(58): Xaa is any aa, unknown or other
  misc_feature (135)..(135): Xaa is any aa, unknown or other
QIEEVCPCTPLRYWEEHKCIAVAAAPGSPPQAHAHTGAKRLHLQXXDKVCRPRVRGRXDGGRRLPAIRDGGGVLGSGHHGQGNGDQPPPPRLPRHRLEQDPRQVPRARRARRHRRGDACLRRLQVQIHHRHALRXQRRPISRL

SEQ ID NO: 14241 - protein, 75 aa, Zea mays subsp. mays
  misc_feature (1)..(75): Ceres Seq. ID no. 2899077
  misc_feature (66)..(66): Xaa is any aa, unknown or other
MEVGFLGLGIMGKAMATNLLRHGFRVTVWNRTLAKCQELAALGATVGETPASVVSKCRYTIAMLSXPSAALSVVF

SEQ ID NO: 14242 - DNA, 591 bp, Zea mays subsp. mays
  misc_feature (1)..(591): Ceres Seq. ID no. 2924086
  misc_feature (525)..(525): n is a, c, t, g, unknown, or other
  misc_feature (544)..(544): n is a, c, t, g, unknown, or other
  misc_feature (550)..(550): n is a, c, t, g, unknown, or other
aaagttgaaccataatctgaaggagaatgtaaccacatcaaagtcacccgttgttgggactggacatgaaaatcttttgaacattgtaccgtcaacagacaacctggaaacagcttcatcagcaacttctttatggcctacccaaacagatggacttttgcatcaaggttttcctactaacttcaatcaacaacaaatgttcaaagatgcacttccagatgtggaaattcaagaagtggatccgactaacaatgccttctttgggatcaacagtgatggtccattgggctttcctatggaaaccgaaggcttgttggtaagtgcaattaatcctgtgaagtgtcagcctaatttgtcaactgacgttgagatcaattaccgaatacaaaaggatgcccaacaagagatctcaacctccatggtttcacagtcattcggcagtctgatatagcttttaactcaattgattctgcaatcaacgatggtgtcatgttgaatagaaattcttgccccctgccctcgcanaaatgcggcattccaaagnctacangcgtggactgaggccgaccattgaatagcaggtctccgatt

SEQ ID NO: 14243 - protein, 149 aa, Zea mays subsp. mays
  misc_feature (1)..(149): Ceres Seq. ID no. 2924087
KLNHNLKENVTTSKSPVVGTGHENLLNIVPSTDNLETASSATSLWPTQTDGLLHQGFPTNFNQQQMFKDALPDVEIQEVDPTNNAFFGINSDGPLGFPMETEGLLVSAINPVKCQPNLSTDVEINYRIQKDAQQEISTSMVSQSFGSLI

SEQ ID NO: 14244 - protein, 84 aa, Zea mays subsp. mays
  misc_feature (1)..(84): Ceres Seq. ID no. 2924088
MFKDALPDVEIQEVDPTNNAFFGINSDGPLGFPMETEGLLVSAINPVKCQPNLSTDVEINYRIQKDAQQEISTSMVSQSFGSLI

SEQ ID NO: 14245 - DNA, 595 bp, Zea mays subsp. mays
  misc_feature (1)..(595): Ceres Seq. ID no. 2924141
aaaaaacaaagcaagtagctcctcacagtttgtgaaaaagatgatgacgtcattaccttacacttgccaatcacaaagtccttcaccgtacttcgacctgtctctttttaggtatgatgagaagctgatttcagcaattgatcggcatcggcattgcacagagcatccaataaaatttatgtcagtgaggcaaaatgttgtcaaatttaagatcaagccaggttcagattctggtgcttctgacagcagagcaaaaagaatctcgtccttcttgtttcacccatttttcccgcttgcactttcgattcagcagacttatatgcagccaactgttgtcaacatccatttcaggagatagaaaaggtataacggttgccttagttgtatttgtgtcattagtgaacttgcagcattgctggtggcaaagttttggccatatgtgctctagtagatatgctggaacaagatccattgctggcggtgaggatggctagttngatttntcttccaaaacaaagacaaaatgcaaatgggctatnttctctatngatgtgggctcatgggctcatcagtattatcattgtgcttcacagtg

SEQ ID NO: 14246 - protein, 118 aa, Zea mays subsp. mays
  misc_feature (1)..(118): Ceres Seq. ID no. 2924142
KNKASSSSQFVKKMMTSLPYTCQSQSPSPYFDLSLFRYDEKLISAIDRHRHCTEHPIKFMSVRQNVVKFKIKPGSDSGASDSRAKRISSFLFHPFFPLALSIQQTYMQPTVVNIHFRR

SEQ ID NO: 14247 - protein, 105 aa, Zea mays subsp. mays
  misc_feature (1)..(105): Ceres Seq. ID no. 2924143
MMTSLPYTCQSQSPSPYFDLSLFRYDEKLISAIDRHRHCTEHPIKFMSVRQNVVKFKIKPGSDSGASDSRAKRISSFLFHPFFPLALSIQQTYMQPTVVNIHFRR

SEQ ID NO: 14248 - protein, 104 aa, Zea mays subsp. mays
  misc_feature (1)..(104): Ceres Seq. ID no. 2924144
MTSLPYTCQSQSPSPYFDLSLFRYDEKLISAIDRHRHCTEHPIKFMSVRQNVVKFKIKPGSDSGASDSRAKRISSFLFHPFFPLALSIQQTYMQPTVVNIHFRR

SEQ ID NO: 14249 - DNA, 343 bp, Zea mays subsp. mays
  misc_feature (1)..(343): Ceres Seq. ID no. 2924301
gaacgtcgatggcgtcaacaggacctacacctggagctacactccttcctcgaaaggcaggcagaggagcgctttgaggcatgaatcgttttcggatagagggatggacggcgtgaactcgtggcgtttagagcatagctttcggggcatggatgaggagctggagggatactgggcggaagggtgtatcaacggaatactgaccatggatcacgactaggagaggtccttggcaatcaagaatctctgagagcaaatgctggccgggtcagggttcatcctatcacaaggtatagaaaatgctgaaagatagtgttgtggcttgtaagataaactgcatatg

SEQ ID NO: 14250 - protein, 72 aa, Zea mays subsp. mays
  misc_feature (1)..(72): Ceres Seq. ID no. 2924302
NVDGVNRTYTWSYTPSSKGRQRSALRHESFSDRGMDGVNSWRLEHSFRGMDEELEGYWAEGCINGILTMDHD

SEQ ID NO: 14251 - protein, 38 aa, Zea mays subsp. mays
  misc_feature (1)..(38): Ceres Seq. ID no. 2924303
MDGVNSWRLEHSFRGMDEELEGYWAEGCINGILTMDHD

SEQ ID NO: 14252 - DNA, 382 bp, Zea mays subsp. mays
  misc_feature (1)..(382): Ceres Seq. ID no. 3008573
aatgagtttatggtgaactgggatggtctgagaacaagggagaaggaacgtgtattagtacttgctgcaactaacaggccatttgatcttgatgaggctgttgttaggcggcttccaaggaggttgatggtgaatttgccagatgcatcaaataggagaaaaattcttagtgtaatactagccaaggaagatttggcagacgacgttgatctagaaactatagctaacctgacagaagggtactcaggcagtgatctcaagaatctgtgtgttactgctgcacaccgtcctattagggagattcttgaaaaggaaaagaaggagagagcttcagcagaagcngaaaatagatcattgcctccgtcacacactagcaatgatg

SEQ ID NO: 14253 - protein, 127 aa, Zea mays subsp. mays
  misc_feature (1)..(127): Ceres Seq. ID no. 3008574
  misc_feature (114)..(114): Xaa is any aa, unknown or other
NEFMVNWDGLRTREKERVLVLAATNRPFDLDEAVVRRLPRRLMVNLPDASNRRKILSVILAKEDLADDVDLETIANLTEGYSGSDLKNLCVTAAHRPIREILEKEKKERASAEXENRSLPPSHTSND

SEQ ID NO: 14254 - protein, 124 aa, Zea mays subsp. mays
  misc_feature (1)..(124): Ceres Seq. ID no. 3008575
  misc_feature (111)..(111): Xaa is any aa, unknown or other
MVNWDGLRTREKERVLVLAATNRPFDLDEAVVRRLPRRLMVNLPDASNRRKILSVILAKEDLADDVDLETIANLTEGYSGSDLKNLCVTAAHRPIREILEKEKKERASAEXENRSLPPSHTSND

SEQ ID NO: 14255 - protein, 85 aa, Zea mays subsp. mays
  misc_feature (1)..(85): Ceres Seq. ID no. 3008576
  misc_feature (72)..(72): Xaa is any aa, unknown or other
MVNLPDASNRRKILSVILAKEDLADDVDLETIANLTEGYSGSDLKNLCVTAAHRPIREILEKEKKERASAEXENRSLPPSHTSND

SEQ ID NO: 14256 - DNA, 457 bp, Zea mays subsp. mays
  misc_feature (1)..(457): Ceres Seq. ID no. 3011619
cacacctcctcaaccgccgcctccaagaccctagtaccgaaccccaacctcgtcccgctccggctcgtccgccacttcccggccatggccgccaccgccgcagacgagttcgtgaagggccgcgtcttccccaacggcgtcgccgtcatcacgctcgaccgacccaaggccctcaacgccatgaacctcgaaatggatgttagatacaaggcacttcttgatgaatgggaaacaaatccaagtgtcaagtgtattcttgtggaaagcagctcttctcgtgccttctcagcaggtattcacagtagagtactctttaatttgtaagatacatgagtatgcaaaaccttatatatgcttgatggatggagtgacaatgggatttggaattgggctatcagggcatggccgctaccgcattattacagagagaacactcctagccatgcctgaaaatggt

SEQ ID NO: 14257 - protein, 107 aa, Zea mays subsp. mays
  misc_feature (1)..(107): Ceres Seq. ID no. 3011620
HTSSTAASKTLVPNPNLVPLRLVRHFPAMAATAADEFVKGRVFPNGVAVITLDRPKALNAMNLEMDVRYKALLDEWETNPSVKCILVESSSSRAFSAGIHSRVLFNL

SEQ ID NO: 14258 - protein, 87 aa, Zea mays subsp. mays
  misc_feature (1)..(87): Ceres Seq. ID no. 3011621
MLDTRHFLMNGKQIQVSSVFLWKAALLVPSQQVFTVEYSLICKIHEYAKPYICLMDGVTMGFGIGLSGHGRYRIITERTLLAMPENG

SEQ ID NO: 14259 - protein, 79 aa, Zea mays subsp. mays
  misc_feature (1)..(79): Ceres Seq. ID no. 3011622
MAATAADEFVKGRVFPNGVAVITLDRPKALNAMNLEMDVRYKALLDEWETNPSVKCILVESSSSRAFSAGIHSRVLFNL

SEQ ID NO: 14260 - DNA, 401 bp, Zea mays subsp. mays
  misc_feature (1)..(401): Ceres Seq. ID no. 3238333
acagcatgtgctcactcttctcgaattcatcctcccgcaggacttcctgaacatgttcttcagggatcagtacaggccgatccccaacgtgtacaacctcgtgctggccatgctctggaggcaccccgagaacgtgcagctggagaaggtgaaggtcgtgcactactgcgcggcggggtccaagccgtggaggttcacgggcaaggaggcgaacatggacagggaggacatcaacgccctggtgaagaagtggtgggacatctacaacgacgagacgctggacttgaagggcctgccctcgctctcgcccgacgacgacgacnaggtggaggcggtggccaagaagccgcttcgcgcggcctggcggaggcggcacggtcaagtacgtcaccgcgccctcg

SEQ ID NO: 14261 - protein, 133 aa, Zea mays subsp. mays
  misc_feature (1)..(133): Ceres Seq. ID no. 3238334
  misc_feature (108)..(108): Xaa is any aa, unknown or other
QHVLTLLEFILPQDFLNMFFRDQYRPIPNVYNLVLAMLWRHPENVQLEKVKVVHYCAAGSKPWRFTGKEANMDREDINALVKKWWDIYNDETLDLKGLPSLSPDDDDXVEAVAKKPLRAAWRRRHGQVRHRAL

SEQ ID NO: 14262 - protein, 133 aa, Zea mays subsp. mays
  misc_feature (1)..(133): Ceres Seq. ID no. 3238335
  misc_feature (108)..(108): Xaa is any aa, unknown or other
TACAHSSRIHPPAGLPEHVLQGSVQADPQRVQPRAGHALEAPRERAAGEGEGRALLRGGVQAVEVHGQGGEHGQGGHQRPGEEVVGHLQRRDAGLEGPALALARRRRXGGGGGQEAASRGLAEAARSSTSPRP

SEQ ID NO: 14263 - protein, 116 aa, Zea mays subsp. mays
  misc_feature (1)..(116): Ceres Seq. ID no. 3238336
  misc_feature (91)..(91): Xaa is any aa, unknown or other
MFFRDQYRPIPNVYNLVLAMLWRHPENVQLEKVKVVHYCAAGSKPWRFTGKEANMDREDINALVKKWWDIYNDETLDLKGLPSLSPDDDDXVEAVAKKPLRAAWRRRHGQVRHRAL

SEQ ID NO: 14264 - DNA, 586 bp, Zea mays subsp. mays
  misc_feature (1)..(586): Ceres Seq. ID no. 3296860
  misc_feature (580)..(580): n is a, c, t, g, unknown, or other
gaagcttctttggtacttgccgatccatgtgatgatcaagaaatgattacagatgaggaaaagtctgttttccgtaggattggtttacggcttaaggcatatttgccacttggagttcgtggtgtttttgatggtgtaattgaaaatatgcacttgcattggaagcacagggaagttgttaaactawtttcaaagcanaaraccttgtcattcgttgaaragacggcacggyttcttgcatacragagtggtggtatactagttgcaattgaaagagttccaaagggttatgcactcattttttaccgtgggaagaactataggagacctattaacataaggccaagaaacctcttaacaaaagctaaggcattgaascgkgcggttgctatgcaacgtcatgaggcccttagtcagcatatagatcaactggaaagcaatataaagcaratgaagttggatttgggtattgaggactatgaggaacaagatgaggatagctcagattcagaaaatgaatwtgacaacgcagtcacctytgstagctwtgacgaggatcaagacgattttgacgaatcanctgatg

SEQ ID NO: 14265 - protein, 195 aa, Zea mays subsp. mays
  misc_feature (1)..(195): Ceres Seq. ID no. 3296861
  misc_feature (63)..(63): Xaa is any aa, unknown or other
  misc_feature (66)..(66): Xaa is any aa, unknown or other
  misc_feature (67)..(67): Xaa is any aa, unknown or other
  misc_feature (74)..(74): Xaa is any aa, unknown or other
  misc_feature (78)..(78): Xaa is any aa, unknown or other
  misc_feature (82)..(82): Xaa is any aa, unknown or other
  misc_feature (126)..(126): Xaa is any aa, unknown or other
  misc_feature (127)..(127): Xaa is any aa, unknown or other
  misc_feature (150)..(150): Xaa is any aa, unknown or other
  misc_feature (174)..(174): Xaa is any aa, unknown or other
  misc_feature (180)..(180): Xaa is any aa, unknown or other
  misc_feature (181)..(181): Xaa is any aa, unknown or other
  misc_feature (183)..(183): Xaa is any aa, unknown or other
  misc_feature (194)..(194): Xaa is any aa, unknown or other
EASLVLADPCDDQEMITDEEKSVFRRIGLRLKAYLPLGVRGVFDGVIENMHLHWKHREVVKLXSKXXTLSFVEXTARXLAYXSGGILVAIERVPKGYALIFYRGKNYRRPINIRPRNLLTKAKALXXAVAMQRHEALSQHIDQLESNIKXMKLDLGIEDYEEQDEDSSDSENEXDNAVTXXSXDEDQDDFDESXD

SEQ ID NO: 14266 - protein, 181 aa, Zea mays subsp. mays
  misc_feature (1)..(181): Ceres Seq. ID no. 3296862
  misc_feature (49)..(49): Xaa is any aa, unknown or other
  misc_feature (52)..(52): Xaa is any aa, unknown or other
  misc_feature (53)..(53): Xaa is any aa, unknown or other
  misc_feature (60)..(60): Xaa is any aa, unknown or other
  misc_feature (64)..(64): Xaa is any aa, unknown or other
  misc_feature (68)..(68): Xaa is any aa, unknown or other
  misc_feature (112)..(112): Xaa is any aa, unknown or other
  misc_feature (113)..(113): Xaa is any aa, unknown or other
  misc_feature (136)..(136): Xaa is any aa, unknown or other
  misc_feature (160)..(160): Xaa is any aa, unknown or other
  misc_feature (166)..(166): Xaa is any aa, unknown or other
  misc_feature (167)..(167): Xaa is any aa, unknown or other
  misc_feature (169)..(169): Xaa is any aa, unknown or other
  misc_feature (180)..(180): Xaa is any aa, unknown or other
MITDEEKSVFRRIGLRLKAYLPLGVRGVFDGVIENMHLHWKHREVVKLXSKXXTLSFVEXTARXLAYXSGGILVAIERVPKGYALIFYRGKNYRRPINIRPRNLLTKAKALXXAVAMQRHEALSQHIDQLESNIKXMKLDLGIEDYEEQDEDSSDSENEXDNAVTXXSXDEDQDDFDESXD

SEQ ID NO: 14267 - protein, 146 aa, Zea mays subsp. mays
  misc_feature (1)..(146): Ceres Seq. ID no. 3296863
  misc_feature (14)..(14): Xaa is any aa, unknown or other
  misc_feature (17)..(17): Xaa is any aa, unknown or other
  misc_feature (18)..(18): Xaa is any aa, unknown or other
  misc_feature (25)..(25): Xaa is any aa, unknown or other
  misc_feature (29)..(29): Xaa is any aa, unknown or other
  misc_feature (33)..(33): Xaa is any aa, unknown or other
  misc_feature (77)..(77): Xaa is any aa, unknown or other
  misc_feature (78)..(78): Xaa is any aa, unknown or other
  misc_feature (101)..(101): Xaa is any aa, unknown or other
  misc_feature (125)..(125): Xaa is any aa, unknown or other
  misc_feature (131)..(131): Xaa is any aa, unknown or other
  misc_feature (132)..(132): Xaa is any aa, unknown or other
  misc_feature (134)..(134): Xaa is any aa, unknown or other
  misc_feature (145)..(145): Xaa is any aa, unknown or other
MHLHWKHREVVKLXSKXXTLSFVEXTARXLAYXSGGILVAIERVPKGYALIFYRGKNYRRPINIRPRNLLTKAKALXXAVAMQRHEALSQHIDQLESNIKXMKLDLGIEDYEEQDEDSSDSENEXDNAVTXXSXDEDQDDFDESXD

SEQ ID NO: 14268 - DNA, 555 bp, Zea mays subsp. mays
  misc_feature (1)..(555): Ceres Seq. ID no. 3315214
gctcattcacggcaaattaagcgagcgccggccgaggcagacacaaccagcagcaacttgcatcggcacggacgaccgattgagagcctcggcgttcgtacgccacgccaccaagagactctgtgcaaaggagcaagaatgtatccggccaagcccgccgcctccgccagcgagccggtggtcggcatccccatcagcagccccggcgcggttgcggtcgggccggtcgtcggcaagtggtcctccggcctctgcgcctgctccgacgactgcggcctctgctgcctgacgtgctggtgcccgtgcatcacgttcggccgcgtcgcggagatcgtggaccgcggcgcgacgtcgttcggcgtggcggggaccatctacacgctgctggcctgcttcacgggctgccactggatctactcctgcacgtaccgctccaggatgcgcgcgcagctcggcctccccgaagcctgctgctgcgactgctgcgtccacttctgctgcgagccctgcgcgctctcccagcagtacagggagctcaaggcccgcggattcgac

SEQ ID NO: 14269 - protein, 185 aa, Zea mays subsp. mays
  misc_feature (1)..(185): Ceres Seq. ID no. 3315215
AHSRQIKRAPAEADTTSSNLHRHGRPIESLGVRTPRHQETLCKGARMYPAKPAASASEPVVGIPISSPGAVAVGPVVGKWSSGLCACSDDCGLCCLTCWCPCITFGRVAEIVDRGATSFGVAGTIYTLLACFTGCHWIYSCTYRSRMRAQLGLPEACCCDCCVHFCCEPCALSQQYRELKARGFD

SEQ ID NO: 14270 - protein, 139 aa, Zea mays subsp. mays
  misc_feature (1)..(139): Ceres Seq. ID no. 3315216
MYPAKPAASASEPVVGIPISSPGAVAVGPVVGKWSSGLCACSDDCGLCCLTCWCPCITFGRVAEIVDRGATSFGVAGTIYTLLACFTGCHWIYSCTYRSRMRAQLGLPEACCCDCCVHFCCEPCALSQQYRELKARGFD

SEQ ID NO: 14271 - protein, 95 aa, Zea mays subsp. mays
  misc_feature (1)..(95): Ceres Seq. ID no. 3315217
LIHGKLSERRPRQTQPAATCIGTDDRLRASAFVRHATKRLCAKEQECIRPSPPPPPASRWSASPSAAPARLRSGRSSASGPPASAPAPTTAASAA

SEQ ID NO: 14272 - DNA, 383 bp, Zea mays subsp. mays
  misc_feature (1)..(383): Ceres Seq. ID no. 3477243
tttttataacatatacaatggktgatggttgggctggggtasctggtgagatattgagattgaagccactagtgatcttccacctgaaaaactttttcttggtcaagactgagaaagacagggaagaggcaatggaccctggaagtattggttttgactcaagcgaacctcaaattcagctgtatttcttacttggtcttgtctatgcggcagtgacaccatttttgctcccttttgtattgatattctttgggtttgcgtacgttgtataccgccaccagataataaatgtgtataatcaagaatacgagagtgcagcagcattttggccaagtgttcatggacgcataatcacagcgttgattgtatcacagctgcttctc

SEQ ID NO: 14273 - protein, 127 aa, Zea mays subsp. mays
  misc_feature (1)..(127): Ceres Seq. ID no. 3477244
  misc_feature (7)..(7): Xaa is any aa, unknown or other
  misc_feature (14)..(14): Xaa is any aa, unknown or other
FITYTMXDGWAGVXGEILRLKPLVIFHLKNFFLVKTEKDREEAMDPGSIGFDSSEPQIQLYFLLGLVYAAVTPFLLPFVLIFFGFAYVVYRHQIINVYNQEYESAAAFWPSVHGRIITALIVSQLLL

SEQ ID NO: 14274 - protein, 122 aa, Zea mays subsp. mays
  misc_feature (1)..(122): Ceres Seq. ID no. 3477245
  misc_feature (2)..(2): Xaa is any aa, unknown or other
  misc_feature (9)..(9): Xaa is any aa, unknown or other
MXDGWAGVXGEILRLKPLVIFHLKNFFLVKTEKDREEAMDPGSIGFDSSEPQIQLYFLLGLVYAAVTPFLLPFVLIFFGFAYVVYRHQIINVYNQEYESAAAFWPSVHGRIITALIVSQLLL

SEQ ID NO: 14275 - protein, 84 aa, Zea mays subsp. mays
  misc_feature (1)..(84): Ceres Seq. ID no. 3477246
MDPGSIGFDSSEPQIQLYFLLGLVYAAVTPFLLPFVLIFFGFAYVVYRHQIINVYNQEYESAAAFWPSVHGRIITALIVSQLLL

SEQ ID NO: 14276 - DNA, 437 bp, Zea mays subsp. mays
  misc_feature (1)..(437): Ceres Seq. ID no. 3477340
gtggctctcaacttggatttcgatcaagtcaaggagtttgtcaaggascggctgggggttgaggttgagatgggtggctgcaaggctccaatcacgaccttcatcgtcgagccatttgtgccacatgatcaagagtactacctttcgattgtctcagagaggttgggcagcaccatcagcttctcagagtgtggagggattgagatcgaggagaactgggacaaggttaagactattttccttcctactgagaagccaatgacgtctgattcatgtgctcctttgattgcaacccttccattggaggcacscggaaaaawtggtgacttcattaaaggagtgtttgccgtcttcctagacttggatttctcattttyttgaratgaatccgttcaccatggtcaatggggagccatatcctctggacatgagaggag

SEQ ID NO: 14277 - protein, 126 aa, Zea mays subsp. mays
  misc_feature (1)..(126): Ceres Seq. ID no. 3477341
  misc_feature (16)..(16): Xaa is any aa, unknown or other
  misc_feature (104)..(104): Xaa is any aa, unknown or other
  misc_feature (107)..(107): Xaa is any aa, unknown or other
  misc_feature (126)..(126): Xaa is any aa, unknown or other
VALNLDFDQVKEFVKXRLGVEVEMGGCKAPITTFIVEPFVPHDQEYYLSIVSERLGSTISFSECGGIEIEENWDKVKTIFLPTEKPMTSDSCAPLIATLPLEAXGKXGDFIKGVFAVFLDLDFSFX

SEQ ID NO: 14278 - protein, 103 aa, Zea mays subsp. mays
  misc_feature (1)..(103): Ceres Seq. ID no. 3477342
  misc_feature (81)..(81): Xaa is any aa, unknown or other
  misc_feature (84)..(84): Xaa is any aa, unknown or other
  misc_feature (103)..(103): Xaa is any aa, unknown or other
MGGCKAPITTFIVEPFVPHDQEYYLSIVSERLGSTISFSECGGIEIEENWDKVKTIFLPTEKPMTSDSCAPLIATLPLEAXGKXGDFIKGVFAVFLDLDFSFX

SEQ ID NO: 14279 - protein, 86 aa, Zea mays subsp. mays
  misc_feature (1)..(86): Ceres Seq. ID no. 3477343
  misc_feature (16)..(16): Xaa is any aa, unknown or other
WLSTWISIKSRSLSRXGWGLRLRWVAARLQSRPSSSSHLCHMIKSTTFRLSQRGWAAPSASQSVEGLRSRRTGTRLRLFSFLLRSQ

SEQ ID NO: 14280 - DNA, 496 bp, Zea mays subsp. mays
  misc_feature (1)..(496): Ceres Seq. ID no. 3477512
agcgtcgccctcgtcgacgaggtcaccgtmrtccgcgacagggtcaccagggtctcgcgaggctgctgcttcgtgatctgcccatcaagggaggaggctgataaggctgtgactacataccacaacaagcgcacactacctggggcctcaagtccattgcaagtaaaatatgccgatggggagttggaaagattggagcacaagctcttcgttggaatgctccccaaaaatgtaacacatgctgaaatgacggatttattttcaaaatatggaaatataaaggatttacagattctgagaggctctcagcaaacgagcaaagctggttgtgcctttctaaaatatgaaacaaaagagcaagctgtggctgctatagaagctctaaatggaacacacaaaatagagggttcaagtgttcccttggttgtcaaatgggctgacactgaaaaggaaaggcaggctcgaaaagcacaaaaagctcaanttccagtcttct

SEQ ID NO: 14281 - protein, 165 aa, Zea mays subsp. mays
  misc_feature (1)..(165): Ceres Seq. ID no. 3477513
  misc_feature (10)..(10): Xaa is any aa, unknown or other
  misc_feature (11)..(11): Xaa is any aa, unknown or other
  misc_feature (162)..(162): Xaa is any aa, unknown or other
SVALVDEVTXXRDRVTRVSRGCCFVICPSREEADKAVTTYHNKRTLPGASSPLQVKYADGELERLEHKLFVGMLPKNVTHAEMTDLFSKYGNIKDLQILRGSQQTSKAGCAFLKYETKEQAVAAIEALNGTHKIEGSSVPLVVKWADTEKERQARKAQKAQXPVF

SEQ ID NO: 14282 - protein, 93 aa, Zea mays subsp. mays
  misc_feature (1)..(93): Ceres Seq. ID no. 3477514
  misc_feature (90)..(90): Xaa is any aa, unknown or other
MLPKNVTHAEMTDLFSKYGNIKDLQILRGSQQTSKAGCAFLKYETKEQAVAAIEALNGTHKIEGSSVPLVVKWADTEKERQARKAQKAQXPVF

SEQ ID NO: 14283 - protein, 83 aa, Zea mays subsp. mays
  misc_feature (1)..(83): Ceres Seq. ID no. 3477515
  misc_feature (80)..(80): Xaa is any aa, unknown or other
MTDLFSKYGNIKDLQILRGSQQTSKAGCAFLKYETKEQAVAAIEALNGTHKIEGSSVPLVVKWADTEKERQARKAQKAQXPVF

SEQ ID NO: 14284 - DNA, 454 bp, Zea mays subsp. mays
  misc_feature (1)..(454): Ceres Seq. ID no. 3603843
agagagtcttactttagaarkgaaactgacagctggaccmcmbaaagcagcactagagcatctgaggaagaagattgaaatatcaacagagaaaatacgtttagctaaggtgaaagaggaacatgcaaaaaagacttgggaagttgctgcmcaakttgttaargacgaakaggatgctaagcagaaattatgtgatgacctaaaccatstaktccaggagagtgctgctycccaatatgcawgattkgaggagctgaagaaacgttkagaatctctaaatcccataagggattctgttattgtgtcaggkgtttatactgcacarcatgctactctgaattcagtacctcascaaccaactgcacaaaatcctgcagatgtaactggccgtcagaatattgccacaaagcctgcttctatgcaacagcagcctatacctgcggaggcagaaaag

SEQ ID NO: 14285 - protein, 151 aa, Zea mays subsp. mays
  misc_feature (1)..(151): Ceres Seq. ID no. 3603844
  misc_feature (7)..(7): Xaa is any aa, unknown or other
  misc_feature (13)..(13): Xaa is any aa, unknown or other
  misc_feature (14)..(14): Xaa is any aa, unknown or other
  misc_feature (50)..(50): Xaa is any aa, unknown or other
  misc_feature (52)..(52): Xaa is any aa, unknown or other
  misc_feature (54)..(54): Xaa is any aa, unknown or other
  misc_feature (57)..(57): Xaa is any aa, unknown or other
  misc_feature (70)..(70): Xaa is any aa, unknown or other
  misc_feature (71)..(71): Xaa is any aa, unknown or other
  misc_feature (77)..(77): Xaa is any aa, unknown or other
  misc_feature (81)..(81): Xaa is any aa, unknown or other
  misc_feature (82)..(82): Xaa is any aa, unknown or other
  misc_feature (89)..(89): Xaa is any aa, unknown or other
  misc_feature (103)..(103): Xaa is any aa, unknown or other
  misc_feature (108)..(108): Xaa is any aa, unknown or other
  misc_feature (117)..(117): Xaa is any aa, unknown or other
ESLTLEXKLTAGXXKAALEHLRKKIEISTEKIRLAKVKEEHAKKTWEVAXQXVXDEXDAKQKLCDDLNHXXQESAAXQYAXXEELKKRXESLNPIRDSVIVSXVYTAXHATLNSVPXQPTAQNPADVTGRQNIATKPASMQQQPIPAEAEK

SEQ ID NO: 14286 - DNA, 520 bp, Zea mays subsp. mays
  misc_feature (1)..(520): Ceres Seq. ID no. 3604118
gtgttcatgcaatggaagcagkcatggcttgttgggagctcsaacaaactttacaaagccttacaggtgcatctcctggtgagggcactggggcaactatgtctgacgatgaagacaatcaggtggacagtgagagcaacatgtttgatggaaatgaggggtcagatggaatgggatttggcccattaatgttgactgagggtgagagatccttagttgagcgtgtccggcaggagctaaagcatgagcttaagcaggggtacagagacaaacttgtggatattcgggaagagatattgcggaagcgaagagctgggaaactccctggcgacactgcttctaccttaaaagcctggtggcaagctcattctaagtggccgtacccaaccgaggaagacaaggctcgactggtgcaggaaacagggctacaactgaagcagatcaataactggtttatcaaccagcgtaagcggaactggcacaacaattcggcgtcatcctygtcggacaaaagcaagag

SEQ ID NO: 14287 - protein, 172 aa, Zea mays subsp. mays
  misc_feature (1)..(172): Ceres Seq. ID no. 3604119
  misc_feature (7)..(7): Xaa is any aa, unknown or other
  misc_feature (14)..(14): Xaa is any aa, unknown or other
  misc_feature (167)..(167): Xaa is any aa, unknown or other
VHAMEAXMACWELXQTLQSLTGASPGEGTGATMSDDEDNQVDSESNMFDGNEGSDGMGFGPLMLTEGERSLVERVRQELKHELKQGYRDKLVDIREEILRKRRAGKLPGDTASTLKAWWQAHSKWPYPTEEDKARLVQETGLQLKQINNWFINQRKRNWHNNSASSXSDKSK

SEQ ID NO: 14288 - protein, 169 aa, Zea mays subsp. mays
  misc_feature (1)..(169): Ceres Seq. ID no. 3604120
  misc_feature (4)..(4): Xaa is any aa, unknown or other
  misc_feature (11)..(11): Xaa is any aa, unknown or other
  misc_feature (164)..(164): Xaa is any aa, unknown or other
MEAXMACWELXQTLQSLTGASPGEGTGATMSDDEDNQVDSESNMFDGNEGSDGMGFGPLMLTEGERSLVERVRQELKHELKQGYRDKLVDIREEILRKRRAGKLPGDTASTLKAWWQAHSKWPYPTEEDKARLVQETGLQLKQINNWFINQRKRNWHNNSASSXSDKSK

SEQ ID NO: 14289 - protein, 165 aa, Zea mays subsp. mays
  misc_feature (1)..(165): Ceres Seq. ID no. 3604121
  misc_feature (7)..(7): Xaa is any aa, unknown or other
  misc_feature (160)..(160): Xaa is any aa, unknown or other
MACWELXQTLQSLTGASPGEGTGATMSDDEDNQVDSESNMFDGNEGSDGMGFGPLMLTEGERSLVERVRQELKHELKQGYRDKLVDIREEILRKRRAGKLPGDTASTLKAWWQAHSKWPYPTEEDKARLVQETGLQLKQINNWFINQRKRNWHNNSASSXSDKSK

SEQ ID NO: 14290 - DNA, 610 bp, Zea mays subsp. mays
  misc_feature (1)..(610): Ceres Seq. ID no. 3609410
ttgacgtggttacgttgtgtgcgtgcgttcagaggtgtggctgtgccggaccagtcaagcccatatggtgtccgactgctgatcaaggactacccctatgccgttgacgggctcgtcatctggtgggcgatcgagcggtgggtcaaggagtacctggacatctactaccctaacgacggcgagctccagcgtgacgtggagctgcaggcgtggtggaaggaggtgcgtgaggaggcgcacggcgacctcaaggaccgagactggtggcccaggatggacaccgtccagcagctggctagggcgtgcacgaccatcatctgggtggcatccgcgctgcacgcggctgtcaactttgggcagtacccatacgccgggtacctcccgaaccggccgacggtcagccggcgcccgatgccggagccaggcagccacgactacaagaagctgggagcggggcaraaggaggcggacatggtgttcatccgcaccatcaccagccagttccagaccatcctgggcatctcgctcatcgaagatcctctccaagcactcctncgacgaggtgtacctcggccagcgtgacgagcctgagcgctggacgtcaracgcc

SEQ ID NO: 14291 - protein, 193 aa, Zea mays subsp. mays
  misc_feature (1)..(193): Ceres Seq. ID no. 3609411
  misc_feature (153)..(153): Xaa is any aa, unknown or other
  misc_feature (185)..(185): Xaa is any aa, unknown or other
LTWLRCVRAFRGVAVPDQSSPYGVRLLIKDYPYAVDGLVIWWAIERWVKEYLDIYYPNDGELQRDVELQAWWKEVREEAHGDLKDRDWWPRMDTVQQLARACTTIIWVASALHAAVNFGQYPYAGYLPNRPTVSRRPMPEPGSHDYKKLGAGXKEADMVFIRTITSQFQTILGISLIEDPLQALXRRGVPRPA

SEQ ID NO: 14292 - protein, 171 aa, Zea mays subsp. mays
  misc_feature (1)..(171): Ceres Seq. ID no. 3609412
  misc_feature (121)..(121): Xaa is any aa, unknown or other
  misc_feature (153)..(153): Xaa is any aa, unknown or other
  misc_feature (170)..(170): Xaa is any aa, unknown or other
MPLTGSSSGGRSSGGSRSTWTSTTLTTASSSVTWSCRRGGRRCVRRRTATSRTETGGPGWTPSSSWLGRARPSSGWHPRCTRLSTLGSTHTPGTSRTGRRSAGARCRSQAATTTRSWERGXRRRTWCSSAPSPASSRPSWASRSSKILSKHSXDEVYLGQRDEPERWTSXA

SEQ ID NO: 14293 - protein, 102 aa, Zea mays subsp. mays
  misc_feature (1)..(102): Ceres Seq. ID no. 3609413
  misc_feature (62)..(62): Xaa is any aa, unknown or other
  misc_feature (94)..(94): Xaa is any aa, unknown or other
MDTVQQLARACTTIIWVASALHAAVNFGQYPYAGYLPNRPTVSRRPMPEPGSHDYKKLGAGXKEADMVFIRTITSQFQTILGISLIEDPLQALXRRGVPRPA

SEQ ID NO: 14294 - DNA, 551 bp, Zea mays subsp. mays
  misc_feature (1)..(551): Ceres Seq. ID no. 3623404
attttaagcctggagaagccatcctggattggctttcaaggaaacgggtggctataggtacagctcgtggactggagtatctgcatgaacactgcaaccccaagatcatacaccgtgatgttaaagctgcaaatgtattgcttgacgaggatttcgagcctgttgtcggcgattttggcctagcaaagctagtagatgtgcagaagacgtctgtgacaacacaagtccgcggaaccatgggtcacatagcacccgagtacctgtccacagggaagtcttccgagaggacagatgtttttggatatgggatcatgcttcttgaacttgtgactggtcaacgggctattgacttctcacggctggaagacgaagatgatgtgctattgcttgatcatgtaaagaagctacagagagaaggggagctggactccatcgtggacagcaaccttaaccagaattatgacggcgaggatatcgagatgataatacagatagcgctgctctgcactcaggcatcacctgaggaccgtccatcgatgtctgaagtggtt

SEQ ID NO: 14295 - protein, 183 aa, Zea mays subsp. mays
  misc_feature (1)..(183): Ceres Seq. ID no. 3623405
FKPGEAILDWLSRKRVAIGTARGLEYLHEHCNPKIIHRDVKAANVLLDEDFEPVVGDFGLAKLVDVQKTSVTTQVRGTMGHIAPEYLSTGKSSERTDVFGYGIMLLELVTGQRAIDFSRLEDEDDVLLLDHVKKLQREGELDSIVDSNLNQNYDGEDIEMIIQIALLCTQASPEDRPSMSEVV

SEQ ID NO: 14296 - protein, 105 aa, Zea mays subsp. mays
  misc_feature (1)..(105): Ceres Seq. ID no. 3623406
MGHIAPEYLSTGKSSERTDVFGYGIMLLELVTGQRAIDFSRLEDEDDVLLLDHVKKLQREGELDSIVDSNLNQNYDGEDIEMIIQIALLCTQASPEDRPSMSEVV

SEQ ID NO: 14297 - DNA, 600 bp, Zea mays subsp. mays
  misc_feature (1)..(600): Ceres Seq. ID no. 3623648
ttggttccgtttacaagggacagctcaggaatggtacagttattgctgtcaaggtcctttcgtcggagtcaagacaaggagtaagggagtttctgaatgaactcgtggcaatttccgacatctcacatgataatcttgtgaaactttatgggtattgtgcggaaggagaccaaagaatccttgtttacaatcatcttgaaaataatagccttgcacaaacacttctaggctccagccacagcaatatccagtttgattggaaaacacgagtaaatatttgccttggcattgcacggggattagcatacctccatcatggtgtcagtccccacattgttcatcgagacattaaagcaagcaatatacttcttgatagggaccttaccccaaaaatctctgattttggtctagcaaagcttcttccaccaaacgcaacacatgttagcacaagagttgcaggaacactgggttatttggctcctgagtatgctattcgaggacaggtgacacgcaaatcagatgtgtacagctttggcgtgctgcttctggaaattggttgcgggagatcaaacagcgatacaagattagcatacggagatc

SEQ ID NO: 14298 - protein, 199 aa, Zea mays subsp. mays
  misc_feature (1)..(199): Ceres Seq. ID no. 3623649
GSVYKGQLRNGTVIAVKVLSSESRQGVREFLNELVAISDISHDNLVKLYGYCAEGDQRILVYNHLENNSLAQTLLGSSHSNIQFDWKTRVNICLGIARGLAYLHHGVSPHIVHRDIKASNILLDRDLTPKISDFGLAKLLPPNATHVSTRVAGTLGYLAPEYAIRGQVTRKSDVYSFGVLLLEIGCGRSNSDTRLAYGD

SEQ ID NO: 14299 - DNA, 510 bp, Zea mays subsp. mays
  misc_feature (1)..(510): Ceres Seq. ID no. 3623923
aatatggtggatattcgkgrtgttgctgatgctcttcttctgacttacgaaaagccarargcgtctggacgatacatctgcagttcacatgcaataaaaatttctgatatgataaacatactgaagaccatgtatccgtcttacccttatcccaaaaattttgtggaagatgatgtcaactctgtatacagctctgagaaactgcagaagctggggtggaccttcaagcctatagaggaatccctccgtgacactgttgaatcctacaaggcatttggcatcctgaattgaacatccaactaggactgtttccatctgctgttgcctccgaactcctcctgaataatgtaggcgcagttaaacagcagcagcactgccgatctctttatttttcaatattgktatctagtggttcaggaccaaataagtaggccaggtgctgactgttgtatggtttgkggcctattgkcgttgctaaaaactagaaatgcgcgtmctaatgttgcattg

SEQ ID NO: 14300 - protein, 96 aa, Zea mays subsp. mays
  misc_feature (1)..(96): Ceres Seq. ID no. 3623924
  misc_feature (6)..(6): Xaa is any aa, unknown or other
  misc_feature (7)..(7): Xaa is any aa, unknown or other
  misc_feature (20)..(20): Xaa is any aa, unknown or other
NMVDIXXVADALLLTYEKPXASGRYICSSHAIKISDMINILKTMYPSYPYPKNFVEDDVNSVYSSEKLQKLGWTFKPIEESLRDTVESYKAFGILN

SEQ ID NO: 14301 - protein, 95 aa, Zea mays subsp. mays
  misc_feature (1)..(95): Ceres Seq. ID no. 3623925
  misc_feature (5)..(5): Xaa is any aa, unknown or other
  misc_feature (6)..(6): Xaa is any aa, unknown or other
  misc_feature (19)..(19): Xaa is any aa, unknown or other
MVDIXXVADALLLTYEKPXASGRYICSSHAIKISDMINILKTMYPSYPYPKNFVEDDVNSVYSSEKLQKLGWTFKPIEESLRDTVESYKAFGILN

SEQ ID NO: 14302 - protein, 60 aa, Zea mays subsp. mays
  misc_feature (1)..(60): Ceres Seq. ID no. 3623926
MINILKTMYPSYPYPKNFVEDDVNSVYSSEKLQKLGWTFKPIEESLRDTVESYKAFGILN

SEQ ID NO: 14303 - DNA, 520 bp, Zea mays subsp. mays
  misc_feature (1)..(520): Ceres Seq. ID no. 3624558
gaacttctcacgttcatttctacacatccctagctctgtcgttccgtcgttgacgatggcgtttcgggtgcgaagccctgacctccgctctctctttcttctctctctcttgtccatcgcttccgccaatgtcttcttcgaagagcgtttcgatgacgggtgggaaaatcgatgggttaaatcagattggaaaaaagatgagaacgtggctggggagtggaaccacacctctggtcaatggaatggagacgctaatgacaaaggtattcaaaccagtgaggattacagattctatgctatttcagctgagtaccctgaattcggcaacaagggtaagacactagtctttcaattttctgttaagcacgaacagaagcttgactgtggtggtggctacatgaagttgctcagtggggatgttgatcagaagaaatttggcggggatactccttacagtattatgtttggcccagatatctgcggttacagtaccaagaaagttcacgctattcttacctac

SEQ ID NO: 14304 - protein, 173 aa, Zea mays subsp. mays
  misc_feature (1)..(173): Ceres Seq. ID no. 3624559
NFSRSFLHIPSSVVPSLTMAFRVRSPDLRSLFLLSLLSIASANVFFEERFDDGWENRWVKSDWKKDENVAGEWNHTSGQWNGDANDKGIQTSEDYRFYAISAEYPEFGNKGKTLVFQFSVKHEQKLDCGGGYMKLLSGDVDQKKFGGDTPYSIMFGPDICGYSTKKVHAILTY

SEQ ID NO: 14305 - protein, 155 aa, Zea mays subsp. mays
  misc_feature (1)..(155): Ceres Seq. ID no. 3624560
MAFRVRSPDLRSLFLLSLLSIASANVFFEERFDDGWENRWVKSDWKKDENVAGEWNHTSGQWNGDANDKGIQTSEDYRFYAISAEYPEFGNKGKTLVFQFSVKHEQKLDCGGGYMKLLSGDVDQKKFGGDTPYSIMFGPDICGYSTKKVHAILTY

SEQ ID NO: 14306 - DNA, 532 bp, Zea mays subsp. mays
  misc_feature (1)..(532): Ceres Seq. ID no. 3625134
gatcaaatcgactggaaacgcagatacggaaaatacaagcccattgttgakccagcaaaatgccagaagtgtaataagcgaaacgtccggcaagcataccataacgtatgcagagattgctccaaggacctcggcatatgtgctaagtgctgcacatgtgttaatgagcttgtcggaagggatgcgaatgaggaggaaagtgaacgcaagtcactagaagaggctgtcagaggtgctagggagagggaacgacgtacacttcttcgtattgttattgagatgcaagtggaatgtgactttggttccttattatgaacaaaggcaaaggtggggagagtgggccgtcagtcccaaagattgctgacagaagtcgagaaggtgatatctttcctgctggatcacttgatgaatacgccgaacaaactagagagcaagaggaagatgactcagatgtagaggctggagattttgtggaarattaaagtttggaatgctttatgctgtaaagacratactttctgtgatgcctatg

SEQ ID NO: 14307 - protein, 104 aa, Zea mays subsp. mays
  misc_feature (1)..(104): Ceres Seq. ID no. 3625135
  misc_feature (17)..(17): Xaa is any aa, unknown or other
DQIDWKRRYGKYKPIVXPAKCQKCNKRNVRQAYHNVCRDCSKDLGICAKCCTCVNELVGRDANEEESERKSLEEAVRGARERERRTLLRIVIEMQVECDFGSLL

SEQ ID NO: 14308 - protein, 71 aa, Zea mays subsp. mays
  misc_feature (1)..(71): Ceres Seq. ID no. 3625136
  misc_feature (17)..(17): Xaa is any aa, unknown or other
IKSTGNADTENTSPLLXQQNARSVISETSGKHTITYAEIAPRTSAYVLSAAHVLMSLSEGMRMRRKVNASH

SEQ ID NO: 14309 - protein, 56 aa, Zea mays subsp. mays
  misc_feature (1)..(56): Ceres Seq. ID no. 3625137
  misc_feature (56)..(56): Xaa is any aa, unknown or other
MNKGKGGESGPSVPKIADRSREGDIFPAGSLDEYAEQTREQEEDDSDVEAGDFVEX

SEQ ID NO: 14310 - DNA, 418 bp, Zea mays subsp. mays
  misc_feature (1)..(418): Ceres Seq. ID no. 3625581
gtgtywkctgyagactttggattagtgaattatttattgcamggctattackaggkcwagagggcttctgaagctgaattgttgtcaaagtttacatatggaggagtgatactgargcctggttttattcatggaactcgtcgagtgggcagtgtaaagatacctcttggtcttgtcggttctcctatgcagatggtgctccaaaatataaaacctttgactaggttaccacttatcgggccgctattgactcctcccgtcagtgctgcctccgtggggaaggtcgctgtgagagcagcgacggatccggtgtttcctcctggcatcgwtgatgtctacgggatcatgcgttacagcgagcaaaactaagctgcctcattcaccgggcagtatatacatgccgstgkacttttgttac

SEQ ID NO: 14311 - protein, 122 aa, Zea mays subsp. mays
  misc_feature (1)..(122): Ceres Seq. ID no. 3625582
  misc_feature (2)..(2): Xaa is any aa, unknown or other
  misc_feature (3)..(3): Xaa is any aa, unknown or other
  misc_feature (4)..(4): Xaa is any aa, unknown or other
  misc_feature (14)..(14): Xaa is any aa, unknown or other
  misc_feature (18)..(18): Xaa is any aa, unknown or other
  misc_feature (19)..(19): Xaa is any aa, unknown or other
  misc_feature (20)..(20): Xaa is any aa, unknown or other
  misc_feature (39)..(39): Xaa is any aa, unknown or other
  misc_feature (110)..(110): Xaa is any aa, unknown or other
VXXXDFGLVNYLLXGYYXXXRASEAELLSKFTYGGVILXPGFIHGTRRVGSVKIPLGLVGSPMQMVLQNIKPLTRLPLIGPLLTPPVSAASVGKVAVRAATDPVFPPGIXDVYGIMRYSEQN

SEQ ID NO: 14312 - protein, 60 aa, Zea mays subsp. mays
  misc_feature (1)..(60): Ceres Seq. ID no. 3625583
  misc_feature (48)..(48): Xaa is any aa, unknown or other
MQMVLQNIKPLTRLPLIGPLLTPPVSAASVGKVAVRAATDPVFPPGIXDVYGIMRYSEQN

SEQ ID NO: 14313 - DNA, 548 bp, Zea mays subsp. mays
  misc_feature (1)..(548): Ceres Seq. ID no. 3625697
tcaacatctacgacatctcccccctcaaccactacctctactggttcggactcggcatcttccactccgggatccaagtccatggcatggagtatggctttggagctcatgaataccccaccagcggagtcttccaagtagaacccaaaagctgccccgggtttatcttcaggcgctctgtgtgtgtgggtgtaactcacatgtcccgttcccaagtccgcacttccatagaggatctcgccgaggattatcatggggacacttatcatttgattctcaagaactgcaatcatttcacagcagatgtctgcgagcgtttgaccgggaagccagtacctggatgggtgaatcgactcgccagattaggttccttcttcaattgtgtattgcctgacagcatcaaggtttcagcagtcagagatgtaaatgcacatccagatttttctggtactctacctacacccagtttaactacttgtaccttcacattcacatcacatggttggaatttgaccttacagaatcatgtaccactttattaaagattg

SEQ ID NO: 14314 - protein, 179 aa, Zea mays subsp. mays
  misc_feature (1)..(179): Ceres Seq. ID no. 3625698
NIYDISPLNHYLYWFGLGIFHSGIQVHGMEYGFGAHEYPTSGVFQVEPKSCPGFIFRRSVCVGVTHMSRSQVRTSIEDLAEDYHGDTYHLILKNCNHFTADVCERLTGKPVPGWVNRLARLGSFFNCVLPDSIKVSAVRDVNAHPDFSGTLPTPSLTTCTFTFTSHGWNLTLQNHVPLY

SEQ ID NO: 14315 - protein, 151 aa, Zea mays subsp. mays
  misc_feature (1)..(151): Ceres Seq. ID no. 3625699
MEYGFGAHEYPTSGVFQVEPKSCPGFIFRRSVCVGVTHMSRSQVRTSIEDLAEDYHGDTYHLILKNCNHFTADVCERLTGKPVPGWVNRLARLGSFFNCVLPDSIKVSAVRDVNAHPDFSGTLPTPSLTTCTFTFTSHGWNLTLQNHVPLY

SEQ ID NO: 14316 - protein, 113 aa, Zea mays subsp. mays
  misc_feature (1)..(113): Ceres Seq. ID no. 3625700
MSRSQVRTSIEDLAEDYHGDTYHLILKNCNHFTADVCERLTGKPVPGWVNRLARLGSFFNCVLPDSIKVSAVRDVNAHPDFSGTLPTPSLTTCTFTFTSHGWNLTLQNHVPLY

SEQ ID NO: 14317 - DNA, 481 bp, Zea mays subsp. mays
  misc_feature (1)..(481): Ceres Seq. ID no. 3626194
gataacgactttgcttcttkrcagggaattgctgagaggtccactctattatgtcctggtgctgctgttcagcgttttagtcttctggcgtgagtcccccatcgggatcgtctccttgtcgatgatgagcggtggcgatggttttgctgacattgttgggaggaggtatggctcagcgaagctgccattcaatcggaagaagagctgggccgggagcatctcgatgttcatttctggtttcctgctgtccgctatgatgatgctctacttctcaagcctgggttacattgatgttatctgggaagaggcacttggtaagctggcgcttgttgcactagcagcaacagtagtggagtgcgttcctgtgaccgaagttgtagatgacaacatatctgttcctttggccaccatgctggtagcttttctcttgtttagctccaaccgcacaatagttaattaaaatactactagtgcattattt

SEQ ID NO: 14318 - protein, 152 aa, Zea mays subsp. mays
  misc_feature (1)..(152): Ceres Seq. ID no. 3626195
  misc_feature (7)..(7): Xaa is any aa, unknown or other
ITTLLLXRELLRGPLYYVLVLLFSVLVFWRESPIGIVSLSMMSGGDGFADIVGRRYGSAKLPFNRKKSWAGSISMFISGFLLSAMMMLYFSSLGYIDVIWEEALGKLALVALAATVVECVPVTEVVDDNISVPLATMLVAFLLFSSNRTIVN

SEQ ID NO: 14319 - protein, 112 aa, Zea mays subsp. mays
  misc_feature (1)..(112): Ceres Seq. ID no. 3626196
MMSGGDGFADIVGRRYGSAKLPFNRKKSWAGSISMFISGFLLSAMMMLYFSSLGYIDVIWEEALGKLALVALAATVVECVPVTEVVDDNISVPLATMLVAFLLFSSNRTIVN

SEQ ID NO: 14320 - protein, 111 aa, Zea mays subsp. mays
  misc_feature (1)..(111): Ceres Seq. ID no. 3626197
MSGGDGFADIVGRRYGSAKLPFNRKKSWAGSISMFISGFLLSAMMMLYFSSLGYIDVIWEEALGKLALVALAATVVECVPVTEVVDDNISVPLATMLVAFLLFSSNRTIVN

SEQ ID NO: 14321 - DNA, 577 bp, Zea mays subsp. mays
  misc_feature (1)..(577): Ceres Seq. ID no. 3626253
ggttcgaccccaccgccgactkccacacctactccatccagtggacgcagcagcacatcctcgtgctggtggacgggacgccgatccgggagttcaagaaccacgcggaccggggcgtgccgtacccgtcgtcgcagcggatgcgcctctacggctcgctgtgggacgccgaggactgggccacgcagggcggccgcgtgaagacggactggtcgcgggcccccttcgtggcgcagtaccgcaacttcacggccgcgccgccggccacggcggcggacggccggtacgggcaacagatggacgccgcggcgcagcaggccatgaagtgggcgcgggacaactacatggtctacgactactgcgccgacaccaagcgcttcccgcagggcgcgccgcctgagtgctccatggcgtagaggtgctgggctgaaccacggtgcacttcgattgcgatgtcgatcagctagtgcacactatatacgacgcacgggtcaattcattgtttataccgatcgatcgattctctggtgtgaaagaaatactctagtataatttaattcatttggttggttgcaag

SEQ ID NO: 14322 - protein, 137 aa, Zea mays subsp. mays
  misc_feature (1)..(137): Ceres Seq. ID no. 3626254
  misc_feature (7)..(7): Xaa is any aa, unknown or other
FDPTADXHTYSIQWTQQHILVLVDGTPIREFKNHADRGVPYPSSQRMRLYGSLWDAEDWATQGGRVKTDWSRAPFVAQYRNFTAAPPATAADGRYGQQMDAAAQQAMKWARDNYMVYDYCADTKRFPQGAPPECSMA

SEQ ID NO: 14323 - protein, 132 aa, Zea mays subsp. mays
  misc_feature (1)..(132): Ceres Seq. ID no. 3626255
  misc_feature (7)..(7): Xaa is any aa, unknown or other
VRPHRRXPHLLHPVDAAAHPRAGGRDADPGVQEPRGPGRAVPVVAADAPLRLAVGRRGLGHAGRPREDGLVAGPLRGAVPQLHGRAAGHGGGRPVRATDGRRGAAGHEVGAGQLHGLRLLRRHQALPAGRAA

SEQ ID NO: 14324 - protein, 91 aa, Zea mays subsp. mays
  misc_feature (1)..(91): Ceres Seq. ID no. 3626256
MRLYGSLWDAEDWATQGGRVKTDWSRAPFVAQYRNFTAAPPATAADGRYGQQMDAAAQQAMKWARDNYMVYDYCADTKRFPQGAPPECSMA

SEQ ID NO: 14325 - DNA, 599 bp, Zea mays subsp. mays
  misc_feature (1)..(599): Ceres Seq. ID no. 3626363
atatgtgccagtgtggattttatatctatagcatcggtgctcttgttgcttgggaaacccgcagaaaagattttgctgtaatgatgtctcatcatgtaataacatctactctaattggagtttcatatctgactggatttttccgaattgggaccatcattctcgctcttcatgatgcaagtgatgtgtttcttgagactgccaaattgtgcaaatacacagaaaaagagctgggtgctagcttgttttttggtctcttcgctatctcctggcttctattgcgtctgatttacttcccattttggataatcaaagcctctaggtttgttttttacttctctttgtgataactttctgtttctgtagtcttgtagttttggacttattgctgttgccgttgcaatggcagctatcattccatcacattcttgaggaagctggatgaattcccaacaactttgtactacatcttgaacacaatgcttctcacattgcttgtattccatatgtactggtggaaactcatatgtttgatgataatgagacagctgaataataaaggacaagttacagacgatgtccgawctgattctgaggat

SEQ ID NO: 14326 - protein, 114 aa, Zea mays subsp. mays
  misc_feature (1)..(114): Ceres Seq. ID no. 3626364
MCQCGFYIYSIGALVAWETRRKDFAVMMSHHVITSTLIGVSYLTGFFRIGTIILALHDASDVFLETAKLCKYTEKELGASLFFGLFAISWLLLRLIYFPFWIIKASRFVFYFSL

SEQ ID NO: 14327 - protein, 88 aa, Zea mays subsp. mays
  misc_feature (1)..(88): Ceres Seq. ID no. 3626365
MMSHHVITSTLIGVSYLTGFFRIGTIILALHDASDVFLETAKLCKYTEKELGASLFFGLFAISWLLLRLIYFPFWIIKASRFVFYFSL

SEQ ID NO: 14328 - protein, 87 aa, Zea mays subsp. mays
  misc_feature (1)..(87): Ceres Seq. ID no. 3626366
MSHHVITSTLIGVSYLTGFFRIGTIILALHDASDVFLETAKLCKYTEKELGASLFFGLFAISWLLLRLIYFPFWIIKASRFVFYFSL

SEQ ID NO: 14329 - DNA, 530 bp, Zea mays subsp. mays
  misc_feature (1)..(530): Ceres Seq. ID no. 3629587
ttggcgaattccagcttgaaggcattccaccagccccaagaggcatgccccagatcgaggttacctttgacattgatgccaatggcattgtaaaggtgtcagctagggacaaagccacaggcaaagaacaagaaatcaccatcaagtcttytggtggtttgtcagaggtcgaaattgakaagatggtgaaggaggcaragctacattctcagaaggaccaggaaaggaagtctcttattgatctcaagaactctgcasataccacgatctacagcattgasaagagtgtcagcgagtacaaggacaaggtccctgctgaagtcaccaaggagatcgagtctgctgtctctgatctgagggcagctatggctgaggatgatctggacaagatcaagcagaagctggaagcagcaaacaaggctgtttcaaagatcggagarcacatgcmacaaggtggtggtggcggcsgcagcscttgtggcagcagcagtggaggaraccagactccagaagctgagtaccagggacgc

SEQ ID NO: 14330 - protein, 176 aa, Zea mays subsp. mays
  misc_feature (1)..(176): Ceres Seq. ID no. 3629588
  misc_feature (50)..(50): Xaa is any aa, unknown or other
  misc_feature (59)..(59): Xaa is any aa, unknown or other
  misc_feature (66)..(66): Xaa is any aa, unknown or other
  misc_feature (86)..(86): Xaa is any aa, unknown or other
  misc_feature (93)..(93): Xaa is any aa, unknown or other
  misc_feature (146)..(146): Xaa is any aa, unknown or other
  misc_feature (149)..(149): Xaa is any aa, unknown or other
  misc_feature (156)..(156): Xaa is any aa, unknown or other
  misc_feature (158)..(158): Xaa is any aa, unknown or other
  misc_feature (166)..(166): Xaa is any aa, unknown or other
GEFQLEGIPPAPRGMPQIEVTFDIDANGIVKVSARDKATGKEQEITIKSXGGLSEVEIXKMVKEAXLHSQKDQERKSLIDLKNSAXTTIYSIXKSVSEYKDKVPAEVTKEIESAVSDLRAAMAEDDLDKIKQKLEAANKAVSKIGXHMXQGGGGGXSXCGSSSGGXQTPEAEYQGR

SEQ ID NO: 14331 - protein, 162 aa, Zea mays subsp. mays
  misc_feature (1)..(162): Ceres Seq. ID no. 3629589
  misc_feature (36)..(36): Xaa is any aa, unknown or other
  misc_feature (45)..(45): Xaa is any aa, unknown or other
  misc_feature (52)..(52): Xaa is any aa, unknown or other
  misc_feature (72)..(72): Xaa is any aa, unknown or other
  misc_feature (79)..(79): Xaa is any aa, unknown or other
  misc_feature (132)..(132): Xaa is any aa, unknown or other
  misc_feature (135)..(135): Xaa is any aa, unknown or other
  misc_feature (142)..(142): Xaa is any aa, unknown or other
  misc_feature (144)..(144): Xaa is any aa, unknown or other
  misc_feature (152)..(152): Xaa is any aa, unknown or other
MPQIEVTFDIDANGIVKVSARDKATGKEQEITIKSXGGLSEVEIXKMVKEAXLHSQKDQERKSLIDLKNSAXTTIYSIXKSVSEYKDKVPAEVTKEIESAVSDLRAAMAEDDLDKIKQKLEAANKAVSKIGXHMXQGGGGGXSXCGSSSGGXQTPEAEYQGR

SEQ ID NO: 14332 - protein, 116 aa, Zea mays subsp. mays
  misc_feature (1)..(116): Ceres Seq. ID no. 3629590
  misc_feature (6)..(6): Xaa is any aa, unknown or other
  misc_feature (26)..(26): Xaa is any aa, unknown or other
  misc_feature (33)..(33): Xaa is any aa, unknown or other
  misc_feature (86)..(86): Xaa is any aa, unknown or other
  misc_feature (89)..(89): Xaa is any aa, unknown or other
  misc_feature (96)..(96): Xaa is any aa, unknown or other
  misc_feature (98)..(98): Xaa is any aa, unknown or other
  misc_feature (106)..(106): Xaa is any aa, unknown or other
MVKEAXLHSQKDQERKSLIDLKNSAXTTIYSIXKSVSEYKDKVPAEVTKEIESAVSDLRAAMAEDDLDKIKQKLEAANKAVSKIGXHMXQGGGGGXSXCGSSSGGXQTPEAEYQGR

SEQ ID NO: 14333 - DNA, 439 bp, Zea mays subsp. mays
  misc_feature (1)..(439): Ceres Seq. ID no. 4377636
gagtacgagcggctactcccggcggcggcggcgatgagcgcggtgaacatcaccaacgtggcggtgctggataaccccaccgccttcctcaatcccttccagtttgagatctcctacgagtgcctcgtgcccctcgacgacgatctggagtggaagcttatatatgttggatcagctgaagatgaaaactacgatcaacagcttgagagcgtgcttgttggccctgtcaatgttgggacctaccgttttgtccttcaggctgacccaccggatccctcaaagatccgtgaggaagacataattggtgtgactgtgctgctattgacatgctcttacatgggccaggagttcatgagagtaggcyactacgtgaacaacgattattatgatgaacaattgaragaagaacctccascaaargtgctaattgaccgggtgc

SEQ ID NO: 14334 - protein, 146 aa, Zea mays subsp. mays
  misc_feature (1)..(146): Ceres Seq. ID no. 4377637
  misc_feature (122)..(122): Xaa is any aa, unknown or other
  misc_feature (134)..(134): Xaa is any aa, unknown or other
  misc_feature (139)..(139): Xaa is any aa, unknown or other
  misc_feature (140)..(140): Xaa is any aa, unknown or other
EYERLLPAAAAMSAVNITNVAVLDNPTAFLNPFQFEISYECLVPLDDDLEWKLIYVGSAEDENYDQQLESVLVGPVNVGTYRFVLQADPPDPSKIREEDIIGVTVLLLTCSYMGQEFMRVGXYVNNDYYDEQLXEEPPXXVLIDRV

SEQ ID NO: 14335 - protein, 135 aa, Zea mays subsp. mays
  misc_feature (1)..(135): Ceres Seq. ID no. 4377638
  misc_feature (111)..(111): Xaa is any aa, unknown or other
  misc_feature (123)..(123): Xaa is any aa, unknown or other
  misc_feature (128)..(128): Xaa is any aa, unknown or other
  misc_feature (129)..(129): Xaa is any aa, unknown or other
MSAVNITNVAVLDNPTAFLNPFQFEISYECLVPLDDDLEWKLIYVGSAEDENYDQQLESVLVGPVNVGTYRFVLQADPPDPSKIREEDIIGVTVLLLTCSYMGQEFMRVGXYVNNDYYDEQLXEEPPXXVLIDRV

SEQ ID NO: 14336 - DNA, 471 bp, Zea mays subsp. mays
  misc_feature (1)..(471): Ceres Seq. ID no. 4487301
attggcaagggtttagggcgcagcagagtctggtgtctcttgctccgaccccgttggcgactgagacgcgatccccttctcctgcactgccgtcctccgtcgctgcgatgcctcggtattactgtgactactgcgacacctacctgacccatgactcgccatctgtccggaaacaacataatgctggatacaaacacaaggcgaatgttcgaacctactatcagcaatttgaggagcagcaaactcaaagtttaattgatcaaagaatcaaggagcatcttggacaagctgcagctttccaagcaggtgcccctttcaaccaacatctgcttgcattcccaggagctatggcccgccctcgtcttccaattctgccaacccctggcatgcctcatgggtttcctcaagcacctggcgcaccattgatgccaggaattaggccccngattttaccagctccaggttatcctg

SEQ ID NO: 14337 - protein, 156 aa, Zea mays subsp. mays
  misc_feature (1)..(156): Ceres Seq. ID no. 4487302
  misc_feature (148)..(148): Xaa is any aa, unknown or other
WQGFRAQQSLVSLAPTPLATETRSPSPALPSSVAAMPRYYCDYCDTYLTHDSPSVRKQHNAGYKHKANVRTYYQQFEEQQTQSLIDQRIKEHLGQAAAFQAGAPFNQHLLAFPGAMARPRLPILPTPGMPHGFPQAPGAPLMPGIRPXILPAPGYP

SEQ ID NO: 14338 - protein, 121 aa, Zea mays subsp. mays
  misc_feature (1)..(121): Ceres Seq. ID no. 4487303
  misc_feature (113)..(113): Xaa is any aa, unknown or other
MPRYYCDYCDTYLTHDSPSVRKQHNAGYKHKANVRTYYQQFEEQQTQSLIDQRIKEHLGQAAAFQAGAPFNQHLLAFPGAMARPRLPILPTPGMPHGFPQAPGAPLMPGIRPXILPAPGYP

SEQ ID NO: 14339 - DNA, 456 bp, Zea mays subsp. mays
  misc_feature (1)..(456): Ceres Seq. ID no. 4487388
ccccgttcagtcgcagcccaggccgacgacggcagagagcgagccgacgccgccgcaccctcgtgccagaccttagctaaaagattggattcaaaggactgggttatgacatgtgaagctctcaacaatgttcgtcagttggcaatgtatcacaaggaacgattgcaggagcttctggagcctgtagttcctcttatcgtgaaatctgtgaagaacccaagaagtgctgtatgcaaaactgcactaatgacttgtgctgacatctttaaggcctatggtgacttaatggttcactcaatcgatccactgctagtacaactgtttctgaaggcttcacaagataagcgttttgtctgtgaagctgcagaggcagctcttatatcgatgacaagttggatctcccctttactactcttgccaagaatgctgccttacctcaagaacaagaatccacgg

SEQ ID NO: 14340 - protein, 152 aa, Zea mays subsp. mays
  misc_feature (1)..(152): Ceres Seq. ID no. 4487389
PRSVAAQADDGRERADAAAPSCQTLAKRLDSKDWVMTCEALNNVRQLAMYHKERLQELLEPVVPLIVKSVKNPRSAVCKTALMTCADIFKAYGDLMVHSIDPLLVQLFLKASQDKRFVCEAAEAALISMTSWISPLLLLPRMLPYLKNKNPR

SEQ ID NO: 14341 - protein, 117 aa, Zea mays subsp. mays
  misc_feature (1)..(117): Ceres Seq. ID no. 4487390
MTCEALNNVRQLAMYHKERLQELLEPVVPLIVKSVKNPRSAVCKTALMTCADIFKAYGDLMVHSIDPLLVQLFLKASQDKRFVCEAAEAALISMTSWISPLLLLPRMLPYLKNKNPR

SEQ ID NO: 14342 - protein, 104 aa, Zea mays subsp. mays
  misc_feature (1)..(104): Ceres Seq. ID no. 4487391
MYHKERLQELLEPVVPLIVKSVKNPRSAVCKTALMTCADIFKAYGDLMVHSIDPLLVQLFLKASQDKRFVCEAAEAALISMTSWISPLLLLPRMLPYLKNKNPR

SEQ ID NO: 14343 - DNA, 431 bp, Zea mays subsp. mays
  misc_feature (1)..(431): Ceres Seq. ID no. 4489669
acaacaagctcgacggaacaactgactagaactagtacgtagaaatccaacactcgggacgaaattaaaagagacgagacgacgcatcatccggsgtggcggcgcaggagggcggcatgaggctggtgtcgcacccgatcgcggcgcacgacgggcggctgccgcggcagtacacggcggaggggcagggcgccaagaaggacatgtcgccgccgctggaatggtacggcgtgcccgagggcgcgcggtcgctggcgctgctggtgcaggacatcgacgccgaccccatcgtgccgtggacgcactgggtggtggccaacatcccgcccgccaccaggggcctccccgaggggttctccggcgccgcgggggcggggccggggcgcgaccagctcggcggactgcaggagggggtcaacgactggaagcag

SEQ ID NO: 14344 - protein, 105 aa, Zea mays subsp. mays
  misc_feature (1)..(105): Ceres Seq. ID no. 4489670
MRLVSHPIAAHDGRLPRQYTAEGQGAKKDMSPPLEWYGVPEGARSLALLVQDIDADPIVPWTHWVVANIPPATRGLPEGFSGAAGAGPGRDQLGGLQEGVNDWKQ

SEQ ID NO: 14345 - protein, 76 aa, Zea mays subsp. mays
  misc_feature (1)..(76): Ceres Seq. ID no. 4489671
MSPPLEWYGVPEGARSLALLVQDIDADPIVPWTHWVVANIPPATRGLPEGFSGAAGAGPGRDQLGGLQEGVNDWKQ

SEQ ID NO: 14346 - protein, 70 aa, Zea mays subsp. mays
  misc_feature (1)..(70): Ceres Seq. ID no. 4489672
MVRRARGRAVAGAAGAGHRRRPHRAVDALGGGQHPARHQGPPRGVLRRRGGGAGARPARRTAGGGQRLEA

SEQ ID NO: 14347 - DNA, 522 bp, Zea mays subsp. mays
  misc_feature (1)..(522): Ceres Seq. ID no. 4576493
aaatctctaacgttctataaatcgagtacatttgaagttgatgttttgtatgtgsgtacaggcgactcgcaaattccacaaaagataagcacttacacgattggccctttccaaccctccaaatgtgagaagaccaagctgaaagttaaagtgtgtctcaacatccatggcattgtcacagtggattcagcaatgatgctggaggaggatgtggaagttccagtctcatctgctaatgaagctctaaaggatactacaaagatggacacggatgatgcaccaagtgatcctgtttctggaactgatgcgaatatgcatgagcttagaagtgcttacactactgaggctcctgctgaaaatgaagcacaagattctgaggaaaaatctgttccaatggaaactgatgcaaaggttgagccatcgaaaaggaaaattaagaaaacttctattccgatccatgagttggtctacggcgcattgtctgccactgacctgcagaaggctgtagaraaagagtatgag

SEQ ID NO: 14348 - protein, 174 aa, Zea mays subsp. mays
  misc_feature (1)..(174): Ceres Seq. ID no. 4576494
  misc_feature (19)..(19): Xaa is any aa, unknown or other
  misc_feature (170)..(170): Xaa is any aa, unknown or other
KSLTFYKSSTFEVDVLYVXTGDSQIPQKISTYTIGPFQPSKCEKTKLKVKVCLNIHGIVTVDSAMMLEEDVEVPVSSANEALKDTTKMDTDDAPSDPVSGTDANMHELRSAYTTEAPAENEAQDSEEKSVPMETDAKVEPSKRKIKKTSIPIHELVYGALSATDLQKAVXKEYE

SEQ ID NO: 14349 - protein, 110 aa, Zea mays subsp. mays
  misc_feature (1)..(110): Ceres Seq. ID no. 4576495
  misc_feature (106)..(106): Xaa is any aa, unknown or other
MMLEEDVEVPVSSANEALKDTTKMDTDDAPSDPVSGTDANMHELRSAYTTEAPAENEAQDSEEKSVPMETDAKVEPSKRKIKKTSIPIHELVYGALSATDLQKAVXKEYE

SEQ ID NO: 14350 - protein, 109 aa, Zea mays subsp. mays
  misc_feature (1)..(109): Ceres Seq. ID no. 4576496
  misc_feature (105)..(105): Xaa is any aa, unknown or other
MLEEDVEVPVSSANEALKDTTKMDTDDAPSDPVSGTDANMHELRSAYTTEAPAENEAQDSEEKSVPMETDAKVEPSKRKIKKTSIPIHELVYGALSATDLQKAVXKEYE

SEQ ID NO: 14351 - DNA, 468 bp, Zea mays subsp. mays
  misc_feature (1)..(468): Ceres Seq. ID no. 4581778
gtttgttgagacaaccgttggctttgacaccatatgcaaggtgaacgcacaacttatcagcaatgtatgcactgatgctctatctgctgagaagtattactactttattcgcctgatgggacgcaaggcttctcatgtggcattggaatgtgctcttcaatcacatccaaacatggttatcctaggagaggaggtggctgcttccaaacttacaatttttgatattacgaagcagatttgtgatgcagttcaggcaagggctgaaaaagacaagaaccatggggttattcttattcctgagggccttgtggagagtattcctgaactatatgctctgcttcaggaaatccatggcctccatggcaaaggtgtttctgttgagaatatctcttctcagctttcaccttgggcatctgcactctttgagtttttgcccccttttatcaggaagcagctactactacatcc

SEQ ID NO: 14352 - protein, 155 aa, Zea mays subsp. mays
  misc_feature (1)..(155): Ceres Seq. ID no. 4581779
FVETTVGFDTICKVNAQLISNVCTDALSAEKYYYFIRLMGRKASHVALECALQSHPNMVILGEEVAASKLTIFDITKQICDAVQARAEKDKNHGVILIPEGLVESIPELYALLQEIHGLHGKGVSVENISSQLSPWASALFEFLPPFIRKQLLLH

SEQ ID NO: 14353 - protein, 117 aa, Zea mays subsp. mays
  misc_feature (1)..(117): Ceres Seq. ID no. 4581780
MGRKASHVALECALQSHPNMVILGEEVAASKLTIFDITKQICDAVQARAEKDKNHGVILIPEGLVESIPELYALLQEIHGLHGKGVSVENISSQLSPWASALFEFLPPFIRKQLLLH

SEQ ID NO: 14354 - protein, 98 aa, Zea mays subsp. mays
  misc_feature (1)..(98): Ceres Seq. ID no. 4581781
MVILGEEVAASKLTIFDITKQICDAVQARAEKDKNHGVILIPEGLVESIPELYALLQEIHGLHGKGVSVENISSQLSPWASALFEFLPPFIRKQLLLH

SEQ ID NO: 14355 - DNA, 495 bp, Zea mays subsp. mays
  misc_feature (1)..(495): Ceres Seq. ID no. 4581901
ttgaagatgggtgactgtgatctttcagatctnattgggtttttccaaacctccaaagcattgcaagaattcgccggtggtgccttttttgaagttggagagtacaccaagtacgaaaaggtcattttcccacctaggctatgcttcttagggggtcttaccttcatgggtaaaaacgagatgccagttatctttccgtattccacaatgcttaagaaactggacttgcagttcactttcctcaccactgaagaccactgtcagcttattgctaaatgccccaacctaagtgttctcgaggtgaggaatgtgattggggatagaggactagaagttgttgctgctacatgcaagaagctacgaaggctcagaattgagcgtggcgacgatgatcctggccaagaagagcagggaggagtctctcagataggtttgacagccgtagccgttggctgccgcgaactagagtacatagctgcctatgtatctgatatc

SEQ ID NO: 14356 - protein, 165 aa, Zea mays subsp. mays
  misc_feature (1)..(165): Ceres Seq. ID no. 4581902
  misc_feature (11)..(11): Xaa is any aa, unknown or other
LKMGDCDLSDXIGFFQTSKALQEFAGGAFFEVGEYTKYEKVIFPPRLCFLGGLTFMGKNEMPVIFPYSTMLKKLDLQFTFLTTEDHCQLIAKCPNLSVLEVRNVIGDRGLEVVAATCKKLRRLRIERGDDDPGQEEQGGVSQIGLTAVAVGCRELEYIAAYVSDI

SEQ ID NO: 14357 - protein, 163 aa, Zea mays subsp. mays
  misc_feature (1)..(163): Ceres Seq. ID no. 4581903
  misc_feature (9)..(9): Xaa is any aa, unknown or other
MGDCDLSDXIGFFQTSKALQEFAGGAFFEVGEYTKYEKVIFPPRLCFLGGLTFMGKNEMPVIFPYSTMLKKLDLQFTFLTTEDHCQLIAKCPNLSVLEVRNVIGDRGLEVVAATCKKLRRLRIERGDDDPGQEEQGGVSQIGLTAVAVGCRELEYIAAYVSDI

SEQ ID NO: 14358 - protein, 110 aa, Zea mays subsp. mays
  misc_feature (1)..(110): Ceres Seq. ID no. 4581904
MGKNEMPVIFPYSTMLKKLDLQFTFLTTEDHCQLIAKCPNLSVLEVRNVIGDRGLEVVAATCKKLRRLRIERGDDDPGQEEQGGVSQIGLTAVAVGCRELEYIAAYVSDI

SEQ ID NO: 14359 - DNA, 480 bp, Zea mays subsp. mays
  misc_feature (1)..(480): Ceres Seq. ID no. 4583495
accaagctggtggttgaggttagaagaggagctagagcgagagagtcccatcgcaacacacaaaaggaagaggaagaggaagaggaaggcgagaacgatgggcttgctcctgctgctcctcgtcgcggcggcggcgacagctcctgcggccgacgcatggggcaaggaggggcactacatggtgtgcaagatcgctgagagctttctgacgaaagaggcctcgacggcggtgaaggagctgctgccggggtgggccggcggcgagctcgcggagacgtgctcttgggcggacacgcagaggttccggtaccgctggtccagcccgctgcacttcgccgacacgccaggggactgcgagttcgactacgcccgggactgccacaacaccaaaggggagaagaacatgtgcgtggtcggagccatcaacaactacacggcggcgctgaaagactcatcaagtccttttgatccgacggagag

SEQ ID NO: 14360 - protein, 159 aa, Zea mays subsp. mays
  misc_feature (1)..(159): Ceres Seq. ID no. 4583496
PSWWLRLEEELERESPIATHKRKRKRKRKARTMGLLLLLLVAAAATAPAADAWGKEGHYMVCKIAESFLTKEASTAVKELLPGWAGGELAETCSWADTQRFRYRWSSPLHFADTPGDCEFDYARDCHNTKGEKNMCVVGAINNYTAALKDSSSPFDPTE

SEQ ID NO: 14361 - protein, 127 aa, Zea mays subsp. mays
  misc_feature (1)..(127): Ceres Seq. ID no. 4583497
MGLLLLLLVAAAATAPAADAWGKEGHYMVCKIAESFLTKEASTAVKELLPGWAGGELAETCSWADTQRFRYRWSSPLHFADTPGDCEFDYARDCHNTKGEKNMCVVGAINNYTAALKDSSSPFDPTE

SEQ ID NO: 14362 - protein, 100 aa, Zea mays subsp. mays
  misc_feature (1)..(100): Ceres Seq. ID no. 4583498
MVCKIAESFLTKEASTAVKELLPGWAGGELAETCSWADTQRFRYRWSSPLHFADTPGDCEFDYARDCHNTKGEKNMCVVGAINNYTAALKDSSSPFDPTE

SEQ ID NO: 14363 - DNA, 480 bp, Zea mays subsp. mays
  misc_feature (1)..(480): Ceres Seq. ID no. 4612851
aactttgcttatgatgcagcactggatcaaggacatgaagtacagcaccagggtgaaggatgaggaaggctaccctgccatcgtcctcgtcaacaaagccactggagaggctctcaagcattcccttggccagtcacaccctgttcttctgacccgccataatccagactccctggacgagtctgtcctgtggacaagagcagggacgttggggatgggttccgctgcattaggatggtcaacaacatctacctgaactttgatgctttacatggagacaaggaccatggtggtgtgcgcgacgggacggcccttgtgctgtgggagtggtgcgagggagacaaccagcgctggaagattgttccctggtgaacaaggaaatgtgtgaccgagcccgcaccaaggaggagctcctgccgtaataagtgaagtgattggtactgaagtttctggaaataagaggctcttctgagatgcctg

SEQ ID NO: 14364 - protein, 84 aa, Zea mays subsp. mays
  misc_feature (1)..(84): Ceres Seq. ID no. 4612852
TLLMMQHWIKDMKYSTRVKDEEGYPAIVLVNKATGEALKHSLGQSHPVLLTRHNPDSLDESVLWTRAGTLGMGSAALGWSTTST

SEQ ID NO: 14365 - protein, 81 aa, Zea mays subsp. mays
  misc_feature (1)..(81): Ceres Seq. ID no. 4612853
MMQHWIKDMKYSTRVKDEEGYPAIVLVNKATGEALKHSLGQSHPVLLTRHNPDSLDESVLWTRAGTLGMGSAALGWSTTST

SEQ ID NO: 14366 - protein, 80 aa, Zea mays subsp. mays
  misc_feature (1)..(80): Ceres Seq. ID no. 4612854
MQHWIKDMKYSTRVKDEEGYPAIVLVNKATGEALKHSLGQSHPVLLTRHNPDSLDESVLWTRAGTLGMGSAALGWSTTST

SEQ ID NO: 14367 - DNA, 484 bp, Zea mays subsp. mays
  misc_feature (1)..(484): Ceres Seq. ID no. 4613295
attggccgggctccagtgctgggcgttgtatgagaggtgagcctcccggtggagcgtgggtggtgccggggatgagctgcaacgggtgccgcgtgcttcgcaaggggtgcagcgacgcgtgcgtgctgcggccgtgcctgcagtggatcgacggcgccgaggcgcagggccacgccaccgtcttcgtcgccaagttcttcggccgcgccggcctcatgtccttcctcaccgccgtccccgagccgcagcgcccagcggtgttccagtcgttgatgtacgaggcggccgggcggacgatcaaccctgtgagcggcgccgtggggctgctcggcgcgggcagctggcagctgtgccaggcggcggtggagacggtgcttcggggcggcgccatcgggccgctgcccgagttcgacgggggccgcgacaacacgtttgctctggcggcgacggcgaggcgggccgtggggtgctcgacgttctccac

SEQ ID NO: 14368 - protein, 160 aa, Zea mays subsp. mays
  misc_feature (1)..(160): Ceres Seq. ID no. 4613296
WPGSSAGRCMRGEPPGGAWVVPGMSCNGCRVLRKGCSDACVLRPCLQWIDGAEAQGHATVFVAKFFGRAGLMSFLTAVPEPQRPAVFQSLMYEAAGRTINPVSGAVGLLGAGSWQLCQAAVETVLRGGAIGPLPEFDGGRDNTFALAATARRAVGCSTFS

SEQ ID NO: 14369 - protein, 151 aa, Zea mays subsp. mays
  misc_feature (1)..(151): Ceres Seq. ID no. 4613297
MRGEPPGGAWVVPGMSCNGCRVLRKGCSDACVLRPCLQWIDGAEAQGHATVFVAKFFGRAGLMSFLTAVPEPQRPAVFQSLMYEAAGRTINPVSGAVGLLGAGSWQLCQAAVETVLRGGAIGPLPEFDGGRDNTFALAATARRAVGCSTFS

SEQ ID NO: 14370 - protein, 137 aa, Zea mays subsp. mays
  misc_feature (1)..(137): Ceres Seq. ID no. 4613298
MSCNGCRVLRKGCSDACVLRPCLQWIDGAEAQGHATVFVAKFFGRAGLMSFLTAVPEPQRPAVFQSLMYEAAGRTINPVSGAVGLLGAGSWQLCQAAVETVLRGGAIGPLPEFDGGRDNTFALAATARRAVGCSTFS

SEQ ID NO: 14371 - DNA, 484 bp, Zea mays subsp. mays
  misc_feature (1)..(484): Ceres Seq. ID no. 4613578
gctccagtctagacggcggtttgacttttcgaccggggaaataggcgctgcgtttgatttgaggaggcgacacgagacgggacgggagggatctcttcgctggaggctggagcgttgcccgattcgtcgcggttctcggacaagggaggagggagggcgcacctcgggctccgatcgaagagctttgttaacattagagattgaaaggtagcatcgtagcaaaatgaaggcaccatcactactggttcagtgtttccctggcttgcttcccagcaaggccactagttgcgtgccaattgtatctgagaaggatctgcagctaccatcaccagctgttgaaataatcccctcaaagagtgttcatccatacaaatatgctggagagaaggttgatgtgcaaggtcttaatattttcaagggtaaagtcagtgtagcagatatgatagttatctcaccttctgaagtagcatcatcaaaatatgat

SEQ ID NO: 14372 - protein, 87 aa, Zea mays subsp. mays
  misc_feature (1)..(87): Ceres Seq. ID no. 4613579
MKAPSLLVQCFPGLLPSKATSCVPIVSEKDLQLPSPAVEIIPSKSVHPYKYAGEKVDVQGLNIFKGKVSVADMIVISPSEVASSKYD

SEQ ID NO: 14373 - protein, 69 aa, Zea mays subsp. mays
  misc_feature (1)..(69): Ceres Seq. ID no. 4613580
LQSRRRFDFSTGEIGAAFDLRRRHETGREGSLRWRLERCPIRRGSRTREEGGRTSGSDRRALLTLEIER

SEQ ID NO: 14374 - DNA, 443 bp, Zea mays subsp. mays
  misc_feature (1)..(443): Ceres Seq. ID no. 4614034
atctgaaacaagaagctttcgcaagctggccagctagctccctaccgactagataccgaggagtgacggatcaggatgggaggggtgacctcgagtgtggcggcgaagatggccttcttcccgccgacgccgccgtcgtacgcgctggtggaggacgccggtgcgggggtcaccacgctcagcggccagccgcaccgggagaacgtcgagttgctgcgcttccgcacccgcaaagggaacacgctggcggcgatgtacgtgcgccacccggacgccgcgtccacggtgctctattcccacggcaacgccgcggacctgggccacctctaccagctcttcctgcatctgtccttcaacctccgcgttaacatcctcgggtatgactattcaggatatgggcaatcatcaggaaagccgagtgaacacaatacttatgctgacat

SEQ ID NO: 14375 - protein, 122 aa, Zea mays subsp. mays
  misc_feature (1)..(122): Ceres Seq. ID no. 4614035
MGGVTSSVAAKMAFFPPTPPSYALVEDAGAGVTTLSGQPHRENVELLRFRTRKGNTLAAMYVRHPDAASTVLYSHGNAADLGHLYQLFLHLSFNLRVNILGYDYSGYGQSSGKPSEHNTYAD

SEQ ID NO: 14376 - protein, 121 aa, Zea mays subsp. mays
  misc_feature (1)..(121): Ceres Seq. ID no. 4614036
LKQEAFASWPASSLPTRYRGVTDQDGRGDLECGGEDGLLPADAAVVRAGGGRRCGGHHAQRPAAPGERRVAALPHPQREHAGGDVRAPPGRRVHGALFPRQRRGPGPPLPALPASVLQPPR

SEQ ID NO: 14377 - protein, 111 aa, Zea mays subsp. mays
  misc_feature (1)..(111): Ceres Seq. ID no. 4614037
MAFFPPTPPSYALVEDAGAGVTTLSGQPHRENVELLRFRTRKGNTLAAMYVRHPDAASTVLYSHGNAADLGHLYQLFLHLSFNLRVNILGYDYSGYGQSSGKPSEHNTYAD

SEQ ID NO: 14378 - DNA, 441 bp, Zea mays subsp. mays
  misc_feature (1)..(441): Ceres Seq. ID no. 4614339
agaacgccccagccttccacctcgaactccgcggcgcccagcgccctcggtaaccgccccccgccccgccacagagacaggtcgacgagacagacaaaggccggccgccatgggagaggacaagaaggcgggcaacaaggacgccgccggcggcgacaagaagaaggacgccggcgccggggccgcgccgcagcccatcgtgctgaaggtcgacttgcactgcgccggctgcgccaacaaggtccgcaaggccatcaagcacgccccaggtgtggagtcggtgacgccggacatggcggcgggtaaggtggtcgtgaccggtctggcggacgcggtggagctcaaggagcgcatcgaggccagggcgaagaagcccgtgcagatcgtctccgccggcgccggcccacccaagaaggagaaggacaaggagaaggawgaagg

SEQ ID NO: 14379 - protein, 146 aa, Zea mays subsp. mays
  misc_feature (1)..(146): Ceres Seq. ID no. 4614340
  misc_feature (145)..(145): Xaa is any aa, unknown or other
ERPSLPPRTPRRPAPSVTAPRPATETGRRDRQRPAAMGEDKKAGNKDAAGGDKKKDAGAGAAPQPIVLKVDLHCAGCANKVRKAIKHAPGVESVTPDMAAGKVVVTGLADAVELKERIEARAKKPVQIVSAGAGPPKKEKDKEKXE

SEQ ID NO: 14380 - protein, 110 aa, Zea mays subsp. mays
  misc_feature (1)..(110): Ceres Seq. ID no. 4614341
  misc_feature (109)..(109): Xaa is any aa, unknown or other
MGEDKKAGNKDAAGGDKKKDAGAGAAPQPIVLKVDLHCAGCANKVRKAIKHAPGVESVTPDMAAGKVVVTGLADAVELKERIEARAKKPVQIVSAGAGPPKKEKDKEKXE

SEQ ID NO: 14381 - protein, 101 aa, Zea mays subsp. mays
  misc_feature (1)..(101): Ceres Seq. ID no. 4614342
RTPQPSTSNSAAPSALGNRPPPRHRDRSTRQTKAGRHGRGQEGGQQGRRRRRQEEGRRRRGRAAAHRAEGRLALRRLRQQGPQGHQARPRCGVGDAGHGGG

SEQ ID NO: 14382 - DNA, 474 bp, Zea mays subsp. mays
  misc_feature (1)..(474): Ceres Seq. ID no. 4615028
atcagaaccgatccttacagagagacacccccagcgcgcgaggtatctacatcgatcatcaccagcgagccagccggccgaacgagcagcaccgatggcggcgtacatgcgcgtgacgcaccgcgacgagaaaggcaagaaggtgacggakaagatgccggtcccggagacgcggcgcccggacacggccaagcacttcgagcgcaagctggaggagcagggcctacaccgcttcgagcggcacccggcgaacgcgccccggggcgtgggcatcggcgccccgccgcccaagtccgggcgcggcggcmagtacacgtgggagggccccggcggcctcgtcgaggaccagctcgacccggcgccgcccgccatcgacccmaacgaccccaactacgaggaggcggaggakggaggggcggcggacgaggacgacgaggcggccagggaggtggtcgtcggggaggtggaggtcgc

SEQ ID NO: 14383 - protein, 158 aa, Zea mays subsp. mays
  misc_feature (1)..(158): Ceres Seq. ID no. 4615029
  misc_feature (51)..(51): Xaa is any aa, unknown or other
  misc_feature (103)..(103): Xaa is any aa, unknown or other
  misc_feature (127)..(127): Xaa is any aa, unknown or other
  misc_feature (137)..(137): Xaa is any aa, unknown or other
IRTDPYRETPPAREVSTSIITSEPAGRTSSTDGGVHARDAPRRERQEGDGXDAGPGDAAPGHGQALRAQAGGAGPTPLRAAPGERAPGRGHRRPAAQVRARRXVHVGGPRRPRRGPARPGAARHRPXRPQLRGGGGXRGGGRGRRGGQGGGRRGGGGR

SEQ ID NO: 14384 - protein, 157 aa, Zea mays subsp. mays
  misc_feature (1)..(157): Ceres Seq. ID no. 4615030
  misc_feature (50)..(50): Xaa is any aa, unknown or other
  misc_feature (103)..(103): Xaa is any aa, unknown or other
  misc_feature (126)..(126): Xaa is any aa, unknown or other
  misc_feature (136)..(136): Xaa is any aa, unknown or other
SEPILTERHPQRARYLHRSSPASQPAERAAPMAAYMRVTHRDEKGKKVTXKMPVPETRRPDTAKHFERKLEEQGLHRFERHPANAPRGVGIGAPPPKSGRGGXYTWEGPGGLVEDQLDPAPPAIDXNDPNYEEAEXGGAADEDDEAAREVVVGEVEV

SEQ ID NO: 14385 - protein, 126 aa, Zea mays subsp. mays
  misc_feature (1)..(126): Ceres Seq. ID no. 4615031
  misc_feature (19)..(19): Xaa is any aa, unknown or other
  misc_feature (72)..(72): Xaa is any aa, unknown or other
  misc_feature (95)..(95): Xaa is any aa, unknown or other
  misc_feature (105)..(105): Xaa is any aa, unknown or other
MAAYMRVTHRDEKGKKVTXKMPVPETRRPDTAKHFERKLEEQGLHRFERHPANAPRGVGIGAPPPKSGRGGXYTWEGPGGLVEDQLDPAPPAIDXNDPNYEEAEXGGAADEDDEAAREVVVGEVEV

SEQ ID NO: 14386 - DNA, 474 bp, Zea mays subsp. mays
  misc_feature (1)..(474): Ceres Seq. ID no. 4615167
agcagagtccaggtgcgtcmgcaggagtcaggactctcaactccggcgaagggagcagaaccgtttgtggcagttgggcggcgtcggcatggacgaggctacgaagaaggtggaggctacggtgctggagatcccgcgaggtctgatatggagtccgtaacggagaacaaggaggaggcgaaggcggcggaggagggcgacgctggcagggagagcaaggacaaggaacggaaggaagatgaggaggaggatgaaggtaagggtggcgggaagaganaktacggcgaccaaggggaccttatcctgtgccgcctgtcgagcaagaggagggtgactctgtcggagttcaagggcaggtcgctggtgtccatccgagagttctacgtgaaggacggcaaggagatgccctccgccaaaggtattagtatgacaatggagcagtgggaagcattttcaatgctgcacctgcgatag

SEQ ID NO: 14387 - protein, 157 aa, Zea mays subsp. mays
  misc_feature (1)..(157): Ceres Seq. ID no. 4615168
  misc_feature (7)..(7): Xaa is any aa, unknown or other
  misc_feature (93)..(93): Xaa is any aa, unknown or other
SRVQVRXQESGLSTPAKGAEPFVAVGRRRHGRGYEEGGGYGAGDPARSDMESVTENKEEAKAAEEGDAGRESKDKERKEDEEEDEGKGGGKRXYGDQGDLILCRLSSKRRVTLSEFKGRSLVSIREFYVKDGKEMPSAKGISMTMEQWEAFSMLHLR

SEQ ID NO: 14388 - protein, 108 aa, Zea mays subsp. mays
  misc_feature (1)..(108): Ceres Seq. ID no. 4615169
  misc_feature (44)..(44): Xaa is any aa, unknown or other
MESVTENKEEAKAAEEGDAGRESKDKERKEDEEEDEGKGGGKRXYGDQGDLILCRLSSKRRVTLSEFKGRSLVSIREFYVKDGKEMPSAKGISMTMEQWEAFSMLHLR

SEQ ID NO: 14389 - DNA, 448 bp, Zea mays subsp. mays
  misc_feature (1)..(448): Ceres Seq. ID no. 4616522
gcgtccattccacctgcttggtccatcagcagcgagcgaacagggaaaaaggagaggccgagaagcgctttagcgataagactggtgcacccgtagcggcacggcatggcggccacggcgtactccgtggcgctcctcggcggcgcacgcctgccggccgccctcctccctcggcgcagcagcgtgtgccaccagcagcttcgcctccaagacgcgccgaggctctccctgcaccgtgccagggccgcttccgaggacacgtcggcctccggcggcgacgagctcatcgaagacctcaaggcaaagtgggacgccgttgaggacaagcccaccgtcctcctgtacggcggcggcgccgtcgtggcgctatggttgacgtccgttgttgtcggcgccatcaacgccgtgccgctgctccccaagatcctggagctcgtcggcctcgtct

SEQ ID NO: 14390 - protein, 114 aa, Zea mays subsp. mays
  misc_feature (1)..(114): Ceres Seq. ID no. 4616523
MAATAYSVALLGGARLPAALLPRRSSVCHQQLRLQDAPRLSLHRARAASEDTSASGGDELIEDLKAKWDAVEDKPTVLLYGGGAVVALWLTSVVVGAINAVPLLPKILELVGLV

SEQ ID NO: 14391 - protein, 105 aa, Zea mays subsp. mays
  misc_feature (1)..(105): Ceres Seq. ID no. 4616524
VHSTCLVHQQRANREKGEAEKRFSDKTGAPVAARHGGHGVLRGAPRRRTPAGRPPPSAQQRVPPAASPPRRAEALPAPCQGRFRGHVGLRRRRAHRRPQGKVGRR

SEQ ID NO: 14392 - DNA, 434 bp, Zea mays subsp. mays
  misc_feature (1)..(434): Ceres Seq. ID no. 4647884
ttccgcagccaccaccaccccaacccaccggagcagacgaaggcggcgccgcggcgacctcatctccggccaagggaaatgactaccgttccggggtctctggtgtgggagctcgtgaagaaaaacaactgcttcttgatcaagcagttcggcaacagcaacgccaaggtgcagttcagcaaggagccaaacaacctctacaatgtccactcctacaagttctctggcttggcgaacagcaagaccgtggcggtccagccatcagcgggagaggacaaggctgtcgtcctgtccacgaccaagaccaagaagcagaacacccctgccaagctccagcacaagactctgatgcgcaaggagttccgcaagatggccaagtccgtcaagaaccaggtctgcgacaactactacaggcctgatctgaccaagccggc

SEQ ID NO: 14393 - protein, 144 aa, Zea mays subsp. mays
  misc_feature (1)..(144): Ceres Seq. ID no. 4647885
FRSHHHPNPPEQTKAAPRRPHLRPREMTTVPGSLVWELVKKNNCFLIKQFGNSNAKVQFSKEPNNLYNVHSYKFSGLANSKTVAVQPSAGEDKAVVLSTTKTKKQNTPAKLQHKTLMRKEFRKMAKSVKNQVCDNYYRPDLTKP

SEQ ID NO: 14394 - protein, 138 aa, Zea mays subsp. mays
  misc_feature (1)..(138): Ceres Seq. ID no. 4647886
PQPPPPQPTGADEGGAAATSSPAKGNDYRSGVSGVGAREEKQLLLDQAVRQQQRQGAVQQGAKQPLQCPLLQVLWLGEQQDRGGPAISGRGQGCRPVHDQDQEAEHPCQAPAQDSDAQGVPQDGQVRQEPGLRQLLQA

SEQ ID NO: 14395 - protein, 118 aa, Zea mays subsp. mays
  misc_feature (1)..(118): Ceres Seq. ID no. 4647887
MTTVPGSLVWELVKKNNCFLIKQFGNSNAKVQFSKEPNNLYNVHSYKFSGLANSKTVAVQPSAGEDKAVVLSTTKTKKQNTPAKLQHKTLMRKEFRKMAKSVKNQVCDNYYRPDLTKP

SEQ ID NO: 14396 - DNA, 475 bp, Zea mays subsp. mays
  misc_feature (1)..(475): Ceres Seq. ID no. 4648388
gaggagctcctccacgccattcctgcacgccttcctctccaccacctcctcctcccctacgcccccctcctccctccagctccggcgagccttctccgacggccacctcccttcgctcaacccctcctcctccggcgacgacgacagcaagaccaccggcctctacaccgagctctccttctccatctacaacacctycagcaaggccaagctggagccccaccaggagcaggagatggaggaggagcaggagcagcaggcggcgcagccggagctgccgctgttcctggcgaggggcatggggatcgaccgcctcgcctccggcctcttcaccgccggcatgggctccgaggctgccctggctaggatggccagcggggtggaccagaaggccgtgctggcgctggacgcccagtacaaggagatggtggacgagcagcccggcaacgccctgttcctgcgcaactacgcgcag

SEQ ID NO: 14397 - protein, 158 aa, Zea mays subsp. mays
  misc_feature (1)..(158): Ceres Seq. ID no. 4648389
  misc_feature (66)..(66): Xaa is any aa, unknown or other
RSSSTPFLHAFLSTTSSSPTPPSSLQLRRAFSDGHLPSLNPSSSGDDDSKTTGLYTELSFSIYNTXSKAKLEPHQEQEMEEEQEQQAAQPELPLFLARGMGIDRLASGLFTAGMGSEAALARMASGVDQKAVLALDAQYKEMVDEQPGNALFLRNYAQ

SEQ ID NO: 14398 - protein, 157 aa, Zea mays subsp. mays
  misc_feature (1)..(157): Ceres Seq. ID no. 4648390
  misc_feature (66)..(66): Xaa is any aa, unknown or other
GAPPRHSCTPSSPPPPPPLRPPPPSSSGEPSPTATSLRSTPPPPATTTARPPASTPSSPSPSTTPXARPSWSPTRSRRWRRSRSSRRRSRSCRCSWRGAWGSTASPPASSPPAWAPRLPWLGWPAGWTRRPCWRWTPSTRRWWTSSPATPCSCATTR

SEQ ID NO: 14399 - protein, 121 aa, Zea mays subsp. mays
  misc_feature (1)..(121): Ceres Seq. ID no. 4648391
  misc_feature (66)..(66): Xaa is any aa, unknown or other
EELLHAIPARLPLHHLLLPYAPLLPPAPASLLRRPPPFAQPLLLRRRRQQDHRPLHRALLLHLQHXQQGQAGAPPGAGDGGGAGAAGGAAGAAAVPGEGHGDRPPRLRPLHRRHGLRGCPG

SEQ ID NO: 14400 - DNA, 419 bp, Zea mays subsp. mays
  misc_feature (1)..(419): Ceres Seq. ID no. 4648681
accgcattagcactcgtctttggttctggtttatagatctctgtgaagtcgctttataacactcaacctaagatgcagaacgaggaaggacagatcaccgagctttacattcctaggaagtgctctgccacaaaccgattgattaccgctaaggaccatgcttcggttcaggttaacattgggcatgtggatnagaatggcgtctacaatggccatttctccacttttgctctctgcggcttcatccgtgctcagggtgatgctgacagtgccctagatcgcttgtggcagaagaagaaagttgaagttaagcaacagtagacacccatgatagtttgttactttgctatgtattaatttctactcttgctagagatatttgagtactatgattgtcgtcttgagcaaatactcattct

SEQ ID NO: 14401 - protein, 82 aa, Zea mays subsp. mays
  misc_feature (1)..(82): Ceres Seq. ID no. 4648682
  misc_feature (41)..(41): Xaa is any aa, unknown or other
MQNEEGQITELYIPRKCSATNRLITAKDHASVQVNIGHVDXNGVYNGHFSTFALCGFIRAQGDADSALDRLWQKKKVEVKQQ

SEQ ID NO: 14402 - DNA, 444 bp, Zea mays subsp. mays
  misc_feature (1)..(444): Ceres Seq. ID no. 4776731
ataaaatggtctcagttgagaggataaaacaattcacaaatattccttcagaggccacatggaggatcaaggactgcctaccagattctaattggccaacaaaaggcgacatcaatgtcattgatcttaagtttaggtataggcacaacactcctctagtgttgaagggcatcacaataagcatacatggaggagagaagattggagttgtcggcagaactggtagtgggaaatcaacactgatccaggcactgttcagaatagtggagccttctgaggggagaataatcatcgacggtgttgacatctgcactttaggactccatgaccttaggtcacggtttggtatcatacctcaggaacctgttctctttgaagggaccattaggagcaacattgatccgcttgagcagtattccgatgatgaaatctggcaggcattgg

SEQ ID NO: 14403 - protein, 147 aa, Zea mays subsp. mays
  misc_feature (1)..(147): Ceres Seq. ID no. 4776732
KMVSVERIKQFTNIPSEATWRIKDCLPDSNWPTKGDINVIDLKFRYRHNTPLVLKGITISIHGGEKIGVVGRTGSGKSTLIQALFRIVEPSEGRIIIDGVDICTLGLHDLRSRFGIIPQEPVLFEGTIRSNIDPLEQYSDDEIWQAL

SEQ ID NO: 14404 - protein, 146 aa, Zea mays subsp. mays
  misc_feature (1)..(146): Ceres Seq. ID no. 4776733
MVSVERIKQFTNIPSEATWRIKDCLPDSNWPTKGDINVIDLKFRYRHNTPLVLKGITISIHGGEKIGVVGRTGSGKSTLIQALFRIVEPSEGRIIIDGVDICTLGLHDLRSRFGIIPQEPVLFEGTIRSNIDPLEQYSDDEIWQAL

SEQ ID NO: 14405 - DNA, 432 bp, Zea mays subsp. mays
  misc_feature (1)..(432): Ceres Seq. ID no. 4776740
attttctttcgatcgtctcgcatcgacttttattagggttttcgtttcctgagagatcaatcaatcaatcgatatggcttccctagattccgacgtaaacatgatccctgctggtgaatcctccagctccgttgccgcttcttcgtcgagcaagaaggccaagagattcgaagttaagaagtggagcgccgtggctctctgggcttgggatatcgttgttgacaattgcgccatctgcagaaaccacatcatggatctctgtattgaatgtcaggctaatcaggccagcgctacgagtgaggaatgcactgttgcttggggggtttgcaatcacgccttccactttcactgcatcagcagatggttaaagactcgtcaagtttgcccattggataacagtgagtgggagttccagaaatatggtcactaaat

SEQ ID NO: 14406 - protein, 118 aa, Zea mays subsp. mays
  misc_feature (1)..(118): Ceres Seq. ID no. 4776741
MASLDSDVNMIPAGESSSSVAASSSSKKAKRFEVKKWSAVALWAWDIVVDNCAICRNHIMDLCIECQANQASATSEECTVAWGVCNHAFHFHCISRWLKTRQVCPLDNSEWEFQKYGH

SEQ ID NO: 14407 - protein, 109 aa, Zea mays subsp. mays
  misc_feature (1)..(109): Ceres Seq. ID no. 4776742
MIPAGESSSSVAASSSSKKAKRFEVKKWSAVALWAWDIVVDNCAICRNHIMDLCIECQANQASATSEECTVAWGVCNHAFHFHCISRWLKTRQVCPLDNSEWEFQKYGH

SEQ ID NO: 14408 - protein, 59 aa, Zea mays subsp. mays
  misc_feature (1)..(59): Ceres Seq. ID no. 4776743
MDLCIECQANQASATSEECTVAWGVCNHAFHFHCISRWLKTRQVCPLDNSEWEFQKYGH

SEQ ID NO: 14409 - DNA, 414 bp, Zea mays subsp. mays
  misc_feature (1)..(414): Ceres Seq. ID no. 4777312
ataccgaatcctagcccagctgttccgccgagcgaacgacccacaaccagaagccacccattggcgtacgcgaggcgatcggagcatcccgtcccaagaggagaaactccggccggcgacgcgggggaaaatggggaagacgccggtgcggatgaaggcggtggtgtacgcgctgtcgcccttccagcagaaggtgatgccggggctgtggaaggacatcaccaccaagatccaccacaaggtcaccgagaactggatctccgccacgctcctcctcacccccgtcgtcggcacctaccaatacgccatgtggtacaaagagcaggagaagctttcccacagatactaaatgggatgtcctccaagttgctgcggcttgtcgcagttgaattttcyatgatgggbtgtataatc

SEQ ID NO: 14410 - protein, 138 aa, Zea mays subsp. mays
  misc_feature (1)..(138): Ceres Seq. ID no. 4777313
  misc_feature (132)..(132): Xaa is any aa, unknown or other
  misc_feature (135)..(135): Xaa is any aa, unknown or other
IPNPSPAVPPSERPTTRSHPLAYARRSEHPVPRGETPAGDAGENGEDAGADEGGGVRAVALPAEGDAGAVEGHHHQDPPQGHRELDLRHAPPHPRRRHLPIRHVVQRAGEAFPQILNGMSSKLLRLVAVEFXMMXCII

SEQ ID NO: 14411 - protein, 115 aa, Zea mays subsp. mays
  misc_feature (1)..(115): Ceres Seq. ID no. 4777314
YRILAQLFRRANDPQPEATHWRTRGDRSIPSQEEKLRPATRGKMGKTPVRMKAVVYALSPFQQKVMPGLWKDITTKIHHKVTENWISATLLLTPVVGTYQYAMWYKEQEKLSHRY

SEQ ID NO: 14412 - protein, 72 aa, Zea mays subsp. mays
  misc_feature (1)..(72): Ceres Seq. ID no. 4777315
MGKTPVRMKAVVYALSPFQQKVMPGLWKDITTKIHHKVTENWISATLLLTPVVGTYQYAMWYKEQEKLSHRY

SEQ ID NO: 14413 - DNA, 535 bp, Zea mays subsp. mays
  misc_feature (1)..(535): Ceres Seq. ID no. 4777621
gtccgccgacgacaaattcatccggcaggtgacgacgcaaggtacccgcgccggcgcgggcccgggtctgctcccggaggcgcagttcgcagcgttcgtgaggcggcacgggcggcggtactccgggcccaaggagtatgcgcgtcggctgcgcgtgttcgcggccaacctggcccgcgcggcggcgcaccaggcgctggacccgacggcgcgccacggggtcacgcccttctccgacctcacgcgggaggagttcgaggcgcgcctcacgggcctgcgcgccggcggggacgtccagcggctcatgagtggcgtgccggccgccccgccggcctcgcaggaggaggtggcccggctgccggccagcttcgactggcgcgacaagggcgccgtcacgggcgtcaagacgcagggtgcgtgcgggtcgtgctgggcgttcagcacgacgggcgcggtggagggcgccaacttcctcgccacgggggagctcgtcgacctcagcgagcagcagctggtcgactgcgaccacacgtgc

SEQ ID NO: 14414 - protein, 178 aa, Zea mays subsp. mays
  misc_feature (1)..(178): Ceres Seq. ID no. 4777622
VRRRQIHPAGDDARYPRRRGPGSAPGGAVRSVREAARAAVLRAQGVCASAARVRGQPGPRGGAPGAGPDGAPRGHALLRPHAGGVRGAPHGPARRRGRPAAHEWRAGRPAGLAGGGGPAAGQLRLARQGRRHGRQDAGCVRVVLGVQHDGRGGGRQLPRHGGARRPQRAAAGRLRPHV

SEQ ID NO: 14415 - protein, 178 aa, Zea mays subsp. mays
  misc_feature (1)..(178): Ceres Seq. ID no. 4777623
SADDKFIRQVTTQGTRAGAGPGLLPEAQFAAFVRRHGRRYSGPKEYARRLRVFAANLARAAAHQALDPTARHGVTPFSDLTREEFEARLTGLRAGGDVQRLMSGVPAAPPASQEEVARLPASFDWRDKGAVTGVKTQGACGSCWAFSTTGAVEGANFLATGELVDLSEQQLVDCDHTC

SEQ ID NO: 14416 - DNA, 476 bp, Zea mays subsp. mays
  misc_feature (1)..(476): Ceres Seq. ID no. 5005895
catcacccgcgtccgccaccgccgccgcctttcgtaccgcggcccctaaacccctttcctcgttcccctccgtctctcagttaggcacaatgatgctagctaataagcttggtggtttgctcaagaatgctacgagttcaaagagttcaaatatgtctgtctaccaagcaatcagatgcatgtcatcatccaagctttttgttggagggctttcttatggaaccgatgatcacagtctcagagacgagtttgccaaatatggacaagttattgaagctaagattatccttgatcgtgagtctgggaggtccagaggttttggctttataacttacacgtcttctgaggaggcttcggctgccatcactgccatggatggaaagactctggatggacggaacatacgggttaatcatgctaacgagaggacaggtggcttccgcagcagtggtggcggctatggtggcggtggctat

SEQ ID NO: 14417 - protein, 158 aa, Zea mays subsp. mays
  misc_feature (1)..(158): Ceres Seq. ID no. 5005896
SPASATAAAFRTAAPKPLSSFPSVSQLGTMMLANKLGGLLKNATSSKSSNMSVYQAIRCMSSSKLFVGGLSYGTDDHSLRDEFAKYGQVIEAKIILDRESGRSRGFGFITYTSSEEASAAITAMDGKTLDGRNIRVNHANERTGGFRSSGGGYGGGGY

SEQ ID NO: 14418 - protein, 129 aa, Zea mays subsp. mays
  misc_feature (1)..(129): Ceres Seq. ID no. 5005897
MMLANKLGGLLKNATSSKSSNMSVYQAIRCMSSSKLFVGGLSYGTDDHSLRDEFAKYGQVIEAKIILDRESGRSRGFGFITYTSSEEASAAITAMDGKTLDGRNIRVNHANERTGGFRSSGGGYGGGGY

SEQ ID NO: 14419 - protein, 128 aa, Zea mays subsp. mays
  misc_feature (1)..(128): Ceres Seq. ID no. 5005898
MLANKLGGLLKNATSSKSSNMSVYQAIRCMSSSKLFVGGLSYGTDDHSLRDEFAKYGQVIEAKIILDRESGRSRGFGFITYTSSEEASAAITAMDGKTLDGRNIRVNHANERTGGFRSSGGGYGGGGY

SEQ ID NO: 14420 - DNA, 490 bp, Zea mays subsp. mays
  misc_feature (1)..(490): Ceres Seq. ID no. 5006152
atcacccgcgtccgccaccgccgccgcctttcgtaccgcggcccctaaacccctttcctcgttcccctccgtctctcagttaggcacaatgatgctagctaataagcttggtggtttgctcaagaatgctacgagttcaaagagttcaaatatgtctgtctaccaagcaatcagatgcatgtcatcatccaagctttttgttggagggctttcttatggaaccgatgatcacagtctcagagacgagtttgccaaatatggacaagttattgaagctaagattatccttgatcgtgagtctgggaggtccagaggttttggctttataacttacacgtcttctgaggaggcttcggctgccatcactgccatggatggaaagactctggatggacggaacatacgggttaatcatgctaacgagaggacaggtggcttcccgcagcagcggtggttatggtggtggcggctatggtggtggcaytacggc

SEQ ID NO: 14421 - protein, 163 aa, Zea mays subsp. mays
  misc_feature (1)..(163): Ceres Seq. ID no. 5006153
  misc_feature (161)..(161): Xaa is any aa, unknown or other
SPASATAAAFRTAAPKPLSSFPSVSQLGTMMLANKLGGLLKNATSSKSSNMSVYQAIRCMSSSKLFVGGLSYGTDDHSLRDEFAKYGQVIEAKIILDRESGRSRGFGFITYTSSEEASAAITAMDGKTLDGRNIRVNHANERTGGFPQQRWLWWWRLWWWXYG

SEQ ID NO: 14422 - protein, 134 aa, Zea mays subsp. mays
  misc_feature (1)..(134): Ceres Seq. ID no. 5006154
  misc_feature (132)..(132): Xaa is any aa, unknown or other
MMLANKLGGLLKNATSSKSSNMSVYQAIRCMSSSKLFVGGLSYGTDDHSLRDEFAKYGQVIEAKIILDRESGRSRGFGFITYTSSEEASAAITAMDGKTLDGRNIRVNHANERTGGFPQQRWLWWWRLWWWXYG

SEQ ID NO: 14423 - protein, 133 aa, Zea mays subsp. mays
  misc_feature (1)..(133): Ceres Seq. ID no. 5006155
  misc_feature (131)..(131): Xaa is any aa, unknown or other
MLANKLGGLLKNATSSKSSNMSVYQAIRCMSSSKLFVGGLSYGTDDHSLRDEFAKYGQVIEAKIILDRESGRSRGFGFITYTSSEEASAAITAMDGKTLDGRNIRVNHANERTGGFPQQRWLWWWRLWWWXYG

SEQ ID NO: 14424 - DNA, 510 bp, Zea mays subsp. mays
  misc_feature (1)..(510): Ceres Seq. ID no. 5008125
atcagaagctagaagcctagagcagccaagaaaagcacatacccgagtcgccgaaacaacaacaatcccaatcccccctcgtcactcaaaactcgaccaacaatgtcgctgattcgccgtggaagcgcattcgaccccttctcccttgacctctgggaccccttccagggctttcccttcggctctggaagcagcagcagcagcagcctgttcccctcgttcggaggcaccaccagctctgagacggccgccttcgccggcgctcgcgtcgactggaaggagacgccggaggcgcacgtgttcaagaccgacgtgccggggctgaagaaggaggaggtgaaggtggagctggaggacggcaacgtgctccagatcagcggcgagcgcagcaaggagcaggaggagaagacggacacctggcaccgcgtggagcgcmscagcggcaagttcctgcgcaggttccgcctgccggagaacgccaggacggagcagatcagtgcgtccatggag

SEQ ID NO: 14425 - protein, 136 aa, Zea mays subsp. mays
  misc_feature (1)..(136): Ceres Seq. ID no. 5008126
  misc_feature (112)..(112): Xaa is any aa, unknown or other
MSLIRRGSAFDPFSLDLWDPFQGFPFGSGSSSSSSLFPSFGGTTSSETAAFAGARVDWKETPEAHVFKTDVPGLKKEEVKVELEDGNVLQISGERSKEQEEKTDTWHRVERXSGKFLRRFRLPENARTEQISASME

SEQ ID NO: 14426 - DNA, 502 bp, Zea mays subsp. mays
  misc_feature (1)..(502): Ceres Seq. ID no. 5008167
atcagaagctagaagcctagagcagccaagaaaagcacatacccgagtcgccgaaacaacaacaatcccaatcccccctcgtcactcaaaactcgagctcgagcaacaatgtcgctgattcgccgtggaagcgcattcgaccccttctccctcgacctctgggaccccttccagggcttatttcccttcggctctggaagcagcagcagcagcagcctgttcccctcgttcggaggcaccaccaccagctcggagacggccgccttcgccggcgctcgcgtcgactggaaggagacgccggaggcgcacgtgttcaagaccgacgtgccggggctgaagaaggaggaggtgaaggtggagctggaggacggcaacgtgctccagatcagcggcgagcgctgcaaggagcaggaggagaagacggacacctggcaccgcgtggagcgcagcagcggcaagttcctgcgcaggttccgcctgacggagaacgccaggacggagc

SEQ ID NO: 14427 - protein, 131 aa, Zea mays subsp. mays
  misc_feature (1)..(131): Ceres Seq. ID no. 5008168
MSLIRRGSAFDPFSLDLWDPFQGLFPFGSGSSSSSSLFPSFGGTTTSSETAAFAGARVDWKETPEAHVFKTDVPGLKKEEVKVELEDGNVLQISGERCKEQEEKTDTWHRVERSSGKFLRRFRLTENARTE

SEQ ID NO: 14428 - DNA, 504 bp, Zea mays subsp. mays
  misc_feature (1)..(504): Ceres Seq. ID no. 5008183
ggttccgtggcggggagtgttttccaggcggcggcgcggtagcgtgaaaccgggcgaccgagcaagcgacggccatggcgttctggcagacgcgcgattttctcttctgtggcatatgcggcaccctcctcaccttcgactccgtccgctccgcctcctgccctctatgcggcttcaagcgcgatgccaaagaaattgaagggaaagaaatacagtacacgatgaccgccgaggatattcgaagagggttaaagacacaaacggaggacgttgttgggcaaagaccagtgacaaataaagcctgtccaaaatgcgaccatccaaaagctgaattttacaacatacagatgcgttcagcagatgagggagagacgacgttctacatgtgtaaaggatgcggctgtaatttcaaagacgaatgaggagttatcctaccacttctacggatatatggcattggtgccgaagawattccagcgttgacagactagtactccctccgcc

SEQ ID NO: 14429 - protein, 115 aa, Zea mays subsp. mays
  misc_feature (1)..(115): Ceres Seq. ID no. 5008184
MAFWQTRDFLFCGICGTLLTFDSVRSASCPLCGFKRDAKEIEGKEIQYTMTAEDIRRGLKTQTEDVVGQRPVTNKACPKCDHPKAEFYNIQMRSADEGETTFYMCKGCGCNFKDE

SEQ ID NO: 14430 - protein, 66 aa, Zea mays subsp. mays
  misc_feature (1)..(66): Ceres Seq. ID no. 5008185
MTAEDIRRGLKTQTEDVVGQRPVTNKACPKCDHPKAEFYNIQMRSADEGETTFYMCKGCGCNFKDE

SEQ ID NO: 14431 - protein, 65 aa, Zea mays subsp. mays
  misc_feature (1)..(65): Ceres Seq. ID no. 5008186
VPWRGVFSRRRRGSVKPGDRASDGHGVLADARFSLLWHMRHPPHLRLRPLRLLPSMRLQARCQRN

SEQ ID NO: 14432 - DNA, 586 bp, Zea mays subsp. mays
  misc_feature (1)..(586): Ceres Seq. ID no. 5682771
ttgctgcggttgctcttgctcttaggttggatggcctgattatatcaaacnccacagtttccagaccatcacctgcagataaacatccattggctcaggaaactggtggattaagtgggaagcctttgttggacttatctactaacattctcagggacatgtatatgcttacacggggcaagattcccctcataggctgtggtggcgtgagtarcggtgaggatgcatacaagaagatccgttccggagctacacttgttcaactttatactgctcttgcatatggtggtccagctcttatacccagaataaaggctgagctagcagaatgtttggaaagagacggtttcaaatctgtgcaggaagcagtcggcgctgatttccgatgatccctggcggatcgctgagaaggtytgaataaccgttccgttaaagttcatgtgattttgatgagaagcaagcaactttttttttgtgtgtgggcacgatgcttgccaattccatttgaccggtacttgaaaagaaataccgggttgaaactttgctgggggtgagttgagtaatgagcggctgtatcacgcgcgcg

SEQ ID NO: 14433 - protein, 128 aa, Zea mays subsp. mays
  misc_feature (1)..(128): Ceres Seq. ID no. 5682772
  misc_feature (17)..(17): Xaa is any aa, unknown or other
  misc_feature (71)..(71): Xaa is any aa, unknown or other
AAVALALRLDGLIISNXTVSRPSPADKHPLAQETGGLSGKPLLDLSTNILRDMYMLTRGKIPLIGCGGVSXGEDAYKKIRSGATLVQLYTALAYGGPALIPRIKAELAECLERDGFKSVQEAVGADFR

SEQ ID NO: 14434 - protein, 76 aa, Zea mays subsp. mays
  misc_feature (1)..(76): Ceres Seq. ID no. 5682773
  misc_feature (19)..(19): Xaa is any aa, unknown or other
MYMLTRGKIPLIGCGGVSXGEDAYKKIRSGATLVQLYTALAYGGPALIPRIKAELAECLERDGFKSVQEAVGADFR

SEQ ID NO: 14435 - protein, 74 aa, Zea mays subsp. mays
  misc_feature (1)..(74): Ceres Seq. ID no. 5682774
  misc_feature (17)..(17): Xaa is any aa, unknown or other
MLTRGKIPLIGCGGVSXGEDAYKKIRSGATLVQLYTALAYGGPALIPRIKAELAECLERDGFKSVQEAVGADFR

SEQ ID NO: 14436 - DNA, 407 bp, Zea mays subsp. mays
  misc_feature (1)..(407): Ceres Seq. ID no. 5682780
actggtgaccatcatcaccagaggcgaccacgtcagcaracggcgctggtggaggaggccacctggcgcgcgtactgcaacggccgcaagtgcggctacgcgctgcggcgggactgcggcgcggacgagtggcgggtgctgcgcgccgtggagccggtctccgtgggcgccggtgtgctccccgacggcgacaacgtgggcaccggagccgccgccgccggcgagggcgacctcatgtacatgagggccaagttcgagcgggtggtggggtccagggactcggaggcgttctacatgctgaaccccgacggcggcaccgggcccgagctcagcatctaccttctcagggtctagatgacaaaatagacatgtataacatataataatatgctgtttgtttgcgtgcc

SEQ ID NO: 14437 - protein, 117 aa, Zea mays subsp. mays
  misc_feature (1)..(117): Ceres Seq. ID no. 5682781
  misc_feature (13)..(13): Xaa is any aa, unknown or other
TGDHHHQRRPRQXTALVEEATWRAYCNGRKCGYALRRDCGADEWRVLRAVEPVSVGAGVLPDGDNVGTGAAAAGEGDLMYMRAKFERVVGSRDSEAFYMLNPDGGTGPELSIYLLRV

SEQ ID NO: 14438 - protein, 80 aa, Zea mays subsp. mays
  misc_feature (1)..(80): Ceres Seq. ID no. 5682782
  misc_feature (13)..(13): Xaa is any aa, unknown or other
LVTIITRGDHVSXRRWWRRPPGARTATAASAATRCGGTAARTSGGCCAPWSRSPWAPVCSPTATTWAPEPPPPARATSCT

SEQ ID NO: 14439 - DNA, 527 bp, Zea mays subsp. mays
  misc_feature (1)..(527): Ceres Seq. ID no. 5682838
tactgctgcgcttgtggctgtttctcgagtggatgactactggcatcattggcaagatgtatttgcagggggtcttataggtcttacagttgcttcattttgctatctacagttttttccatatccttttgatggcgatgctttgtggcctcacgcatacactgtccagttagccgaggaagggagcagcagaaatacaaactcctacagcgtgagaccagccgagatcgaaacagtcaatattcctggtcacggtgggatcaccctaagagatactctaaatgatatggagtctggtagcggcaggagattgtgaatgagtctggaagttttgaaccatataccatgagagctgcttgcaatatatacacaagtagatctattgtagagctgttgagtgctgccaccgtgataggagagggttgtttagatgggtctgtcactaaattacttggtaggggtgttgtatcttctgacaacctttggcctttctttatactccacctgtggttaaagtttgtttgctt

SEQ ID NO: 14440 - protein, 104 aa, Zea mays subsp. mays
  misc_feature (1)..(104): Ceres Seq. ID no. 5682839
TAALVAVSRVDDYWHHWQDVFAGGLIGLTVASFCYLQFFPYPFDGDALWPHAYTVQLAEEGSSRNTNSYSVRPAEIETVNIPGHGGITLRDTLNDMESGSGRRL

SEQ ID NO: 14441 - protein, 60 aa, Zea mays subsp. mays
  misc_feature (1)..(60): Ceres Seq. ID no. 5682840
MRAACNIYTSRSIVELLSAATVIGEGCLDGSVTKLLGRGVVSSDNLWPFFILHLWLKFVC

SEQ ID NO: 14442 - DNA, 459 bp, Zea mays subsp. mays
  misc_feature (1)..(459): Ceres Seq. ID no. 5682845
gacggtcggaggsccgctgaggagtggatggtcgactacgctctccggaaggaagtcaagaggctggctcgtgctcagaagaggaaagttgagatgcttgtccaggccttcgaatctgttytgcccmcggtagcaatagcaagcgagaagaagaagcccgggcaacacgatggccttygaaagcatgcatgtagctgacagatagatagatagaatcatagatagccgacactcatcttgagtcaggtagtagtaggacgtgacaatttgagtcaggtagatgaaacgtttcaattcagtcaaacactagtcacaacggatacaaggtttgatgctccaccaaccactgatccgttgtgaacttgtagtagaagcaggccaccgctggcatgccatgccatcaacctaacatggaccattytgaatgtcagctcaaaacgtggcaaaatactatacttc

SEQ ID NO: 14443 - protein, 65 aa, Zea mays subsp. mays
  misc_feature (1)..(65): Ceres Seq. ID no. 5682846
  misc_feature (5)..(5): Xaa is any aa, unknown or other
  misc_feature (41)..(41): Xaa is any aa, unknown or other
  misc_feature (43)..(43): Xaa is any aa, unknown or other
  misc_feature (60)..(60): Xaa is any aa, unknown or other
DGRRXAEEWMVDYALRKEVKRLARAQKRKVEMLVQAFESVXPXVAIASEKKKPGQHDGLXKHACS

SEQ ID NO: 14444 - protein, 56 aa, Zea mays subsp. mays
  misc_feature (1)..(56): Ceres Seq. ID no. 5682847
  misc_feature (32)..(32): Xaa is any aa, unknown or other
  misc_feature (34)..(34): Xaa is any aa, unknown or other
  misc_feature (51)..(51): Xaa is any aa, unknown or other
MVDYALRKEVKRLARAQKRKVEMLVQAFESVXPXVAIASEKKKPGQHDGLXKHACS

SEQ ID NO: 14445 - protein, 43 aa, Zea mays subsp. mays
  misc_feature (1)..(43): Ceres Seq. ID no. 5682848
  misc_feature (4)..(4): Xaa is any aa, unknown or other
  misc_feature (40)..(40): Xaa is any aa, unknown or other
  misc_feature (42)..(42): Xaa is any aa, unknown or other
TVGXPLRSGWSTTLSGRKSRGWLVLRRGKLRCLSRPSNLXCXR

SEQ ID NO: 14446 - DNA, 394 bp, Zea mays subsp. mays
  misc_feature (1)..(394): Ceres Seq. ID no. 5683237
mcgccgaggaggcggtgaaggaggagaggcagccaaagacgttcccsccgccgataccgtccatcgggcgcggcggcaarccgtacgtgtgcttccggtcgttccgggaggacggccggttcgtgctgctggaggtggtgatccccgggaaggagctcctgcaggccacgcgcgagggcggccggctcaggctgcagttcgccaacgctgccgcagcagccgcaggtggtgtgggtgtcgtcgacgaggcggtgcacggaggtgacgacgatggcgacccccgtggcaagaacgcatgcatagacgacgacgaccmcgatgacgagcgctaggtgatcgtcggggttcgttgatgtacttggcatactttatcacgatcgataattgtcctact

SEQ ID NO: 14447 - protein, 109 aa, Zea mays subsp. mays
  misc_feature (1)..(109): Ceres Seq. ID no. 5683238
  misc_feature (15)..(15): Xaa is any aa, unknown or other
  misc_feature (26)..(26): Xaa is any aa, unknown or other
  misc_feature (105)..(105): Xaa is any aa, unknown or other
AEEAVKEERQPKTFXPPIPSIGRGGXPYVCFRSFREDGRFVLLEVVIPGKELLQATREGGRLRLQFANAAAAAAGGVGVVDEAVHGGDDDGDPRGKNACIDDDDXDDER

SEQ ID NO: 14448 - protein, 87 aa, Zea mays subsp. mays
  misc_feature (1)..(87): Ceres Seq. ID no. 5683239
  misc_feature (16)..(16): Xaa is any aa, unknown or other
  misc_feature (27)..(27): Xaa is any aa, unknown or other
RRGGGEGGEAAKDVPXADTVHRARRQXVRVLPVVPGGRPVRAAGGGDPREGAPAGHARGRPAQAAVRQRCRSSRRWCGCRRRGGARR

SEQ ID NO: 14449 - DNA, 523 bp, Zea mays subsp. mays
  misc_feature (1)..(523): Ceres Seq. ID no. 5683273
btggtgaacaaaggtcaccggsgaagccwtcaagcactcgbtgggacagagccmccccggtacgccttgtgccctacaaccccgagtacgttracgagtcggtgctgtggacggagagccgcgacgtcgggcacggcttccgctgcgtgcgcatggtgaacaacatctacctcaacatggacgccttccmcggcgacaaggaccacggcggsgtccacgacggcaccaccgtggtgctctgggagtgggccaagggcgacaaccagcgctggaagatcctgccctggtgaacagagacgatctagatgaatccaaggaaccttacctagctgctgccgccgcctaattcgtcctcctccgctctagctgttctctgtctgtgtcttcgcgtcctgaatggacgaataatatatagcatgcatgtacgctagcgaccatgtctgaatgacatcttcctggctgctacagctagctactgctacctgtctgtttggtgttctaaaagactctgatgagtggttct

SEQ ID NO: 14450 - protein, 95 aa, Zea mays subsp. mays
  misc_feature (1)..(95): Ceres Seq. ID no. 5683274
  misc_feature (7)..(7): Xaa is any aa, unknown or other
  misc_feature (9)..(9): Xaa is any aa, unknown or other
  misc_feature (13)..(13): Xaa is any aa, unknown or other
  misc_feature (18)..(18): Xaa is any aa, unknown or other
  misc_feature (31)..(31): Xaa is any aa, unknown or other
  misc_feature (63)..(63): Xaa is any aa, unknown or other
  misc_feature (70)..(70): Xaa is any aa, unknown or other
GEQRSPXKXSSTXWDRAXPVRLVPYNPEYVXESVLWTESRDVGHGFRCVRMVNNIYLNMDAFXGDKDHGXVHDGTTVVLWEWAKGDNQRWKILPW

SEQ ID NO: 14451 - protein, 52 aa, Zea mays subsp. mays
  misc_feature (1)..(52): Ceres Seq. ID no. 5683275
  misc_feature (1)..(1): Xaa is any aa, unknown or other
  misc_feature (8)..(8): Xaa is any aa, unknown or other
  misc_feature (10)..(10): Xaa is any aa, unknown or other
  misc_feature (14)..(14): Xaa is any aa, unknown or other
  misc_feature (18)..(18): Xaa is any aa, unknown or other
  misc_feature (31)..(31): Xaa is any aa, unknown or other
XVNKGHRXSXQALXGTEXPRYALCPTTPSTXTSRCCGRRAATSGTASAACAW

SEQ ID NO: 14452 - DNA, 551 bp, Zea mays subsp. mays
  misc_feature (1)..(551): Ceres Seq. ID no. 5683459
cgtcgggcgacgtkacgatcctggtggtggacctgagctacaaccggttytggggccagctgtcgccgctcctcgcgggcgtcgggcagctgtacytgaacaacaaccggttcarcggcdaggtgcccgcgcggctggtgcaggagctggtgggctccggcggcctgcaggtgctgtacctgcagcacaacttcctgacgggcatcgagatatcgccgtygtcgtcgctcccttccacggtgtcgctytgcctgatgtacaactgcatggtgccgccggtgtacgcsccgtgcccgatcaaggccgggtcgcagaacacgcggccggccgaccagtgcccggagtggaggggctgaracgccaatgcggcaatgccaaataccggcggcgtgcccggattgcgaaacggcggtctctgattctttgattgttttttttgtccagttgttactagtgtttcttactattcttttccggtttggggaaggaggatagttacagacatgtaatgatagccgtgatttacaggtgtaagtttttttagttggttt

SEQ ID NO: 14453 - protein, 141 aa, Zea mays subsp. mays
  misc_feature (1)..(141): Ceres Seq. ID no. 5683460
  misc_feature (5)..(5): Xaa is any aa, unknown or other
  misc_feature (17)..(17): Xaa is any aa, unknown or other
  misc_feature (32)..(32): Xaa is any aa, unknown or other
  misc_feature (38)..(38): Xaa is any aa, unknown or other
  misc_feature (40)..(40): Xaa is any aa, unknown or other
  misc_feature (73)..(73): Xaa is any aa, unknown or other
  misc_feature (83)..(83): Xaa is any aa, unknown or other
  misc_feature (96)..(96): Xaa is any aa, unknown or other
  misc_feature (119)..(119): Xaa is any aa, unknown or other
VGRRXDPGGGPELQPVXGPAVAAPRGRRAAVXEQQPVXRXGARAAGAGAGGLRRPAGAVPAAQLPDGHRDIAXVVAPFHGVAXPDVQLHGAAGVRXVPDQGRVAEHAAGRPVPGVEGLXRQCGNAKYRRRARIAKRRSLIL

SEQ ID NO: 14454 - protein, 117 aa, Zea mays subsp. mays
  misc_feature (1)..(117): Ceres Seq. ID no. 5683461
  misc_feature (4)..(4): Xaa is any aa, unknown or other
  misc_feature (16)..(16): Xaa is any aa, unknown or other
  misc_feature (32)..(32): Xaa is any aa, unknown or other
  misc_feature (38)..(38): Xaa is any aa, unknown or other
  misc_feature (40)..(40): Xaa is any aa, unknown or other
  misc_feature (73)..(73): Xaa is any aa, unknown or other
  misc_feature (82)..(82): Xaa is any aa, unknown or other
  misc_feature (95)..(95): Xaa is any aa, unknown or other
SGDXTILVVDLSYNRXWGQLSPLLAGVGQLYXNNNRFXGXVPARLVQELVGSGGLQVLYLQHNFLTGIEISPXSSLPSTVSXCLMYNCMVPPVYXPCPIKAGSQNTRPADQCPEWRG

SEQ ID NO: 14455 - DNA, 548 bp, Zea mays subsp. mays
  misc_feature (1)..(548): Ceres Seq. ID no. 5683811
gctggtgtgtcsccgctttgtgaatttcccttatgaactcgttcctaagctgtatgacgcgctctttgacgaggtttcctgggcamcagaagatgagccaacmcaagaactccgggactccttccggttcaagcactacctgttgatcgtcagaatgcttgagaggaaaacccctccaaaacataaatcaaaggsgawcaaagatgatgrcgaacctattatytatccaaagtttgaggatgaaatttttcacgagcttagctcatggtctttcacttttccaatacgttytgaagagtcagctcagcaggagatgaagaattmcaaggagatgggcttagtgatggcaattaaagcaggcmcagttctgaagttcagaaagaagctgggggatttggtgtccgaataggagsgtaattgaccgatgtggaattttgctgctgtccacgtggtttgaacatttccmcattcagcctgttgtctgtaacgatgtgattctgattggagcttgaatggtggcaatggtattgacattgtcgttgatttgc

SEQ ID NO: 14456 - protein, 135 aa, Zea mays subsp. mays
  misc_feature (1)..(135): Ceres Seq. ID no. 5683812
  misc_feature (4)..(4): Xaa is any aa, unknown or other
  misc_feature (29)..(29): Xaa is any aa, unknown or other
  misc_feature (34)..(34): Xaa is any aa, unknown or other
  misc_feature (65)..(65): Xaa is any aa, unknown or other
  misc_feature (66)..(66): Xaa is any aa, unknown or other
  misc_feature (70)..(70): Xaa is any aa, unknown or other
  misc_feature (74)..(74): Xaa is any aa, unknown or other
  misc_feature (97)..(97): Xaa is any aa, unknown or other
  misc_feature (108)..(108): Xaa is any aa, unknown or other
  misc_feature (121)..(121): Xaa is any aa, unknown or other
LVCXRFVNFPYELVPKLYDALFDEVSWAXEDEPXQELRDSFRFKHYLLIVRMLERKTPPKHKSKXXKDDXEPIXYPKFEDEIFHELSSWSFTFPIRXEESAQQEMKNXKEMGLVMAIKAGXVLKFRKKLGDLVSE

SEQ ID NO: 14457 - protein, 84 aa, Zea mays subsp. mays
  misc_feature (1)..(84): Ceres Seq. ID no. 5683813
  misc_feature (14)..(14): Xaa is any aa, unknown or other
  misc_feature (15)..(15): Xaa is any aa, unknown or other
  misc_feature (19)..(19): Xaa is any aa, unknown or other
  misc_feature (23)..(23): Xaa is any aa, unknown or other
  misc_feature (46)..(46): Xaa is any aa, unknown or other
  misc_feature (57)..(57): Xaa is any aa, unknown or other
  misc_feature (70)..(70): Xaa is any aa, unknown or other
MLERKTPPKHKSKXXKDDXEPIXYPKFEDEIFHELSSWSFTFPIRXEESAQQEMKNXKEMGLVMAIKAGXVLKFRKKLGDLVSE

SEQ ID NO: 14458 - DNA, 549 bp, Zea mays subsp. mays
  misc_feature (1)..(549): Ceres Seq. ID no. 5683966
aggaggtattttgagcaatttggtgtgataaccsatgtggtagtgatgtatgmccmcaacacscagaggcctaggggctttggtttcatcacatatgactcagaagacgcagtggacaaggcmctgcmcaagaacttccatgagctgaatggtaaaatggtcgaggttaagagggctgtgccaaaggagcagtctcctggacctattgcacgttcmcctgcgggagggcagaactatgctatgagcagggttcataacttcctaaatggcttcaaccagggttacaacccgaaccccctgggtggttatggcatgagggtggatggaaggtatggtctccttacgggtgcmcggaatgggttctyttcgtttggtccaggttatggaatgggcatgaatgctgaaggtggaatgagtgcatattttggtgcaagttytggttttgccmatagctccaatgggcggcaaataggttcttacttcaatagtagttcaaacagattaggcagtccaattggttatgttggccttaatgatgattcaggatcg

SEQ ID NO: 14459 - protein, 183 aa, Zea mays subsp. mays
  misc_feature (1)..(183): Ceres Seq. ID no. 5683967
  misc_feature (12)..(12): Xaa is any aa, unknown or other
  misc_feature (18)..(18): Xaa is any aa, unknown or other
  misc_feature (19)..(19): Xaa is any aa, unknown or other
  misc_feature (21)..(21): Xaa is any aa, unknown or other
  misc_feature (41)..(41): Xaa is any aa, unknown or other
  misc_feature (43)..(43): Xaa is any aa, unknown or other
  misc_feature (72)..(72): Xaa is any aa, unknown or other
  misc_feature (117)..(117): Xaa is any aa, unknown or other
  misc_feature (122)..(122): Xaa is any aa, unknown or other
  misc_feature (146)..(146): Xaa is any aa, unknown or other
  misc_feature (150)..(150): Xaa is any aa, unknown or other
RRYFEQFGVITXVVVMYXXNXQRPRGFGFITYDSEDAVDKXLXKNFHELNGKMVEVKRAVPKEQSPGPIARXPAGGQNYAMSRVHNFLNGFNQGYNPNPLGGYGMRVDGRYGLLTGXRNGFXSFGPGYGMGMNAEGGMSAYFGASXGFAXSSNGRQIGSYFNSSSNRLGSPIGYVGLNDDSGS

SEQ ID NO: 14460 - protein, 168 aa, Zea mays subsp. mays
  misc_feature (1)..(168): Ceres Seq. ID no. 5683968
  misc_feature (3)..(3): Xaa is any aa, unknown or other
  misc_feature (4)..(4): Xaa is any aa, unknown or other
  misc_feature (6)..(6): Xaa is any aa, unknown or other
  misc_feature (26)..(26): Xaa is any aa, unknown or other
  misc_feature (28)..(28): Xaa is any aa, unknown or other
  misc_feature (57)..(57): Xaa is any aa, unknown or other
  misc_feature (102)..(102): Xaa is any aa, unknown or other
  misc_feature (107)..(107): Xaa is any aa, unknown or other
  misc_feature (131)..(131): Xaa is any aa, unknown or other
  misc_feature (135)..(135): Xaa is any aa, unknown or other
MYXXNXQRPRGFGFITYDSEDAVDKXLXKNFHELNGKMVEVKRAVPKEQSPGPIARXPAGGQNYAMSRVHNFLNGFNQGYNPNPLGGYGMRVDGRYGLLTGXRNGFXSFGPGYGMGMNAEGGMSAYFGASXGFAXSSNGRQIGSYFNSSSNRLGSPIGYVGLNDDSGS

SEQ ID NO: 14461 - protein, 131 aa, Zea mays subsp. mays
  misc_feature (1)..(131): Ceres Seq. ID no. 5683969
  misc_feature (20)..(20): Xaa is any aa, unknown or other
  misc_feature (65)..(65): Xaa is any aa, unknown or other
  misc_feature (70)..(70): Xaa is any aa, unknown or other
  misc_feature (94)..(94): Xaa is any aa, unknown or other
  misc_feature (98)..(98): Xaa is any aa, unknown or other
MVEVKRAVPKEQSPGPIARXPAGGQNYAMSRVHNFLNGFNQGYNPNPLGGYGMRVDGRYGLLTGXRNGFXSFGPGYGMGMNAEGGMSAYFGASXGFAXSSNGRQIGSYFNSSSNRLGSPIGYVGLNDDSGS

SEQ ID NO: 14462 - DNA, 607 bp, Zea mays subsp. mays
  misc_feature (1)..(607): Ceres Seq. ID no. 5684137
gcatttgctcttatttcgaggtcgcagggtttcaaccttggaaatttgtttgagaaggagatgatgggaatggtaaagagggaaacatctttcacatctcaatgcacagcacaggagatcatgacaaaaatagaggatgcatgtgggccactcggtttcaacgtgcggaaacaaaattacaagatgaaattgaaaggtgacaaatctggaagaaaaggtcacttatctgttgcaactgaggtttttgaggttgccccatcacttcacatggttgagcttcgtaaaaccggaggagacacattggagttccmcagcttctacaagaacttctcatcggagctgaaagatatcgtgtggaaagctgaatctgacgcaaataataaacagacgaataagtgatacccagagaatctgtgtagccctcatgaggccacattcagatagatcacctcttcgggtgataccacctgcttggtactgtatgctttttttttactggtaccacattagcagccaaaatctcttgtaaacgggaactccttctgaatgagcgcaattgtacaaaacacatatgaagaggmcctccgtgagatgctccgaacactgc

SEQ ID NO: 14463 - protein, 132 aa, Zea mays subsp. mays
  misc_feature (1)..(132): Ceres Seq. ID no. 5684138
  misc_feature (104)..(104): Xaa is any aa, unknown or other
AFALISRSQGFNLGNLFEKEMMGMVKRETSFTSQCTAQEIMTKIEDACGPLGFNVRKQNYKMKLKGDKSGRKGHLSVATEVFEVAPSLHMVELRKTGGDTLEFXSFYKNFSSELKDIVWKAESDANNKQTNK

SEQ ID NO: 14464 - protein, 112 aa, Zea mays subsp. mays
  misc_feature (1)..(112): Ceres Seq. ID no. 5684139
  misc_feature (84)..(84): Xaa is any aa, unknown or other
MMGMVKRETSFTSQCTAQEIMTKIEDACGPLGFNVRKQNYKMKLKGDKSGRKGHLSVATEVFEVAPSLHMVELRKTGGDTLEFXSFYKNFSSELKDIVWKAESDANNKQTNK

SEQ ID NO: 14465 - protein, 111 aa, Zea mays subsp. mays
  misc_feature (1)..(111): Ceres Seq. ID no. 5684140
  misc_feature (83)..(83): Xaa is any aa, unknown or other
MGMVKRETSFTSQCTAQEIMTKIEDACGPLGFNVRKQNYKMKLKGDKSGRKGHLSVATEVFEVAPSLHMVELRKTGGDTLEFXSFYKNFSSELKDIVWKAESDANNKQTNK

SEQ ID NO: 14466 - DNA, 577 bp, Zea mays subsp. mays
  misc_feature (1)..(577): Ceres Seq. ID no. 5684364
gaggataagctagcagagcttatggagatgaaccaaggtttgcttcagtgtatgggagtcagccattcttctatagaaactgtgttgcggaccactctgaaatatagcttggtctcaaagctaactggagctggtggtggaggctgtgtgttgactctaawaccgacgttatcgtccaatattgttytggagaaagtcgccagggagctcgaatctcatggttatcgctgcttcaaagttgaggttggtgggcgaggtctccaagtattccgaggataacataacactcaacctatttcaaggagatgttgtaccatacttttagaagatggcttacctgcactgaagctgtttagattctcttcttgagttattccaagatcatgataggatattyttctcctaagcctagcaggttyttgtatccagtactcgagttgctccaggattaggacattcttatgctatccctagcactcttgtatcaaataagctcatagatgcctgatcattgctggtatgattgttgtattaactattaagtaaacaaacatttaattgctccaaatgttgtatc

SEQ ID NO: 14467 - protein, 92 aa, Zea mays subsp. mays
  misc_feature (1)..(92): Ceres Seq. ID no. 5684365
  misc_feature (54)..(54): Xaa is any aa, unknown or other
  misc_feature (63)..(63): Xaa is any aa, unknown or other
EDKLAELMEMNQGLLQCMGVSHSSIETVLRTTLKYSLVSKLTGAGGGGCVLTLXPTLSSNIVXEKVARELESHGYRCFKVEVGGRGLQVFRG

SEQ ID NO: 14468 - protein, 85 aa, Zea mays subsp. mays
  misc_feature (1)..(85): Ceres Seq. ID no. 5684366
  misc_feature (47)..(47): Xaa is any aa, unknown or other
  misc_feature (56)..(56): Xaa is any aa, unknown or other
MEMNQGLLQCMGVSHSSIETVLRTTLKYSLVSKLTGAGGGGCVLTLXPTLSSNIVXEKVARELESHGYRCFKVEVGGRGLQVFRG

SEQ ID NO: 14469 - protein, 83 aa, Zea mays subsp. mays
  misc_feature (1)..(83): Ceres Seq. ID no. 5684367
  misc_feature (45)..(45): Xaa is any aa, unknown or other
  misc_feature (54)..(54): Xaa is any aa, unknown or other
MNQGLLQCMGVSHSSIETVLRTTLKYSLVSKLTGAGGGGCVLTLXPTLSSNIVXEKVARELESHGYRCFKVEVGGRGLQVFRG

SEQ ID NO: 14470 - DNA, 565 bp, Zea mays subsp. mays
  misc_feature (1)..(565): Ceres Seq. ID no. 5684385
cgcgcccctcctygtgtggctcgcgcaccgggtgttcccgagccagagctggatcctgctcgtcaacatgcccgtgctcatcggctccaccggcatgatgccgccggccaccgccgtcaactacaccacgtggatcattgccgggttcctgtcggggtacgtggtctacaggtaccggcgtcactggtgggagcgccacaactacctgctytctggcgcgctcgacgctggcctggcgttcatggccgtgctcatctacctgtgcttgggcttggagaacgtcggcctcaactggtggggcaatgatctggacgggtgccctctcgcctcttgtcccactgccaaaggtatcgttgttgagggctgcccggtgtatacatgaggaattgagaacccatgcattcggagaagagaacatggcaatgcaagtggacaagtgtctcaagagcaatgtaaataatttatcttttcaaacaatttagggatgggaaattggtgttcctttcattgtaaaatggctggtaattacggctattccagctcggaatcaaatttattccgtggt

SEQ ID NO: 14471 - protein, 126 aa, Zea mays subsp. mays
  misc_feature (1)..(126): Ceres Seq. ID no. 5684386
  misc_feature (4)..(4): Xaa is any aa, unknown or other
  misc_feature (70)..(70): Xaa is any aa, unknown or other
APLXVWLAHRVFPSQSWILLVNMPVLIGSTGMMPPATAVNYTTWIIAGFLSGYVVYRYRRHWWERHNYLXSGALDAGLAFMAVLIYLCLGLENVGLNWWGNDLDGCPLASCPTAKGIVVEGCPVYT

SEQ ID NO: 14472 - protein, 104 aa, Zea mays subsp. mays
  misc_feature (1)..(104): Ceres Seq. ID no. 5684387
  misc_feature (48)..(48): Xaa is any aa, unknown or other
MPVLIGSTGMMPPATAVNYTTWIIAGFLSGYVVYRYRRHWWERHNYLXSGALDAGLAFMAVLIYLCLGLENVGLNWWGNDLDGCPLASCPTAKGIVVEGCPVYT

SEQ ID NO: 14473 - protein, 101 aa, Zea mays subsp. mays
  misc_feature (1)..(101): Ceres Seq. ID no. 5684388
  misc_feature (5)..(5): Xaa is any aa, unknown or other
  misc_feature (71)..(71): Xaa is any aa, unknown or other
RAPPXVARAPGVPEPELDPARQHARAHRLHRHDAAGHRRQLHHVDHCRVPVGVRGLQVPASLVGAPQLPAXWRARRWPGVHGRAHLPVLGLGERRPQLVGQ

SEQ ID NO: 14474 - DNA, 570 bp, Zea mays subsp. mays
  misc_feature (1)..(570): Ceres Seq. ID no. 5684866
gtgtggtaacagagccacatgggagtacccatttgcggttgctggtgtaaatattacattcatgatcatgcagatgctagatctccagtctactaagccaagaacatttgtgcgagccatttttatccaaatgctctcagaggatgagtgggcatttgatctgctctactgtgtcgcatttgttgtgatggacaagcagtggctggacaagaatgcatcttacatggacttcaatgaggtgctgaagtcgacacgagcccagctggagagggagcttatgctggacgatgtcatccgcatcgaagacatgccgtcatacagcctgctttgctagtaaccaaaataccaaattcgccggagaacagaactgagttgatggttcaactgtatagtacctccctttgtctgatttctgggaggatttttttttagcaacaaagtagagtgtcgacgtactggtatcatgcttaatttgggctaatgatggtgatatgcacattctcagaagtgttacaatgttctgtacttgtctaagcatttgtcagatatctaatattgatcatttgatcc

SEQ ID NO: 14475 - protein, 110 aa, Zea mays subsp. mays
  misc_feature (1)..(110): Ceres Seq. ID no. 5684867
CGNRATWEYPFAVAGVNITFMIMQMLDLQSTKPRTFVRAIFIQMLSEDEWAFDLLYCVAFVVMDKQWLDKNASYMDFNEVLKSTRAQLERELMLDDVIRIEDMPSYSLLC

SEQ ID NO: 14476 - protein, 90 aa, Zea mays subsp. mays
  misc_feature (1)..(90): Ceres Seq. ID no. 5684868
MIMQMLDLQSTKPRTFVRAIFIQMLSEDEWAFDLLYCVAFVVMDKQWLDKNASYMDFNEVLKSTRAQLERELMLDDVIRIEDMPSYSLLC

SEQ ID NO: 14477 - protein, 88 aa, Zea mays subsp. mays
  misc_feature (1)..(88): Ceres Seq. ID no. 5684869
MQMLDLQSTKPRTFVRAIFIQMLSEDEWAFDLLYCVAFVVMDKQWLDKNASYMDFNEVLKSTRAQLERELMLDDVIRIEDMPSYSLLC

SEQ ID NO: 14478 - DNA, 661 bp, Zea mays subsp. mays
  misc_feature (1)..(661): Ceres Seq. ID no. 5685133
tacactgatgcacatttcaggaggattgcttctaacgtgtcctcatacattggcatggtatytgaaacgctgaagaatactatccccaagtctgttgtccactgtcaggtccgcgaagctaagcggtccctgcttaacgatttctatacccaagtgggcgggaaagatgctaagcaacttgcagtattccttgacgaggatcctgccctcatggaacgcaggctgcaatgctttaaraggcttgagctgtacaagtctgctcgggacgagattgatgccgtgtcgtggacaagatgaaggtaacgcgtgccatgcttgttaatatattcgctttyttcattagacacattgtagttctactagtgcagaattagcagctagccattgtgcacactgattgtcaagtatagcagagcgatcacctgtcttgtatcttagcctgttaatatcagtagttgtgtgcttgactgcttgtgttgtatctttgtctcaactcccaactgttatcaggtgcaaatttccgtccttggtaacccatgtgcaaacctgtatgcacgaacgatacctggattctgtaggatgcacatgccgatcttcgtcccatgctgtagttaggtgtagactgcagaactgggacttctaatgtgaaaaatattgtttt

SEQ ID NO: 14479 - protein, 98 aa, Zea mays subsp. mays
  misc_feature (1)..(98): Ceres Seq. ID no. 5685134
  misc_feature (21)..(21): Xaa is any aa, unknown or other
  misc_feature (79)..(79): Xaa is any aa, unknown or other
YTDAHFRRIASNVSSYIGMVXETLKNTIPKSVVHCQVREAKRSLLNDFYTQVGGKDAKQLAVFLDEDPALMERRLQCFXRLELYKSARDEIDAVSWTR

SEQ ID NO: 14480 - protein, 80 aa, Zea mays subsp. mays
  misc_feature (1)..(80): Ceres Seq. ID no. 5685135
  misc_feature (3)..(3): Xaa is any aa, unknown or other
  misc_feature (61)..(61): Xaa is any aa, unknown or other
MVXETLKNTIPKSVVHCQVREAKRSLLNDFYTQVGGKDAKQLAVFLDEDPALMERRLQCFXRLELYKSARDEIDAVSWTR

SEQ ID NO: 14481 - protein, 51 aa, Zea mays subsp. mays
  misc_feature (1)..(51): Ceres Seq. ID no. 5685136
  misc_feature (24)..(24): Xaa is any aa, unknown or other
MLSNLQYSLTRILPSWNAGCNALXGLSCTSLLGTRLMPCRGQDEGNACHAC

SEQ ID NO: 14482 - DNA, 561 bp, Zea mays subsp. mays
  misc_feature (1)..(561): Ceres Seq. ID no. 5685260
ggracctaagaatgaataacaatgggggatgcgtacagcgcattactggatcagttggagacattatatactccacatgtagctcaccttcaggactgattgctagtggtggaactgatcgtgctgtcaccatctatgatcctcgcaggtggtctgctctgtcaagatgggtgggctgctccaagtttgagattacaggtcttgcgttttcatcagttgacgaatctttcatctacgtccaaggtgttgattatgagattacctgtggacattggaaacaaagtgagcgagcattytcatttcgaggggattccaactggttggggttttcaaagtgtgccamcaatgatgtgatagcagggtggtgcgagtctggaagtatcttcattgctgatgctaggcagctataggatcaatatccccttcatctggtgccctggagccccggaagtcagcagtatgtgttgtgttttgccatttctgtaagaatgtgatgtttacaggaggaactgttyttaactctccagtaccaagtagcatgcgaactcatgcccattggcc

SEQ ID NO: 14483 - protein, 135 aa, Zea mays subsp. mays
  misc_feature (1)..(135): Ceres Seq. ID no. 5685261
  misc_feature (1)..(1): Xaa is any aa, unknown or other
  misc_feature (98)..(98): Xaa is any aa, unknown or other
  misc_feature (114)..(114): Xaa is any aa, unknown or other
XLRMNNNGGCVQRITGSVGDIIYSTCSSPSGLIASGGTDRAVTIYDPRRWSALSRWVGCSKFEITGLAFSSVDESFIYVQGVDYEITCGHWKQSERAXSFRGDSNWLGFSKCAXNDVIAGWCESGSIFIADARQL

SEQ ID NO: 14484 - protein, 132 aa, Zea mays subsp. mays
  misc_feature (1)..(132): Ceres Seq. ID no. 5685262
  misc_feature (95)..(95): Xaa is any aa, unknown or other
  misc_feature (111)..(111): Xaa is any aa, unknown or other
MNNNGGCVQRITGSVGDIIYSTCSSPSGLIASGGTDRAVTIYDPRRWSALSRWVGCSKFEITGLAFSSVDESFIYVQGVDYEITCGHWKQSERAXSFRGDSNWLGFSKCAXNDVIAGWCESGSIFIADARQL

SEQ ID NO: 14485 - protein, 72 aa, Zea mays subsp. mays
  misc_feature (1)..(72): Ceres Seq. ID no. 5685263
  misc_feature (54)..(54): Xaa is any aa, unknown or other
  misc_feature (70)..(70): Xaa is any aa, unknown or other
MILAGGLLCQDGWAAPSLRLQVLRFHQLTNLSSTSKVLIMRLPVDIGNKVSEHXHFEGIPTGWGFQSVPXMM

SEQ ID NO: 14486 - DNA, 619 bp, Zea mays subsp. mays
  misc_feature (1)..(619): Ceres Seq. ID no. 5687045
tgttggagcttttataatgaatgmcaaaagagaggtyttggctgtmcaaraaaagagtggtgtacttcgaggactaggtgtgtggaaatttccaactggcgtagtagaaccgggggaagatattaacgttggasccgtccgagaagtaaaagaagagacagggattgatgcagaattcgttgaagtgctggccttcaggcagagccacaaatccttttttgataaatcagatctatttttcgtgtgcctgctacgacccctttcatacgacattacgaagcaagactcggaaatagaggcatgccagtggatgccagtagaggaatttgcagcacaaccatttgtccagaaacatgagcttgtgaagtacatcctcgaagtcggcctggctaaagttgacaaggaatacgcaggcttttcgccaatctccataaaatcggcatttacagacaaattgtccttattttacatgaaccggagggatytggatagggcctcagggtagagtatatatgtaatgacatgggcaattcaggatagttaaattttcactttggtgtgtgaaagcgggctaaatcttgttagacctaatcttgattgtctagtaatttttagagcc

SEQ ID NO: 14487 - protein, 167 aa, Zea mays subsp. mays
  misc_feature (1)..(167): Ceres Seq. ID no. 5687046
  misc_feature (8)..(8): Xaa is any aa, unknown or other
  misc_feature (12)..(12): Xaa is any aa, unknown or other
  misc_feature (15)..(15): Xaa is any aa, unknown or other
  misc_feature (17)..(17): Xaa is any aa, unknown or other
  misc_feature (45)..(45): Xaa is any aa, unknown or other
  misc_feature (162)..(162): Xaa is any aa, unknown or other
VGAFIMNXKREXLAXQXKSGVLRGLGVWKFPTGVVEPGEDINVGXVREVKEETGIDAEFVEVLAFRQSHKSFFDKSDLFFVCLLRPLSYDITKQDSEIEACQWMPVEEFAAQPFVQKHELVKYILEVGLAKVDKEYAGFSPISIKSAFTDKLSLFYMNRRDXDRASG

SEQ ID NO: 14488 - protein, 162 aa, Zea mays subsp. mays
  misc_feature (1)..(162): Ceres Seq. ID no. 5687047
  misc_feature (3)..(3): Xaa is any aa, unknown or other
  misc_feature (7)..(7): Xaa is any aa, unknown or other
  misc_feature (10)..(10): Xaa is any aa, unknown or other
  misc_feature (12)..(12): Xaa is any aa, unknown or other
  misc_feature (40)..(40): Xaa is any aa, unknown or other
  misc_feature (157)..(157): Xaa is any aa, unknown or other
MNXKREXLAXQXKSGVLRGLGVWKFPTGVVEPGEDINVGXVREVKEETGIDAEFVEVLAFRQSHKSFFDKSDLFFVCLLRPLSYDITKQDSEIEACQWMPVEEFAAQPFVQKHELVKYILEVGLAKVDKEYAGFSPISIKSAFTDKLSLFYMNRRDXDRASG

SEQ ID NO: 14489 - DNA, 615 bp, Zea mays subsp. mays
  misc_feature (1)..(615): Ceres Seq. ID no. 5689322
gcatatttccaggtggcmccaaaaaacgatagtgttcgttccccaaagatcgacacgaggtaccatttggacttgtgcagaaatgttttcggcgaaggagtctaccctgatgtctttatgacaaacttatactatggaggcmcaggaattgcaggttctaaaattgtttttgcaaatggatctcaagacccatggcgccacgcttytaagcagaaatcatcagacgaattgccatcatacttaattgagtgcaagaactgcggacactgcagtgatctctytggatgccctcaagctccttcaaacattgaaggtgattcatccaagtgctcacctcccgaagctntgaacaaagtaaggaaggagattgtcgatcacattgacctgtggctatcagaatgccaagagcaaggacatgacaaggagccatggctgggaagcagatggagcatagctgctatttgatcaatctgtgaagctataagcatgtgctgctagagtaaccaaggcaaatatgctttctttttcttgcagcactgtggtttatcgtttcggcaaactatgtgggctgctgagtaatccacctgtggcgaataaataaascagtcagttcgc

SEQ ID NO: 14490 - protein, 154 aa, Zea mays subsp. mays
  misc_feature (1)..(154): Ceres Seq. ID no. 5689323
  misc_feature (6)..(6): Xaa is any aa, unknown or other
  misc_feature (48)..(48): Xaa is any aa, unknown or other
  misc_feature (69)..(69): Xaa is any aa, unknown or other
  misc_feature (94)..(94): Xaa is any aa, unknown or other
  misc_feature (116)..(116): Xaa is any aa, unknown or other
AYFQVXPKNDSVRSPKIDTRYHLDLCRNVFGEGVYPDVFMTNLYYGGXGIAGSKIVFANGSQDPWRHAXKQKSSDELPSYLIECKNCGHCSDLXGCPQAPSNIEGDSSKCSPPEAXNKVRKEIVDHIDLWLSECQEQGHDKEPWLGSRWSIAAI

SEQ ID NO: 14491 - protein, 115 aa, Zea mays subsp. mays
  misc_feature (1)..(115): Ceres Seq. ID no. 5689324
  misc_feature (9)..(9): Xaa is any aa, unknown or other
  misc_feature (30)..(30): Xaa is any aa, unknown or other
  misc_feature (55)..(55): Xaa is any aa, unknown or other
  misc_feature (77)..(77): Xaa is any aa, unknown or other
MTNLYYGGXGIAGSKIVFANGSQDPWRHAXKQKSSDELPSYLIECKNCGHCSDLXGCPQAPSNIEGDSSKCSPPEAXNKVRKEIVDHIDLWLSECQEQGHDKEPWLGSRWSIAAI

SEQ ID NO: 14492 - DNA, 490 bp, Zea mays subsp. mays
  misc_feature (1)..(490): Ceres Seq. ID no. 5690811
tctatatgmgagaaaatgatgatgggaagacagttgctgcaatggatttgttggttccycgggttggtgagcttattgggggaagccagagggaagagcgtcttgattaccttgaagcccgactagacgagcaaaatctgaacaaggagagctactggtggtatctggacctacggcgatatggatcagttccccacgccggtttcggtcttggatttgagcggcttgtacagtttgctactggaatagacaacatcagagacgccatcccatttccccgagttcctggctcagccgagttttaggcttcctttcgaatgtaggaattttatggggatggtatatgaatttcacaggaaatggttcaaaaacacatgaattatcttttaatccaaaggaggccttagcgccccgaaagtgttgtcatttgtttcatcattgtacagagttgagctgagactcgtggttaatcgagccaaccagtgttgtg

SEQ ID NO: 14493 - protein, 100 aa, Zea mays subsp. mays
  misc_feature (1)..(100): Ceres Seq. ID no. 5690812
  misc_feature (3)..(3): Xaa is any aa, unknown or other
  misc_feature (19)..(19): Xaa is any aa, unknown or other
YMXENDDGKTVAAMDLLVXRVGELIGGSQREERLDYLEARLDEQNLNKESYWWYLDLRRYGSVPHAGFGLGFERLVQFATGIDNIRDAIPFPRVPGSAEF

SEQ ID NO: 14494 - protein, 99 aa, Zea mays subsp. mays
  misc_feature (1)..(99): Ceres Seq. ID no. 5690813
  misc_feature (2)..(2): Xaa is any aa, unknown or other
  misc_feature (18)..(18): Xaa is any aa, unknown or other
MXENDDGKTVAAMDLLVXRVGELIGGSQREERLDYLEARLDEQNLNKESYWWYLDLRRYGSVPHAGFGLGFERLVQFATGIDNIRDAIPFPRVPGSAEF

SEQ ID NO: 14495 - protein, 87 aa, Zea mays subsp. mays
  misc_feature (1)..(87): Ceres Seq. ID no. 5690814
  misc_feature (6)..(6): Xaa is any aa, unknown or other
MDLLVXRVGELIGGSQREERLDYLEARLDEQNLNKESYWWYLDLRRYGSVPHAGFGLGFERLVQFATGIDNIRDAIPFPRVPGSAEF

SEQ ID NO: 14496 - DNA, 537 bp, Zea mays subsp. mays
  misc_feature (1)..(537): Ceres Seq. ID no. 5724945
caagactccaactcctcgccgattgtctytcggcagtgctactcctgagcttttgacgcccagatcgtactctggccataatagatactttggcgatgtgaggcgtctatcgacttcccatytgaacttcggtgatgattcgctgtcaacgtttacatccatcagtggctytgaaccagaatccccctytattggatgaacmccgtactgctggatgactggatggtcagtattgcgtattgtaaatgggcaccatgttaccaagttyttgcactagcatgtacattcctgatgtcatatatttagctcatattggagtactaagtattggacgggttgacttggtttgggttgggtgtggagttgaattgtttcaagttgatggctttgtagattgacaattaggcggaaagatgtaggggagcgatctggatttgggcagtcagctgtaacatatcataacttatgtgtttggtttgtgtgtgcaaccttgtgtacaggtgcaatgaaaaatctgtgtgcagaatctactacttc

SEQ ID NO: 14497 - protein, 65 aa, Zea mays subsp. mays
  misc_feature (1)..(65): Ceres Seq. ID no. 5724946
  misc_feature (10)..(10): Xaa is any aa, unknown or other
  misc_feature (41)..(41): Xaa is any aa, unknown or other
  misc_feature (57)..(57): Xaa is any aa, unknown or other
  misc_feature (63)..(63): Xaa is any aa, unknown or other
KTPTPRRLSXGSATPELLTPRSYSGHNRYFGDVRRLSTSHXNFGDDSLSTFTSISGXEPESPXIG

SEQ ID NO: 14498 - protein, 50 aa, Zea mays subsp. mays
  misc_feature (1)..(50): Ceres Seq. ID no. 5724947
  misc_feature (8)..(8): Xaa is any aa, unknown or other
MGTMLPSXCTSMYIPDVIYLAHIGVLSIGRVDLVWVGCGVELFQVDGFVD

SEQ ID NO: 14499 - protein, 47 aa, Zea mays subsp. mays
  misc_feature (1)..(47): Ceres Seq. ID no. 5724948
  misc_feature (5)..(5): Xaa is any aa, unknown or other
MLPSXCTSMYIPDVIYLAHIGVLSIGRVDLVWVGCGVELFQVDGFVD

SEQ ID NO: 14500 - DNA, 537 bp, Zea mays subsp. mays
  misc_feature (1)..(537): Ceres Seq. ID no. 5725204
tagagatgaatccmcmccaagagcmccaaggggtggtggtgccgscgmcgccgccggctttgtcgattcagctaacaaggtctacgtggggaaccttgcgtggggcgttgacaactcgactytggagaacctgttcagtgagcaagggcaagtgcttgatgctaaggtcatctacgacagggatagcggcaggtcaagggggtttggtttcgtcacctatggctccgcccaagaggtcaacaatgccatatcaaacctcgatggcatcgacttggatggtagacagatccgagtcacggctgcggagtcaaagccgagacgtcaattttgagattattttcttatgggggtttagaggctgatagtgtgtttcaaaacttttagtttgtagtgtctattctttcctccatatgagtattaagaagatgataatgagagactggctgtgaaatggctgtatacaggaagacttttccccgctggaaagatgcatttatttgtttcagctgtaccacaaaattggcagttcaaatttcc

SEQ ID NO: 14501 - protein, 119 aa, Zea mays subsp. mays
  misc_feature (1)..(119): Ceres Seq. ID no. 5725205
  misc_feature (4)..(4): Xaa is any aa, unknown or other
  misc_feature (5)..(5): Xaa is any aa, unknown or other
  misc_feature (8)..(8): Xaa is any aa, unknown or other
  misc_feature (15)..(15): Xaa is any aa, unknown or other
  misc_feature (16)..(16): Xaa is any aa, unknown or other
  misc_feature (40)..(40): Xaa is any aa, unknown or other
EMNXXQEXQGVVVPXXPPALSIQLTRSTWGTLRGALTTRXWRTCSVSKGKCLMLRSSTTGIAAGQGGLVSSPMAPPKRSTMPYQTSMASTWMVDRSESRLRSQSRDVNFEIIFLWGFRG

SEQ ID NO: 14502 - protein, 118 aa, Zea mays subsp. mays
  misc_feature (1)..(118): Ceres Seq. ID no. 5725206
  misc_feature (3)..(3): Xaa is any aa, unknown or other
  misc_feature (4)..(4): Xaa is any aa, unknown or other
  misc_feature (7)..(7): Xaa is any aa, unknown or other
  misc_feature (14)..(14): Xaa is any aa, unknown or other
  misc_feature (15)..(15): Xaa is any aa, unknown or other
  misc_feature (39)..(39): Xaa is any aa, unknown or other
MNXXQEXQGVVVPXXPPALSIQLTRSTWGTLRGALTTRXWRTCSVSKGKCLMLRSSTTGIAAGQGGLVSSPMAPPKRSTMPYQTSMASTWMVDRSESRLRSQSRDVNFEIIFLWGFRG

SEQ ID NO: 14503 - protein, 109 aa, Zea mays subsp. mays
  misc_feature (1)..(109): Ceres Seq. ID no. 5725207
  misc_feature (5)..(5): Xaa is any aa, unknown or other
  misc_feature (8)..(8): Xaa is any aa, unknown or other
  misc_feature (15)..(15): Xaa is any aa, unknown or other
  misc_feature (16)..(16): Xaa is any aa, unknown or other
  misc_feature (41)..(41): Xaa is any aa, unknown or other
RDESXPRXPRGGGAXXAAGFVDSANKVYVGNLAWGVDNSTXENLFSEQGQVLDAKVIYDRDSGRSRGFGFVTYGSAQEVNNAISNLDGIDLDGRQIRVTAAESKPRRQF

SEQ ID NO: 14504 - DNA, 569 bp, Zea mays subsp. mays
  misc_feature (1)..(569): Ceres Seq. ID no. 5725390
gtgtacctgaccagcctccgcggcgtccgcaagacgtacgaggactgctggtccaccaggtccgtcctccagagctacggcgtgcgcgtcgacgagcgagacctgtcgatgcacgcggggttcaaggacgagctccacgccgcgctgggctccagcgcgggcaggctcccgcaggtgttcgcggacggcaggcacctgggcggcgccgaggagatccgccggatgcacgaggccggcgagctgtcggaggcgctcgaggcctgcgagatggcgcccccgccgagctgcccgggcggcaagggcgttgccctggaggcgtgctccggctgcggcggcgtgcggttcgtgccctgcgaggagtgctccggcagctgcaaggtgttcgtcgaggaggcgggcacattcaggcggtgccccgagtgcaacgagaacgggctggtgcggtgtcctctctgctccttgtgaaaaatctcagagctgctctgctattgctatgggttatgagatttgtagtgtgccgtgtgggttactgggtttgtaagattttgctgaggagtaattttcgttct

SEQ ID NO: 14505 - protein, 189 aa, Zea mays subsp. mays
  misc_feature (1)..(189): Ceres Seq. ID no. 5725391
VPDQPPRRPQDVRGLLVHQVRPPELRRARRRARPVDARGVQGRAPRRAGLQRGQAPAGVRGRQAPGRRRGDPPDARGRRAVGGARGLRDGAPAELPGRQGRCPGGVLRLRRRAVRALRGVLRQLQGVRRGGGHIQAVPRVQRERAGAVSSLLLVKNLRAALLLLWVMRFVVCRVGYWVCKILLRSNFRS

SEQ ID NO: 14506 - protein, 154 aa, Zea mays subsp. mays
  misc_feature (1)..(154): Ceres Seq. ID no. 5725392
VYLTSLRGVRKTYEDCWSTRSVLQSYGVRVDERDLSMHAGFKDELHAALGSSAGRLPQVFADGRHLGGAEEIRRMHEAGELSEALEACEMAPPPSCPGGKGVALEACSGCGGVRFVPCEECSGSCKVFVEEAGTFRRCPECNENGLVRCPLCSL

SEQ ID NO: 14507 - protein, 118 aa, Zea mays subsp. mays
  misc_feature (1)..(118): Ceres Seq. ID no. 5725393
MHAGFKDELHAALGSSAGRLPQVFADGRHLGGAEEIRRMHEAGELSEALEACEMAPPPSCPGGKGVALEACSGCGGVRFVPCEECSGSCKVFVEEAGTFRRCPECNENGLVRCPLCSL

SEQ ID NO: 14508 - DNA, 420 bp, Zea mays subsp. mays
  misc_feature (1)..(420): Ceres Seq. ID no. 5725449
ggattcggagttatytgaagctatattcamcaataaccattagcaaacttgcccaatatatggaagtggatgaagcaacactaaggtcgatcctgatgacatacaagcmcaaaatgcatgcagttgmcagtgaaggaaagatagtatcaagtgcagactttgacttytacatcgtcgaggatgtgattcatgttgtggagtccaaacctaccaagsgtcatggtgattactttttgagacaaattttgaagtttgaggaaatgattggtgaactggagaaggtacagcttgactgaaatytgatagcgatcatggagagaaatgtcactgtttcctttttgctytyttttgtactccgttgaaaccccatcttttttttttttgtttccttattgactytgaagcccgttgaaaccgscc

SEQ ID NO: 14509 - protein, 97 aa, Zea mays subsp. mays
  misc_feature (1)..(97): Ceres Seq. ID no. 5725450
  misc_feature (5)..(5): Xaa is any aa, unknown or other
  misc_feature (10)..(10): Xaa is any aa, unknown or other
  misc_feature (36)..(36): Xaa is any aa, unknown or other
  misc_feature (42)..(42): Xaa is any aa, unknown or other
  misc_feature (55)..(55): Xaa is any aa, unknown or other
  misc_feature (72)..(72): Xaa is any aa, unknown or other
IRSYXKLYSXITISKLAQYMEVDEATLRSILMTYKXKMHAVXSEGKIVSSADFDXYIVEDVIHVVESKPTKXHGDYFLRQILKFEEMIGELEKVQLD

SEQ ID NO: 14510 - protein, 78 aa, Zea mays subsp. mays
  misc_feature (1)..(78): Ceres Seq. ID no. 5725451
  misc_feature (17)..(17): Xaa is any aa, unknown or other
  misc_feature (23)..(23): Xaa is any aa, unknown or other
  misc_feature (36)..(36): Xaa is any aa, unknown or other
  misc_feature (53)..(53): Xaa is any aa, unknown or other
MEVDEATLRSILMTYKXKMHAVXSEGKIVSSADFDXYIVEDVIHVVESKPTKXHGDYFLRQILKFEEMIGELEKVQLD

SEQ ID NO: 14511 - protein, 66 aa, Zea mays subsp. mays
  misc_feature (1)..(66): Ceres Seq. ID no. 5725452
  misc_feature (5)..(5): Xaa is any aa, unknown or other
  misc_feature (11)..(11): Xaa is any aa, unknown or other
  misc_feature (24)..(24): Xaa is any aa, unknown or other
  misc_feature (41)..(41): Xaa is any aa, unknown or other
MTYKXKMHAVXSEGKIVSSADFDXYIVEDVIHVVESKPTKXHGDYFLRQILKFEEMIGELEKVQLD

SEQ ID NO: 14512 - DNA, 553 bp, Zea mays subsp. mays
  misc_feature (1)..(553): Ceres Seq. ID no. 5725715
gatggccgtactgctgccaaagtgtacccttcagttatcaaagaatcagagctgtccaaatccagtggccttcmccgaggagctagacaagacgtttacattttggggaacacctgaaggggatgtttttcatcctgttgaatgcatgcatgagttgcttgatacagttcggcgccacaaagtcaacattgatggcaacatatgtactgtaatggttaccattttggtccttgaggggtggcaacgcaagctggacccaggctttgatatcatgcaaacgttgaagactttactgctagagaaggacataaagcaaccaattgattttttytcataaacaaacctgtcagatcgttcttatgtatagaagcagtggaagatgatgccctaccaatcagaaggcgaaacatctaatccaactcgaagcaacctggcattaattgagcagatatattatgcagtatgttctatctgtcctttctgatagtagaagtagcagaaactgtytgcactgagtttcattttttactacgtcagtatgaaaattttgccg

SEQ ID NO: 14513 - protein, 111 aa, Zea mays subsp. mays
  misc_feature (1)..(111): Ceres Seq. ID no. 5725716
  misc_feature (25)..(25): Xaa is any aa, unknown or other
  misc_feature (110)..(110): Xaa is any aa, unknown or other
MAVLLPKCTLQLSKNQSCPNPVAFXEELDKTFTFWGTPEGDVFHPVECMHELLDTVRRHKVNIDGNICTVMVTILVLEGWQRKLDPGFDIMQTLKTLLLEKDIKQPIDFXS

SEQ ID NO: 14514 - protein, 63 aa, Zea mays subsp. mays
  misc_feature (1)..(63): Ceres Seq. ID no. 5725717
  misc_feature (62)..(62): Xaa is any aa, unknown or other
MHELLDTVRRHKVNIDGNICTVMVTILVLEGWQRKLDPGFDIMQTLKTLLLEKDIKQPIDFXS

SEQ ID NO: 14515 - DNA, 418 bp, Zea mays subsp. mays
  misc_feature (1)..(418): Ceres Seq. ID no. 5754401
cccacagtgagcgaggttcccctcccgactcggtgatggcggctacggtggcggcggcggctacggtggtggtggcggcggctacggcggtggcaaccgtggcggcggctacggcaactccgacgggaactggaggaactgagcggtggggcccgcgcggccaagttatcctgttcgctaccgtgttgtttaccctagtccagagggtttatcttcgttcgtctcatgtttgttgttgcccatctgtgtttttgattgcaaggtcgctttgtgtcagttgttagtgctgtgttcatcctcggctccagcagacccatgcatcaaccagcatggactgcggatcgatggatgctgttacccccgtcaggctttatcctaagttaatcttcaaggaaaaaatggtgcttcttggtgctgc

SEQ ID NO: 14516 - protein, 93 aa, Zea mays subsp. mays
  misc_feature (1)..(93): Ceres Seq. ID no. 5754402
HSERGSPPDSVMAATVAAAATVVVAAATAVATVAAATATPTGTGGTERWGPRGQVILFATVLFTLVQRVYLRSSHVCCCPSVFLIARSLCVSC

SEQ ID NO: 14517 - protein, 82 aa, Zea mays subsp. mays
  misc_feature (1)..(82): Ceres Seq. ID no. 5754403
MAATVAAAATVVVAAATAVATVAAATATPTGTGGTERWGPRGQVILFATVLFTLVQRVYLRSSHVCCCPSVFLIARSLCVSC

SEQ ID NO: 14518 - DNA, 491 bp, Zea mays subsp. mays
  misc_feature (1)..(491): Ceres Seq. ID no. 5760189
agatcaccagccataccacacgaccgcagaggagtagcaagagcccgggggagaaatgagcgcggcggcgggcgggctgcggcggctgctggcggcggcggcaacggcgggagccgcggaggtgcgggcgtccatcttcggccacgcgttgaaccctacgggaaggcgcgcggcgacgaagctcctgcggaagaagatggtcggcgaccaggtggcgcagtggtacccctacgacatcaagcgcgacgacccgctcgtcatggcgcgcgaggagaaggagcgtctggctaaactggaaatgctgaagcgtcgtggcaagggcccgccgaagaagggtcagggaaggcgtgccgtcaagaggagcaagtagtcgagctgtgctaccctatcaatgctcatctctgtttctggagcttgccttgttcttacatgctgtaacgtactaccagtgatttgtcgggtgagtgggaacagaaagtgcctggtttact

SEQ ID NO: 14519 - protein, 104 aa, Zea mays subsp. mays
  misc_feature (1)..(104): Ceres Seq. ID no. 5760190
MSAAAGGLRRLLAAAATAGAAEVRASIFGHALNPTGRRAATKLLRKKMVGDQVAQWYPYDIKRDDPLVMAREEKERLAKLEMLKRRGKGPPKKGQGRRAVKRSK

SEQ ID NO: 14520 - protein, 96 aa, Zea mays subsp. mays
  misc_feature (1)..(96): Ceres Seq. ID no. 5760191
RSPAIPHDRRGVARARGRNERGGGRAAAAAGGGGNGGSRGGAGVHLRPRVEPYGKARGDEAPAEEDGRRPGGAVVPLRHQARRPARHGARGEGASG

SEQ ID NO: 14521 - protein, 57 aa, Zea mays subsp. mays
  misc_feature (1)..(57): Ceres Seq. ID no. 5760192
MVGDQVAQWYPYDIKRDDPLVMAREEKERLAKLEMLKRRGKGPPKKGQGRRAVKRSK

SEQ ID NO: 14522 - DNA, 443 bp, Zea mays subsp. mays
  misc_feature (1)..(443): Ceres Seq. ID no. 5760569
agcgacccaggcgtcacggcgtgatgcagttcctccgaggcagcggcggcggggcggtgggttcccgggggttgcgtgggaggtgttgcggcgnmactdmtctaagaagcggtccgtggacgtgaggcggatcaaccccaaggtgcccaaggaggaggccgtcgccatttccggccgactcctccagatcctctccgaccatgggcccctcaccgtcggcaacacctggaaccacgccaaggatgctggcatcgctggcctgaacagcaagacgcacatgaagatcctgctgaaatggatgacggggagaaatgtcgtgaagctgacctgcgtgcacgtgggcaacgcgaagaagttcctctactccccgtccactgaaagcagcagcagcagcgccggcgcatcaccgtcatccacatcggcctcgcagtgacagtcagtcg

SEQ ID NO: 14523 - protein, 143 aa, Zea mays subsp. mays
  misc_feature (1)..(143): Ceres Seq. ID no. 5760570
  misc_feature (31)..(31): Xaa is any aa, unknown or other
  misc_feature (32)..(32): Xaa is any aa, unknown or other
  misc_feature (33)..(33): Xaa is any aa, unknown or other
ATQASRRDAVPPRQRRRGGGFPGVAWEVLRXXXSKKRSVDVRRINPKVPKEEAVAISGRLLQILSDHGPLTVGNTWNHAKDAGIAGLNSKTHMKILLKWMTGRNVVKLTCVHVGNAKKFLYSPSTESSSSSAGASPSSTSASQ

SEQ ID NO: 14524 - DNA, 422 bp, Zea mays subsp. mays
  misc_feature (1)..(422): Ceres Seq. ID no. 5761283
cgaaaaatctaccgtgcggagggggaagagggagaggccaggagaggaaagcctgcagccaccatgcattccgacctctggatctcgcgtctcacggccgccaagcggcagtttgcgctgcagcgcgcgcagcgccagcacgccgccccggcatcccatcacgatcggatttgggtatgatgatatcgaacctgaggatgatttgcactcagacttcccatgcccttactgttatgaagatcatgatgttgcttctctctgcgcccatttggaggacgagcaccctttcgagtctaaaattgtgtcttgcccagtttgctcagctaggatttcgaaggacttggtggatcatataacccttcagcatggctacctatttaaaatatccttcttagatgattatatctttttagacatgtttt

SEQ ID NO: 14525 - protein, 140 aa, Zea mays subsp. mays
  misc_feature (1)..(140): Ceres Seq. ID no. 5761284
EKSTVRRGKRERPGEESLQPPCIPTSGSRVSRPPSGSLRCSARSASTPPRHPITIGFGYDDIEPEDDLHSDFPCPYCYEDHDVASLCAHLEDEHPFESKIVSCPVCSARISKDLVDHITLQHGYLFKISFLDDYIFLDMF

SEQ ID NO: 14526 - protein, 117 aa, Zea mays subsp. mays
  misc_feature (1)..(117): Ceres Seq. ID no. 5761285
KNLPCGGGRGRGQERKACSHHAFRPLDLASHGRQAAVCAAARAAPARRPGIPSRSDLGMMISNLRMICTQTSHALTVMKIMMLLLSAPIWRTSTLSSLKLCLAQFAQLGFRRTWWII

SEQ ID NO: 14527 - DNA, 497 bp, Zea mays subsp. mays
  misc_feature (1)..(497): Ceres Seq. ID no. 6405274
tttctgtgcaagcaaccttcccttataaattcgttgtgagcaagttcttgcagcctggagcttatgatctggttggttacatagtgtatgagatcgaccagcacccttaccagaatgtattctacaatggcactattgaggtcgttgaggctggaggcttactcagtgttgagtctgtgttcctcatcacccttggaatcgctctttttggtctctttggattatgggcatatggccaggttcagcagctctcgaagaaaacgaagaaggcccccaaggtggagctcggaactggaacaactgatgccaacatcgatgagtggctggagggcacttcgtttgtgcagagaagcaaatccaagaagaagcagacctgaagctagctctccagagtagttaatccttggaggatctagaatgaggcatttgagggtagcccttcacaagtgacttctgcagaaagataratgcctaaggaggkgctgaaaaatgtagtt

SEQ ID NO: 14528 - protein, 124 aa, Zea mays subsp. mays
  misc_feature (1)..(124): Ceres Seq. ID no. 6405275
SVQATFPYKFVVSKFLQPGAYDLVGYIVYEIDQHPYQNVFYNGTIEVVEAGGLLSVESVFLITLGIALFGLFGLWAYGQVQQLSKKTKKAPKVELGTGTTDANIDEWLEGTSFVQRSKSKKKQT

SEQ ID NO: 14529 - protein, 102 aa, Zea mays subsp. mays
  misc_feature (1)..(102): Ceres Seq. ID no. 6405276
MRSTSTLTRMYSTMALLRSLRLEAYSVLSLCSSSPLESLFLVSLDYGHMARFSSSRRKRRRPPRWSSELEQLMPTSMSGWRALRLCREANPRRSRPEASSPE

SEQ ID NO: 14530 - protein, 93 aa, Zea mays subsp. mays
  misc_feature (1)..(93): Ceres Seq. ID no. 6405277
MYSTMALLRSLRLEAYSVLSLCSSSPLESLFLVSLDYGHMARFSSSRRKRRRPPRWSSELEQLMPTSMSGWRALRLCREANPRRSRPEASSPE

SEQ ID NO: 14531 - DNA, 466 bp, Zea mays subsp. mays
  misc_feature (1)..(466): Ceres Seq. ID no. 6410186
atccatccgtagcgttccattccattccatctccctcctcgcctacggcttcttccaccgcggcatcgtgcccggcctctgcttcggcgcgggcctggggattacgctgttcggcatggcctacatgttcgtccacgacggcctggtccaccgccgctttccggtcggccccatcgccgacgtgccctacttccgccgagtggctgcctcgcacaagatacaccacatggacaagttcggcggcgtcccgtatgggctcttcctgggaccaaaggagctggaggaggttggtggcctggacgagcttgttagcagtccggtgagtgaagctactgatactgaagacgcaggagaagaaaagacgcgtccagttgtatgcgttgtccgaacaagcgtgttcatgggccagagtgtgccaaatgagttctagctttaggcgagtgggccaaatgagtgtgggctgcgt

SEQ ID NO: 14532 - protein, 142 aa, Zea mays subsp. mays
  misc_feature (1)..(142): Ceres Seq. ID no. 6410187
SIRSVPFHSISLLAYGFFHRGIVPGLCFGAGLGITLFGMAYMFVHDGLVHRRFPVGPIADVPYFRRVAASHKIHHMDKFGGVPYGLFLGPKELEEVGGLDELVSSPVSEATDTEDAGEEKTRPVVCVVRTSVFMGQSVPNEF

SEQ ID NO: 14533 - protein, 106 aa, Zea mays subsp. mays
  misc_feature (1)..(106): Ceres Seq. ID no. 6410188
PSVAFHSIPSPSSPTASSTAASCPASASARAWGLRCSAWPTCSSTTAWSTAAFRSAPSPTCPTSAEWLPRTRYTTWTSSAASRMGSSWDQRSWRRLVAWTSLLAVR

SEQ ID NO: 14534 - protein, 104 aa, Zea mays subsp. mays
  misc_feature (1)..(104): Ceres Seq. ID no. 6410189
MAYMFVHDGLVHRRFPVGPIADVPYFRRVAASHKIHHMDKFGGVPYGLFLGPKELEEVGGLDELVSSPVSEATDTEDAGEEKTRPVVCVVRTSVFMGQSVPNEF

SEQ ID NO: 14535 - DNA, 455 bp, Zea mays subsp. mays
  misc_feature (1)..(455): Ceres Seq. ID no. 7113127
gaacaaaaaccttttgattccaattgttcttctctcttcttcttcttcttcttcttcttcttcttcgccgcttcttctctctcgaattcaccccatctcaagtgtacgttagcctcctccctctaatggcgactcgtcttcagtttgagaacaactgcgaagttggtgtcttttccaaactcactaatgcctattgcttagtcgctataggaggctctgagaacttttacagtgcttttgagtcggagttagcagatgttatccctattgttaagacctctattggaggaacacgaattattgggcgtctttgtgctggaaacaagaatgggcttcttgtacctcatacaacaactgaccaagagcttcaacacttaaggaacagtctacctgatcaagttgtggtccagcgaattgatgaacgtctgtctgctcttggaaattgcattgcctgc

SEQ ID NO: 14536 - protein, 110 aa, Zea mays subsp. mays
  misc_feature (1)..(110): Ceres Seq. ID no. 7113128
MATRLQFENNCEVGVFSKLTNAYCLVAIGGSENFYSAFESELADVIPIVKTSIGGTRIIGRLCAGNKNGLLVPHTTTDQELQHLRNSLPDQVVVQRIDERLSALGNCIAC

SEQ ID NO: 14537 - DNA, 432 bp, Zea mays subsp. mays
  misc_feature (1)..(432): Ceres Seq. ID no. 7114355
accggctctgcacccaaagtccgaacccaaatcgtgtgttcaccgttcccgacgaacctgccgcatcacctcaccgatcccccggcgcccgctggccctgtcccgactcccgagacatgcaacccgtttgccgctcgtgcttggcccccgcgcggccacagccggaggtaccccgcgcgcaaacacgccgcgcggaggcgggacgacggagcccgtcgagccgcgcaaggacgggccggcgtcggcggtcgatcaggcggaggaggccgggctggcgcccgaanagctggaggtgctggaggaggcggccatcatgggggaggacgaggggcgccggcccaccgactacgaacgccgcgcgcacatnttcgangagagctcgcgggtcttccgtgatctcaagcagcgaancgacggcgacggtggcggcgg

SEQ ID NO: 14538 - protein, 143 aa, Zea mays subsp. mays
  misc_feature (1)..(143): Ceres Seq. ID no. 7114356
  misc_feature (95)..(95): Xaa is any aa, unknown or other
  misc_feature (122)..(122): Xaa is any aa, unknown or other
  misc_feature (124)..(124): Xaa is any aa, unknown or other
  misc_feature (137)..(137): Xaa is any aa, unknown or other
PALHPKSEPKSCVHRSRRTCRITSPIPRRPLALSRLPRHATRLPLVLGPRAATAGGTPRANTPRGGGTTEPVEPRKDGPASAVDQAEEAGLAPEXLEVLEEAAIMGEDEGRRPTDYERRAHXFXESSRVFRDLKQRXDGDGGG

SEQ ID NO: 14539 - protein, 143 aa, Zea mays subsp. mays
  misc_feature (1)..(143): Ceres Seq. ID no. 7114357
  misc_feature (94)..(94): Xaa is any aa, unknown or other
  misc_feature (122)..(122): Xaa is any aa, unknown or other
  misc_feature (124)..(124): Xaa is any aa, unknown or other
  misc_feature (137)..(137): Xaa is any aa, unknown or other
RLCTQSPNPNRVFTVPDEPAASPHRSPGARWPCPDSRDMQPVCRSCLAPARPQPEVPRAQTRRAEAGRRSPSSRARTGRRRRSIRRRRPGWRPXSWRCWRRRPSWGRTRGAGPPTTNAARTXSXRARGSSVISSSEXTATVAA

SEQ ID NO: 14540 - protein, 131 aa, Zea mays subsp. mays
  misc_feature (1)..(131): Ceres Seq. ID no. 7114358
  misc_feature (95)..(95): Xaa is any aa, unknown or other
  misc_feature (123)..(123): Xaa is any aa, unknown or other
  misc_feature (125)..(125): Xaa is any aa, unknown or other
TGSAPKVRTQIVCSPFPTNLPHHLTDPPAPAGPVPTPETCNPFAARAWPPRGHSRRYPARKHAARRRDDGARRAAQGRAGVGGRSGGGGRAGARXAGGAGGGGHHGGGRGAPAHRLRTPRAHXRXELAGLP

SEQ ID NO: 14541 - DNA, 453 bp, Zea mays subsp. mays
  misc_feature (1)..(453): Ceres Seq. ID no. 7115007
aacaacgagttaacgaaagccttttatccaagctcaggaaagctcacagtttcgttggatccaatcttagttttatccaagctcagcaatggcttctcgtcagcagcatcctactagctaccacgccggcgagacaaaggcccgtgccgaggagaagacgggtcaagtgatgggggcggcgcaggagaaagggagggaggccaagcacaaggcgtccgacgccgccgaccgcgccatggggatgggccacgacgccagggaggcgaccagggagaaggcgcgcgccgccgcggaccgaaccatggggatgggccacgacgccggggagacggccaaggacagggcgtaccgcgcccacgacggcgcgcagcagaccgggagctacgtcgcgcagacggccgaggccgccaggcagaangcggccggcgccgcgctgtacgccaaggacacccg

SEQ ID NO: 14542 - protein, 121 aa, Zea mays subsp. mays
  misc_feature (1)..(121): Ceres Seq. ID no. 7115008
  misc_feature (110)..(110): Xaa is any aa, unknown or other
MASRQQHPTSYHAGETKARAEEKTGQVMGAAQEKGREAKHKASDAADRAMGMGHDAREATREKARAAADRTMGMGHDAGETAKDRAYRAHDGAQQTGSYVAQTAEAARQXAAGAALYAKDT

SEQ ID NO: 14543 - protein, 94 aa, Zea mays subsp. mays
  misc_feature (1)..(94): Ceres Seq. ID no. 7115009
  misc_feature (83)..(83): Xaa is any aa, unknown or other
MGAAQEKGREAKHKASDAADRAMGMGHDAREATREKARAAADRTMGMGHDAGETAKDRAYRAHDGAQQTGSYVAQTAEAARQXAAGAALYAKDT

SEQ ID NO: 14544 - protein, 72 aa, Zea mays subsp. mays
  misc_feature (1)..(72): Ceres Seq. ID no. 7115010
  misc_feature (61)..(61): Xaa is any aa, unknown or other
MGMGHDAREATREKARAAADRTMGMGHDAGETAKDRAYRAHDGAQQTGSYVAQTAEAARQXAAGAALYAKDT

SEQ ID NO: 14545 - DNA, 470 bp, Zea mays subsp. mays
  misc_feature (1)..(470): Ceres Seq. ID no. 7118147
aactgagcctaagaaaaagaccaaaactgttattgagaagtattgggattgggagctttcaaatgagacacaacctatttggcttcggaaccccaaagaggtttcaactgaggaatacaatgattttttcaagaaaaccttcaatgagtacttgggccctttggcatcatcacacttcactacagagggtgaggtagaatttaggtcaattctttttgttcctgctacaaggaaaggaagatgtaactgctgatagtaggaagaccaagaatatcagactatatgttaagcgtgtattcatatcagatgactttgatggagaattgttcccaagatatttgagttttgtggaaggggtgttgttgactcaaatgaccttccattgaatgtttctcgtgagattccttcaagaaaagtcgaattgttcgtataaatgagaaaaaggctgggtgcggaaagcctttgatatg

SEQ ID NO: 14546 - protein, 83 aa, Zea mays subsp. mays
  misc_feature (1)..(83): Ceres Seq. ID no. 7118148
TEPKKKTKTVIEKYWDWELSNETQPIWLRNPKEVSTEEYNDFFKKTFNEYLGPLASSHFTTEGEVEFRSILFVPATRKGRCNC

SEQ ID NO: 14547 - protein, 64 aa, Zea mays subsp. mays
  misc_feature (1)..(64): Ceres Seq. ID no. 7118149
LSLRKRPKLLLRSIGIGSFQMRHNLFGFGTPKRFQLRNTMIFSRKPSMSTWALWHHHTSLQRVR

SEQ ID NO: 14548 - protein, 44 aa, Zea mays subsp. mays
  misc_feature (1)..(44): Ceres Seq. ID no. 7118150
MRHNLFGFGTPKRFQLRNTMIFSRKPSMSTWALWHHHTSLQRVR

SEQ ID NO: 14549 - DNA, 447 bp, Zea mays subsp. mays
  misc_feature (1)..(447): Ceres Seq. ID no. 11027955
gccaaaggaaggcttgtgttgtgtttggctagggtttgctcgcgtctcctccttcccttggctgctgtcgtgccggtcggcggcgacatgtcgaagaagaacaatcttgccaagaggaagaagcagtacgagttcgacctccaacgggagaaggaggccaaggagaagcaggccaagaagctgcaagccaagaaatccaagatgaagatagatggtgctgaaaagaaacgtaaaggtggccaatttaaggtcggcaagaaaaaggtgaagacgaaactttcagccttagcaaaagccaaagccgcgcaagccatggaggtcgacaagtgactgcggagcacaagcatcatcagcttaatcgtcgagccagagttggaactctgaattctgtgcccacatgaatagctcccgtcgggtgcagctgcagcttgttgaacctttctttct

SEQ ID NO: 14550 - protein, 109 aa, Zea mays subsp. mays
  misc_feature (1)..(109): Ceres Seq. ID no. 11027956
AKGRLVLCLARVCSRLLLPLAAVVPVGGDMSKKNNLAKRKKQYEFDLQREKEAKEKQAKKLQAKKSKMKIDGAEKKRKGGQFKVGKKKVKTKLSALAKAKAAQAMEVDK

SEQ ID NO: 14551 - protein, 80 aa, Zea mays subsp. mays
  misc_feature (1)..(80): Ceres Seq. ID no. 11027957
MSKKNNLAKRKKQYEFDLQREKEAKEKQAKKLQAKKSKMKIDGAEKKRKGGQFKVGKKKVKTKLSALAKAKAAQAMEVDK

SEQ ID NO: 14552 - protein, 67 aa, Zea mays subsp. mays
  misc_feature (1)..(67): Ceres Seq. ID no. 11027958
PKEGLCCVWLGFARVSSFPWLLSCRSAATCRRRTILPRGRSSTSSTSNGRRRPRRSRPRSCKPRNPR

SEQ ID NO: 14553 - DNA, 476 bp, Zea mays subsp. mays
  misc_feature (1)..(476): Ceres Seq. ID no. 11028215
aatatttttagccgcttttcggttggtggtgcctggcatctaccgtgcggagggggaagagggagaggccaggagaggaaagcctgcagccaccatggattccgacctctggatctcgcgtctcacggccgccnggcggcagtttgcgctgcagcgcgcgcagcgccagcacgccgccccggcatcccatcacgatcgatttgggtatgatgatatcgaacctgaggatgatttgcactcagacttcccatgcccttactgttatgaagatcatgatgttgcttctctctgcgcccatttggaggacgagcaccctttcgagtctaaaattgtgaaacatcaaagagtacgcagagttactggtaatggcaaccacaatctctcctatgcagggagagatcttcaactgcaagagacctacttaaaggtgcttcttggaaatagcagtcgaagcagcagtacaatgcatcaagtac

SEQ ID NO: 14554 - protein, 158 aa, Zea mays subsp. mays
  misc_feature (1)..(158): Ceres Seq. ID no. 11028216
  misc_feature (45)..(45): Xaa is any aa, unknown or other
IFLAAFRLVVPGIYRAEGEEGEARRGKPAATMDSDLWISRLTAAXRQFALQRAQRQHAAPASHHDRFGYDDIEPEDDLHSDFPCPYCYEDHDVASLCAHLEDEHPFESKIVKHQRVRRVTGNGNHNLSYAGRDLQLQETYLKVLLGNSSRSSSTMHQV

SEQ ID NO: 14555 - protein, 127 aa, Zea mays subsp. mays
  misc_feature (1)..(127): Ceres Seq. ID no. 11028217
  misc_feature (14)..(14): Xaa is any aa, unknown or other
MDSDLWISRLTAAXRQFALQRAQRQHAAPASHHDRFGYDDIEPEDDLHSDFPCPYCYEDHDVASLCAHLEDEHPFESKIVKHQRVRRVTGNGNHNLSYAGRDLQLQETYLKVLLGNSSRSSSTMHQV

SEQ ID NO: 14556 - DNA, 494 bp, Zea mays subsp. mays
  misc_feature (1)..(494): Ceres Seq. ID no. 11030852
atcaagatgcgtgagatcgctgaagcttaccttggcagcacgatcaagaatgctgttgtcacggtccctgcctacttcaacgactcacagaggcaggccacgaaggatgctggggtgattgctggcctcaatgtgctgcgtatcatcaatgagccaaccgctgctgctattgcctatggtcttgacaagaaggcaaccagcgtcggtgagaagaatgtcctcatctttgaccttggaggtggtaccttcgatgtctccctccttactattgaggaaggtatctttgaggtcaaggccacagctggcgacacccatcttgggggtgaggactttgacaacaggatggtcaaccactttgtccaggagttcaagaggaagaacaagaaggatatcactggcaacccgagggctctccggaggctgaggacctcttgtgagagggccaagagaactctgtcttccactgcccagaccaccattgagattgactcgct

SEQ ID NO: 14557 - protein, 164 aa, Zea mays subsp. mays
  misc_feature (1)..(164): Ceres Seq. ID no. 11030853
IKMREIAEAYLGSTIKNAVVTVPAYFNDSQRQATKDAGVIAGLNVLRIINEPTAAAIAYGLDKKATSVGEKNVLIFDLGGGTFDVSLLTIEEGIFEVKATAGDTHLGGEDFDNRMVNHFVQEFKRKNKKDITGNPRALRRLRTSCERAKRTLSSTAQTTIEIDS

SEQ ID NO: 14558 - protein, 162 aa, Zea mays subsp. mays
  misc_feature (1)..(162): Ceres Seq. ID no. 11030854
MREIAEAYLGSTIKNAVVTVPAYFNDSQRQATKDAGVIAGLNVLRIINEPTAAAIAYGLDKKATSVGEKNVLIFDLGGGTFDVSLLTIEEGIFEVKATAGDTHLGGEDFDNRMVNHFVQEFKRKNKKDITGNPRALRRLRTSCERAKRTLSSTAQTTIEIDS

SEQ ID NO: 14559 - protein, 97 aa, Zea mays subsp. mays
  misc_feature (1)..(97): Ceres Seq. ID no. 11030855
MCCVSSMSQPLLLLPMVLTRRQPASVRRMSSSLTLEVVPSMSPSLLLRKVSLRSRPQLATPILGVRTLTTGWSTTLSRSSRGRTRRISLATRGLSGG

SEQ ID NO: 14560 - DNA, 1021 bp, Zea mays subsp. mays
  misc_feature (1)..(1021): Ceres Seq. ID no. 11048868
cacgagcaatccccttcaacaaacgcaccgcactccacggcagccagaaaacacatcccacggggcccagacccggcgacccacctgagcccggcgcagatgcagttcatccaggcccagctccacctgcagcggaacccggggctgggcccgcgggcgcagcccatgaagcccgccgtcccagtgccgccggcgccggcgccgcagcggcctgtgaagctgtaccgcggcgtgcggcagcgtcactggggcaagtgggtggccgagatccggctcccccggaaccgcacccgcctgtggctcgggaccttcgacaccgccgagcaggcagcgctggcctacgaccaggcggcgtaccgcctccgcggggacgcggcgcggctcaacttccccgacaacgcggagtccagggcgccgctcgaccccgccgtggacgccaagctgcaggccatctgcgccaccatcgccgccgcgtcgtcgtcatccaagaattccaaggccaagagcaaggcgatgccaatcaacgcgtccgttctggaagcggcagcggcgtctccgagcaacagctcctccgacgaaggttccggctccgggttcgggtcggacgacgagatgtcctcgtcttccccgacgccggtggtggcgccgccggtggcggacatgggacagttggatttcagcgaggttccgtgggacgaggacgagagcttcgtgctccgcaagtacccgtcctacgagatcgactgggacgcgctgctctccaactagtcgcccttcgccgacagatgtgctgttgtagttcagtagtggcagtatctctggccgccgcagatgaggttttaggcaatctgcaggccgccggcccatgtgtattaagtaggttttgctcagttgttggccccggacttcgccggcgtttttgtgaccggcgtccccgagtgcactgcattggtgtactggtctgtctgtaaaaaaaaatggatctgtgtacttctatagtgtgtattcaaccattgttctt

SEQ ID NO: 14561 - protein, 322 aa, Zea mays subsp. mays
  misc_feature (1)..(322): Ceres Seq. ID no. 11048869
RAIPFNKRTALHGSQKTHPTGPRPGDPPEPGADAVHPGPAPPAAEPGAGPAGAAHEARRPSAAGAGAAAACEAVPRRAAASLGQVGGRDPAPPEPHPPVARDLRHRRAGSAGLRPGGVPPPRGRGAAQLPRQRGVQGAARPRRGRQAAGHLRHHRRRVVVIQEFQGQEQGDANQRVRSGSGSGVSEQQLLRRRFRLRVRVGRRDVLVFPDAGGGAAGGGHGTVGFQRGSVGRGRELRAPQVPVLRDRLGRAALQLVALRRQMCCCSSVVAVSLAAADEVLGNLQAAGPCVLSRFCSVVGPGLRRRFCDRRPRVHCIGVLVCL

SEQ ID NO: 14562 - protein, 255 aa, Zea mays subsp. mays
  misc_feature (1)..(255): Ceres Seq. ID no. 11048870
HEQSPSTNAPHSTAARKHIPRGPDPATHLSPAQMQFIQAQLHLQRNPGLGPRAQPMKPAVPVPPAPAPQRPVKLYRGVRQRHWGKWVAEIRLPRNRTRLWLGTFDTAEQAALAYDQAAYRLRGDAARLNFPDNAESRAPLDPAVDAKLQAICATIAAASSSSKNSKAKSKAMPINASVLEAAAASPSNSSSDEGSGSGFGSDDEMSSSSPTPVVAPPVADMGQLDFSEVPWDEDESFVLRKYPSYEIDWDALLSN

SEQ ID NO: 14563 - protein, 222 aa, Zea mays subsp. mays
  misc_feature (1)..(222): Ceres Seq. ID no. 11048871
MQFIQAQLHLQRNPGLGPRAQPMKPAVPVPPAPAPQRPVKLYRGVRQRHWGKWVAEIRLPRNRTRLWLGTFDTAEQAALAYDQAAYRLRGDAARLNFPDNAESRAPLDPAVDAKLQAICATIAAASSSSKNSKAKSKAMPINASVLEAAAASPSNSSSDEGSGSGFGSDDEMSSSSPTPVVAPPVADMGQLDFSEVPWDEDESFVLRKYPSYEIDWDALLSN

SEQ ID NO: 14564 - DNA, 2494 bp, Zea mays subsp. mays
  misc_feature (1)..(2494): Ceres Seq. ID no. 11048998
cttaagggtttggactaatgattgtaattgagattcttagataacgagttcgttgttctaagtgagatggcatgtgtagttgacatttgaaggatttctctatataaatcccggctactattaacatctcaacctcaccatcttctcttgatcgaggcagggatcaagcgaccgatacccgccatggaccttgcacggagaggcggtgccgcaggcgcggacgacgagggggagatcgagaggcacgagccggcgcccgaggacatggagtccgaccccgcagcggcgcgcgagaaggagctggagctggagcgggtgcagtcgtggcgggagcaggtgactctgcgcggcgtggtggcggcgctgctgatcggcttcatgtacagcgtgatcgtgatgaagatcgcgctcaccacggggctggtgcccacgctgaacgtctccgcggcgctgatggcgttcctggcgctccgcgggtggacgcgcgtgctggagcgcctcggcgtggcgcaccgccccttcacgcgccaggagaactgcgtcatcgagacctgcgccgtcgcgtgctacaccatcgcgttcggcggtgggttcggctccacgctgctgggcctggacaagaagacgtacgagctggccggggcctcgccggccaacgttccgggcagctacaaggaccctgggttcggctggatggccggattcgtcgcggcgatcagcttcgccggcctcctaagcctgatccccctcagaaaggttctggtcattgactacaagctaacttacccaagcgggactgcgaccgctgttctcataaacgggttccacaccaagcaaggagacaagaacgcaaggatgcaagtccgagggttcctcaagtactttgggctcagcttcgtgtggagctttttccagtggttctacacaggcggtgaagtttgcggctttgttcagtttcctacgttcggtctgaaggcctggaagcagacgttcttctttgattttagcctcacgtacgttggtgcggggatgatctgttcgcacctcgtgaacatctccaccctccttggtgccatcctgtcatgggggatactgtggccactcatcagcaagcagaaaggggagtggtaccctgcgaacatacctgagagtagcatgaaaagcttatacggttacaaggccttcctctgcatagctctgatcatgggagacggtacataccacttctttaaagtcttcggtgtcactgttaagagtctgcatcaacggctgagccgcaaacgtgctaccaacagagtggcaaacggtggagacgaaatggccgcgcttgacgacctacagcgtgacgagatcttcagcgacgggtctttccccgcctgggcagcttacgccgggtacgcggcgctgaccgtcgtctcagcggtcatcatcccgcacatgttccggcaggtcaagtggtactacgtgatcgtggcctacgtcctcgcccctctcctcggcttcgccaactcctacggcacggggctcaccgacatcaacatggcctacaactacggcaagatcgcgctcttcatcttcgcggcctgggccggcagggacaacggcgtcatcgcgggcctcgccggcggcaccctggtgaagcagctggtgatggcgtccgcggacctgatgcacgacttcaagacgggccacctgaccatgacgtcgcccaggtccctgctcgtggcgcagttcatcgggacggccatgggctgcgtcgtcgcgcccctcacgttcctgctcttctacaacgcgttcgacatcgggaaccccaccgggtactggaaggcgccgtacggcctcatctaccgcaacatggcgatcctcggcgtggagggcttctccgtgctgcccaggcactgcctcgcgctctccgctgggttcttcgccttcgccttcgtcttcagcgtcgcccgggacgtcctgccgcggaagtacgccaggttcgtgcccctgcccatggccatggccgtgccgttcctcgtgggcgggagcttcgcgatcgatatgtgcgtcgggagcctggccgtctttgtctgggagaaggtgaacaggaaggaggccgtgttcatggtgcctgcggttgcgtccggtttgatctgtggagacggcatatggaccttcccgtcttccattctcgctctggccaagatcaagccaccgatttgcatgaagttcactcctggaagctagaaacagtatggacagttcacggaaatggagaatgcgagatacactgaaggcatcaactgtggttggttgaagccatatgtcccctgtattatccttgttgtgcatgtgtgggttctccaagggctacagcactcgagattttttatagagtttatatgttttgttgtcatgttgggttcaacctatgtttatgttttgggtggaaaaaaagattacaactgtacatttttaacagaaattaatgctcattttggttgtgtat

SEQ ID NO: 14565 - protein, 682 aa, Zea mays subsp. mays
  misc_feature (1)..(682): Ceres Seq. ID no. 11048999
MDLARRGGAAGADDEGEIERHEPAPEDMESDPAAAREKELELERVQSWREQVTLRGVVAALLIGFMYSVIVMKIALTTGLVPTLNVSAALMAFLALRGWTRVLERLGVAHRPFTRQENCVIETCAVACYTIAFGGGFGSTLLGLDKKTYELAGASPANVPGSYKDPGFGWMAGFVAAISFAGLLSLIPLRKVLVIDYKLTYPSGTATAVLINGFHTKQGDKNARMQVRGFLKYFGLSFVWSFFQWFYTGGEVCGFVQFPTFGLKAWKQTFFFDFSLTYVGAGMICSHLVNISTLLGAILSWGILWPLISKQKGEWYPANIPESSMKSLYGYKAFLCIALIMGDGTYHFFKVFGVTVKSLHQRLSRKRATNRVANGGDEMAALDDLQRDEIFSDGSFPAWAAYAGYAALTVVSAVIIPHMFRQVKWYYVIVAYVLAPLLGFANSYGTGLTDINMAYNYGKIALFIFAAWAGRDNGVIAGLAGGTLVKQLVMASADLMHDFKTGHLTMTSPRSLLVAQFIGTAMGCVVAPLTFLLFYNAFDIGNPTGYWKAPYGLIYRNMAILGVEGFSVLPRHCLALSAGFFAFAFVFSVARDVLPRKYARFVPLPMAMAVPFLVGGSFAIDMCVGSLAVFVWEKVNRKEAVFMVPAVASGLICGDGIWTFPSSILALAKIKPPICMKFTPGS

SEQ ID NO: 14566 - protein, 655 aa, Zea mays subsp. mays
  misc_feature (1)..(655): Ceres Seq. ID no. 11049000
MESDPAAAREKELELERVQSWREQVTLRGVVAALLIGFMYSVIVMKIALTTGLVPTLNVSAALMAFLALRGWTRVLERLGVAHRPFTRQENCVIETCAVACYTIAFGGGFGSTLLGLDKKTYELAGASPANVPGSYKDPGFGWMAGFVAAISFAGLLSLIPLRKVLVIDYKLTYPSGTATAVLINGFHTKQGDKNARMQVRGFLKYFGLSFVWSFFQWFYTGGEVCGFVQFPTFGLKAWKQTFFFDFSLTYVGAGMICSHLVNISTLLGAILSWGILWPLISKQKGEWYPANIPESSMKSLYGYKAFLCIALIMGDGTYHFFKVFGVTVKSLHQRLSRKRATNRVANGGDEMAALDDLQRDEIFSDGSFPAWAAYAGYAALTVVSAVIIPHMFRQVKWYYVIVAYVLAPLLGFANSYGTGLTDINMAYNYGKIALFIFAAWAGRDNGVIAGLAGGTLVKQLVMASADLMHDFKTGHLTMTSPRSLLVAQFIGTAMGCVVAPLTFLLFYNAFDIGNPTGYWKAPYGLIYRNMAILGVEGFSVLPRHCLALSAGFFAFAFVFSVARDVLPRKYARFVPLPMAMAVPFLVGGSFAIDMCVGSLAVFVWEKVNRKEAVFMVPAVASGLICGDGIWTFPSSILALAKIKPPICMKFTPGS

SEQ ID NO: 14567 - protein, 617 aa, Zea mays subsp. mays
  misc_feature (1)..(617): Ceres Seq. ID no. 11049001
MYSVIVMKIALTTGLVPTLNVSAALMAFLALRGWTRVLERLGVAHRPFTRQENCVIETCAVACYTIAFGGGFGSTLLGLDKKTYELAGASPANVPGSYKDPGFGWMAGFVAAISFAGLLSLIPLRKVLVIDYKLTYPSGTATAVLINGFHTKQGDKNARMQVRGFLKYFGLSFVWSFFQWFYTGGEVCGFVQFPTFGLKAWKQTFFFDFSLTYVGAGMICSHLVNISTLLGAILSWGILWPLISKQKGEWYPANIPESSMKSLYGYKAFLCIALIMGDGTYHFFKVFGVTVKSLHQRLSRKRATNRVANGGDEMAALDDLQRDEIFSDGSFPAWAAYAGYAALTVVSAVIIPHMFRQVKWYYVIVAYVLAPLLGFANSYGTGLTDINMAYNYGKIALFIFAAWAGRDNGVIAGLAGGTLVKQLVMASADLMHDFKTGHLTMTSPRSLLVAQFIGTAMGCVVAPLTFLLFYNAFDIGNPTGYWKAPYGLIYRNMAILGVEGFSVLPRHCLALSAGFFAFAFVFSVARDVLPRKYARFVPLPMAMAVPFLVGGSFAIDMCVGSLAVFVWEKVNRKEAVFMVPAVASGLICGDGIWTFPSSILALAKIKPPICMKFTPGS

SEQ ID NO: 14568 - DNA, 1195 bp, Zea mays subsp. mays
  misc_feature (1)..(1195): Ceres Seq. ID no. 11049022
cctagctctgcccctctcctccagcgccgctcgccagctctctgcccccgccgcgcccagagatgcagatcccccaccgccgttaccgctgggtgaaggagtgggtctcgcaagaactggtcgtcgccggaggcccctgcgtgctgtacaagtgggtgcgagaggacagactagcagctttgaaggctaaggacaagaagcatgggggcagaatctgcaactcctgaacccaactctgaggttctctgcctgtgcagctacgaaggatgtgggaagacattttttgatgcaggggctcttaagaagcacgctcatgtccatggggagaggcaatatatctgccactatgagaactgtggcaagaaattcttagatagctctaagttgaagagacattttcttatccatactggagagaagaattttgtgtgcccacatgaaggttgtgggagggcattttcgttggattttaatttaaaggcacacatgaaaacacattctgcagataactatcatgtgtgccagtacccagaatgtggccgaagatttacaccagaatcaaaactgagagctcatatcagggcacaacatgagaaaaatccaggtgcgtcatcaatgaaccacagtgcaattggaggtccgcaccagccccctaagccagcgaaggtctcagcagcacctccagctccctcagctgagcgcccttacgtctgcccctacgatggttgtgacaaggcatacatccatgagtacaagttgaacctccatctgaaaaaagagcatcccaaccactaccaggatggtggtccaaatggtgctgccgccccttcaaagcgcaacatctcgaagaattcccacaggagcaagctggacatcacctctaggatgccaccggccaacatccccaagcacagagggtatgcaacaccattgccagctgtggtgagcctccctgaggagcagcagttgcttaaggaaagtggtgtacgaggatgacagcgaggagactgaagaagagggggataacaatggcgaggacagatggaactacaagagagctgctagcagcgacgacgaggaaaccgaagacgaagaatgagctgctagcagggattcatttttttttcttctgtagctgtgcatataccataatctatagactggtggttatagatttcaatacatgtacattttt

SEQ ID NO: 14569 - protein, 264 aa, Zea mays subsp. mays
  misc_feature (1)..(264): Ceres Seq. ID no. 11049023
MGAESATPEPNSEVLCLCSYEGCGKTFFDAGALKKHAHVHGERQYICHYENCGKKFLDSSKLKRHFLIHTGEKNFVCPHEGCGRAFSLDFNLKAHMKTHSADNYHVCQYPECGRRFTPESKLRAHIRAQHEKNPGASSMNHSAIGGPHQPPKPAKVSAAPPAPSAERPYVCPYDGCDKAYIHEYKLNLHLKKEHPNHYQDGGPNGAAAPSKRNISKNSHRSKLDITSRMPPANIPKHRGYATPLPAVVSLPEEQQLLKESGVRG

SEQ ID NO: 14570 - protein, 169 aa, Zea mays subsp. mays
  misc_feature (1)..(169): Ceres Seq. ID no. 11049024
MKTHSADNYHVCQYPECGRRFTPESKLRAHIRAQHEKNPGASSMNHSAIGGPHQPPKPAKVSAAPPAPSAERPYVCPYDGCDKAYIHEYKLNLHLKKEHPNHYQDGGPNGAAAPSKRNISKNSHRSKLDITSRMPPANIPKHRGYATPLPAVVSLPEEQQLLKESGVRG

SEQ ID NO: 14571 - DNA, 547 bp, Zea mays subsp. mays
  misc_feature (1)..(547): Ceres Seq. ID no. 11049089
ccaggccgaaggaaaacaatcctgaaaccaagccatgggtctgcaggaggaatttgaggagcatgctgagaaggcaaagaccttgcctgagagcacgagcaatgagaacaagctgatcctctacgggctctacaagcaagccacggttggagatgtgaataccgatcgtccgggcatattctaccaaaaggacagggccaagtgggatgcctggaaggctgttgaaggcaaatcgaaggatgaggcgatgaatgactacatcaccaaggtgaagcagctccaggaggaggctgccgcctcttaaaagtctcttaatagtgttgccaaacagctatttgtcagatgagcttgtgccatttcctcattagaagtatatcattcgatcattggggatctgtgaaccatgtactgttagtaactttttttttttcaaagacgcangaggactgccaccatatataaagtaagggaaaataaagggcatatgatgatatcatcancatcnagtactggttatgtacattactgttaagtactggtacatgta

SEQ ID NO: 14572 - protein, 89 aa, Zea mays subsp. mays
  misc_feature (1)..(89): Ceres Seq. ID no. 11049090
MGLQEEFEEHAEKAKTLPESTSNENKLILYGLYKQATVGDVNTDRPGIFYQKDRAKWDAWKAVEGKSKDEAMNDYITKVKQLQEEAAAS

SEQ ID NO: 14573 - DNA, 1842 bp, Zea mays subsp. mays
  misc_feature (1)..(1842): Ceres Seq. ID no. 11049105
gaattcggcacgagcgaagggaatgggccagtggtgaggagctcgccgccgtgcgcatagtcgagccactccgccggtccatggatcgcgccagggaaattcttgagattaaaacaggaggcttagttgtgtggacaaaaggagacatgcattttgtctacagaggaagcaaatatcagcaaaacgcaaagcatagtcacacttttctaactaatgttcataaagatgatgcttttcaagaaaatgatcaaagcatttgtggccagaaggatgaagaacctgtcaagggtacactatatgagagagaagtcaatagactattggacactttgggccctcgatttgttgattggtggtgggacacaccattacctgttgatgctgatctcctcccagagtttgttccaggctttaagactccatataggctgtgccctcctggggtgagaccaacactagctgatgaggagctgacatacttgcgcaagcttgcacgccttttgccaacacattttgcccttggtagaaacacaagattgcagggtttggctgctgctatactgaagctttgggagaaaagccttatagcaaaaattgcagtgaaaataggtatccagaatacaaacaatgaacaaatggcatggaacctcaagggaaaggcttacatcggtttatcccttactcagagcactgagtctgtccttttgttatttgtattttcttgtgtaacactgaagctcctcagtgcagcatcttacgggaggcactgttatattgagaaacaaggattttattattctatatagaggcaaggattttcttcctggtggagttgctcaaactgtcattcaacgagaagctcaggtacatgatgaacaggtgaaggaagaggaagcccgactgaaagcagttgactcacttcagatggttggtgaattatctgaagaaagttctttaggaactttcagggagtaccagggtttccatgctaagtttgtgcatgaaaatactgaaaactctaacaccatgattgaactagaggctgagaagtatagattggaaaaggaactgaaagaccatgagtggaagctttccgttctcaacaagaagattgaaagatctaaccaggcactggcaaagcttcacagttcttggagcccttcagagcagtctgctgatagagaacacttgacagaagaggaaaaaataatgttccgccggattggccgcaaaatggatgggcttgttctcctaggaaggcgtggtatctttgatggtgtaattgaagagattcatcagcactggaaacataaagaggttgtgaaagtaattacaaaacagaatcaaactcgacagatcatgtacgccgcgagtctgctcgaggttgagacaggtgggatattaatagcagtagaaaagctcacaaccagccatgccataatactttaccgtggaaaaaactatcgccgcccagcaaaatcatcatttagtaatctcctaacaaaaagagaagcgctccgaagatcaatcgaggtccaacgacgagggtcaatgaaatactttgttcgggagagacagaagtccattttggaattgaaaaggaaactgaggtatgtgacaaggcaaatcaggtatcgaaccccatgatcatgaagagtttggatagcatggttagtaaatgatagttagaatttgcaataatgactgcatccaatttttttccttaatatgggatagccgtgtaaactgtgaagcccaacatgaacaattctgaagtgtacagattatataatagtgtctgttgtacatatgtgacacttttgactttacccatatttcatg

SEQ ID NO: 14574 - protein, 267 aa, Zea mays subsp. mays
  misc_feature (1)..(267): Ceres Seq. ID no. 11049106
IRHERREWASGEELAAVRIVEPLRRSMDRAREILEIKTGGLVVWTKGDMHFVYRGSKYQQNAKHSHTFLTNVHKDDAFQENDQSICGQKDEEPVKGTLYEREVNRLLDTLGPRFVDWWWDTPLPVDADLLPEFVPGFKTPYRLCPPGVRPTLADEELTYLRKLARLLPTHFALGRNTRLQGLAAAILKLWEKSLIAKIAVKIGIQNTNNEQMAWNLKGKAYIGLSLTQSTESVLLLFVFSCVTLKLLSAASYGRHCYIEKQGFYYSI

SEQ ID NO: 14575 - protein, 241 aa, Zea mays subsp. mays
  misc_feature (1)..(241): Ceres Seq. ID no. 11049107
MDRAREILEIKTGGLVVWTKGDMHFVYRGSKYQQNAKHSHTFLTNVHKDDAFQENDQSICGQKDEEPVKGTLYEREVNRLLDTLGPRFVDWWWDTPLPVDADLLPEFVPGFKTPYRLCPPGVRPTLADEELTYLRKLARLLPTHFALGRNTRLQGLAAAILKLWEKSLIAKIAVKIGIQNTNNEQMAWNLKGKAYIGLSLTQSTESVLLLFVFSCVTLKLLSAASYGRHCYIEKQGFYYSI

SEQ ID NO: 14576 - protein, 240 aa, Zea mays subsp. mays
  misc_feature (1)..(240): Ceres Seq. ID no. 11049108
MVGELSEESSLGTFREYQGFHAKFVHENTENSNTMIELEAEKYRLEKELKDHEWKLSVLNKKIERSNQALAKLHSSWSPSEQSADREHLTEEEKIMFRRIGRKMDGLVLLGRRGIFDGVIEEIHQHWKHKEVVKVITKQNQTRQIMYAASLLEVETGGILIAVEKLTTSHAIILYRGKNYRRPAKSSFSNLLTKREALRRSIEVQRRGSMKYFVRERQKSILELKRKLRYVTRQIRYRTP

SEQ ID NO: 14577 - DNA, 2348 bp, Zea mays subsp. mays
  misc_feature (1)..(2348): Ceres Seq. ID no. 11049109
ctccccacatggcgccaccgccgctgcccctcttctccccgtccctaaaggccccgccgccgccgccatggctccacgggtcctctacccaaagccgcgactccgcacccccggtgcctccactccccgccgaggcaactccttccaagttccgcatcgacagccccaaaccggcaccggcaaggaaaaacaccaaaacagcagccaagcccctcactgccggagtccccgggggccgcacccaccgagcggtcctcggcatcatccggcgcgtccgctccctcgagctctccgatgctccgagtccgaattccgtccacaccagcaacagcggtgccgccgccgccgcattccaccttacgatcgagctgtccccgccgcgggaaccaggccaatatgtggttgagaaggagaagtcacgggctgttccgtgggcggctgctagggacgagggcctcaaggttgcgctgcggcgggagaagaagccgcgggagccgacgcgcgcggagaccgagctggagacccacgagctgcgtcgcctgcggcggttggcgcgtgggataggcaggtgggcgcgggccaagaaggccggagtcaccgacgaggtagtcaaggaggtgcgaagggaatgggccagtggtgaggagctcgccgccgtgcgcatagtcgagccactccgccggtccatggatcgcgccagggaaattcttgagattaaaacaggaggcttagttgtgtggacaaaaggagacatgcattttgtctacagaggaagcaaatatcagcaaaacgcaaagcatagtcacacttttctaactaatgttcataaagatgatgcttttcaagaaaatgatcaaagcatttgtggccagaaggatgaagaacctgtcaagggtacactatatgagagagaagtcaatagactattggacactttgggccctcgatttgttgattggtggtgggacacaccattacctgttgatgctgatctcctcccagagtttgttccaggctctaagactccatataggctgtgccctcctggggtgagaccaacactagctgatgaggagctgacatacttgcgcaagcttgcacgccttttgccaacacattttgcccttggtagaaacacaagattgcagggtttggctgctgctatactgaagctttgggagaaaagccttatagcaaaaattgcagtgaaaataggtatccagaatacaaacaatgaacaaatggcatggaacctcaagcatcttacgggaggcactgttatattgagaaacaaggattttattattctatatagaggcaaggattttcttcctggtggagttgctcaaactgtcattcaacgagaagctcaggtacatgatgaacaggtgaaggaagaggaagcccgactgaaagcagttgactcacttcagatggttggtgaattatctgaagaaagttctttaggaactttcagggagtaccagggtttccatgctaagtttgtgcatgaaaatactgaaaactctaacaccatgattgaactagaggctgagaagtatagattggaaaaggaactgaaagaccatgagtggaagctttccgttctcaacaagaagattgaaagatctaaccaggcactggcaaagcttcacagttcttggagcccttcagagcagtctgctgatagagaacacttgacagaagaggaaaaaataatgttccgccggattggccgcaaaatggatgggcttgttctcctaggaaggcgtggtatctttgatggtgtaattgaagagattcatcagcactggaaacataaagaggttgtgaaagtaattacaaaacagaatcaaactcgacagatcatgtacgccgcgagtctgctcgaggttgagacaggtgggatattaatagcagtagaaaagctcacaaccagccatgccataatactttaccgtggaaagaactatcgccgcccagcaaaatcatcatttagtaatctcctaacaaaaagagaagcgctccgaagatcaatcgaggtccaacgacgagggtcaatgaaatactttgttcgggagagacagaagtccattttggaattgaaaaggaaactgaggtatgtgacaaggcaaatcaggtatcgaaccccatgatcatgaagagtttggatagcatggttagtaaatgatagttagaatttgcaataatgactgcatccaatttttttccttaatatgggatagccgtgtaaactgtgaagcccaacatgaacaattctgaagtgtacagattatataatagtgtctgttgtacatatgtgacacttttgactttacccatatttc

SEQ ID NO: 14578 - protein, 717 aa, Zea mays subsp. mays
  misc_feature (1)..(717): Ceres Seq. ID no. 11049110
PHMAPPPLPLFSPSLKAPPPPPWLHGSSTQSRDSAPPVPPLPAEATPSKFRIDSPKPAPARKNTKTAAKPLTAGVPGGRTHRAVLGIIRRVRSLELSDAPSPNSVHTSNSGAAAAAFHLTIELSPPREPGQYVVEKEKSRAVPWAAARDEGLKVALRREKKPREPTRAETELETHELRRLRRLARGIGRWARAKKAGVTDEVVKEVRREWASGEELAAVRIVEPLRRSMDRAREILEIKTGGLVVWTKGDMHFVYRGSKYQQNAKHSHTFLTNVHKDDAFQENDQSICGQKDEEPVKGTLYEREVNRLLDTLGPRFVDWWWDTPLPVDADLLPEFVPGSKTPYRLCPPGVRPTLADEELTYLRKLARLLPTHFALGRNTRLQGLAAAILKLWEKSLIAKIAVKIGIQNTNNEQMAWNLKHLTGGTVILRNKDFIILYRGKDFLPGGVAQTVIQREAQVHDEQVKEEEARLKAVDSLQMVGELSEESSLGTFREYQGFHAKFVHENTENSNTMIELEAEKYRLEKELKDHEWKLSVLNKKIERSNQALAKLHSSWSPSEQSADREHLTEEEKIMFRRIGRKMDGLVLLGRRGIFDGVIEEIHQHWKHKEVVKVITKQNQTRQIMYAASLLEVETGGILIAVEKLTTSHAIILYRGKNYRRPAKSSFSNLLTKREALRRSIEVQRRGSMKYFVRERQKSILELKRKLRYVTRQIRYRTP

SEQ ID NO: 14579 - protein, 715 aa, Zea mays subsp. mays
  misc_feature (1)..(715): Ceres Seq. ID no. 11049111
MAPPPLPLFSPSLKAPPPPPWLHGSSTQSRDSAPPVPPLPAEATPSKFRIDSPKPAPARKNTKTAAKPLTAGVPGGRTHRAVLGIIRRVRSLELSDAPSPNSVHTSNSGAAAAAFHLTIELSPPREPGQYVVEKEKSRAVPWAAARDEGLKVALRREKKPREPTRAETELETHELRRLRRLARGIGRWARAKKAGVTDEVVKEVRREWASGEELAAVRIVEPLRRSMDRAREILEIKTGGLVVWTKGDMHFVYRGSKYQQNAKHSHTFLTNVHKDDAFQENDQSICGQKDEEPVKGTLYEREVNRLLDTLGPRFVDWWWDTPLPVDADLLPEFVPGSKTPYRLCPPGVRPTLADEELTYLRKLARLLPTHFALGRNTRLQGLAAAILKLWEKSLIAKIAVKIGIQNTNNEQMAWNLKHLTGGTVILRNKDFIILYRGKDFLPGGVAQTVIQREAQVHDEQVKEEEARLKAVDSLQMVGELSEESSLGTFREYQGFHAKFVHENTENSNTMIELEAEKYRLEKELKDHEWKLSVLNKKIERSNQALAKLHSSWSPSEQSADREHLTEEEKIMFRRIGRKMDGLVLLGRRGIFDGVIEEIHQHWKHKEVVKVITKQNQTRQIMYAASLLEVETGGILIAVEKLTTSHAIILYRGKNYRRPAKSSFSNLLTKREALRRSIEVQRRGSMKYFVRERQKSILELKRKLRYVTRQIRYRTP

SEQ ID NO: 14580 - protein, 489 aa, Zea mays subsp. mays
  misc_feature (1)..(489): Ceres Seq. ID no. 11049112
MDRAREILEIKTGGLVVWTKGDMHFVYRGSKYQQNAKHSHTFLTNVHKDDAFQENDQSICGQKDEEPVKGTLYEREVNRLLDTLGPRFVDWWWDTPLPVDADLLPEFVPGSKTPYRLCPPGVRPTLADEELTYLRKLARLLPTHFALGRNTRLQGLAAAILKLWEKSLIAKIAVKIGIQNTNNEQMAWNLKHLTGGTVILRNKDFIILYRGKDFLPGGVAQTVIQREAQVHDEQVKEEEARLKAVDSLQMVGELSEESSLGTFREYQGFHAKFVHENTENSNTMIELEAEKYRLEKELKDHEWKLSVLNKKIERSNQALAKLHSSWSPSEQSADREHLTEEEKIMFRRIGRKMDGLVLLGRRGIFDGVIEEIHQHWKHKEVVKVITKQNQTRQIMYAASLLEVETGGILIAVEKLTTSHAIILYRGKNYRRPAKSSFSNLLTKREALRRSIEVQRRGSMKYFVRERQKSILELKRKLRYVTRQIRYRTP

SEQ ID NO: 14581 - DNA, 902 bp, Zea mays subsp. mays
  misc_feature (1)..(902): Ceres Seq. ID no. 11049113
attcggtgcaggaaggacccgtcctgctccgggcggacggagacggtgatcatcaccgacatgaactactacccggtgtccaagtaccacttcgacctcagcggcacggcgttcggcaggctggccaagtccggcctcaacgacaagctccgccactcgggcatcatcgacatcgagttcaccagggtgccgtgcgagttccctggcctcaagatcgggttccacgtggaggagtactcgagccccgtctacttcgcggtgctggtggagtacgaggacggcgacggcgacgtggtgcaggtggacctgatggagtccaagacggcgcgcgggccgccgacggggcgctgggcgccgatgcgcgagtcctggggctccgtctggcgcatggacaccaaccaccgcatgcagccgcccttctccatccgcatccgcaacgagtccggcaagacgctcgtcgccaggaacgtcatcccggccaactggaggcccaacaccttctaccgctccttcgtccagtacagctagctagctagctggtttgcgcccctagttcaccacccaccactactaccaccgccacccactagactactgcttctgctaccaaatactacggcggaacggaacggctggttgccgccgccgccgtcgtccttggaaaggttgaggcgtctcttggtcatccgtatcgttaccgttgtcatggtcctttgagtcgttgcaaccctgattgcaagccggcaagggggaaaaaaccaacaaagccgtgtgggaaaatggaggaggcaggcgtacaatgtacgctctcccgcccactgttgctttataatctctatatcatcatcatcttcttcttctccattccgatcggtgattaatcgaaaagtatattgtaatgt

SEQ ID NO: 14582 - protein, 177 aa, Zea mays subsp. mays
  misc_feature (1)..(177): Ceres Seq. ID no. 11049114
SVQEGPVLLRADGDGDHHRHELLPGVQVPLRPQRHGVRQAGQVRPQRQAPPLGHHRHRVHQGAVRVPWPQDRVPRGGVLEPRLLRGAGGVRGRRRRRGAGGPDGVQDGARAADGALGADARVLGLRLAHGHQPPHAAALLHPHPQRVRQDARRQERHPGQLEAQHLLPLLRPVQLAS

SEQ ID NO: 14583 - protein, 175 aa, Zea mays subsp. mays
  misc_feature (1)..(175): Ceres Seq. ID no. 11049115
IRCRKDPSCSGRTETVIITDMNYYPVSKYHFDLSGTAFGRLAKSGLNDKLRHSGIIDIEFTRVPCEFPGLKIGFHVEEYSSPVYFAVLVEYEDGDGDVVQVDLMESKTARGPPTGRWAPMRESWGSVWRMDTNHRMQPPFSIRIRNESGKTLVARNVIPANWRPNTFYRSFVQYS

SEQ ID NO: 14584 - protein, 155 aa, Zea mays subsp. mays
  misc_feature (1)..(155): Ceres Seq. ID no. 11049116
MNYYPVSKYHFDLSGTAFGRLAKSGLNDKLRHSGIIDIEFTRVPCEFPGLKIGFHVEEYSSPVYFAVLVEYEDGDGDVVQVDLMESKTARGPPTGRWAPMRESWGSVWRMDTNHRMQPPFSIRIRNESGKTLVARNVIPANWRPNTFYRSFVQYS

SEQ ID NO: 14585 - DNA, 1012 bp, Zea mays subsp. mays
  misc_feature (1)..(1012): Ceres Seq. ID no. 11049117
catcacacatgaagaaactgatccttcttctttcttctttcttcttcttctctgcgcgtgcacggacgacaggcggcgcctgcgggtacggcaacctgtacagcacggggtacggcacgagcacggcggcgctgagcacggcgctgttcaacgacggcgcggcgtgcgggtcctgctacgagctgcggtgcgacaacgacgggcggtggtgcctgccgggcaccatcaccgtcacggccaccaacttctgcccgcccaactacggcctccccagcgacgacggcggctggtgcaacccgccgcgcccgcacttcgacatggccgagccggccttcctccgcatcgcgcagtaccgcgccggcatcgtgcccgtcgcgttcaggagagtgccgtgcgtgaagaagggcggcatccggttcaccatcaacgggcactcctacttcaacctggtgctggtgaccaacgtggcgggcgccggcgacgtgcgctccgtctccatccggggctcccgcacggggtggcagcccatgtcccggaactggggccagaactggcagagcaactcgtacctggacaggcaggcgctctcgttccaggtcaccgccagcgacggccgcaccgtcaccagcaacggcgccgtccccgctggctggcagttcggccagaccttcgagggcggccagttctgaggatgaacagctagcgcgcgcgcggctagctattggataattagttacggtactgtcgatttgtttgttttttttttttttttttttgcgcgtgatgatcgagtgcatgcaagagaaagagacgacgaggagaacgacgaagacgaagacgaagcctctctccgggtatattgaaggaaggagaaggctttgcgcgcgctatgctgaggctgctaatctagcacccgcctagacgtttcccttttctcttctctggtggattacggactggatcggaccaaagatcgatccagctcctagtactaataatatagttgtacttg

SEQ ID NO: 14586 - protein, 233 aa, Zea mays subsp. mays
  misc_feature (1)..(233): Ceres Seq. ID no. 11049118
ITHEETDPSSFFFLLLLCACTDDRRRLRVRQPVQHGVRHEHGGAEHGAVQRRRGVRVLLRAAVRQRRAVVPAGHHHRHGHQLLPAQLRPPQRRRRLVQPAAPALRHGRAGLPPHRAVPRRHRARRVQESAVREEGRHPVHHQRALLLQPGAGDQRGGRRRRALRLHPGLPHGVAAHVPELGPELAEQLVPGQAGALVPGHRQRRPHRHQQRRRPRWLAVRPDLRGRPVLRMNS

SEQ ID NO: 14587 - protein, 228 aa, Zea mays subsp. mays
  misc_feature (1)..(228): Ceres Seq. ID no. 11049119
SHMKKLILLLSSFFFFSARARTTGGACGYGNLYSTGYGTSTAALSTALFNDGAACGSCYELRCDNDGRWCLPGTITVTATNFCPPNYGLPSDDGGWCNPPRPHFDMAEPAFLRIAQYRAGIVPVAFRRVPCVKKGGIRFTINGHSYFNLVLVTNVAGAGDVRSVSIRGSRTGWQPMSRNWGQNWQSNSYLDRQALSFQVTASDGRTVTSNGAVPAGWQFGQTFEGGQF

SEQ ID NO: 14588 - protein, 226 aa, Zea mays subsp. mays
  misc_feature (1)..(226): Ceres Seq. ID no. 11049120
MKKLILLLSSFFFFSARARTTGGACGYGNLYSTGYGTSTAALSTALFNDGAACGSCYELRCDNDGRWCLPGTITVTATNFCPPNYGLPSDDGGWCNPPRPHFDMAEPAFLRIAQYRAGIVPVAFRRVPCVKKGGIRFTINGHSYFNLVLVTNVAGAGDVRSVSIRGSRTGWQPMSRNWGQNWQSNSYLDRQALSFQVTASDGRTVTSNGAVPAGWQFGQTFEGGQF

SEQ ID NO: 14589 - DNA, 1020 bp, Zea mays subsp. mays
  misc_feature (1)..(1020): Ceres Seq. ID no. 11049121
gtgtgtggtggttcgtcgatctcctgctaggtgctaagcttagctcgctcgctggcaacaacaatgaaagccgcaactggctcatcatcagtctctcgcgctcttgcgttgctcttggcggcgtgccttctctggaaggaagccgcgtgcttctcggcgtccgggctaaacaaggcgttcgccaccttctatggcggtagcgacgcttcaggaacgatgggtggggcttgtgggtacggcaacctgtactcgacggggtacggcacggacacggcggcgctgagcacggcgctcttcaacgacggcgcctcgtgcgggcagtgctaccggatctcctgcgactaccaggcggacccgcggttctgcatccgcggcacgtcggtgaccatcaccgccaccaacctgtgccctcccaactacgcgctgcccaacgacgacggcggctggtgcaacccgccgcggcagcacttcgacatggccgagccggcctggctcaagatcggcatctaccgcggcggcatcgtgcccgtcaactaccaaagggtgccgtgtgtgaagaaaggcggggtgaggttcagcatcaacgggcgcgactacttcgagctggtgctcatctccaatgtcggcggctgcgggtccatccagtcggcgtccatcaaggggtcgcgcaccgggtggatggccatgtcccggaactggggcgtcaactggcagtccaacgcgtacctcaatggccagagcctgtcgttccaggtcaccagcagcgacggccagaccaaaaccttccccgacgtcgcgcccgccagctgggggttcggtcagacgtttgcgacctcgcagcagttctcttagtatagacacatctttgttttctgcctcgttcgcttgtcgtttatatatatgcctcactcggctcggccctcgatcaatgccttgtaaagtttaccggcctttgttcaaatgccccaccacctgccgcgatgcaggagatatatgatatatatgctttgacttgtgctt

SEQ ID NO: 14590 - protein, 262 aa, Zea mays subsp. mays
  misc_feature (1)..(262): Ceres Seq. ID no. 11049122
MKAATGSSSVSRALALLLAACLLWKEAACFSASGLNKAFATFYGGSDASGTMGGACGYGNLYSTGYGTDTAALSTALFNDGASCGQCYRISCDYQADPRFCIRGTSVTITATNLCPPNYALPNDDGGWCNPPRQHFDMAEPAWLKIGIYRGGIVPVNYQRVPCVKKGGVRFSINGRDYFELVLISNVGGCGSIQSASIKGSRTGWMAMSRNWGVNWQSNAYLNGQSLSFQVTSSDGQTKTFPDVAPASWGFGQTFATSQQFS

SEQ ID NO: 14591 - protein, 211 aa, Zea mays subsp. mays
  misc_feature (1)..(211): Ceres Seq. ID no. 11049123
MGGACGYGNLYSTGYGTDTAALSTALFNDGASCGQCYRISCDYQADPRFCIRGTSVTITATNLCPPNYALPNDDGGWCNPPRQHFDMAEPAWLKIGIYRGGIVPVNYQRVPCVKKGGVRFSINGRDYFELVLISNVGGCGSIQSASIKGSRTGWMAMSRNWGVNWQSNAYLNGQSLSFQVTSSDGQTKTFPDVAPASWGFGQTFATSQQFS

SEQ ID NO: 14592 - DNA, 2487 bp, Zea mays subsp. mays
  misc_feature (1)..(2487): Ceres Seq. ID no. 11049132
aggaattcggcacgaggcccactcctccggctcttcttctccaccggcaccagtccaccacctcccacctcctgccaccgcgcggccccaaccaaccacaccgcagcgcagcaatggcgggcaacggcgccatcgtggagagcgacccgctgaactggggcgcggcggcggcggagctggccgggagccacctggacgaggtgaagcgcatggtggcgcaggcccggcagcccgtggtcaagatcgagggctccaccctccgcgtcggccaggtggccgccgtcgcctccgccaaggacgcgtccggcgtcgccgtcgagctcgacgaggaggcccgcccccgcgtcaaggccagcagcgagtggatcctcgactgcatcgcccacggcggcgacatctacggcgtcaccaccggcttcggcggcacctcccaccgccgcaccaaggacgggcccgcgctccaggtcgagctgctcaggcatctcaacgccggaatcttcggcaccggcagcgacgggcacacgctgccgtcggaggtcacccgcgcggcgatgctggtgcgcatcaacaccctcctccagggctactccggcatccgcttcgagatcctcgaggccatcacgaagctgctcaacaccggtgtcagcccctgcctgccgctccggggcaccatcaccgcgtcgggcgacctggtcccgctctcctacatcgccggcctcatcacgggccgccccaacgcgcaggccgtcaccgtcgacggaaggaaggtggacgccgccgaggcgttcaagatcgccggcatcgagggcggcttcttcaagctcaaccccaaggagggcctcgccatcgtcaacggcacgtccgtgggctccgcgctcgcggccaccgtgatgtacgacgccaacgtcctggccgtcctgtcggaggtcctgtccgccgtcttctgcgaggtcatgaacggcaagcccgagtacacggaccacctgacccacaagctgaagcaccacccggggtccatcgaggccgcggccatcatggagcacatcctggatggcagctccttcatgaagcaggccaagaaggtgaacgagctggacccgctgctgaagcccaagcaggacaggtacgcgctccgcacgtcgccgcagtggctgggcccccagatcgaggtcatccgcgccgccaccaagtccatcgagcgcgaggtcaactccgtgaacgacaacccggtcatcgacgtccaccgcggcaaggcgctgcacggcggcaacttccagggcacccccatcggcgtgtccatggacaacgcccgcctcgccatcgccaacatcggcaagctcatgttcgcgcagttctccgagctcgtcaacgagttctacaacaacgggctcacctccaacctggccggcagccgcaaccccagcctggactacggcttcaagggcaccgagatcgccatggcctcctactgctccgagctccagtacctgggcaaccccatcaccaaccacgtgcagagcgcggacgagcacaaccaggacgtgaactccctgggcctcgtctcggccaggaagaccgccgaggcgatcgacatcctgaagctcatgtcgtccacctacatcgtggcgctgtgccaggccgtggacctgcgccacctcgaggagaacatcaaggcgtcggtgaagaacaccgtgacccaggtggccaagaaggtgctgaccatgaacccctcgggcgagctctccagcgcccgcttcagcgagaaggagctgatcagcgccatcgaccgcgaggccgtgttcacgtacgcggaggacgcggccagcgccagcctgccgctgatgcagaagctgcgcgccgtgctggtggaccacgccctcagcagcggcgagcgcggagcgggagccctccgtgttctccaagatcaccaggttcgaggaggagctccgcgcggtgctgccccaggaggtggaggccgcccgcgtggcgtcgccgagggcaccgcccccgtggcgaaccggatcgcggacagccggtcgttcccgctgtaccgcttcgtgcgcgaggagctcggctgcgtgttcctgaccggcgagaggctcaagtcccccggcgaggagtgcaacaaggtgttcgtcggcatcagccagggcaagctcgtggaccccatgctcgagtgcctcaaggagtgggacggcaagccgctgcccatcaacatcaagtaaaagaacgccaaggagaagaggagggaggggaggaaatacgtgaaaaaaaataaaacctgtacacgtgtctgtccagatcgtgccgtcgatcgctcttcgttgttgatttttggttgtattgatcgatccgtatgtgtgcgtgcgtgtgtggcgttgctctttcttcttttgtgtagctgtgccctgccaccggccgacgtgcgtgcatgccatggtggcgggcagcgttttctaaggtcatatactgttgttgtgtttaagt

SEQ ID NO: 14593 - protein, 758 aa, Zea mays subsp. mays
  misc_feature (1)..(758): Ceres Seq. ID no. 11049133
GIRHEAHSSGSSSPPAPVHHLPPPATARPQPTTPQRSNGGQRRHRGERPAELGRGGGGAGREPPGRGEAHGGAGPAARGQDRGLHPPRRPGGRRRLRQGRVRRRRRARRGGPPPRQGQQRVDPRLHRPRRRHLRRHHRLRRHLPPPHQGRARAPGRAAQASQRRNLRHRQRRAHAAVGGHPRGDAGAHQHPPPGLLRHPLRDPRGHHEAAQHRCQPLPAAPGHHHRVGRPGPALLHRRPHHGPPQRAGRHRRRKEGGRRRGVQDRRHRGRLLQAQPQGGPRHRQRHVRGLRARGHRDVRRQRPGRPVGGPVRRLLRGHERQARVHGPPDPQAEAPPGVHRGRGHHGAHPGWQLLHEAGQEGERAGPAAEAQAGQVRAPHVAAVAGPPDRGHPRRHQVHRARGQLRERQPGHRRPPRQGAARRQLPGHPHRRVHGQRPPRHRQHRQAHVRAVLRARQRVLQQRAHLQPGRQPQPQPGLRLQGHRDRHGLLLLRAPVPGQPHHQPRAERGRAQPGRELPGPRLGQEDRRGDRHPEAHVVHLHRGAVPGRGPAPPRGEHQGVGEEHRDPGGQEGADHEPLGRALQRPLQREGADQRHRPRGRVHVRGGRGQRQPAADAEAARRAGGPRPQQRRARSGSPPCSPRSPGSRRSSARCCPRRWRPPAWRRRGHRPRGEPDRGQPVVPAVPLRARGARLRVPDRREAQVPRRGVQQGVRRHQPGQARGPHARVPQGVGRQAAAHQHQVKERQGEEEGGEEIREKK

SEQ ID NO: 14594 - protein, 740 aa, Zea mays subsp. mays
  misc_feature (1)..(740): Ceres Seq. ID no. 11049134
EFGTRPTPPALLLHRHQSTTSHLLPPRGPNQPHRSAAMAGNGAIVESDPLNWGAAAAELAGSHLDEVKRMVAQARQPVVKIEGSTLRVGQVAAVASAKDASGVAVELDEEARPRVKASSEWILDCIAHGGDIYGVTTGFGGTSHRRTKDGPALQVELLRHLNAGIFGTGSDGHTLPSEVTRAAMLVRINTLLQGYSGIRFEILEAITKLLNTGVSPCLPLRGTITASGDLVPLSYIAGLITGRPNAQAVTVDGRKVDAAEAFKIAGIEGGFFKLNPKEGLAIVNGTSVGSALAATVMYDANVLAVLSEVLSAVFCEVMNGKPEYTDHLTHKLKHHPGSIEAAAIMEHILDGSSFMKQAKKVNELDPLLKPKQDRYALRTSPQWLGPQIEVIRAATKSIEREVNSVNDNPVIDVHRGKALHGGNFQGTPIGVSMDNARLAIANIGKLMFAQFSELVNEFYNNGLTSNLAGSRNPSLDYGFKGTEIAMASYCSELQYLGNPITNHVQSADEHNQDVNSLGLVSARKTAEAIDILKLMSSTYIVALCQAVDLRHLEENIKASVKNTVTQVAKKVLTMNPSGELSSARFSEKELISAIDREAVFTYAEDAASASLPLMQKLRAVLVDHALSSGERGAGALRVLQDHQVRGGAPRGAAPGGGGRPRGVAEGTAPVANRIADSRSFPLYRFVREELGCVFLTGERLKSPGEECNKVFVGISQGKLVDPMLECLKEWDGKPLPINIK

SEQ ID NO: 14595 - protein, 703 aa, Zea mays subsp. mays
  misc_feature (1)..(703): Ceres Seq. ID no. 11049135
MAGNGAIVESDPLNWGAAAAELAGSHLDEVKRMVAQARQPVVKIEGSTLRVGQVAAVASAKDASGVAVELDEEARPRVKASSEWILDCIAHGGDIYGVTTGFGGTSHRRTKDGPALQVELLRHLNAGIFGTGSDGHTLPSEVTRAAMLVRINTLLQGYSGIRFEILEAITKLLNTGVSPCLPLRGTITASGDLVPLSYIAGLITGRPNAQAVTVDGRKVDAAEAFKIAGIEGGFFKLNPKEGLAIVNGTSVGSALAATVMYDANVLAVLSEVLSAVFCEVMNGKPEYTDHLTHKLKHHPGSIEAAAIMEHILDGSSFMKQAKKVNELDPLLKPKQDRYALRTSPQWLGPQIEVIRAATKSIEREVNSVNDNPVIDVHRGKALHGGNFQGTPIGVSMDNARLAIANIGKLMFAQFSELVNEFYNNGLTSNLAGSRNPSLDYGFKGTEIAMASYCSELQYLGNPITNHVQSADEHNQDVNSLGLVSARKTAEAIDILKLMSSTYIVALCQAVDLRHLEENIKASVKNTVTQVAKKVLTMNPSGELSSARFSEKELISAIDREAVFTYAEDAASASLPLMQKLRAVLVDHALSSGERGAGALRVLQDHQVRGGAPRGAAPGGGGRPRGVAEGTAPVANRIADSRSFPLYRFVREELGCVFLTGERLKSPGEECNKVFVGISQGKLVDPMLECLKEWDGKPLPINIK

SEQ ID NO: 14596 - DNA, 1333 bp, Zea mays subsp. mays
  misc_feature (1)..(1333): Ceres Seq. ID no. 11049140
gtgggacaggcatcatttggcgtcgggccggtacggtattggcggcgggccagctgacgagaaggaacggccgcagcccatcctgattcctgtcctcccagcaccggtgtctcatcaggaacaggaagcgaacaccggcggttgtcccgttccaattccaaccaacctacctaggctccgcgcgcacctaccccgtctctgctccggggagcgtcaccagtcagtcacggcggctctaaaatctcagataccaccagaccagaccagatccgtcccgcgaatctaaagtcaaaccaaccgcgatccgcgaatcagcgggagaggaggggaggggaggggcgcgggggcatggagttcctgcagggccagaggctggagaccacgctggccgtcgcggccgctgtcgttgccgtcgcagccggctccgcctacctcttcctccgcagtaggaagcccaggggatgcctagaccccgagaacttcaaggagttcaaacttgttgagaagaagcagctgagtcataatgttgccaagttcaagtttgcgctcccaacacctacttctgtattgggtcttccaatcggacagcatataagctgcagaggacaggatgcttctggcgaggaagtgatcaagccttatactccaactactctggactctgatattggatcttttgagcttgttataaagatgtatccccaaggaagaatgtctcatcatttccgtgagacgaaagttggtgattatatgtctgtgaagggacctaagggccgtttcaagtacctacctggacaagtgagagcatttggaatggtagctggaggatcaggcattactccaatgttccaagtgacaagggcaatccttgagaacccaaaggacaacacgaaagtacacttaatctatgcaaatgtcacgtatgaggatattcttctgaaggaagaacttgacggcatggccaaaaactatcctgatcgtttcaagatctactatgtcttgaatcagcctcctgaagtctgggacggtggcgtcgggttcgtgtcgaaggaaatgatccagactcattgcccagcgcctgccgccgacattcaggtattgcgatgtggacctcctcccatgaacaaagccatggccgcgcacctggacggccttggctacacgaaggagatgcagtttcagttctaagcgttgcattctctctaccagtaccagaataaacggcggtggaacaaagttctaagctccaaacagacgctcttttgtacccaccaaatttgtatcggtgtcgggacattgtaccatgccgttattttgtatcggtttgtcactc

SEQ ID NO: 14597 - protein, 279 aa, Zea mays subsp. mays
  misc_feature (1)..(279): Ceres Seq. ID no. 11049141
MEFLQGQRLETTLAVAAAVVAVAAGSAYLFLRSRKPRGCLDPENFKEFKLVEKKQLSHNVAKFKFALPTPTSVLGLPIGQHISCRGQDASGEEVIKPYTPTTLDSDIGSFELVIKMYPQGRMSHHFRETKVGDYMSVKGPKGRFKYLPGQVRAFGMVAGGSGITPMFQVTRAILENPKDNTKVHLIYANVTYEDILLKEELDGMAKNYPDRFKIYYVLNQPPEVWDGGVGFVSKEMIQTHCPAPAADIQVLRCGPPPMNKAMAAHLDGLGYTKEMQFQF

SEQ ID NO: 14598 - protein, 164 aa, Zea mays subsp. mays
  misc_feature (1)..(164): Ceres Seq. ID no. 11049142
MYPQGRMSHHFRETKVGDYMSVKGPKGRFKYLPGQVRAFGMVAGGSGITPMFQVTRAILENPKDNTKVHLIYANVTYEDILLKEELDGMAKNYPDRFKIYYVLNQPPEVWDGGVGFVSKEMIQTHCPAPAADIQVLRCGPPPMNKAMAAHLDGLGYTKEMQFQF

SEQ ID NO: 14599 - protein, 158 aa, Zea mays subsp. mays
  misc_feature (1)..(158): Ceres Seq. ID no. 11049143
MSHHFRETKVGDYMSVKGPKGRFKYLPGQVRAFGMVAGGSGITPMFQVTRAILENPKDNTKVHLIYANVTYEDILLKEELDGMAKNYPDRFKIYYVLNQPPEVWDGGVGFVSKEMIQTHCPAPAADIQVLRCGPPPMNKAMAAHLDGLGYTKEMQFQF

SEQ ID NO: 14600 - DNA, 1173 bp, Zea mays subsp. mays
  misc_feature (1)..(1173): Ceres Seq. ID no. 11049182
atggtgacctcaagcaagggcaaggtatgcgtaaccggggcctcaggctttgttgcctcttggcttatcaaacggctcctcgagtctggatatcatgtggtagggactgtcagggacccaggaaatcaccaaaaaacagcccacctttggaaattacctggcgctaaagagaggctgcaaatcgtgcgagctaatctgttggaagaagggagcttcgacagcgccgtgatggcctgtgagggtgtattccacactgcatcccccgtcctcgctaaacccgactctactagcaaggaggacacgctcgtccctgcggtgaacggtactctgaacgtgctgagatcgtgcaagaagaaccccttcctgaaaagggtcgtccttacgtcttcgtcgtctgcggtgaggatcagggacgacggtggccagtccagtaacatctcgctggacgaaacgacatggagctccgtgccactctgcgagaagatgcatctatggtatgccctagccaaggtatttgcagagaaagcggcgtgggagttcgccaaggagaacggcatcgaccttgtgactgtcctcccgtcgttcgtgatcgggcccagtttgtcccacgagctatgcgttaccgcttcagacgtcctaggcctattccaaggcgacacggcaaggttcagctcgtacggaagaatggggtacgtccacatcgacgacgttgcgagcagccacatcctggtgtacgaggtcccccaggccgccgggaggtacctgtgcagctcagtggtgctggacaacgacgagctggtctcctcgctcgcgaaacgctacccgatattccccataccccggaggctgaacagcccctacggcaagcagtcgtaccagctgaacacgtcgaagctgcaggggctgggcttcaagttcagaggggtgcaggagatgttcgacgactgcgtgcagtcgctcaaagaccagggccacctgctggagtgccccctgtgaactgcgatgggggtgcctcctgtgaacgcccgtttttttttttcttcaataattccacgtcatgtcacggtgtcctcgcgcagactgctactgtcaggtgtcagggcgtcatagctcacgggctctacggctacatgaataaaatgtcacgctagctcgtcatttgctttgccattt

SEQ ID NO: 14601 - protein, 331 aa, Zea mays subsp. mays
  misc_feature (1)..(331): Ceres Seq. ID no. 11049183
MVTSSKGKVCVTGASGFVASWLIKRLLESGYHVVGTVRDPGNHQKTAHLWKLPGAKERLQIVRANLLEEGSFDSAVMACEGVFHTASPVLAKPDSTSKEDTLVPAVNGTLNVLRSCKKNPFLKRVVLTSSSSAVRIRDDGGQSSNISLDETTWSSVPLCEKMHLWYALAKVFAEKAAWEFAKENGIDLVTVLPSFVIGPSLSHELCVTASDVLGLFQGDTARFSSYGRMGYVHIDDVASSHILVYEVPQAAGRYLCSSVVLDNDELVSSLAKRYPIFPIPRRLNSPYGKQSYQLNTSKLQGLGFKFRGVQEMFDDCVQSLKDQGHLLECPL

SEQ ID NO: 14602 - protein, 255 aa, Zea mays subsp. mays
  misc_feature (1)..(255): Ceres Seq. ID no. 11049184
MACEGVFHTASPVLAKPDSTSKEDTLVPAVNGTLNVLRSCKKNPFLKRVVLTSSSSAVRIRDDGGQSSNISLDETTWSSVPLCEKMHLWYALAKVFAEKAAWEFAKENGIDLVTVLPSFVIGPSLSHELCVTASDVLGLFQGDTARFSSYGRMGYVHIDDVASSHILVYEVPQAAGRYLCSSVVLDNDELVSSLAKRYPIFPIPRRLNSPYGKQSYQLNTSKLQGLGFKFRGVQEMFDDCVQSLKDQGHLLECPL

SEQ ID NO: 14603 - protein, 231 aa, Zea mays subsp. mays
  misc_feature (1)..(231): Ceres Seq. ID no. 11049185
MELRATLREDASMVCPSQGICRESGVGVRQGERHRPCDCPPVVRDRAQFVPRAMRYRFRRPRPIPRRHGKVQLVRKNGVRPHRRRCEQPHPGVRGPPGRREVPVQLSGAGQRRAGLLARETLPDIPHTPEAEQPLRQAVVPAEHVEAAGAGLQVQRGAGDVRRLRAVAQRPGPPAGVPPVNCDGGASCERPFFFFFNNSTSCHGVLAQTATVRCQGVIAHGLYGYMNKMSR

SEQ ID NO: 14604 - DNA, 883 bp, Zea mays subsp. mays
  misc_feature (1)..(883): Ceres Seq. ID no. 11049225
gacaccacaggcataacagaacagaaccatcgatcgagcttggttgctcggcagcagctagcaatggccgccaatggaggtgatgagctgaagctgctgggcgtgtgggacagcccgtacgtcaacagggtccagatcgtgctcaacctcaagggcctcagctacgagtacgtggaggaggacctcctcagcaagagcgagctcctcctcaattccaacccggtgcacaagaaagtgcccgtgctcatccacgccggcaagccggtcgccgagtcgcaggccatcgttcagtacctcgacgaggctttccccagcggcacgttcccgtcggtcctcccagccgaaccctacgcacgcgccaccgcccgcttctgggccgccttcgtcgacgacaaggtcgggtctccatggcacacggtcctgttcgcgcgggagcacgggaagaaggcggacgcggcgtcgcggatcgtcgcggcgctggagacgctggagggtgcgttcgaggactgctccggcgggagggactacttcggcggcgacgccatcggcttcgtggacgtggtcctcggcagctacctgggctggttcaaggtgttcgagaagatggtcggcgtcagggtcctggacgtggcgaggacgccgctcctcgccgcgtggggggagcgtttcgcggcggcggaagcggccaaggacgtcctgccggatgacgttgacaaggtgctcgagttccttcagaagttcctggattagatgcgcgccaccatgtgctccggtgtccaactcccaatgtttgtttgctttggtcattttcggtgcgctgttaatgggcctcggatgtttgccagttgattaacttgattttatagaatcttaataatattct

SEQ ID NO: 14605 - protein, 249 aa, Zea mays subsp. mays
  misc_feature (1)..(249): Ceres Seq. ID no. 11049226
DTTGITEQNHRSSLVARQQLAMAANGGDELKLLGVWDSPYVNRVQIVLNLKGLSYEYVEEDLLSKSELLLNSNPVHKKVPVLIHAGKPVAESQAIVQYLDEAFPSGTFPSVLPAEPYARATARFWAAFVDDKVGSPWHTVLFAREHGKKADAASRIVAALETLEGAFEDCSGGRDYFGGDAIGFVDVVLGSYLGWFKVFEKMVGVRVLDVARTPLLAAWGERFAAAEAAKDVLPDDVDKVLEFLQKFLD

SEQ ID NO: 14606 - protein, 228 aa, Zea mays subsp. mays
  misc_feature (1)..(228): Ceres Seq. ID no. 11049227
MAANGGDELKLLGVWDSPYVNRVQIVLNLKGLSYEYVEEDLLSKSELLLNSNPVHKKVPVLIHAGKPVAESQAIVQYLDEAFPSGTFPSVLPAEPYARATARFWAAFVDDKVGSPWHTVLFAREHGKKADAASRIVAALETLEGAFEDCSGGRDYFGGDAIGFVDVVLGSYLGWFKVFEKMVGVRVLDVARTPLLAAWGERFAAAEAAKDVLPDDVDKVLEFLQKFLD

SEQ ID NO: 14607 - DNA, 946 bp, Zea mays subsp. mays
  misc_feature (1)..(946): Ceres Seq. ID no. 11049234
gggctagctagtcttgcagactcggagatacgactagcttgttataacaagccaagcagagcggtggggaaaacaatggcgggcaatgagggtcttaaggtccttggcctgcaggtgagcccgttcgtgctccgcgtgtgcatggcgttgaacacaaaaggagtgagctacgagtacgttgaggaggacctatccaacaagagtgagctcctgcttaagtccaacccggtgcacaagaaggtacccgtgctcatccacaacggtaagcccatctgtgagtcactcgtcatcatgcagtacgtcgacgagctgttcgccggccggtcgatcctaccaaccgacccctacgagcgcgccactgctcgcttctgggctgcctacgccgacgacaagttgttgccagcgtggtacggcatggtgaaggcccagtcggcggaggagagagcggagaaggtggaggagacgctttccgcgatccagcacatggaagtggccttcgccaagtgctccggcggcaacgccgccttcttcggcggcgactccattggctacgtcgacatcgtgctcggctccttcttgttctggttcgaggcggtgcgcagggtttacgacttggagatcattaacgctagcaatactccgctcttggctgcgtgggcggagcggtttgtagggactgtagaagcaaaggaggtggtgccggtgcccgacgtggacatggccgtacagtgcatcaataagcttcatgcccctgccgccgccataagttcacaatgagtcgtgtaagtgtaataaccaggaaaaggtaaatggtgcggtgctatggtccaaattccaaccgaataatgttcaaagcttacattgataggcttgggttgttgtcatcaaataatgtggttcagtcgtctcctctgcaataaatataaatatgattgttttagtgtgt

SEQ ID NO: 14608 - protein, 258 aa, Zea mays subsp. mays
  misc_feature (1)..(258): Ceres Seq. ID no. 11049235
GLASLADSEIRLACYNKPSRAVGKTMAGNEGLKVLGLQVSPFVLRVCMALNTKGVSYEYVEEDLSNKSELLLKSNPVHKKVPVLIHNGKPICESLVIMQYVDELFAGRSILPTDPYERATARFWAAYADDKLLPAWYGMVKAQSAEERAEKVEETLSAIQHMEVAFAKCSGGNAAFFGGDSIGYVDIVLGSFLFWFEAVRRVYDLEIINASNTPLLAAWAERFVGTVEAKEVVPVPDVDMAVQCINKLHAPAAAISSQ

SEQ ID NO: 14609 - protein, 233 aa, Zea mays subsp. mays
  misc_feature (1)..(233): Ceres Seq. ID no. 11049236
MAGNEGLKVLGLQVSPFVLRVCMALNTKGVSYEYVEEDLSNKSELLLKSNPVHKKVPVLIHNGKPICESLVIMQYVDELFAGRSILPTDPYERATARFWAAYADDKLLPAWYGMVKAQSAEERAEKVEETLSAIQHMEVAFAKCSGGNAAFFGGDSIGYVDIVLGSFLFWFEAVRRVYDLEIINASNTPLLAAWAERFVGTVEAKEVVPVPDVDMAVQCINKLHAPAAAISSQ

SEQ ID NO: 14610 - protein, 211 aa, Zea mays subsp. mays
  misc_feature (1)..(211): Ceres Seq. ID no. 11049237
MALNTKGVSYEYVEEDLSNKSELLLKSNPVHKKVPVLIHNGKPICESLVIMQYVDELFAGRSILPTDPYERATARFWAAYADDKLLPAWYGMVKAQSAEERAEKVEETLSAIQHMEVAFAKCSGGNAAFFGGDSIGYVDIVLGSFLFWFEAVRRVYDLEIINASNTPLLAAWAERFVGTVEAKEVVPVPDVDMAVQCINKLHAPAAAISSQ

SEQ ID NO: 14611 - DNA, 923 bp, Zea mays subsp. mays
  misc_feature (1)..(923): Ceres Seq. ID no. 11049266
cagccacggcgagcaagcgatgatgagcggcggcgcggtgaaggtgatcggcgccctggacagcccgttcagccaccgcgcggaggcggcgctgcgcctcaagggagtcccctacgagcttgtcctggagaaggacctgcgcgacaaaagcgagctgctgctgcggcacaaccccgtccacaagaaggtgcccgtgctccttcacggcggccgccgcgccgtctgcgagtcgctcgtcatcgtcgagtacgttgacgaggcattccgcggcccgccactcctccccgccgacccctccgcccgcgccgccgcccgcttctgggcccgcttcatcgacgacaagtgctcgacgcccttctggctggcgatgtggacggagggcgaggcgcagagggggttcgtgaaggagatcaaggagaacctgaagctgctggaggggcaggtgaagggcaagcggttcttcggcggcggcgacgtgggctacctcgacgtcgccgccagcgtgttcgcgcactggcttccggtctgcgaggaggtcgcgggcgtcagcctggtcacggccgaggagtacccggacctgtgccggtgggcgagggagtacacctcccacgacgccgtcaagcggtgcctgcctggcagggaggagctgctcgcccgtttcagcgccaggaaggactcgtttgtggccgcggcgaggtcaatggcgccggcgccggagaagtaatctatgggaattcaactgggtgcatggatagcataaatttaagtattgtgacaagtggtcaggactgctgtcacgtaccgtcgagcccgggagatatgtactctccggctcaggcaaatgccatctgtcctgatgcatgtgttttgttcctactttgtttgactgcttgttgaataaaaaaagatatccggttgtgttc

SEQ ID NO: 14612 - protein, 240 aa, Zea mays subsp. mays
  misc_feature (1)..(240): Ceres Seq. ID no. 11049267
SHGEQAMMSGGAVKVIGALDSPFSHRAEAALRLKGVPYELVLEKDLRDKSELLLRHNPVHKKVPVLLHGGRRAVCESLVIVEYVDEAFRGPPLLPADPSARAAARFWARFIDDKCSTPFWLAMWTEGEAQRGFVKEIKENLKLLEGQVKGKRFFGGGDVGYLDVAASVFAHWLPVCEEVAGVSLVTAEEYPDLCRWAREYTSHDAVKRCLPGREELLARFSARKDSFVAAARSMAPAPEK

SEQ ID NO: 14613 - protein, 234 aa, Zea mays subsp. mays
  misc_feature (1)..(234): Ceres Seq. ID no. 11049268
MMSGGAVKVIGALDSPFSHRAEAALRLKGVPYELVLEKDLRDKSELLLRHNPVHKKVPVLLHGGRRAVCESLVIVEYVDEAFRGPPLLPADPSARAAARFWARFIDDKCSTPFWLAMWTEGEAQRGFVKEIKENLKLLEGQVKGKRFFGGGDVGYLDVAASVFAHWLPVCEEVAGVSLVTAEEYPDLCRWAREYTSHDAVKRCLPGREELLARFSARKDSFVAAARSMAPAPEK

SEQ ID NO: 14614 - protein, 233 aa, Zea mays subsp. mays
  misc_feature (1)..(233): Ceres Seq. ID no. 11049269
MSGGAVKVIGALDSPFSHRAEAALRLKGVPYELVLEKDLRDKSELLLRHNPVHKKVPVLLHGGRRAVCESLVIVEYVDEAFRGPPLLPADPSARAAARFWARFIDDKCSTPFWLAMWTEGEAQRGFVKEIKENLKLLEGQVKGKRFFGGGDVGYLDVAASVFAHWLPVCEEVAGVSLVTAEEYPDLCRWAREYTSHDAVKRCLPGREELLARFSARKDSFVAAARSMAPAPEK

SEQ ID NO: 14615 - DNA, 2149 bp, Zea mays subsp. mays
  misc_feature (1)..(2149): Ceres Seq. ID no. 11049340
aattcgcggccgccctctcttcctcgaaacgcagctatggggactcggccgcggggggtcgtcctcgcgccatgggcggtggtgctggtgctggtgctcgcgcttcgtctggcaggcgcgtcgcatgtgatccaccgcagcctggaggccgaggcggcgccgtcggtcccggcctccattgtcagccccctgctcaggacggggtaccatttccagccgccaatgaactggatcaacgaccccaacgctccgctgtactacaaaggatggtatcacctgttctaccagtacaaccccaagggcgcggtatggggcaacatcgtgtgggcgcactcggtgtcgcgcgacctgatcaactgggtggcgctggagcccgccatctaccccagcatcccgtccgacaagtacggctgctggtcgggctcggcgacgatcctggaggacggcacgccggcgatcctgtacacggggatcgaccgggcggacatcaactaccaggtgcaggtgctggcgctccccaaggacgcgtccgacccgctgctccgcgagtgggagaagccggaggagtacaacccggtggcgacgccggcggccggcggcatcaacgcgacgcagttccgcgacccgacgacggcgtggcggcacgcggggcactggcggatgctggtgggcagcgtgcgcggcgcgcgcgggatggcgctggtgtaccggagccgggacttcaggaagtggaccaaggccaagcacccgctgcactcggcggcgctgacggggatgtgggagtgccccgacttcttcccggtgtccgggccggggctgcaggccggcctcgacacctccgcgcccggaacaaagtacgtgctcaagagcagcctcgacctcacccgctacgactactacaccatcgggtcgtacgacggcggcaaggaccggtactaccccgacgaccccgccggcgactaccaccaccgccgccgctacgactacggcaactactacgcgtccaagacgttctacgaccccgtggagcgccgccgcgtgctgctcgggtgggccaacgagtccgacagcgtccccgacgacaaggccaagggctgggccggcatccatgcgatcccaaggaagatctggctggaccccaccgggaagcagctgctgcagtggcccatccacgaggtcgagaagctcagggggaaggccgtcagtgtggacgccaagctggtcaagcccggcgaccattttgaggtcacaggcatcgcaacttatcaggctgacgtggaggtgagcttcgagctggagctggaggcggggacgagcctgctggagaaggcggaggcgttcgacccggcgtacgacgacgacgcgcagaagctgtgcggagtcaagggcgcggacgccaggggcggcgtggggccattcggcctctgggtgctggcctccgccgacctgcaggagcggacggccgtcttcttcagggtgttcagggacggacacggcaagcccaaggtgctcatgtgcaccgaccccaccaagtcgtctcttagtccggatctgtacaagccgaccttcgcgggcttcgtcgacgccgacatctccagcggcaagatcacccttagaagcttgatcgatcggtccgtggtcgagagcttcggcgcgggaggcaagacgtgcatcctgtcacgggtgtacccgtccatcgccgtcgggaaggacgctcacctctacgttttcaacaacggcgaggtggacgtcacggtgtccggcctgaccgcctgggagatgaagaaaccgctgatgaacggcgcctgaaattgaagggaaaaaacaaaagtctatccggccgccacgtgactttctttattttcgttcttcttcttcttcgtcaacacacgtctctgccgccaaaggagaaattgattgatttcaacgtacgtatgtgtacgtctgctgccgatcgaaagagaattggattattataaaattgtttgaggccggtccttccattttctcgtccttaattcctctggcatgcaggatcagtgaccgacgacttgtagtttgcttgagcatgttgtttacgctgctagcttcttgttgtacgatacacatatacaacaatatgacacgatgaataaaaaaagcggccgcg

SEQ ID NO: 14616 - protein, 602 aa, Zea mays subsp. mays
  misc_feature (1)..(602): Ceres Seq. ID no. 11049341
NSRPPSLPRNAAMGTRPRGVVLAPWAVVLVLVLALRLAGASHVIHRSLEAEAAPSVPASIVSPLLRTGYHFQPPMNWINDPNAPLYYKGWYHLFYQYNPKGAVWGNIVWAHSVSRDLINWVALEPAIYPSIPSDKYGCWSGSATILEDGTPAILYTGIDRADINYQVQVLALPKDASDPLLREWEKPEEYNPVATPAAGGINATQFRDPTTAWRHAGHWRMLVGSVRGARGMALVYRSRDFRKWTKAKHPLHSAALTGMWECPDFFPVSGPGLQAGLDTSAPGTKYVLKSSLDLTRYDYYTIGSYDGGKDRYYPDDPAGDYHHRRRYDYGNYYASKTFYDPVERRRVLLGWANESDSVPDDKAKGWAGIHAIPRKIWLDPTGKQLLQWPIHEVEKLRGKAVSVDAKLVKPGDHFEVTGIATYQADVEVSFELELEAGTSLLEKAEAFDPAYDDDAQKLCGVKGADARGGVGPFGLWVLASADLQERTAVFFRVFRDGHGKPKVLMCTDPTKSSLSPDLYKPTFAGFVDADISSGKITLRSLIDRSVVESFGAGGKTCILSRVYPSIAVGKDAHLYVFNNGEVDVTVSGLTAWEMKKPLMNGA

SEQ ID NO: 14617 - protein, 590 aa, Zea mays subsp. mays
  misc_feature (1)..(590): Ceres Seq. ID no. 11049342
MGTRPRGVVLAPWAVVLVLVLALRLAGASHVIHRSLEAEAAPSVPASIVSPLLRTGYHFQPPMNWINDPNAPLYYKGWYHLFYQYNPKGAVWGNIVWAHSVSRDLINWVALEPAIYPSIPSDKYGCWSGSATILEDGTPAILYTGIDRADINYQVQVLALPKDASDPLLREWEKPEEYNPVATPAAGGINATQFRDPTTAWRHAGHWRMLVGSVRGARGMALVYRSRDFRKWTKAKHPLHSAALTGMWECPDFFPVSGPGLQAGLDTSAPGTKYVLKSSLDLTRYDYYTIGSYDGGKDRYYPDDPAGDYHHRRRYDYGNYYASKTFYDPVERRRVLLGWANESDSVPDDKAKGWAGIHAIPRKIWLDPTGKQLLQWPIHEVEKLRGKAVSVDAKLVKPGDHFEVTGIATYQADVEVSFELELEAGTSLLEKAEAFDPAYDDDAQKLCGVKGADARGGVGPFGLWVLASADLQERTAVFFRVFRDGHGKPKVLMCTDPTKSSLSPDLYKPTFAGFVDADISSGKITLRSLIDRSVVESFGAGGKTCILSRVYPSIAVGKDAHLYVFNNGEVDVTVSGLTAWEMKKPLMNGA

SEQ ID NO: 14618 - protein, 528 aa, Zea mays subsp. mays
  misc_feature (1)..(528): Ceres Seq. ID no. 11049343
MNWINDPNAPLYYKGWYHLFYQYNPKGAVWGNIVWAHSVSRDLINWVALEPAIYPSIPSDKYGCWSGSATILEDGTPAILYTGIDRADINYQVQVLALPKDASDPLLREWEKPEEYNPVATPAAGGINATQFRDPTTAWRHAGHWRMLVGSVRGARGMALVYRSRDFRKWTKAKHPLHSAALTGMWECPDFFPVSGPGLQAGLDTSAPGTKYVLKSSLDLTRYDYYTIGSYDGGKDRYYPDDPAGDYHHRRRYDYGNYYASKTFYDPVERRRVLLGWANESDSVPDDKAKGWAGIHAIPRKIWLDPTGKQLLQWPIHEVEKLRGKAVSVDAKLVKPGDHFEVTGIATYQADVEVSFELELEAGTSLLEKAEAFDPAYDDDAQKLCGVKGADARGGVGPFGLWVLASADLQERTAVFFRVFRDGHGKPKVLMCTDPTKSSLSPDLYKPTFAGFVDADISSGKITLRSLIDRSVVESFGAGGKTCILSRVYPSIAVGKDAHLYVFNNGEVDVTVSGLTAWEMKKPLMNGA

SEQ ID NO: 14619 - DNA, 1991 bp, Zea mays subsp. mays
  misc_feature (1)..(1991): Ceres Seq. ID no. 11049355
aagcagtggtaacaacgcagagtacgcgggggctcgcggccgcattagcgcggagatcgagagacaagagagggaaggcggcggcttgccggcttaagccttctctccctccgtcgtcgcctcctccttacgtccgcttcttcctcctgaatggagacgtcagcgccgcccaatgcccccgctccgccggcgcagcacggaggcggttgccgggacttccagcagtcagtgcggctcaagtatgtgaagctggggtaccactacctcatatcccacgggatgtacctgctgctgtcgccgctgatggcgctcgtcgccgtgcagctctccaccgtctccccgcatgacctcgccgacctgtgggagcagctccgcttcaacctcctctccgtcgtcgcctgctccacgctgctcgtcttcctctccaccgtttacttcctcacccgcccgcgccccgtgtacctgctcgacttcgcctgctacaagccggagtcggagcgcaagtgcacgcgcgagaccttcatgcactgctccaagctcaccggatccttcacggacgagaacctcgagttccagcgcaagatcctcgagcgctccggcctcggcgaggacacgtaccttccccccgccgtgctccgggtgccccctaacccgtgcatggacgaggcgcgtaaggaggcgcgcgccgtcatgttcggcgccatcgaccagctgctcgagaagaccggtgtcaggcccaaggacattggtgtcctagtggtcaactgcagcctgttcaacccgacgccgtcgctgtcagccatggtggtgaaccattacaagctgagggggaatattgtgagctacaacctcggcgggatgggctgcagcgccgggctcatcgacctcgccaaggatctgctgcaggtgcaccccaactcttacgccctggtgatcagcatggagaacatcacactgaattggtactttgggaacaaccggtccatgcttgtgtcgaattgcctgttccggatgggtggcgcggccatcctgctctcgaacaggcggtctgacaggcggaggtccaagtatgagctggtgcacacggtgcgcacgcacaagggcgccaacgacaagtgcttcggctgcgtgacacaggaggaagatgagattggcaagattggcgtgtcactgtccaaggacctcatggcagtggccggagacgcacttaagaccaacatcaccacgctggggccgttggtgctcccattatcagagcaacttctcttcatgggcacattgattgccaagaaggtgctcaagatgaaaatcaagccatacatccctgacttcaagctggctttcgagcacttctgcatccacgcaggcggccgcgctgtgctggatgagctggagaagaacctggagctcactgactggcacatggagccatcgaggatgaccctgtacaggtttggcaacacatcaagcagctcactctggtacgagctggcgtacactgaggcaaagggtaggatcaggaagcgcgacaggatctggcagatcgcatttggttctggattcaagtgcaacagcgccgtctggaaggcactccggacggtgaacccggccaaggagaagagcccctggatggatgagattgacaacttcccggtggatgttccaaagatttcaaaggttggtggcgcttgaagaaccattcttcttattattaggtggcaagtggagttgggtgattgtcaggggctgggcagagatttattccatcgtttccaccgttggttcttgtattcagttgtagcatggcatctgtgaaggaacttgagtagatgattcggttaggtagaaagggtgtgttcttcggctcgctagggttgtctgaatgcctgatatgtcctatttattcagattggagagagcaatcgatttgcattctttgctgcctgattgagatgttcacattgcaggccaacttaaacttgtaattcccc

SEQ ID NO: 14620 - protein, 513 aa, Zea mays subsp. mays
  misc_feature (1)..(513): Ceres Seq. ID no. 11049356
METSAPPNAPAPPAQHGGGCRDFQQSVRLKYVKLGYHYLISHGMYLLLSPLMALVAVQLSTVSPHDLADLWEQLRFNLLSVVACSTLLVFLSTVYFLTRPRPVYLLDFACYKPESERKCTRETFMHCSKLTGSFTDENLEFQRKILERSGLGEDTYLPPAVLRVPPNPCMDEARKEARAVMFGAIDQLLEKTGVRPKDIGVLVVNCSLFNPTPSLSAMVVNHYKLRGNIVSYNLGGMGCSAGLIDLAKDLLQVHPNSYALVISMENITLNWYFGNNRSMLVSNCLFRMGGAAILLSNRRSDRRRSKYELVHTVRTHKGANDKCFGCVTQEEDEIGKIGVSLSKDLMAVAGDALKTNITTLGPLVLPLSEQLLFMGTLIAKKVLKMKIKPYIPDFKLAFEHFCIHAGGRAVLDELEKNLELTDWHMEPSRMTLYRFGNTSSSSLWYELAYTEAKGRIRKRDRIWQIAFGSGFKCNSAVWKALRTVNPAKEKSPWMDEIDNFPVDVPKISKVGGA

SEQ ID NO: 14621 - protein, 470 aa, Zea mays subsp. mays
  misc_feature (1)..(470): Ceres Seq. ID no. 11049357
MYLLLSPLMALVAVQLSTVSPHDLADLWEQLRFNLLSVVACSTLLVFLSTVYFLTRPRPVYLLDFACYKPESERKCTRETFMHCSKLTGSFTDENLEFQRKILERSGLGEDTYLPPAVLRVPPNPCMDEARKEARAVMFGAIDQLLEKTGVRPKDIGVLVVNCSLFNPTPSLSAMVVNHYKLRGNIVSYNLGGMGCSAGLIDLAKDLLQVHPNSYALVISMENITLNWYFGNNRSMLVSNCLFRMGGAAILLSNRRSDRRRSKYELVHTVRTHKGANDKCFGCVTQEEDEIGKIGVSLSKDLMAVAGDALKTNITTLGPLVLPLSEQLLFMGTLIAKKVLKMKIKPYIPDFKLAFEHFCIHAGGRAVLDELEKNLELTDWHMEPSRMTLYRFGNTSSSSLWYELAYTEAKGRIRKRDRIWQIAFGSGFKCNSAVWKALRTVNPAKEKSPWMDEIDNFPVDVPKISKVGGA

SEQ ID NO: 14622 - protein, 462 aa, Zea mays subsp. mays
  misc_feature (1)..(462): Ceres Seq. ID no. 11049358
MALVAVQLSTVSPHDLADLWEQLRFNLLSVVACSTLLVFLSTVYFLTRPRPVYLLDFACYKPESERKCTRETFMHCSKLTGSFTDENLEFQRKILERSGLGEDTYLPPAVLRVPPNPCMDEARKEARAVMFGAIDQLLEKTGVRPKDIGVLVVNCSLFNPTPSLSAMVVNHYKLRGNIVSYNLGGMGCSAGLIDLAKDLLQVHPNSYALVISMENITLNWYFGNNRSMLVSNCLFRMGGAAILLSNRRSDRRRSKYELVHTVRTHKGANDKCFGCVTQEEDEIGKIGVSLSKDLMAVAGDALKTNITTLGPLVLPLSEQLLFMGTLIAKKVLKMKIKPYIPDFKLAFEHFCIHAGGRAVLDELEKNLELTDWHMEPSRMTLYRFGNTSSSSLWYELAYTEAKGRIRKRDRIWQIAFGSGFKCNSAVWKALRTVNPAKEKSPWMDEIDNFPVDVPKISKVGGA

SEQ ID NO: 14623 - DNA, 848 bp, Zea mays subsp. mays
  misc_feature (1)..(848): Ceres Seq. ID no. 11049359
caacgacgagccacatcgagaacacgatcgagcacacaagcacgaagactcgtttaggagaaaccacaaaccaccaagccgtgaaagcatcatggagtacggtcagcaggggcagcacggccacggcgccacgggccatgtcgaccagtacggcaacccagtcggcggcgtcgagcacggcaccggcggcatgaggcacggcacgggaaccggcggcatgggccagctgggtgagcacggcggcgctggcatgggtggcgggcagttccagcctgcgagggaggagcacaagaccggcggcatcctgcatcgctccggcagctccagctccagctcgtcggaggacgacggcatgggcggaaggaggaagaagggaatcaaggagaagatcaaggagaagctgcccggaggccacaaggacgaccagcacgccacggcgacgaccggcggcgcctacgggcagcagggacacaccggcagcgcctacgggcagcagggacacaccggcggcgcctacgccaccggcaccgagggcaccggcgagaagaaaggcattatggacaagatcaaagagaagctgcccggacagcactgagcgcccataagtacagtggctgtgctggcgcgtcaaagccgtaatgttcagtgttccatagataataagataaatccatgaataagtgtccctacccttgatcatgtgacagggacagggacagtttcctgtacttgtggggtgaatttgtacgtgtgatacggtaactgggtccgtgtactgtttatgctacgttttccttcctaaaagtacgtatatatatacagcacttgcgagtggctttacttcagtg

SEQ ID NO: 14624 - protein, 197 aa, Zea mays subsp. mays
  misc_feature (1)..(197): Ceres Seq. ID no. 11049360
NDEPHREHDRAHKHEDSFRRNHKPPSRESIMEYGQQGQHGHGATGHVDQYGNPVGGVEHGTGGMRHGTGTGGMGQLGEHGGAGMGGGQFQPAREEHKTGGILHRSGSSSSSSSEDDGMGGRRKKGIKEKIKEKLPGGHKDDQHATATTGGAYGQQGHTGSAYGQQGHTGGAYATGTEGTGEKKGIMDKIKEKLPGQH

SEQ ID NO: 14625 - protein, 167 aa, Zea mays subsp. mays
  misc_feature (1)..(167): Ceres Seq. ID no. 11049361
MEYGQQGQHGHGATGHVDQYGNPVGGVEHGTGGMRHGTGTGGMGQLGEHGGAGMGGGQFQPAREEHKTGGILHRSGSSSSSSSEDDGMGGRRKKGIKEKIKEKLPGGHKDDQHATATTGGAYGQQGHTGSAYGQQGHTGGAYATGTEGTGEKKGIMDKIKEKLPGQH

SEQ ID NO: 14626 - protein, 134 aa, Zea mays subsp. mays
  misc_feature (1)..(134): Ceres Seq. ID no. 11049362
MRHGTGTGGMGQLGEHGGAGMGGGQFQPAREEHKTGGILHRSGSSSSSSSEDDGMGGRRKKGIKEKIKEKLPGGHKDDQHATATTGGAYGQQGHTGSAYGQQGHTGGAYATGTEGTGEKKGIMDKIKEKLPGQH

SEQ ID NO: 14627 - DNA, 1567 bp, Zea mays subsp. mays
  misc_feature (1)..(1567): Ceres Seq. ID no. 11049363
gaaaaaaaaatagagtagactcgccagccaggcagccaccctcaccctggtctggtctcctctccaagcgggcagcgctcctccaaactgaaccctatcctagcacgagtgcacgtcggtggcagcaggagatggtggggacggcggaaggcggcgcggagagggcggtgcggcggtgggtggacgccgccggcgggcgcctggtcctggacggcgggctggccacggagctcgaggccaacggcgccgacctcaacgacccgctctggagcgccaagtgcctcctctcctccccgcacctcatccgcaaggtccatatggactacctagaagctggggcgaacattataatcacagcatcgtatcaggccactatccaagggtttgaatcaaagggcttttcaaaagaacaaagtgaaaacttgttaacaaagagtgttcagattgcactggaagcccgtgagatgttcttgaaggaacatttggagaaatccactcctatacagcatcctattctggttgcagcagctctagggagttatggggcttatcttgctgatggctctgagtacagtggggattatggtgaagctggtacgaaagagttcctgaaggactttcatcggcggaggcttcaggttcttgctgaagcaggcccggatttgattgcttttgaaacgatccccaacaaattggaagctcaggcatatgttgaactccttgaggaatgtaacatcaatatcccttcatggctttccttcaactcaaaagatggagtgcatgttgtgagtggtgattcgttaattgaatgcgctactattgctgacaagtgtgcaaaggttggtgcagtcgggataaattgcacacctccaagatttattcatggactgatactctccattcgaaaggtcacagacaagcctattctgatatatcccaacagtggtgaaagatatgatggtgaaaaaaaggagtgggtggaatccactggtgtgtcagatggtgattttgtttcgtacgtaaatgaatggtgcaaagatggggctgcgcttatcgggggctgctgcaggacaactccaaacactatcagggccatacacagaactcttaaccaaggctgccacaagcatcagttacctgtagcatagatctgtgctccactcctgatgctctcctcccagcagtaccttgagctgtatccccgagattccttaaccagcgcgaaccaatatactgttgcgtgttctcctgcaaatgagatgttctgcacctatgtttgtaatgttgtatttctgggtttttaagctatccaacttggagatacaaccggtgaggaagcagcaacaataggtagttctacttctgagtgaggaaaaacaacttgcggctgagttaatgaagcttagtagctaccaccgttgtatgacagttgctcagagatgttatcttcattaagtgcttatattaccgctagttcgctgtgaaatttgttaaaccattatatgtaagttttgtttgacaagactgcatctcctgaaactaagatcttagtttcctgctatttccc

SEQ ID NO: 14628 - protein, 381 aa, Zea mays subsp. mays
  misc_feature (1)..(381): Ceres Seq. ID no. 11049364
KKNRVDSPARQPPSPWSGLLSKRAALLQTEPYPSTSARRWQQEMVGTAEGGAERAVRRWVDAAGGRLVLDGGLATELEANGADLNDPLWSAKCLLSSPHLIRKVHMDYLEAGANIIITASYQATIQGFESKGFSKEQSENLLTKSVQIALEAREMFLKEHLEKSTPIQHPILVAAALGSYGAYLADGSEYSGDYGEAGTKEFLKDFHRRRLQVLAEAGPDLIAFETIPNKLEAQAYVELLEECNINIPSWLSFNSKDGVHVVSGDSLIECATIADKCAKVGAVGINCTPPRFIHGLILSIRKVTDKPILIYPNSGERYDGEKKEWVESTGVSDGDFVSYVNEWCKDGAALIGGCCRTTPNTIRAIHRTLNQGCHKHQLPVA

SEQ ID NO: 14629 - protein, 338 aa, Zea mays subsp. mays
  misc_feature (1)..(338): Ceres Seq. ID no. 11049365
MVGTAEGGAERAVRRWVDAAGGRLVLDGGLATELEANGADLNDPLWSAKCLLSSPHLIRKVHMDYLEAGANIIITASYQATIQGFESKGFSKEQSENLLTKSVQIALEAREMFLKEHLEKSTPIQHPILVAAALGSYGAYLADGSEYSGDYGEAGTKEFLKDFHRRRLQVLAEAGPDLIAFETIPNKLEAQAYVELLEECNINIPSWLSFNSKDGVHVVSGDSLIECATIADKCAKVGAVGINCTPPRFIHGLILSIRKVTDKPILIYPNSGERYDGEKKEWVESTGVSDGDFVSYVNEWCKDGAALIGGCCRTTPNTIRAIHRTLNQGCHKHQLPVA

SEQ ID NO: 14630 - protein, 276 aa, Zea mays subsp. mays
  misc_feature (1)..(276): Ceres Seq. ID no. 11049366
MDYLEAGANIIITASYQATIQGFESKGFSKEQSENLLTKSVQIALEAREMFLKEHLEKSTPIQHPILVAAALGSYGAYLADGSEYSGDYGEAGTKEFLKDFHRRRLQVLAEAGPDLIAFETIPNKLEAQAYVELLEECNINIPSWLSFNSKDGVHVVSGDSLIECATIADKCAKVGAVGINCTPPRFIHGLILSIRKVTDKPILIYPNSGERYDGEKKEWVESTGVSDGDFVSYVNEWCKDGAALIGGCCRTTPNTIRAIHRTLNQGCHKHQLPVA

SEQ ID NO: 14631 - DNA, 1359 bp, Zea mays subsp. mays
  misc_feature (1)..(1359): Ceres Seq. ID no. 11049371
cacacacaccatatcacaagcaagcgccaacgatcgagcagaaagaagatcgtcgagatcgagcataagccatggcggcctctgtttctgcctcttgccttattagcctgtcgtcgttggcggtggtgctggtggcgctggcgtcggcggcgtcggcgcagctgtcgtcgacgttctacgacaggtcatgccccaacgcgctgtccaccatcaggagcggcgtgaactccgcggtgaggcaggagcctcgcgtgggggcgtcgctgctcaggctccatttccacgactgctttgtccggggctgcgacgcgtcccttctgctgaacgacacgtcaggggagcagagccagggcccgaatctaactctgaacccaaggggcttcgttgtcgtgaacagcatcaaggcgcaggtggagtccgtgtgcccggggatcgtctcctgcgccgacatcctcgccgtggccgccagggacggagtcgtatcgctcggcgggccttcgtggacagttctgctagggcgaagggactctaccgcttcattcccaggacagacaagcgaccccccacctccgacgtctagcctccgacagcttttgtctgcgtataacaagaagaatctcaacccaaccgacatggttgcactctcaggagctcacacgatcggacaggcgcagtgctcgagcttcaacgaccacatctacaacgacaccaacatcaactccgccttcgcggcgtcgctcagggccaactgccccagggcaggcagcaccgcccttgcgccgctggacaccacgacgcccaacgcgttcgacaacgcctactacaccaacctgctgtcccagaaggggctcctgcactcggaccaggagctcttcaacaacggcagcaccgacagcacggtcaggagcttcgcgtcccagcacgtcggccttcaacagcgccttcgccacggccatggtcaagatgggcaacctcagcccccagaccggaacccaggggcagatcaggcgcagctgctggaaggtcaactcgtaaactactagctacgtactacgcccaatgcaatgcgttatggcaggcagatcagagccaattagtaataaggcctcagctcgctctctacctgtacgtgtgtgtgtgactggtgttggtcgagtaagtgtacgtactacatggatggagcagagagagagagagatatatcgatttggccaccttattattgcatgcatatgtgtactgtattagcacgacactattagacacatttattaatggtacccatgctatgcttgtaaacgtacccagccattgacctagatatgacactataggtctaatcgtattgcggctaacacc

SEQ ID NO: 14632 - protein, 323 aa, Zea mays subsp. mays
  misc_feature (1)..(323): Ceres Seq. ID no. 11049372
MAASVSASCLISLSSLAVVLVALASAASAQLSSTFYDRSCPNALSTIRSGVNSAVRQEPRVGASLLRLHFHDCFVRGCDASLLLNDTSGEQSQGPNLTLNPRGFVVVNSIKAQVESVCPGIVSCADILAVAARDGVVSLGGPSWTVLLGRRDSTASFPGQTSDPPPPTSSLRQLLSAYNKKNLNPTDMVALSGAHTIGQAQCSSFNDHIYNDTNINSAFAASLRANCPRAGSTALAPLDTTTPNAFDNAYYTNLLSQKGLLHSDQELFNNGSTDSTVRSFASQHVGLQQRLRHGHGQDGQPQPPDRNPGADQAQLLEGQLVNY

SEQ ID NO: 14633 - DNA, 2750 bp, Zea mays subsp. mays
  misc_feature (1)..(2750): Ceres Seq. ID no. 11049373
catggtctcctctcctcggctcctcttcctgctcctcgccggcgcctcgctatgctgtgtggcggcgcagaagacggacacgctgcggcagggggagtcgctgtccggggcggcgacgctggtgtcctcgccggagggggtgttcgaggcgggcttcttcgcgccggaccccaagcagccttctcgccagtacctcggcatctggtaccacagcatctcgccgcggaccgtcgtctgggtcgccaaccgcgtcgcgccggccacctcggcctcgccgtcgctcacgctcaccgtcaccggcgacctccgcgtcctcgacggcacggcggccaacggcaccgccgacgcgccgctgctctggtcctccaacaccacctcgcgcgcgggcccgcggggcggctactcggcggtgctccaggacactggcagcctcgaggtgcgcagcgaggatggggtgctctgggacagcttctggcacccgacggacaccatcctgtccgggatgcgcatcaccttgcaggcgccagggaggggccctaaggagcggatgctgttcacgtcctgggccagcgagacggacccttcgccggggcgatacgcgctcggcctcgacccgggcaactccggtcaggcctacatctggaaagatggcaacgttacgtactggaggtcgggacagtggaatggggtgaattttataggcattccatggaggccactctacaggagtgggttcacaccggcaattgatccagtgcttggaaattattacacatacactgcaacaaacacttctttgcagaggtttgttgttttgccaaatggcacagacatctgctacatggttagaaaatcttcacaagattgggagcttgtctggtaccaaccatcaaatgagtgtgaatactatgctacatgtggtccaaatgcaaaatgcactgcatcgcaagatggcaaggcaaaatgcacctgcctaaaaggttttcatccgaagttgcaggagcagtggaatgcaggaaattggagtcaaggttgcatcaggagcccacctctgggttgtgagaccaatcagtctggggatggatttcttccaatgggaaacataaagtggcctgatttctcatattgggtatctacagtgggagatgagcctggatgcagaactgtctgccttaacaactgctcatgcggtgcttatgtttacacagctacaacagggtgcctagcctggggtaacgaactaattgacatgcatgagttgcaaacaggggcatatactctaaacctgaagcttcctgcttctgaattgcgaggacatcacccaatttggaaaatagccacgataatatcagccatagtgttatttgttttggctgcttgccttcttctgtggtggaagcatggtagaaatattaaagatgcagtgcacggaagttggagatcaaggcattcgtctacccaatcccagcagaatagtgctatgctggacatctcgcagtcaattcgttttgatgatgatgtggaggatggaaaaagtcatgaactcaaagtgtactcgctggaccgtataagaactgctacaagtaattttagtgactctaacaagcttggagaaggaggatttggtcctgtctatatgggaactttacctgggggagaagaagtagctgtgaagaggctttgtaggaattcaggtcaaggccttgaagaattcaagaatgaggtcatacttattgcaaagttgcagcaccgcaatcttgtaagactactagggtgctgcataccgagggaagagaagatcctggtgtatgagtacatgcctaacaaaagtctagatgcattcctctttaatcctgaaaagcaacggcttctagactggaagaaacggtttgatataatcgaaggcattgctagagggctgctatatctccaccgggattcgaggctgcgagttgttcaccgtgatctcaaggccagcaacattctcctggacgcggacatgaaacccaagatatcagattttggaatggcaaggatgtttggaggggaccaaaaccaattcaacacgaatcgggtcgtcggtacatttggctacatgtctcctgaatacgcaatggaaggcattttttcagtcaagtctgacgtctatggcttcggagtcctgatcttggagatcatcacaggaaagagggctgtgagcttccactgtcacgaggactccttgaacatcgctggatatgcgtggcggcaatggaacgaagacaatgctgcggagctgatcgatccagtgataagagcatcgtgctcagttcggcaggtgctgagatgcatccatattgcgttgctgtgcgtgcaagatcacgcagatgagcgacctgacatccccactgtcatccttatgctgagcaacgacagctcgagccttcctaatccgaggccgcctaccctgatgcttcgaggccgtgagatcgaatccagcaagtcaagcgagaaggaccggagccactccattggcactgtgacaatgacacagttgcatggaagatgaagtataacacgaaaaatatactgaatttgtgatatatttggttttttttgttctcccttcctgatgttgataatttgccatttgtcgcggattagtttcctctttttctccttttcatgacggcgaccgcgaagttgtatgaaaatcacattagcgtcatacattaagtgacaattaattttgcaaaggtgaaatatttacc

SEQ ID NO: 14634 - protein, 848 aa, Zea mays subsp. mays
  misc_feature (1)..(848): Ceres Seq. ID no. 11049374
MVSSPRLLFLLLAGASLCCVAAQKTDTLRQGESLSGAATLVSSPEGVFEAGFFAPDPKQPSRQYLGIWYHSISPRTVVWVANRVAPATSASPSLTLTVTGDLRVLDGTAANGTADAPLLWSSNTTSRAGPRGGYSAVLQDTGSLEVRSEDGVLWDSFWHPTDTILSGMRITLQAPGRGPKERMLFTSWASETDPSPGRYALGLDPGNSGQAYIWKDGNVTYWRSGQWNGVNFIGIPWRPLYRSGFTPAIDPVLGNYYTYTATNTSLQRFVVLPNGTDICYMVRKSSQDWELVWYQPSNECEYYATCGPNAKCTASQDGKAKCTCLKGFHPKLQEQWNAGNWSQGCIRSPPLGCETNQSGDGFLPMGNIKWPDFSYWVSTVGDEPGCRTVCLNNCSCGAYVYTATTGCLAWGNELIDMHELQTGAYTLNLKLPASELRGHHPIWKIATIISAIVLFVLAACLLLWWKHGRNIKDAVHGSWRSRHSSTQSQQNSAMLDISQSIRFDDDVEDGKSHELKVYSLDRIRTATSNFSDSNKLGEGGFGPVYMGTLPGGEEVAVKRLCRNSGQGLEEFKNEVILIAKLQHRNLVRLLGCCIPREEKILVYEYMPNKSLDAFLFNPEKQRLLDWKKRFDIIEGIARGLLYLHRDSRLRVVHRDLKASNILLDADMKPKISDFGMARMFGGDQNQFNTNRVVGTFGYMSPEYAMEGIFSVKSDVYGFGVLILEIITGKRAVSFHCHEDSLNIAGYAWRQWNEDNAAELIDPVIRASCSVRQVLRCIHIALLCVQDHADERPDIPTVILMLSNDSSSLPNPRPPTLMLRGREIESSKSSEKDRSHSIGTVTMTQLHGR

SEQ ID NO: 14635 - protein, 681 aa, Zea mays subsp. mays
  misc_feature (1)..(681): Ceres Seq. ID no. 11049375
MRITLQAPGRGPKERMLFTSWASETDPSPGRYALGLDPGNSGQAYIWKDGNVTYWRSGQWNGVNFIGIPWRPLYRSGFTPAIDPVLGNYYTYTATNTSLQRFVVLPNGTDICYMVRKSSQDWELVWYQPSNECEYYATCGPNAKCTASQDGKAKCTCLKGFHPKLQEQWNAGNWSQGCIRSPPLGCETNQSGDGFLPMGNIKWPDFSYWVSTVGDEPGCRTVCLNNCSCGAYVYTATTGCLAWGNELIDMHELQTGAYTLNLKLPASELRGHHPIWKIATIISAIVLFVLAACLLLWWKHGRNIKDAVHGSWRSRHSSTQSQQNSAMLDISQSIRFDDDVEDGKSHELKVYSLDRIRTATSNFSDSNKLGEGGFGPVYMGTLPGGEEVAVKRLCRNSGQGLEEFKNEVILIAKLQHRNLVRLLGCCIPREEKILVYEYMPNKSLDAFLFNPEKQRLLDWKKRFDIIEGIARGLLYLHRDSRLRVVHRDLKASNILLDADMKPKISDFGMARMFGGDQNQFNTNRVVGTFGYMSPEYAMEGIFSVKSDVYGFGVLILEIITGKRAVSFHCHEDSLNIAGYAWRQWNEDNAAELIDPVIRASCSVRQVLRCIHIALLCVQDHADERPDIPTVILMLSNDSSSLPNPRPPTLMLRGREIESSKSSEKDRSHSIGTVTMTQLHGR

SEQ ID NO: 14636 - protein, 666 aa, Zea mays subsp. mays
  misc_feature (1)..(666): Ceres Seq. ID no. 11049376
MLFTSWASETDPSPGRYALGLDPGNSGQAYIWKDGNVTYWRSGQWNGVNFIGIPWRPLYRSGFTPAIDPVLGNYYTYTATNTSLQRFVVLPNGTDICYMVRKSSQDWELVWYQPSNECEYYATCGPNAKCTASQDGKAKCTCLKGFHPKLQEQWNAGNWSQGCIRSPPLGCETNQSGDGFLPMGNIKWPDFSYWVSTVGDEPGCRTVCLNNCSCGAYVYTATTGCLAWGNELIDMHELQTGAYTLNLKLPASELRGHHPIWKIATIISAIVLFVLAACLLLWWKHGRNIKDAVHGSWRSRHSSTQSQQNSAMLDISQSIRFDDDVEDGKSHELKVYSLDRIRTATSNFSDSNKLGEGGFGPVYMGTLPGGEEVAVKRLCRNSGQGLEEFKNEVILIAKLQHRNLVRLLGCCIPREEKILVYEYMPNKSLDAFLFNPEKQRLLDWKKRFDIIEGIARGLLYLHRDSRLRVVHRDLKASNILLDADMKPKISDFGMARMFGGDQNQFNTNRVVGTFGYMSPEYAMEGIFSVKSDVYGFGVLILEIITGKRAVSFHCHEDSLNIAGYAWRQWNEDNAAELIDPVIRASCSVRQVLRCIHIALLCVQDHADERPDIPTVILMLSNDSSSLPNPRPPTLMLRGREIESSKSSEKDRSHSIGTVTMTQLHGR

SEQ ID NO: 14637 - DNA, 1325 bp, Zea mays subsp. mays
  misc_feature (1)..(1325): Ceres Seq. ID no. 11049409
ccgaatcgatttgtccatttgctgcacgcatgactcgacatgcatggaattggatgggtcctactaatgctgtggcgctgcagcctatataagaacactacacacatagctcttgacacgtcgcttcatctagtcccagcactactcactcacttccagtctctagagccatcaagatcgtagctgagcgagttagtattcatggcaggaggcacgctgcaggacagatcggaggaagaggacgtgcgcgtgggcgtggaccgtttcccggagcggcagcccatcggcacggcggcggacgacctgggccgcgactacagcgagcccccggcggcgccgctgttcgaggcgtcggagctctcctcgtggtccttctaccgcgccggcatcgccgagttcgtggccacgttcctcttcctgtacgtgaccgtgctgacggtgatgggcgtgagcaagtccccctccaagtgcggcaccgtgggcatccagggcatcgcgtgggcgttcggcggcatgatcttcgcgctcgtgtactgcaccgcgggcgtgtcgggcggccacatcaacccggccgtcacgttcggcctcctcctcgcccggaagctgtcgctgacgcgggcggtctactacgtggtgatgcagtgcctgggcgccgtctgcggcgccggcgtcgtgaaggcgttcggcagcgcgctgtacgagtccgcgggcggcggcgccaacgccgtcagccccgggtacaccaagggcgacggcctcggcgccgaggtcgtgggcacgttcgtgctcgtgtacaccgtcttctccgccaccgacgccaagcgcaccgccagggactcccacgtccccgcgctggccccgctgcccatcggcttcgccgtattcctggtgcacctcgccaccatccccatcaccggcaccggcatcaaccccgccaggagcctcggcgccgccatcatctacgacaacccgcacgggtggcacggccactggatcttctgggtgggcccgttcgccggagcggcgcttgcggcggtgtaccaccaggtcgtcctcagggccatccccttcaagtccagcgctcactactagtgttgcttgccttgccgtcatacacggagttctgctgccacatcggccgctcaatgggccatcactccgcgaatgtatgatgtgtgtaactcgaatgtgtggttaattttcgttttcttacgtgtttgcatccacggaatgtgtcatcagtgtacaaatcaactgtatgtggctgtacgtgtcccaattatgataatgctaataaggccataatataccaaggcccatttact

SEQ ID NO: 14638 - protein, 296 aa, Zea mays subsp. mays
  misc_feature (1)..(296): Ceres Seq. ID no. 11049410
MAGGTLQDRSEEEDVRVGVDRFPERQPIGTAADDLGRDYSEPPAAPLFEASELSSWSFYRAGIAEFVATFLFLYVTVLTVMGVSKSPSKCGTVGIQGIAWAFGGMIFALVYCTAGVSGGHINPAVTFGLLLARKLSLTRAVYYVVMQCLGAVCGAGVVKAFGSALYESAGGGANAVSPGYTKGDGLGAEVVGTFVLVYTVFSATDAKRTARDSHVPALAPLPIGFAVFLVHLATIPITGTGINPARSLGAAIIYDNPHGWHGHWIFWVGPFAGAALAAVYHQVVLRAIPFKSSAHY

SEQ ID NO: 14639 - protein, 216 aa, Zea mays subsp. mays
  misc_feature (1)..(216): Ceres Seq. ID no. 11049411
MGVSKSPSKCGTVGIQGIAWAFGGMIFALVYCTAGVSGGHINPAVTFGLLLARKLSLTRAVYYVVMQCLGAVCGAGVVKAFGSALYESAGGGANAVSPGYTKGDGLGAEVVGTFVLVYTVFSATDAKRTARDSHVPALAPLPIGFAVFLVHLATIPITGTGINPARSLGAAIIYDNPHGWHGHWIFWVGPFAGAALAAVYHQVVLRAIPFKSSAHY

SEQ ID NO: 14640 - protein, 192 aa, Zea mays subsp. mays
  misc_feature (1)..(192): Ceres Seq. ID no. 11049412
MIFALVYCTAGVSGGHINPAVTFGLLLARKLSLTRAVYYVVMQCLGAVCGAGVVKAFGSALYESAGGGANAVSPGYTKGDGLGAEVVGTFVLVYTVFSATDAKRTARDSHVPALAPLPIGFAVFLVHLATIPITGTGINPARSLGAAIIYDNPHGWHGHWIFWVGPFAGAALAAVYHQVVLRAIPFKSSAHY

SEQ ID NO: 14641 - DNA, 496 bp, Zea mays subsp. mays
  misc_feature (1)..(496): Ceres Seq. ID no. 11049471
ggcgatgcggaacgccatcgagggcatgaacggcaaggagctggacggccgcaacatcaccaccaccgggtcggccaaggccacgatcttcgatgagtacctcgagaagagcaaggccaacaaggagctgaacgacaagaagaggctggccaccagtggagccaactttgcgcgcgcctacaccgtggagttcggcagctgccagttcccctacaacttcactgggtgccaggacctcgccaagcagaagaaagtccccttcatcagcgacgacctcgagattgagtgcgaggggaaggagaagttcaagtgcggctccaacgttttctggaagtggtgaagcagctagcagcagcgtctgatgggaatggaggagatcatcacctgtcttgtcgaccctagatatgtccaaactgcagggaaattaaatcttcatgtgtaattgtgctcattctgtttcaatcatctcaacatccgatcatgaacctcttgcatt

SEQ ID NO: 14642 - protein, 112 aa, Zea mays subsp. mays
  misc_feature (1)..(112): Ceres Seq. ID no. 11049472
AMRNAIEGMNGKELDGRNITTTGSAKATIFDEYLEKSKANKELNDKKRLATSGANFARAYTVEFGSCQFPYNFTGCQDLAKQKKVPFISDDLEIECEGKEKFKCGSNVFWKW

SEQ ID NO: 14643 - protein, 111 aa, Zea mays subsp. mays
  misc_feature (1)..(111): Ceres Seq. ID no. 11049473
MRNAIEGMNGKELDGRNITTTGSAKATIFDEYLEKSKANKELNDKKRLATSGANFARAYTVEFGSCQFPYNFTGCQDLAKQKKVPFISDDLEIECEGKEKFKCGSNVFWKW

SEQ ID NO: 14644 - protein, 104 aa, Zea mays subsp. mays
  misc_feature (1)..(104): Ceres Seq. ID no. 11049474
MNGKELDGRNITTTGSAKATIFDEYLEKSKANKELNDKKRLATSGANFARAYTVEFGSCQFPYNFTGCQDLAKQKKVPFISDDLEIECEGKEKFKCGSNVFWKW

SEQ ID NO: 14645 - DNA, 2489 bp, Zea mays subsp. mays
  misc_feature (1)..(2489): Ceres Seq. ID no. 11049475
caacaacagactacggaggaccgccgccgcccacgcaaaaacccacccgatccccgcaaaaacccccgcacgcgatccacgccaattccagtcaccgcgatgcagggtctcgccccgcccacctctgtttccatacaccggcacctgccggcccggtccagggcccgggcctccaattccgtcaggttctcgccgcgcgccgtcagctccgtgccgcccgccgagtgcctccaggcgccgttccacaagcccgtcgccgacctgcctgcgccgtccaggaagcccgccgccattgccgtcccagggcacgccgcggcgccgaggaaagcggagggcggcaagaagcagctcaacttgttccagcgcgccgcggcggccgcgctcgacgcgttcgaggaagggttcgtggccaacgtcctcgagcggccccacgggctgcccagcacggccgacccggccgtgcagatcgccggcaacttcgcgcccgtcggggagaggccgcccgtgcacgagctccccgtctccggccgcatcccgcccttcatcgacggggtctacgcgcgcaacggcgccaacccctgcttcgaccccgtcgcggggcaccacctcttcgacggcgacggcatggtgcacgcgctgcggatacgcaacggcgccgccgagtcctacgcctgccgcttcacggagaccgcgcgcctgcgccaggagcgcgcgatcggccgccccgtcttccccaaggccattggcgagctgcacgggcactccgggatcgcgcgcctcgccctgttctacgcgcgcgccgcgtgcggcctcgtggacccctcggccggcaccggcgtggccaacgccggcctcgtctacttcaacggccgcctgctcgccatgtccgaggacgacctcccctaccacgtccgcgtggcggacgacggcgacctcgagaccgtcggccgctacgacttcgacgggcagctcggctgcgccatgatcgcgcaccccaagctggacccggccaccggggagctccacgcgctcagctacgacgtcatcaagaggccgtacctcaagtacttctacttcaggcccgacggcaccaagtccgacgacgtggagatcccgctggagcagcccacgatgatccacgacttcgccatcaccgagaacttcgtggttgtgcccgaccaccaggtggtgttcaagctccaggagatgctgcgcggcgggtcgcccgtggtgctggacaaggagaagacgtcgcggttcggcgtgctccccaagcacgccgcggacgcgtcggagatggcgtgggtggacgtgccggactgcttctgcttccacctgtggaacgcgtgggaggacgaggcgacgggcgaggtggtggtgatcggctcctgcatgacccccgccgactccatcttcaacgagtccgacgagcgcctggagagcgtgctgaccgagatccgcctggacgcgcgcacgggccggtccacgcgccgcgccgtcctgccgccgtcgcagcaggagaacctggaggtgggcatggtgaaccgcaacctgctgggccgcgagagccggtacgcgtacctcgcggtggcggagccgtggcccaaggagtcgggcttcgccaaggaggacctgtccacgggcgagctcaccaagttcgagtacggcgagggccggttcggcggcgagccctgcttcgttcccatggacccggccgcggcccacccgcgcggcgaggacgacgggtacgtgctcaccttcgtccacgacgagcgcgccggcacgtcggagctacttgtggtcaatgccgccgacatccggctggaggccacggttcagctgccgtcccgcgtgcccttcggcttccacggcaccttcatcacgggccaggagctcgaggcccaggcggcctgaccgagctccacgtttctcggaggaggaacagaggagccagccttggatcaggggagaagtcaccagagggagcccagatcagttccccggggtcttcctgtccccccacgcacaccagagttacagttggtagttgctttgctttgcctttttttaacattatttcatttgacactagtgtaagtaaattggtatagtggcagcttagagagagagagagattagtagaaaggcgcccagctcgtagcttaacagctggtggtgcctctggctagtatagagtacatatttttttttcttcttctgtgctttatcccttttttttttctccctttggatgacatggatgtgcatccagctccagttgttgtcacccagtccagtggactggggtgtctgggatcttggttgctgttacttgctcgccattgccacccagttgctgccgctgctgctgaggtgttgctggcttggcttgtatactctgtgttccctgtggctatcggtgcgtgtacatttgttcacagtatatgactgatggtattaaaataagaaccggtgacggcttctgtttc

SEQ ID NO: 14646 - protein, 702 aa, Zea mays subsp. mays
  misc_feature (1)..(702): Ceres Seq. ID no. 11049476
TTDYGGPPPPTQKPTRSPQKPPHAIHANSSHRDAGSRPAHLCFHTPAPAGPVQGPGLQFRQVLAARRQLRAARRVPPGAVPQARRRPACAVQEARRHCRPRARRGAEESGGRQEAAQLVPARRGGRARRVRGRVRGQRPRAAPRAAQHGRPGRADRRQLRARRGEAARARAPRLRPHPALHRRGLRAQRRQPLLRPRRGAPPLRRRRHGARAADTQRRRRVLRLPLHGDRAPAPGARDRPPRLPQGHWRAARALRDRAPRPVLRARRVRPRGPLGRHRRGQRRPRLLQRPPARHVRGRPPLPRPRGGRRRPRDRRPLRLRRAARLRHDRAPQAGPGHRGAPRAQLRRHQEAVPQVLLLQARRHQVRRRGDPAGAAHDDPRLRHHRELRGCARPPGGVQAPGDAARRVARGAGQGEDVAVRRAPQARRGRVGDGVGGRAGLLLLPPVERVGGRGDGRGGGDRLLHDPRRLHLQRVRRAPGERADRDPPGRAHGPVHAPRRPAAVAAGEPGGGHGEPQPAGPREPVRVPRGGGAVAQGVGLRQGGPVHGRAHQVRVRRGPVRRRALLRSHGPGRGPPARRGRRVRAHLRPRRARRHVGATCGQCRRHPAGGHGSAAVPRALRLPRHLHHGPGARGPGGLTELHVSRRRNRGASLGSGEKSPEGAQISSPGSSCPPTHTRVTVGSCFALPFFNIISFDTSVSKLV

SEQ ID NO: 14647 - protein, 637 aa, Zea mays subsp. mays
  misc_feature (1)..(637): Ceres Seq. ID no. 11049477
QQQTTEDRRRPRKNPPDPRKNPRTRSTPIPVTAMQGLAPPTSVSIHRHLPARSRARASNSVRFSPRAVSSVPPAECLQAPFHKPVADLPAPSRKPAAIAVPGHAAAPRKAEGGKKQLNLFQRAAAAALDAFEEGFVANVLERPHGLPSTADPAVQIAGNFAPVGERPPVHELPVSGRIPPFIDGVYARNGANPCFDPVAGHHLFDGDGMVHALRIRNGAAESYACRFTETARLRQERAIGRPVFPKAIGELHGHSGIARLALFYARAACGLVDPSAGTGVANAGLVYFNGRLLAMSEDDLPYHVRVADDGDLETVGRYDFDGQLGCAMIAHPKLDPATGELHALSYDVIKRPYLKYFYFRPDGTKSDDVEIPLEQPTMIHDFAITENFVVVPDHQVVFKLQEMLRGGSPVVLDKEKTSRFGVLPKHAADASEMAWVDVPDCFCFHLWNAWEDEATGEVVVIGSCMTPADSIFNESDERLESVLTEIRLDARTGRSTRRAVLPPSQQENLEVGMVNRNLLGRESRYAYLAVAEPWPKESGFAKEDLSTGELTKFEYGEGRFGGEPCFVPMDPAAAHPRGEDDGYVLTFVHDERAGTSELLVVNAADIRLEATVQLPSRVPFGFHGTFITGQELEAQAA

SEQ ID NO: 14648 - protein, 604 aa, Zea mays subsp. mays
  misc_feature (1)..(604): Ceres Seq. ID no. 11049478
MQGLAPPTSVSIHRHLPARSRARASNSVRFSPRAVSSVPPAECLQAPFHKPVADLPAPSRKPAAIAVPGHAAAPRKAEGGKKQLNLFQRAAAAALDAFEEGFVANVLERPHGLPSTADPAVQIAGNFAPVGERPPVHELPVSGRIPPFIDGVYARNGANPCFDPVAGHHLFDGDGMVHALRIRNGAAESYACRFTETARLRQERAIGRPVFPKAIGELHGHSGIARLALFYARAACGLVDPSAGTGVANAGLVYFNGRLLAMSEDDLPYHVRVADDGDLETVGRYDFDGQLGCAMIAHPKLDPATGELHALSYDVIKRPYLKYFYFRPDGTKSDDVEIPLEQPTMIHDFAITENFVVVPDHQVVFKLQEMLRGGSPVVLDKEKTSRFGVLPKHAADASEMAWVDVPDCFCFHLWNAWEDEATGEVVVIGSCMTPADSIFNESDERLESVLTEIRLDARTGRSTRRAVLPPSQQENLEVGMVNRNLLGRESRYAYLAVAEPWPKESGFAKEDLSTGELTKFEYGEGRFGGEPCFVPMDPAAAHPRGEDDGYVLTFVHDERAGTSELLVVNAADIRLEATVQLPSRVPFGFHGTFITGQELEAQAA

SEQ ID NO: 14649 - DNA, 686 bp, Zea mays subsp. mays
  misc_feature (1)..(686): Ceres Seq. ID no. 11049495
gaactagtaattatcagcaaacaacaaacaatggcaccgaggctagcgtgcctcctagctctggccatggcagccatcgtcgtggcgccgtgcacggcccagaactcgccgcaggactacgtggacccgcacaacgcggcgcgcgccgacgtgggcgtcgggccggtgtcctgggacgacaccgtggccgcgtacgcgcagagctacgcggcgcagcgccagggcgactgcaagctgatccactccggcgggccctacggcgagaacctcttctggggctccgccggcgccgactggtcggcgtccgacgccgtgggctcctgggtgtccgagaagcagtactacgaccacgacaccaacagctgcgcggaggggcaggtgtgcggccactacacgcaggtggtgtggcgcgactccaccgccatcggctgtgcccgcgtcgtctgcgacaacaacgccggcgtcttcatcatctgcagctacaacccgccgggcaacgtcgtcggcgagagcccctactagactgtcatgcatactacaattatatatatatacgcttaatattaacttcagcatgcatgcatattataaatagtgttgtcaactctgtatatcattatattacgatgattatattgttgatgaacataataagtcaataaaaccatgcaggcgatttgtgagcc

SEQ ID NO: 14650 - protein, 219 aa, Zea mays subsp. mays
  misc_feature (1)..(219): Ceres Seq. ID no. 11049496
TSNYQQTTNNGTEASVPPSSGHGSHRRGAVHGPELAAGLRGPAQRGARRRGRRAGVLGRHRGRVRAELRGAAPGRLQADPLRRALRREPLLGLRRRRLVGVRRRGLLGVREAVLRPRHQQLRGGAGVRPLHAGGVARLHRHRLCPRRLRQQRRRLHHLQLQPAGQRRRREPLLDCHAYYNYIYIRLILTSACMHIINSVVNSVYHYITMIILLMNIISQ

SEQ ID NO: 14651 - protein, 173 aa, Zea mays subsp. mays
  misc_feature (1)..(173): Ceres Seq. ID no. 11049497
ELVIISKQQTMAPRLACLLALAMAAIVVAPCTAQNSPQDYVDPHNAARADVGVGPVSWDDTVAAYAQSYAAQRQGDCKLIHSGGPYGENLFWGSAGADWSASDAVGSWVSEKQYYDHDTNSCAEGQVCGHYTQVVWRDSTAIGCARVVCDNNAGVFIICSYNPPGNVVGESPY

SEQ ID NO: 14652 - protein, 163 aa, Zea mays subsp. mays
  misc_feature (1)..(163): Ceres Seq. ID no. 11049498
MAPRLACLLALAMAAIVVAPCTAQNSPQDYVDPHNAARADVGVGPVSWDDTVAAYAQSYAAQRQGDCKLIHSGGPYGENLFWGSAGADWSASDAVGSWVSEKQYYDHDTNSCAEGQVCGHYTQVVWRDSTAIGCARVVCDNNAGVFIICSYNPPGNVVGESPY

SEQ ID NO: 14653 - DNA, 1392 bp, Zea mays subsp. mays
  misc_feature (1)..(1392): Ceres Seq. ID no. 11049575
tggaggttatatggtcaatggttggggctcagaccactgaacagggcgactgctcaaagttcaagagcagcccaccccattgctgcaagaaagatccaacaattgtcgatttacttccaggcactccatacaacatgcaaattgccaattgctgcaaggcaggagttgtaaatacctttaaccaggacccagcaaatgctgcttcctccttccagatcagtgttggtcttgctggaactaccaataaaactgttaaggtgcccaggaacttcactcttaagactccaggccctgggtacacatgtgggcgtgccattgttggcaggcctacgaagtttttcaccgcggacgggcgcagggcaacccaagctctaatgacatggaatgtgacctgcacatattcccaatttcttgctcagaagactccatcctgctgtgtatctctatcatcgttttataatgacacaattgtgaactgcccaacatgctcatgtggctgccagaacccaagtgggtcaaactgtgtgaatgaggattcacctaatctacaagctgcaattgatggccctggcaaatggactggtcagccccttgtacaatgcacttcccacatgtgcccgataagaatccactggcatgtgaagctcaactacaaggattactggagagtgaaaatcactatcacaaacttcaacttccgcatgaattacacgcagtggaacttagtagcccagcatccaaactttgataatatcactcagttgttcagcttcaactacaaaccacttactccatatggtggtggcataaatgatacggcaatgttctggggtgtaaaattctacaatgatctgctgatgcaagccggcaaacttgggaatgtgcaatcagagctgcttctccgcaaggactcccggactttcactttcgaaaagggatgggccttcccacgccgagtttacttcaatggtgataattgtgtcatgccatctcctgaaaattatccatggctgccgaatgcaagccctctaacaaaaccattggcactcccattacttggtattctgggccttggctgctctgttggcttatgcatgattagtgggatcaagaggtttcaagttgatgtcagattccatgaggtgcactgcaacaagtcatttgttcattcaattccatggttgcacagaaaagatgagcgatgccaagaaaaagtcgatatgtctatgtgtttaagttaaagggccaaaatgtatttcttgtttggtatataacagccctacaacactttggtgaacttagttactgcagattaggtaattacagttgcaccttttgtattttatagcaaacccagaatttttcattggattctacgactgcccctcttgt

SEQ ID NO: 14654 - protein, 412 aa, Zea mays subsp. mays
  misc_feature (1)..(412): Ceres Seq. ID no. 11049576
EVIWSMVGAQTTEQGDCSKFKSSPPHCCKKDPTIVDLLPGTPYNMQIANCCKAGVVNTFNQDPANAASSFQISVGLAGTTNKTVKVPRNFTLKTPGPGYTCGRAIVGRPTKFFTADGRRATQALMTWNVTCTYSQFLAQKTPSCCVSLSSFYNDTIVNCPTCSCGCQNPSGSNCVNEDSPNLQAAIDGPGKWTGQPLVQCTSHMCPIRIHWHVKLNYKDYWRVKITITNFNFRMNYTQWNLVAQHPNFDNITQLFSFNYKPLTPYGGGINDTAMFWGVKFYNDLLMQAGKLGNVQSELLLRKDSRTFTFEKGWAFPRRVYFNGDNCVMPSPENYPWLPNASPLTKPLALPLLGILGLGCSVGLCMISGIKRFQVDVRFHEVHCNKSFVHSIPWLHRKDERCQEKVDMSMCLS

SEQ ID NO: 14655 - protein, 407 aa, Zea mays subsp. mays
  misc_feature (1)..(407): Ceres Seq. ID no. 11049577
MVGAQTTEQGDCSKFKSSPPHCCKKDPTIVDLLPGTPYNMQIANCCKAGVVNTFNQDPANAASSFQISVGLAGTTNKTVKVPRNFTLKTPGPGYTCGRAIVGRPTKFFTADGRRATQALMTWNVTCTYSQFLAQKTPSCCVSLSSFYNDTIVNCPTCSCGCQNPSGSNCVNEDSPNLQAAIDGPGKWTGQPLVQCTSHMCPIRIHWHVKLNYKDYWRVKITITNFNFRMNYTQWNLVAQHPNFDNITQLFSFNYKPLTPYGGGINDTAMFWGVKFYNDLLMQAGKLGNVQSELLLRKDSRTFTFEKGWAFPRRVYFNGDNCVMPSPENYPWLPNASPLTKPLALPLLGILGLGCSVGLCMISGIKRFQVDVRFHEVHCNKSFVHSIPWLHRKDERCQEKVDMSMCLS

SEQ ID NO: 14656 - protein, 368 aa, Zea mays subsp. mays
  misc_feature (1)..(368): Ceres Seq. ID no. 11049578
MQIANCCKAGVVNTFNQDPANAASSFQISVGLAGTTNKTVKVPRNFTLKTPGPGYTCGRAIVGRPTKFFTADGRRATQALMTWNVTCTYSQFLAQKTPSCCVSLSSFYNDTIVNCPTCSCGCQNPSGSNCVNEDSPNLQAAIDGPGKWTGQPLVQCTSHMCPIRIHWHVKLNYKDYWRVKITITNFNFRMNYTQWNLVAQHPNFDNITQLFSFNYKPLTPYGGGINDTAMFWGVKFYNDLLMQAGKLGNVQSELLLRKDSRTFTFEKGWAFPRRVYFNGDNCVMPSPENYPWLPNASPLTKPLALPLLGILGLGCSVGLCMISGIKRFQVDVRFHEVHCNKSFVHSIPWLHRKDERCQEKVDMSMCLS

SEQ ID NO: 14657 - DNA, 793 bp, Zea mays subsp. mays
  misc_feature (1)..(793): Ceres Seq. ID no. 11049602
atctccgcgtccgcaaccgcatcgctcacaagaagaagattcggttggattgtttgtctcttgcaaactgcaatggctgctgctgccactgctactccgtccgtggcgccggagtccggcgaccggaaggcggtggcaccgccggtcgacgcggtggatctggagctggagctggaggagaagcacgtgctggcggtggacgacagctccgtggatcgcgcggtgatcgccaagatcctgcgcagctccaagtacagagtgacgaccgtggattcggcgacgcgcgcgctggagctgctggcgctggggctggtccccgacgtgaacatgatcatcacggactactggatgcccgggatgaccgggtacgagctgctgaagcacgtgaaggagtcgtcggcgctgcgggccatcccggtggtgatcatgtcgtcggagaacgtgcccacccgcatcagccggtgcctggaggagggcgccgaggacttcctcctcaagcccgtccgccccgccgacgtctcccgcctctgcagccggatccggtgaccgcccgcgcaaggatggaggatctggttgcgcgctctgacttaattagaggagttgttaggatccaattttttgtgtgttcgttcgttcgttcgttcttttctttctttcttcttggacatagatctgctgccgccgctgctgccgtcgactgaaacaagaagctaacttagttttagggtccaggttgttgttgttgttgttaggaaggcgagtcgttgggggcattcacggatgttcttcctcg

SEQ ID NO: 14658 - protein, 232 aa, Zea mays subsp. mays
  misc_feature (1)..(232): Ceres Seq. ID no. 11049603
LRVRNRIAHKKKIRLDCLSLANCNGCCCHCYSVRGAGVRRPEGGGTAGRRGGSGAGAGGEARAGGGRQLRGSRGDRQDPAQLQVQSDDRGFGDARAGAAGAGAGPRREHDHHGLLDARDDRVRAAEAREGVVGAAGHPGGDHVVGERAHPHQPVPGGGRRGLPPQARPPRRRLPPLQPDPVTARARMEDLVARSDLIRGVVRIQFFVCSFVRSFFSFFLLGHRSAAAAAAVD

SEQ ID NO: 14659 - protein, 181 aa, Zea mays subsp. mays
  misc_feature (1)..(181): Ceres Seq. ID no. 11049604
ISASATASLTRRRFGWIVCLLQTAMAAAATATPSVAPESGDRKAVAPPVDAVDLELELEEKHVLAVDDSSVDRAVIAKILRSSKYRVTTVDSATRALELLALGLVPDVNMIITDYWMPGMTGYELLKHVKESSALRAIPVVIMSSENVPTRISRCLEEGAEDFLLKPVRPADVSRLCSRIR

SEQ ID NO: 14660 - protein, 157 aa, Zea mays subsp. mays
  misc_feature (1)..(157): Ceres Seq. ID no. 11049605
MAAAATATPSVAPESGDRKAVAPPVDAVDLELELEEKHVLAVDDSSVDRAVIAKILRSSKYRVTTVDSATRALELLALGLVPDVNMIITDYWMPGMTGYELLKHVKESSALRAIPVVIMSSENVPTRISRCLEEGAEDFLLKPVRPADVSRLCSRIR

SEQ ID NO: 14661 - DNA, 2123 bp, Zea mays subsp. mays
  misc_feature (1)..(2123): Ceres Seq. ID no. 11049617
ttcacgtgcgttgcgtgccctgcccccatggagaccctcctggctggcaaccccgccaacggcgtggcgaagccgacgtgcaacggcgtcggcgccctgcccgtggccaactcccacgccatcatcgccacgccggcggcggctgcggcgacgctggccccggctggcgccacgctcggccggcacctggcgcgccgcctcgtgcagatcggcgcctccgacgtcttcgccgtcccgggggacttcaacctcaccctgctcgactacctcatcgccgagccgggcctgaccctcgtcggctgctgcaacgaactcaacgccgggtacgccgccgacgggtacgcgcggtcgcggggcgtcggcgcctgcgccgtcacgttcaccgtcggtgggctcagcgtgctcaacgccatcgccggcgcgtacagcgagaacctccccgtcgtctgcatcgtgggcgggcccaactccaacgactacggcaccaaccgcatcctgcaccacaccatcggcctccctgacttctcccaggagctccgctgcttccagacgatcacctgctaccaggccatcatcaacaacctggacgacgcgcatgagcagatcgacacggccatcgcgacggcgctgagggagagcaagcccgtgtacatcagcgtcagctgcaacctggccggcctctcccacccgaccttcagccgggatccggtgcccatgttcatctcgccgaggctgagcaacaaggccaacctggagtacgccgtggaggcggcggccgacttcctcaacaaggcggtgaagccggtgatggtgggcgggcccaagatccgggtggccaaggccagggaggcgttcgccgccgtcgcggacgccagcgggtaccctttcgccgtcatgccggccgccaagggcctggtgccggagcaccacccgcgcttcatcggcacctactggggcgccgtcagcaccaccttctgcgccgagatcgtggagtccgccgacgcctacctcttcgccgggcccatcttcaacgactacagctccgtcggctactccctcctgctcaagcgggagaaggccgtcatcgtgcagcccgaccgcatggtggtcggcgacggcccggcgttcggctgcatcctcatgcccgagttcctccgcgcgctcgccaagcgcctcaggcgcaacaccacggcgtacgacaactaccgccgcatcttcgtccccgaccgcgagccgcccaacggcaagcccaacgagccgcttagggtcaacgtcctcttcaagcacatcaagggcatgctgtccggcgactccgcggtcgtcgccgagaccggcgactcgtggttcaactgccagaagctcaggctccccgagggctgcggctacgagttccagatgcagtacggctccatcgggtggtcggtcggcgcgacgctcgggtacgcccaggcggccaaggacaagcgtgtcatcgcgtgcatcggcgacggaagcttccaggtgacggcgcaggacgtgtccacgatgctccggtgcgggcagaagagcatcatcttcctcatcaacaacggcggctacaccatcgaggtggagatccacgatggcccgtacaacgtgatcaagaactgggactacacgggcctggtcaacgccatccataactccgagggcaactgctggaccatgaaggttcggacggaggagcagctcaaggaggcgatcgccatggcgacgggcgacaagaaagactgcctctgcttcatcgaggtaatcgtgcacaaggacgacacgagcaaggagctcctcgagtgggggtccagggtctccgccgccaacagcaggccgcccaacccccagtgatgagcccgtcgatcggtctcgagcgttcctgcaatggcgcctgcgtctgcgtctgtctgccctgaaattttttcgggtcgtttactcgttttcagtcagttactcagtttgtccgtcttcgtcgagcagaactacatccctgctgagggaagctgccaatctttatcctacgatgataatgtctgcaatttcacttgcttccaattgagttctgttacaaatttttgcaacattttttcccgcatcaataaaattcgttcgcg

SEQ ID NO: 14662 - protein, 619 aa, Zea mays subsp. mays
  misc_feature (1)..(619): Ceres Seq. ID no. 11049618
FTCVACPAPMETLLAGNPANGVAKPTCNGVGALPVANSHAIIATPAAAAATLAPAGATLGRHLARRLVQIGASDVFAVPGDFNLTLLDYLIAEPGLTLVGCCNELNAGYAADGYARSRGVGACAVTFTVGGLSVLNAIAGAYSENLPVVCIVGGPNSNDYGTNRILHHTIGLPDFSQELRCFQTITCYQAIINNLDDAHEQIDTAIATALRESKPVYISVSCNLAGLSHPTFSRDPVPMFISPRLSNKANLEYAVEAAADFLNKAVKPVMVGGPKIRVAKAREAFAAVADASGYPFAVMPAAKGLVPEHHPRFIGTYWGAVSTTFCAEIVESADAYLFAGPIFNDYSSVGYSLLLKREKAVIVQPDRMVVGDGPAFGCILMPEFLRALAKRLRRNTTAYDNYRRIFVPDREPPNGKPNEPLRVNVLFKHIKGMLSGDSAVVAETGDSWFNCQKLRLPEGCGYEFQMQYGSIGWSVGATLGYAQAAKDKRVIACIGDGSFQVTAQDVSTMLRCGQKSIIFLINNGGYTIEVEIHDGPYNVIKNWDYTGLVNAIHNSEGNCWTMKVRTEEQLKEAIAMATGDKKDCLCFIEVIVHKDDTSKELLEWGSRVSAANSRPPNPQ

SEQ ID NO: 14663 - protein, 610 aa, Zea mays subsp. mays
  misc_feature (1)..(610): Ceres Seq. ID no. 11049619
METLLAGNPANGVAKPTCNGVGALPVANSHAIIATPAAAAATLAPAGATLGRHLARRLVQIGASDVFAVPGDFNLTLLDYLIAEPGLTLVGCCNELNAGYAADGYARSRGVGACAVTFTVGGLSVLNAIAGAYSENLPVVCIVGGPNSNDYGTNRILHHTIGLPDFSQELRCFQTITCYQAIINNLDDAHEQIDTAIATALRESKPVYISVSCNLAGLSHPTFSRDPVPMFISPRLSNKANLEYAVEAAADFLNKAVKPVMVGGPKIRVAKAREAFAAVADASGYPFAVMPAAKGLVPEHHPRFIGTYWGAVSTTFCAEIVESADAYLFAGPIFNDYSSVGYSLLLKREKAVIVQPDRMVVGDGPAFGCILMPEFLRALAKRLRRNTTAYDNYRRIFVPDREPPNGKPNEPLRVNVLFKHIKGMLSGDSAVVAETGDSWFNCQKLRLPEGCGYEFQMQYGSIGWSVGATLGYAQAAKDKRVIACIGDGSFQVTAQDVSTMLRCGQKSIIFLINNGGYTIEVEIHDGPYNVIKNWDYTGLVNAIHNSEGNCWTMKVRTEEQLKEAIAMATGDKKDCLCFIEVIVHKDDTSKELLEWGSRVSAANSRPPNPQ

SEQ ID NO: 14664 - protein, 381 aa, Zea mays subsp. mays
  misc_feature (1)..(381): Ceres Seq. ID no. 11049620
MFISPRLSNKANLEYAVEAAADFLNKAVKPVMVGGPKIRVAKAREAFAAVADASGYPFAVMPAAKGLVPEHHPRFIGTYWGAVSTTFCAEIVESADAYLFAGPIFNDYSSVGYSLLLKREKAVIVQPDRMVVGDGPAFGCILMPEFLRALAKRLRRNTTAYDNYRRIFVPDREPPNGKPNEPLRVNVLFKHIKGMLSGDSAVVAETGDSWFNCQKLRLPEGCGYEFQMQYGSIGWSVGATLGYAQAAKDKRVIACIGDGSFQVTAQDVSTMLRCGQKSIIFLINNGGYTIEVEIHDGPYNVIKNWDYTGLVNAIHNSEGNCWTMKVRTEEQLKEAIAMATGDKKDCLCFIEVIVHKDDTSKELLEWGSRVSAANSRPPNPQ

SEQ ID NO: 14665 - DNA, 528 bp, Zea mays subsp. mays
  misc_feature (1)..(528): Ceres Seq. ID no. 11049666
ctgttcgaaccatctgagctgacgtcgtggtcgttctacagagccggtatcgccgagttcgtggccacttttctgttcctgtacatcaccatcttgacggttatgggcgtcagtcgttctgattcaaagtgcaaaaccgtcggaattcaaggaatcgcttgggcttccggcggcatgatcttcgccctcgtgtactgcacagctggaatttcaggtggtcacataaacccggccgtgacttttgggttgttcttggggaggaagttgtcgttgacgaggacaatattctacatcgtgatgcagtgcttgggtgcgatctgtggtgcaggggtggtgaagggttttgagggcaagaaattatacggcgacagcggcggtggtgtcaactatgtgcacagcggttacaccaaaggagacggcctcggtgctgagattgttggcaccctcatcctcgtctacaccgtcttctccgccaccgatgccaagcgtagcgctcgtgactcccacgtccccattttggcgccgttg

SEQ ID NO: 14666 - protein, 176 aa, Zea mays subsp. mays
  misc_feature (1)..(176): Ceres Seq. ID no. 11049667
LFEPSELTSWSFYRAGIAEFVATFLFLYITILTVMGVSRSDSKCKTVGIQGIAWASGGMIFALVYCTAGISGGHINPAVTFGLFLGRKLSLTRTIFYIVMQCLGAICGAGVVKGFEGKKLYGDSGGGVNYVHSGYTKGDGLGAEIVGTLILVYTVFSATDAKRSARDSHVPILAPL

SEQ ID NO: 14667 - protein, 142 aa, Zea mays subsp. mays
  misc_feature (1)..(142): Ceres Seq. ID no. 11049668
MGVSRSDSKCKTVGIQGIAWASGGMIFALVYCTAGISGGHINPAVTFGLFLGRKLSLTRTIFYIVMQCLGAICGAGVVKGFEGKKLYGDSGGGVNYVHSGYTKGDGLGAEIVGTLILVYTVFSATDAKRSARDSHVPILAPL

SEQ ID NO: 14668 - protein, 118 aa, Zea mays subsp. mays
  misc_feature (1)..(118): Ceres Seq. ID no. 11049669
MIFALVYCTAGISGGHINPAVTFGLFLGRKLSLTRTIFYIVMQCLGAICGAGVVKGFEGKKLYGDSGGGVNYVHSGYTKGDGLGAEIVGTLILVYTVFSATDAKRSARDSHVPILAPL

SEQ ID NO: 14669 - DNA, 1380 bp, Zea mays subsp. mays
  misc_feature (1)..(1380): Ceres Seq. ID no. 11049673
ggcacgagaggacacaagcgagcgctagccagaagagcagctgcaggtactattatcatcgtcgtcgtcgtcgccaggatgaccgtcgtcgacgccgtcgtctcctccaccgatgccggcgcccctgccgccgccgccgcaccggtaccggcggggaacgggcagaccgtgtgcgtcaccggcgcggccgggtacatcgcctcgtggttggtgaagctgctgctcgagaagggatacactgtgaagggcaccgtgaggaacccagatgacccgaagaacgcgcacctcagggcgctggacggcgccgccgagcggctgatcctctgcaaggccgatctgctggactacgacgccatctgccgcgccgtgcagggctgccagggcgtcttccacaccgcctcccccgtcaccgacgacccggagcaaatggtggagccggcggtgcgcggcaccgagtacgtgatcaacgcggcggcggaggccggcacggtgcggcgggtggtgttcacgtcgtccatcggcgccgtgaccatggaccccaagcgcgggcccgacgtcgtggtcgacgagtcgtgctggagcgacctcgagttctgcgagaaaaccaggaactggtactgctacggcaaggcggtggcggagcaggcggcgtgggaggcggcccggcggcggggcgtggacctggtggtggtgaaccccgtgctggtggtgggccccctgctgcaggcgacggtgaacgccagcatcgcgcacatcctcaagtacctggacggctcggcccgcaccttcgccaacgccgtgcaggcgtacgtggacgtgcgcgacgtggccgacgcgcacctccgcgtcttcgagagcccccgcgcgtccggccgccacctctgcgccgagcgcgtcctccaccgcgaggacgtcgtccgcatcctcgccaagctcttccccgagtaccccgtcccagccaggtgctccgacgaggtgaatccgcggaagcagccgtacaagttctccaaccagaagctccgggacctggggctgcagttccggccggtcagccagtcgctttacgacacggtgaagaacctccaggagaagggccacctgccggtgctcggagagcggacgacgacggaggccgccgacaaggatgcccccgcggccgagatgcagcagggagggatcgccatccgtgcctgagagggcgatgccacacatgaacacaaagcaatgttcatactgctgccctgcacctgcaccttcccctgctgtgtaaacaggcctgtgtttgttctggctgatagtgatgtaccctaagacttgtaacgtcatgttcgttcttgtgaactatagcgagtgaataaaattggttaatgttggatattc

SEQ ID NO: 14670 - protein, 397 aa, Zea mays subsp. mays
  misc_feature (1)..(397): Ceres Seq. ID no. 11049674
GTRGHKRALARRAAAGTIIIVVVVARMTVVDAVVSSTDAGAPAAAAAPVPAGNGQTVCVTGAAGYIASWLVKLLLEKGYTVKGTVRNPDDPKNAHLRALDGAAERLILCKADLLDYDAICRAVQGCQGVFHTASPVTDDPEQMVEPAVRGTEYVINAAAEAGTVRRVVFTSSIGAVTMDPKRGPDVVVDESCWSDLEFCEKTRNWYCYGKAVAEQAAWEAARRRGVDLVVVNPVLVVGPLLQATVNASIAHILKYLDGSARTFANAVQAYVDVRDVADAHLRVFESPRASGRHLCAERVLHREDVVRILAKLFPEYPVPARCSDEVNPRKQPYKFSNQKLRDLGLQFRPVSQSLYDTVKNLQEKGHLPVLGERTTTEAADKDAPAAEMQQGGIAIRA

SEQ ID NO: 14671 - protein, 371 aa, Zea mays subsp. mays
  misc_feature (1)..(371): Ceres Seq. ID no. 11049675
MTVVDAVVSSTDAGAPAAAAAPVPAGNGQTVCVTGAAGYIASWLVKLLLEKGYTVKGTVRNPDDPKNAHLRALDGAAERLILCKADLLDYDAICRAVQGCQGVFHTASPVTDDPEQMVEPAVRGTEYVINAAAEAGTVRRVVFTSSIGAVTMDPKRGPDVVVDESCWSDLEFCEKTRNWYCYGKAVAEQAAWEAARRRGVDLVVVNPVLVVGPLLQATVNASIAHILKYLDGSARTFANAVQAYVDVRDVADAHLRVFESPRASGRHLCAERVLHREDVVRILAKLFPEYPVPARCSDEVNPRKQPYKFSNQKLRDLGLQFRPVSQSLYDTVKNLQEKGHLPVLGERTTTEAADKDAPAAEMQQGGIAIRA

SEQ ID NO: 14672 - protein, 255 aa, Zea mays subsp. mays
  misc_feature (1)..(255): Ceres Seq. ID no. 11049676
MVEPAVRGTEYVINAAAEAGTVRRVVFTSSIGAVTMDPKRGPDVVVDESCWSDLEFCEKTRNWYCYGKAVAEQAAWEAARRRGVDLVVVNPVLVVGPLLQATVNASIAHILKYLDGSARTFANAVQAYVDVRDVADAHLRVFESPRASGRHLCAERVLHREDVVRILAKLFPEYPVPARCSDEVNPRKQPYKFSNQKLRDLGLQFRPVSQSLYDTVKNLQEKGHLPVLGERTTTEAADKDAPAAEMQQGGIAIRA

SEQ ID NO: 14673 - DNA, 1422 bp, Zea mays subsp. mays
  misc_feature (1)..(1422): Ceres Seq. ID no. 11049748
ggcacgagctcggctgctacgtagctatatatagctgcagaacagttttagttaccggactgtaggcacaccaagctagatatccaaggggcccccccggaaactagctagctaggatgccaacagcagaggcgacgacgcccgtgccgccggagctgtcctccgggcaagggcggacggtttgcgtgaccggagctggagggttcattgcctcctggctcgtcaagcgcctcctggagaagggctacacagtccgcggcacggtcaggaaccctgtggatccaaagaacgaccacctgagggcccttgacggcgccgtcgaccgtctcgtcctcctccgcgccgacctgctggacccacagagccttgccgaggccttctccggctgtgacggcgtcttccacgccgcctccccggtcaccgatgaccctgagatgatgatcgagccagcgatccggggcacgcgctacgtgatggcggcggcggacgacgccggagtgaagcgcgtcgtgttcacgtcctccatcggcaccgtgtacatgaacccctaccgtgaccccagcaagcctgtggacgacacctgctggagcgacctcgagtattgcaagaacacccagaactggtactgctacgccaagacggtggcggagcagggcgcgtgggaggtggcgcggaagcgagggctggacctggtggtggtgaacccggtgctggtgctgggcccgctgctgcagccgacggtgaacgccagcacggaccacgtgatgaagtacctgacggggtcggccacgacctacgtgaacgcggcgcaggcgtacgtgcacgtcagggacgtggccgaggcgcacgtccgggtgtacgaggcgccccacgcgcacggccgctacatctgcgccgagagcaccctgcaccgcggcgacctctgccgcgtcctcgccaagctcttcccggagtaccccgtacccaccaagtgcaaggaccaggttaaccctccggtggtaggatacaagttcaccaaccagaggctcaaggatctggggatggacttcgtgccggtcctgcagtgcctctacgagacggtcaccagcctccaggagaaaggcatgctgcccgtgcttccgacaaaacaagaccatgaccaactcggcaaatcatgatcatattcatatccctcgttgacgatactagctgctgctaccacgcatatcatatcatatatataagatatatatatatatagtggattcatatagttaaccttatatatatgtgtgtgtgtgtgtgttattgtgtgttattagtgtgtacaattaaatggcaactctaatgggtgcatgcatctgcatgcatgctttcctgacaagtgccacacatgcatgcaatgtatctctttggacgatttatatacaatactccgttgcc

SEQ ID NO: 14674 - protein, 346 aa, Zea mays subsp. mays
  misc_feature (1)..(346): Ceres Seq. ID no. 11049749
MPTAEATTPVPPELSSGQGRTVCVTGAGGFIASWLVKRLLEKGYTVRGTVRNPVDPKNDHLRALDGAVDRLVLLRADLLDPQSLAEAFSGCDGVFHAASPVTDDPEMMIEPAIRGTRYVMAAADDAGVKRVVFTSSIGTVYMNPYRDPSKPVDDTCWSDLEYCKNTQNWYCYAKTVAEQGAWEVARKRGLDLVVVNPVLVLGPLLQPTVNASTDHVMKYLTGSATTYVNAAQAYVHVRDVAEAHVRVYEAPHAHGRYICAESTLHRGDLCRVLAKLFPEYPVPTKCKDQVNPPVVGYKFTNQRLKDLGMDFVPVLQCLYETVTSLQEKGMLPVLPTKQDHDQLGKS

SEQ ID NO: 14675 - protein, 240 aa, Zea mays subsp. mays
  misc_feature (1)..(240): Ceres Seq. ID no. 11049750
MMIEPAIRGTRYVMAAADDAGVKRVVFTSSIGTVYMNPYRDPSKPVDDTCWSDLEYCKNTQNWYCYAKTVAEQGAWEVARKRGLDLVVVNPVLVLGPLLQPTVNASTDHVMKYLTGSATTYVNAAQAYVHVRDVAEAHVRVYEAPHAHGRYICAESTLHRGDLCRVLAKLFPEYPVPTKCKDQVNPPVVGYKFTNQRLKDLGMDFVPVLQCLYETVTSLQEKGMLPVLPTKQDHDQLGKS

SEQ ID NO: 14676 - protein, 239 aa, Zea mays subsp. mays
  misc_feature (1)..(239): Ceres Seq. ID no. 11049751
MIEPAIRGTRYVMAAADDAGVKRVVFTSSIGTVYMNPYRDPSKPVDDTCWSDLEYCKNTQNWYCYAKTVAEQGAWEVARKRGLDLVVVNPVLVLGPLLQPTVNASTDHVMKYLTGSATTYVNAAQAYVHVRDVAEAHVRVYEAPHAHGRYICAESTLHRGDLCRVLAKLFPEYPVPTKCKDQVNPPVVGYKFTNQRLKDLGMDFVPVLQCLYETVTSLQEKGMLPVLPTKQDHDQLGKS

SEQ ID NO: 14677 - DNA, 1999 bp, Zea mays subsp. mays
  misc_feature (1)..(1999): Ceres Seq. ID no. 11049822
ctcgagatccattgtgctggaaagccgacgcgcccgttttctcctgaaaacagaaggctccggcctccggcatccgccaaaaaggggaaaaaaggagagataacacacacacacacaaaccccaatcccctgcggcggcgatggacccgtcatcggcgggctccggcggcaactccctcccgtccgtcggccccgacgggcagaaacggcgcgtgtgctacttctacgacccggatgtgggcaactactactacgggcagggccatccgatgaagccgcaccgcatccggatgacgcactcgctgctggcgcgctacggcctcctcaaccaaatgcaggtgtaccgccccaacccggcccgcgaacgcgaactctgccgcttccacgccgaggaatacatcaacttcctgcgctccgtcacgccggaaacgcagcaggaccagatccgcctgctcaagcgcttcaacgtcggcgaggagtgccccgtcttggacggcctttacagcttctgccagacctatgcgggcgcctccgtcggcggggccgtcaagttcaaccacggccatgacatcgcaatcaactggtcggggggcctgcaccacgccaagaagtgcgaggcgtcgggcttctgttacgtcaatgacatcgtgctcgccatactcgagctgctcaagcatcacgagagagttctgtatgtcgatatcgatatccaccatggtgatggagtggaggaggctttctacacaacagatagggttatgactgtctcgttccacaagtttggtgattatttcccaggaacaggggatatccgtgacattgggcactcaaaagggaagtactactccctgaatgtccctctagatgatgggattgatgatgaaagctaccagtccctttttaagccaatcatgggcaaagttatggaggttttccgccctggtgcagttgtgcttcagtgtggtgctgattccttgtctggggataggttgggctgcttcaacctctcaatcaaaggtcatgcggaatgtgttaggtatatgaggtctttcaacgttccattgttgctccttggtggtggtggatataccataagaaatgttgcacgctgttggtgttatgagactggagttgctcttggccaagagcctgaagacaagatgcctgttaatgagtactatgaatacttcggtccagattacactcttcatgttgcaccaagtaacatggagaacaaaaatacacgacaacaactggatgatatacgatctaaactttcaaaacttcgacatgctcctagtgtccactttcaagagagagttcctgacacagaaatacctgagcaagatgaagatcaagatgatccagatgaacgacatgatcctgactctgatatggaagtggatgaccacaaggctgtggaagagtcatcgaggaggagcattctaggtataaaaatcaagagagaatttggtgaaaatgcgaccagagtacaggatggtggcagggttgcatctgaacatagaggactggaacccatggcagaagacattggttcctccaagcaagctcctcaggcagatgccagtgcaatggccatcgatgaaccaagcaatgtcaagaatgaacctgagagctcaactaaattgcaaggccaagcagctgcgtaccacaagccatagctgcgaccatcaagagttgctgggtttctgctaggcaacttcctgcttgatttggacagtccagaaaacagaagtgaatccgcaatacgtccctgccatttcaaatttgacttggttacacctatctgtgacaatgttaatgtaatgagatcccatggcactagtgaagttcccaggtgtccacctgggattgcttgcggttgagagagacgatagtctgatgacccatgtatacatgaagcccatgatctcagttgtacagtcattagccaatacaaatatgcagtggactaaagggtgattcattgcgtgttctt

SEQ ID NO: 14678 - protein, 513 aa, Zea mays subsp. mays
  misc_feature (1)..(513): Ceres Seq. ID no. 11049823
MDPSSAGSGGNSLPSVGPDGQKRRVCYFYDPDVGNYYYGQGHPMKPHRIRMTHSLLARYGLLNQMQVYRPNPARERELCRFHAEEYINFLRSVTPETQQDQIRLLKRFNVGEECPVLDGLYSFCQTYAGASVGGAVKFNHGHDIAINWSGGLHHAKKCEASGFCYVNDIVLAILELLKHHERVLYVDIDIHHGDGVEEAFYTTDRVMTVSFHKFGDYFPGTGDIRDIGHSKGKYYSLNVPLDDGIDDESYQSLFKPIMGKVMEVFRPGAVVLQCGADSLSGDRLGCFNLSIKGHAECVRYMRSFNVPLLLLGGGGYTIRNVARCWCYETGVALGQEPEDKMPVNEYYEYFGPDYTLHVAPSNMENKNTRQQLDDIRSKLSKLRHAPSVHFQERVPDTEIPEQDEDQDDPDERHDPDSDMEVDDHKAVEESSRRSILGIKIKREFGENATRVQDGGRVASEHRGLEPMAEDIGSSKQAPQADASAMAIDEPSNVKNEPESSTKLQGQAAAYHKP

SEQ ID NO: 14679 - protein, 470 aa, Zea mays subsp. mays
  misc_feature (1)..(470): Ceres Seq. ID no. 11049824
MKPHRIRMTHSLLARYGLLNQMQVYRPNPARERELCRFHAEEYINFLRSVTPETQQDQIRLLKRFNVGEECPVLDGLYSFCQTYAGASVGGAVKFNHGHDIAINWSGGLHHAKKCEASGFCYVNDIVLAILELLKHHERVLYVDIDIHHGDGVEEAFYTTDRVMTVSFHKFGDYFPGTGDIRDIGHSKGKYYSLNVPLDDGIDDESYQSLFKPIMGKVMEVFRPGAVVLQCGADSLSGDRLGCFNLSIKGHAECVRYMRSFNVPLLLLGGGGYTIRNVARCWCYETGVALGQEPEDKMPVNEYYEYFGPDYTLHVAPSNMENKNTRQQLDDIRSKLSKLRHAPSVHFQERVPDTEIPEQDEDQDDPDERHDPDSDMEVDDHKAVEESSRRSILGIKIKREFGENATRVQDGGRVASEHRGLEPMAEDIGSSKQAPQADASAMAIDEPSNVKNEPESSTKLQGQAAAYHKP

SEQ ID NO: 14680 - protein, 463 aa, Zea mays subsp. mays
  misc_feature (1)..(463): Ceres Seq. ID no. 11049825
MTHSLLARYGLLNQMQVYRPNPARERELCRFHAEEYINFLRSVTPETQQDQIRLLKRFNVGEECPVLDGLYSFCQTYAGASVGGAVKFNHGHDIAINWSGGLHHAKKCEASGFCYVNDIVLAILELLKHHERVLYVDIDIHHGDGVEEAFYTTDRVMTVSFHKFGDYFPGTGDIRDIGHSKGKYYSLNVPLDDGIDDESYQSLFKPIMGKVMEVFRPGAVVLQCGADSLSGDRLGCFNLSIKGHAECVRYMRSFNVPLLLLGGGGYTIRNVARCWCYETGVALGQEPEDKMPVNEYYEYFGPDYTLHVAPSNMENKNTRQQLDDIRSKLSKLRHAPSVHFQERVPDTEIPEQDEDQDDPDERHDPDSDMEVDDHKAVEESSRRSILGIKIKREFGENATRVQDGGRVASEHRGLEPMAEDIGSSKQAPQADASAMAIDEPSNVKNEPESSTKLQGQAAAYHKP

SEQ ID NO: 14681 - DNA, 1547 bp, Zea mays subsp. mays
  misc_feature (1)..(1547): Ceres Seq. ID no. 11049826
ttcggcacgagaaacctttcggtttctcgagcgcaatgcctctcgctgcagtgctccttcccctcctcgtcctcggcgcgtcgtcggtgtgtcaaggtcaaggcgctgcgagccacaacatcacggccatcctggcggcgtacccggagttcaccgacttcagcgctgccctggtcagcaccggcgccgcggcggagatcgaccgccgcagcaccgtcaccgtcctcgccgtcgacaacgccgtcatggcgcggctaaaggcgcagaagctgcagctcgacgacctgcagcgcgtgatctacctccacgtcctcctggactacttcgacgccgccaagctaggcagcatccagggcggtttcgcccaggccgctagcctctaccaggcctccggcaaggcgcaggggagcgacgggatcgtcaacatcaccgtgttccccgacggccgcgtggcggcgttcacgccgtcgggcccctccaacaggttgccgaccgccttctaccaacgatccatcaaggaacaaccgtactacatcgccgtcctgcaggtgagggacctgatctggtctccggcgccggcggacggggtgcaggctccaccgcccgcgccgcagcccgacgcggcgccggggttgacggatctgctgtccaagaacggctgcgggggcttcgccagcctcctcgccgcgacggccgacgcagtcaccaagtacgacagcagcgccgccgggctcaccgtcttctgcccggccgacgaggcggtggaggccttcaactccaccttcaagaacctcaccgccgacgcccagctcgcgctcctgctgtaccacggcgtggcggaacactactccgcgcagtctctcaaggcgatcaatggggacgtaagcacgcttgcctccgacggatccaagaacaacaacgggtacaacctaacgatacgtgccgacggggacacagtgaaaatctcgtctgcatctgccagcgccgccacggtgaccaagacgctgctcgacaaggcgccgctctccgtctacctcatcgacgcggtgctcctgccaaggcgcagtctaacgacgaccagggacacactgcgcccgcccctgcgccggcctcctcgcctgcacatgcacctacacctgcccttgcgccggtctcgccgtcgcctgcccctgtaccggtctcgccgtcgccgtcgccgtcgcctgcacatgcacccacacccccacttgcccctgctccggtgactgcacctgcgcccaggcgtcgcccagcgccatcgccagagcacactaccccagctccttcgccagacgcggacggccaaccgcctgcagatcagaagaacaacgcagcaagggacacggcatcttggactatcggcgcggcgctggcgatcgtgtgcctcttgtcgtgaagggtttaaggctttaagcttagatatattgacgccgattgggatccgtcatctcgccgccaataccagtgtacactgaagacaatgtttatgggcatgcattggccaaaataatattattctgcttccgcct

SEQ ID NO: 14682 - protein, 413 aa, Zea mays subsp. mays
  misc_feature (1)..(413): Ceres Seq. ID no. 11049827
RHEKPFGFSSAMPLAAVLLPLLVLGASSVCQGQGAASHNITAILAAYPEFTDFSAALVSTGAAAEIDRRSTVTVLAVDNAVMARLKAQKLQLDDLQRVIYLHVLLDYFDAAKLGSIQGGFAQAASLYQASGKAQGSDGIVNITVFPDGRVAAFTPSGPSNRLPTAFYQRSIKEQPYYIAVLQVRDLIWSPAPADGVQAPPPAPQPDAAPGLTDLLSKNGCGGFASLLAATADAVTKYDSSAAGLTVFCPADEAVEAFNSTFKNLTADAQLALLLYHGVAEHYSAQSLKAINGDVSTLASDGSKNNNGYNLTIRADGDTVKISSASASAATVTKTLLDKAPLSVYLIDAVLLPRRSLTTTRDTLRPPLRRPPRLHMHLHLPLRRSRRRLPLYRSRRRRRRRLHMHPHPHLPLLR

SEQ ID NO: 14683 - protein, 402 aa, Zea mays subsp. mays
  misc_feature (1)..(402): Ceres Seq. ID no. 11049828
MPLAAVLLPLLVLGASSVCQGQGAASHNITAILAAYPEFTDFSAALVSTGAAAEIDRRSTVTVLAVDNAVMARLKAQKLQLDDLQRVIYLHVLLDYFDAAKLGSIQGGFAQAASLYQASGKAQGSDGIVNITVFPDGRVAAFTPSGPSNRLPTAFYQRSIKEQPYYIAVLQVRDLIWSPAPADGVQAPPPAPQPDAAPGLTDLLSKNGCGGFASLLAATADAVTKYDSSAAGLTVFCPADEAVEAFNSTFKNLTADAQLALLLYHGVAEHYSAQSLKAINGDVSTLASDGSKNNNGYNLTIRADGDTVKISSASASAATVTKTLLDKAPLSVYLIDAVLLPRRSLTTTRDTLRPPLRRPPRLHMHLHLPLRRSRRRLPLYRSRRRRRRRLHMHPHPHLPLLR

SEQ ID NO: 14684 - protein, 332 aa, Zea mays subsp. mays
  misc_feature (1)..(332): Ceres Seq. ID no. 11049829
MARLKAQKLQLDDLQRVIYLHVLLDYFDAAKLGSIQGGFAQAASLYQASGKAQGSDGIVNITVFPDGRVAAFTPSGPSNRLPTAFYQRSIKEQPYYIAVLQVRDLIWSPAPADGVQAPPPAPQPDAAPGLTDLLSKNGCGGFASLLAATADAVTKYDSSAAGLTVFCPADEAVEAFNSTFKNLTADAQLALLLYHGVAEHYSAQSLKAINGDVSTLASDGSKNNNGYNLTIRADGDTVKISSASASAATVTKTLLDKAPLSVYLIDAVLLPRRSLTTTRDTLRPPLRRPPRLHMHLHLPLRRSRRRLPLYRSRRRRRRRLHMHPHPHLPLLR

SEQ ID NO: 14685 - DNA, 1776 bp, Zea mays subsp. mays
  misc_feature (1)..(1776): Ceres Seq. ID no. 11049904
tagctctctctctctcccgtgaacgacgacgtcgctaatggcggtggtttattacctgctgctggccgggctgatcgcctgctctcatgcactagcggcaggcacgcctgcgctcggagacgatcgcggccgtccctggccagcctccctcgccgcgctggccttggacggcaagctccggaccgacagcaacgcgacggcggcggcctcgacggacttcggcaacatcacgtcggcgctcccggcggcggtcctgtacccgtcgtccacggccgacctggtggcgctgctgagcgcggccaactccaccccggggtggccctacaccatcgcgttccgcggccgcggccactccctcatgggccaggccttcgcccccggcggcgtcgtcgtcaacatggcgtccctgggcgacgccgccgcgccgccgcgcatcaacgtgtccgcggacggccgctacgtggacgccggcggcgagcaggtgtggatcgacgtgctgcgcgcgtctctggcgcgcggcgtggcgccgcgctcctggaccgactacctctacctcaccgtcggcggcacgctgtccaacgcaggcatcagcggccaggcgttccgccacggcccacagatatctaacgtgctggagatggacgttatcaccggccatggggagatggtgacgtgctccaagcagctgaacgcggacctgttcgacgccgtcctgggcgggctggggcagttcggagtgatcacccgagcccggatcgcggtggagccggcgccggcgcgggcgcggtgggtgcggctcgtgtacaccgacttcgcggcgttcagcgccgaccaggagcggctgaccgccccgcggcccggcggcggcggcgcgtcgttcggcccgatgagctacgtggaagggtcggtgttcgtgaaccagagcctggcgaccgacctggcgaacacggggttcttcaccgacgccgacgtcgcccggatcgtcgcgctcgccggggagcggaacgccaccaccgtgtacagcatcgaggccacgctcaactacgacaacgccacggcggcggcggcggcggtggaccaggagctcgcgtccgtgctgggcacgctgagctacgtggaggggttcgcgttccagcgcgacgtggcatacgcggcgttccttgaccgggtgcacggcgaggaggtggcgctcaacaagctggggctgtggcgggtgccgcacccgtggctcaacatgttcgtgccgcgctcgcgcatcgccgacttcgaccgcggcgtgttcaagggcatcctgcagggcaccgacatcgtcggcccgctcatcgtctaccccctcaacaaatccatgtgggacgacggcatgtcggcggcgacgccgtctgaggacgtgttctacgcggtgtcgctgctcttctcgtcggtggcgcccaacgacctggcgaggctgcaggagcagaacaggaggatcctgcgcttctgcgacctcgccgggatccagtacaagacctacctggcgcggcacacggaccgcagtgactgggtccgccacttcggcgccgccaagtggaatcgcttcgtggagatgaagaacaagtacgaccccaagaggctgctctcccccggccaggacatcttcaactgatgatgatagcccatgcatgttttagtttcttgggacaataatgtgaataattcccagctagcggctattaattaatctgtatatagattgatcactgcactgatgtatgtcaaggtcattatttacgttatggt

SEQ ID NO: 14686 - protein, 534 aa, Zea mays subsp. mays
  misc_feature (1)..(534): Ceres Seq. ID no. 11049905
MAVVYYLLLAGLIACSHALAAGTPALGDDRGRPWPASLAALALDGKLRTDSNATAAASTDFGNITSALPAAVLYPSSTADLVALLSAANSTPGWPYTIAFRGRGHSLMGQAFAPGGVVVNMASLGDAAAPPRINVSADGRYVDAGGEQVWIDVLRASLARGVAPRSWTDYLYLTVGGTLSNAGISGQAFRHGPQISNVLEMDVITGHGEMVTCSKQLNADLFDAVLGGLGQFGVITRARIAVEPAPARARWVRLVYTDFAAFSADQERLTAPRPGGGGASFGPMSYVEGSVFVNQSLATDLANTGFFTDADVARIVALAGERNATTVYSIEATLNYDNATAAAAAVDQELASVLGTLSYVEGFAFQRDVAYAAFLDRVHGEEVALNKLGLWRVPHPWLNMFVPRSRIADFDRGVFKGILQGTDIVGPLIVYPLNKSMWDDGMSAATPSEDVFYAVSLLFSSVAPNDLARLQEQNRRILRFCDLAGIQYKTYLARHTDRSDWVRHFGAAKWNRFVEMKNKYDPKRLLSPGQDIFN

SEQ ID NO: 14687 - protein, 427 aa, Zea mays subsp. mays
  misc_feature (1)..(427): Ceres Seq. ID no. 11049906
MGQAFAPGGVVVNMASLGDAAAPPRINVSADGRYVDAGGEQVWIDVLRASLARGVAPRSWTDYLYLTVGGTLSNAGISGQAFRHGPQISNVLEMDVITGHGEMVTCSKQLNADLFDAVLGGLGQFGVITRARIAVEPAPARARWVRLVYTDFAAFSADQERLTAPRPGGGGASFGPMSYVEGSVFVNQSLATDLANTGFFTDADVARIVALAGERNATTVYSIEATLNYDNATAAAAAVDQELASVLGTLSYVEGFAFQRDVAYAAFLDRVHGEEVALNKLGLWRVPHPWLNMFVPRSRIADFDRGVFKGILQGTDIVGPLIVYPLNKSMWDDGMSAATPSEDVFYAVSLLFSSVAPNDLARLQEQNRRILRFCDLAGIQYKTYLARHTDRSDWVRHFGAAKWNRFVEMKNKYDPKRLLSPGQDIFN

SEQ ID NO: 14688 - protein, 414 aa, Zea mays subsp. mays
  misc_feature (1)..(414): Ceres Seq. ID no. 11049907
MASLGDAAAPPRINVSADGRYVDAGGEQVWIDVLRASLARGVAPRSWTDYLYLTVGGTLSNAGISGQAFRHGPQISNVLEMDVITGHGEMVTCSKQLNADLFDAVLGGLGQFGVITRARIAVEPAPARARWVRLVYTDFAAFSADQERLTAPRPGGGGASFGPMSYVEGSVFVNQSLATDLANTGFFTDADVARIVALAGERNATTVYSIEATLNYDNATAAAAAVDQELASVLGTLSYVEGFAFQRDVAYAAFLDRVHGEEVALNKLGLWRVPHPWLNMFVPRSRIADFDRGVFKGILQGTDIVGPLIVYPLNKSMWDDGMSAATPSEDVFYAVSLLFSSVAPNDLARLQEQNRRILRFCDLAGIQYKTYLARHTDRSDWVRHFGAAKWNRFVEMKNKYDPKRLLSPGQDIFN

SEQ ID NO: 14689 - DNA, 5375 bp, Zea mays subsp. mays
  misc_feature (1)..(5375): Ceres Seq. ID no. 11049911
catttcaggaccagagcagaattcctcgtttctttcaaaccgcaagaaaactaagcagcacataattaccatttctgccctccgtcccctctcaactccgtcgtcgcgacctgccgcgccgtcatcgccggcggacccagcgcgtgcagtggaccagtcgccgaacgaaccgcgcagaagagaagggtaaaaacaggactgttggaagtcgagtcgagaagcaacagcaagcagcagcttggggggtaggtggggcaacgcagcagagatagtccaattcgccgccttgccggccactgacctgccggcggcggggtcccctctgttggagccgacggatccgttgccccctcctatccgaacctgatccacccatgggaactccagttggtatcatcgttggttctcatgtttgggtggaagacccaaatctagcttggatagatggagaagttattagcataaaaaacaatgaagtacatgtgcagacatcgaatgggaaaaaggttaccacagacaggtcaaaagtatttcccaaggatatggaagctccaccaggaggagttgatgatatgacaagactttcatacttacatgaacctggtgttctacagaatcttgctacccgctatgaactgaatgaaatatatacttacacaggcagcattttgattgctgtaaatccatttcaaagattgccacatctttatgatacccacatgatggaacagtacaagggtgcagattttggggaattgagtccccatgactttgctatcgcagatgttgcttacagggcaatggataatgaagggaaaagcaactctatattggtcagtggtgaaagtggtgctgggaagactgagacaacgaagatgcttatgagatatttagcacatttaggtgggcgatctggagtagaaggacgtacagtggaacaacaagttttagagtccaacccagttcttgaagcttttggtaatgctaaaactgtgcgaaataacaactcaagtcgctttggcaagtttgttgagatccaatttgacaagactggacggatctcaggagctgctatcagaacttacttgctggaaagatcacgtgtgtgccaaattaattctccagaaagaaattaccattgcttttattttctttgtgccgcaccacctgagtacactcagaggtacaagctgtctgatcctagatctttccattacctcaatcagtcgagctgtattgaggtggatggaatcaatgatgctgaagagtatttagcaacacgaagagctatggatatagttggaatcaatgaggaagagcaggaaggtatattccgggttgtagctgctgtacttcatcttggaaatataaattttgccaagggaacagaaatcgattcttctgtaatcaaggatgataaatccaggttccaccttaatatcgcagcagaacttttgaaatgtgattgccagaatttagagaaggcgctgataacacgagttatagtcacgcctgaagaagttatcactagaacacttgatcctgcttctgcagttgctagcagagacgcattagctaaaataatatactcccgattgtttgattggattgtggaaaaaattaatgtctcaattggacaggacccaaactcaaaacagttaattggagttcttgatatctatggttttgagagcttcaaagttaacagttttgaacagctatgtatcaattatacaaatgaaaagctgcaacaacattttaaccagcacgtgttcaaaatggaacaagaagagtataccagagaagagataaactggagttacatcgagtttgttgataatcaagatgtgctagacttgatagagaagaaaggtggattgattgcacttctggatgaagcatgtatgtttcctagatctacacatgagacgtttgcgcagaagctatatacaacatttaagaataacaagcggtttgccaagccaaagctttcacgcactgattttacagtagtccattatgctggcgatgtgacataccaggctgattatttcttagacaagaacaaagattatgtagtggctgaacatcaggatctgctgaatgcttcttcatgcctattcgtagctggtttattccctcctctcccacaggagacagcaaagtcttcaaaattttcatccattggatcacgttttaagcttcaacttcaatccctcatggaaactttgagctctaccgaaccccactatattagatgtgtgaagccaaataatctccttaagccagctatttttgagaatacaaatgttatacaacaactaagatgtggaggtgttctcgaagctatcaggatcagctgtgctggatatcccacaagaaaaacattttatgaatttgtcaatcgttttggtgtccttgctcctgaagttttagaagggagcaatgatgataagattgcgtgccaaaagattttggaaaaaatgggtctggagaattaccagattggaaaaacaaaggtgtttctaagagctggacagatggctgatttggatgctcgtagagctgaagtattaggaagagcagcaagaatcatacagaggcaaatacgtacatatattgcaaggaaacagtttgctgagcttaaaagatcagcaacacagctgcaatcttttgtcagaggaaccttggctcgtaagttgtatgagtgcatgaggcaggaagcagcagcagtgaaaatacaaaagaatatgcgacgccacaaagcacgggaatcttatttacaattgcaagcagctgcaatcacattgcagacaggtttaagggcaatgtctgctcgcaaagaattcaggttcagaaaggaaacaaaagctgctgtccacatccaagctcaatggcgccgccacagagactactcacattacaagaatctgcaaggagcagctcttacttaccagtgtgcctggaggcaaaggcttgccagaagggagctcaggaagctcaagatggcggcaagagaaacaggagccctaaaagaggccaaggataaacttgagaagcgtgttgaagaactcacctggcgcttaggattggagaagcgattaaggactgaccttgaggaagcaaaagcccaggaaattgctaagctgcaagagacgttgcatgatatgcagcttcaagttgaagagtcaaaggccatggtagttaaggagagggaagctgctagaaaggcaattgaagaagcacctccagtaattaaagagactcctgtgctagtcgaagacacagaaaagattaactcactgacgaccgaagttgaacaactgaaggctttgctgctaactgaaagacaagcaacagaagctgcaaaaagagaacacgctgaatctgaactgagaaatgaagaactaattaagaaatttgagagcgcagagaaaaagattgagcaacttcaggaaactgtccataggctggaggagaaagcaaccaacatggagtctgagaacaaagtgctccgtcaacaagctgttgcaatttctcctacgtcaaaatcattagctgcatatcctaagtctcctttccagctgaaaactccggagaatgggaatgctctaaatggagaagtgaagtcatcaccagatatcacccctatcttaccaaaccccaaggagcttgaggctgaagagaagccacaaaaatcacttaatgaaaagcagcaggaaaatcaagacctactgatcaagtgtgtatcacaagatctgggattctccagtggcaaacctattgcagcttgccttatctacaggtgtcttctacactggagatcattcgaagttgaaagaactggtgtttttgaccgtattattcaaacaattggctctgctattgagtcccaggacaacaatgacaagttggcatattggctctcgaattcatccacactgctgctgctgctgcaacgaacactgaaaacaactggagcagctggattcactcctcaaaggcgcaggtcatctgctgcatcttttgggagggtgttttcggggatgcgagcctcaccacaaagtgctgggcgtgcttttatgggaagtcgcttgattggaggtctaggtgaccttcgtcaagttgaagccaagtaccctgccctgcttttcaagcaacagctcacagctttccttgagaagatctatggaatgataagagacaatttgaaaaaggagatatctcctttgcttggcctttgcatccaggcaccaagaacatcccgtgcaagcctaattaaagggtcacgttcccaagcaaatgccttagctcagcaaactctgattgcacattggcagagcattgtgaaaatattgacaaattacttgaatgttttaaaagcaaattatgtcccttcagtcttaatcagcaaagtgttcactcaaatcttttcatttattaatgttcagttatttaatagtcttcttcttcgacgggagtgctgttcatttagcaacggagaatatgtgaaagctggattggcagaattagagcagtggtgcatttatgcaacagaagagtatgcaggttcttcctgggaagaattaaaacatattaggcaggctgttggattccttgtgattcatcaaaagccaaagaaaacattgaaagaaattaccaacgatctgtgccctgtccttagcatacaacagctatatcgaatcagtacaatgtactgggatgataagtacggtacccacactgtttcatcagatgtcatctcaagtatgagagtaatgatgacagaagattctaataacgcggtcagcagttcgttcctgttggatgatgattccagcattccgttttcggtggacgacatctcgaagtcgatgacagaaatcgaggtaacagatgtcgacatgccacctctgatccgggagaattctggcttcaccttcctacaccaaagaaaggactaacaggggtggtccttccagctgcatgtccctttttgcacattctttttctccgctcaacctgtgcataactcatgtacatacgctcgtgccttttgctctctggtcagggcttgttagatgtattgtctttggtttgattggttggttggttctttcctcgatcctctcccaattttgttgggcgaagggtccacaatctatgtttctccatactgtagtgaaaaggggccggatgcccctggtctccccgagctgcttttggaaaagctcgtggtcattaagcagttaagcttgtggaaaaggttctccacatctaccgagtcgttcgttgtgtcgccttcttcatatggatcatcgccatattgtaaattgcaaatacgattatagttgaaaaaagagatattacagtga

SEQ ID NO: 14690 - protein, 1529 aa, Zea mays subsp. mays
  misc_feature (1)..(1529): Ceres Seq. ID no. 11049912
MGTPVGIIVGSHVWVEDPNLAWIDGEVISIKNNEVHVQTSNGKKVTTDRSKVFPKDMEAPPGGVDDMTRLSYLHEPGVLQNLATRYELNEIYTYTGSILIAVNPFQRLPHLYDTHMMEQYKGADFGELSPHDFAIADVAYRAMDNEGKSNSILVSGESGAGKTETTKMLMRYLAHLGGRSGVEGRTVEQQVLESNPVLEAFGNAKTVRNNNSSRFGKFVEIQFDKTGRISGAAIRTYLLERSRVCQINSPERNYHCFYFLCAAPPEYTQRYKLSDPRSFHYLNQSSCIEVDGINDAEEYLATRRAMDIVGINEEEQEGIFRVVAAVLHLGNINFAKGTEIDSSVIKDDKSRFHLNIAAELLKCDCQNLEKALITRVIVTPEEVITRTLDPASAVASRDALAKIIYSRLFDWIVEKINVSIGQDPNSKQLIGVLDIYGFESFKVNSFEQLCINYTNEKLQQHFNQHVFKMEQEEYTREEINWSYIEFVDNQDVLDLIEKKGGLIALLDEACMFPRSTHETFAQKLYTTFKNNKRFAKPKLSRTDFTVVHYAGDVTYQADYFLDKNKDYVVAEHQDLLNASSCLFVAGLFPPLPQETAKSSKFSSIGSRFKLQLQSLMETLSSTEPHYIRCVKPNNLLKPAIFENTNVIQQLRCGGVLEAIRISCAGYPTRKTFYEFVNRFGVLAPEVLEGSNDDKIACQKILEKMGLENYQIGKTKVFLRAGQMADLDARRAEVLGRAARIIQRQIRTYIARKQFAELKRSATQLQSFVRGTLARKLYECMRQEAAAVKIQKNMRRHKARESYLQLQAAAITLQTGLRAMSARKEFRFRKETKAAVHIQAQWRRHRDYSHYKNLQGAALTYQCAWRQRLARRELRKLKMAARETGALKEAKDKLEKRVEELTWRLGLEKRLRTDLEEAKAQEIAKLQETLHDMQLQVEESKAMVVKEREAARKAIEEAPPVIKETPVLVEDTEKINSLTTEVEQLKALLLTERQATEAAKREHAESELRNEELIKKFESAEKKIEQLQETVHRLEEKATNMESENKVLRQQAVAISPTSKSLAAYPKSPFQLKTPENGNALNGEVKSSPDITPILPNPKELEAEEKPQKSLNEKQQENQDLLIKCVSQDLGFSSGKPIAACLIYRCLLHWRSFEVERTGVFDRIIQTIGSAIESQDNNDKLAYWLSNSSTLLLLLQRTLKTTGAAGFTPQRRRSSAASFGRVFSGMRASPQSAGRAFMGSRLIGGLGDLRQVEAKYPALLFKQQLTAFLEKIYGMIRDNLKKEISPLLGLCIQAPRTSRASLIKGSRSQANALAQQTLIAHWQSIVKILTNYLNVLKANYVPSVLISKVFTQIFSFINVQLFNSLLLRRECCSFSNGEYVKAGLAELEQWCIYATEEYAGSSWEELKHIRQAVGFLVIHQKPKKTLKEITNDLCPVLSIQQLYRISTMYWDDKYGTHTVSSDVISSMRVMMTEDSNNAVSSSFLLDDDSSIPFSVDDISKSMTEIEVTDVDMPPLIRENSGFTFLHQRKD

SEQ ID NO: 14691 - protein, 1473 aa, Zea mays subsp. mays
  misc_feature (1)..(1473): Ceres Seq. ID no. 11049913
MEAPPGGVDDMTRLSYLHEPGVLQNLATRYELNEIYTYTGSILIAVNPFQRLPHLYDTHMMEQYKGADFGELSPHDFAIADVAYRAMDNEGKSNSILVSGESGAGKTETTKMLMRYLAHLGGRSGVEGRTVEQQVLESNPVLEAFGNAKTVRNNNSSRFGKFVEIQFDKTGRISGAAIRTYLLERSRVCQINSPERNYHCFYFLCAAPPEYTQRYKLSDPRSFHYLNQSSCIEVDGINDAEEYLATRRAMDIVGINEEEQEGIFRVVAAVLHLGNINFAKGTEIDSSVIKDDKSRFHLNIAAELLKCDCQNLEKALITRVIVTPEEVITRTLDPASAVASRDALAKIIYSRLFDWIVEKINVSIGQDPNSKQLIGVLDIYGFESFKVNSFEQLCINYTNEKLQQHFNQHVFKMEQEEYTREEINWSYIEFVDNQDVLDLIEKKGGLIALLDEACMFPRSTHETFAQKLYTTFKNNKRFAKPKLSRTDFTVVHYAGDVTYQADYFLDKNKDYVVAEHQDLLNASSCLFVAGLFPPLPQETAKSSKFSSIGSRFKLQLQSLMETLSSTEPHYIRCVKPNNLLKPAIFENTNVIQQLRCGGVLEAIRISCAGYPTRKTFYEFVNRFGVLAPEVLEGSNDDKIACQKILEKMGLENYQIGKTKVFLRAGQMADLDARRAEVLGRAARIIQRQIRTYIARKQFAELKRSATQLQSFVRGTLARKLYECMRQEAAAVKIQKNMRRHKARESYLQLQAAAITLQTGLRAMSARKEFRFRKETKAAVHIQAQWRRHRDYSHYKNLQGAALTYQCAWRQRLARRELRKLKMAARETGALKEAKDKLEKRVEELTWRLGLEKRLRTDLEEAKAQEIAKLQETLHDMQLQVEESKAMVVKEREAARKAIEEAPPVIKETPVLVEDTEKINSLTTEVEQLKALLLTERQATEAAKREHAESELRNEELIKKFESAEKKIEQLQETVHRLEEKATNMESENKVLRQQAVAISPTSKSLAAYPKSPFQLKTPENGNALNGEVKSSPDITPILPNPKELEAEEKPQKSLNEKQQENQDLLIKCVSQDLGFSSGKPIAACLIYRCLLHWRSFEVERTGVFDRIIQTIGSAIESQDNNDKLAYWLSNSSTLLLLLQRTLKTTGAAGFTPQRRRSSAASFGRVFSGMRASPQSAGRAFMGSRLIGGLGDLRQVEAKYPALLFKQQLTAFLEKIYGMIRDNLKKEISPLLGLCIQAPRTSRASLIKGSRSQANALAQQTLIAHWQSIVKILTNYLNVLKANYVPSVLISKVFTQIFSFINVQLFNSLLLRRECCSFSNGEYVKAGLAELEQWCIYATEEYAGSSWEELKHIRQAVGFLVIHQKPKKTLKEITNDLCPVLSIQQLYRISTMYWDDKYGTHTVSSDVISSMRVMMTEDSNNAVSSSFLLDDDSSIPFSVDDISKSMTEIEVTDVDMPPLIRENSGFTFLHQRKD

SEQ ID NO: 14692 - protein, 1463 aa, Zea mays subsp. mays
  misc_feature (1)..(1463): Ceres Seq. ID no. 11049914
MTRLSYLHEPGVLQNLATRYELNEIYTYTGSILIAVNPFQRLPHLYDTHMMEQYKGADFGELSPHDFAIADVAYRAMDNEGKSNSILVSGESGAGKTETTKMLMRYLAHLGGRSGVEGRTVEQQVLESNPVLEAFGNAKTVRNNNSSRFGKFVEIQFDKTGRISGAAIRTYLLERSRVCQINSPERNYHCFYFLCAAPPEYTQRYKLSDPRSFHYLNQSSCIEVDGINDAEEYLATRRAMDIVGINEEEQEGIFRVVAAVLHLGNINFAKGTEIDSSVIKDDKSRFHLNIAAELLKCDCQNLEKALITRVIVTPEEVITRTLDPASAVASRDALAKIIYSRLFDWIVEKINVSIGQDPNSKQLIGVLDIYGFESFKVNSFEQLCINYTNEKLQQHFNQHVFKMEQEEYTREEINWSYIEFVDNQDVLDLIEKKGGLIALLDEACMFPRSTHETFAQKLYTTFKNNKRFAKPKLSRTDFTVVHYAGDVTYQADYFLDKNKDYVVAEHQDLLNASSCLFVAGLFPPLPQETAKSSKFSSIGSRFKLQLQSLMETLSSTEPHYIRCVKPNNLLKPAIFENTNVIQQLRCGGVLEAIRISCAGYPTRKTFYEFVNRFGVLAPEVLEGSNDDKIACQKILEKMGLENYQIGKTKVFLRAGQMADLDARRAEVLGRAARIIQRQIRTYIARKQFAELKRSATQLQSFVRGTLARKLYECMRQEAAAVKIQKNMRRHKARESYLQLQAAAITLQTGLRAMSARKEFRFRKETKAAVHIQAQWRRHRDYSHYKNLQGAALTYQCAWRQRLARRELRKLKMAARETGALKEAKDKLEKRVEELTWRLGLEKRLRTDLEEAKAQEIAKLQETLHDMQLQVEESKAMVVKEREAARKAIEEAPPVIKETPVLVEDTEKINSLTTEVEQLKALLLTERQATEAAKREHAESELRNEELIKKFESAEKKIEQLQETVHRLEEKATNMESENKVLRQQAVAISPTSKSLAAYPKSPFQLKTPENGNALNGEVKSSPDITPILPNPKELEAEEKPQKSLNEKQQENQDLLIKCVSQDLGFSSGKPIAACLIYRCLLHWRSFEVERTGVFDRIIQTIGSAIESQDNNDKLAYWLSNSSTLLLLLQRTLKTTGAAGFTPQRRRSSAASFGRVFSGMRASPQSAGRAFMGSRLIGGLGDLRQVEAKYPALLFKQQLTAFLEKIYGMIRDNLKKEISPLLGLCIQAPRTSRASLIKGSRSQANALAQQTLIAHWQSIVKILTNYLNVLKANYVPSVLISKVFTQIFSFINVQLFNSLLLRRECCSFSNGEYVKAGLAELEQWCIYATEEYAGSSWEELKHIRQAVGFLVIHQKPKKTLKEITNDLCPVLSIQQLYRISTMYWDDKYGTHTVSSDVISSMRVMMTEDSNNAVSSSFLLDDDSSIPFSVDDISKSMTEIEVTDVDMPPLIRENSGFTFLHQRKD

SEQ ID NO: 14693 - DNA, 1315 bp, Zea mays subsp. mays
  misc_feature (1)..(1315): Ceres Seq. ID no. 11049951
ggctgcgttattttgccggtaattgattgatagatggcgtcggagaagagcaagatcctggtggtcggcggcacggggtacctgggcaggcacgtcgtggcggcgagcgcgcggctgggccaccccacctcggcgctcgtcagggacacggcgccgtccgacccggccaaagcggcgctgctcaagagcttccaggacgccggcgtgacgctcctcaagggcgacctgtacgaccaggctagcctggtgagcgcggtgaagggcgcggacgtggtcatctccgtgctcggatcgatgcagatcgccgaccagagccggctcgtcgacgccatcaaggaggccggaaacgtcaagaggttcttcccgtcggagttcggcctggacgtggaccgcacgggcatcgtggagccggccaagtccatcctaggcgccaaggtgggcatccgccgcgccaccgaggccgcgggcataccctacacctacgccgtggccggcttcttcgcgggcttcggcctccccaaggtcgggcaggtcctcgcccccggcccgcccgcggacaaggcggtcgtcctcggcgacggcgacaccaaggcggtgttcgtggaggagggcgacatcgccacgtacacggtgctggcggccgacgacccgcgcgcggagaacaaggtgctgtacatcaagccgccggccaacacgctgtcgcacaacgagctgctgtcgctgtgggagaagaagaccggcaagacgttccggcgggagtacgtgccggaggaagccgtgctcaagcagatccaagagtcgccgatccctctgaacatcatcctggcgatcgggcacgcggcgttcgtgcgtggggagcagacgggcttcgagatcgacccggccaagggggtggacgccagcgaactgtacccggatgtcaagtacaccaccgtcgacgagtacctcaaccgctttctctgagcctgaggtctcaacaaacaggacgtcacgtacggccgcgcgcggccatgatgtgtggacgtcctgatcgtcagctgcttattgctagtcgctagcgacgacgacgtgccaacctaaacatcactagcagcataccgtagtgtacgctacggtagaaatggaaagacaatatgttttctaaataataagatatatagattaaggttcatggcaaaagagatttatgatgaattatatcatattgttgagctcataaaaaatatgtttaaaaagagtaacactatcatagctacaatatcttttgaagccacctaaattctcacgcgaataagatgtttctgtatatcttccg

SEQ ID NO: 14694 - protein, 309 aa, Zea mays subsp. mays
  misc_feature (1)..(309): Ceres Seq. ID no. 11049952
MASEKSKILVVGGTGYLGRHVVAASARLGHPTSALVRDTAPSDPAKAALLKSFQDAGVTLLKGDLYDQASLVSAVKGADVVISVLGSMQIADQSRLVDAIKEAGNVKRFFPSEFGLDVDRTGIVEPAKSILGAKVGIRRATEAAGIPYTYAVAGFFAGFGLPKVGQVLAPGPPADKAVVLGDGDTKAVFVEEGDIATYTVLAADDPRAENKVLYIKPPANTLSHNELLSLWEKKTGKTFRREYVPEEAVLKQIQESPIPLNIILAIGHAAFVRGEQTGFEIDPAKGVDASELYPDVKYTTVDEYLNRFL

SEQ ID NO: 14695 - protein, 222 aa, Zea mays subsp. mays
  misc_feature (1)..(222): Ceres Seq. ID no. 11049953
MQIADQSRLVDAIKEAGNVKRFFPSEFGLDVDRTGIVEPAKSILGAKVGIRRATEAAGIPYTYAVAGFFAGFGLPKVGQVLAPGPPADKAVVLGDGDTKAVFVEEGDIATYTVLAADDPRAENKVLYIKPPANTLSHNELLSLWEKKTGKTFRREYVPEEAVLKQIQESPIPLNIILAIGHAAFVRGEQTGFEIDPAKGVDASELYPDVKYTTVDEYLNRFL

SEQ ID NO: 14696 - DNA, 2609 bp, Zea mays subsp. mays
  misc_feature (1)..(2609): Ceres Seq. ID no. 11049970
atggctcctgtcttcttccttctacctctcctactcggccagatccttctctgcgcagccggcgacaccatcaactcgtccacacccttgtccggcgcgcagaagattgtgtccaagggcaacaagttcaccttgggcttctacaccccaccccaaggtaccaacacctcctccaaccagggtaactattacatcgccatatggtacagcaacataccactgcagacgacggtgtggatggccaaccccgatctgccggtggctgacccgaccaccgccgccttgaccatcggcagcgacggcaacctcgtcctccttgatcaatccaagaatcggcaggtgctgtggtcgacgaacataagtactagctccaattccaccatcgctgtcctccaggacggcggtagcctcgacctcagagatgccaccaattcatccatggtttattggcgaagcatcgatcatcccaccaatacctggcttcctgggggcaagcttgggctgaacaagaccactggtgtgagccagcggcttgttccatggactaacaccgccaacccctctcctgggctgttctcactggagttggatccaagaggcacgacgcaatacttaattcagtggaatgattccataacatactggagcagtggtccttggaataataacatctttagccttgtgccagagatgacctctggttacaactatgacttccagttcatcaacaatgccaccgagagctacttcatctactcaatgaaggacaacagcatcatctcgaggttcatcatcgatgtggatgggcagatcaagcagctgacatgggtgcctgcctcccagtcatggatcttgttctggtcccagccaaggacacagtgtgaggtgtacgcactgtgtggggcctatggtagctgcaacctcaatgcactgccattctgcaactgcatcagggggttcagccagaaggttcagagtgattgggacctccaggattacagtagcgggtgcaaaaggagagtaccattgcagtgccagaccaattcgagctcttcacaggctcagcctgataagttctataccatggcaaatgtgaggctacctgataatgctcagactgctgtggctgcgagctctcaagactgtcaagtggcttgtctgaacaattgctcctgtaatgcatatacttataatagtagtggctgctttgcttggcatggggatctgattaaccttcaggatcaatacagcgggaatggaggaggcacactcttcctcaggcttgcggcttctgaactgccaggctccaaaaggagcaaggcagtgatcattggtgcagttgttggcggagttgctgcagttttaattgtcctttctattgtggcatacttcctatttcagaaataccgccgagagaggactctcaggatacccaagactgctgggggcacactgatcgcctttagatacagtgatctgcagcatgtcactaataacttctcggagaggctgggtggaggtgcctttggctcggtgttcaaagggaagctcccagattcaacagccattgctgtgaagaggctcgatggagttcaccaaggggagaagcaatttcgtgctgaggtgagcaccattggcaccgtacagcatgttaatttggtccgcctccttggattttgctcagaaggatcacggaggctgcttgtgtatgagttcatgccaaagggctccctggacctgcagctattccttggtgagacaacagcactcagctgggctaccaggtaccaaatagcacttggaacagcaaggggcttaaattacctgcatgaaaaatgtagggattgcattatacactgtgatgtcaagccagaaaacatactcttggatgagtcatttgtgcctaaggtggctgattttggtctagcaaagctcttaggcagagacttcagccgtgtattgacaacaatgagaggaacaaggggttaccttgcgcctgaatggatcagtggtgtggcaattacagcaaaggcagatgtctttagctatggcatgatgctcttcgaactcatatcaggcaggagaaattctgaccacggagaacagcatggatccacctttttcccaacctttgctgccagcaagcttcatgaaggagatgtgcggaccttgttggaccccaagctgaatggagatgcaaatgctgacgaactcacaagagcttgtaaggttgcctgttggtgcatccaagatgacgaaagtgctagacctacaactggtcagattgttcaaatcctcgagggattccttgacgttaacatgcctcctgttccaaggtcattgagagttcttggtgaaagccctgatgttataaacttcttttcagatatatcttcaaaccagacttcccagacacagaacagcacaacttcccagacacgcagtactacttcaggcagttcacatctccaaagtccatagatcagataacctgcaatttattagggcaatacttgaagagcatgagtaaatctgtacatgattagaacctaatatactcagtttttgtatcactatgcttcagtactgtaaatttagtgcagaatgtc

SEQ ID NO: 14697 - protein, 826 aa, Zea mays subsp. mays
  misc_feature (1)..(826): Ceres Seq. ID no. 11049971
MAPVFFLLPLLLGQILLCAAGDTINSSTPLSGAQKIVSKGNKFTLGFYTPPQGTNTSSNQGNYYIAIWYSNIPLQTTVWMANPDLPVADPTTAALTIGSDGNLVLLDQSKNRQVLWSTNISTSSNSTIAVLQDGGSLDLRDATNSSMVYWRSIDHPTNTWLPGGKLGLNKTTGVSQRLVPWTNTANPSPGLFSLELDPRGTTQYLIQWNDSITYWSSGPWNNNIFSLVPEMTSGYNYDFQFINNATESYFIYSMKDNSIISRFIIDVDGQIKQLTWVPASQSWILFWSQPRTQCEVYALCGAYGSCNLNALPFCNCIRGFSQKVQSDWDLQDYSSGCKRRVPLQCQTNSSSSQAQPDKFYTMANVRLPDNAQTAVAASSQDCQVACLNNCSCNAYTYNSSGCFAWHGDLINLQDQYSGNGGGTLFLRLAASELPGSKRSKAVIIGAVVGGVAAVLIVLSIVAYFLFQKYRRERTLRIPKTAGGTLIAFRYSDLQHVTNNFSERLGGGAFGSVFKGKLPDSTAIAVKRLDGVHQGEKQFRAEVSTIGTVQHVNLVRLLGFCSEGSRRLLVYEFMPKGSLDLQLFLGETTALSWATRYQIALGTARGLNYLHEKCRDCIIHCDVKPENILLDESFVPKVADFGLAKLLGRDFSRVLTTMRGTRGYLAPEWISGVAITAKADVFSYGMMLFELISGRRNSDHGEQHGSTFFPTFAASKLHEGDVRTLLDPKLNGDANADELTRACKVACWCIQDDESARPTTGQIVQILEGFLDVNMPPVPRSLRVLGESPDVINFFSDISSNQTSQTQNSTTSQTRSTTSGSSHLQSP

SEQ ID NO: 14698 - protein, 747 aa, Zea mays subsp. mays
  misc_feature (1)..(747): Ceres Seq. ID no. 11049972
MANPDLPVADPTTAALTIGSDGNLVLLDQSKNRQVLWSTNISTSSNSTIAVLQDGGSLDLRDATNSSMVYWRSIDHPTNTWLPGGKLGLNKTTGVSQRLVPWTNTANPSPGLFSLELDPRGTTQYLIQWNDSITYWSSGPWNNNIFSLVPEMTSGYNYDFQFINNATESYFIYSMKDNSIISRFIIDVDGQIKQLTWVPASQSWILFWSQPRTQCEVYALCGAYGSCNLNALPFCNCIRGFSQKVQSDWDLQDYSSGCKRRVPLQCQTNSSSSQAQPDKFYTMANVRLPDNAQTAVAASSQDCQVACLNNCSCNAYTYNSSGCFAWHGDLINLQDQYSGNGGGTLFLRLAASELPGSKRSKAVIIGAVVGGVAAVLIVLSIVAYFLFQKYRRERTLRIPKTAGGTLIAFRYSDLQHVTNNFSERLGGGAFGSVFKGKLPDSTAIAVKRLDGVHQGEKQFRAEVSTIGTVQHVNLVRLLGFCSEGSRRLLVYEFMPKGSLDLQLFLGETTALSWATRYQIALGTARGLNYLHEKCRDCIIHCDVKPENILLDESFVPKVADFGLAKLLGRDFSRVLTTMRGTRGYLAPEWISGVAITAKADVFSYGMMLFELISGRRNSDHGEQHGSTFFPTFAASKLHEGDVRTLLDPKLNGDANADELTRACKVACWCIQDDESARPTTGQIVQILEGFLDVNMPPVPRSLRVLGESPDVINFFSDISSNQTSQTQNSTTSQTRSTTSGSSHLQSP

SEQ ID NO: 14699 - protein, 680 aa, Zea mays subsp. mays
  misc_feature (1)..(680): Ceres Seq. ID no. 11049973
MVYWRSIDHPTNTWLPGGKLGLNKTTGVSQRLVPWTNTANPSPGLFSLELDPRGTTQYLIQWNDSITYWSSGPWNNNIFSLVPEMTSGYNYDFQFINNATESYFIYSMKDNSIISRFIIDVDGQIKQLTWVPASQSWILFWSQPRTQCEVYALCGAYGSCNLNALPFCNCIRGFSQKVQSDWDLQDYSSGCKRRVPLQCQTNSSSSQAQPDKFYTMANVRLPDNAQTAVAASSQDCQVACLNNCSCNAYTYNSSGCFAWHGDLINLQDQYSGNGGGTLFLRLAASELPGSKRSKAVIIGAVVGGVAAVLIVLSIVAYFLFQKYRRERTLRIPKTAGGTLIAFRYSDLQHVTNNFSERLGGGAFGSVFKGKLPDSTAIAVKRLDGVHQGEKQFRAEVSTIGTVQHVNLVRLLGFCSEGSRRLLVYEFMPKGSLDLQLFLGETTALSWATRYQIALGTARGLNYLHEKCRDCIIHCDVKPENILLDESFVPKVADFGLAKLLGRDFSRVLTTMRGTRGYLAPEWISGVAITAKADVFSYGMMLFELISGRRNSDHGEQHGSTFFPTFAASKLHEGDVRTLLDPKLNGDANADELTRACKVACWCIQDDESARPTTGQIVQILEGFLDVNMPPVPRSLRVLGESPDVINFFSDISSNQTSQTQNSTTSQTRSTTSGSSHLQSP

SEQ ID NO: 14700 - DNA, 1318 bp, Zea mays subsp. mays
  misc_feature (1)..(1318): Ceres Seq. ID no. 11049978
tgataccatctcatctcagtgaatcatcacacgtacagacagcatcacagcactcacccagcgcgcagtacaacgcaaatggccaggctgggagcactgattccgctggccatcgtcctgctcgccgccgtcgcggccactgccgcgccttcagacaggccacccaaggcgcaggggcccaagccgcacaaggagaaggagaaggagaagcccaagcccatgaaggtgaagtgccgcccccgtaagctctacccttactgccccggcaagccgatggagtgccccgccgagtgttcccagtcatgctacgccgactgcagctcctgcaaacccgtctgcgtgtgcagcgtgccgggggcgtgcggcgacccgcgcttcatcggcggcgacggcaacgccttctacttccacggccgccgggacgccgacttctgcgtgctctccgaccgcgacctccacatcaacgcgcacttcatcggcaagcacggcgccgacggcatgtcccgggacttcacgtggatccaggccatcgccgtgctcttcgacggccacgagctctacgtcggcgccaggaagacggccgcgtgggacgacgacgtcgaccgcatggagctcaccctggacggcgagcccgtgcgcctcctgccgggaaccgacgccgcgtggacgtccggcgccgtgccggcgctgtccgtcacccgcaccagcgcggccaacggcgtgctcgtctcgctcgacggcaggttcaccatcagggccaacgccgtgcccatcaccgaggaggagtcgagggtgcaccggtacggcgtcacggccgacgactgcctcgcgcaccttgacctggccttcaagttcggcgcgctcaccgccgacgtgcacggcgtggtcggccagacgtaccgctccgactacgtcaaccggttcgatgtcaaggcctccatgcccaccatgggaggggacagcaactacaccacgtccagcctcttcgccgctgactgcgccgtggcgcgttacgcgccgtctggcggtagccgtgaccgtgacgacggcgttgctatggtgtcagagatcgctggcatcacctgttccagtggcatgggtggtcaaggcgtggtgtgcaagaagtaaccaaggaggtgtgcttctacttgccgacgaaagcacgagagttaatcgggtaaactatatatgatgttaccggaattgtaactgctatgatatataagcgtgggtgtcttcatcattgtcatgacattcacaccgcaataaggcttgccactggttgtggtattcacatttgattataatacaagtgtat

SEQ ID NO: 14701 - protein, 349 aa, Zea mays subsp. mays
  misc_feature (1)..(349): Ceres Seq. ID no. 11049979
MARLGALIPLAIVLLAAVAATAAPSDRPPKAQGPKPHKEKEKEKPKPMKVKCRPRKLYPYCPGKPMECPAECSQSCYADCSSCKPVCVCSVPGACGDPRFIGGDGNAFYFHGRRDADFCVLSDRDLHINAHFIGKHGADGMSRDFTWIQAIAVLFDGHELYVGARKTAAWDDDVDRMELTLDGEPVRLLPGTDAAWTSGAVPALSVTRTSAANGVLVSLDGRFTIRANAVPITEEESRVHRYGVTADDCLAHLDLAFKFGALTADVHGVVGQTYRSDYVNRFDVKASMPTMGGDSNYTTSSLFAADCAVARYAPSGGSRDRDDGVAMVSEIAGITCSSGMGGQGVVCKK

SEQ ID NO: 14702 - protein, 302 aa, Zea mays subsp. mays
  misc_feature (1)..(302): Ceres Seq. ID no. 11049980
MKVKCRPRKLYPYCPGKPMECPAECSQSCYADCSSCKPVCVCSVPGACGDPRFIGGDGNAFYFHGRRDADFCVLSDRDLHINAHFIGKHGADGMSRDFTWIQAIAVLFDGHELYVGARKTAAWDDDVDRMELTLDGEPVRLLPGTDAAWTSGAVPALSVTRTSAANGVLVSLDGRFTIRANAVPITEEESRVHRYGVTADDCLAHLDLAFKFGALTADVHGVVGQTYRSDYVNRFDVKASMPTMGGDSNYTTSSLFAADCAVARYAPSGGSRDRDDGVAMVSEIAGITCSSGMGGQGVVCKK

SEQ ID NO: 14703 - protein, 284 aa, Zea mays subsp. mays
  misc_feature (1)..(284): Ceres Seq. ID no. 11049981
MECPAECSQSCYADCSSCKPVCVCSVPGACGDPRFIGGDGNAFYFHGRRDADFCVLSDRDLHINAHFIGKHGADGMSRDFTWIQAIAVLFDGHELYVGARKTAAWDDDVDRMELTLDGEPVRLLPGTDAAWTSGAVPALSVTRTSAANGVLVSLDGRFTIRANAVPITEEESRVHRYGVTADDCLAHLDLAFKFGALTADVHGVVGQTYRSDYVNRFDVKASMPTMGGDSNYTTSSLFAADCAVARYAPSGGSRDRDDGVAMVSEIAGITCSSGMGGQGVVCKK

SEQ ID NO: 14704 - DNA, 1225 bp, Zea mays subsp. mays
  misc_feature (1)..(1225): Ceres Seq. ID no. 11049982
tctgcgatcaagacaccaattaagccagagcagtctacaatggctcacagtcacagaagcagtatgagcttctgcttggtgtgcatcgtcgtcatggcggcggcggcggcgttgttgcaacccgcatcttctcagcaggcggtgccggacatcccgaacctgaaggtgggctccaacgatcgcagcacgactctcaagtgcaccaacatcaagagcaacaagaccacctgcagcgccacctgcaacgcacgctgccctcacaagtgcctcatccagtgcccaagctgcaagacattctgcttgtgcgacttctatcccggcgtgtcctgcggcgacccacgcttcacgggcgccgacggcaacaacttctacttccacggcaagaaggaccgggacttctgcatcgtctccgacgccgccctccacatcaacgcgcacttcatcggcaagcgcaacccggccatgagccgcgacttcacctggatccaggcgctgggcatccgcttcgcgcaccaccacctctacgtcgccgcccagaggacgcccaggtgggacgccgccgccgaccacctggcgctggccctcgacgacgaggacgtcgacgtcgcgtccctgctgccgcgcttcgtcggcgcgcgctggtccccgcccacggcgccggcgctgtccgtcacccgcaccgcgcgcgtcaacaccgtcgtcgtcgagctcaggggcgccttccgcatcgtcgccagcgtagtgcccatcaccgccgaggactcgcggatccacaactacggcgtcagggaggacgacggcgacaccctcgcgcacctcgacctcggcttcaagttctacgacctcaccgacgacgtgcacggcgtgctgggccagacctaccgcccggactacgtcaacagcctcaacgtcacatccaacatgcccgtcatgggaggcgcgccggactacctctcctccgacctcttctccaccgactgcgccgtcgcacgcttcggcggacgccgacaccagcaagccaccgccgctaatattgccatgctcaccgacgacgacgacatggaatgaataacaaaggacacgtcgtacgcgcgatcgacgactttaccgtaccatttcattaccatctccgaggatatcgatccatcgttgtgtgtcttctacactagctagtgaatgaagaagcagcaataaacccattgaaattatatattatatattcaac

SEQ ID NO: 14705 - protein, 355 aa, Zea mays subsp. mays
  misc_feature (1)..(355): Ceres Seq. ID no. 11049983
SAIKTPIKPEQSTMAHSHRSSMSFCLVCIVVMAAAAALLQPASSQQAVPDIPNLKVGSNDRSTTLKCTNIKSNKTTCSATCNARCPHKCLIQCPSCKTFCLCDFYPGVSCGDPRFTGADGNNFYFHGKKDRDFCIVSDAALHINAHFIGKRNPAMSRDFTWIQALGIRFAHHHLYVAAQRTPRWDAAADHLALALDDEDVDVASLLPRFVGARWSPPTAPALSVTRTARVNTVVVELRGAFRIVASVVPITAEDSRIHNYGVREDDGDTLAHLDLGFKFYDLTDDVHGVLGQTYRPDYVNSLNVTSNMPVMGGAPDYLSSDLFSTDCAVARFGGRRHQQATAANIAMLTDDDDME

SEQ ID NO: 14706 - protein, 342 aa, Zea mays subsp. mays
  misc_feature (1)..(342): Ceres Seq. ID no. 11049984
MAHSHRSSMSFCLVCIVVMAAAAALLQPASSQQAVPDIPNLKVGSNDRSTTLKCTNIKSNKTTCSATCNARCPHKCLIQCPSCKTFCLCDFYPGVSCGDPRFTGADGNNFYFHGKKDRDFCIVSDAALHINAHFIGKRNPAMSRDFTWIQALGIRFAHHHLYVAAQRTPRWDAAADHLALALDDEDVDVASLLPRFVGARWSPPTAPALSVTRTARVNTVVVELRGAFRIVASVVPITAEDSRIHNYGVREDDGDTLAHLDLGFKFYDLTDDVHGVLGQTYRPDYVNSLNVTSNMPVMGGAPDYLSSDLFSTDCAVARFGGRRHQQATAANIAMLTDDDDME

SEQ ID NO: 14707 - protein, 334 aa, Zea mays subsp. mays
  misc_feature (1)..(334): Ceres Seq. ID no. 11049985
MSFCLVCIVVMAAAAALLQPASSQQAVPDIPNLKVGSNDRSTTLKCTNIKSNKTTCSATCNARCPHKCLIQCPSCKTFCLCDFYPGVSCGDPRFTGADGNNFYFHGKKDRDFCIVSDAALHINAHFIGKRNPAMSRDFTWIQALGIRFAHHHLYVAAQRTPRWDAAADHLALALDDEDVDVASLLPRFVGARWSPPTAPALSVTRTARVNTVVVELRGAFRIVASVVPITAEDSRIHNYGVREDDGDTLAHLDLGFKFYDLTDDVHGVLGQTYRPDYVNSLNVTSNMPVMGGAPDYLSSDLFSTDCAVARFGGRRHQQATAANIAMLTDDDDME

SEQ ID NO: 14708 - DNA, 1220 bp, Zea mays subsp. mays
  misc_feature (1)..(1220): Ceres Seq. ID no. 11049993
cggcacgagatcgcacgcaccatcgtcctgccgatcgatcgcagccagccagtcttgctgagagacgaactgaagcctgaagtgaaccgatcgatcgatcgatcgagcgagcgagctcccatgaaggcgttgattctggcggcggtgctgctgctgcagcacgggggagccgcgagcgccggcggcaacttctaccaggacgtggacatcacctggggcgacggccgcggcaagatcctcgacaacggccagctcctgacgctgtccatggacaggtcctccggctcgggcttccagtccaaggcccagtacctctacggccgcttcgacatgcagctcaagctcgtcccgggggactccgccggcaccgtcgccaccttctatctttcgtcgcagggttcgcagcacgacgagatcgacttcgagttcctggggaacgcgagcggggagccgtacacggtgcacacgaacgtgtacagccaggggaagggcgggcgggagcagcagttccggatgtggttcgaccccacggcggccttccacgcctactccgtgctgtggaaccccgcccacgtcgtcttctacgtggacggcgtccccatccgggagttccggcgccgcggcgacgggaccgtgccgttcccgacgtcgcagccgatgcgggtgtacgccagcgtgtgggacgcggaggagtgggccacgcagggggggcgcgtccggaccgactggtccaaggcgcccttcgtcgcgtcgtaccgcgggtacgccgccgccgggtgcaccgcgccggacgccgccgcctgcgcgcgctccaacggcgcatggatgtcgcaggagctcgacagcgccggccaggagcagctccgccgggcgcaggccagctacatgatctacaactactgcaccgataagtaccggttcccgcagggcccgccgcccgagtgctcgtcgccggccaagtagtagatgagtagaattgatcggatacagagagcaatcaattaattaaatcgacccgtcgcttggtttttggtttacacattgtactacggcataagttcggcggatatatgtatacgtagacggctagacgccatgcatgtgtcttggcatgtatcgtattcgtatatatcgtaattcgtatgtacctcagtatacctgcatcgtacatttacatgcatatatatctccctatatataaatatatatggttttattat

SEQ ID NO: 14709 - protein, 320 aa, Zea mays subsp. mays
  misc_feature (1)..(320): Ceres Seq. ID no. 11049994
RHEIARTIVLPIDRSQPVLLRDELKPEVNRSIDRSSERAPMKALILAAVLLLQHGGAASAGGNFYQDVDITWGDGRGKILDNGQLLTLSMDRSSGSGFQSKAQYLYGRFDMQLKLVPGDSAGTVATFYLSSQGSQHDEIDFEFLGNASGEPYTVHTNVYSQGKGGREQQFRMWFDPTAAFHAYSVLWNPAHVVFYVDGVPIREFRRRGDGTVPFPTSQPMRVYASVWDAEEWATQGGRVRTDWSKAPFVASYRGYAAAGCTAPDAAACARSNGAWMSQELDSAGQEQLRRAQASYMIYNYCTDKYRFPQGPPPECSSPAK

SEQ ID NO: 14710 - protein, 280 aa, Zea mays subsp. mays
  misc_feature (1)..(280): Ceres Seq. ID no. 11049995
MKALILAAVLLLQHGGAASAGGNFYQDVDITWGDGRGKILDNGQLLTLSMDRSSGSGFQSKAQYLYGRFDMQLKLVPGDSAGTVATFYLSSQGSQHDEIDFEFLGNASGEPYTVHTNVYSQGKGGREQQFRMWFDPTAAFHAYSVLWNPAHVVFYVDGVPIREFRRRGDGTVPFPTSQPMRVYASVWDAEEWATQGGRVRTDWSKAPFVASYRGYAAAGCTAPDAAACARSNGAWMSQELDSAGQEQLRRAQASYMIYNYCTDKYRFPQGPPPECSSPAK

SEQ ID NO: 14711 - protein, 231 aa, Zea mays subsp. mays
  misc_feature (1)..(231): Ceres Seq. ID no. 11049996
MDRSSGSGFQSKAQYLYGRFDMQLKLVPGDSAGTVATFYLSSQGSQHDEIDFEFLGNASGEPYTVHTNVYSQGKGGREQQFRMWFDPTAAFHAYSVLWNPAHVVFYVDGVPIREFRRRGDGTVPFPTSQPMRVYASVWDAEEWATQGGRVRTDWSKAPFVASYRGYAAAGCTAPDAAACARSNGAWMSQELDSAGQEQLRRAQASYMIYNYCTDKYRFPQGPPPECSSPAK

SEQ ID NO: 14712 - DNA, 1531 bp, Zea mays subsp. mays
  misc_feature (1)..(1531): Ceres Seq. ID no. 11050020
gaattcggcacgagcacgaccttaggggttcagatcggatcggaagcttccataagtttccatcgggcgtcgccggtatggcgatccgcaaggggtcttcgtacgccgtcgcggcacttctcgcgctcgcctctgtcgccgccgtcgcaggggaggtcttcttccaggagaagttcgaagatggctgggaaagtcggtgggtcaagtccgagtggaagaaggatgagaacatggctggtgaatggaaccacacatctggaaaatggaatggagatgccgaggacaaaggtattcaaacctccgaggattacaggttctatgccatttcagccgaataccctgagttcagcaacaaggataagaccctggtgctgcagttctctgtgaagcacgagcagaagcttgactgcggcggtggctacgtcaagttgctgggtggtgatgtagaccagaagacattaggtggagacacatcttacagcattatctctcgcccagatatctctcggtacagcaccaagaaggttcacactatcctgaccaaggatggcaaaaaccacttgatcaagaaggatgtcccttgtcagactgatcagttgactcatgtttacactttcatcatccgtcctgatgcaacatacagcattctcattgataatgaagagaagcatactggcagcatctacgagcattgggatattcttccccctaagaaaatcaaggacccagaggctaagaagcctgaggactgggatgacaaggagtacattcctgaccctgaggacaagaagccagagggctatgatgatattcccaaggaaattcctgaccctgatgctaagaagcctgaggactgggacgatgaggaagatggtgaatggactgcccctaccattcccaacccagaatacaagggaccatggaaacaaaagaaaatcaagaacccgaactaccagggtaaatggaaggcacctatgattgacaacccagattttaaggatgatccatacatttacgccttcgacagcttgaagtacattggcattgagctgtggcaggttaaatcgggcactctgttcgacaacatcatcatcactgatgaccctgcgttggccaagacttttgcagaggagacctggggcaagcacaaggaggcagaaaaggctgcttttgatgaggccgagaaaaagaaggaagaagaggatgccgccaagggtggggatgatgaggatgatgacctagaggatgaggaagacgatgagaaggcagacgaggacaaggccgactctgatgccgaggatggcaaggattctgatgatgagaagcacgacgagctctagatggcgaggatgatgttgctggcctagatttatcagctctgccactatgaagttcttttttttttcccgtgaccatcaagaagtagaacactgctaataagcagatggacagtttgggtcgccgtagcgctttgtagtcatttttcccattaaagccgataacactgaacaaggaggaaggatcttttgcc

SEQ ID NO: 14713 - protein, 445 aa, Zea mays subsp. mays
  misc_feature (1)..(445): Ceres Seq. ID no. 11050021
IRHEHDLRGSDRIGSFHKFPSGVAGMAIRKGSSYAVAALLALASVAAVAGEVFFQEKFEDGWESRWVKSEWKKDENMAGEWNHTSGKWNGDAEDKGIQTSEDYRFYAISAEYPEFSNKDKTLVLQFSVKHEQKLDCGGGYVKLLGGDVDQKTLGGDTSYSIISRPDISRYSTKKVHTILTKDGKNHLIKKDVPCQTDQLTHVYTFIIRPDATYSILIDNEEKHTGSIYEHWDILPPKKIKDPEAKKPEDWDDKEYIPDPEDKKPEGYDDIPKEIPDPDAKKPEDWDDEEDGEWTAPTIPNPEYKGPWKQKKIKNPNYQGKWKAPMIDNPDFKDDPYIYAFDSLKYIGIELWQVKSGTLFDNIIITDDPALAKTFAEETWGKHKEAEKAAFDEAEKKKEEEDAAKGGDDEDDDLEDEEDDEKADEDKADSDAEDGKDSDDEKHDEL

SEQ ID NO: 14714 - protein, 420 aa, Zea mays subsp. mays
  misc_feature (1)..(420): Ceres Seq. ID no. 11050022
MAIRKGSSYAVAALLALASVAAVAGEVFFQEKFEDGWESRWVKSEWKKDENMAGEWNHTSGKWNGDAEDKGIQTSEDYRFYAISAEYPEFSNKDKTLVLQFSVKHEQKLDCGGGYVKLLGGDVDQKTLGGDTSYSIISRPDISRYSTKKVHTILTKDGKNHLIKKDVPCQTDQLTHVYTFIIRPDATYSILIDNEEKHTGSIYEHWDILPPKKIKDPEAKKPEDWDDKEYIPDPEDKKPEGYDDIPKEIPDPDAKKPEDWDDEEDGEWTAPTIPNPEYKGPWKQKKIKNPNYQGKWKAPMIDNPDFKDDPYIYAFDSLKYIGIELWQVKSGTLFDNIIITDDPALAKTFAEETWGKHKEAEKAAFDEAEKKKEEEDAAKGGDDEDDDLEDEEDDEKADEDKADSDAEDGKDSDDEKHDEL

SEQ ID NO: 14715 - protein, 369 aa, Zea mays subsp. mays
  misc_feature (1)..(369): Ceres Seq. ID no. 11050023
MAGEWNHTSGKWNGDAEDKGIQTSEDYRFYAISAEYPEFSNKDKTLVLQFSVKHEQKLDCGGGYVKLLGGDVDQKTLGGDTSYSIISRPDISRYSTKKVHTILTKDGKNHLIKKDVPCQTDQLTHVYTFIIRPDATYSILIDNEEKHTGSIYEHWDILPPKKIKDPEAKKPEDWDDKEYIPDPEDKKPEGYDDIPKEIPDPDAKKPEDWDDEEDGEWTAPTIPNPEYKGPWKQKKIKNPNYQGKWKAPMIDNPDFKDDPYIYAFDSLKYIGIELWQVKSGTLFDNIIITDDPALAKTFAEETWGKHKEAEKAAFDEAEKKKEEEDAAKGGDDEDDDLEDEEDDEKADEDKADSDAEDGKDSDDEKHDEL

SEQ ID NO: 14716 - DNA, 678 bp, Zea mays subsp. mays
  misc_feature (1)..(678): Ceres Seq. ID no. 11050099
agaaaatctgagcggtattgatggcgcccaaggcggagaagaagccggcggcgaagaaggtggcggaggaggagccctcggagaaggcggctccggcggagaaggcccccgcggggaagaagcccaaggcggagaagcggctacctgcgggcaagtccgccggcaaggagggcggggacaagaagggtaggaagaaggcgaagaagagcgtggagacctacaagatctacatcttcaaggtcctgaagcaggttcaccccgacatcggcatctcctccaaggccatgtccatcatgaactccttcatcaacgacatcttcgagaagctcgccgcggaggccgccaagctcgcccggtacaacaagaagcccaccatcacctcccgcgagatccagacctccgtccgcctcgtcctccccggcgagctcgccaagcacgccgtctcggagggtaccaaggccgtcaccaagttcacctcgtcttagccgccttgttgtaggcgtcgttgttgtctgcttctcaagcaagcactgtctagtgccgcttctctaggcgatgatggtggttggctggtgtgtgtaagtggtgcagtggcttttgcctgtgttatgaatttagtcatggtggtaatgtattgctatggttatttgaatgttgatcagtgagcttatgtccgcc

SEQ ID NO: 14717 - protein, 154 aa, Zea mays subsp. mays
  misc_feature (1)..(154): Ceres Seq. ID no. 11050100
MAPKAEKKPAAKKVAEEEPSEKAAPAEKAPAGKKPKAEKRLPAGKSAGKEGGDKKGRKKAKKSVETYKIYIFKVLKQVHPDIGISSKAMSIMNSFINDIFEKLAAEAAKLARYNKKPTITSREIQTSVRLVLPGELAKHAVSEGTKAVTKFTSS

SEQ ID NO: 14718 - DNA, 1661 bp, Zea mays subsp. mays
  misc_feature (1)..(1661): Ceres Seq. ID no. 11050161
aattcggcacgaggcagtcggctgccgcagactggtagccggcgcgccgtcaccgtatcctcagatcagaggcgagcagaaaccacaccactctactgacgcccgacgagcagtgtaacattttccttcagccatgggtaaggagaagactcacatcaacattgtggtcattggccatgtcgactctggcaagtcgaccaccactggccacctgatctacaagcttggaggtattgacaagcgagtgattgagaggttcgagaaagaggctgccgagatgaacaagcggtcattcaagtatgcgtgggtgcttgacaagctcaaggctgagcgtgagagaggtattacaattgatattgccctgtggaagttcgagaccaccaagtactactgcactgttattgatgccccgggacaccgtgacttcatcaagaatatgatcactggcacttcccaagctgactgtgctgttcttatcattgactcaaccactggtggttttgaggctggtatctccaaggatggccagacccgtgagcatgctctccttgctttcacacttggtgtgaagcagatgatttgctgctgcaacaagatggatgctactacacccaagtattcaaaggcccgttatgatgagattgtgaaggaagtctcttcctacctgaagaaggttggatacaaccctgataagatccacttcgttccaatctctggttttgaaggtgacaacatgattgagaggtccaccaaccttgactggtacaagggcccaaccctacttgaggctctggacttgatcaatgagccaaagaggccttcagacaagcccctgcgtctcccccttcaggatgtgtacaagattggtggtattggaactgtccctgttggacgtgttgagactggtgtcattaagcctggtatggttgttacttttgggcctactggtcttactactgaggttaagtccgttgagatgcaccatgaggctctccaggaggcccttcccggtgacaatgttggcttcaacgtgaagaatgttgctgtgaaggatctgaagcgtgggtatgtggcctccaactccaaggatgaccctgccaaggaggctgctagctttacctcccaggtcatcatcatgaaccaccctggccagattggcaatggctatgccccagttctggactgccacacctcacacattgctgtcaagtttgctgagctcgttaccaagattgataggcgatccggcaaggagctggagaaggagcccaaatttctcaagaacggtgatgctggtatggtgaagatggttcccactaagcccatggtggtggagaccttttctcagtatcctcctcttggtcgatttgctgtccgtgacatgaggcaaacggtggctgtcggagtcatcaagagtgtggagaagaaggacccaactggagccaaggtgacgaaggctgctgccaagaagaaatgatctatctgtctggtgctgtgcttgcttgttggttacctcgtggaagcttaaaatatctcgtcttgttgacatccttgcagttgtcgcgtgaacaagtaatctatgatggcaatgtttgcctggtcatgaagtattattactttcgttgaaaccgtgatgctattaagacttaatttttttatgg

SEQ ID NO: 14719 - protein, 447 aa, Zea mays subsp. mays
  misc_feature (1)..(447): Ceres Seq. ID no. 11050162
MGKEKTHINIVVIGHVDSGKSTTTGHLIYKLGGIDKRVIERFEKEAAEMNKRSFKYAWVLDKLKAERERGITIDIALWKFETTKYYCTVIDAPGHRDFIKNMITGTSQADCAVLIIDSTTGGFEAGISKDGQTREHALLAFTLGVKQMICCCNKMDATTPKYSKARYDEIVKEVSSYLKKVGYNPDKIHFVPISGFEGDNMIERSTNLDWYKGPTLLEALDLINEPKRPSDKPLRLPLQDVYKIGGIGTVPVGRVETGVIKPGMVVTFGPTGLTTEVKSVEMHHEALQEALPGDNVGFNVKNVAVKDLKRGYVASNSKDDPAKEAASFTSQVIIMNHPGQIGNGYAPVLDCHTSHIAVKFAELVTKIDRRSGKELEKEPKFLKNGDAGMVKMVPTKPMVVETFSQYPPLGRFAVRDMRQTVAVGVIKSVEKKDPTGAKVTKAAAKKK

SEQ ID NO: 14720 - protein, 399 aa, Zea mays subsp. mays
  misc_feature (1)..(399): Ceres Seq. ID no. 11050163
MNKRSFKYAWVLDKLKAERERGITIDIALWKFETTKYYCTVIDAPGHRDFIKNMITGTSQADCAVLIIDSTTGGFEAGISKDGQTREHALLAFTLGVKQMICCCNKMDATTPKYSKARYDEIVKEVSSYLKKVGYNPDKIHFVPISGFEGDNMIERSTNLDWYKGPTLLEALDLINEPKRPSDKPLRLPLQDVYKIGGIGTVPVGRVETGVIKPGMVVTFGPTGLTTEVKSVEMHHEALQEALPGDNVGFNVKNVAVKDLKRGYVASNSKDDPAKEAASFTSQVIIMNHPGQIGNGYAPVLDCHTSHIAVKFAELVTKIDRRSGKELEKEPKFLKNGDAGMVKMVPTKPMVVETFSQYPPLGRFAVRDMRQTVAVGVIKSVEKKDPTGAKVTKAAAKKK

SEQ ID NO: 14721 - protein, 346 aa, Zea mays subsp. mays
  misc_feature (1)..(346): Ceres Seq. ID no. 11050164
MITGTSQADCAVLIIDSTTGGFEAGISKDGQTREHALLAFTLGVKQMICCCNKMDATTPKYSKARYDEIVKEVSSYLKKVGYNPDKIHFVPISGFEGDNMIERSTNLDWYKGPTLLEALDLINEPKRPSDKPLRLPLQDVYKIGGIGTVPVGRVETGVIKPGMVVTFGPTGLTTEVKSVEMHHEALQEALPGDNVGFNVKNVAVKDLKRGYVASNSKDDPAKEAASFTSQVIIMNHPGQIGNGYAPVLDCHTSHIAVKFAELVTKIDRRSGKELEKEPKFLKNGDAGMVKMVPTKPMVVETFSQYPPLGRFAVRDMRQTVAVGVIKSVEKKDPTGAKVTKAAAKKK

SEQ ID NO: 14722 - DNA, 1169 bp, Zea mays subsp. mays
  misc_feature (1)..(1169): Ceres Seq. ID no. 11050165
acacatcaaaaactaccagcggcttaaaccctagttctcactcccctcgccgctttcagctccgccgctgcagatggagttctggggtctcgaggtcaagcctggttccactgttaagtgtgagcctggatatggctttgtgctgcacctttcccaggctgctcttggggaatcgaagaagagtgataatgccttgatgtatgtcaaaattgatgatcagaaacttgccattggaaccctctctgttgacaagaacccacacattcaatttgatctgattttcgataaagagtttgagctgtcgcacacatcaaaaactaccagcgtcttcttcactggctacaaggttgaacagccattcgaggaagatgaaatggatcttgattctgaagatgaagacgaggagctgaatgttccagtagtcaaggaaaatggcaaggctgatgagaagaaacagaaaagtcaagaaaaggcagttgctgcaccctcaaaatcaagtccggattccaagaagagcaaggatgacgatgattctgatgaggacgagactgatgattctgatgaggatgagacggacgattctgatgagggtttatcttctgaagaaggcgatgatgattcaagtgatgaagatgataccagtgacgatgaggaggaagacactccaactcctaagaagcctgaggtaggcaagaagagacctgctgaaagttccgtgctgaaaactcctctatctgataagaaagcaaaggttgccacaccgtcatctcagaagacaggtggcaagaagggcgccgcggtccatgtggcaactccacacccagcaaaaggcaagaccattgtaaacaatgacaaatcggtcaagtctccaaaatctgcgccaaaatctggtggctcggtcccttgcaaaccgtgcagcaagtcattcatcagtgagacggcacttcaggctcactcgagggcgaagatgggggcaagtgagtcgcaggtccaatagagtccgcaacaaatgcgaaacatgggagaggagggtaagcgagagtctcgaaagagtgtcggtggaagtaggcctaaccttattttgtttagagacgggctatgcgttcgatgtagcaaaacaaggctgtggtttgtgtacttcaatatttgggttgtgtgtttcgattttt

SEQ ID NO: 14723 - protein, 307 aa, Zea mays subsp. mays
  misc_feature (1)..(307): Ceres Seq. ID no. 11050166
MEFWGLEVKPGSTVKCEPGYGFVLHLSQAALGESKKSDNALMYVKIDDQKLAIGTLSVDKNPHIQFDLIFDKEFELSHTSKTTSVFFTGYKVEQPFEEDEMDLDSEDEDEELNVPVVKENGKADEKKQKSQEKAVAAPSKSSPDSKKSKDDDDSDEDETDDSDEDETDDSDEGLSSEEGDDDSSDEDDTSDDEEEDTPTPKKPEVGKKRPAESSVLKTPLSDKKAKVATPSSQKTGGKKGAAVHVATPHPAKGKTIVNNDKSVKSPKSAPKSGGSVPCKPCSKSFISETALQAHSRAKMGASESQVQ

SEQ ID NO: 14724 - protein, 266 aa, Zea mays subsp. mays
  misc_feature (1)..(266): Ceres Seq. ID no. 11050167
MYVKIDDQKLAIGTLSVDKNPHIQFDLIFDKEFELSHTSKTTSVFFTGYKVEQPFEEDEMDLDSEDEDEELNVPVVKENGKADEKKQKSQEKAVAAPSKSSPDSKKSKDDDDSDEDETDDSDEDETDDSDEGLSSEEGDDDSSDEDDTSDDEEEDTPTPKKPEVGKKRPAESSVLKTPLSDKKAKVATPSSQKTGGKKGAAVHVATPHPAKGKTIVNNDKSVKSPKSAPKSGGSVPCKPCSKSFISETALQAHSRAKMGASESQVQ

SEQ ID NO: 14725 - protein, 207 aa, Zea mays subsp. mays
  misc_feature (1)..(207): Ceres Seq. ID no. 11050168
MDLDSEDEDEELNVPVVKENGKADEKKQKSQEKAVAAPSKSSPDSKKSKDDDDSDEDETDDSDEDETDDSDEGLSSEEGDDDSSDEDDTSDDEEEDTPTPKKPEVGKKRPAESSVLKTPLSDKKAKVATPSSQKTGGKKGAAVHVATPHPAKGKTIVNNDKSVKSPKSAPKSGGSVPCKPCSKSFISETALQAHSRAKMGASESQVQ

SEQ ID NO: 14726 - DNA, 621 bp, Zea mays subsp. mays
  misc_feature (1)..(621): Ceres Seq. ID no. 11050190
cggcacgagcttgtggcgatccatccctcaccatgtcgtcggagaaggaggcggcgctccgtcggctcgacgacagcccaactatatttgacaagatcatcaaaaaggaaataccttctactgtggtttatgaggacgagaaggtactggctttcagggacataaaccctcaagctccaacacacattctcatcatccccaaagtcaaggatggactaactggcctggccaaggctgaagagaggcacatagagatacttggctatctcctctatgttgccaaggttgttgcgaagcaggaaggacttgaagatggctatcgcgttgtcatcaatgacggcccaagtggatgtcaatctgtttaccacatccacgttcatctcctcggaggcaggcaaatgaactggcccccaggctaagaatatcttgtgattgatcagtgttaatggcaaggactgctactccatttctctagaataatccctgtaatttccataaaagctagtgcgctgaccttgtgctatatttgtggaattaccggaagcatgctgctgtgatctatgaatgaacacaagaaacttgtaactggtactcctatcatggattgacttgtccttattg

SEQ ID NO: 14727 - protein, 138 aa, Zea mays subsp. mays
  misc_feature (1)..(138): Ceres Seq. ID no. 11050191
ARACGDPSLTMSSEKEAALRRLDDSPTIFDKIIKKEIPSTVVYEDEKVLAFRDINPQAPTHILIIPKVKDGLTGLAKAEERHIEILGYLLYVAKVVAKQEGLEDGYRVVINDGPSGCQSVYHIHVHLLGGRQMNWPPG

SEQ ID NO: 14728 - protein, 128 aa, Zea mays subsp. mays
  misc_feature (1)..(128): Ceres Seq. ID no. 11050192
MSSEKEAALRRLDDSPTIFDKIIKKEIPSTVVYEDEKVLAFRDINPQAPTHILIIPKVKDGLTGLAKAEERHIEILGYLLYVAKVVAKQEGLEDGYRVVINDGPSGCQSVYHIHVHLLGGRQMNWPPG

SEQ ID NO: 14729 - DNA, 1878 bp, Zea mays subsp. mays
  misc_feature (1)..(1878): Ceres Seq. ID no. 11050193
gctaacacaagcaagcaagcaagtcactgagtagctagcagtatataccaccataaaaacaacacacacacacgtgcgctaataactaagcttaaggtagctcctctctatctccggctagctcggacggacgacgttgccatggctgctcaactgcatcacgcactatacgagctgctgcacgaagcagcagcagcgcaacgagctctgctgctcgcgatccccttctccctgctgctcctgccgctcctgctccgctacctcgcagcgtcggcgtcggcgtcggcgacgaagaacgacggagcggcgccggccagcgaccccgacaagctcttgagcctgctgccgtcgccgcccatgaagctccccatcatcgggcacctgcacctgatgggggacatcccctacgtgtccctcgccgcgctcgccaccaggtacggcccggacctgatgctgctccgcctcggcgccgtgccgaccgtcgtggtctcgtcgccgcgcgtcgccgaggccgtgctccgcacctacgaccacgtcttctcctcccgcccgcgctccctggtgtccgacatcatcatgtacggcgccaccgactcgtgcttcgcgccctacggcgaccacttccgcaaggcgcggaagctggtcaccgtgcacctgctcaacgccagcaaggtgcggtcgcagcggcccgcgcgggaggaggaggtgcgcggcgcgctcgacagggtgcgccgcgccgccgccgcgcgggagcccgtcgacatgagcgagctcctgcactccttcgtcaacaacctcgtctgccgcgccgtctccggcaagttctccatggaggaaggccgcaacaggctgttccgggagctcaccgacatcaacgcgggcctcctcggagggttccacatccaggactacttccctaggctgggccggatcgagctcgtcaggaaggtggcgtgcgccaagaccaggagagtcaggaagcgctgggacgacctcctcgacaagctcatcgacgaccatgcggccaggatggcaacccatcaggacgaggacgacgataaggacttcatatacgtattgctgtctcttcagaaggagtatggcctcaccagagaccatatcaaggctatcttgatagacatgttcgaggccggaaccgacacctcgtacatgacgttggagttcgccatgacggagctcatacggaagccacacctgatgaagaagctgcaggaagaagtgcggcggaacgtgccggcggggcaggagatggtcaccgaggacaacctccccggcatgaccgacctcaaggccgtcatcaaggagacgctccgcctgcacccgccggtgccgctcctcctcccgcactactccctggacgcctgcgaggtcgccggctacaccatcccggccaacacccgcgtcgtcgtcaacgcctgggcgctcggccgccacagcggctactgggagcgcgagaacgagttcgtcccggagaggttcctcagcggggacgtggccggcggcgtcgacctcaagcccaacgagttccagttcctggcgttcgggtccgggcggaggatgtgccctggggtccactcggcgtccgcgaccatcgaggcgatgctgtccaacctcatgtaccggttcgactggcagctgccggcggggatgaaggcggaggacgtggacatgaccgaggtgtttgggatcacggtctcgaggaaggagaagctgctcctagtcccacaggctgcgtgatgatgatgatgatactagtgcaatgcaatagggttttaaattagtaacaccaaaggctgtgttactggaccttaattaataattaataaatgtgctactactatatagccaggcttcacg

SEQ ID NO: 14730 - protein, 538 aa, Zea mays subsp. mays
  misc_feature (1)..(538): Ceres Seq. ID no. 11050194
MAAQLHHALYELLHEAAAAQRALLLAIPFSLLLLPLLLRYLAASASASATKNDGAAPASDPDKLLSLLPSPPMKLPIIGHLHLMGDIPYVSLAALATRYGPDLMLLRLGAVPTVVVSSPRVAEAVLRTYDHVFSSRPRSLVSDIIMYGATDSCFAPYGDHFRKARKLVTVHLLNASKVRSQRPAREEEVRGALDRVRRAAAAREPVDMSELLHSFVNNLVCRAVSGKFSMEEGRNRLFRELTDINAGLLGGFHIQDYFPRLGRIELVRKVACAKTRRVRKRWDDLLDKLIDDHAARMATHQDEDDDKDFIYVLLSLQKEYGLTRDHIKAILIDMFEAGTDTSYMTLEFAMTELIRKPHLMKKLQEEVRRNVPAGQEMVTEDNLPGMTDLKAVIKETLRLHPPVPLLLPHYSLDACEVAGYTIPANTRVVVNAWALGRHSGYWERENEFVPERFLSGDVAGGVDLKPNEFQFLAFGSGRRMCPGVHSASATIEAMLSNLMYRFDWQLPAGMKAEDVDMTEVFGITVSRKEKLLLVPQAA

SEQ ID NO: 14731 - protein, 466 aa, Zea mays subsp. mays
  misc_feature (1)..(466): Ceres Seq. ID no. 11050195
MKLPIIGHLHLMGDIPYVSLAALATRYGPDLMLLRLGAVPTVVVSSPRVAEAVLRTYDHVFSSRPRSLVSDIIMYGATDSCFAPYGDHFRKARKLVTVHLLNASKVRSQRPAREEEVRGALDRVRRAAAAREPVDMSELLHSFVNNLVCRAVSGKFSMEEGRNRLFRELTDINAGLLGGFHIQDYFPRLGRIELVRKVACAKTRRVRKRWDDLLDKLIDDHAARMATHQDEDDDKDFIYVLLSLQKEYGLTRDHIKAILIDMFEAGTDTSYMTLEFAMTELIRKPHLMKKLQEEVRRNVPAGQEMVTEDNLPGMTDLKAVIKETLRLHPPVPLLLPHYSLDACEVAGYTIPANTRVVVNAWALGRHSGYWERENEFVPERFLSGDVAGGVDLKPNEFQFLAFGSGRRMCPGVHSASATIEAMLSNLMYRFDWQLPAGMKAEDVDMTEVFGITVSRKEKLLLVPQAA

SEQ ID NO: 14732 - protein, 455 aa, Zea mays subsp. mays
  misc_feature (1)..(455): Ceres Seq. ID no. 11050196
MGDIPYVSLAALATRYGPDLMLLRLGAVPTVVVSSPRVAEAVLRTYDHVFSSRPRSLVSDIIMYGATDSCFAPYGDHFRKARKLVTVHLLNASKVRSQRPAREEEVRGALDRVRRAAAAREPVDMSELLHSFVNNLVCRAVSGKFSMEEGRNRLFRELTDINAGLLGGFHIQDYFPRLGRIELVRKVACAKTRRVRKRWDDLLDKLIDDHAARMATHQDEDDDKDFIYVLLSLQKEYGLTRDHIKAILIDMFEAGTDTSYMTLEFAMTELIRKPHLMKKLQEEVRRNVPAGQEMVTEDNLPGMTDLKAVIKETLRLHPPVPLLLPHYSLDACEVAGYTIPANTRVVVNAWALGRHSGYWERENEFVPERFLSGDVAGGVDLKPNEFQFLAFGSGRRMCPGVHSASATIEAMLSNLMYRFDWQLPAGMKAEDVDMTEVFGITVSRKEKLLLVPQAA

SEQ ID NO: 14733 - DNA, 1857 bp, Zea mays subsp. mays
  misc_feature (1)..(1857): Ceres Seq. ID no. 11050216
gccgccaccgccgcccgccaccgccatgaggcgcggcggggccggcgcgccgccggacctggggtccgtgctcggccacacaacccccaacctccgcgacctctacgcgctcggcaggaagctcgggcaggggcagttcggcaccacctacctctgcaccgagctcgccacggggatcgactacgcctgcaagtccatctccaagcgcaagctcatcaccaaggaggacgtcgacgacgtgcgccgcgagatccagatcatgcaccacctctccggccacaagaacgtcgtcgctatcaagggcgcgtacgaggaccaggtctacgtccacatcgtcatggagctctgtgccgggggcgagctcttcgaccggatcatacagcgcggacactacagcgagcgcaaggccgccgcgctcacaaggatcatcgtcggggtcgtcgaggcctgccactcgctcggggtcatgcaccgggacctcaagcccgagaacttcctgctcgccaacagggacgatgacctctcgctcaaggccatcgatttcggactctctgtctttttcaagcctggtcaagttttcaccgatgtagttggtagcccatattatgtagctccagaagttctgttgaaaagttatggaccagcagctgatgtatggacagccggtgtcattctttacattctactgagtggtgtgcctccattttgggcagaaacacaacaaggaatatttgatgctgtattgaagggtgccattgattttgattctgatccgtggcctgtcatatctgatagtgcaaaagatcttatcagacgaatgctgaatcctcgccctgccgagcgcttaacagcacatgaagttctatgccatccatggattcgtgatcatggagtagctcctgaccgtccactggatccagctgtcttatctcgcattaagcaattctctgcaatgaataagttgaagaaaatggctttacgagtaatagctgagagcctatcagaagaggaaattgcggggttgaaggaaatgttccagaccatggacactgacaacagtggcgcaattacttatgatgagctaaaagaaggattgagaaaatatggctccacactaaaggacactgagattcgtgatcttatggatgcagctgatattgacaacagtggaacaattgactacatagaattcattgctgcaactttgcatctcaataagctggagcgtgaggaacatctcgtggcagccttttcatatttcgacaaagatggtagtggctatatcacagtggacgaactacagctagcttgcaaagagcataacatgccggatgcttttcttgatgatgtcatcaacgaagctgatcaggacaatgatggccgcattgactatggagaatttgttgccatgatgaccaagggcaatatgggagtcggtcgaagaacaatgagaaacagcttgaatatcagcatgagggacgacctggtgtgttctgagacttaacacgatgtacagcttgttgcttggctacttcctgccttgctgccctacgaaaccttctgcattttttcaagatgttgtcaagtgtctgtgtggatgtgtttttctggggattctgattcaactctggtgattgattccatgaaatgcataacaagatgcccatgtcacgcaagaagccagattgtaaatgctgctgcccctttgactctcagaaacactaatgctcagtgaaaagaaatcgctccctatgcatgtctccagtctcccttgattgatggcatccattcttggatgcacgctgtatctcaatgcaatgtgttgctccgtttggatgaacatgtactcaatatact

SEQ ID NO: 14734 - protein, 500 aa, Zea mays subsp. mays
  misc_feature (1)..(500): Ceres Seq. ID no. 11050217
PPPPPATAMRRGGAGAPPDLGSVLGHTTPNLRDLYALGRKLGQGQFGTTYLCTELATGIDYACKSISKRKLITKEDVDDVRREIQIMHHLSGHKNVVAIKGAYEDQVYVHIVMELCAGGELFDRIIQRGHYSERKAAALTRIIVGVVEACHSLGVMHRDLKPENFLLANRDDDLSLKAIDFGLSVFFKPGQVFTDVVGSPYYVAPEVLLKSYGPAADVWTAGVILYILLSGVPPFWAETQQGIFDAVLKGAIDFDSDPWPVISDSAKDLIRRMLNPRPAERLTAHEVLCHPWIRDHGVAPDRPLDPAVLSRIKQFSAMNKLKKMALRVIAESLSEEEIAGLKEMFQTMDTDNSGAITYDELKEGLRKYGSTLKDTEIRDLMDAADIDNSGTIDYIEFIAATLHLNKLEREEHLVAAFSYFDKDGSGYITVDELQLACKEHNMPDAFLDDVINEADQDNDGRIDYGEFVAMMTKGNMGVGRRTMRNSLNISMRDDLVCSET

SEQ ID NO: 14735 - protein, 492 aa, Zea mays subsp. mays
  misc_feature (1)..(492): Ceres Seq. ID no. 11050218
MRRGGAGAPPDLGSVLGHTTPNLRDLYALGRKLGQGQFGTTYLCTELATGIDYACKSISKRKLITKEDVDDVRREIQIMHHLSGHKNVVAIKGAYEDQVYVHIVMELCAGGELFDRIIQRGHYSERKAAALTRIIVGVVEACHSLGVMHRDLKPENFLLANRDDDLSLKAIDFGLSVFFKPGQVFTDVVGSPYYVAPEVLLKSYGPAADVWTAGVILYILLSGVPPFWAETQQGIFDAVLKGAIDFDSDPWPVISDSAKDLIRRMLNPRPAERLTAHEVLCHPWIRDHGVAPDRPLDPAVLSRIKQFSAMNKLKKMALRVIAESLSEEEIAGLKEMFQTMDTDNSGAITYDELKEGLRKYGSTLKDTEIRDLMDAADIDNSGTIDYIEFIAATLHLNKLEREEHLVAAFSYFDKDGSGYITVDELQLACKEHNMPDAFLDDVINEADQDNDGRIDYGEFVAMMTKGNMGVGRRTMRNSLNISMRDDLVCSET

SEQ ID NO: 14736 - protein, 414 aa, Zea mays subsp. mays
  misc_feature (1)..(414): Ceres Seq. ID no. 11050219
MHHLSGHKNVVAIKGAYEDQVYVHIVMELCAGGELFDRIIQRGHYSERKAAALTRIIVGVVEACHSLGVMHRDLKPENFLLANRDDDLSLKAIDFGLSVFFKPGQVFTDVVGSPYYVAPEVLLKSYGPAADVWTAGVILYILLSGVPPFWAETQQGIFDAVLKGAIDFDSDPWPVISDSAKDLIRRMLNPRPAERLTAHEVLCHPWIRDHGVAPDRPLDPAVLSRIKQFSAMNKLKKMALRVIAESLSEEEIAGLKEMFQTMDTDNSGAITYDELKEGLRKYGSTLKDTEIRDLMDAADIDNSGTIDYIEFIAATLHLNKLEREEHLVAAFSYFDKDGSGYITVDELQLACKEHNMPDAFLDDVINEADQDNDGRIDYGEFVAMMTKGNMGVGRRTMRNSLNISMRDDLVCSET

SEQ ID NO: 14737 - DNA, 1416 bp, Zea mays subsp. mays
  misc_feature (1)..(1416): Ceres Seq. ID no. 11050253
cttcctcttcttcttcttgcctactaagcaagctctctctcgtgttcttctcgtcttctgcccgagtgatggccagcctcaccgacctcgtcaacctcgacctgagtgactgcaccgacaggatcatcgccgagtacatctggattggaggaaccggcatagacctcaggagcaaagcgaggacggtgaaaggccccatcaccgacccgagccagctgccgaaatggaactacgacggctccagcacagggcaggctcccggagaggacagtgaagtcatcctctaccctcaagccattttcaaggacccgttcaggaagggtaaccacatccttgtgatgtgtgactgctacacgccacaaggcgagccaatccccaccaacaagaggtacagcgccgccaaggttttcagccaccccgacgtcgcagctgaggtcccgtggtacggtattgagcaggagtacaccctccttcagaaggacgtgagctggcccctcggctggcctgttggtggataccctggtccccagggaccatactactgcgccgccggtgccgacaaggcctttgggcgcgacgtggttgacgcccactacaaggcctgcctctacgccggcatcaacatcagcggcatcaacggcgaagtcatgcctggacagtgggagttccaagtggggccgtcagttgggatctctgccggcgacgagatatgggtcgcccgctacattctcgagaggatcaccgagatggccggaatcgtcctctccctcgacccgaagccgatcaagggcgactggaacggcgccggcgcccacaccaactacagcaccaagtcgatgagggaggccgggggatacgaggtgatcaaggcggcgatcgacaagctggggaagaggcacaaggagcacatcgccgcgtacggcgagggcaacgagcgccgcctcacgggccgccacgagaccgccgacatcaacaccttcaaatggggcgtggcgaaccgcggcgcgtccatccgcgtcggccgcgacaccgagagggagggcaagggctacttcgaggaccgcaggccggcgtccaacatggacccctacgtcgtcaccggcatgatcgccgagaccaccatcctgtggaatggaaactgatcaagcatgcgcattctcgagggagcccactgttttggttctgcacaacgcatccgccgtggtgtcgctttggttttgaaatttagtttccgttgtcctaaaatttatcactacggtctccggtgtattgctcgggaacaatgaataacgactgcgatgttttttttttgcttgcgtcgtagatgtacgtttggctgtgcttccagtttattgggtaaatgaaaaaaatgtaatggtctatcggtcttaaaatagtagtcattttagctctaac

SEQ ID NO: 14738 - protein, 379 aa, Zea mays subsp. mays
  misc_feature (1)..(379): Ceres Seq. ID no. 11050254
SSSSSCLLSKLSLVFFSSSARVMASLTDLVNLDLSDCTDRIIAEYIWIGGTGIDLRSKARTVKGPITDPSQLPKWNYDGSSTGQAPGEDSEVILYPQAIFKDPFRKGNHILVMCDCYTPQGEPIPTNKRYSAAKVFSHPDVAAEVPWYGIEQEYTLLQKDVSWPLGWPVGGYPGPQGPYYCAAGADKAFGRDVVDAHYKACLYAGINISGINGEVMPGQWEFQVGPSVGISAGDEIWVARYILERITEMAGIVLSLDPKPIKGDWNGAGAHTNYSTKSMREAGGYEVIKAAIDKLGKRHKEHIAAYGEGNERRLTGRHETADINTFKWGVANRGASIRVGRDTEREGKGYFEDRRPASNMDPYVVTGMIAETTILWNGN

SEQ ID NO: 14739 - protein, 357 aa, Zea mays subsp. mays
  misc_feature (1)..(357): Ceres Seq. ID no. 11050255
MASLTDLVNLDLSDCTDRIIAEYIWIGGTGIDLRSKARTVKGPITDPSQLPKWNYDGSSTGQAPGEDSEVILYPQAIFKDPFRKGNHILVMCDCYTPQGEPIPTNKRYSAAKVFSHPDVAAEVPWYGIEQEYTLLQKDVSWPLGWPVGGYPGPQGPYYCAAGADKAFGRDVVDAHYKACLYAGINISGINGEVMPGQWEFQVGPSVGISAGDEIWVARYILERITEMAGIVLSLDPKPIKGDWNGAGAHTNYSTKSMREAGGYEVIKAAIDKLGKRHKEHIAAYGEGNERRLTGRHETADINTFKWGVANRGASIRVGRDTEREGKGYFEDRRPASNMDPYVVTGMIAETTILWNGN

SEQ ID NO: 14740 - protein, 267 aa, Zea mays subsp. mays
  misc_feature (1)..(267): Ceres Seq. ID no. 11050256
MCDCYTPQGEPIPTNKRYSAAKVFSHPDVAAEVPWYGIEQEYTLLQKDVSWPLGWPVGGYPGPQGPYYCAAGADKAFGRDVVDAHYKACLYAGINISGINGEVMPGQWEFQVGPSVGISAGDEIWVARYILERITEMAGIVLSLDPKPIKGDWNGAGAHTNYSTKSMREAGGYEVIKAAIDKLGKRHKEHIAAYGEGNERRLTGRHETADINTFKWGVANRGASIRVGRDTEREGKGYFEDRRPASNMDPYVVTGMIAETTILWNGN

SEQ ID NO: 14741 - DNA, 1125 bp, Zea mays subsp. mays
  misc_feature (1)..(1125): Ceres Seq. ID no. 11050373
taggcggtccacaggcaaatcccctatctccaacctgtgaacggtgaaccccgatcgatgacgccgacggcgaacctcctcctcccggctcccccattcgtccccatctctgatgtgcgccgcctccagctccccccgcgcgtccgccaccagcctcgtccctgctggaagggcgtggagtggggctccatacagacccggatggtctcttctttcgttgctgtagggagcagaacacgccgcagaaacgttatatgtgcttccctgtttggagttggagctcccgaagcactggtcattggagtagtcgccttgttggtattcggccccaagggtctagcagaggtagccaggaatttggggaagactttgcgtgctttccaaccaaccattagagagctacaggatgtatcaagggagttcaggagcactcttgaacgagaaatcggaattgatgaggtttcccaatcaacgaactataggcccacaaccatgaataacaaccaacaacctgctgccgacccaaatgtcaagcctgaaccagcaccttatactagcgaggaactaatgaaagtaactgaagaacaaattgctgcatcagctgctgctgcttggaatccacaacagcctgccacgtcgcaacagcaagaagaagcgcccactactccaagaagtgaggacgctcctacatcaggaggaagcgatggtcctgctgctccagctcgtgctgtgagtgactctgatccaaaccaagtgaataagtcacagaaggcggaaggagagagatgactccgcttgacagtttgacactggacggaaagagcacagtgcataggtcaggacgagcagtcatgttttttttttttcattttgtagacgatgaaatagttgtatgagagcgttttcgatggttaggcttgttttgtagcagcatgggccaggtagatgaaaaaaaggctatgcgtatattatttcccacgttgtgtggccgcaattgtttttcaatcgtaagagtaacttcaagacactctctgtattctttttaattgctaggaatagatttttttgtaaaaaattttcttcaaaagcttatttaaatgattatctgaatatatctattttttt

SEQ ID NO: 14742 - protein, 243 aa, Zea mays subsp. mays
  misc_feature (1)..(243): Ceres Seq. ID no. 11050374
MTPTANLLLPAPPFVPISDVRRLQLPPRVRHQPRPCWKGVEWGSIQTRMVSSFVAVGSRTRRRNVICASLFGVGAPEALVIGVVALLVFGPKGLAEVARNLGKTLRAFQPTIRELQDVSREFRSTLEREIGIDEVSQSTNYRPTTMNNNQQPAADPNVKPEPAPYTSEELMKVTEEQIAASAAAAWNPQQPATSQQQEEAPTTPRSEDAPTSGGSDGPAAPARAVSDSDPNQVNKSQKAEGER

SEQ ID NO: 14743 - protein, 195 aa, Zea mays subsp. mays
  misc_feature (1)..(195): Ceres Seq. ID no. 11050375
MVSSFVAVGSRTRRRNVICASLFGVGAPEALVIGVVALLVFGPKGLAEVARNLGKTLRAFQPTIRELQDVSREFRSTLEREIGIDEVSQSTNYRPTTMNNNQQPAADPNVKPEPAPYTSEELMKVTEEQIAASAAAAWNPQQPATSQQQEEAPTTPRSEDAPTSGGSDGPAAPARAVSDSDPNQVNKSQKAEGER

SEQ ID NO: 14744 - DNA, 3299 bp, Zea mays subsp. mays
  misc_feature (1)..(3299): Ceres Seq. ID no. 11050389
ttcggcacgaggatcgatctcacttagctgctgctgctgctgcttgctggtggcctgggcctggctgctgtgtctgtatcgatgtgtccgtattttctccatctcgtctgcatacgctgcaattggtaaggagctagctggcctttcatgtcttccatgctgccatagccatacgcccggccggaaggcaggataccccatcgctcgctgcacatgcatgtatgccgcatggggatacatgttcatcatcagcagcacagtggctctgtatcccccatcccaatccgatcctatataggaggaggagaaggaggagcagcagcagcagccaggcgcggccggcggccggagtagtatccgaatccgctcaacacccacaccggtgcgggtggtctctagctttcccatcgatcaatggctttcaaaggactcccgcgtgattcccgagggtccctcgaagtcttcaatccagacgcccctgtttcagatcgtgcaaccacctccccgttcctcctccctcctgcggtcgcgtcccatcccagcctcctcgccgccggagatggcggcgatgctgacgtgggtcgggcgacacagagggccgccgagtggggcctcgtcctccagaccgacgagcacaccggccgcccccagggtgtcgtcgcccgtccctccggttccaaccgcaccagcgagagtggcaactccatcgacgagagggccgccgccgccggtgctggtagagctctcccccgggtgtcggaggagcttcgcgccgcgctctcagcgttccagcagaccttcgtcgtgtccgatgccacccgccctgaccaccccatcctctacgccagcgctggattcttcaacatgacgggctactcctccaatgaggtcgtcggaaggaactgccgcttccttcaaggttctgggaccgaccccgtagagatttccaagatcagacaggctctcgcagctgggtcaaattactgtggccgtatcctcaactacaagaaggatggcacaccattctggaacctcctaaccgttgcccccataaaggatgaggatggcagggtcctcaagttcattgggatgcaagtggaagtaagtaagtacacggaaggtaacaaagatactgctcttcgtccaaatggattgccagagtcactcatcaaatatgatgcaaggcagaaggatcatgctcgtagctcagtctcggagctcctacttgccctgaaggatccacggtcattgtcagaatcaagaaacaataccttaaaaaggaaatcacaggaatcagcaggttcagctctagttcccggcaagagaagctccgaaactggatcccgtcgtaactcacatagtggaatgagaaactctctacaaaaaatcagtgaggtgcctgaaggagggaataagaccaggaaatctggtttgcgttcttttatgggccttattggtatgggacatgggaatgtagagaagaacattctaaaaccaagggaagatcccctacttgatagcgatgatgagagaccagatagcttcgatgacgatttcaggaagaaagaaatgagaaagggcatagatttggctaccacacttgaacgtattgaaaagaattttgtcatcaccgacccgaggttaccagataatccaattatatttgcatcggatagctttttgcgtttgacagagtattgccgcgaagaaatattgggaagaaactgcaggtttcttcaaggacctgaaactgaccgtgggacagtaaagaagataagagatgccatagataaccaaacagaagttactgttcagctgataaattatacaaagagcggtaagaaattctggaacctctttcacttgcagcctatgcgtgatcagaagggtgatgttcaatacttcattggggttcaattggatggaactgagcgtgttcgagaggctgctgcaaaagatggtgccatactggttaagaaaactgcagacaatattgatgaggctgcaaaggagcttccggatgctaatttgagacctgaggatctatgggctaatcactcaaaaccagtcttgccaaagccacatatgaaggatactgcatcgtggagagccatccaaaaggttcttgagaacggtgaaagcattgatttgaaacatttcagaccagtaaggcctttaggatctggtgatactggcagtgtccacttggtggagttgcttggcacaggtgaatactttgccatgaaagctatggataaaagtgtcatgcttaaccgaaacaaggtccatagagctaccgctgaacgacaaatccttgatatgttggaccacccattccttccgacattgtatgcatcatttcagacaaagacacatatatgtcttattgttgactattgtgctggtggggaactctttatgctccttgataggcaacctatgaaggttctgaaggaggatgcggtcaggttctatgctgcagaagtggtcacagcacttgaatacctacattgccaaggtataatctacagagacttaaagccagagaacattttacttcatagagatgggcacatttcattgacagactttgatttgtcttgcttgacatcctgccgaccacaagtgtttcttccacacgatattgataagaagaaaaagaggaggaagagcaggagtaatcccatattttttgctgaaccaatgcgagcatcaaattcttttgttggtacagaggagtacattgcaccggagattattaccggagctggccatacgagtgctgtagattggtgggcgctaggaattcttctatatgagatgttatatggttatacacccttcagagggaaaacaagacaaaggacatttgctaatattctgcacaaggatatcagatttcctgcgagcatacaggtgagcctggcggcaaggcagctgatataccggttgctacaccgagaccctgcaaataggctaggttcctatgagggcgctatggagatcaaacaacaccccttctttcgtggcataaactgggctctagttcgtgccgccacgcccccagagctggaggctcccctccaggatacattggaggccacactgcctcctcctgcagctgatgcggctcacaccgatatgttctgatcatacattgatccatgatgctgcatgttaatttgcttaaaggaagaaaaaaatattagatgatgaagatgcgtgactttggcatagatgagaacaataatgtatgttaaggactaattatcttgatccatctatgcatgctcacaatt

SEQ ID NO: 14745 - protein, 911 aa, Zea mays subsp. mays
  misc_feature (1)..(911): Ceres Seq. ID no. 11050390
MAFKGLPRDSRGSLEVFNPDAPVSDRATTSPFLLPPAVASHPSLLAAGDGGDADVGRATQRAAEWGLVLQTDEHTGRPQGVVARPSGSNRTSESGNSIDERAAAAGAGRALPRVSEELRAALSAFQQTFVVSDATRPDHPILYASAGFFNMTGYSSNEVVGRNCRFLQGSGTDPVEISKIRQALAAGSNYCGRILNYKKDGTPFWNLLTVAPIKDEDGRVLKFIGMQVEVSKYTEGNKDTALRPNGLPESLIKYDARQKDHARSSVSELLLALKDPRSLSESRNNTLKRKSQESAGSALVPGKRSSETGSRRNSHSGMRNSLQKISEVPEGGNKTRKSGLRSFMGLIGMGHGNVEKNILKPREDPLLDSDDERPDSFDDDFRKKEMRKGIDLATTLERIEKNFVITDPRLPDNPIIFASDSFLRLTEYCREEILGRNCRFLQGPETDRGTVKKIRDAIDNQTEVTVQLINYTKSGKKFWNLFHLQPMRDQKGDVQYFIGVQLDGTERVREAAAKDGAILVKKTADNIDEAAKELPDANLRPEDLWANHSKPVLPKPHMKDTASWRAIQKVLENGESIDLKHFRPVRPLGSGDTGSVHLVELLGTGEYFAMKAMDKSVMLNRNKVHRATAERQILDMLDHPFLPTLYASFQTKTHICLIVDYCAGGELFMLLDRQPMKVLKEDAVRFYAAEVVTALEYLHCQGIIYRDLKPENILLHRDGHISLTDFDLSCLTSCRPQVFLPHDIDKKKKRRKSRSNPIFFAEPMRASNSFVGTEEYIAPEIITGAGHTSAVDWWALGILLYEMLYGYTPFRGKTRQRTFANILHKDIRFPASIQVSLAARQLIYRLLHRDPANRLGSYEGAMEIKQHPFFRGINWALVRAATPPELEAPLQDTLEATLPPPAADAAHTDMF

SEQ ID NO: 14746 - protein, 761 aa, Zea mays subsp. mays
  misc_feature (1)..(761): Ceres Seq. ID no. 11050391
MTGYSSNEVVGRNCRFLQGSGTDPVEISKIRQALAAGSNYCGRILNYKKDGTPFWNLLTVAPIKDEDGRVLKFIGMQVEVSKYTEGNKDTALRPNGLPESLIKYDARQKDHARSSVSELLLALKDPRSLSESRNNTLKRKSQESAGSALVPGKRSSETGSRRNSHSGMRNSLQKISEVPEGGNKTRKSGLRSFMGLIGMGHGNVEKNILKPREDPLLDSDDERPDSFDDDFRKKEMRKGIDLATTLERIEKNFVITDPRLPDNPIIFASDSFLRLTEYCREEILGRNCRFLQGPETDRGTVKKIRDAIDNQTEVTVQLINYTKSGKKFWNLFHLQPMRDQKGDVQYFIGVQLDGTERVREAAAKDGAILVKKTADNIDEAAKELPDANLRPEDLWANHSKPVLPKPHMKDTASWRAIQKVLENGESIDLKHFRPVRPLGSGDTGSVHLVELLGTGEYFAMKAMDKSVMLNRNKVHRATAERQILDMLDHPFLPTLYASFQTKTHICLIVDYCAGGELFMLLDRQPMKVLKEDAVRFYAAEVVTALEYLHCQGIIYRDLKPENILLHRDGHISLTDFDLSCLTSCRPQVFLPHDIDKKKKRRKSRSNPIFFAEPMRASNSFVGTEEYIAPEIITGAGHTSAVDWWALGILLYEMLYGYTPFRGKTRQRTFANILHKDIRFPASIQVSLAARQLIYRLLHRDPANRLGSYEGAMEIKQHPFFRGINWALVRAATPPELEAPLQDTLEATLPPPAADAAHTDMF

SEQ ID NO: 14747 - protein, 686 aa, Zea mays subsp. mays
  misc_feature (1)..(686): Ceres Seq. ID no. 11050392
MQVEVSKYTEGNKDTALRPNGLPESLIKYDARQKDHARSSVSELLLALKDPRSLSESRNNTLKRKSQESAGSALVPGKRSSETGSRRNSHSGMRNSLQKISEVPEGGNKTRKSGLRSFMGLIGMGHGNVEKNILKPREDPLLDSDDERPDSFDDDFRKKEMRKGIDLATTLERIEKNFVITDPRLPDNPIIFASDSFLRLTEYCREEILGRNCRFLQGPETDRGTVKKIRDAIDNQTEVTVQLINYTKSGKKFWNLFHLQPMRDQKGDVQYFIGVQLDGTERVREAAAKDGAILVKKTADNIDEAAKELPDANLRPEDLWANHSKPVLPKPHMKDTASWRAIQKVLENGESIDLKHFRPVRPLGSGDTGSVHLVELLGTGEYFAMKAMDKSVMLNRNKVHRATAERQILDMLDHPFLPTLYASFQTKTHICLIVDYCAGGELFMLLDRQPMKVLKEDAVRFYAAEVVTALEYLHCQGIIYRDLKPENILLHRDGHISLTDFDLSCLTSCRPQVFLPHDIDKKKKRRKSRSNPIFFAEPMRASNSFVGTEEYIAPEIITGAGHTSAVDWWALGILLYEMLYGYTPFRGKTRQRTFANILHKDIRFPASIQVSLAARQLIYRLLHRDPANRLGSYEGAMEIKQHPFFRGINWALVRAATPPELEAPLQDTLEATLPPPAADAAHTDMF

SEQ ID NO: 14748 - DNA, 1773 bp, Zea mays subsp. mays
  misc_feature (1)..(1773): Ceres Seq. ID no. 11050426
ggaattcccgtacagtatagcttcattcttaactggtgaacaaggcagcagctagcagatcgatctccatggacatggacatgagctcagcttatccccaccattggctctccttctccctctccaacaactaccaccatggcctactcgaagccttctctaactcctccggtactcctcttggagacgagcagggcgcagtggaggagtccccgaggacggtggaggacttcctcggcggcgtcggttgcgtcggcgccccgcgcagccggcggctgcagatcaggatcaccagcttgtgtgcggcgagctgtggcagcatcacagccaggttcttgcgccactacccggcggcgcagtctgggacgacggttggagaacccctttcgcggtttaccctggcggccatgtcgtcgacggacgttgcgtgggcggagtccgaccaggcgagtcggtccgccgagacgttcggccagcgcacatccatctaccgtggcgtcaccaggcaccggtggacggggagatatgaggcgcacctgtgggaaaacagctgccgccgggagggccaaagccgcaaaggacgccaagtctacctaggaggctatgacaaggaggagaaggcggctagagcttacgacctcgccgcgctcaagttctgggggcctacaaccacgaccaacttccaggtgtccaactacgagaaggagctggaggagatgaaatccatgacgcggcaggagttcatcgcgtcgttgcgcaggaagagcagcggcttctcacgaggcgcctccatctacagaggagtcacaaggcatcatcagcacggccggtggcaggcgaggattggcagtgtggccggaaacaaggacctgtacttgggcactttcagtactcaggaagaggcggcggaggcgtacgacatcgctgcgatcaagttccgcgggctcaacgccgtcaccaacttggacatgagccgctacgacgtggagagcatcctcagcagcgacctccccgtcgggggcggcgctagcggtcgcgccgccgccaagttcccgttggactcgctgcagccggggagcgctgccgccatgatgctcgccggggctgctgccgcttcgcaggccaccatgccgccgtccgagaaggactactggtctctgctcgccctgcactaccagcagcagcaggagcaggagcggcagttcccggcttctgcttacgaggcttacggctccggcggcgtgaacgtggacttcacgatgggcaccagcagcggcagcaacaacaacaccggcagcggcgtcatgtggggcgccacctctggtgcagtagtgggccagcaagacagcagcagcaagcagggcaacggctatgccagtaacattccttatgctgctgctatggtttctggaactgctggctacgagggctccaccggcgacaatggaacctgggttactacgactaccagcagcaacaccggcacggctccccactactacaactatctcttcgggatggagtaggtgcatgcgctgacaagctagctagctgaaatcaggtggtaggcctaggaagaagctaggactgacatggaactgatcacaattttggctgctacatataccatgcatgccccatgtatggatgggggtgcgtgtccgtccttctgcttgctattcacgacacttgctgacttactgtggcagagccgcagagggctcgtgtaccatcagcatttctaaattctaattatcaagctcgtttcaagct

SEQ ID NO: 14749 - protein, 485 aa, Zea mays subsp. mays
  misc_feature (1)..(485): Ceres Seq. ID no. 11050427
MDMDMSSAYPHHWLSFSLSNNYHHGLLEAFSNSSGTPLGDEQGAVEESPRTVEDFLGGVGCVGAPRSRRLQIRITSLCAASCGSITARFLRHYPAAQSGTTVGEPLSRFTLAAMSSTDVAWAESDQASRSAETFGQRTSIYRGVTRHRWTGRYEAHLWENSCRREGQSRKGRQVYLGGYDKEEKAARAYDLAALKFWGPTTTTNFQVSNYEKELEEMKSMTRQEFIASLRRKSSGFSRGASIYRGVTRHHQHGRWQARIGSVAGNKDLYLGTFSTQEEAAEAYDIAAIKFRGLNAVTNLDMSRYDVESILSSDLPVGGGASGRAAAKFPLDSLQPGSAAAMMLAGAAAASQATMPPSEKDYWSLLALHYQQQQEQERQFPASAYEAYGSGGVNVDFTMGTSSGSNNNTGSGVMWGATSGAVVGQQDSSSKQGNGYASNIPYAAAMVSGTAGYEGSTGDNGTWVTTTTSSNTGTAPHYYNYLFGME

SEQ ID NO: 14750 - protein, 483 aa, Zea mays subsp. mays
  misc_feature (1)..(483): Ceres Seq. ID no. 11050428
MDMSSAYPHHWLSFSLSNNYHHGLLEAFSNSSGTPLGDEQGAVEESPRTVEDFLGGVGCVGAPRSRRLQIRITSLCAASCGSITARFLRHYPAAQSGTTVGEPLSRFTLAAMSSTDVAWAESDQASRSAETFGQRTSIYRGVTRHRWTGRYEAHLWENSCRREGQSRKGRQVYLGGYDKEEKAARAYDLAALKFWGPTTTTNFQVSNYEKELEEMKSMTRQEFIASLRRKSSGFSRGASIYRGVTRHHQHGRWQARIGSVAGNKDLYLGTFSTQEEAAEAYDIAAIKFRGLNAVTNLDMSRYDVESILSSDLPVGGGASGRAAAKFPLDSLQPGSAAAMMLAGAAAASQATMPPSEKDYWSLLALHYQQQQEQERQFPASAYEAYGSGGVNVDFTMGTSSGSNNNTGSGVMWGATSGAVVGQQDSSSKQGNGYASNIPYAAAMVSGTAGYEGSTGDNGTWVTTTTSSNTGTAPHYYNYLFGME

SEQ ID NO: 14751 - protein, 481 aa, Zea mays subsp. mays
  misc_feature (1)..(481): Ceres Seq. ID no. 11050429
MSSAYPHHWLSFSLSNNYHHGLLEAFSNSSGTPLGDEQGAVEESPRTVEDFLGGVGCVGAPRSRRLQIRITSLCAASCGSITARFLRHYPAAQSGTTVGEPLSRFTLAAMSSTDVAWAESDQASRSAETFGQRTSIYRGVTRHRWTGRYEAHLWENSCRREGQSRKGRQVYLGGYDKEEKAARAYDLAALKFWGPTTTTNFQVSNYEKELEEMKSMTRQEFIASLRRKSSGFSRGASIYRGVTRHHQHGRWQARIGSVAGNKDLYLGTFSTQEEAAEAYDIAAIKFRGLNAVTNLDMSRYDVESILSSDLPVGGGASGRAAAKFPLDSLQPGSAAAMMLAGAAAASQATMPPSEKDYWSLLALHYQQQQEQERQFPASAYEAYGSGGVNVDFTMGTSSGSNNNTGSGVMWGATSGAVVGQQDSSSKQGNGYASNIPYAAAMVSGTAGYEGSTGDNGTWVTTTTSSNTGTAPHYYNYLFGME

SEQ ID NO: 14752 - DNA, 822 bp, Zea mays subsp. mays
  misc_feature (1)..(822): Ceres Seq. ID no. 11050491
acgcgtccgcccacgcgtccggggaaaacaatctctgcctgctcaaacgaaatatctgaaggttgtaaatgtccagtgggtttcaagggtgatggagaaaaaagttgtgaagacattgatgaatgccaagagaaactttattgtcagtgcaagggttgcagctgcaagaatacgtggggaagctatgaatgcagctgtggtgatgacaatatgctatacatgagagagcatgacacttgcatcagcaaagagggaactgccactactgttggctggagcttcctctgggttattttctttggacttgtttttgccggggttggagcatacgctgtgtacaaatacaggctgcggagttacatggattcagagatccgtgccatcatggctcagtacatgcctctggataaccaagtaggagcaaaccagcatcaggtcgtgcacgccaatgatatctgaagctgcactccttttctgaagcagaaatagagggggcgtgcaacatttcacttgtgctgctgcatcattgggtcatgggttttacaggtataggtcaactaggctcaaagatacacaggttatgcgagatcaagatctactgtaccatgaattaagatttaagagagagacgttgtgcgcctcttgttacgacacttgatgaacagcatagggaatgataccatcatagttttagtagtccttcgttgccttcagtttgtcttcaaagagttcttgttgcctcttcacatacatgtaaacactgtaaataccgttacctgaataaagctttcagcctgctaggctaaaagcagggtttactgt

SEQ ID NO: 14753 - protein, 152 aa, Zea mays subsp. mays
  misc_feature (1)..(152): Ceres Seq. ID no. 11050492
TRPPTRPGKTISACSNEISEGCKCPVGFKGDGEKSCEDIDECQEKLYCQCKGCSCKNTWGSYECSCGDDNMLYMREHDTCISKEGTATTVGWSFLWVIFFGLVFAGVGAYAVYKYRLRSYMDSEIRAIMAQYMPLDNQVGANQHQVVHANDI

SEQ ID NO: 14754 - protein, 82 aa, Zea mays subsp. mays
  misc_feature (1)..(82): Ceres Seq. ID no. 11050493
MLYMREHDTCISKEGTATTVGWSFLWVIFFGLVFAGVGAYAVYKYRLRSYMDSEIRAIMAQYMPLDNQVGANQHQVVHANDI

SEQ ID NO: 14755 - protein, 79 aa, Zea mays subsp. mays
  misc_feature (1)..(79): Ceres Seq. ID no. 11050494
MREHDTCISKEGTATTVGWSFLWVIFFGLVFAGVGAYAVYKYRLRSYMDSEIRAIMAQYMPLDNQVGANQHQVVHANDI

SEQ ID NO: 14756 - DNA, 827 bp, Zea mays subsp. mays
  misc_feature (1)..(827): Ceres Seq. ID no. 11050513
cggcgaaggggggtccaggaagaatcacacaacagcagctcaaaaaacccaacacacctcaacaagcagagcaaagacccgggattcgccggcgcggtagcagagcgagagatggacgggaggatgttcggtctcgagacccccctgatggtggcgctgcagcaccttctggacgtgcccgacggcgacgccggcgcgggcggcgacaaggcgggcggcggcgggcccacgcgcacctacgtcgccgacgcgcgcgccatggcggtcaccccggccgacgtcaaggagctcccgggcgcgtacgcgttcgtggtggacatgccggggctgggcacgggcgacatcaaggtgcaggtggaggacgagcgggtgctggtgatcagcggcgagcggcgccgggaggagcgcgaggacgccaagtacctgcgcatggagcggcggatgggcaagttcatgcgcaagttcgtgctgccggacaacgccgacatggacaagatctcggcggtgtgcagggacggcgtgctcaccgtgaccgtcgagaagctgcccccgcccgagcccaagaagcccaagaccatcgaggtcaaggtcgcctgaggtgggactaggtcgaccgatcgtggactctgaagatgtgggagcagtgccagcgagttgtgaggacctctacctgtgtggaatgtggcgaggaataatcgtagtctgtagtgggggtgcttctggtgtgcgtgtttgcttccttcggtcgcggtgtctgtctaccaattcctatctgatgtatgggcttcggtttcgtatgaaccatgccggatgctttcagtatgttc

SEQ ID NO: 14757 - protein, 201 aa, Zea mays subsp. mays
  misc_feature (1)..(201): Ceres Seq. ID no. 11050514
AKGGPGRITQQQLKKPNTPQQAEQRPGIRRRGSRARDGREDVRSRDPPDGGAAAPSGRARRRRRRGRRQGGRRRAHAHLRRRRARHGGHPGRRQGAPGRVRVRGGHAGAGHGRHQGAGGGRAGAGDQRRAAPGGARGRQVPAHGAADGQVHAQVRAAGQRRHGQDLGGVQGRRAHRDRREAAPARAQEAQDHRGQGRLRWD

SEQ ID NO: 14758 - protein, 198 aa, Zea mays subsp. mays
  misc_feature (1)..(198): Ceres Seq. ID no. 11050515
RRRGVQEESHNSSSKNPTHLNKQSKDPGFAGAVAEREMDGRMFGLETPLMVALQHLLDVPDGDAGAGGDKAGGGGPTRTYVADARAMAVTPADVKELPGAYAFVVDMPGLGTGDIKVQVEDERVLVISGERRREEREDAKYLRMERRMGKFMRKFVLPDNADMDKISAVCRDGVLTVTVEKLPPPEPKKPKTIEVKVA

SEQ ID NO: 14759 - protein, 161 aa, Zea mays subsp. mays
  misc_feature (1)..(161): Ceres Seq. ID no. 11050516
MDGRMFGLETPLMVALQHLLDVPDGDAGAGGDKAGGGGPTRTYVADARAMAVTPADVKELPGAYAFVVDMPGLGTGDIKVQVEDERVLVISGERRREEREDAKYLRMERRMGKFMRKFVLPDNADMDKISAVCRDGVLTVTVEKLPPPEPKKPKTIEVKVA

SEQ ID NO: 14760 - DNA, 2837 bp, Zea mays subsp. mays
  misc_feature (1)..(2837): Ceres Seq. ID no. 11050525
atatttaaaaattcaatatttgtttgtttatgagtgtttgatgagtatattgtacctcttgtaaactgaagcacacgattaattctttgttaaagaatgccatgataatagtttgctataaatgaaattaatgttaaatcaatttgttaaaaattatggtttcttctgaatttagttattgccgatagagaaaaaacattgaaaaaatatttagatcatatacggctgaatttagttattgatgatcttatttgttatattttatttgtttgaggaatacacgcttattttacttcaccctgtttgttactttagtcactagattaaactttagtttaatcgctaaagtacctcgttggtttcagtgactaaaccagactaaagagcattaattgatgtaaataatgactatgttgtccatattaattagtggatatttgctgcaaaaagaaagtgaagagggcaaataaggtaaaaatcctactttaatcccttttagccatcccttggtgactaaagaattaaagtttagtcacaacactttagtcaccatatttaattctttagggactaaaagtgactaaactttagtcaccccaaactaaacggtaccttagatctatttatttgaggaatgcaagtgtttgaataactattctatttaaataagatctacctaacgacgtacggacatctaactagtatagaattaacgtacacatgtattgatttgagtgacccatggctgattccagtgatcaacaataatcctgccaagcatcaagctaatcccaaggtgccacggaatggtctcgcccgccgccgctggccacatataccagcaggtgaccgtcggattgggtggcgcttggcacggaaaaaaatttggtgcagcactgctgcaaaccagagtggtttgcagcccctcacaaaaaggaggatagaccccacctgcaggtccagcagataacgttttagttgtattattgttgctgcgggtggggtctatcctcttttttgtgaggggctgcaaacactctggtttgcagcagtgctgcaccaaatttttttcccttggcacgtgttcgggtggtagctggctcctccatgcaatgcctatgcctgtcgtcgcgatcgcaaccaccagtcaagacgaatggcaggcagctaagtagctaacaacaacaggcttgtattgtatgtacagcaatatatatacatctcgagaagctcctagcagagatgcatccatctcgacgacgatccatccatcttaaagcaagcagagacatggagtcgtcgccgctgctgcagctgccggcggcacgcgtggaggctctgagcctcagcggcctctccgccatcccgcccgagtacgtccgccccgccgacgagcgagccggcctcggggatgccttcgacctggcgcgcacccatgccaacgaccacaccgcgccgaggatccccgtcgtcgacatctccccgttcctcgacagcagcagccagcagcagcagcgggacgaatgcgtggaggccgtgcgtgccgccgccgccgactggggcgtcatgcacatcgccggccacggcatccccgccgagctcatggaccgcctgcgcgccgcaggaaccgccttcttcgccctccccgtccaggacaaggaggcctacgccaacgaccccgccgccggccgcctgcagggctacggcagccgcctcgccaccaacacctgcgggcagcgcgagtgggaggactacctcttccaccttgtgcaccccgacgggctcgccgaccacgcgctctggcctgcgtacccgcccgactacatcgccgccacccgcgacttcggccgccgaacgcgggacctggcctccacgctgctcgccatcctctccatgggcctccttggcacagaccgtggcgacgcgctagagaaggcgctcaccaccaccaccaccaggacagcagctgacgacgacctcctcctgcagctcaagatcaactactacccgaggtgcccgcagccggagctggccgtcggcgtggaggcccacacggacgtcagcgccctctccttcatcctccacaacggcgtgccgggcctgcaggtgctccacggcgcccgctgggtgacggcgcgccacgagccgggcaccatcatcgtccacgtgggggacgccctggagatcctcagcaacggccgctacaccagcgtcctccaccgcggcctcgtcaaccgggaggccgtgcgcatctcctgggtcgtcttctgcgagccgccaccagactccgtgctgctgcacccgctgccggagcttgtcacggaaggccaccccgcaaggttcacgccgcgcacattcaagcagcacctggatcgcaagcttttcaagaagaaacagcagcacaaagcaaaagcagaggaagaggatggcggcaatggtgaccaccaccgccacgagccgccgccgcagaccaactgatgggctgcacatgtctttccatccgcccacgcatatcttctctcgcgaaattaataaggatccatcagcattttccatatatttatattagtttcatgctcctacgttactacgagaaaaaaaatagtatctatgatatatagaatccatgtgttaaaatatcactgtaacactaatattatatatgttgttacgaaatcaatataataaaataaattgatataccaaaacactaattattattctatagttttgttagagtaactaaaagttaagatttatatactttaaaagatatataagattgtaccatcactagtaaaaaataaacaataccaatattttataaatatgagtat

SEQ ID NO: 14761 - protein, 411 aa, Zea mays subsp. mays
  misc_feature (1)..(411): Ceres Seq. ID no. 11050526
MHPSRRRSIHLKASRDMESSPLLQLPAARVEALSLSGLSAIPPEYVRPADERAGLGDAFDLARTHANDHTAPRIPVVDISPFLDSSSQQQQRDECVEAVRAAAADWGVMHIAGHGIPAELMDRLRAAGTAFFALPVQDKEAYANDPAAGRLQGYGSRLATNTCGQREWEDYLFHLVHPDGLADHALWPAYPPDYIAATRDFGRRTRDLASTLLAILSMGLLGTDRGDALEKALTTTTTRTAADDDLLLQLKINYYPRCPQPELAVGVEAHTDVSALSFILHNGVPGLQVLHGARWVTARHEPGTIIVHVGDALEILSNGRYTSVLHRGLVNREAVRISWVVFCEPPPDSVLLHPLPELVTEGHPARFTPRTFKQHLDRKLFKKKQQHKAKAEEEDGGNGDHHRHEPPPQTN

SEQ ID NO: 14762 - protein, 395 aa, Zea mays subsp. mays
  misc_feature (1)..(395): Ceres Seq. ID no. 11050527
MESSPLLQLPAARVEALSLSGLSAIPPEYVRPADERAGLGDAFDLARTHANDHTAPRIPVVDISPFLDSSSQQQQRDECVEAVRAAAADWGVMHIAGHGIPAELMDRLRAAGTAFFALPVQDKEAYANDPAAGRLQGYGSRLATNTCGQREWEDYLFHLVHPDGLADHALWPAYPPDYIAATRDFGRRTRDLASTLLAILSMGLLGTDRGDALEKALTTTTTRTAADDDLLLQLKINYYPRCPQPELAVGVEAHTDVSALSFILHNGVPGLQVLHGARWVTARHEPGTIIVHVGDALEILSNGRYTSVLHRGLVNREAVRISWVVFCEPPPDSVLLHPLPELVTEGHPARFTPRTFKQHLDRKLFKKKQQHKAKAEEEDGGNGDHHRHEPPPQTN

SEQ ID NO: 14763 - protein, 303 aa, Zea mays subsp. mays
  misc_feature (1)..(303): Ceres Seq. ID no. 11050528
MHIAGHGIPAELMDRLRAAGTAFFALPVQDKEAYANDPAAGRLQGYGSRLATNTCGQREWEDYLFHLVHPDGLADHALWPAYPPDYIAATRDFGRRTRDLASTLLAILSMGLLGTDRGDALEKALTTTTTRTAADDDLLLQLKINYYPRCPQPELAVGVEAHTDVSALSFILHNGVPGLQVLHGARWVTARHEPGTIIVHVGDALEILSNGRYTSVLHRGLVNREAVRISWVVFCEPPPDSVLLHPLPELVTEGHPARFTPRTFKQHLDRKLFKKKQQHKAKAEEEDGGNGDHHRHEPPPQTN

SEQ ID NO: 14764 - DNA, 1262 bp, Zea mays subsp. mays
  misc_feature (1)..(1262): Ceres Seq. ID no. 11050568
ctcgtgcgctgatattccgctcctgtccctgtgtcctccccggatggagctagagccggctctgctcatcattatatcgtcgcgcacaaatgcagcacttgtgttcgtgggggtgtgtggcatattagctagcggataagcggccggccgggcagctagcagaagagagcaagctcggacctcggatcggaggaggtcggcatggggaggggacgcgtcgagctgaagcggatcgagaacaagatcaaccgccaggtcaccttctccaagcgccgcaacggcctgctcaagaaggcctacgagctctccgtgctctgcgacgccgaggtcgcgctcatcatcttctccggccgcggcaagctctacgagttcggcagcgccggcgtaactaaaactttagaaaggtatcaacattgctgctacaatgctcaagattccaacaatagtgcactctctgaatctcagagctggtaccaggaaatgtcaaaactgagggcaaaattcgaggccttgcagcgcactcagaggcacttgcttggcgaggaccttgggccactgagtgtgaaggaattgcagcagctagagaaacagctagaatgtgctttgtcacaggcaagacagagaaagacgcaagttatgatggagcaagtggaagagcttcgcagaacggagcgtcacctgggagaaatgaacaggcaactcaaacacaagctcgaagctgaaggctgtagcaactacacaaccttgcagcatgccgcctgctggccagctcccggcggcaccatcgtggagcatgacggcgccacctatcaagtgcatccgcctgcccactcagttgctatggactgtgaacccactctgcaaatcgggtaccctcatcaccagtttccgccccctgaggcagtcaataatatcccaaggagcgccgccacaggcgagaacaacttcatgctgggatgggttctttgagttcttctgttaatccatccatcagatggatccatgttgaaaccaataaaaggcattcagtgctatatatatcatatgcatatccgtgctcaagtgcttgatttgccacgacgttggattgtatcgttctgtgtgtaatagctaatttagaacggcacatctattctatgtggttgtggtgtggcacttatactgtttattcatttggaccatgaatcggggtagtttgtaaaaacacatctatatatgctgccggtgcatagaattaaagttatctgcaccgtaattattat

SEQ ID NO: 14765 - protein, 255 aa, Zea mays subsp. mays
  misc_feature (1)..(255): Ceres Seq. ID no. 11050569
MGRGRVELKRIENKINRQVTFSKRRNGLLKKAYELSVLCDAEVALIIFSGRGKLYEFGSAGVTKTLERYQHCCYNAQDSNNSALSESQSWYQEMSKLRAKFEALQRTQRHLLGEDLGPLSVKELQQLEKQLECALSQARQRKTQVMMEQVEELRRTERHLGEMNRQLKHKLEAEGCSNYTTLQHAACWPAPGGTIVEHDGATYQVHPPAHSVAMDCEPTLQIGYPHHQFPPPEAVNNIPRSAATGENNFMLGWVL

SEQ ID NO: 14766 - protein, 162 aa, Zea mays subsp. mays
  misc_feature (1)..(162): Ceres Seq. ID no. 11050570
MSKLRAKFEALQRTQRHLLGEDLGPLSVKELQQLEKQLECALSQARQRKTQVMMEQVEELRRTERHLGEMNRQLKHKLEAEGCSNYTTLQHAACWPAPGGTIVEHDGATYQVHPPAHSVAMDCEPTLQIGYPHHQFPPPEAVNNIPRSAATGENNFMLGWVL

SEQ ID NO: 14767 - DNA, 924 bp, Zea mays subsp. mays
  misc_feature (1)..(924): Ceres Seq. ID no. 11050602
gaattccggcttcaaatacttgcataagatggcaggttccgtggcaatcgtgggcatcttcgtcgccctcctcgccgtggccggcgaggcggctgtgttcacggtggtgaaccagtgcccgttcaccgtgtgggccgcgtccgtgccggtgggcggcgggcggcagctgaaccgcggcgagagctggcggatcacggcccccgcgggcacgacggccgcgcgcatctgggcgcgcacggggtgcaagttcgacgcgagcgggcgcgggagctgccgcacgggggactgcggcggcgtgctgcagtgcactgggtacgggcgcgcgcccaacacgctggcggagtacgcgctgaagcagttcaacaacctcgacttcttcgacatctccctcatcgacggcttcaacgtgcccatgagcttcctccccgacggcgggtccgggtgcagccgcggcccgcgctgcgccgtggacgtgaacgcgcgctgccctgccgagctgcggcaggacggcgtgtgcaacaacgcgtgccccgtgttcaagaaggacgagtactgctgcgtcggctcggcggccaacgactgccacccgaccaactactccaggtacttcaaggggcagtgccccgacgcgtacagctaccccaaggatgacgccaccagcaccttcacctgccccgccggaaccaactacaaggtcgtcttctgcccgtgaggccgctgaactagcatcagcgtgcgcgcgtcgaccaagaacaagaaataaacgaccgaggctgtgtatgttgcccgccgtgtgctcaactggagcaaaaataaagccaacaaaacaagcacgtgtgatctctatgtcaccaactctatcaccttaattaatggggcattatgaagttgtttctttacatgctcgtactgaaattgggtttt

SEQ ID NO: 14768 - protein, 236 aa, Zea mays subsp. mays
  misc_feature (1)..(236): Ceres Seq. ID no. 11050603
NSGFKYLHKMAGSVAIVGIFVALLAVAGEAAVFTVVNQCPFTVWAASVPVGGGRQLNRGESWRITAPAGTTAARIWARTGCKFDASGRGSCRTGDCGGVLQCTGYGRAPNTLAEYALKQFNNLDFFDISLIDGFNVPMSFLPDGGSGCSRGPRCAVDVNARCPAELRQDGVCNNACPVFKKDEYCCVGSAANDCHPTNYSRYFKGQCPDAYSYPKDDATSTFTCPAGTNYKVVFCP

SEQ ID NO: 14769 - protein, 227 aa, Zea mays subsp. mays
  misc_feature (1)..(227): Ceres Seq. ID no. 11050604
MAGSVAIVGIFVALLAVAGEAAVFTVVNQCPFTVWAASVPVGGGRQLNRGESWRITAPAGTTAARIWARTGCKFDASGRGSCRTGDCGGVLQCTGYGRAPNTLAEYALKQFNNLDFFDISLIDGFNVPMSFLPDGGSGCSRGPRCAVDVNARCPAELRQDGVCNNACPVFKKDEYCCVGSAANDCHPTNYSRYFKGQCPDAYSYPKDDATSTFTCPAGTNYKVVFCP

SEQ ID NO: 14770 - DNA, 756 bp, Zea mays subsp. mays
  misc_feature (1)..(756): Ceres Seq. ID no. 11050697
gcagccgctctccccagccccactctctccatctagccccctaactgccaccggccgccacaccaccccgaccggaccctccacaacaatggccaccgtcctgggcagcccccgcgcgccggccttcttcttttcgtcgtcctccctccgcgccgcgccggcgcctaccgccgtggcgctgcctgcggccaaggtgggcatcatgggccgtagcgccagcagcaggcgcaggctgcgcgcgcaggccacctacaacgtgaagctgatcacgccggagggggaggtggagctgcaggtgcccgacgacgtgtacatcctggaccaggccgaggaggacggcatcgacctgccctactcctgccgcgcggggtcctgctcctcgtgcgccggcaaggtcgtctccggctccgtggaccagtccgaccagagctacctcgacgacggccagatcgccgacggctgggtgctcacctgccacgcctaccccacctctgacgtcgtcatcgagacgcacaaggaggaggagctcaccggcgcataatcatgcccatccatctctctctctatatatctctgtgtgtcgttgtgtgtaatttgagtacgcgcgtacgtactgcttgggtttcatttgagtgcagttcatgtaagcgtggagttttcagacaccgccctgccatcgtctctctctctctctgtgcgcgcttctatttccaatgttgagttacgcatatttgtccagtaaccttttgcttaatc

SEQ ID NO: 14771 - protein, 179 aa, Zea mays subsp. mays
  misc_feature (1)..(179): Ceres Seq. ID no. 11050698
QPLSPAPLSPSSPLTATGRHTTPTGPSTTMATVLGSPRAPAFFFSSSSLRAAPAPTAVALPAAKVGIMGRSASSRRRLRAQATYNVKLITPEGEVELQVPDDVYILDQAEEDGIDLPYSCRAGSCSSCAGKVVSGSVDQSDQSYLDDGQIADGWVLTCHAYPTSDVVIETHKEEELTGA

SEQ ID NO: 14772 - protein, 150 aa, Zea mays subsp. mays
  misc_feature (1)..(150): Ceres Seq. ID no. 11050699
MATVLGSPRAPAFFFSSSSLRAAPAPTAVALPAAKVGIMGRSASSRRRLRAQATYNVKLITPEGEVELQVPDDVYILDQAEEDGIDLPYSCRAGSCSSCAGKVVSGSVDQSDQSYLDDGQIADGWVLTCHAYPTSDVVIETHKEEELTGA

SEQ ID NO: 14773 - protein, 112 aa, Zea mays subsp. mays
  misc_feature (1)..(112): Ceres Seq. ID no. 11050700
MGRSASSRRRLRAQATYNVKLITPEGEVELQVPDDVYILDQAEEDGIDLPYSCRAGSCSSCAGKVVSGSVDQSDQSYLDDGQIADGWVLTCHAYPTSDVVIETHKEEELTGA

SEQ ID NO: 14774 - DNA, 1353 bp, Zea mays subsp. mays
  misc_feature (1)..(1353): Ceres Seq. ID no. 11050729
acggccaacgtgctgggccacccgaccccgagcctccgcgaccactacgcgctcggccgcaagctggggcaggggcagttcggcaccacctacctctgcacggacctcgccacgggtggactacgctgcaagagtatagccaagcggaacgtcatcaccaaggaggatgtcgaggacgtgcgccgcgagatccagattatgcaccacctggctggccaccggaacgtcgtcgccatcaagggcgcgtacgaggaccagttgtacgtccacatcgttatggagttctgcgcgggcggggagctcttcgaccgtatcatacagcgggggcattacagcgagcgcaaggccgcggagctcacgcgcattatcgttggggtcgtcgaggcttgccactcgctcggggtaatgcacagggatctcaagccagagaacttcctgctctcgaacaaggatgacgatatgtcgctcaaggccatcgacttcggcctctccgtgttcttcaagcctggtcaaatttttaccgatgttgtgggaagcccttactatgtagctccagaagtgctgcgcaaacgatatggaccagaagctgatgtgtggacagctggagttattctttacatacttctatgtggtgtaccgccattttgggcagagacacagcaaggccttttcgatgctgttctgaaaggtgtaattgattttgatttggatccctggcctgtgatctctgagagtgcgaaggatcttataagaagaatgctgaatcctatcccatcgagacgcttaacagcacatgaagttctatgtcatccatggatttgtgaccatggagttgctcctgatcgtcctcttgatccagctgtcctgtcacgcatcaagcagttctcagcagtgaataagttaaagaagatgatggccttgcaggtcattgctgagagcctttcggaggaggagattgcagggccgaaggaaatgttcatggcaatggatacagataatagcggtgcaattacatatgatgaactgaaggaaggattgagaaagtatggctccacattaaaggatactgaaattcgtgatctcatggaggcggcggatatagacaacagcgggaccattgattatatagaattcattgctgctacattgcacctcaataaactggaacgtgaggaacatctagttgcagcattttcctattttgacaaagatagcagtggttacattactgtggatgagcttcaacaagcctgcaaagagcataacatgccagctgcttttcttgatgatgtgattaaagaagctgaccaggataatgatgggcgcattgattacggggaatttgcggaattc

SEQ ID NO: 14775 - protein, 451 aa, Zea mays subsp. mays
  misc_feature (1)..(451): Ceres Seq. ID no. 11050730
TANVLGHPTPSLRDHYALGRKLGQGQFGTTYLCTDLATGGLRCKSIAKRNVITKEDVEDVRREIQIMHHLAGHRNVVAIKGAYEDQLYVHIVMEFCAGGELFDRIIQRGHYSERKAAELTRIIVGVVEACHSLGVMHRDLKPENFLLSNKDDDMSLKAIDFGLSVFFKPGQIFTDVVGSPYYVAPEVLRKRYGPEADVWTAGVILYILLCGVPPFWAETQQGLFDAVLKGVIDFDLDPWPVISESAKDLIRRMLNPIPSRRLTAHEVLCHPWICDHGVAPDRPLDPAVLSRIKQFSAVNKLKKMMALQVIAESLSEEEIAGPKEMFMAMDTDNSGAITYDELKEGLRKYGSTLKDTEIRDLMEAADIDNSGTIDYIEFIAATLHLNKLEREEHLVAAFSYFDKDSSGYITVDELQQACKEHNMPAAFLDDVIKEADQDNDGRIDYGEFAEF

SEQ ID NO: 14776 - protein, 385 aa, Zea mays subsp. mays
  misc_feature (1)..(385): Ceres Seq. ID no. 11050731
MHHLAGHRNVVAIKGAYEDQLYVHIVMEFCAGGELFDRIIQRGHYSERKAAELTRIIVGVVEACHSLGVMHRDLKPENFLLSNKDDDMSLKAIDFGLSVFFKPGQIFTDVVGSPYYVAPEVLRKRYGPEADVWTAGVILYILLCGVPPFWAETQQGLFDAVLKGVIDFDLDPWPVISESAKDLIRRMLNPIPSRRLTAHEVLCHPWICDHGVAPDRPLDPAVLSRIKQFSAVNKLKKMMALQVIAESLSEEEIAGPKEMFMAMDTDNSGAITYDELKEGLRKYGSTLKDTEIRDLMEAADIDNSGTIDYIEFIAATLHLNKLEREEHLVAAFSYFDKDSSGYITVDELQQACKEHNMPAAFLDDVIKEADQDNDGRIDYGEFAEF

SEQ ID NO: 14777 - protein, 359 aa, Zea mays subsp. mays
  misc_feature (1)..(359): Ceres Seq. ID no. 11050732
MEFCAGGELFDRIIQRGHYSERKAAELTRIIVGVVEACHSLGVMHRDLKPENFLLSNKDDDMSLKAIDFGLSVFFKPGQIFTDVVGSPYYVAPEVLRKRYGPEADVWTAGVILYILLCGVPPFWAETQQGLFDAVLKGVIDFDLDPWPVISESAKDLIRRMLNPIPSRRLTAHEVLCHPWICDHGVAPDRPLDPAVLSRIKQFSAVNKLKKMMALQVIAESLSEEEIAGPKEMFMAMDTDNSGAITYDELKEGLRKYGSTLKDTEIRDLMEAADIDNSGTIDYIEFIAATLHLNKLEREEHLVAAFSYFDKDSSGYITVDELQQACKEHNMPAAFLDDVIKEADQDNDGRIDYGEFAEF

SEQ ID NO: 14778 - DNA, 3045 bp, Zea mays subsp. mays
  misc_feature (1)..(3045): Ceres Seq. ID no. 11050733
cctcgggtctcggctctcgccgtcgccactcgccgcgagcgagatgcagggcctagccgtatcatgccagcttcctcctgctgcggccgcagctcggtggcggccgcgcgcttcttcctctaatagggaagcagttttacaatgttggaagtatgaattaagtcaagaccactatttgggaggccccctaaggataggtcagtctcaaggaagtttgcacagacatcgctctacaaattttctcagaccagctgctgcagctatttcagttgaacaagatgaagtcaatacttatcttccaaaaggtgatatgtggtctgtgcacaagttcggtggaacctgtatgggaactcccaaaagaatccagtgtgttgcaaatatagttcttggtgattcttctgagaggaagctgatcattgtttccgcaatgtccaaagtaactgacatgatgtacaaccttgtacaaaaggctcagtcacgggatgattcatatgcaatagcactggcagaagtttttgagaagcatatgactgcagcaaaggatcttcttgacggagaagatcttgcaagattcttgtctcagttgcattcagacgtcagcaacttgcgagccatgctccgtgctatttatatagctgggcatgcgacagaatctttctctgactttgttgttgggcatggagagttgtggtctgcgcagatgctgtcgtatgcaataaagaagtctggggcaccctgcagttggatggatacaagagaagttctagttgtaacacccagtggttgtaatcaagtagaccctgattacttggaatgtgagaagcgacttcagaaatggttttctcgacaaccagctgagataatagttgctacaggatttattgcaagtacagctggaaacattccaacaactctaaaaagggatggaagtgatttctcagcagccatagttggttctcttgtcagggcacgccaggtcactatttggactgatgttgacggggtatttagcgcagatcctagaaaagttagtgaggctgtgatcttaagcactctgtcttaccaggaggcctgggaaatgtcatattttggggcaaatgttttgcatccgcgcaccattatacctgtgatgaaagacaacattcccattgttattaggaacatgttcaacctctctgcccctggaaccatgatttgcaagcagcctgccaatgaaaatggtgatttagacgcatgtgtcaaatcatttgctactgtcgataatttagcacttgttaatgttgaaggaactggaatggctggcgttccaggtacagcaagtgctatatttagtgctgttaaggatgttggagctaatgttatcatgatatctcaggctagcagcgaacattcagtatgctttgctgttccagaaaaggaagttgctgtagtttctgctgagttacatgataggtttcgtgaggcattagctgcagggaggctgtctaaggttgaagttattaatggttgcagcattcttgctgctgttggtctgaggatggccagcactccaggagtcagtgcaatactttttgatgcattagcaaaggcaaacattaatgttcgagcaatagctcaaggttgcagtgaatacaatattactgttgtattgaagcaacaagattgtgtaagggctctgagagctgctcactcaaggttcttcctctccaaaaccacacttgctgttgggatcattggacctggtttaattggtggagcactccttaaccagttgaagaatcagactgctgttctcaaggaaaatatgaacattgatctgcgtgtcattggaataactggctcaagtacaatgcttctgagcgacacgggaatagacttaacccagtggaaacagcttctacaaaaggaagcagaaccagctgatattggtagttttgttcatcatttatctgataatcatgtatttccgaacaaagttttggtggactgcacagcggatacaagtgtggcatcccactattacgattggttaaagaagggtattcatgtcatcacgccaaataagaaagcaaattctgggccacttgatcagtacctgaaattacggactatgcagcgtgcctcatacactcattacttttatgaagcaactgttggtgctggcctcccaatcatcagcaccttgcgaggtcttctggagacgggtgacaagatactgcgtattgagggcattttcagtggaactttgagttatatatttaacaatttcgaaggaacaagggcgtttagtgatgttgttgccgaagcaagagaggcgggatacactgaacctgacccaagggatgatctatctggaactgacgttgcccgaaaggtcgttgtcctcgcgagggaatctggtctgaggcttgaactttctgacattcctgtgaagagccttgtgccagaaacacttgcatcatgctcgtcagcagatgaattcatgcagaagctaccgtccttcgacgaggactgggccaggcaacgcagtgatgctgaggctgcaggcgaagtcctgcgttacgttggagcgttggatgcggtgaacaggagcggacaggtggagctacgcaggtacaggagggaccacccgttcgcgcagctctccggctccgacaacatcatcgccttcaccacgtccaggtacaaggagcagccgctgatcgtgcggggtccgggtgccggcgcggaggtgacagccggtggcgtcttctgcgacattctgcggctggcgtcttacctcggtgctccttcttgagcttcgagctacaggtgccagtttcaggaagcagtcggagacacactgccatgcatgatgcctcccctccgtgtttgggctatgctcacatgttgtaatgttgttctgaataagtgccaggaaataatgcctctagcgtatgtcgagagagagaggtggttcggctttggaatagccgattaggtgttgtttttgctgcatgatgcaaatgaattatcgtaccactgaagggatgtttgcttgtgcct

SEQ ID NO: 14779 - protein, 931 aa, Zea mays subsp. mays
  misc_feature (1)..(931): Ceres Seq. ID no. 11050734
LGSRLSPSPLAASEMQGLAVSCQLPPAAAAARWRPRASSSNREAVLQCWKYELSQDHYLGGPLRIGQSQGSLHRHRSTNFLRPAAAAISVEQDEVNTYLPKGDMWSVHKFGGTCMGTPKRIQCVANIVLGDSSERKLIIVSAMSKVTDMMYNLVQKAQSRDDSYAIALAEVFEKHMTAAKDLLDGEDLARFLSQLHSDVSNLRAMLRAIYIAGHATESFSDFVVGHGELWSAQMLSYAIKKSGAPCSWMDTREVLVVTPSGCNQVDPDYLECEKRLQKWFSRQPAEIIVATGFIASTAGNIPTTLKRDGSDFSAAIVGSLVRARQVTIWTDVDGVFSADPRKVSEAVILSTLSYQEAWEMSYFGANVLHPRTIIPVMKDNIPIVIRNMFNLSAPGTMICKQPANENGDLDACVKSFATVDNLALVNVEGTGMAGVPGTASAIFSAVKDVGANVIMISQASSEHSVCFAVPEKEVAVVSAELHDRFREALAAGRLSKVEVINGCSILAAVGLRMASTPGVSAILFDALAKANINVRAIAQGCSEYNITVVLKQQDCVRALRAAHSRFFLSKTTLAVGIIGPGLIGGALLNQLKNQTAVLKENMNIDLRVIGITGSSTMLLSDTGIDLTQWKQLLQKEAEPADIGSFVHHLSDNHVFPNKVLVDCTADTSVASHYYDWLKKGIHVITPNKKANSGPLDQYLKLRTMQRASYTHYFYEATVGAGLPIISTLRGLLETGDKILRIEGIFSGTLSYIFNNFEGTRAFSDVVAEAREAGYTEPDPRDDLSGTDVARKVVVLARESGLRLELSDIPVKSLVPETLASCSSADEFMQKLPSFDEDWARQRSDAEAAGEVLRYVGALDAVNRSGQVELRRYRRDHPFAQLSGSDNIIAFTTSRYKEQPLIVRGPGAGAEVTAGGVFCDILRLASYLGAPS

SEQ ID NO: 14780 - protein, 917 aa, Zea mays subsp. mays
  misc_feature (1)..(917): Ceres Seq. ID no. 11050735
MQGLAVSCQLPPAAAAARWRPRASSSNREAVLQCWKYELSQDHYLGGPLRIGQSQGSLHRHRSTNFLRPAAAAISVEQDEVNTYLPKGDMWSVHKFGGTCMGTPKRIQCVANIVLGDSSERKLIIVSAMSKVTDMMYNLVQKAQSRDDSYAIALAEVFEKHMTAAKDLLDGEDLARFLSQLHSDVSNLRAMLRAIYIAGHATESFSDFVVGHGELWSAQMLSYAIKKSGAPCSWMDTREVLVVTPSGCNQVDPDYLECEKRLQKWFSRQPAEIIVATGFIASTAGNIPTTLKRDGSDFSAAIVGSLVRARQVTIWTDVDGVFSADPRKVSEAVILSTLSYQEAWEMSYFGANVLHPRTIIPVMKDNIPIVIRNMFNLSAPGTMICKQPANENGDLDACVKSFATVDNLALVNVEGTGMAGVPGTASAIFSAVKDVGANVIMISQASSEHSVCFAVPEKEVAVVSAELHDRFREALAAGRLSKVEVINGCSILAAVGLRMASTPGVSAILFDALAKANINVRAIAQGCSEYNITVVLKQQDCVRALRAAHSRFFLSKTTLAVGIIGPGLIGGALLNQLKNQTAVLKENMNIDLRVIGITGSSTMLLSDTGIDLTQWKQLLQKEAEPADIGSFVHHLSDNHVFPNKVLVDCTADTSVASHYYDWLKKGIHVITPNKKANSGPLDQYLKLRTMQRASYTHYFYEATVGAGLPIISTLRGLLETGDKILRIEGIFSGTLSYIFNNFEGTRAFSDVVAEAREAGYTEPDPRDDLSGTDVARKVVVLARESGLRLELSDIPVKSLVPETLASCSSADEFMQKLPSFDEDWARQRSDAEAAGEVLRYVGALDAVNRSGQVELRRYRRDHPFAQLSGSDNIIAFTTSRYKEQPLIVRGPGAGAEVTAGGVFCDILRLASYLGAPS

SEQ ID NO: 14781 - protein, 828 aa, Zea mays subsp. mays
  misc_feature (1)..(828): Ceres Seq. ID no. 11050736
MWSVHKFGGTCMGTPKRIQCVANIVLGDSSERKLIIVSAMSKVTDMMYNLVQKAQSRDDSYAIALAEVFEKHMTAAKDLLDGEDLARFLSQLHSDVSNLRAMLRAIYIAGHATESFSDFVVGHGELWSAQMLSYAIKKSGAPCSWMDTREVLVVTPSGCNQVDPDYLECEKRLQKWFSRQPAEIIVATGFIASTAGNIPTTLKRDGSDFSAAIVGSLVRARQVTIWTDVDGVFSADPRKVSEAVILSTLSYQEAWEMSYFGANVLHPRTIIPVMKDNIPIVIRNMFNLSAPGTMICKQPANENGDLDACVKSFATVDNLALVNVEGTGMAGVPGTASAIFSAVKDVGANVIMISQASSEHSVCFAVPEKEVAVVSAELHDRFREALAAGRLSKVEVINGCSILAAVGLRMASTPGVSAILFDALAKANINVRAIAQGCSEYNITVVLKQQDCVRALRAAHSRFFLSKTTLAVGIIGPGLIGGALLNQLKNQTAVLKENMNIDLRVIGITGSSTMLLSDTGIDLTQWKQLLQKEAEPADIGSFVHHLSDNHVFPNKVLVDCTADTSVASHYYDWLKKGIHVITPNKKANSGPLDQYLKLRTMQRASYTHYFYEATVGAGLPIISTLRGLLETGDKILRIEGIFSGTLSYIFNNFEGTRAFSDVVAEAREAGYTEPDPRDDLSGTDVARKVVVLARESGLRLELSDIPVKSLVPETLASCSSADEFMQKLPSFDEDWARQRSDAEAAGEVLRYVGALDAVNRSGQVELRRYRRDHPFAQLSGSDNIIAFTTSRYKEQPLIVRGPGAGAEVTAGGVFCDILRLASYLGAPS

SEQ ID NO: 14782 - DNA, 1128 bp, Zea mays subsp. mays
  misc_feature (1)..(1128): Ceres Seq. ID no. 11050764
gcaacaccagcttctctaaagatcacaatgatgagagccctggcgtggtggccatgctggcccgccttcttcgctgtgcccgctcgcgccgagcagtgcgggtcgcaggccggcggcgcgctgtgccccaactgcctgtgctgcagccagttcgggtggtgcggcagctccgactactgcggcagcgggtgccagagccagtgcagcgcagcctgcagcaccccgaacccgccgagcagcggcggcgtggcgtccatcatccccgagtcgctcttcaaccagatgctgctgcaccgcaacgacgcggcgtgccccgccaacggcttctacacctacgcgggcttcatcgcggcggccaacgcgttcccgggcttggcaccacgggtgcggcccgacgtgcagaagcgcgagctggcggcgttcctggcgcagacgtcccacgagacgacgggcgggtgggcgacggcgcgacggccctacgcctggggctactgcttcaaggaggagcagggcggcgcgtcggggccggactactgcgagcccagcgcccagtggccgtgcgccgcggggaagaagtactacgggccgcgggccatccagatctccatcaacatcaacatcgggcccgctggcaggccatcggcgcccggcatcctcgccaacccggacctggtggccacccgaccccaccgtgtcgttcgaagaccgccgtctggttctgggatgaccccgcagtcgcccaagccgtcgtgcaccgacgtcatgacggggcagtggacgccctccgccgctgacacggccgccggcaggctgccgggctacggcgtcgtcaccaacatctccaacggcggcctcgagtgcggccatggcgctgacagccgcgtcgccgaccggatcggcttctacaaacgatactgtgacttgcttggggtcagctacggcgacaacttggactgcgccaaccagacgcctttcaacggctagttaataagctagctacctcaccatgcatgtctgccttattattagagacacaataagacctgatcgatatgatgatgggtatgcatgtattactttactacacgcagatccagcaatcaagaataaagcaaattaatgtttact

SEQ ID NO: 14783 - protein, 327 aa, Zea mays subsp. mays
  misc_feature (1)..(327): Ceres Seq. ID no. 11050765
ATPASLKITMMRALAWWPCWPAFFAVPARAEQCGSQAGGALCPNCLCCSQFGWCGSSDYCGSGCQSQCSAACSTPNPPSSGGVASIIPESLFNQMLLHRNDAACPANGFYTYAGFIAAANAFPGLAPRVRPDVQKRELAAFLAQTSHETTGGWATARRPYAWGYCFKEEQGGASGPDYCEPSAQWPCAAGKKYYGPRAIQISININIGPAGRPSAPGILANPDLVATRPHRVVRRPPSGSGMTPQSPKPSCTDVMTGQWTPSAADTAAGRLPGYGVVTNISNGGLECGHGADSRVADRIGFYKRYCDLLGVSYGDNLDCANQTPFNG

SEQ ID NO: 14784 - protein, 318 aa, Zea mays subsp. mays
  misc_feature (1)..(318): Ceres Seq. ID no. 11050766
MMRALAWWPCWPAFFAVPARAEQCGSQAGGALCPNCLCCSQFGWCGSSDYCGSGCQSQCSAACSTPNPPSSGGVASIIPESLFNQMLLHRNDAACPANGFYTYAGFIAAANAFPGLAPRVRPDVQKRELAAFLAQTSHETTGGWATARRPYAWGYCFKEEQGGASGPDYCEPSAQWPCAAGKKYYGPRAIQISININIGPAGRPSAPGILANPDLVATRPHRVVRRPPSGSGMTPQSPKPSCTDVMTGQWTPSAADTAAGRLPGYGVVTNISNGGLECGHGADSRVADRIGFYKRYCDLLGVSYGDNLDCANQTPFNG

SEQ ID NO: 14785 - protein, 317 aa, Zea mays subsp. mays
  misc_feature (1)..(317): Ceres Seq. ID no. 11050767
MRALAWWPCWPAFFAVPARAEQCGSQAGGALCPNCLCCSQFGWCGSSDYCGSGCQSQCSAACSTPNPPSSGGVASIIPESLFNQMLLHRNDAACPANGFYTYAGFIAAANAFPGLAPRVRPDVQKRELAAFLAQTSHETTGGWATARRPYAWGYCFKEEQGGASGPDYCEPSAQWPCAAGKKYYGPRAIQISININIGPAGRPSAPGILANPDLVATRPHRVVRRPPSGSGMTPQSPKPSCTDVMTGQWTPSAADTAAGRLPGYGVVTNISNGGLECGHGADSRVADRIGFYKRYCDLLGVSYGDNLDCANQTPFNG

SEQ ID NO: 14786 - DNA, 3781 bp, Zea mays subsp. mays
  misc_feature (1)..(3781): Ceres Seq. ID no. 11398585
cacagctcatataccaagagccggagcagcttagcgcagcccagagcggcgccgcgccaagcacaacccccacccgccacagccgcgtgcgcatgtgagcggtcgccgcggccgggagaccagaggaggggaggactacgtgcatttcgctgtgccgccgccgcggggttcgtgcgcgagcgagatccggcggggcggggcggggggcctgagatggaggctagcgcggggctggtggccggctcgcataaccggaacgagctggtggtgatccgccgcgaccgcgagtcgggagccgcgggcggcggcgcggcgcgccgggcggaggcgccgtgccagatatgcggcgacgaggtcggggtgggcttcgacggggagcccttcgtggcgtgcaacgagtgcgccttccccgtctgccgcgcctgctacgagtacgagcgccgcgagggctcgcaagcgtgcccgcagtgcaggacccgctacaagcgcctcaagggctgcccgcgggtggccggcgacgaggaggaggacggcgtcgacgacctggagggcgagttcggcctgcaggacggcgccgcccacgaggacgacccgcagtacgtcgccgagtccatgctcagggcgcagatgagctacggccgcggcggcgacgcgcaccccggcttcagccccgtccccaacgtgccgctcctcaccaacggccagatggttgatgacatcccgccggagcagcacgcgctcgtgccgtcctacatgagcggcggcggcggcgggggcaagaggatccacccgctccctttcgcagatcccaaccttccagtgcaaccgagatccatggacccgtccaaggatctggccgcctacggatatggcagcgtggcctggaaggagagaatggagggctggaagcagaagcaggagcgcctgcagcatgtcaggagcgagggtggcggtgattgggatggcgacgatgcagatctgccactaatggatgaagctaggcagccattgtccagaaaagtccctatatcatcaagccgaattaatccctacaggatgattatcgttatccggttggtggttttgggtttcttcttccactaccgagtgatgcatccggcgaaagatgcatttgcattgtggctcatatctgtaatctgtgaaatctggtttgcgatgtcctggattcttgatcagttcccaaagtggcttccaatcgagagagagacttacctggaccgtttgtcactaaggtttgacaaggaaggtcaaccctctcagcttgctccaatcgacttctttgtcagtacggttgatcccacaaaggaacctcccttggtcacagcgaacactgtcctttccatcctttctgtggattatccggttgagaaggtctcctgctatgtttctgatgatggtgctgcaatgcttacgtttgaagcattgtctgaaacatctgaatttgcaaagaaatgggttcctttcagcaaaaagtttaatatcgagcctcgtgctcctgagtggtacttccaacagaagatagactacctgaaagacaaggttgctgcttcatttgttagggagaggagggcgatgaagagagaatacgaggaattcaaggtaaggatcaatgccttggttgcaaaagcccaaaaggttcctgaggaaggatggacaatgcaagatggaagcccctggcctggaaacaacgtacgcgatcatcctggaatgattcaggtattccttggccaaagtggcggtcgtgatgtggaaggaaatgagttgcctcgcctggtttatgtctcgagagaaaagaggccaggttataaccatcacaagaaggctggtgccatgaatgcactggtccgtgtctctgctgtcttatcaaatgctgcatacctattgaacttggactgtgatcactacatcaacaatagcaaggccataaaagaggctatgtgtttcatgatggatcctttggtggggaagaaagtgtgctatgtacagttccctcagaggtttgatggtattgacaaaaatgatcgatacgctaacaggaacgttgtcttttttgacatcaacatgaaaggtttggacggtattcaaggacccatttatgtgggtactggatgtgttttcagacggcaggcactgtatggttatgatgctcctaaaacgaagaagccaccatcaagaacttgcaactgctggcccaagtggtgcctctcttgctgctgcagcaggaacaagaataaaaagaagactacaaaaccaaagacggagaagaagaaaagattatttttcaagaaagcagaaaacccatctcctgcatatgctttgggtgaaattgatgaaggtgctccaggtgctgatatcgagaaggccggaatcgtaaatcaacagaaactagagaagaaatttgggcagtcttctgtttttgtcgcatcaacacttcttgagaacggagggaccctgaagagcgcaagtccagcttctcttctgaaggaagctatacatgttatcagctgcggctacgaagacaagaccgactggggaaaagagattggctggatttacggatcgatcacagaggatatcttgactggatttaagatgcactgccatggctggcggtctatttactgcatcccgaagcggcctgcattcaaaggttctgcgcctctgaacctttccgaccgtcttcaccaggtccttcgctgggcccttgggtccgtcgaaattttcttcagcaagcactgcccactttggtacggatacggcggcgggctaaaattcctggaaaggttttcttatatcaactccatcgtttatccctggacgtccattcctctcctggcttactgtaccttgcctgccatctgcctgctcacggggaagtttatcacaccagagcttaccaatgtcgccagtatctggttcatggcacttttcatctgcatctccgtgaccggcatcctggaaatgaggtggagtggcgtggccatcgacgactggtggaggaacgagcagttctgggtcatcggaggcgtttcggcgcatctgttcgcggtgttccagggcctgctgaaggtgttcgccggcatcgacacgagcttcaccgtgacgtcgaaggccggggacgacgaggagttctcggagctgtacacgttcaagtggaccaccctgctgatacccccgaccacgctcctcctgctgaacttcatcggggtggtggccgggatctcgaacgcgatcaacaacgggtacgagtcgtggggccccctgttcgggaagctcttcttcgccttctgggtgatcgtccacctgtacccgttcctcaagggtctggtggggaggcagaacaggacgccgacgatcgtcatcgtctggtccatcctgctggcctcgatcttctcgctcctgtgggtccgcgtcgacccgttcctcgccaagagcaacggcccgctcctggaggagtgtggcctggactgcaactgaagtgggggccccctgtcactcgaagttctgtcacgggcgaattacgcctgattttttgttgttgttgttgttggaattctttgctgtagatagaaaccacatgtccacggcatctctgctgtgtccattggagcaggagagaggtgcctgctgctgtttgttgagtaaattaaaagttttaaagttatacagtgatgcacattccagtgcccagtgtattccctttttacagtctgtatattagcgacaaaggacatattggttaggagtttgattcttttgt

SEQ ID NO: 14787 - protein, 1165 aa, Zea mays subsp. mays
  misc_feature (1)..(1165): Ceres Seq. ID no. 11398586
HSSYTKSRSSLAQPRAAPRQAQPPPATAACACERSPRPGDQRRGGLRAFRCAAAAGFVRERDPAGRGGGPEMEASAGLVAGSHNRNELVVIRRDRESGAAGGGAARRAEAPCQICGDEVGVGFDGEPFVACNECAFPVCRACYEYERREGSQACPQCRTRYKRLKGCPRVAGDEEEDGVDDLEGEFGLQDGAAHEDDPQYVAESMLRAQMSYGRGGDAHPGFSPVPNVPLLTNGQMVDDIPPEQHALVPSYMSGGGGGGKRIHPLPFADPNLPVQPRSMDPSKDLAAYGYGSVAWKERMEGWKQKQERLQHVRSEGGGDWDGDDADLPLMDEARQPLSRKVPISSSRINPYRMIIVIRLVVLGFFFHYRVMHPAKDAFALWLISVICEIWFAMSWILDQFPKWLPIERETYLDRLSLRFDKEGQPSQLAPIDFFVSTVDPTKEPPLVTANTVLSILSVDYPVEKVSCYVSDDGAAMLTFEALSETSEFAKKWVPFSKKFNIEPRAPEWYFQQKIDYLKDKVAASFVRERRAMKREYEEFKVRINALVAKAQKVPEEGWTMQDGSPWPGNNVRDHPGMIQVFLGQSGGRDVEGNELPRLVYVSREKRPGYNHHKKAGAMNALVRVSAVLSNAAYLLNLDCDHYINNSKAIKEAMCFMMDPLVGKKVCYVQFPQRFDGIDKNDRYANRNVVFFDINMKGLDGIQGPIYVGTGCVFRRQALYGYDAPKTKKPPSRTCNCWPKWCLSCCCSRNKNKKKTTKPKTEKKKRLFFKKAENPSPAYALGEIDEGAPGADIEKAGIVNQQKLEKKFGQSSVFVASTLLENGGTLKSASPASLLKEAIHVISCGYEDKTDWGKEIGWIYGSITEDILTGFKMHCHGWRSIYCIPKRPAFKGSAPLNLSDRLHQVLRWALGSVEIFFSKHCPLWYGYGGGLKFLERFSYINSIVYPWTSIPLLAYCTLPAICLLTGKFITPELTNVASIWFMALFICISVTGILEMRWSGVAIDDWWRNEQFWVIGGVSAHLFAVFQGLLKVFAGIDTSFTVTSKAGDDEEFSELYTFKWTTLLIPPTTLLLLNFIGVVAGISNAINNGYESWGPLFGKLFFAFWVIVHLYPFLKGLVGRQNRTPTIVIVWSILLASIFSLLWVRVDPFLAKSNGPLLEECGLDCN

SEQ ID NO: 14788 - protein, 1094 aa, Zea mays subsp. mays
  misc_feature (1)..(1094): Ceres Seq. ID no. 11398587
MEASAGLVAGSHNRNELVVIRRDRESGAAGGGAARRAEAPCQICGDEVGVGFDGEPFVACNECAFPVCRACYEYERREGSQACPQCRTRYKRLKGCPRVAGDEEEDGVDDLEGEFGLQDGAAHEDDPQYVAESMLRAQMSYGRGGDAHPGFSPVPNVPLLTNGQMVDDIPPEQHALVPSYMSGGGGGGKRIHPLPFADPNLPVQPRSMDPSKDLAAYGYGSVAWKERMEGWKQKQERLQHVRSEGGGDWDGDDADLPLMDEARQPLSRKVPISSSRINPYRMIIVIRLVVLGFFFHYRVMHPAKDAFALWLISVICEIWFAMSWILDQFPKWLPIERETYLDRLSLRFDKEGQPSQLAPIDFFVSTVDPTKEPPLVTANTVLSILSVDYPVEKVSCYVSDDGAAMLTFEALSETSEFAKKWVPFSKKFNIEPRAPEWYFQQKIDYLKDKVAASFVRERRAMKREYEEFKVRINALVAKAQKVPEEGWTMQDGSPWPGNNVRDHPGMIQVFLGQSGGRDVEGNELPRLVYVSREKRPGYNHHKKAGAMNALVRVSAVLSNAAYLLNLDCDHYINNSKAIKEAMCFMMDPLVGKKVCYVQFPQRFDGIDKNDRYANRNVVFFDINMKGLDGIQGPIYVGTGCVFRRQALYGYDAPKTKKPPSRTCNCWPKWCLSCCCSRNKNKKKTTKPKTEKKKRLFFKKAENPSPAYALGEIDEGAPGADIEKAGIVNQQKLEKKFGQSSVFVASTLLENGGTLKSASPASLLKEAIHVISCGYEDKTDWGKEIGWIYGSITEDILTGFKMHCHGWRSIYCIPKRPAFKGSAPLNLSDRLHQVLRWALGSVEIFFSKHCPLWYGYGGGLKFLERFSYINSIVYPWTSIPLLAYCTLPAICLLTGKFITPELTNVASIWFMALFICISVTGILEMRWSGVAIDDWWRNEQFWVIGGVSAHLFAVFQGLLKVFAGIDTSFTVTSKAGDDEEFSELYTFKWTTLLIPPTTLLLLNFIGVVAGISNAINNGYESWGPLFGKLFFAFWVIVHLYPFLKGLVGRQNRTPTIVIVWSILLASIFSLLWVRVDPFLAKSNGPLLEECGLDCN

SEQ ID NO: 14789 - protein, 961 aa, Zea mays subsp. mays
  misc_feature (1)..(961): Ceres Seq. ID no. 11398588
MLRAQMSYGRGGDAHPGFSPVPNVPLLTNGQMVDDIPPEQHALVPSYMSGGGGGGKRIHPLPFADPNLPVQPRSMDPSKDLAAYGYGSVAWKERMEGWKQKQERLQHVRSEGGGDWDGDDADLPLMDEARQPLSRKVPISSSRINPYRMIIVIRLVVLGFFFHYRVMHPAKDAFALWLISVICEIWFAMSWILDQFPKWLPIERETYLDRLSLRFDKEGQPSQLAPIDFFVSTVDPTKEPPLVTANTVLSILSVDYPVEKVSCYVSDDGAAMLTFEALSETSEFAKKWVPFSKKFNIEPRAPEWYFQQKIDYLKDKVAASFVRERRAMKREYEEFKVRINALVAKAQKVPEEGWTMQDGSPWPGNNVRDHPGMIQVFLGQSGGRDVEGNELPRLVYVSREKRPGYNHHKKAGAMNALVRVSAVLSNAAYLLNLDCDHYINNSKAIKEAMCFMMDPLVGKKVCYVQFPQRFDGIDKNDRYANRNVVFFDINMKGLDGIQGPIYVGTGCVFRRQALYGYDAPKTKKPPSRTCNCWPKWCLSCCCSRNKNKKKTTKPKTEKKKRLFFKKAENPSPAYALGEIDEGAPGADIEKAGIVNQQKLEKKFGQSSVFVASTLLENGGTLKSASPASLLKEAIHVISCGYEDKTDWGKEIGWIYGSITEDILTGFKMHCHGWRSIYCIPKRPAFKGSAPLNLSDRLHQVLRWALGSVEIFFSKHCPLWYGYGGGLKFLERFSYINSIVYPWTSIPLLAYCTLPAICLLTGKFITPELTNVASIWFMALFICISVTGILEMRWSGVAIDDWWRNEQFWVIGGVSAHLFAVFQGLLKVFAGIDTSFTVTSKAGDDEEFSELYTFKWTTLLIPPTTLLLLNFIGVVAGISNAINNGYESWGPLFGKLFFAFWVIVHLYPFLKGLVGRQNRTPTIVIVWSILLASIFSLLWVRVDPFLAKSNGPLLEECGLDCN

SEQ ID NO: 14790 - DNA, 1241 bp, Zea mays subsp. mays
  misc_feature (1)..(1241): Ceres Seq. ID no. 11405314
actaaagggaacaaaagctggagctccaccgcggtgcgccgctctagaactagtggatcccccgggctgcaggaattcggcacgagctcttccctgcagatcgagaggcactgcacaccaccaccaccaccaccaccaccaccacaccatgctcaacatgatgactgatctgagctgcgggccgtcgtccaaggtcaaggagcaggtggcggcggcgccgacgggctccggcgacaggcaggggcaggggagaggcaagatcgagatcaagcgcatcgagaacacgacgaaccggcaggtgaccttctgcaagcgccgcaacggcctgctcaagaaggcgtacgagctctcggtgctctgcgacgccgaggtcgcgctcgtcgtcttctccagccgcggccgcctctacgagtacgccaacaacagtgtgaagtccaccattgagaggtacaagaaggccaacagtgactcctccaactctggcacagttgcagaagtcaatgcccagtactaccagcaggagtcctccaagctgcgacagatgatccacagcttgcaaaacgcaaacactaggaacatagtgggagattccatccacaccatgggcctcagggatcttaaacaaatggagggcaagctggagaaagccataatcaagattagagctagaaagaatgagctgctatacgctgaagttgactatatgcaaaaaagggagatggatctgcagactgacaacatgtacctgaggagcaagatcgctgagagtaatgaaacggggcagccggcgatgcacatgacgatgggagcgccgccgacgagcgagtacgaccacatggcccctttcgactcgagaaactttctgcaagtgagcatgcctcagcactactcccatcagctgcaacctacaaccctccagctcggatgatgaaatcagcgctatacctggcggcgcccggcccccaatcgagatagatcacgcatgcagttatatcatgtgccaaatcgagatctcaagtaactctacgtacgtttgcttaattattaataattgtgattagtgcaactgttagggtatatatatttgtgagtgccaccactgtgtgcgtgcatttgtacgtgtgaatttagctgttgcatctactactattgtaccctccggccaggccatatcatcagaaacgcgggtttatttacgcatacttatatatatatatgatttgtgtgctttatatagattg

SEQ ID NO: 14791 - protein, 308 aa, Zea mays subsp. mays
  misc_feature (1)..(308): Ceres Seq. ID no. 11405315
LKGTKAGAPPRCAALELVDPPGCRNSARALPCRSRGTAHHHHHHHHHHTMLNMMTDLSCGPSSKVKEQVAAAPTGSGDRQGQGRGKIEIKRIENTTNRQVTFCKRRNGLLKKAYELSVLCDAEVALVVFSSRGRLYEYANNSVKSTIERYKKANSDSSNSGTVAEVNAQYYQQESSKLRQMIHSLQNANTRNIVGDSIHTMGLRDLKQMEGKLEKAIIKIRARKNELLYAEVDYMQKREMDLQTDNMYLRSKIAESNETGQPAMHMTMGAPPTSEYDHMAPFDSRNFLQVSMPQHYSHQLQPTTLQLG

SEQ ID NO: 14792 - protein, 259 aa, Zea mays subsp. mays
  misc_feature (1)..(259): Ceres Seq. ID no. 11405316
MLNMMTDLSCGPSSKVKEQVAAAPTGSGDRQGQGRGKIEIKRIENTTNRQVTFCKRRNGLLKKAYELSVLCDAEVALVVFSSRGRLYEYANNSVKSTIERYKKANSDSSNSGTVAEVNAQYYQQESSKLRQMIHSLQNANTRNIVGDSIHTMGLRDLKQMEGKLEKAIIKIRARKNELLYAEVDYMQKREMDLQTDNMYLRSKIAESNETGQPAMHMTMGAPPTSEYDHMAPFDSRNFLQVSMPQHYSHQLQPTTLQLG

SEQ ID NO: 14793 - protein, 256 aa, Zea mays subsp. mays
  misc_feature (1)..(256): Ceres Seq. ID no. 11405317
MMTDLSCGPSSKVKEQVAAAPTGSGDRQGQGRGKIEIKRIENTTNRQVTFCKRRNGLLKKAYELSVLCDAEVALVVFSSRGRLYEYANNSVKSTIERYKKANSDSSNSGTVAEVNAQYYQQESSKLRQMIHSLQNANTRNIVGDSIHTMGLRDLKQMEGKLEKAIIKIRARKNELLYAEVDYMQKREMDLQTDNMYLRSKIAESNETGQPAMHMTMGAPPTSEYDHMAPFDSRNFLQVSMPQHYSHQLQPTTLQLG

SEQ ID NO: 14794 - DNA, 573 bp, Zea mays subsp. mays
  misc_feature (1)..(573): Ceres Seq. ID no. 11413183
ggaggccagcctgcatgatctccatccagcgtcttggtatgctctcttttcatggaacgtgcacttgtatctggtattgtgttgcatggtatcccatataccggatacctgatggaaaattccaggctacattcttgacatatcactctcttggccactggattcgtcggagcagctcagcaggtggggccgctgttttgccagtcatgggcctgcagtcttacaatgccaaggcagagtggtggtttgagatgagcaagtccgaatctgaaggcgggcagtcgcaggacagtgaagcatccgagattctgaaggagagatcgcgcacgctgagtgaggctgcggccgtgttgtccagggccagcgtgctgaagaatgggcagacgagtagaaacagacatccagactacgagttcttcctctcccggagctgatttggaagtgcctcttcgtaatcggatttagttaggtttcagtgtatgtatgtgttgttgacactaaagcttatgctgcaaccgatgactggaagctgtttgcttagcttagcttagcaatataataataatgctagtc

SEQ ID NO: 14795 - protein, 143 aa, Zea mays subsp. mays
  misc_feature (1)..(143): Ceres Seq. ID no. 11413184
RPACMISIQRLGMLSFHGTCTCIWYCVAWYPIYRIPDGKFQATFLTYHSLGHWIRRSSSAGGAAVLPVMGLQSYNAKAEWWFEMSKSESEGGQSQDSEASEILKERSRTLSEAAAVLSRASVLKNGQTSRNRHPDYEFFLSRS

SEQ ID NO: 14796 - protein, 139 aa, Zea mays subsp. mays
  misc_feature (1)..(139): Ceres Seq. ID no. 11413185
MISIQRLGMLSFHGTCTCIWYCVAWYPIYRIPDGKFQATFLTYHSLGHWIRRSSSAGGAAVLPVMGLQSYNAKAEWWFEMSKSESEGGQSQDSEASEILKERSRTLSEAAAVLSRASVLKNGQTSRNRHPDYEFFLSRS

SEQ ID NO: 14797 - protein, 131 aa, Zea mays subsp. mays
  misc_feature (1)..(131): Ceres Seq. ID no. 11413186
MLSFHGTCTCIWYCVAWYPIYRIPDGKFQATFLTYHSLGHWIRRSSSAGGAAVLPVMGLQSYNAKAEWWFEMSKSESEGGQSQDSEASEILKERSRTLSEAAAVLSRASVLKNGQTSRNRHPDYEFFLSRS

SEQ ID NO: 14798 - DNA, 444 bp, Zea mays subsp. mays
  misc_feature (1)..(444): Ceres Seq. ID no. 11414774
atcgcagaaattctccgcaacttcacagcgtatcatcgttttccatcgctcctactcctatcatccagaaaatctgagcggtattgatggcgcccaaggcggagaagaagccggcggcgaagaaggtggcggaggaggagccctcggagaaggcggctccggcggagaaggcccccgcggggaagaaggccaaggcggagaagcggctacctgcgggcaagtccgccggcaaggagggcggcgacaagaaggggaggaagaaggcgaagaagagcgtggagacctacaagatctacatcttcaaggtcctgaagcaggtgcaccccgacatcggcatctcctccaaggccatgtccatcatgacttctctctgtggagcacttgtaatcgaagatcgtgccctgttttctgtactatttcaaactgcatgcagactcctgggtt

SEQ ID NO: 14799 - protein, 147 aa, Zea mays subsp. mays
  misc_feature (1)..(147): Ceres Seq. ID no. 11414775
SQKFSATSQRIIVFHRSYSYHPENLSGIDGAQGGEEAGGEEGGGGGALGEGGSGGEGPRGEEGQGGEAATCGQVRRQGGRRQEGEEEGEEERGDLQDLHLQGPEAGAPRHRHLLQGHVHHDFSLWSTCNRRSCPVFCTISNCMQTPG

SEQ ID NO: 14800 - protein, 119 aa, Zea mays subsp. mays
  misc_feature (1)..(119): Ceres Seq. ID no. 11414776
MAPKAEKKPAAKKVAEEEPSEKAAPAEKAPAGKKAKAEKRLPAGKSAGKEGGDKKGRKKAKKSVETYKIYIFKVLKQVHPDIGISSKAMSIMTSLCGALVIEDRALFSVLFQTACRLLG

SEQ ID NO: 14801 - DNA, 503 bp, Zea mays subsp. mays
  misc_feature (1)..(503): Ceres Seq. ID no. 11414974
actgctcctttcttggaaaagctggttcagaaagatattgaggttctttacctcattgagccaattgatgaggttgccattcagaatttacagacatacaaagagaagaagtttgtagatattagcaaagaggatttggaattgggtgatgaagatgaggacaaggagaaagaaagcaagcaggagtatactcttctatgcgactggataaagcagcagcttggcgataaagtcgccaaggtccagatctcgaagcgactcagctcttctccatgtgttcttgtttctggtaaatttggctggtcagccaacatggaaaggctcatgaaggcacagacccttggtgacacatcaagcctggagttcatgagaggtagacgaatttttgagatcaaccctgaccatcctatcatcaaggacctgaacgctgcttgcaaaaacgagcctgaaagtactgaagccaagagggcggctgagtttgctatacgaggctgcgctgatct

SEQ ID NO: 14802 - protein, 167 aa, Zea mays subsp. mays
  misc_feature (1)..(167): Ceres Seq. ID no. 11414975
TAPFLEKLVQKDIEVLYLIEPIDEVAIQNLQTYKEKKFVDISKEDLELGDEDEDKEKESKQEYTLLCDWIKQQLGDKVAKVQISKRLSSSPCVLVSGKFGWSANMERLMKAQTLGDTSSLEFMRGRRIFEINPDHPIIKDLNAACKNEPESTEAKRAAEFAIRGCAD

SEQ ID NO: 14803 - DNA, 645 bp, Zea mays subsp. mays
  misc_feature (1)..(645): Ceres Seq. ID no. 11415217
agcgccaacggccaacctcacgcagtcccgccgcatcgaatggcatccctccggcttgtggcaacgctagcgccctccggtcctccgccgccacctcgacgtaagcagcggagaccgtcctccgcagtccgtctgacaggtgggatgggcctggcggcagctgctgccgtggcggcggccgcggccgcctcaccaccggcgctcgccgcgctgtccgagccggcgaacgcgctctcgctgcccacctgggccgtccacgtctccagcgtcgccgagtgggtgacggcgatgtggctggtttgggactacggcgagaagacggggctcaagggttggaaaggcctctcgtgggggatggttccacttctaggtggagcaatgtgtgcttgcacgtggcatttcttctacaattcagagtctcttgaagttcttgtagcccttcaaggtgctctgacagtgattggtaacataacaatgtgcatagctgcataccgcatcttcaaagcatcccaggaaggctcaaaaacttcgtaggctgcaagattggatcttacagccggtttggcaagggatgctcagccgcatttgaagattgacgttgctgagagcctgagacgatgataggagaagatacagatagccggt

SEQ ID NO: 14804 - protein, 177 aa, Zea mays subsp. mays
  misc_feature (1)..(177): Ceres Seq. ID no. 11415218
SANGQPHAVPPHRMASLRLVATLAPSGPPPPPRRKQRRPSSAVRLTGGMGLAAAAAVAAAAAASPPALAALSEPANALSLPTWAVHVSSVAEWVTAMWLVWDYGEKTGLKGWKGLSWGMVPLLGGAMCACTWHFFYNSESLEVLVALQGALTVIGNITMCIAAYRIFKASQEGSKTS

SEQ ID NO: 14805 - protein, 164 aa, Zea mays subsp. mays
  misc_feature (1)..(164): Ceres Seq. ID no. 11415219
MASLRLVATLAPSGPPPPPRRKQRRPSSAVRLTGGMGLAAAAAVAAAAAASPPALAALSEPANALSLPTWAVHVSSVAEWVTAMWLVWDYGEKTGLKGWKGLSWGMVPLLGGAMCACTWHFFYNSESLEVLVALQGALTVIGNITMCIAAYRIFKASQEGSKTS

SEQ ID NO: 14806 - protein, 129 aa, Zea mays subsp. mays
  misc_feature (1)..(129): Ceres Seq. ID no. 11415220
MGLAAAAAVAAAAAASPPALAALSEPANALSLPTWAVHVSSVAEWVTAMWLVWDYGEKTGLKGWKGLSWGMVPLLGGAMCACTWHFFYNSESLEVLVALQGALTVIGNITMCIAAYRIFKASQEGSKTS

SEQ ID NO: 14807 - DNA, 1864 bp, Zea mays subsp. mays
  misc_feature (1)..(1864): Ceres Seq. ID no. 12336605
gaaccctcgcgccgccgcctactccagcctccagcgtgatctgagtcctgaccaagccctaaacgccaccgccctcgcaaatctcctttcccttcgatccatggccgccgccgtcgccgcccccgcgccatcccgcaagacggagacctacaccgacaccaagcgccgcgacgacgtgcgcggcgccaacatcgccgctgcgcgcgccgtcgccgacgccgtgcgcacctcgctgggcccccgtggcatggataagatgatcgcttcgggcgaccaggctcaggaggtcatcatcaccaacgacggtgccaccatcctctcccgcatggcgctcctccagcccggccgcgcgcatgctcgccgagctatcccgctcccaggacgccgccgctggggacggcaccactaccgtcgtcgtcctcgctggatccctcctccgccgcgcccagtcgctcctctccgccggggctcaccccaccgccgctgccgacgccctccaccgtctcgccacgcgcgctgttgagatcctccacgccatggccatccccatcgagctatccgaccgggaatccctcgtcaagtctgcgtccacggctctcaactccaaggtcgtctcccagtactccacccttctctcgcccctcgccgtcgacgccgccctctctgtggtggaccccgctcaccctgaccttctcgacctccgggacatccgcatcgtgaagaagcttggtggcaccgtggacgatactgagctcatccctggcctcatctttgacaagaaggctagccatgctgctgggggcccaactcggatggagaatgctaagatcgctgtcatacagttccaaatctcaccacccaagactgacattgagcagagtgtcattgtatccgactacgcacagatggaccgcatcctacgtgaggagcgcaattatatccttgggatggtaaaaaagatcaaggcggctggatgcaatgtattgctcattcagaagagcatcttgcgtgatgcagtcactgacttgtctctgcactatcttgctaaggcaaagattctggtggtgaaggacgtggagagggatgagatggagttcatcaccaagaccctaaactgccttcccattgccaacattgagcacttccgcacggataagtttgggtatgcagatgttgttgaggaagtctctgttggagagggcaaggttgtgaagatcactggaatcaaggacatggttggaccgcaactgtacttgtcaggggatctaaccaattggttattgatgaagctgaacgcagtctccatgatgcactctgtgtcataaggtgcttggtcagcaagagatttttgattgctggtggtggtgctccagaaatagagatgtcaatgcagctggctgcttgggcaaaggagcttcgagggatggagagttactgcatcaaggagtttgctgaggcgcttgaggtcatcccttacacattggctgagaatgctgggctcaacccaatctccattgtcaccgaactcaggaatcgccatgccagaggtgagaagaacactggcatcaatgtgaggaaagggcagatcacaaacatcctggaggagaatgtcgtgcagccgttgctggtgagcacaagtgccattacgttagcctgcgagtgtgtcagaatgatcttgaagattgatgacattgtcactgttaggtaagagcgtgaagttggggtcatgtcagcctgctctgttctgtctggattgattattagttaggttactgcttaatgtaaaacttggttcatgggcgtgtttctacacttggttttgatgttagtactatccttgacatgaaactactaccagggttgc

SEQ ID NO: 14808 - protein, 323 aa, Zea mays subsp. mays
  misc_feature (1)..(323): Ceres Seq. ID no. 12336606
MLAELSRSQDAAAGDGTTTVVVLAGSLLRRAQSLLSAGAHPTAAADALHRLATRAVEILHAMAIPIELSDRESLVKSASTALNSKVVSQYSTLLSPLAVDAALSVVDPAHPDLLDLRDIRIVKKLGGTVDDTELIPGLIFDKKASHAAGGPTRMENAKIAVIQFQISPPKTDIEQSVIVSDYAQMDRILREERNYILGMVKKIKAAGCNVLLIQKSILRDAVTDLSLHYLAKAKILVVKDVERDEMEFITKTLNCLPIANIEHFRTDKFGYADVVEEVSVGEGKVVKITGIKDMVGPQLYLSGDLTNWLLMKLNAVSMMHSVS

SEQ ID NO: 14809 - protein, 262 aa, Zea mays subsp. mays
  misc_feature (1)..(262): Ceres Seq. ID no. 12336607
MAIPIELSDRESLVKSASTALNSKVVSQYSTLLSPLAVDAALSVVDPAHPDLLDLRDIRIVKKLGGTVDDTELIPGLIFDKKASHAAGGPTRMENAKIAVIQFQISPPKTDIEQSVIVSDYAQMDRILREERNYILGMVKKIKAAGCNVLLIQKSILRDAVTDLSLHYLAKAKILVVKDVERDEMEFITKTLNCLPIANIEHFRTDKFGYADVVEEVSVGEGKVVKITGIKDMVGPQLYLSGDLTNWLLMKLNAVSMMHSVS

SEQ ID NO: 14810 - protein, 173 aa, Zea mays subsp. mays
  misc_feature (1)..(173): Ceres Seq. ID no. 12336608
NPRAAAYSSLQRDLSPDQALNATALANLLSLRSMAAAVAAPAPSRKTETYTDTKRRDDVRGANIAAARAVADAVRTSLGPRGMDKMIASGDQAQEVIITNDGATILSRMALLQPGRAHARRAIPLPGRRRWGRHHYRRRPRWIPPPPRPVAPLRRGSPHRRCRRPPPSRHARC

SEQ ID NO: 14811 - DNA, 1048 bp, Zea mays subsp. mays
  misc_feature (1)..(1048): Ceres Seq. ID no. 12336653
gctgtcctactccacacaccgcgctcacctactccaatccagacccctctctccctcacccacagtccccgccggcgccgcgtccgcgtcctgtgcgcctcgctcactctgcttccgccgccgccgcagcagtcgtctcgcagcggagcggacccggaggcctaccatggcagcggcaatctcgctggaggccggcggggccctggcccatgacctagggtctgcagtcgtcacaggtggtgtcgccctcgcgctcctcaaattctttgaggagctcgccaagcgcggcgtcttcgagcagaaactcagcaggaagcttgttcatataagcgttgggctggtattcatgctcttttggcctctttttagctctggatggtatactcctttccttgctgcgctagcaccaggggttaacattataaggatgcttctactggggctgggacttatgaaaaacgaggctatggttaaatcaatgagccgctctggagattacagggaacttctcaagggcccactgtattatgctgctactataacttttgccacgtctcttttatggagaacctcaccagttgctatagcacttatatgcaacttatgtgctggggatggtatagccgatgttgttgggagacgcctaggtaaagaaaagcttccatacaatcccaacaaatcatatgctggaagcatagcaatggcggtggctggttttctggcctcagttgggtatatgcattacttccacactttcggttttattgaggaaacatggtacatggctttaagcttcctcgtggtctctgtagctgcagcactcgttgaatcgcaccccatcagcacagaacttgatgacaatttgactgttcttttgacatcattcctagttggtagcctcatcttttgatgtttaggcgcaaggacgtatgagatgtttctccgtcatgctgtaatcttctgatgtttaggctcaaggacatatgagatgtttctccgtcatgctgtattttatgtaaaacgtttctaaaatactactataattgtg

SEQ ID NO: 14812 - protein, 302 aa, Zea mays subsp. mays
  misc_feature (1)..(302): Ceres Seq. ID no. 12336654
LSYSTHRAHLLQSRPLSPSPTVPAGAASASCAPRSLCFRRRRSSRLAAERTRRPTMAAAISLEAGGALAHDLGSAVVTGGVALALLKFFEELAKRGVFEQKLSRKLVHISVGLVFMLFWPLFSSGWYTPFLAALAPGVNIIRMLLLGLGLMKNEAMVKSMSRSGDYRELLKGPLYYAATITFATSLLWRTSPVAIALICNLCAGDGIADVVGRRLGKEKLPYNPNKSYAGSIAMAVAGFLASVGYMHYFHTFGFIEETWYMALSFLVVSVAAALVESHPISTELDDNLTVLLTSFLVGSLIF

SEQ ID NO: 14813 - protein, 247 aa, Zea mays subsp. mays
  misc_feature (1)..(247): Ceres Seq. ID no. 12336655
MAAAISLEAGGALAHDLGSAVVTGGVALALLKFFEELAKRGVFEQKLSRKLVHISVGLVFMLFWPLFSSGWYTPFLAALAPGVNIIRMLLLGLGLMKNEAMVKSMSRSGDYRELLKGPLYYAATITFATSLLWRTSPVAIALICNLCAGDGIADVVGRRLGKEKLPYNPNKSYAGSIAMAVAGFLASVGYMHYFHTFGFIEETWYMALSFLVVSVAAALVESHPISTELDDNLTVLLTSFLVGSLIF

SEQ ID NO: 14814 - protein, 187 aa, Zea mays subsp. mays
  misc_feature (1)..(187): Ceres Seq. ID no. 12336656
MLFWPLFSSGWYTPFLAALAPGVNIIRMLLLGLGLMKNEAMVKSMSRSGDYRELLKGPLYYAATITFATSLLWRTSPVAIALICNLCAGDGIADVVGRRLGKEKLPYNPNKSYAGSIAMAVAGFLASVGYMHYFHTFGFIEETWYMALSFLVVSVAAALVESHPISTELDDNLTVLLTSFLVGSLIF

SEQ ID NO: 14815 - DNA, 978 bp, Zea mays subsp. mays
  misc_feature (1)..(978): Ceres Seq. ID no. 12336696
atcaccattcttcatccctcgttgtcatctcacagcttgggctagagaccaaacaaaccaaagggaagcatggcagcaggcctgcaagtgtttggccagccggcgtctactgatgttgccagggttctgacgtgcctgtttgagaagaaattggagtttgagcttgtccgcattgatacatttaagacacatcacaggcttcctgagttcatcaggctgcgggatccgaatgggcaagtgaccttcaagcatggcgacaaaacccttgttgattcaagggacatatgccggtacgtttgcaaccagtttccaaattacggaaacaagagcctctatggatctggtgctctagaacgggcatcgatagaacagtggctccaggcagaagcccagaactttggccctcccagctctgcgcttgtgtttcagctggcgttcgttccgcacctcagtcacctgggcgttcgtcaggaccctgctgttattgctgaaaacgaggacaaactgaagcaggttcttgatgtttacgacgaaatactctccaagaacgagtacctggctggtgatgagttcaccctggccgacctgtctcaccttccgaactcgcactacatcgtaaacaccgagagaggaaggaagctcttcaccaacaagaagaatgtggcgaaatggtatgacaggctctcgaagcgcgagacatgggtgcaggtcgtcaagatgcagaaggaacatcctggtgcgttcaagtaatggcttgtcttggggagttgtgagtatggcttcatcgtccgtgttggtctggctcatcagtgttaaaagcccatcagtgtcgtcaaccagaataatgtgaagcccaactgtgatgtatggtcttttttttttaaaagcgcatttgtaaactattggctatttcttgcacgtgccaattcatcgtcacatataaaataaactgtatctttgaccttgtgtcatgtacgc

SEQ ID NO: 14816 - protein, 226 aa, Zea mays subsp. mays
  misc_feature (1)..(226): Ceres Seq. ID no. 12336697
MAAGLQVFGQPASTDVARVLTCLFEKKLEFELVRIDTFKTHHRLPEFIRLRDPNGQVTFKHGDKTLVDSRDICRYVCNQFPNYGNKSLYGSGALERASIEQWLQAEAQNFGPPSSALVFQLAFVPHLSHLGVRQDPAVIAENEDKLKQVLDVYDEILSKNEYLAGDEFTLADLSHLPNSHYIVNTERGRKLFTNKKNVAKWYDRLSKRETWVQVVKMQKEHPGAFK

SEQ ID NO: 14817 - DNA, 533 bp, Zea mays subsp. mays
  misc_feature (1)..(533): Ceres Seq. ID no. 12336943
atctttagttggatcataatctaatggatcggatggtttgtttgcacgcgaatgcttgcatagcggtcgttgccctaaaattcgtgtgacctgtggagatgcctaaagaaccctagtcacacggaacactcagtgcctgcacgcacgagcgaattaccaggcgtttgcgatgggcggagaggccacgaatgccggcggcgggggtatccgcgcgcggatggagcactacctttacagtggcgagaagaagcacgtcgtcgccggcatcgccatcttcgctgccgtcttcggcgtcccatggtacttcatgacgcgaggggcaaagcatcaatctcaccaagattacatggaaaaggctaacaaggcgagatcagagaggctttcttctggacagtcatctgcactaaaagaatgaatgttgtattgcctattctggtccctgaccttcagagcttgtcatagatcatacactgtattgatttgcactcaacggatttgatctgttgttaaataagcaggttatctttctttct

SEQ ID NO: 14818 - protein, 81 aa, Zea mays subsp. mays
  misc_feature (1)..(81): Ceres Seq. ID no. 12336944
MGGEATNAGGGGIRARMEHYLYSGEKKHVVAGIAIFAAVFGVPWYFMTRGAKHQSHQDYMEKANKARSERLSSGQSSALKE

SEQ ID NO: 14819 - protein, 65 aa, Zea mays subsp. mays
  misc_feature (1)..(65): Ceres Seq. ID no. 12336945
MEHYLYSGEKKHVVAGIAIFAAVFGVPWYFMTRGAKHQSHQDYMEKANKARSERLSSGQSSALKE

SEQ ID NO: 14820 - protein, 40 aa, Zea mays subsp. mays
  misc_feature (1)..(40): Ceres Seq. ID no. 12336946
MPAAGVSARGWSTTFTVARRSTSSPASPSSLPSSASHGTS

SEQ ID NO: 14821 - DNA, 1732 bp, Zea mays subsp. mays
  misc_feature (1)..(1732): Ceres Seq. ID no. 12336960
attcttagactaaaaacactatgagttagtgctaccaactgaaggatacgccatggctgttctgacactggttaatatccttatcagcttcgctgcttgtgctgaagctctaaggagagcagacttccctcaaggtttcgtctttggcactgcttcttcagcttaccagtatgaaggtgctgtcaacgagggtcaacgtggacctacaatatgggatactctcacaagacgacccggacgggtgatagatttcagcaatgcagatgttgccgttgatcactaccatcgttataaggaagatgtggacttgattaaggacattggcatggatgcataccggttctctatctcgtggtcacgtatctttccaaatggaactggtgaacctaatgaagaaggattgaattactataacagcctcataaatactctattagacaaaggtatacaaccatatgtaacactctttcactgggaccttccgcaagcactagaagacagatatggtggatggttaaacccccaaatcgtggatgattttgttcactatgcctctacttgcttcaaggaatttggagatagagtgaaacactggatcactttcaatgagccccataattttgcgattgaaggctatgaccttggcatccaggcacctgggaggtgttctattctgtctcatatattttgcagggagggcaaatcatcgactgagccttatgtcgtagctcacaacatactcttagcgcatgctggtgcctttcatacttataagcagcatttcaagaaagaacaaggaggtatcattggcattgcactcgattctaagtggtatgagccactgtcagatgttgatgaggacacagaggcagcagcacgagcaatggactttgagcttggatggttcctggatcccttaatgtttggccactatcctccttctatgcagaaacttgtgggcgacaggctgcctcagttttcagctcgggcttccgatgttagtgtcaggctcactagattttgtgggcataaaccattacaccacactgtatgttaggaacgacagaatgcggatcaggaaacttgtaatgaatgatgcttcaactgatgctgcggtcatacctactgcttatagacatggaaagaaaataggagaaacggcagcgtcaggatggctgcacatagtgccctggggcatgttcaagctgatgaagcacatcaaagaaaagtacgggaatccgcccgtgatcattactgaaaacggcatggatgatgcgaacaaccggttttcgaaattagaggatgatctgcaggatgataaacggatacagtaccacaaggactacatgtctaacctcctagacgcaattaggaaggaaggctgcaacgtccatggctacttcgtctggtcgctgctcgacaactgggagtggaactccgggtacacggtgcggtttgggctctactacatcgactacaacaacaatttgacacggatacccaaggcgtccgtggagtggttcaggcaggtcttggcccagaagacggctggtggagtacagtggttctacagtggccagtagttgagtgtatataacatacacggcacggctaccatcgatctgtacatgcgtacgtagctttagattagattgtgattattctcgatgtatatagactcaccatttggacgaccttcaaccgcacagttgaatgtgtcgttatgcttgct

SEQ ID NO: 14822 - protein, 334 aa, Zea mays subsp. mays
  misc_feature (1)..(334): Ceres Seq. ID no. 12336961
MAVLTLVNILISFAACAEALRRADFPQGFVFGTASSAYQYEGAVNEGQRGPTIWDTLTRRPGRVIDFSNADVAVDHYHRYKEDVDLIKDIGMDAYRFSISWSRIFPNGTGEPNEEGLNYYNSLINTLLDKGIQPYVTLFHWDLPQALEDRYGGWLNPQIVDDFVHYASTCFKEFGDRVKHWITFNEPHNFAIEGYDLGIQAPGRCSILSHIFCREGKSSTEPYVVAHNILLAHAGAFHTYKQHFKKEQGGIIGIALDSKWYEPLSDVDEDTEAAARAMDFELGWFLDPLMFGHYPPSMQKLVGDRLPQFSARASDVSVRLTRFCGHKPLHHTVC

SEQ ID NO: 14823 - protein, 243 aa, Zea mays subsp. mays
  misc_feature (1)..(243): Ceres Seq. ID no. 12336962
MDAYRFSISWSRIFPNGTGEPNEEGLNYYNSLINTLLDKGIQPYVTLFHWDLPQALEDRYGGWLNPQIVDDFVHYASTCFKEFGDRVKHWITFNEPHNFAIEGYDLGIQAPGRCSILSHIFCREGKSSTEPYVVAHNILLAHAGAFHTYKQHFKKEQGGIIGIALDSKWYEPLSDVDEDTEAAARAMDFELGWFLDPLMFGHYPPSMQKLVGDRLPQFSARASDVSVRLTRFCGHKPLHHTVC

SEQ ID NO: 14824 - protein, 195 aa, Zea mays subsp. mays
  misc_feature (1)..(195): Ceres Seq. ID no. 12336963
MLVSGSLDFVGINHYTTLYVRNDRMRIRKLVMNDASTDAAVIPTAYRHGKKIGETAASGWLHIVPWGMFKLMKHIKEKYGNPPVIITENGMDDANNRFSKLEDDLQDDKRIQYHKDYMSNLLDAIRKEGCNVHGYFVWSLLDNWEWNSGYTVRFGLYYIDYNNNLTRIPKASVEWFRQVLAQKTAGGVQWFYSGQ

SEQ ID NO: 14825 - DNA, 1076 bp, Zea mays subsp. mays
  misc_feature (1)..(1076): Ceres Seq. ID no. 12337188
caaaaccccattccgcaatgagacccgcagccgcagcagccaccgctaccaccgccgcgctccgtctccgcgccgcctccctctcgccttctctcgctgcctccctctcgccttctctcgccgccctcctttctcatcgtagatcctccctcattcttcctccgctgcgccgcatctgctcccttgcgcctccccactcctccgccgcccccaattcgcagcccccgccgcagttgctctctcccatcatggacgcgcagttcgagctcttccgcgcgcagctcgacgagtcttccaccctccgcgaccgcatccgtgccgtcgtcgccgagattgagtccgcctcccgcgtcgccaccgccgcgctcctcctagtccaccagcccgtccccctggcagatgtgcttgtgaaagccaaggcgcaggtagaggtgatcaaggggttgtacgcgcgcctggcggaagtcctcaaggaatgccctgggcagtactacaggtaccatgctgattggaggactgagacacatatggtagtgtcgatgcttgcattcatgcactggctggagacaggtggcctactcatgcatgctgaagcccaggagaagctagggttgtgctctggggagtttggccttgatgttgaggactacctgacaggactgtgcttcatgtccaatgaatttcctagatttgtagtaaatcgcgtcactgctggcgactatgactgtcctaaaagggttttgggcttcttgaccgatcttcatgcttcgtttaggatgctgaatctgcgcaatgacttcttgcgtaagaaatttgatgggatgaagtatgatttgaggagggtggaagaggtctactatgatgtgaagatccgtggacttgtacctgcgtagttgaaacaagagacttagaatccttggtaatgttagattgttaacatactgtggtttggcttttgtcatccataacgtgttcatctagctaaaatgtgaaatatattctgttggagcgtatgtgttatggactgaacttgagggcactcgaatgaccttgctcatttcttttactgtggcgcc

SEQ ID NO: 14826 - protein, 296 aa, Zea mays subsp. mays
  misc_feature (1)..(296): Ceres Seq. ID no. 12337189
KPHSAMRPAAAAATATTAALRLRAASLSPSLAASLSPSLAALLSHRRSSLILPPLRRICSLAPPHSSAAPNSQPPPQLLSPIMDAQFELFRAQLDESSTLRDRIRAVVAEIESASRVATAALLLVHQPVPLADVLVKAKAQVEVIKGLYARLAEVLKECPGQYYRYHADWRTETHMVVSMLAFMHWLETGGLLMHAEAQEKLGLCSGEFGLDVEDYLTGLCFMSNEFPRFVVNRVTAGDYDCPKRVLGFLTDLHASFRMLNLRNDFLRKKFDGMKYDLRRVEEVYYDVKIRGLVPA

SEQ ID NO: 14827 - protein, 291 aa, Zea mays subsp. mays
  misc_feature (1)..(291): Ceres Seq. ID no. 12337190
MRPAAAAATATTAALRLRAASLSPSLAASLSPSLAALLSHRRSSLILPPLRRICSLAPPHSSAAPNSQPPPQLLSPIMDAQFELFRAQLDESSTLRDRIRAVVAEIESASRVATAALLLVHQPVPLADVLVKAKAQVEVIKGLYARLAEVLKECPGQYYRYHADWRTETHMVVSMLAFMHWLETGGLLMHAEAQEKLGLCSGEFGLDVEDYLTGLCFMSNEFPRFVVNRVTAGDYDCPKRVLGFLTDLHASFRMLNLRNDFLRKKFDGMKYDLRRVEEVYYDVKIRGLVPA

SEQ ID NO: 14828 - protein, 214 aa, Zea mays subsp. mays
  misc_feature (1)..(214): Ceres Seq. ID no. 12337191
MDAQFELFRAQLDESSTLRDRIRAVVAEIESASRVATAALLLVHQPVPLADVLVKAKAQVEVIKGLYARLAEVLKECPGQYYRYHADWRTETHMVVSMLAFMHWLETGGLLMHAEAQEKLGLCSGEFGLDVEDYLTGLCFMSNEFPRFVVNRVTAGDYDCPKRVLGFLTDLHASFRMLNLRNDFLRKKFDGMKYDLRRVEEVYYDVKIRGLVPA

SEQ ID NO: 14829 - DNA, 562 bp, Zea mays subsp. mays
  misc_feature (1)..(562): Ceres Seq. ID no. 12337588
cacaaagcacaaacaacgccactcctgcacggctccgacgccggggccggggccgcctacgtctgggtcggcaacgccgaaacgcagtgccccgggcagtgcgcgtggccgttccaccagccgctgtacgggccccaggcgccggcgctcgtgccgccgagcggcgacgtcggcatggatggcatggtggtcaacatcgccagcatggtcgccggcgcggtcaccaacccgttccgcgacgggttctaccagggcgacaaggacgcgccgctagaggccgccaccgcctgcacgggggtctacggcagcggcgcctaccccggtttcgcaggcaacctggcggtggacggcacgacgggggcgagctacaatgccaatggtgccaacgggaggaagtacctgcttcccgctctattcgaccctgcaacctttacgtgttcgactttggtttaacgcccaaggaaacagtcctgtcaactgtgtagtaacgctgtgtatatagtatgagagtttgataaggagtgtactgtggttagtgttgatatctgcatcataatacgat

SEQ ID NO: 14830 - protein, 160 aa, Zea mays subsp. mays
  misc_feature (1)..(160): Ceres Seq. ID no. 12337589
QSTNNATPARLRRRGRGRLRLGRQRRNAVPRAVRVAVPPAAVRAPGAGARAAERRRRHGWHGGQHRQHGRRRGHQPVPRRVLPGRQGRAARGRHRLHGGLRQRRLPRFRRQPGGGRHDGGELQCQWCQREEVPASRSIRPCNLYVFDFGLTPKETVLSTV

SEQ ID NO: 14831 - protein, 150 aa, Zea mays subsp. mays
  misc_feature (1)..(150): Ceres Seq. ID no. 12337590
HKAQTTPLLHGSDAGAGAAYVWVGNAETQCPGQCAWPFHQPLYGPQAPALVPPSGDVGMDGMVVNIASMVAGAVTNPFRDGFYQGDKDAPLEAATACTGVYGSGAYPGFAGNLAVDGTTGASYNANGANGRKYLLPALFDPATFTCSTLV

SEQ ID NO: 14832 - protein, 92 aa, Zea mays subsp. mays
  misc_feature (1)..(92): Ceres Seq. ID no. 12337591
MDGMVVNIASMVAGAVTNPFRDGFYQGDKDAPLEAATACTGVYGSGAYPGFAGNLAVDGTTGASYNANGANGRKYLLPALFDPATFTCSTLV

SEQ ID NO: 14833 - DNA, 740 bp, Zea mays subsp. mays
  misc_feature (1)..(740): Ceres Seq. ID no. 12337596
  misc_feature (653)..(653): n is a, c, t, g, unknown, or other
taccagcttcatgtacctcaaagccaaagcaatcacctgagctgtgtatgttcccacagtatgttgtcccgacaatgcgcacaccattgttcatacttaatgcagcctacgattcgtggcaggtcaagaacgtcctagcacctagtccagctgatccgaagaagacttgggcccaatgcaagcttgacatcaagagctgctccgccagccaactcacaaccttgcaaaatttcaggacagattttctggcagcactccctaaaacgcagtctgtaggcatgttcatcgactcatgcaatgctcactgccaatcaggatctcaagacacgtggctagccgatggttctcccacggttaacaagacgcaaattggtaaggcggtgggggactggtactacgatagggaggtccctcggcagattgattgcccgtatccctgcaacccaacttgcaagaaccgtgatgatgattggagcatttgtataagtagttcatgttatcgaaatgaaaacaataaaggatcacaacgcgcgcccgtagttgtagatgatgaattataaacacatatgactgagctcaaagttgtttaatcatcatctgttgcgaaatgaggaagacaattggtgtcttgaagctgtgttttcgactgtgtntaaagcgtaaatgtaacgtatattgtgtcttcgcctatgcttaagacattggactagttgattggtcaatttaatttattaaatgcc

SEQ ID NO: 14834 - protein, 185 aa, Zea mays subsp. mays
  misc_feature (1)..(185): Ceres Seq. ID no. 12337597
PASCTSKPKQSPELCMFPQYVVPTMRTPLFILNAAYDSWQVKNVLAPSPADPKKTWAQCKLDIKSCSASQLTTLQNFRTDFLAALPKTQSVGMFIDSCNAHCQSGSQDTWLADGSPTVNKTQIGKAVGDWYYDREVPRQIDCPYPCNPTCKNRDDDWSICISSSCYRNENNKGSQRAPVVVDDEL

SEQ ID NO: 14835 - protein, 170 aa, Zea mays subsp. mays
  misc_feature (1)..(170): Ceres Seq. ID no. 12337598
MFPQYVVPTMRTPLFILNAAYDSWQVKNVLAPSPADPKKTWAQCKLDIKSCSASQLTTLQNFRTDFLAALPKTQSVGMFIDSCNAHCQSGSQDTWLADGSPTVNKTQIGKAVGDWYYDREVPRQIDCPYPCNPTCKNRDDDWSICISSSCYRNENNKGSQRAPVVVDDEL

SEQ ID NO: 14836 - protein, 161 aa, Zea mays subsp. mays
  misc_feature (1)..(161): Ceres Seq. ID no. 12337599
MRTPLFILNAAYDSWQVKNVLAPSPADPKKTWAQCKLDIKSCSASQLTTLQNFRTDFLAALPKTQSVGMFIDSCNAHCQSGSQDTWLADGSPTVNKTQIGKAVGDWYYDREVPRQIDCPYPCNPTCKNRDDDWSICISSSCYRNENNKGSQRAPVVVDDEL

SEQ ID NO: 14837 - DNA, 1424 bp, Zea mays subsp. mays
  misc_feature (1)..(1424): Ceres Seq. ID no. 12340535
  misc_feature (697)..(697): n is a, c, t, g, unknown, or other
  misc_feature (990)..(990): n is a, c, t, g, unknown, or other
  misc_feature (1240)..(1240): n is a, c, t, g, unknown, or other
aaaaagagacctgggcaggacgacacaggcagagccgccggccctcgcttcttggtggggtctagtttctttctcgcctctgcctgtgcctgctggtggtaagtaataacagcgacacggtacccacgcacngcggcggcggcggcgacgacgaagacgacatgaccgtcggcgacgacgcggcggcgccggggcgggggcagacggtgtgcgtnaccggcgccggcggctacgtcgggtcgtggatcgtcaagctcctgctcnnncngggctacgccgtccgcggcaccgtgcgcaaccctgacgacgcgaagaacgcgcacctgctggcgctccccggcgcggcggagcggctggcgctgtgcaaggccgacctgctcgactacggcgcgctaagggcggccgtcgccggctgccacaagcgtcttccacgccgcgtcgccggtcaccgacgacccggaggagatggtggagccggcggtgcgggggacgcggtacgtcatcgacgcggcggccgaggccggcacggtccgccgcgtcgtcctgacgtcgtcgatcggcgcggtggccatggacccccgccgcgagccggacgccgtcgtcgacgagtcgtgctggagcgacctcgacttctgcaagaagaccaagaactggtactgctacggcaaggcggcggcggagcgggcggcgtgggagncggcggcggcgcgcggggtggacctggtggtggtggtgccggtgctggtgcagggcccggcgctgcagccgtcggtgaacgccagcctgatgcacgtgctcaagtacctgaacgggtccgccaagacgtacgccaacgcggtgcaggcgtacgtgcacgtccgcgacgccgccgacgcgcacgtccgcgtcttcgaggcgccccgcgccgccggccgctacatctgcgccgacgccgtgctccaccgcgaggacgtcgtccgcaccctccgcaagtccttcccgggctacccngtcccggagaggtgctctgacgaggtgaacccgaggaagcagccgtacaagatctccaaccagcggctgagggagctgggcctggagttcaccccggcggcgcaggcgctgtacgacaccgtcgtgtgcttccaggagaagggcatcctccctctccctgtccccgccccaacgccggcgtcaccggacgcctgagctagctgatgagctggcccagaaccaacgaagaaacatgtttggcacgcaaacngctattataacagtcgctgcttcgatcattctgccgctagagatagaatgtggagtgtgtgctactcgttgtgggcgtaagagtgtcagaagagtgcagcagtaactatatcgatgcgactttttatatgttgctatatcatgtgtgacaatctcctaataataaatatatggagtatcgtcct

SEQ ID NO: 14838 - protein, 282 aa, Zea mays subsp. mays
  misc_feature (1)..(282): Ceres Seq. ID no. 12340536
  misc_feature (18)..(18): Xaa is any aa, unknown or other
  misc_feature (35)..(35): Xaa is any aa, unknown or other
  misc_feature (36)..(36): Xaa is any aa, unknown or other
  misc_feature (179)..(179): Xaa is any aa, unknown or other
  misc_feature (277)..(277): Xaa is any aa, unknown or other
MTVGDDAAAPGRGQTVCXTGAGGYVGSWIVKLLLXXGYAVRGTVRNPDDAKNAHLLALPGAAERLALCKADLLDYGALRAAVAGCHKRLPRRVAGHRRPGGDGGAGGAGDAVRHRRGGRGRHGPPRRPDVVDRRGGHGPPPRAGRRRRRVVLERPRLLQEDQELVLLRQGGGGAGGVGXGGGARGGPGGGGAGAGAGPGAAAVGERQPDARAQVPERVRQDVRQRGAGVRARPRRRRRARPRLRGAPRRRPLHLRRRRAPPRGRRPHPPQVLPGLPXPGEVL

SEQ ID NO: 14839 - protein, 239 aa, Zea mays subsp. mays
  misc_feature (1)..(239): Ceres Seq. ID no. 12340537
  misc_feature (78)..(78): Xaa is any aa, unknown or other
  misc_feature (175)..(175): Xaa is any aa, unknown or other
MVEPAVRGTRYVIDAAAEAGTVRRVVLTSSIGAVAMDPRREPDAVVDESCWSDLDFCKKTKNWYCYGKAAAERAAWEXAAARGVDLVVVVPVLVQGPALQPSVNASLMHVLKYLNGSAKTYANAVQAYVHVRDAADAHVRVFEAPRAAGRYICADAVLHREDVVRTLRKSFPGYXVPERCSDEVNPRKQPYKISNQRLRELGLEFTPAAQALYDTVVCFQEKGILPLPVPAPTPASPDA

SEQ ID NO: 14840 - protein, 204 aa, Zea mays subsp. mays
  misc_feature (1)..(204): Ceres Seq. ID no. 12340538
  misc_feature (43)..(43): Xaa is any aa, unknown or other
  misc_feature (140)..(140): Xaa is any aa, unknown or other
MDPRREPDAVVDESCWSDLDFCKKTKNWYCYGKAAAERAAWEXAAARGVDLVVVVPVLVQGPALQPSVNASLMHVLKYLNGSAKTYANAVQAYVHVRDAADAHVRVFEAPRAAGRYICADAVLHREDVVRTLRKSFPGYXVPERCSDEVNPRKQPYKISNQRLRELGLEFTPAAQALYDTVVCFQEKGILPLPVPAPTPASPDA

SEQ ID NO: 14841 - DNA, 648 bp, Zea mays subsp. mays
  misc_feature (1)..(648): Ceres Seq. ID no. 12340573
cttcttcgcattgcctttcccttcagttgcaccgacctccagacgaaaccacccaagacgcgtgcttccattcctagcccaacagaagcgaagcacgccaccgaccaccggcctcgaagggatcatcttctctacaactcgtcctcgtggccttgttcctcctcttgtataggggactgcggcggagtggagatccgtgccgacatagtccgacttcttcgctcgctgcctacgattgatggcctcaccttcaccaaccgaagagttcagcagggaagcagctcgtcagtctctgatcgcgatctccgagtccactccggagacaccttcaccgcagacggtgaggacaccgccgatctccagcgcagagaacgggaagccgggcgatggggcggacaagttcagatcgaagctgatgtccatcacagacctgtcttctgatgcccaacctgcgcagtgccctcccgaggatgtcgctgcttaatcaatcgtgtgattctctgctcgacttgcggacacgatgtatcagtgcttgccgatcctctgaactggacatttggctgtcgtgctttaaactggacgtccttatggcttatgttattactggtcgtttttatttgataaataaatattcaggggaacgggtgc

SEQ ID NO: 14842 - protein, 146 aa, Zea mays subsp. mays
  misc_feature (1)..(146): Ceres Seq. ID no. 12340574
LLRIAFPFSCTDLQTKPPKTRASIPSPTEAKHATDHRPRRDHLLYNSSSWPCSSSCIGDCGGVEIRADIVRLLRSLPTIDGLTFTNRRVQQGSSSSVSDRDLRVHSGDTFTADGEDTADLQRREREAGRWGGQVQIEADVHHRPVF

SEQ ID NO: 14843 - protein, 81 aa, Zea mays subsp. mays
  misc_feature (1)..(81): Ceres Seq. ID no. 12340575
MASPSPTEEFSREAARQSLIAISESTPETPSPQTVRTPPISSAENGKPGDGADKFRSKLMSITDLSSDAQPAQCPPEDVAA

SEQ ID NO: 14844 - DNA, 1072 bp, Zea mays subsp. mays
  misc_feature (1)..(1072): Ceres Seq. ID no. 12340576
acgtgccgtcgccacaatttaagcacggcttcctccgccacgacctccacacatcaccagcgcacagctctcctcatcggcgcacccgagctcgccctctccttcctcatcgaggcccgagtcctgctctgatggcgaccgacgtggctgagactcccgcgccgttggtggatgcggcccctgaggcgcccgcggacaccccggcggcgcctgctgttgacgcgaagccggccaaggccaagaaggccacagcgccgaagaagcgcgccagcccgacccatccgccgtacgccgagatggtctcggaggcgatcgcgtcgctcaaggagaggacggggtccagcagctttgctattgccaagttcttggaggacaagcacaaggacaagctcccgcccaacttccgcaagcttctgaacgttcagctcaagaagctcgtcgccggcggcaagctgaccaaggtgaagaactcgtacaagctgtcgtccgccaccaagccaaaggccgccccgaagaagaccaagaccggcgtgaagaagcccaaggccgctgccaaaccgaaggccaagtcccccgcgaagcccaagcccgccacaaagcccaaggcggccgcgaagcccgcttccaagcccgaaagcagcagcaaaacccaaggcaccagccaagcccaaggccaagcctgctgccaaggcgaagcccaaggctgccggcgctaagccgaagccagctgccaagaaggccggccgccccgccaaggcggccaagacgtcggccaaggccacgccaggaaagaaggcgccggtggccaagaagcccgcggccgccgcgaagaaggcgccggtagccaagaaggccgctccggcgaagaaggcggctgcccctgcccgaaaagcgccgtctcggaaggcgaagaagtagaggaggggtaggcgtcggagaaatgtagggtttggttctcgtattacgctagatgtttgctctccctttagcctaggtggtgtctgtgtgtgcaatgttgtaaatttgatatcggatgctgggaacactaagtcaatctttcagtagctgttgt

SEQ ID NO: 14845 - protein, 237 aa, Zea mays subsp. mays
  misc_feature (1)..(237): Ceres Seq. ID no. 12340577
VPSPQFKHGFLRHDLHTSPAHSSPHRRTRARPLLPHRGPSPALMATDVAETPAPLVDAAPEAPADTPAAPAVDAKPAKAKKATAPKKRASPTHPPYAEMVSEAIASLKERTGSSSFAIAKFLEDKHKDKLPPNFRKLLNVQLKKLVAGGKLTKVKNSYKLSSATKPKAAPKKTKTGVKKPKAAAKPKAKSPAKPKPATKPKAAAKPASKPESSSKTQGTSQAQGQACCQGEAQGCRR

SEQ ID NO: 14846 - protein, 194 aa, Zea mays subsp. mays
  misc_feature (1)..(194): Ceres Seq. ID no. 12340578
MATDVAETPAPLVDAAPEAPADTPAAPAVDAKPAKAKKATAPKKRASPTHPPYAEMVSEAIASLKERTGSSSFAIAKFLEDKHKDKLPPNFRKLLNVQLKKLVAGGKLTKVKNSYKLSSATKPKAAPKKTKTGVKKPKAAAKPKAKSPAKPKPATKPKAAAKPASKPESSSKTQGTSQAQGQACCQGEAQGCRR

SEQ ID NO: 14847 - protein, 139 aa, Zea mays subsp. mays
  misc_feature (1)..(139): Ceres Seq. ID no. 12340579
MVSEAIASLKERTGSSSFAIAKFLEDKHKDKLPPNFRKLLNVQLKKLVAGGKLTKVKNSYKLSSATKPKAAPKKTKTGVKKPKAAAKPKAKSPAKPKPATKPKAAAKPASKPESSSKTQGTSQAQGQACCQGEAQGCRR

SEQ ID NO: 14848 - DNA, 905 bp, Zea mays subsp. mays
  misc_feature (1)..(905): Ceres Seq. ID no. 12340611
acggcacacgtctcggcagccacaagaaaccacccccttccggcacacgggctcgaccacctgactccatcaccgtgcctgtctgtgttctagggacaagaagagcagagatatacaggagcgagcagaggcggggagaagaggatgagcaccacaacggcgtcgtcgctgaaccccaacgcgccgctcttcatcccggcggcgtaccggcaggtggaggacttctcgcccgagtggtgggagctcgtcaacaccaccgcctggttccgggaccactgcttccggcagcgccagctccacgaggccgcctgcgacgacgtcgccgcgctcctccccgacgacctcctcgacaccaacgacctcttctacgcgcccgacgtcgtccaccaccaaccagcgacggcgctgctgcccgggtacgatgtcctcgacgtgctcgcggcgctgagcctcagctcccccagggccatccgccagcctcctaggagaagcctgctcatggcgcctggcgggccaccacctccaccacggctgctgtgcctagtgtaaccccaagcaaggctagtctgtttctgtgtatacaatacgactgaaaaactaggagaggggggattcggccaaggcggccggtgctctctcctctcctcgtagctagtttttcctcctgttccagctcagttcttgttcatccagccgtgttaggaaaacaaacccagccccgtgcccatgttgttgaaaaatatattagtctggtatttacaactcttcgccaggtgcttcttgttcctcgagatttttttttcctctgtttcaacagtgtgttctctgatttgagagctgcaaggtgtgttttttgtctgtctcaacttcggtgatggtgggggcctgaaaatgggatgtgattg

SEQ ID NO: 14849 - protein, 160 aa, Zea mays subsp. mays
  misc_feature (1)..(160): Ceres Seq. ID no. 12340612
GTRLGSHKKPPPSGTRARPPDSITVPVCVLGTRRAEIYRSEQRRGEEDEHHNGVVAEPQRAALHPGGVPAGGGLLARVVGARQHHRLVPGPLLPAAPAPRGRLRRRRRAPPRRPPRHQRPLLRARRRPPPTSDGAAARVRCPRRARGAEPQLPQGHPPAS

SEQ ID NO: 14850 - protein, 134 aa, Zea mays subsp. mays
  misc_feature (1)..(134): Ceres Seq. ID no. 12340613
MSTTTASSLNPNAPLFIPAAYRQVEDFSPEWWELVNTTAWFRDHCFRQRQLHEAACDDVAALLPDDLLDTNDLFYAPDVVHHQPATALLPGYDVLDVLAALSLSSPRAIRQPPRRSLLMAPGGPPPPPRLLCLV

SEQ ID NO: 14851 - DNA, 946 bp, Zea mays subsp. mays
  misc_feature (1)..(946): Ceres Seq. ID no. 12340618
atctggtccttgattactcgtcctttttgcttggtgcctgtgtatatcgtcgccccggccgcttgagctagcttcctctagtgctcgctctcgtcgtcgatcggttgtttgcatagcccacggcgagccgaagcaatgtcgtcggcgcccctgcagatcgcgccggtgccggagcatgtgtgctacgtgcactgcaacttctgcaacacaattctcgcggtcagtgtcccgagtcacagcatgctgaacatcgtcacagtccgttgtgggcactgcactagcctgctgtcggtgaacttgagaggactcatccaatcacttcctgtccagaaccaccactactcccagcagcaggagaatttcaccgtccaaaatatgggttttactgaaaattaccctgagtacgcaccttcgtaccgcatgccaacgacgctgtcagtgaaaggtgatctggatcatatgctgcacgtgcgcgctccagagaagaggcagcgtgttccttcagcatataacagatttattaaggaggagatacgaaggattaaagcatgtaacccggacataagccatagggaagccttcagcactgcagcaaagaattgggcacattttccgaatattcattttggtctagggccctgtgaaagtagcaacaatcttgatgaggccaccggtgcaatgtgccatccccagaaagtccaagatctctactaagacctatatcagcactgccctttgtttcctcttagttctggactagttggtgagtgccatatatatatgcatgagtgtgatatgatcatgaggtaaggaattatgattaagatgatatatatgtacgagatgaacatgcccctaggttcatgaaagactaaataaggatcgtcatctcaccatgttatcataggtagtaactattgtttgaaataaattatcctttgtgtgc

SEQ ID NO: 14852 - protein, 192 aa, Zea mays subsp. mays
  misc_feature (1)..(192): Ceres Seq. ID no. 12340619
MSSAPLQIAPVPEHVCYVHCNFCNTILAVSVPSHSMLNIVTVRCGHCTSLLSVNLRGLIQSLPVQNHHYSQQQENFTVQNMGFTENYPEYAPSYRMPTTLSVKGDLDHMLHVRAPEKRQRVPSAYNRFIKEEIRRIKACNPDISHREAFSTAAKNWAHFPNIHFGLGPCESSNNLDEATGAMCHPQKVQDLY

SEQ ID NO: 14853 - protein, 157 aa, Zea mays subsp. mays
  misc_feature (1)..(157): Ceres Seq. ID no. 12340620
MLNIVTVRCGHCTSLLSVNLRGLIQSLPVQNHHYSQQQENFTVQNMGFTENYPEYAPSYRMPTTLSVKGDLDHMLHVRAPEKRQRVPSAYNRFIKEEIRRIKACNPDISHREAFSTAAKNWAHFPNIHFGLGPCESSNNLDEATGAMCHPQKVQDLY

SEQ ID NO: 14854 - protein, 112 aa, Zea mays subsp. mays
  misc_feature (1)..(112): Ceres Seq. ID no. 12340621
MGFTENYPEYAPSYRMPTTLSVKGDLDHMLHVRAPEKRQRVPSAYNRFIKEEIRRIKACNPDISHREAFSTAAKNWAHFPNIHFGLGPCESSNNLDEATGAMCHPQKVQDLY

SEQ ID NO: 14855 - DNA, 924 bp, Zea mays subsp. mays
  misc_feature (1)..(924): Ceres Seq. ID no. 12340623
attagtgctggtgtgtgtggtgtggttcgtccatctctcctgctagcttagctcgctcgctggcaacaacaatgaaagccgcaactggctcgtcatcagtcgctcgcgctcttgcgttgctcttggcggcgtgccttctctggaaggaagccgcgtgcttctcggcgtccgggctaaacaaggcgttcgccaccttctatggcggtagcgacgcttcaggaacgatgggtggggcctgtgggtacggcaacctgtactcgacggggtacggcacggacacggcggcgctgagcacggcgctcttcaacgacggcgcctcgtgcgggcagtgctaccggatctcctgcgactaccaggcggacccgcggttctgcatccgcggcacgtcggtgaccatcaccgccaccaacctgtgccctcccaactacgcgctgcccaacgacgacggcggctggtgcaacccgccgcggcagcacttcgacatggccgagccggcctggctcaagatcggcatctaccgcggcggcatcgtgcccgtcaactaccaaagggtgccgtgtgtgaagaaaggcggggtgaggttcagcatcaacgggcgcgactacttcgagctggtgctcatctccaacgtgggcggctgcgggtccatccagtcggcgtccatcaaggggtcgcgcaccgggtggatggccatgtcccggaactggggcgtcaactggcagtccaacgcgtacctcaatggccagagcctgtcgttccaggtcaccagcagcgacggccagaccaaaaccttccccgacgtcgcgcccgccagctgggggttcggtcagacgtttgcgacctcgcagcagttctcttagtatagacacatctttgttttctgcctcgttcgcttgtcgtttatatatatccctcactcggctc

SEQ ID NO: 14856 - protein, 262 aa, Zea mays subsp. mays
  misc_feature (1)..(262): Ceres Seq. ID no. 12340624
MKAATGSSSVARALALLLAACLLWKEAACFSASGLNKAFATFYGGSDASGTMGGACGYGNLYSTGYGTDTAALSTALFNDGASCGQCYRISCDYQADPRFCIRGTSVTITATNLCPPNYALPNDDGGWCNPPRQHFDMAEPAWLKIGIYRGGIVPVNYQRVPCVKKGGVRFSINGRDYFELVLISNVGGCGSIQSASIKGSRTGWMAMSRNWGVNWQSNAYLNGQSLSFQVTSSDGQTKTFPDVAPASWGFGQTFATSQQFS

SEQ ID NO: 14857 - protein, 211 aa, Zea mays subsp. mays; identical to SEQ ID NO: 14591
  misc_feature (1)..(211): Ceres Seq. ID no. 12340625

SEQ ID NO: 14858 - DNA, 1144 bp, Zea mays subsp. mays
  misc_feature (1)..(1144): Ceres Seq. ID no. 12340675
acgaccttctagttctagatgattctcaaacccacttccgggctgccgccgaggttatctacaacaccgagcagcgagaaggggttggtgtccagcacgaattgaatcgtcgccagaagtcatggcggattcggccacttcccgtccaaccgttctcgtcaccggcgccggcggccgcacaggccaaattgtctacaacaaactgaaagagaggtctgagcagttcgtggcaagagggctagtcaggacagaggagagcaagcagaagattggggcagccggtgatgtttacgttgctgacataagagacgcggatcgtctagcacctgctgtacaaggtgtggatgcgctcataatcctcaccagtgctgccccgaaaatgaaaccgggtttcgaccctagcaaaggtggacggcccgagttctactacgaagacggaatgtaccctgaacaggtggattggcttggccaaaagaatcagatcgatgctgctaaagctgctggagtgaagcatattgtgctggtgggatctatgggaggaacaaatcctaaccatccgctgaacagcatgggtaatggcaatatactggtatggaagcgcaaagcagaacagtatttggcagacagtggaatcccttatacaatcataaggccaggaggtctacaagacaaggacggaggagtgagagagctacttgtggggaaagacgatgaacttctccagactgacacaaagtcgattcctagagccgatgtggctgaggtttgtgtccaggctctgcagtacgaagaggccaagttcaaggcatttgatttggcctcaaagcctgaaggtgtgggcacgccaacaaaggactttagggcactgttctcccagatcactgctcggttttgagcgagctgctgggaagcctactcgagttctagattttatggtgtcacaatccattttatcgtgggcttgtcctggagatacaaccaggtagcttgttggagctgcggtttggtgcaattgcaaccaggtagcttgtatcaatccattttatggtgcattgtttgcttgtacactgctgaatgtcgtctggttgccaattgtgtgaactgttgacagccattaaaacaagttatttggaaccctgtttgc

SEQ ID NO: 14859 - protein, 257 aa, Zea mays subsp. mays
  misc_feature (1)..(257): Ceres Seq. ID no. 12340676
MADSATSRPTVLVTGAGGRTGQIVYNKLKERSEQFVARGLVRTEESKQKIGAAGDVYVADIRDADRLAPAVQGVDALIILTSAAPKMKPGFDPSKGGRPEFYYEDGMYPEQVDWLGQKNQIDAAKAAGVKHIVLVGSMGGTNPNHPLNSMGNGNILVWKRKAEQYLADSGIPYTIIRPGGLQDKDGGVRELLVGKDDELLQTDTKSIPRADVAEVCVQALQYEEAKFKAFDLASKPEGVGTPTKDFRALFSQITARF

SEQ ID NO: 14860 - protein, 171 aa, Zea mays subsp. mays
  misc_feature (1)..(171): Ceres Seq. ID no. 12340677
MKPGFDPSKGGRPEFYYEDGMYPEQVDWLGQKNQIDAAKAAGVKHIVLVGSMGGTNPNHPLNSMGNGNILVWKRKAEQYLADSGIPYTIIRPGGLQDKDGGVRELLVGKDDELLQTDTKSIPRADVAEVCVQALQYEEAKFKAFDLASKPEGVGTPTKDFRALFSQITARF

SEQ ID NO: 14861 - protein, 151 aa, Zea mays subsp. mays
  misc_feature (1)..(151): Ceres Seq. ID no. 12340678
MYPEQVDWLGQKNQIDAAKAAGVKHIVLVGSMGGTNPNHPLNSMGNGNILVWKRKAEQYLADSGIPYTIIRPGGLQDKDGGVRELLVGKDDELLQTDTKSIPRADVAEVCVQALQYEEAKFKAFDLASKPEGVGTPTKDFRALFSQITARF

SEQ ID NO: 14862 - DNA, 1060 bp, Zea mays subsp. mays
  misc_feature (1)..(1060): Ceres Seq. ID no. 12340681
agagaagatgttcgacgagatgcacgctctgttccacgagctgaagagcgggcatgcgcctgtccagcgtgctcttcccctacgcccccacgccgacgaaccgccggcgcgacagggcgcgcgccaagctgttaaagatattcagcgaggtcgtgcggtcccggaggaggcggggcgaggaggagaaggagaaggaggaggacgtgctgcagagcctgatcgattccaggtacaaggacgggcgggccacgaccgaggaggaggtcaccggcatgatcatcctcctggtcttcggcgggatggacacgagcacgctcgccagcacctggaccggcgcgcgcctgctcagcaccccggcggccatggcagccgcggtcgaggagcagaggcggatcctcaccgaccacgggcacggggcaccgcgtcggctacagtgaattcatgcagatgaccaccctccactggagcatcaaggaggcgctgaggatgcaccctccgtcggcggtgttcttccgcaaggcgcggaggagcttcggcgtgcggacgagagacggccgcgagtacgaggtcccgggtgggcatacggtggcgagccccgtgctgttcaacagccacctgcctagcgtgtacaaggaccccgacgtgtacgacccgacccggtttgggcctgggagggaggaggacagggccggcggtaagttcacctacgaggcgtttagctgcgggcggcacagctgcgtcggcgaggcgtacgcgtatctgcagatcaaggtgatgctcagccatttgctgaggaacttccagctcgagctcgtgtcccctttccctcagacagattgggggaagctggtgcctgagcctaaagggaaagtgatggtcaggtacaagaggcagcgcctgctctcagtgcctagctagtagaagatggctagtacaagaagaaactagtgtggacaaagctggggatgtgtgtgtttatcggcctgtactgtagcatgtgtaattatgtttgcctgtttaatctctatggcgatcggcttagaaaacctgttgacacttg

SEQ ID NO: 14863 - protein, 158 aa, Zea mays subsp. mays
  misc_feature (1)..(158): Ceres Seq. ID no. 12340682
MQMTTLHWSIKEALRMHPPSAVFFRKARRSFGVRTRDGREYEVPGGHTVASPVLFNSHLPSVYKDPDVYDPTRFGPGREEDRAGGKFTYEAFSCGRHSCVGEAYAYLQIKVMLSHLLRNFQLELVSPFPQTDWGKLVPEPKGKVMVRYKRQRLLSVPS

SEQ ID NO: 14864 - protein, 156 aa, Zea mays subsp. mays
  misc_feature (1)..(156): Ceres Seq. ID no. 12340683
MTTLHWSIKEALRMHPPSAVFFRKARRSFGVRTRDGREYEVPGGHTVASPVLFNSHLPSVYKDPDVYDPTRFGPGREEDRAGGKFTYEAFSCGRHSCVGEAYAYLQIKVMLSHLLRNFQLELVSPFPQTDWGKLVPEPKGKVMVRYKRQRLLSVPS

SEQ ID NO: 14865 - protein, 149 aa, Zea mays subsp. mays
  misc_feature (1)..(149): Ceres Seq. ID no. 12340684
EKMFDEMHALFHELKSGHAPVQRALPLRPHADEPPARQGARQAVKDIQRGRAVPEEAGRGGEGEGGGRAAEPDRFQVQGRAGHDRGGGHRHDHPPGLRRDGHEHARQHLDRRAPAQHPGGHGSRGRGAEADPHRPRARGTASATVNSCR

SEQ ID NO: 14866 - DNA, 1514 bp, Zea mays subsp. mays
  misc_feature (1)..(1514): Ceres Seq. ID no. 12340715
aaaacagccgcatccctctctccctactacctctccctagcagcgganagcttctctcccagccgcagctcctccctctgtcccctctcccaaaacccctctctctccacgcttctccctcactctcccagccgctgcagccgcgctgncctccgccccggcgcccgtcgcgctgccctcccatctccctccggtgttgngtngtcatttgtcaggtagccgcctcccccccccccccccccctnttnagcttgttctccncggcggcggcggcggcggcttggatcggagcggagggagaagatggtggcatcaatcagggtgcccaagacccaacgcgccaggagggagcttctcaagcacgcgcccaagcttgttgagaccagcaagaagacactgatcctccatggtaccaagactagtgctgtgttgaactctgtgctgtcagatatttaccacctaaagcgtgataatgctgtgaaatataccaagaagaatgacaacattaggccttttgaaagtggtggagaatcttctctggaatttttctccctcaaggcagactgtagccttatagtgtatggttctcattcaaagaagaggcccaacaatctgattttggctagaacgtatgaccaccacatatatgaccttgttgaagtaggagttgagaactacaagtcaatggaatcttatgtttatgataagaagctagcaccattacttggatcgaagcctttctttgctttcataggggaacactttgagagttctgaagagctgaaacatttgaaagaagtgctgcttgatcttttcagaggagaggtcgtagagaatctgaaccttgccggtgtggatcggatctatgtgtgcactgcaatctctcccaccactgtttacatgatgcactgtgctctccgtctaaaaaggtcaggtacatctattcctaggatggagctggtcgaagttggaccttcaatggatctggttgtaaggaggcacagacttccagctgaaagtttgaagaaagaagctatgaagaccgctgaacatgctaagaagatgaaaaatgtcaccaaggatccagtgcagggcaagctgggcaaggtctacatgccagaccagcaggttggaaagttgaccttatcaaacgacgtaaagggactaaagagggagcgccgcgaagccaagaaaaatcaggactcaaagaagcaaaaggtcaaccctgagtaaagagcactgaagtttacctttgtattggatacaggtcaggttaagaaaccctggcttgtatctgtttccaactgctgtgttatccaagtagaagttgctcgctgtcagattagtgccatcttgttaggctaaagatctctgtacgactttcacatcagtattgtgtaccaatccatgttatgacataagcatggaattttgagaatgtgttatcctatcaaatatcaaacgtcttctgaggtctcaagccctgttaaaggaggattgtggtaggcttggcg

SEQ ID NO: 14867 - protein, 309 aa, Zea mays subsp. mays
  misc_feature (1)..(309): Ceres Seq. ID no. 12340716
MVASIRVPKTQRARRELLKHAPKLVETSKKTLILHGTKTSAVLNSVLSDIYHLKRDNAVKYTKKNDNIRPFESGGESSLEFFSLKADCSLIVYGSHSKKRPNNLILARTYDHHIYDLVEVGVENYKSMESYVYDKKLAPLLGSKPFFAFIGEHFESSEELKHLKEVLLDLFRGEVVENLNLAGVDRIYVCTAISPTTVYMMHCALRLKRSGTSIPRMELVEVGPSMDLVVRRHRLPAESLKKEAMKTAEHAKKMKNVTKDPVQGKLGKVYMPDQQVGKLTLSNDVKGLKRERREAKKNQDSKKQKVNPE

SEQ ID NO: 14868 - protein, 182 aa, Zea mays subsp. mays
  misc_feature (1)..(182): Ceres Seq. ID no. 12340717
MESYVYDKKLAPLLGSKPFFAFIGEHFESSEELKHLKEVLLDLFRGEVVENLNLAGVDRIYVCTAISPTTVYMMHCALRLKRSGTSIPRMELVEVGPSMDLVVRRHRLPAESLKKEAMKTAEHAKKMKNVTKDPVQGKLGKVYMPDQQVGKLTLSNDVKGLKRERREAKKNQDSKKQKVNPE

SEQ ID NO: 14869 - DNA, 1052 bp, Zea mays subsp. mays
  misc_feature (1)..(1052): Ceres Seq. ID no. 12340741
atatatgtgaatcctaactgtacactgtctgaagtggacgaacggctctggcttcggcgtgttacgtgtatagtaggccccttttgaacgaacggcgcgggccggggccaccaccagcatctgcggcagggagaatcgcgttggttcgacgcaaacgctacccggcgcccccttgcccttggggccggctattttaccgcacccgttctcccctctctaccgcagatcagatcacactcgtagagagaaggaaaaatatccccaaaccctagctcccgatctcgatggcgaaccctcgcgtcttcttcgacatgaccgtcggcggcgccccggcgggccggatcgtgatggagctgtacgccaacgaggtgcccaagaccgcggagaacttccgcgcgctgtgcacgggcgagaagggcgtgggcaagtccgggaagccgctccactacaagggctccaccttccaccgcgtcatccccgagttcatgtgccagggcggcgacttcacccgcggcaacggcaccggcggcgagtccatctacggcgagaagttccccgacgagaagttcgtgcgcaagcaacccgcccccggtgtgctctccatggccaacgccgggcccaacaccaacggctcccagttcttcatctgcaccgtcgcgaccccttggctcgacggcaagcacgtcgtcttcggccaggtcgtcgagggcatggacgtcgtcaaggccatcgagaaggtgggcacccgcaacggctccacctccaaggtggtcaaggtcgctgactgcggacagctctcctagatctctctgatctggtctgttcggccgccctccctccgtcatcgtcgactccccctgcgtccgttcctttggatctgaataagatggtggtgatctgagtggtggtcttagtttatcatgtatcgctcgcagtttaatttagcggtttaggtgtggatctgtgaaccccatggcgcctctgcttgattcgtgtttcacctgttatgttctgagattcatgataatgctatgagaactgaaattcccgtt

SEQ ID NO: 14870 - protein, 172 aa, Zea mays subsp. mays
  misc_feature (1)..(172): Ceres Seq. ID no. 12340742
MANPRVFFDMTVGGAPAGRIVMELYANEVPKTAENFRALCTGEKGVGKSGKPLHYKGSTFHRVIPEFMCQGGDFTRGNGTGGESIYGEKFPDEKFVRKQPAPGVLSMANAGPNTNGSQFFICTVATPWLDGKHVVFGQVVEGMDVVKAIEKVGTRNGSTSKVVKVADCGQLS

SEQ ID NO: 14871 - protein, 163 aa, Zea mays subsp. mays
  misc_feature (1)..(163): Ceres Seq. ID no. 12340743
MTVGGAPAGRIVMELYANEVPKTAENFRALCTGEKGVGKSGKPLHYKGSTFHRVIPEFMCQGGDFTRGNGTGGESIYGEKFPDEKFVRKQPAPGVLSMANAGPNTNGSQFFICTVATPWLDGKHVVFGQVVEGMDVVKAIEKVGTRNGSTSKVVKVADCGQLS

SEQ ID NO: 14872 - protein, 151 aa, Zea mays subsp. mays
  misc_feature (1)..(151): Ceres Seq. ID no. 12340744
MELYANEVPKTAENFRALCTGEKGVGKSGKPLHYKGSTFHRVIPEFMCQGGDFTRGNGTGGESIYGEKFPDEKFVRKQPAPGVLSMANAGPNTNGSQFFICTVATPWLDGKHVVFGQVVEGMDVVKAIEKVGTRNGSTSKVVKVADCGQLS

SEQ ID NO: 14873 - DNA, 1041 bp, Zea mays subsp. mays
  misc_feature (1)..(1041): Ceres Seq. ID no. 12340753
agtggctgcacctcggtcccagctgtcagcgaacggcaacgaggcaaacacatgacgcctctcttctcttccgtgtagatctcgcttagaattcgtgtaccagaaaccccggccctaaccgcgcccgcaccctcgcccttggctcgccggagattaacgctacagccgtaatcacgtaaattccttttcatggagggtgtgggcgcgcggctagggcgcacttcggcgcgctacgggccggcgacgacgttcacgggccatgtcaggaagtggcgcaaggagtgggtaccagtggtcgccgccgccgccgccgccgccgccaacgccaacaccagcgccaacggtggcacgacgtcctccacggggatgggatctggcggaggatcccgcgggaataatcttctcctgtttaagtggaccccggtgaacggggctaacgggggaggaggggatggggagcagcagcagcaggctgagacggccacgagacgccggcggtatgtgccggtttctttaatggaagagcaaaggcaagaatctaccaaatctgatgatgagaacaaggctaatgatggagatccatcttcgaatgaaactgagccatcaaatggaaagactgatatcaatgatacacctatggatgaatctcaggcaacagatgaggatggtcgagattctggtaaaaacggcggtggaacagacctaaatttgaatttaggtttgaaagacccggatggtgataatgaagttgagacatcagagaaacatgtagcggcaaacaatccgcagacagagaatagatccaagaggaaatccgtaacccctgaccttgagatgacaatgtaacccagaaatttcatttgtcttaattttactatttgccatgagcccatgaggtgtgtaacttgggtacgttctcatcgtagaaacatttaagtaaaatcgattacaggacatacaatagtgtgaactgaagaaacctttttttactcgaacatggagaattgtctaaagtcattgtcaaatataatttaattttcc

SEQ ID NO: 14874 - protein, 218 aa, Zea mays subsp. mays
  misc_feature (1)..(218): Ceres Seq. ID no. 12340754
MEGVGARLGRTSARYGPATTFTGHVRKWRKEWVPVVAAAAAAAANANTSANGGTTSSTGMGSGGGSRGNNLLLFKWTPVNGANGGGGDGEQQQQAETATRRRRYVPVSLMEEQRQESTKSDDENKANDGDPSSNETEPSNGKTDINDTPMDESQATDEDGRDSGKNGGGTDLNLNLGLKDPDGDNEVETSEKHVAANNPQTENRSKRKSVTPDLEMTM

SEQ ID NO: 14875 - protein, 159 aa, Zea mays subsp. mays
  misc_feature (1)..(159): Ceres Seq. ID no. 12340755
MGSGGGSRGNNLLLFKWTPVNGANGGGGDGEQQQQAETATRRRRYVPVSLMEEQRQESTKSDDENKANDGDPSSNETEPSNGKTDINDTPMDESQATDEDGRDSGKNGGGTDLNLNLGLKDPDGDNEVETSEKHVAANNPQTENRSKRKSVTPDLEMTM

SEQ ID NO: 14876 - protein, 109 aa, Zea mays subsp. mays
  misc_feature (1)..(109): Ceres Seq. ID no. 12340756
MEEQRQESTKSDDENKANDGDPSSNETEPSNGKTDINDTPMDESQATDEDGRDSGKNGGGTDLNLNLGLKDPDGDNEVETSEKHVAANNPQTENRSKRKSVTPDLEMTM

SEQ ID NO: 14877 - DNA, 1144 bp, Zea mays subsp. mays
  misc_feature (1)..(1144): Ceres Seq. ID no. 12340765
aaatcgagctcggaggcgaatctctcgctaactgtcatcaatggcggccgagcccaagatcctagagctctccaacggcaagatcaccgcgaggatctccaactggggcgccaccatcacctccctcctcgtccccgacgcccaggggagtgtcgctgatgtggtgctcggattcgatggcttggatccgtacgtgaaaggcatgtcaccttattttggctgcatagttggccgtgtcgcgaataggatcaaggatgggaagtttacactaaacggacttgagtattcattacctgtcaacaatggacctaacagccttcatggtgggttgaagggatttgataaggtcgtgtgggatgtcgtggagcacaaagatggcgaatgcccttcaataacttttcagtatcacagcaaggacggggaagaaggctatccaggcgatgtaaccattcgagcaacatactctcttcctgaagctactactctaaggcttgacatggaagctacaccagagaacaaagcaactcctataagcctggcgcagcacacctactggaacctcgcaggtcacgcctgcggcgacatcttaaaccactcgctgcagatctggggcaagcacatcactccggtcgacgagaacacaattcccaccggcgagataatgcccgtcgatggcaccccttttgacttcacgacggagcgcaggattggcgagcgcatcgacggtgttcctggagggtatgatcataactacgtgctggactgtggcgacgagaaggacggcctgaagcgtgcggccaggctgaaagatccgtcgagcttgcggaccctggacctgtggactgacgcacccggcatgcagctgtacactgccaactacgtggatggcatcggtggcaaggcgggcgctgtctacgcgaagcatgctggagtgtgcttggaaacccaggggttcccgaatgccatcaaccagcctgagtttccctctgtggttgttcggcccggtgagaagtataagcatactatgctgtttgagttctcgggatgttgaatagtgactggacagcataaattgatgtaaaacatgttgaatgaataaacaagcagaaggataagctgtgataataatgcactagtttgctcc

SEQ ID NO: 14878 - protein, 336 aa, Zea mays subsp. mays
  misc_feature (1)..(336): Ceres Seq. ID no. 12340766
MAAEPKILELSNGKITARISNWGATITSLLVPDAQGSVADVVLGFDGLDPYVKGMSPYFGCIVGRVANRIKDGKFTLNGLEYSLPVNNGPNSLHGGLKGFDKVVWDVVEHKDGECPSITFQYHSKDGEEGYPGDVTIRATYSLPEATTLRLDMEATPENKATPISLAQHTYWNLAGHACGDILNHSLQIWGKHITPVDENTIPTGEIMPVDGTPFDFTTERRIGERIDGVPGGYDHNYVLDCGDEKDGLKRAARLKDPSSLRTLDLWTDAPGMQLYTANYVDGIGGKAGAVYAKHAGVCLETQGFPNAINQPEFPSVVVRPGEKYKHTMLFEFSGC

SEQ ID NO: 14879 - protein, 282 aa, Zea mays subsp. mays
  misc_feature (1)..(282): Ceres Seq. ID no. 12340767
MSPYFGCIVGRVANRIKDGKFTLNGLEYSLPVNNGPNSLHGGLKGFDKVVWDVVEHKDGECPSITFQYHSKDGEEGYPGDVTIRATYSLPEATTLRLDMEATPENKATPISLAQHTYWNLAGHACGDILNHSLQIWGKHITPVDENTIPTGEIMPVDGTPFDFTTERRIGERIDGVPGGYDHNYVLDCGDEKDGLKRAARLKDPSSLRTLDLWTDAPGMQLYTANYVDGIGGKAGAVYAKHAGVCLETQGFPNAINQPEFPSVVVRPGEKYKHTMLFEFSGC

SEQ ID NO: 14880 - protein, 184 aa, Zea mays subsp. mays
  misc_feature (1)..(184): Ceres Seq. ID no. 12340768
MEATPENKATPISLAQHTYWNLAGHACGDILNHSLQIWGKHITPVDENTIPTGEIMPVDGTPFDFTTERRIGERIDGVPGGYDHNYVLDCGDEKDGLKRAARLKDPSSLRTLDLWTDAPGMQLYTANYVDGIGGKAGAVYAKHAGVCLETQGFPNAINQPEFPSVVVRPGEKYKHTMLFEFSGC

SEQ ID NO: 14881 - DNA, 1206 bp, Zea mays subsp. mays
  misc_feature (1)..(1206): Ceres Seq. ID no. 12340792
ctcgccggccttctcagaccacaaacattgcgcttgcggcttgccgcccagctatataagtactctcgggaataggcggtcactcatccatcccatctccatctcggagcaaaggcaatccagcaagagtcgctcctttcccttttcgggatacagccagcagaagcaatccggctaacaagtttcttcttcttcttcttctttcctgtcgcagggctcaccgaagtgacgatggcgtttgcggtctccgacgagctgctgggcaccttcgtgccgattgcggtgtactggctctactcggggctctacgtcgtcctggacgggctggggatggacgactacaggctccatcccaagggggaggaggccaggaacatcgtttccaggtggacggtcgtcaggggcgtccttgttcagcaggcgtttcaaatcgctgtctcccttcttctcttcacggttcttggtgatgataatgggactgtgaggaagcagcctctagctttggtaatggcattgcaatttatcattgcaatgtttgtcatggacacatggcagtacttcatgcacagatacatgcatatcaacagattcttgtacaagcacgtccactctaagcaccacactcttgtcgtcccctacgcctttggagctctttacaaccaccccctggaggggctcatcctggacaccgtcggcggcgcgctctcgttcctcatctctggcatgaccccaaggactggcattttcttcttctcgtttgcgaccatcaagaccgtcgatgaccactgtggtctgtggcttcctggaaacatcctccatgtattcttcagcaacaacagcgcttaccatgacatccaccatcagctctacgggaacaagtacaacttctcgcagcccttctttgtcatgtgggacaagatcctcggaacatacatgccttacactctggagacacgcaagggaggtgggtttgaggcacgcccggttaagctcgaccgagcacagcagatcaaggctgattaagcagcgtggtttctcctgtttgtctactacttcccctggtttttttttccttctgactgcatttgtactgtagaggtattttcctgtccatatagtaaaatcctttaggcagatgacatgttgtacccaaaagatgtagcaaatgaaacatcttgctaatgaagatccattggggtttgtttt

SEQ ID NO: 14882 - protein, 263 aa, Zea mays subsp. mays
  misc_feature (1)..(263): Ceres Seq. ID no. 12340793
MAFAVSDELLGTFVPIAVYWLYSGLYVVLDGLGMDDYRLHPKGEEARNIVSRWTVVRGVLVQQAFQIAVSLLLFTVLGDDNGTVRKQPLALVMALQFIIAMFVMDTWQYFMHRYMHINRFLYKHVHSKHHTLVVPYAFGALYNHPLEGLILDTVGGALSFLISGMTPRTGIFFFSFATIKTVDDHCGLWLPGNILHVFFSNNSAYHDIHHQLYGNKYNFSQPFFVMWDKILGTYMPYTLETRKGGGFEARPVKLDRAQQIKAD

SEQ ID NO: 14883 - protein, 230 aa, Zea mays subsp. mays
  misc_feature (1)..(230): Ceres Seq. ID no. 12340794
MDDYRLHPKGEEARNIVSRWTVVRGVLVQQAFQIAVSLLLFTVLGDDNGTVRKQPLALVMALQFIIAMFVMDTWQYFMHRYMHINRFLYKHVHSKHHTLVVPYAFGALYNHPLEGLILDTVGGALSFLISGMTPRTGIFFFSFATIKTVDDHCGLWLPGNILHVFFSNNSAYHDIHHQLYGNKYNFSQPFFVMWDKILGTYMPYTLETRKGGGFEARPVKLDRAQQIKAD

SEQ ID NO: 14884 - protein, 171 aa, Zea mays subsp. mays
  misc_feature (1)..(171): Ceres Seq. ID no. 12340795
MALQFIIAMFVMDTWQYFMHRYMHINRFLYKHVHSKHHTLVVPYAFGALYNHPLEGLILDTVGGALSFLISGMTPRTGIFFFSFATIKTVDDHCGLWLPGNILHVFFSNNSAYHDIHHQLYGNKYNFSQPFFVMWDKILGTYMPYTLETRKGGGFEARPVKLDRAQQIKAD

SEQ ID NO: 14885 - DNA, 1179 bp, Zea mays subsp. mays
  misc_feature (1)..(1179): Ceres Seq. ID no. 12340811
acaacaacttagcataacaaaagcccttgcccacgccatgacgctcagcaagaagcaaggcgcaggcactgatcagcaggccttgctggatgctcagctgcagctctggcaccacaccatcgcttttgtcaagtccatggcgctcaaggccgccgtagacctccgcatagcggacgccatccacctgcacggcggctcagccaccctctcgcagatagtcaccaaggtcacactccacccgtccaagataccatgcctgcgacgcctcatgcgcgtgctcactctcaccggcgtcttcagcgtcaacaccggcgccgttgtcgacgagcccgtttacgggctcacgccggcgtctcgccttctggtcggcccggggctgaaccagaccccgttcctgaccttgatgctcagcactttcttcgtgtcctccttcctcggcctcgacgagtggttccagcacgagacgggtccgtccccgttcgagctggccaatggccgggacatatggaccctgtccggccacgaccgagcttcggcaagctcttcgacgacgggatggtcgcggacagcggtttcatcatggacgtcgtggtcaaggagtgcggcgacgtgttccgaggggtcggctccctcgtcgacgtcgccggcgggctcggtggtgccacccagaccatcgcgaaggctttcccggacgtggcgtgcagcgtgctggacctcccacacgtcgtcgccaatgctcccaccgacaccaccgtgaagtacatcgccggcgacatgttcgagagcattccgtcggcaaacgttgtcttcctcaagtggattctgcatgactggggtgatgccgaatgcgtgaagatactgaagaactgcaagaaggctatatcatctcaagaagaagggaaggtagtgatactggatatggttgttggagcagggtcatccgacgagaagcatgtggagacgcaaatcgtattcgatctctttatgatgtttatcaatggcactgagcgagatgagacggagtggaagaagatcattttcgaagccgggtttagccgttacaagatcatacctgttctcggtgttcggtcgataatcgaggtctacccataaaaatctatgcaactcaagtatactgcatgcgtgaataatctgcgtgtgaaatcaaaactaggtgtg

SEQ ID NO: 14886 - protein, 286 aa, Zea mays subsp. mays
  misc_feature (1)..(286): Ceres Seq. ID no. 12340812
MPATPHARAHSHRRLQRQHRRRCRRARLRAHAGVSPSGRPGAEPDPVPDLDAQHFLRVLLPRPRRVVPARDGSVPVRAGQWPGHMDPVRPRPSFGKLFDDGMVADSGFIMDVVVKECGDVFRGVGSLVDVAGGLGGATQTIAKAFPDVACSVLDLPHVVANAPTDTTVKYIAGDMFESIPSANVVFLKWILHDWGDAECVKILKNCKKAISSQEEGKVVILDMVVGAGSSDEKHVETQIVFDLFMMFINGTERDETEWKKIIFEAGFSRYKIIPVLGVRSIIEVYP

SEQ ID NO: 14887 - protein, 251 aa, Zea mays subsp. mays
  misc_feature (1)..(251): Ceres Seq. ID no. 12340813
QQLSITKALAHAMTLSKKQGAGTDQQALLDAQLQLWHHTIAFVKSMALKAAVDLRIADAIHLHGGSATLSQIVTKVTLHPSKIPCLRRLMRVLTLTGVFSVNTGAVVDEPVYGLTPASRLLVGPGLNQTPFLTLMLSTFFVSSFLGLDEWFQHETGPSPFELANGRDIWTLSGHDRASASSSTTGWSRTAVSSWTSWSRSAATCSEGSAPSSTSPAGSVVPPRPSRRLSRTWRAACWTSHTSSPMLPPTPP

SEQ ID NO: 14888 - protein, 239 aa, Zea mays subsp. mays
  misc_feature (1)..(239): Ceres Seq. ID no. 12340814
MTLSKKQGAGTDQQALLDAQLQLWHHTIAFVKSMALKAAVDLRIADAIHLHGGSATLSQIVTKVTLHPSKIPCLRRLMRVLTLTGVFSVNTGAVVDEPVYGLTPASRLLVGPGLNQTPFLTLMLSTFFVSSFLGLDEWFQHETGPSPFELANGRDIWTLSGHDRASASSSTTGWSRTAVSSWTSWSRSAATCSEGSAPSSTSPAGSVVPPRPSRRLSRTWRAACWTSHTSSPMLPPTPP

SEQ ID NO: 14889 - DNA, 983 bp, Zea mays subsp. mays
  misc_feature (1)..(983): Ceres Seq. ID no. 12340823
aaccttatttggcccggcgcgggagcccgtcctataactgaataaccgatcgaggcgcgcaacgcacacctccgattcaggacgagcagccggccagccagcgcgcgagaggacgtacggacgcacagctaggcggaggcgatggacggccgacgacgacggcaatggccgcggtcgcgctcgggggctgccgccgcgcctctcctcctcctgctgctcctggcggtgtccttgggtgggcatggtgatcacggcgcggcggctgcgggcgtcgccccggcaggcggcaacggcatgacggagctgcagaagcacgtggcgttcttcgaccgcaaccacgacggcatcatcaccttcgacgagacctaccaaggtctgcgggacgtcggagtcggcgatgtcacggccaaagccagcgccgcgttcataaacggcgccctcgggcccaagaccagacctgacaattccaactcctcaagcatggatatctacgtagagaacattcagaagggcaaacatggaagcgacacaggcgcctacgacgctcaaggaaggttcgttcccgcgaagctggacgagatgttcaccaagcacgccaagaccgtaccgaacgctctgacgaaagacgagctcgacgagatgctcaaggataaccgggagaagatggacgtcgcaggatggctgggagccaagtcggagtgggagatgctgtacaagctggccaaggacaaggacgggcgcctgcccaaggacaccgtcaggaccgtgtacgacggatccctcttttaccagctggcggcgcaggggaagaagggctgattcggttacgttaatttcagtaatcaataacaagcaacgtttttttttttttgtcgtttctgaatgcttgcctgtgtggctgtgtaagaaagcgagtgggtcggactcaatggcaggcaacggttttgttttttttattattattttaacggatcggttctact

SEQ ID NO: 14890 - protein, 225 aa, Zea mays subsp. mays
  misc_feature (1)..(225): Ceres Seq. ID no. 12340824
MDGRRRRQWPRSRSGAAAAPLLLLLLLAVSLGGHGDHGAAAAGVAPAGGNGMTELQKHVAFFDRNHDGIITFDETYQGLRDVGVGDVTAKASAAFINGALGPKTRPDNSNSSSMDIYVENIQKGKHGSDTGAYDAQGRFVPAKLDEMFTKHAKTVPNALTKDELDEMLKDNREKMDVAGWLGAKSEWEMLYKLAKDKDGRLPKDTVRTVYDGSLFYQLAAQGKKG

SEQ ID NO: 14891 - protein, 174 aa, Zea mays subsp. mays
  misc_feature (1)..(174): Ceres Seq. ID no. 12340825
MTELQKHVAFFDRNHDGIITFDETYQGLRDVGVGDVTAKASAAFINGALGPKTRPDNSNSSSMDIYVENIQKGKHGSDTGAYDAQGRFVPAKLDEMFTKHAKTVPNALTKDELDEMLKDNREKMDVAGWLGAKSEWEMLYKLAKDKDGRLPKDTVRTVYDGSLFYQLAAQGKKG

SEQ ID NO: 14892 - protein, 112 aa, Zea mays subsp. mays
  misc_feature (1)..(112): Ceres Seq. ID no. 12340826
MDIYVENIQKGKHGSDTGAYDAQGRFVPAKLDEMFTKHAKTVPNALTKDELDEMLKDNREKMDVAGWLGAKSEWEMLYKLAKDKDGRLPKDTVRTVYDGSLFYQLAAQGKKG

SEQ ID NO: 14893 - DNA, 1057 bp, Zea mays subsp. mays
  misc_feature (1)..(1057): Ceres Seq. ID no. 12340862
aaaatttccacaaccgaaacctgcagtcgggtcatctcgtccacgaaacgtacggacttcgggcatcggccccaacgccagcggcaccgcacccgcaccaccaagctcgtcggcgacatgaatccgcccgcagcagccgcgtccaccggcgcaggaggccacgccgcggcgcctgcggcagccccggagtacgtgcactacccgaggctctcgccagaggaggtggccccgcccccgccttatgcacgccgccaccgccgcgccgtccgcctacggaggcaacccctacatctactcccccgccggcggcgccgccacctccccgaagaatacgatggactccgtgaaggacgtgctcggcaagatggggaagaggtttggcgaggcggcccgcaagaccgagaccatcaccggcaatttctggcagcacttgaaaactggaccaagcattactgatgcagcaatgagcaggatctcacaggtcaccaaagtcattgcagaaggtggatatgacaaaattttccatcaaacttttgaggtcgcccctggtgaaaagctcaagaagccatatgcatgttatctgtcaacctcggctggtcctgttatgggtgtgctttacctgtccaatgtaaaactggcattttgtagtgataacccacttgcataccaggttggagacaaaactgagtggagttactacaaggtggtcatcccccttgctcaactgcgatcaattaattcatcaacaagcagaacaaatgcagcagagaaatacattcaggtggtttctgttgataaccatgggttttggtttatgggcttcgtttactatgacagtgcggtgaagaatctgcaggaagcacttcaggaggctcagaatttacgtgcttagtgatgttcatggattggaactagcatgtcttatacattacagctgtgatatactgtttttccgtcagtttcgactgtttgtccagatttagtttgcgtaggtatcagctgtttctgtcttttgtactgacttaaaccaatgttcaatatgtgacgtgcatccttt

SEQ ID NO: 14894 - protein, 216 aa, Zea mays subsp. mays
  misc_feature (1)..(216): Ceres Seq. ID no. 12340863
MHAATAAPSAYGGNPYIYSPAGGAATSPKNTMDSVKDVLGKMGKRFGEAARKTETITGNFWQHLKTGPSITDAAMSRISQVTKVIAEGGYDKIFHQTFEVAPGEKLKKPYACYLSTSAGPVMGVLYLSNVKLAFCSDNPLAYQVGDKTEWSYYKVVIPLAQLRSINSSTSRTNAAEKYIQVVSVDNHGFWFMGFVYYDSAVKNLQEALQEAQNLRA

SEQ ID NO: 14895 - protein, 185 aa, Zea mays subsp. mays
  misc_feature (1)..(185): Ceres Seq. ID no. 12340864
MDSVKDVLGKMGKRFGEAARKTETITGNFWQHLKTGPSITDAAMSRISQVTKVIAEGGYDKIFHQTFEVAPGEKLKKPYACYLSTSAGPVMGVLYLSNVKLAFCSDNPLAYQVGDKTEWSYYKVVIPLAQLRSINSSTSRTNAAEKYIQVVSVDNHGFWFMGFVYYDSAVKNLQEALQEAQNLRA

SEQ ID NO: 14896 - protein, 175 aa, Zea mays subsp. mays
  misc_feature (1)..(175): Ceres Seq. ID no. 12340865
MGKRFGEAARKTETITGNFWQHLKTGPSITDAAMSRISQVTKVIAEGGYDKIFHQTFEVAPGEKLKKPYACYLSTSAGPVMGVLYLSNVKLAFCSDNPLAYQVGDKTEWSYYKVVIPLAQLRSINSSTSRTNAAEKYIQVVSVDNHGFWFMGFVYYDSAVKNLQEALQEAQNLRA

SEQ ID NO: 14897 - DNA, 1031 bp, Zea mays subsp. mays
  misc_feature (1)..(1031): Ceres Seq. ID no. 12340881
atctctatctcatcgtcatcattagaaaggccgaagccttctccgttcctcctcgacgcgtctcttccacagccgcaacctctatccctcgtctggtatcgtctctcccacacccctctgccccaacccagaaaaaccctcgaaaagcggcggcggcgcgacatggcggaggtcgaggctccagctgctgcggttgcggcggcgacccctgaggtggcgacggtgaccgagggcggagccgctacggaggcgaagggtccgcataagctgcaccgccagtggaccttctggtacgacatccagtccaagcccaagcccggcgctgcgtggggcacctccctcaaaaaggcgtacaccttcgacaccgtcgaggagttttggggcttgtatgatcatgttttccgtccaagcaagttgcctggaactgctgattttcacctattcaaggctggagtagagccaaaatgggaagacccagagtgtgcaaatggtggtaaatggactgtcccatgcaacagaaagccaacctttgagaccatgtggcttgaaacgttgatggctcttgttggggatcagtttgatgaaacagatgacatttgtggaattgttgctagtgtccgtccaagaggagataagcttgcattgtggactaggactgccagcaatgaagctgtccaggtaaacattggcaagaaatggaaggatgtcatcgactacaatgacaagatcatctacactttccatgacgactcgagaagggataagccaagcagaggtggacggtacaccgtgtaagtcgcacacgaagatggtcgttgttcggactggacagaggctgagagtggagttttgtgctgagatcggcaccagctttcatttaatacagcctcagcttacctgaggcaattttcgcacctgttatgatgttgttttgctctcagataggtttatgtagcacaagaaagatatgttggagacgttgacgattttgtatgcaactaaatttctatcttaatatgccccgattcaac

SEQ ID NO: 14898 - protein, 264 aa, Zea mays subsp. mays
  misc_feature (1)..(264): Ceres Seq. ID no. 12340882
ISISSSSLERPKPSPFLLDASLPQPQPLSLVWYRLSHTPLPQPRKTLEKRRRRDMAEVEAPAAAVAAATPEVATVTEGGAATEAKGPHKLHRQWTFWYDIQSKPKPGAAWGTSLKKAYTFDTVEEFWGLYDHVFRPSKLPGTADFHLFKAGVEPKWEDPECANGGKWTVPCNRKPTFETMWLETLMALVGDQFDETDDICGIVASVRPRGDKLALWTRTASNEAVQVNIGKKWKDVIDYNDKIIYTFHDDSRRDKPSRGGRYTV

SEQ ID NO: 14899 - protein, 210 aa, Zea mays subsp. mays
  misc_feature (1)..(210): Ceres Seq. ID no. 12340883
MAEVEAPAAAVAAATPEVATVTEGGAATEAKGPHKLHRQWTFWYDIQSKPKPGAAWGTSLKKAYTFDTVEEFWGLYDHVFRPSKLPGTADFHLFKAGVEPKWEDPECANGGKWTVPCNRKPTFETMWLETLMALVGDQFDETDDICGIVASVRPRGDKLALWTRTASNEAVQVNIGKKWKDVIDYNDKIIYTFHDDSRRDKPSRGGRYTV

SEQ ID NO: 14900 - DNA, 1234 bp, Zea mays subsp. mays
  misc_feature (1)..(1234): Ceres Seq. ID no. 12340896
accgcttccggttccggatccgaatctcgccctcccctctctttcttgcctccaggtccggccgtccgggcggcgccgggaggagagaatggcctccacggcgtcgccgccggtgttcgagagggtggccgggatccgagccattgccgagtccggccgcttcaaggcatggttgctggaccagtttggcgttcttcatgacgggaagaagccgtaccccggcgccattctggcattggagaagctagcggagaatggggcaaagatggtgataatcagcaattcctctaggcggtcatctgtgacaatgaagaagctcaagagcctggggttcgacacgtcctgtttcctcgcgaccatcaccagtggggagctcacacatcagcaccttcagaagagagacgacccatggtttgctgctcttggaaggaagtgtatccatatcacttgggacgatcgaggggcaatttctctcgagggccttggtttgcaagttgtgaacaatgttgatgatgcagagttcatattagcccacggtactgaagctcttggctcaccttctggtgttcctcttcccaaaagtcttgaggagcttgagcaggttctaatgcttggcatagaaaagcgacttccaatggtggtagctaatccagattatgtcactgtcgaagctcgagatctccgtgtcatgcctggcactctggcagctaaatatgagagtcttggtggtgaagtgaaatggatggggaagcctgataaggtgatctatacatcagcgatgtccctagcgggcgttgatgcccgtgaatgtatcatggtgggtgattcgctgcaccacgacatcaaaggagccaatgcgtcagggatggcatccgcgttcgtcactggaggggtccatgcggacgaacttggactcggtgaatttggagaaactgctggggaggatgctgtcagttcgctgtgcagcaagcacggatcgtacccttcttatgttctgccttcattcgcgtggtagagatgcggcctagattttttttttttgttttaggtgcacgggaaagtgattttaggcagatattgttgttatggaaataagtgccacgcaatgatcaagccgctggaggtgtcattcttcttaataaataataagtgacacgcaatgctcaagccgctggaggcagatttgtatttgcatttgtagtgtgtgtgtgtctatatatgctgcctgtggtgt

SEQ ID NO: 14901 - protein, 337 aa, Zea mays subsp. mays
  misc_feature (1)..(337): Ceres Seq. ID no. 12340897
PLPVPDPNLALPSLSCLQVRPSGRRREERMASTASPPVFERVAGIRAIAESGRFKAWLLDQFGVLHDGKKPYPGAILALEKLAENGAKMVIISNSSRRSSVTMKKLKSLGFDTSCFLATITSGELTHQHLQKRDDPWFAALGRKCIHITWDDRGAISLEGLGLQVVNNVDDAEFILAHGTEALGSPSGVPLPKSLEELEQVLMLGIEKRLPMVVANPDYVTVEARDLRVMPGTLAAKYESLGGEVKWMGKPDKVIYTSAMSLAGVDARECIMVGDSLHHDIKGANASGMASAFVTGGVHADELGLGEFGETAGEDAVSSLCSKHGSYPSYVLPSFAW

SEQ ID NO: 14902 - protein, 308 aa, Zea mays subsp. mays
  misc_feature (1)..(308): Ceres Seq. ID no. 12340898
MASTASPPVFERVAGIRAIAESGRFKAWLLDQFGVLHDGKKPYPGAILALEKLAENGAKMVIISNSSRRSSVTMKKLKSLGFDTSCFLATITSGELTHQHLQKRDDPWFAALGRKCIHITWDDRGAISLEGLGLQVVNNVDDAEFILAHGTEALGSPSGVPLPKSLEELEQVLMLGIEKRLPMVVANPDYVTVEARDLRVMPGTLAAKYESLGGEVKWMGKPDKVIYTSAMSLAGVDARECIMVGDSLHHDIKGANASGMASAFVTGGVHADELGLGEFGETAGEDAVSSLCSKHGSYPSYVLPSFAW

SEQ ID NO: 14903 - protein, 249 aa, Zea mays subsp. mays
  misc_feature (1)..(249): Ceres Seq. ID no. 12340899
MVIISNSSRRSSVTMKKLKSLGFDTSCFLATITSGELTHQHLQKRDDPWFAALGRKCIHITWDDRGAISLEGLGLQVVNNVDDAEFILAHGTEALGSPSGVPLPKSLEELEQVLMLGIEKRLPMVVANPDYVTVEARDLRVMPGTLAAKYESLGGEVKWMGKPDKVIYTSAMSLAGVDARECIMVGDSLHHDIKGANASGMASAFVTGGVHADELGLGEFGETAGEDAVSSLCSKHGSYPSYVLPSFAW

SEQ ID NO: 14904 - DNA, 958 bp, Zea mays subsp. mays
  misc_feature (1)..(958): Ceres Seq. ID no. 12340928
aacaagcatcagagctcggtgtcacaaaacctgaccgatggcggcccggtgctccacagctgcctccgtggtcagaacaggatcgcgagacctctccccctccttttccttcacagccgcggcgctcccctcggcgcgtctgaggccggtaggagcgtgggtccgcggtggagggtacacctgcaggctccgcgccgtctgcgccatgggctccgcgccgtcgtcgtcccaatccccgtcgccgcacacgccttcaggacaaacccaagggaaagcagattataaatcactgagtgaagaggagtggaagaagcgcctgactgaagagcagtattatgttactcggcagaagggcactgaaagagcattcactggggaatactggaatactaaaaccccaggcatttatcagtgtgtctgctgcgacacccctctgtttcagtcatcaaccaaatttgatagtggtactgggtggccatcctattataaaccaattggtgaaaatgtcaagagcaagcttgatatgtcaatcatttttatgccccggaccgaggtgctctgtgcaacctgtgatgctcatctggggcatgtcttcgatgacgggccaccaccaacagggaagagatactgtatcaatagtgcatctctgaaattgaagccccaatagttgctggatactttagcaagaagtcaactataacgctggtccgccctatgtaaacttcggggttatgtatataaactactcgagttgtagcatatttattattctctttgttatgtaatatatgtgttcacaaaccgatgaaagtatgaaacaaacagccgctacttcactctggtattctggtctagaattaaggtgttgtttggttgacgaattgtaacgtaaatggcaacggtaatggtttgcactcgagtgacagttgacaacggtaataaatttaaatagatcttt

SEQ ID NO: 14905 - protein, 209 aa, Zea mays subsp. mays
  misc_feature (1)..(209): Ceres Seq. ID no. 12340929
MAARCSTAASVVRTGSRDLSPSFSFTAAALPSARLRPVGAWVRGGGYTCRLRAVCAMGSAPSSSQSPSPHTPSGQTQGKADYKSLSEEEWKKRLTEEQYYVTRQKGTERAFTGEYWNTKTPGIYQCVCCDTPLFQSSTKFDSGTGWPSYYKPIGENVKSKLDMSIIFMPRTEVLCATCDAHLGHVFDDGPPPTGKRYCINSASLKLKPQ

SEQ ID NO: 14906 - protein, 153 aa, Zea mays subsp. mays
  misc_feature (1)..(153): Ceres Seq. ID no. 12340930
MGSAPSSSQSPSPHTPSGQTQGKADYKSLSEEEWKKRLTEEQYYVTRQKGTERAFTGEYWNTKTPGIYQCVCCDTPLFQSSTKFDSGTGWPSYYKPIGENVKSKLDMSIIFMPRTEVLCATCDAHLGHVFDDGPPPTGKRYCINSASLKLKPQ

SEQ ID NO: 14907 - protein, 104 aa, Zea mays subsp. mays
  misc_feature (1)..(104): Ceres Seq. ID no. 12340931
MLLGRRALKEHSLGNTGILKPQAFISVSAATPLCFSHQPNLIVVLGGHPIINQLVKMSRASLICQSFLCPGPRCSVQPVMLIWGMSSMTGHHQQGRDTVSIVHL

SEQ ID NO: 14908 - DNA, 1599 bp, Zea mays subsp. mays
  misc_feature (1)..(1599): Ceres Seq. ID no. 12340954
aggtcgatcactcgctgcgcgcctccacccttttccaccccgccgccgaagccaccgtgccgctagccttccccgccgccgcaaaatggccgcctccgcgcgacccctggttaccgtgagggccctggagggcgacatggccacggactccgccggtgttccgctggcggacgtcctccgcgcaccgatccgcccggacatcgttcgcttcgtccacaagctcctgtcctgcaacagccgccaaccctatgcggtgtcgcgtcgcgccggacaccagacctccgcggagtcctggggcacggggcgtgcggtatcccgtatcccccgcgttcctggcggtggtacccaccgcgccggccagggagcgttcggcaacatgtgtcgtggtggacgcatgttcgcgcccaccaagatctggcgccgctggcaccgtcgcgtcaacatacaccttcgccgtgtcgccatcgcctccgcactctccgccaccgccgttccgtcccttgttctcgcacgtggccaccgcgtggagtctgtgcccgagctcccgctggtcgtttcggactccgcggagtccattgagaagacagcccaggccatcaatatcctcaaacagctcggtgcctacgccgatgctgagaaggccaaggattctgttggcatccgccccggcaagggcaagatgcgcaaccgccgctacatcaatcgtaagggacccctcgttgtctacggcactgagggctctaaggtcgtcaaggcctttcgcaacctccctggcgttgatgttgccaatgtcgagcgcctcaacctgctcgatctcgcccctggtggccaccttggccggttcgtcatctggaccgagtgcgcattcaagaagctggatgaggtgtacggtaccttcaacgcaccatcagcgaagaagaagggtttcgtgctcccgaggcccaagatggcaaacgctgacctatccaggcttatcaactctgacgaggtgcaatctgtagtgaagcccatcaataaggatgtgaagcgtagggagcctaggaagaacccactgaataatatggctgcagtgctcaagctgaacccgtacctcggtactgcacgcaagatggcagccctagccgaggcagcgcgtgtcaaggccaggaagcagaagcttgattccaagaggaccaagctcagcccagaggaggcttctaaggtcaaggctgctggaaaggcgtggtacaagaccatggtttcagacagcgactacacagagtttgagaacttcaccaagtggcttggtgttacacagtgattgtctggtccaacccttattgttttgccaattcagagattatgattttgatcgctgttgtcaaatatcctttgttattggtatattctgacattagttttggctttggtagtttttttttaccgctggatgtttacttccagacacctattacaccttttatggaaacgaagtatatcgattctcaacactcaccgtgcttctgtttttggcagtattggttactcgagtattcatgttcagttgtattagtgtatgcattttctttgtgcccttctgtttgttgggtatataatagt

SEQ ID NO: 14909 - protein, 432 aa, Zea mays subsp. mays
  misc_feature (1)..(432): Ceres Seq. ID no. 12340955
GRSLAARLHPFPPRRRSHRAASLPRRRKMAASARPLVTVRALEGDMATDSAGVPLADVLRAPIRPDIVRFVHKLLSCNSRQPYAVSRRAGHQTSAESWGTGRAVSRIPRVPGGGTHRAGQGAFGNMCRGGRMFAPTKIWRRWHRRVNIHLRRVAIASALSATAVPSLVLARGHRVESVPELPLVVSDSAESIEKTAQAINILKQLGAYADAEKAKDSVGIRPGKGKMRNRRYINRKGPLVVYGTEGSKVVKAFRNLPGVDVANVERLNLLDLAPGGHLGRFVIWTECAFKKLDEVYGTFNAPSAKKKGFVLPRPKMANADLSRLINSDEVQSVVKPINKDVKRREPRKNPLNNMAAVLKLNPYLGTARKMAALAEAARVKARKQKLDSKRTKLSPEEASKVKAAGKAWYKTMVSDSDYTEFENFTKWLGVTQ

SEQ ID NO: 14910 - protein, 404 aa, Zea mays subsp. mays
  misc_feature (1)..(404): Ceres Seq. ID no. 12340956
MAASARPLVTVRALEGDMATDSAGVPLADVLRAPIRPDIVRFVHKLLSCNSRQPYAVSRRAGHQTSAESWGTGRAVSRIPRVPGGGTHRAGQGAFGNMCRGGRMFAPTKIWRRWHRRVNIHLRRVAIASALSATAVPSLVLARGHRVESVPELPLVVSDSAESIEKTAQAINILKQLGAYADAEKAKDSVGIRPGKGKMRNRRYINRKGPLVVYGTEGSKVVKAFRNLPGVDVANVERLNLLDLAPGGHLGRFVIWTECAFKKLDEVYGTFNAPSAKKKGFVLPRPKMANADLSRLINSDEVQSVVKPINKDVKRREPRKNPLNNMAAVLKLNPYLGTARKMAALAEAARVKARKQKLDSKRTKLSPEEASKVKAAGKAWYKTMVSDSDYTEFENFTKWLGVTQ

SEQ ID NO: 14911 - protein, 387 aa, Zea mays subsp. mays
  misc_feature (1)..(387): Ceres Seq. ID no. 12340957
MATDSAGVPLADVLRAPIRPDIVRFVHKLLSCNSRQPYAVSRRAGHQTSAESWGTGRAVSRIPRVPGGGTHRAGQGAFGNMCRGGRMFAPTKIWRRWHRRVNIHLRRVAIASALSATAVPSLVLARGHRVESVPELPLVVSDSAESIEKTAQAINILKQLGAYADAEKAKDSVGIRPGKGKMRNRRYINRKGPLVVYGTEGSKVVKAFRNLPGVDVANVERLNLLDLAPGGHLGRFVIWTECAFKKLDEVYGTFNAPSAKKKGFVLPRPKMANADLSRLINSDEVQSVVKPINKDVKRREPRKNPLNNMAAVLKLNPYLGTARKMAALAEAARVKARKQKLDSKRTKLSPEEASKVKAAGKAWYKTMVSDSDYTEFENFTKWLGVTQ

SEQ ID NO: 14912 - DNA, 1516 bp, Zea mays subsp. mays
  misc_feature (1)..(1516): Ceres Seq. ID no. 12340974
aaccagctccggcccaaacacagccacgagcacctacacccccccgctgtcacctctccttccatcgccgcctcccttacccctctcgctgtgctcctccgcaccgtcattccctagcattccccacgggcgagtggcggcttggtcgagatgggcgatgcggttgatgacatcatctgtgcaacggatgcggcggtcgccgtcgaggatgcggccagtgggaagcccgcaatgctctctagcttaggggggcagggtgaggaagagcatgaggagaaggacaatgaggacaagtcaggcgagagcgaggtgatcaacccgccagaagacgctggcggggaggccacctcacccctggaagggttgaagcctcgcctttccaaggggaatcaaagccatggacctaatgctgtcaaatcaaagagcccaacgagtggagacgaaggtcagacgaggaaaaaggctcccaattcttctcttcctaaggcacccattgtccaggtgtcccatggtgacgctggtgtcggcagtaataaagatggcaagaatgagtctcgctcatcttccgtggatgcaacattgctggatgactccaaggagaaaaggaaaactcaaaagccattagcacagctcttttccatcaaaagtgacgaagaacagtcaaatggtgagagtgcaaagcctcgaaaagttggcagcattccatcatatggtttcaccttcaagtgtgatgagagatctgaaaaaagaagagagttctattcgaagcttgaggagaagattcatgcaagagagttagaaataagcaatttgcaagcgaaatcaaaggaaactgaagaagcagaactcaaaatgctgagaaagagtttgaacttcaaggcaacaccaatgccaagcttctataaggaaccaactcctgtcaaggttgaattgaaaaagatccccccaacaagagccaaatcgccaaagtttggtcgttctaaaaacaagtccacaccagagactgaagaaaatgctaccgcggaccagcctgcccacctgagcctcgaggagaatgtttctcaaaccggtgtgaaaaaaccaaccccgttgaatccagcaaagaagccccagaggaagtcactccccagactgccatctgaagaaaccggtccgcttgatgccacctcaaggcaacttataaagagcgccaagctggatgcagttagtgctccggagacaggatcagctacaggacaggcacaactacaaggaagtcagacggaaacagattctggtcaggggccagttgaagctggagctaatcctgatgaacaagacgccagcgaacagagtgttgtttagtgaagatcacgatgaccaaaccagctgatttgtgatgtgcatggtgttcctcggctttgtataatatattgtgcttgcctgctagagtaacctgtagtctgtattatgttatgtgatatatactactactcctggtttattttcctggaattgagccgtatgttgcttatcg

SEQ ID NO: 14913 - protein, 397 aa, Zea mays subsp. mays
  misc_feature (1)..(397): Ceres Seq. ID no. 12340975
MGDAVDDIICATDAAVAVEDAASGKPAMLSSLGGQGEEEHEEKDNEDKSGESEVINPPEDAGGEATSPLEGLKPRLSKGNQSHGPNAVKSKSPTSGDEGQTRKKAPNSSLPKAPIVQVSHGDAGVGSNKDGKNESRSSSVDATLLDDSKEKRKTQKPLAQLFSIKSDEEQSNGESAKPRKVGSIPSYGFTFKCDERSEKRREFYSKLEEKIHARELEISNLQAKSKETEEAELKMLRKSLNFKATPMPSFYKEPTPVKVELKKIPPTRAKSPKFGRSKNKSTPETEENATADQPAHLSLEENVSQTGVKKPTPLNPAKKPQRKSLPRLPSEETGPLDATSRQLIKSAKLDAVSAPETGSATGQAQLQGSQTETDSGQGPVEAGANPDEQDASEQSVV

SEQ ID NO: 14914 - protein, 370 aa, Zea mays subsp. mays
  misc_feature (1)..(370): Ceres Seq. ID no. 12340976
MLSSLGGQGEEEHEEKDNEDKSGESEVINPPEDAGGEATSPLEGLKPRLSKGNQSHGPNAVKSKSPTSGDEGQTRKKAPNSSLPKAPIVQVSHGDAGVGSNKDGKNESRSSSVDATLLDDSKEKRKTQKPLAQLFSIKSDEEQSNGESAKPRKVGSIPSYGFTFKCDERSEKRREFYSKLEEKIHARELEISNLQAKSKETEEAELKMLRKSLNFKATPMPSFYKEPTPVKVELKKIPPTRAKSPKFGRSKNKSTPETEENATADQPAHLSLEENVSQTGVKKPTPLNPAKKPQRKSLPRLPSEETGPLDATSRQLIKSAKLDAVSAPETGSATGQAQLQGSQTETDSGQGPVEAGANPDEQDASEQSVV

SEQ ID NO: 14915 - DNA, 1903 bp, Zea mays subsp. mays
  misc_feature (1)..(1903): Ceres Seq. ID no. 12341024
accgttcgtccgttccagcagacagcagtgcgcgctctctctctccctcgtggcgacgactgggcgaccgctgccgctgcccttgtgccccggtctccgtcggtccgttcgccaggtctcctgcgggctctttgtcgtcgacaagctccccaggttgctgtgtgaagtccaaggttgtcacatggattcagcacaagatttccaacccaggacattctctataaagttgtggccaccaagtgaaagcacacggatcatgcttgttgacaggatgacaaacaatctgtccacagagtccattttctctcgcaaatatcgccttttgggaaagcaagaggctcatgagaatgcaaaaacgattgaagaactttgctttgccttggctgatgagcatttcagagaggagccagatggtgatgggagttctgctgtccagctatatgcaaaggaaacgagcaagatgatgttggaagttctgaaaaaaggcccaaggactactgcagaactggaggcacctgtagctgacacacctcttgtgtctgctgatactgtactagatatatctggtggcaagcgtgcttttattgaggcagatgaagcaaaggaactgctgagtccacttaccaaaccaggaaattcatataaaagaatttgctttagcaacaggagctttggtattggtgctgctaatgttgctgggccaattcttgagtcagttaagaatcagctcacagaggttgatatctcagattttgtggcaggaaggtctgaggatgaagcccttgatgtgatgcgcatattctccaaagcattagatggttctgtcctgagatatctgaacatctctgacaatgctttgggcgagaagggtgtcagggcattcagtgagctcctgaaatcacaagaatccctggaagaactttatgtgatgaatgatggcatatcagaggaagctgcaaaagctctatctgagcttattcctgcaactgagaagcttaaggttcttcacttccacaacaatatgactggagatgaaggtgctatgtatattgctgaaatggttaagcgttctccaaatgtagagagtttcaggtgctcagcaacaaggataggatctgatggtggagtcgcattgtctgaggcattggggacatgcactcgtctgaagaaacttgatcttagggacaacttgtttggtgttgatgcagggttagctctcagcgaaacccttccaaaactacctgatcttgttgagctttatctcagtgatctcaatcttgagaacaagggtactatagcaattgcaaaagccctcaaacagtcagcactgcagttggaggtccttgaaattgctggaaatgaaataaatgccaaagcagccccagatttggctgaatgtctagcagtaatgcagtcactcaagaagctgaccttggctgaaaatgaactgaaggacaatggtgctgtgataattgcaaaatcattggaagatggccactcagatctcaaggaacttgatgtgagcacgaacatgctgcagagggttggagctcggtgctttgcgcgggcagtcgcaaataaaccagattttgtgcagctgaacatcaatggaaattttatctccgatgaaggggttgatgaggtgaaggaaattctgaaggctggtaagaaatctctggatgtgctgggcccactagacgagaatgaacctgatggagagcctgatgatgaggatgccgaggacgatgaggacgagctggatttgaatctgcagagtgtgaaggttgagcaggatgaggatgattgacgatccttaggttaaatatctttagctactcagtaatcatttggatatccatgagctacgcaaacttttaattaaaaagaatgtactgagcctttt

SEQ ID NO: 14916 - protein, 601 aa, Zea mays subsp. mays
  misc_feature (1)..(601): Ceres Seq. ID no. 12341025
PFVRSSRQQCALSLSLVATTGRPLPLPLCPGLRRSVRQVSCGLFVVDKLPRLLCEVQGCHMDSAQDFQPRTFSIKLWPPSESTRIMLVDRMTNNLSTESIFSRKYRLLGKQEAHENAKTIEELCFALADEHFREEPDGDGSSAVQLYAKETSKMMLEVLKKGPRTTAELEAPVADTPLVSADTVLDISGGKRAFIEADEAKELLSPLTKPGNSYKRICFSNRSFGIGAANVAGPILESVKNQLTEVDISDFVAGRSEDEALDVMRIFSKALDGSVLRYLNISDNALGEKGVRAFSELLKSQESLEELYVMNDGISEEAAKALSELIPATEKLKVLHFHNNMTGDEGAMYIAEMVKRSPNVESFRCSATRIGSDGGVALSEALGTCTRLKKLDLRDNLFGVDAGLALSETLPKLPDLVELYLSDLNLENKGTIAIAKALKQSALQLEVLEIAGNEINAKAAPDLAECLAVMQSLKKLTLAENELKDNGAVIIAKSLEDGHSDLKELDVSTNMLQRVGARCFARAVANKPDFVQLNINGNFISDEGVDEVKEILKAGKKSLDVLGPLDENEPDGEPDDEDAEDDEDELDLNLQSVKVEQDEDD

SEQ ID NO: 14917 - protein, 541 aa, Zea mays subsp. mays
  misc_feature (1)..(541): Ceres Seq. ID no. 12341026
MDSAQDFQPRTFSIKLWPPSESTRIMLVDRMTNNLSTESIFSRKYRLLGKQEAHENAKTIEELCFALADEHFREEPDGDGSSAVQLYAKETSKMMLEVLKKGPRTTAELEAPVADTPLVSADTVLDISGGKRAFIEADEAKELLSPLTKPGNSYKRICFSNRSFGIGAANVAGPILESVKNQLTEVDISDFVAGRSEDEALDVMRIFSKALDGSVLRYLNISDNALGEKGVRAFSELLKSQESLEELYVMNDGISEEAAKALSELIPATEKLKVLHFHNNMTGDEGAMYIAEMVKRSPNVESFRCSATRIGSDGGVALSEALGTCTRLKKLDLRDNLFGVDAGLALSETLPKLPDLVELYLSDLNLENKGTIAIAKALKQSALQLEVLEIAGNEINAKAAPDLAECLAVMQSLKKLTLAENELKDNGAVIIAKSLEDGHSDLKELDVSTNMLQRVGARCFARAVANKPDFVQLNINGNFISDEGVDEVKEILKAGKKSLDVLGPLDENEPDGEPDDEDAEDDEDELDLNLQSVKVEQDEDD

SEQ ID NO: 14918 - protein, 516 aa, Zea mays subsp. mays
  misc_feature (1)..(516): Ceres Seq. ID no. 12341027
MLVDRMTNNLSTESIFSRKYRLLGKQEAHENAKTIEELCFALADEHFREEPDGDGSSAVQLYAKETSKMMLEVLKKGPRTTAELEAPVADTPLVSADTVLDISGGKRAFIEADEAKELLSPLTKPGNSYKRICFSNRSFGIGAANVAGPILESVKNQLTEVDISDFVAGRSEDEALDVMRIFSKALDGSVLRYLNISDNALGEKGVRAFSELLKSQESLEELYVMNDGISEEAAKALSELIPATEKLKVLHFHNNMTGDEGAMYIAEMVKRSPNVESFRCSATRIGSDGGVALSEALGTCTRLKKLDLRDNLFGVDAGLALSETLPKLPDLVELYLSDLNLENKGTIAIAKALKQSALQLEVLEIAGNEINAKAAPDLAECLAVMQSLKKLTLAENELKDNGAVIIAKSLEDGHSDLKELDVSTNMLQRVGARCFARAVANKPDFVQLNINGNFISDEGVDEVKEILKAGKKSLDVLGPLDENEPDGEPDDEDAEDDEDELDLNLQSVKVEQDEDD

SEQ ID NO: 14919 - DNA, 1187 bp, Zea mays subsp. mays
  misc_feature (1)..(1187): Ceres Seq. ID no. 12341028
agtctggtaccgccggcaaagcagtcgttttcgtcctcttccttgattaaaccttccgtacccatatccacctgctgctccgaccttccagtcttctccgtaggggcttcgctccatagatttcgccgcaaggggcaacggcacacccaccaactgacctgacccacgagggatccgcagatgaagatcattccggtcccttgcctggatgacaactatgcctacttaatcgtggacgagagcaccaagaaggcagcggccgttgaccctgtggaaccggagaaggttctcaaggcggccggcgaggtcggcgcctacgtcgactgcgttctcaccacccatcaccactgggatcatgctggtggcaatgagaagatgaggctgcaggtgccagggataaaggtatttggaggatccctggacaatgtgaaaggctgcactgatcaggtggagaatggaatgaagttgtcacttgggaaggacattgagatactatgcctacacacgccttgccacactaaaggtcatatcagctactatgttactagtaaggagggtgaagatccagcggtcttcaccggagataccttgttcattgctgggtgtgggaagttttttgagggttctgcagagcaaatgtatcagtcccttattgttacactgggttcgctgccaaagtcaacccgagtttactgtgggcatgagtacactgtgaagaacctaaaattcatgctgacactggagccagagaatgagaagacgaaacagaaactggaatgggctgaaaagcagcgcgaagcgaatcagccaacagtgccctcgactataggagatgagtttgagataaatactttcatgcgtgttgatctaccagaaatacaggcgaaattcagtgtcaactctccagttgaagcaatgatagaggtcaggaagaccaaggataattggagaggttgaggacacccatggccgccactagtctgttgaaccagcattccaaagtgaactaatgcagaaaccttgccctgtaggtgggaatgaggtttactgccgtgcaatgctttgagaaatgtgttgttgtgaaggagaagactcctacaataagctccgcgttaatgagtagtaacaatacgctccttgtaacttgtggtctgtttgccaataataatgtacgaactgtagtgcct

SEQ ID NO: 14920 - protein, 258 aa, Zea mays subsp. mays
  misc_feature (1)..(258): Ceres Seq. ID no. 12341029
MKIIPVPCLDDNYAYLIVDESTKKAAAVDPVEPEKVLKAAGEVGAYVDCVLTTHHHWDHAGGNEKMRLQVPGIKVFGGSLDNVKGCTDQVENGMKLSLGKDIEILCLHTPCHTKGHISYYVTSKEGEDPAVFTGDTLFIAGCGKFFEGSAEQMYQSLIVTLGSLPKSTRVYCGHEYTVKNLKFMLTLEPENEKTKQKLEWAEKQREANQPTVPSTIGDEFEINTFMRVDLPEIQAKFSVNSPVEAMIEVRKTKDNWRG

SEQ ID NO: 14921 - protein, 193 aa, Zea mays subsp. mays
  misc_feature (1)..(193): Ceres Seq. ID no. 12341030
MRLQVPGIKVFGGSLDNVKGCTDQVENGMKLSLGKDIEILCLHTPCHTKGHISYYVTSKEGEDPAVFTGDTLFIAGCGKFFEGSAEQMYQSLIVTLGSLPKSTRVYCGHEYTVKNLKFMLTLEPENEKTKQKLEWAEKQREANQPTVPSTIGDEFEINTFMRVDLPEIQAKFSVNSPVEAMIEVRKTKDNWRG

SEQ ID NO: 14922 - protein, 165 aa, Zea mays subsp. mays
  misc_feature (1)..(165): Ceres Seq. ID no. 12341031
MKLSLGKDIEILCLHTPCHTKGHISYYVTSKEGEDPAVFTGDTLFIAGCGKFFEGSAEQMYQSLIVTLGSLPKSTRVYCGHEYTVKNLKFMLTLEPENEKTKQKLEWAEKQREANQPTVPSTIGDEFEINTFMRVDLPEIQAKFSVNSPVEAMIEVRKTKDNWRG

SEQ ID NO: 14923 - DNA, 1717 bp, Zea mays subsp. mays
  misc_feature (1)..(1717): Ceres Seq. ID no. 12341036
caaacgaccgcaccagccagtccacttcgccagtgatctgtctcagctcgtcgcgtctccggcgccgacagacacggggcgagtgggcaacgcggctccgagatcggcgggcaggatgatgatgctgatcgactgctcgaggtgccgtaccccgctgcagctgccgcacggggctccctgtatccgatgcgccatctgtggggctatcacgcacgtcgcccccgcccctcctgtcgagcccaaccgcggtgccgtacagccgccgccggggtggggtccaccgccgccgccggtgcacgggcgaaagcgagccgtggtgtgcgggatatcgtatcggcactcgcggtatgagctgaagggctgcatcaacgacgtcaagtgcatgcgccacgtcctcatgacgcgcttcaacttccccgacgactccatcattatgctcaacgaagaacaaaccgacccctacaaaatcccaacaaagcataacatagggatggccatgtattggcttgtgcaaggttgtcaacctggagactcattggtgttccattattctgggcatggagcacagcaaagaaactacaatggagatgaggttgatgggtttgatgaaaccctctgcccattggattttgagacacaaggaatgattgtggatgatgacataaatacagcactagttcgaccacttcctcgtggagttaaacttcatgcattcattgatgcttgtcatagtggaactgcacttgatttgccttacctctgcagaatgaacaggagtgggcaatatgtatgggaagatcaccgaccaccatctggtgtctggaaaggcactagtggtggggaggctatttcatttagtggttgtgatgatgatcagacctctgcagatacctctgctttatcaaaggtcacttcgactggtgcaatgacatttggcttcatccaagctattgaacgtggacagggcaccacctacggtagtatcctgaactccatgcgttcgacaatacgcaacacagatgactcagcaggtgtaggtggcggtgctgttacatcactaattacaatgcttcttactggagggagcctatctgctggtggtctgagacaggagccacaactgacggcatgcgagccatttgatgtctatgcgaagcccttctccctatgacgcgttcatggtgctgctgctgcccacccatttcacgttatcaacttatcatcgtgtacatttcaccatcccgattgttaacagcgcgtggaattacaatccgtataaggaagctatgcatatatatcgtttgtttcacaggtacaatccgtatatgcatagcttccttatacggatgtaattaggcctggaacaactgttgaactgaggaacgcaaagatcgacatgttcaagggttcgatgcggcttgcagtggacaagtggggaattgtcaaagctgctgaaagctcagctgagtggacagtcaaggaggacaacaacctgtccttaattgagtttgagctggtgaccgtgacggagtgaaaaccgccattgcttaggagtattgttggttttctgtgttgttgaacctaatcatcatcgccaatcaataaggactcgtggttgatgttctcggcatcggagttgcgtattgctgtaccgttgcttgcttactgtgcgttgtggctacttttgactgctatcgaataataataaattggtgtc

SEQ ID NO: 14924 - protein, 389 aa, Zea mays subsp. mays
  misc_feature (1)..(389): Ceres Seq. ID no. 12341037
KRPHQPVHFASDLSQLVASPAPTDTGRVGNAAPRSAGRMMMLIDCSRCRTPLQLPHGAPCIRCAICGAITHVAPAPPVEPNRGAVQPPPGWGPPPPPVHGRKRAVVCGISYRHSRYELKGCINDVKCMRHVLMTRFNFPDDSIIMLNEEQTDPYKIPTKHNIGMAMYWLVQGCQPGDSLVFHYSGHGAQQRNYNGDEVDGFDETLCPLDFETQGMIVDDDINTALVRPLPRGVKLHAFIDACHSGTALDLPYLCRMNRSGQYVWEDHRPPSGVWKGTSGGEAISFSGCDDDQTSADTSALSKVTSTGAMTFGFIQAIERGQGTTYGSILNSMRSTIRNTDDSAGVGGGAVTSLITMLLTGGSLSAGGLRQEPQLTACEPFDVYAKPFSL

SEQ ID NO: 14925 - protein, 351 aa, Zea mays subsp. mays
  misc_feature (1)..(351): Ceres Seq. ID no. 12341038
MMMLIDCSRCRTPLQLPHGAPCIRCAICGAITHVAPAPPVEPNRGAVQPPPGWGPPPPPVHGRKRAVVCGISYRHSRYELKGCINDVKCMRHVLMTRFNFPDDSIIMLNEEQTDPYKIPTKHNIGMAMYWLVQGCQPGDSLVFHYSGHGAQQRNYNGDEVDGFDETLCPLDFETQGMIVDDDINTALVRPLPRGVKLHAFIDACHSGTALDLPYLCRMNRSGQYVWEDHRPPSGVWKGTSGGEAISFSGCDDDQTSADTSALSKVTSTGAMTFGFIQAIERGQGTTYGSILNSMRSTIRNTDDSAGVGGGAVTSLITMLLTGGSLSAGGLRQEPQLTACEPFDVYAKPFSL

SEQ ID NO: 14926 - protein, 350 aa, Zea mays subsp. mays
  misc_feature (1)..(350): Ceres Seq. ID no. 12341039
MMLIDCSRCRTPLQLPHGAPCIRCAICGAITHVAPAPPVEPNRGAVQPPPGWGPPPPPVHGRKRAVVCGISYRHSRYELKGCINDVKCMRHVLMTRFNFPDDSIIMLNEEQTDPYKIPTKHNIGMAMYWLVQGCQPGDSLVFHYSGHGAQQRNYNGDEVDGFDETLCPLDFETQGMIVDDDINTALVRPLPRGVKLHAFIDACHSGTALDLPYLCRMNRSGQYVWEDHRPPSGVWKGTSGGEAISFSGCDDDQTSADTSALSKVTSTGAMTFGFIQAIERGQGTTYGSILNSMRSTIRNTDDSAGVGGGAVTSLITMLLTGGSLSAGGLRQEPQLTACEPFDVYAKPFSL

SEQ ID NO: 14927 - DNA, 1413 bp, Zea mays subsp. mays
  misc_feature (1)..(1413): Ceres Seq. ID no. 12341043
aagcatttaggtcttacgacgcgcccaaagctcacgccggacctgctcctctccgacggcggcatcggcttcgtgctccgctactttcccaaggcgttcaagccccgcccccgcccaggccacgaggtggacgacctcgccaacctcatcaagctctacgcggactggcactcccgcctgatcccctactactccttcgaacagttcgtgcgcaaactcgagaaattgggtgccggcaaccgcgtcagggacgatggtgggcctctctgaaggggagaaacacttcatccgcggcggcattgcacaagaccttcgcactgatggacgtaggcggctgcagttccggtccctctccgtccaaaccggagtcattccacaggccgaatggctcagcgcgtgttaggttgggggccactgatataatcgctagtgtcaaggctgaactaggaaaaccaagcattcttcaccctgacaaaggaaaagttgccatttttgtcgactgtagtccaaccgctgagcctctgtttgagggtagaggctctgaagaattgtctgctgagctctctgtttccctgcaaagatgcttgttgggtggtaaaagtggtgctggtgctgcaattgatctgtcatccctaattgttgttgatggaaaggtctgctgggatctgtacattgatgggcttgtggtcagttctgatggtaatttgctagatgcgctagctgttgcgataaaggttgctttgagtgatacaggtataccaaaagttaatgtttctgttagtgctgcatctgatgaggaacctgaagttgatgtaagtgatgaggaatttctgcagtttgacacatccggtgtgcctgttattattacattaaccaaggtgggtcggcactacatcgttgatgccacctcagaggaagaatcccagatgagttctgcagtgtcggtgtcagtcaacaggcatggccagatatgcgggcttaccaagaggggaggggcagggctggatccaagcgtcatcttcgacatgatatctgtcgccaagcatgtgagccagcagttcatctccctcttggattcagagattgccgccgccgaagctgaagaagaggctcagtgattgatgaaaaggaaaaaggactggttgcgtaaatgctcgtgtgttccaacttcaaccaaatgctgtagaaatcttcaggaatttggttccatttttatgttattattagtagtagtaaacaccgaggatttggatcctgggaacgaacgacgtcgtgttggctttggctgggctcagaggaacgaatactgaatcttgggtctgatgatctgatcctcttgtgcccccaatccgatgataaatttggcccctctcataccaaaccaaacactatggatttcctccgtccgttttc

SEQ ID NO: 14928 - protein, 371 aa, Zea mays subsp. mays
  misc_feature (1)..(371): Ceres Seq. ID no. 12341044
AFRSYDAPKAHAGPAPLRRRHRLRAPLLSQGVQAPPPPRPRGGRPRQPHQALRGLALPPDPLLLLRTVRAQTREIGCRQPRQGRWWASLKGRNTSSAAALHKTFALMDVGGCSSGPSPSKPESFHRPNGSARVRLGATDIIASVKAELGKPSILHPDKGKVAIFVDCSPTAEPLFEGRGSEELSAELSVSLQRCLLGGKSGAGAAIDLSSLIVVDGKVCWDLYIDGLVVSSDGNLLDALAVAIKVALSDTGIPKVNVSVSAASDEEPEVDVSDEEFLQFDTSGVPVIITLTKVGRHYIVDATSEEESQMSSAVSVSVNRHGQICGLTKRGGAGLDPSVIFDMISVAKHVSQQFISLLDSEIAAAEAEEEAQ

SEQ ID NO: 14929 - protein, 265 aa, Zea mays subsp. mays
  misc_feature (1)..(265): Ceres Seq. ID no. 12341045
MDVGGCSSGPSPSKPESFHRPNGSARVRLGATDIIASVKAELGKPSILHPDKGKVAIFVDCSPTAEPLFEGRGSEELSAELSVSLQRCLLGGKSGAGAAIDLSSLIVVDGKVCWDLYIDGLVVSSDGNLLDALAVAIKVALSDTGIPKVNVSVSAASDEEPEVDVSDEEFLQFDTSGVPVIITLTKVGRHYIVDATSEEESQMSSAVSVSVNRHGQICGLTKRGGAGLDPSVIFDMISVAKHVSQQFISLLDSEIAAAEAEEEAQ

SEQ ID NO: 14930 - DNA, 1367 bp, Zea mays subsp. mays
  misc_feature (1)..(1367): Ceres Seq. ID no. 12341058
agcagtctcgatggccgccgccgactcctccccgctccacatcgtcattttcccttggctcgcgttcggccacttgatccccggcctcgagttcgccgagcgcctcgctcatcgacttggtggccctcccgttcccgcgcattgacggcctccccgatggcgccgaggccactagcgacctcccgcccggcacggccgagctccacgtgcaggccatggaccgcctcgccccggccttctccgccttcctcggtgccgcctgcgccgacgggagcgaccgtaaggtggactgggtgctcctcgacaacttccacgcgtccatggcggacgtcgccagcgagcacaaggttccctgcatactgaacatgccctactcctcggcgacgacagaggatttcggcattccagacccgtcggttctaccaatgttccggccatttgtcgagaccttcaagagatgcaaagtcatcgctgctcgtagcagcttcgagttggaaccggagtccctgcctctcatgacaaagatcctcgggaagccggtcatccccgtgggcctacttcctccggcgcccgccggaggcaacacgcagcgcgacgacagcgcagccctgtcgtggctcgacgagcagccgtccaagtccgtggtctacgtcgccttcgggagcgagtacccgatgaccgtcaagcagctgcacgagatcgcgcgcgggctggagctcgccgggacgcgcttcctctgggccctcaagaggcctagcgtcgcccaccccgacgaggacctcctgccgccaggtttcgaggagcgcacgcgcggccgtggctccgtcgtcacgggctgggttcctcagaccagcatactggggcatggcgccgtcgccgcgttcatgatgcactgcggctggggctccaccatcgaggcgcttcagtacggccatcctctggtcatgatgccagttctcgtcgaccacctgtccaccgcgcgggtgatggagcagcggaaggtcggagtcaaggtgcggaaggagaagagtgacgaagcgttccttggtgacaacatcgccacagcgatacgggctgtcatgtgcgaagaagagagcaagaggatctttgtggccaatgctaagaggatgcaggagattgtggcagacgacgagtgccacaagaggtacatagacgaattcgttcagagcctgagaacctacaagaactgaaacatgcatggtattggtcagtgcactcagcatacttggcattggcgttacacaagtgattcgctggactccagcttatacgatgtatcttattttgctgcaatatgcaactttatcattgtttggttgtaaaaagatttgaatttgtttctcgtg

SEQ ID NO: 14931 - protein, 331 aa, Zea mays subsp. mays
  misc_feature (1)..(331): Ceres Seq. ID no. 12341059
MDRLAPAFSAFLGAACADGSDRKVDWVLLDNFHASMADVASEHKVPCILNMPYSSATTEDFGIPDPSVLPMFRPFVETFKRCKVIAARSSFELEPESLPLMTKILGKPVIPVGLLPPAPAGGNTQRDDSAALSWLDEQPSKSVVYVAFGSEYPMTVKQLHEIARGLELAGTRFLWALKRPSVAHPDEDLLPPGFEERTRGRGSVVTGWVPQTSILGHGAVAAFMMHCGWGSTIEALQYGHPLVMMPVLVDHLSTARVMEQRKVGVKVRKEKSDEAFLGDNIATAIRAVMCEEESKRIFVANAKRMQEIVADDECHKRYIDEFVQSLRTYKN

SEQ ID NO: 14932 - protein, 296 aa, Zea mays subsp. mays
  misc_feature (1)..(296): Ceres Seq. ID no. 12341060
MADVASEHKVPCILNMPYSSATTEDFGIPDPSVLPMFRPFVETFKRCKVIAARSSFELEPESLPLMTKILGKPVIPVGLLPPAPAGGNTQRDDSAALSWLDEQPSKSVVYVAFGSEYPMTVKQLHEIARGLELAGTRFLWALKRPSVAHPDEDLLPPGFEERTRGRGSVVTGWVPQTSILGHGAVAAFMMHCGWGSTIEALQYGHPLVMMPVLVDHLSTARVMEQRKVGVKVRKEKSDEAFLGDNIATAIRAVMCEEESKRIFVANAKRMQEIVADDECHKRYIDEFVQSLRTYKN

SEQ ID NO: 14933 - protein, 281 aa, Zea mays subsp. mays
  misc_feature (1)..(281): Ceres Seq. ID no. 12341061
MPYSSATTEDFGIPDPSVLPMFRPFVETFKRCKVIAARSSFELEPESLPLMTKILGKPVIPVGLLPPAPAGGNTQRDDSAALSWLDEQPSKSVVYVAFGSEYPMTVKQLHEIARGLELAGTRFLWALKRPSVAHPDEDLLPPGFEERTRGRGSVVTGWVPQTSILGHGAVAAFMMHCGWGSTIEALQYGHPLVMMPVLVDHLSTARVMEQRKVGVKVRKEKSDEAFLGDNIATAIRAVMCEEESKRIFVANAKRMQEIVADDECHKRYIDEFVQSLRTYKN

SEQ ID NO: 14934 - DNA, 1567 bp, Zea mays subsp. mays
  misc_feature (1)..(1567): Ceres Seq. ID no. 12341078
gaccctttctttcccaaagccgagcagcgaccagcgagggtgccactgccaccgcccgccccccagtcccccactcactcactagctagcttgctagctgcgcactacgggctacgccgagctagagtccggcgatcacagcccggcaggccggccatggccaccgcgcccgtcgtcgtcctagtcctgcacgttctgctaggcgctgcagcggccgcctgcgccgcggcggcagggagtagcagcaaggtgccggcgatgtacgtgttcggcgactccacggcggacgtgggcaccaacaactacttgccgggcggcgccgaagtgccgcgtgccaacttcccccacaacggcgtcgacttccccacggcgcgccccaccggcaggttcagcaacgggttcaacggcgtcgacttcttggccgtgaacatgggcttcaagcgcagccccccgccgttcctcgccgtggccaacaagaccaacaggcaggtcttccgaggtctcctgggagtgaacttcgcctctgcaggatcaggcatcctcgacacgacggggagctccatcatcccgctgagcaagcaggtggagcagttcgccgccgtgcggcgcaacatctcgtcgcgcgtcggcaacgggtctgctgctgccgacgccctgctgtcgcggtccctgttcctcgtcagcaccggcggcaacgacctgttcgccttcttcgcgcggaacagcacgccgtcggacgccgacaagcggcggttcgtcgccaacctcgtcacgctgtaccagaaccatgtgaaggctctgtacgtgctcggggctcggaagttcgccgtgatcgacgtcccgccggtcgggtgctgcccctacccgaggagcctgcacccgctgggcgcctgcatcgacgtgctcaacgagctggcgcgcgggttcaacgagggcgtcagggcggccatgcacggcctcggcgtgagcttccaggggctcaggtactccgtcgggagctcccacgccgtcgtgcagagcatcatgaagcaccctcaaaggctggggttcaaggacgtgacgaacgcgtgctgcgggtcgggccggttcaacggcaagtccgggtgcacgcccaacgcgacgctgtgcgacaaccgacaccagtacctgttctgggacctgctgcaccccacgcacgccgcctccaagatcgccgccgccgccatctacaacggctcgctccacttcgccgcgccgatgaacttcaggcagctggccgaagacgaccggtgctagctagctagcacagctagagctagcacgaggacgtagggacgtgtctctgttctctgctgcggactgtggtgaatatggtcgttggtgtgtagaggacgacggatgcgtgcatggctgctgtgttcgctgtatgtttctcgaccgtggtttggtttagatgatgatgaccgacgccgccggcgtagtttggactgtgaacgaatttacatcatgctgctgcagaggtacgggtgtaccgtgtacgtgacatcgtctacacctctcctggacaactttaactgaatcttttttt

SEQ ID NO: 14935 - protein, 424 aa, Zea mays subsp. mays
  misc_feature (1)..(424): Ceres Seq. ID no. 12341079
DPFFPKAEQRPARVPLPPPAPQSPTHSLASLLAAHYGLRRARVRRSQPGRPAMATAPVVVLVLHVLLGAAAAACAAAAGSSSKVPAMYVFGDSTADVGTNNYLPGGAEVPRANFPHNGVDFPTARPTGRFSNGFNGVDFLAVNMGFKRSPPPFLAVANKTNRQVFRGLLGVNFASAGSGILDTTGSSIIPLSKQVEQFAAVRRNISSRVGNGSAAADALLSRSLFLVSTGGNDLFAFFARNSTPSDADKRRFVANLVTLYQNHVKALYVLGARKFAVIDVPPVGCCPYPRSLHPLGACIDVLNELARGFNEGVRAAMHGLGVSFQGLRYSVGSSHAVVQSIMKHPQRLGFKDVTNACCGSGRFNGKSGCTPNATLCDNRHQYLFWDLLHPTHAASKIAAAAIYNGSLHFAAPMNFRQLAEDDRC

SEQ ID NO: 14936 - protein, 372 aa, Zea mays subsp. mays
  misc_feature (1)..(372): Ceres Seq. ID no. 12341080
MATAPVVVLVLHVLLGAAAAACAAAAGSSSKVPAMYVFGDSTADVGTNNYLPGGAEVPRANFPHNGVDFPTARPTGRFSNGFNGVDFLAVNMGFKRSPPPFLAVANKTNRQVFRGLLGVNFASAGSGILDTTGSSIIPLSKQVEQFAAVRRNISSRVGNGSAAADALLSRSLFLVSTGGNDLFAFFARNSTPSDADKRRFVANLVTLYQNHVKALYVLGARKFAVIDVPPVGCCPYPRSLHPLGACIDVLNELARGFNEGVRAAMHGLGVSFQGLRYSVGSSHAVVQSIMKHPQRLGFKDVTNACCGSGRFNGKSGCTPNATLCDNRHQYLFWDLLHPTHAASKIAAAAIYNGSLHFAAPMNFRQLAEDDRC

SEQ ID NO: 14937 - protein, 338 aa, Zea mays subsp. mays
  misc_feature (1)..(338): Ceres Seq. ID no. 12341081
MYVFGDSTADVGTNNYLPGGAEVPRANFPHNGVDFPTARPTGRFSNGFNGVDFLAVNMGFKRSPPPFLAVANKTNRQVFRGLLGVNFASAGSGILDTTGSSIIPLSKQVEQFAAVRRNISSRVGNGSAAADALLSRSLFLVSTGGNDLFAFFARNSTPSDADKRRFVANLVTLYQNHVKALYVLGARKFAVIDVPPVGCCPYPRSLHPLGACIDVLNELARGFNEGVRAAMHGLGVSFQGLRYSVGSSHAVVQSIMKHPQRLGFKDVTNACCGSGRFNGKSGCTPNATLCDNRHQYLFWDLLHPTHAASKIAAAAIYNGSLHFAAPMNFRQLAEDDRC

SEQ ID NO: 14938 - DNA, 657 bp, Zea mays subsp. mays
  misc_feature (1)..(657): Ceres Seq. ID no. 12341116
actagaaaagaggatcttgagagtgttgttggcatggcttcgtcagcaacagcaagcggtgggaagtttgacgagaagttgcctggcgagaaacctccaaagcaccctggcaaacatagaaagttcctcccagttgctgaggggaagggaatgggcagcctggagaaacagcagaatgacaaaatcctgagctctctacttgccagaaactctgatgaaccgcttgatgtcagcaaggcaattacaatgtacaaggtgaaaaaggaaaagcagagaaggaaagagaaaaatatgccatcaaaatctgataagcttaagccccagaagaaaccccacaagaaatcatcgaagaaaagggcttaggtccacgtctttcagttgaccacagttttgaaagctgaagcaaggaggcctgtcacatattggattgtatttgtgagctttgaatctctgggagaaatattgttattccgtctaatggttatgatacaaaaacctgaatgctttgccatggtatgcgcccatcttgtacttttcaaattatgtttgggatgtggtttgtagcttggtaagagtccctccctttggttctgaaacctgttcaaaggagctgtcctggaaacagtaccaatgaagctactgtctagtgtcgatggt

SEQ ID NO: 14939 - protein, 120 aa, Zea mays subsp. mays
  misc_feature (1)..(120): Ceres Seq. ID no. 12341117
TRKEDLESVVGMASSATASGGKFDEKLPGEKPPKHPGKHRKFLPVAEGKGMGSLEKQQNDKILSSLLARNSDEPLDVSKAITMYKVKKEKQRRKEKNMPSKSDKLKPQKKPHKKSSKKRA

SEQ ID NO: 14940 - protein, 109 aa, Zea mays subsp. mays
  misc_feature (1)..(109): Ceres Seq. ID no. 12341118
MASSATASGGKFDEKLPGEKPPKHPGKHRKFLPVAEGKGMGSLEKQQNDKILSSLLARNSDEPLDVSKAITMYKVKKEKQRRKEKNMPSKSDKLKPQKKPHKKSSKKRA

SEQ ID NO: 14941 - protein, 70 aa, Zea mays subsp. mays
  misc_feature (1)..(70): Ceres Seq. ID no. 12341119
MGSLEKQQNDKILSSLLARNSDEPLDVSKAITMYKVKKEKQRRKEKNMPSKSDKLKPQKKPHKKSSKKRA

SEQ ID NO: 14942 - DNA, 834 bp, Zea mays subsp. mays
  misc_feature (1)..(834): Ceres Seq. ID no. 12341141
ataacattataacccacgcaactccggggtccgggttctggctcgccaaaccctagccgccgagtgccgcccaccgcccgcccgccctccgccgcgcgtcggacggtgccgagggaagaggcaccatgaggttggagaagtgctggttctgctcctctaccatctaccccggccatggaatccagttcgtccgcaacgacgccaaggtcttccgcttttgccggtcaaagtgccataaaaacttcaagatgaagaggaaccctcgtaaggttaagtggacaaaagcatacaggcatttgcatggcaaggacatgacccaggatacaacctttgagtttgagaggaagaggaacaggcccgagcgctacgaccgcaatttgacggagcagactctgaaggctatcccgcttattgcaaagattaggcatgaccgtatgggaaaacacatctcaaacagacataaacctggtaaacgcaaggagatggaaaaggactccaaggagctggagcaggacatcggcatgctcccgaagaagcttattatcaaccatctcgcggctgagaaaacgaaggtcaaggttgaagttgttcagcagcagacagaagataacgctatggaagagtagtgcgtggcattttgtgtgcttgtgttttcatgtctgatgcagatccttttgtatttgcgtaagaagctatgtagttgatgaaagatgtttatttgatatatatattaatggatggattcgtggactgagtatcagcaagtttgttgttctggaatgtaagcttgctctgcttatgctataattgtcttgtcaggaaagtctcaatcct

SEQ ID NO: 14943 - protein, 166 aa, Zea mays subsp. mays
  misc_feature (1)..(166): Ceres Seq. ID no. 12341142
MRLEKCWFCSSTIYPGHGIQFVRNDAKVFRFCRSKCHKNFKMKRNPRKVKWTKAYRHLHGKDMTQDTTFEFERKRNRPERYDRNLTEQTLKAIPLIAKIRHDRMGKHISNRHKPGKRKEMEKDSKELEQDIGMLPKKLIINHLAAEKTKVKVEVVQQQTEDNAMEE

SEQ ID NO: 14944 - protein, 125 aa, Zea mays subsp. mays
  misc_feature (1)..(125): Ceres Seq. ID no. 12341143
MKRNPRKVKWTKAYRHLHGKDMTQDTTFEFERKRNRPERYDRNLTEQTLKAIPLIAKIRHDRMGKHISNRHKPGKRKEMEKDSKELEQDIGMLPKKLIINHLAAEKTKVKVEVVQQQTEDNAMEE

SEQ ID NO: 14945 - protein, 104 aa, Zea mays subsp. mays
  misc_feature (1)..(104): Ceres Seq. ID no. 12341144
MTQDTTFEFERKRNRPERYDRNLTEQTLKAIPLIAKIRHDRMGKHISNRHKPGKRKEMEKDSKELEQDIGMLPKKLIINHLAAEKTKVKVEVVQQQTEDNAMEE

SEQ ID NO: 14946 - DNA, 1276 bp, Zea mays subsp. mays
  misc_feature (1)..(1276): Ceres Seq. ID no. 12341164
attaagattagcaaaattgtgggccagcagcaggagcgccccccgtctccctccaccctcctctgtcagggtcctccgagtcggacttcctcacggccgccgcgccaaatcccgtctcgttgctccggtccgctgcgcatcctcaggaatggaacttggcgccaccactgccctctaccctctgcaccgctgcaaaaccatttacctggtcaggcatgcccagggcattcacaatgtcgcgggggagaaggactttggtgcatacatgtcacatgatctgttcgatgctcagctcactcctttgggttggaaccaagtcgatggtctgcgggagcatgtgaagaaaagtgggcttgcagaaaagattgaattagttatttcttcccctttactgaggactatgcaaactgcagttggtgtctttggtggtgaaaagtatattgatggtgtaaatgcacctccactaatggtcgaaaatgccggacacagtggtcgtccggcagtttcaagtttgaactgccccccatttattgcagtcgaaacctgcagagagcacttgggtgtccatccctgtgacaagaggaggagcataacagaataccggcctctctttcctgcgattgatttttcattgatagagaatgatgaagatgttctttgggaaccagatgtgagagaaccaaatgaggctgtcgctttgaggggtatgaagttcatggactggttgtggacaagagaagagaaagagatagctattgtcagtcacagtggtttcttgtttcacaccttaagcatgtacagtaaggagtgtcatccaaccataagagacgaagttggcaagcactttgcaaactgcgagctacggtcgatggtgttggttgacagaagcatgcttggatcatattcttcaagattcaactatgctggcaagaatccaaccggactagatgtgcctagtgatattgcagataagaagcaggttgacgaagctcagaagaactgaggcaacctcgaaagcataccatatatgacttggattatcaagaaattctgacctttgcgaagcttgtttgctttgaagaggacaagctaagagggcatctacagatagagtttacgcataccattttgttagtcaagttgaactacgcagcaatgtattagcatgtctgctcttttgtctcagcctacattgagattcagggccttggactacgattatctatttatgataataataaccggatcacctacattcaccaggtgatgcatggcc

SEQ ID NO: 14947 - protein, 333 aa, Zea mays subsp. mays
  misc_feature (1)..(333): Ceres Seq. ID no. 12341165
LRLAKLWASSRSAPRLPPPSSVRVLRVGLPHGRRAKSRLVAPVRCASSGMELGATTALYPLHRCKTIYLVRHAQGIHNVAGEKDFGAYMSHDLFDAQLTPLGWNQVDGLREHVKKSGLAEKIELVISSPLLRTMQTAVGVFGGEKYIDGVNAPPLMVENAGHSGRPAVSSLNCPPFIAVETCREHLGVHPCDKRRSITEYRPLFPAIDFSLIENDEDVLWEPDVREPNEAVALRGMKFMDWLWTREEKEIAIVSHSGFLFHTLSMYSKECHPTIRDEVGKHFANCELRSMVLVDRSMLGSYSSRFNYAGKNPTGLDVPSDIADKKQVDEAQKN

SEQ ID NO: 14948 - protein, 284 aa, Zea mays subsp. mays
  misc_feature (1)..(284): Ceres Seq. ID no. 12341166
MELGATTALYPLHRCKTIYLVRHAQGIHNVAGEKDFGAYMSHDLFDAQLTPLGWNQVDGLREHVKKSGLAEKIELVISSPLLRTMQTAVGVFGGEKYIDGVNAPPLMVENAGHSGRPAVSSLNCPPFIAVETCREHLGVHPCDKRRSITEYRPLFPAIDFSLIENDEDVLWEPDVREPNEAVALRGMKFMDWLWTREEKEIAIVSHSGFLFHTLSMYSKECHPTIRDEVGKHFANCELRSMVLVDRSMLGSYSSRFNYAGKNPTGLDVPSDIADKKQVDEAQKN

SEQ ID NO: 14949 - protein, 245 aa, Zea mays subsp. mays
  misc_feature (1)..(245): Ceres Seq. ID no. 12341167
MSHDLFDAQLTPLGWNQVDGLREHVKKSGLAEKIELVISSPLLRTMQTAVGVFGGEKYIDGVNAPPLMVENAGHSGRPAVSSLNCPPFIAVETCREHLGVHPCDKRRSITEYRPLFPAIDFSLIENDEDVLWEPDVREPNEAVALRGMKFMDWLWTREEKEIAIVSHSGFLFHTLSMYSKECHPTIRDEVGKHFANCELRSMVLVDRSMLGSYSSRFNYAGKNPTGLDVPSDIADKKQVDEAQKN

SEQ ID NO: 14950 - DNA, 1426 bp, Zea mays subsp. mays
  misc_feature (1)..(1426): Ceres Seq. ID no. 12341231
gaacttgaactggagaggcagtagccagagtgtgagctgacggcggacgtgctcgcctctcctctcctcacatttccggctcccctctccgcattccatggcaccgcattaccggtatttttagccgccggaggagacgggttgcgtagagagagggaaaaccagagctcctgactgttcctctctccctcctcacgggcgggctccgtctgttccgtccatccaccgccccggtcgtctcccggccagatccctctcctgcaaggtttctttgcgagtggccggagaagatgatgggcgggttcctctccagggtcctcctgctggcttttggctatgcctatcctgcctatgaatgctacaagaccgttgaactgaacaaaccacagattgagcagctcatattttggtgtcagtattggattttagttgccctgttgacagttttggagagatttggagattttacaatatcatggctaccgttttactcagaagcaaaggtgttgttctttgtatatttgtggtaccctaagacaaagggaactacgtatgtttatggaactttctttaagccatatatttctcagcatgagaatgaaatcgaccgaaatcttcttgagctcagagctcgagccaccgatatggttgtcctttacttccataaggctgcttcggtagggcaaaatactttctttgacgttttaaaatatgttgctgcccagtccccttctcggaaatcaagactgcaccctcatcaggaaccacagcagcagcaaccacaagtgcaggtggagctgcagcagccgcaaccacaaaaacaagcagcacctgttatgcgcagaggagcatctattgctgctcggcaagcagcaatggcacagcaatctctggagactatacccgttccatcttcacccaagatcaagcgtcaaacatcagggagacctggttcggtggcatccacaaagcctgcagcagctgcatccacaccaaaacctggcggtagcccaaagaaaggtgaggtcaaacctgctgtcgacccagttcaaactccagccacaagtgcagattcaccaaaatccgagcctagcgccccaccactttctgagaccgaaggagtagacaacatggcaatcgatgaggtcagtggtgatgctgcagagggcgcggaagagcttgaccctgcgctcgaggagacgccgatggaggagacaatccgtgtgacgcgcgccaagctaaggaggcgcaccgccaccgaggattctgctgggaattagctgcatgccgttgttttccctgcacattgtattgatctttttccgagttttaggctcacatgttgtttgctggaatggagatatgttgttgttcacttggttcttgtgacacagagttaattatcttatttccgtgctttcttagt

SEQ ID NO: 14951 - protein, 329 aa, Zea mays subsp. mays
  misc_feature (1)..(329): Ceres Seq. ID no. 12341232
MMGGFLSRVLLLAFGYAYPAYECYKTVELNKPQIEQLIFWCQYWILVALLTVLERFGDFTISWLPFYSEAKVLFFVYLWYPKTKGTTYVYGTFFKPYISQHENEIDRNLLELRARATDMVVLYFHKAASVGQNTFFDVLKYVAAQSPSRKSRLHPHQEPQQQQPQVQVELQQPQPQKQAAPVMRRGASIAARQAAMAQQSLETIPVPSSPKIKRQTSGRPGSVASTKPAAAASTPKPGGSPKKGEVKPAVDPVQTPATSADSPKSEPSAPPLSETEGVDNMAIDEVSGDAAEGAEELDPALEETPMEETIRVTRAKLRRRTATEDSAGN

SEQ ID NO: 14952 - protein, 328 aa, Zea mays subsp. mays
  misc_feature (1)..(328): Ceres Seq. ID no. 12341233
MGGFLSRVLLLAFGYAYPAYECYKTVELNKPQIEQLIFWCQYWILVALLTVLERFGDFTISWLPFYSEAKVLFFVYLWYPKTKGTTYVYGTFFKPYISQHENEIDRNLLELRARATDMVVLYFHKAASVGQNTFFDVLKYVAAQSPSRKSRLHPHQEPQQQQPQVQVELQQPQPQKQAAPVMRRGASIAARQAAMAQQSLETIPVPSSPKIKRQTSGRPGSVASTKPAAAASTPKPGGSPKKGEVKPAVDPVQTPATSADSPKSEPSAPPLSETEGVDNMAIDEVSGDAAEGAEELDPALEETPMEETIRVTRAKLRRRTATEDSAGN

SEQ ID NO: 14953 - protein, 211 aa, Zea mays subsp. mays
  misc_feature (1)..(211): Ceres Seq. ID no. 12341234
MVVLYFHKAASVGQNTFFDVLKYVAAQSPSRKSRLHPHQEPQQQQPQVQVELQQPQPQKQAAPVMRRGASIAARQAAMAQQSLETIPVPSSPKIKRQTSGRPGSVASTKPAAAASTPKPGGSPKKGEVKPAVDPVQTPATSADSPKSEPSAPPLSETEGVDNMAIDEVSGDAAEGAEELDPALEETPMEETIRVTRAKLRRRTATEDSAGN

SEQ ID NO: 14954 - DNA, 1299 bp, Zea mays subsp. mays
  misc_feature (1)..(1299): Ceres Seq. ID no. 12341243
aatacaagccgggaaccagaccccaccagcagcactccatatactgcatgcatagagatagatagatatatatagagcttaattactatagtcgtcgtcgtcgatcgtaactgcaatagctttagtttttgcagtcatcagataaatatagggtccataaatatatccatcagctagctgtaactgcaactgcagtcgcaatagctatagttttcagttgattagctagctactaactacaacaagctaggcaaatcgatcaaactaaggctcggcagcggcagcggcatggacgcgatcagcagcctgttgctgcagcagggatggaggaagggcccctggacggcgctggaggacaggctgctcaccgagtacgtgcagcagcacggcgagggctgctggaactccgtcgccaagctcacagggctgcggcggagcgggaagagctgccggctgcggtgggtgaactacctccggccggacctcaagcggggcaagatcacccccgacgaggagaccgtcatcctccacctgcacgccatgctcggcaacaggtggtcggcgatcgcgcggtgcctgccggggaggacggacaacgagatcaagaactactggcggacgcacttcaagaaggcccggccgtcgcggcgcgcccgggcgcagctgctgcaccagtaccagctgcagcagcaggagcagcgccgccagtacctgcagctcctgcagccgcagcagctgcagcagcagcagctgggggtggtgaaacaacagcagctggagcagcagagcccgccggagcctcatcaccaggccatgatggacagcctgcaaagcacggcggcgtgctactgcagcccggtgccggaggaatgctgcccgctcccggccgacgacgacgcggtgctgtgggatagcctgtggaggctggtggacggggatggatgcggcgacggcgacggcgatggctccagcggaggcgactactagccggctagcacgtacgtgtgcgtgtgtatgccaggctgccagccagccagtgtaaagaaataaagcggaagaggaggttctcttcaggtttcagctgctgcaagccaaggatcctgctagtggtagtagagacatgctaattttcctacgagaatagacgatcatgcttcatgcttttttcccctttatccatgaaccatgagcaagtgacattgtgtatcgaagggccctctgtttatgttattatggcctgattacaaggttggaataccttcatgttccttttggtttcaagaatcaagatcatgtttt

SEQ ID NO: 14955 - protein, 232 aa, Zea mays subsp. mays
  misc_feature (1)..(232): Ceres Seq. ID no. 12341244
MDAISSLLLQQGWRKGPWTALEDRLLTEYVQQHGEGCWNSVAKLTGLRRSGKSCRLRWVNYLRPDLKRGKITPDEETVILHLHAMLGNRWSAIARCLPGRTDNEIKNYWRTHFKKARPSRRARAQLLHQYQLQQQEQRRQYLQLLQPQQLQQQQLGVVKQQQLEQQSPPEPHHQAMMDSLQSTAACYCSPVPEECCPLPADDDAVLWDSLWRLVDGDGCGDGDGDGSSGGDY

SEQ ID NO: 14956 - protein, 196 aa, Zea mays subsp. mays
  misc_feature (1)..(196): Ceres Seq. ID no. 12341245
MEEGPLDGAGGQAAHRVRAAARRGLLELRRQAHRAAAEREELPAAVGELPPAGPQAGQDHPRRGDRHPPPARHARQQVVGDRAVPAGEDGQRDQELLADALQEGPAVAARPGAAAAPVPAAAAGAAPPVPAAPAAAAAAAAAAGGGETTAAGAAEPAGASSPGHDGQPAKHGGVLLQPGAGGMLPAPGRRRRGAVG

SEQ ID NO: 14957 - protein, 148 aa, Zea mays subsp. mays
  misc_feature (1)..(148): Ceres Seq. ID no. 12341246
MLGNRWSAIARCLPGRTDNEIKNYWRTHFKKARPSRRARAQLLHQYQLQQQEQRRQYLQLLQPQQLQQQQLGVVKQQQLEQQSPPEPHHQAMMDSLQSTAACYCSPVPEECCPLPADDDAVLWDSLWRLVDGDGCGDGDGDGSSGGDY

SEQ ID NO: 14958 - DNA, 677 bp, Zea mays subsp. mays
  misc_feature (1)..(677): Ceres Seq. ID no. 12341262
acgaacggtggaagagtacgcctcggaatcagaggagcagcgaggaagctgaaggaggggcgaatctaagcccaattgaagcatgagggcgtcgattaatcgtcccccgacgccgagcgcggaggaggatcgggacaagcagccttctctcggagagatcattaacatcaagttggtagagactggggagaaggagaagctaatggagctactccgcgagcgactcgctgagtgcggctggagggatgagatgaaggcactctgcagggcctatgcaaggaagaaaggaagaaataatgtgacagtagatgacctcattcatgttattactccgaaaggaagagcatccgtgcctgattcagtgaaggcagaactcctgcaacgcatccggtccttccttatgtctaccacacttcggtagtcatttgtcgcgacggttggagcctatatgtaccattgtaggatcattgggaagtcgatcttgttggggaccaaaggtgcaggaaagcagtgcgtaggggaatattgtgagcatgaaaagaaacagtgtgatcttcatgacactgtcgacatgttcctcgtcaggcgcaggcggttggcgtaatttcaggtgtaccaatagagttgtaagttgtaacccctgaatactgtattgttaaagcaaccttccaccttgt

SEQ ID NO: 14959 - protein, 112 aa, Zea mays subsp. mays
  misc_feature (1)..(112): Ceres Seq. ID no. 12341263
MRASINRPPTPSAEEDRDKQPSLGEIINIKLVETGEKEKLMELLRERLAECGWRDEMKALCRAYARKKGRNNVTVDDLIHVITPKGRASVPDSVKAELLQRIRSFLMSTTLR

SEQ ID NO: 14960 - protein, 72 aa, Zea mays subsp. mays
  misc_feature (1)..(72): Ceres Seq. ID no. 12341264
MELLRERLAECGWRDEMKALCRAYARKKGRNNVTVDDLIHVITPKGRASVPDSVKAELLQRIRSFLMSTTLR

SEQ ID NO: 14961 - protein, 56 aa, Zea mays subsp. mays
  misc_feature (1)..(56): Ceres Seq. ID no. 12341265
MKALCRAYARKKGRNNVTVDDLIHVITPKGRASVPDSVKAELLQRIRSFLMSTTLR

SEQ ID NO: 14962 - DNA, 1481 bp, Zea mays subsp. mays
  misc_feature (1)..(1481): Ceres Seq. ID no. 12341277
ctgttccggctctgtggagcgccgccccttctccgacgtggcgcctcagtatttgttagggttttctccgggattgaaggcactgctgcaggctgaaacgtttctcgcttgattggcggaagaagggattccagcgatctgtttgctgctagctgcgagagttcaatatgtctcggaccttcaaatcgacgacgggtctctctcggcggtttctgaatctgatcgcggccaaccactcccctggcgtcaagtcgctgcaccgcatcggcctgggtcgcatctttaactcaacgccagggccaataccaaacggagatcgattggagtccgcagcaggacaagaagactacatggtgcggccccgcgcgttggatatcattcggctccccacgccggtaatgagcttccgatcttcagcgtcatttgaaagcaaagaatggaagttggattgcttcccgttatcggactgcaaagttttctgcatggaccagtcagggcgcggtttcctcttcgatgccaactcgtgcggggtgtcaaccgtggcccatctccatacacccaaggtgaagcccatctccctctctatcccccaacccaatgttgacgaagacgaccacaacgacgagtggggcagcaaacttttcatcttggagagcatgcccgaagaaccagaggtgaactgccagttcgaggccttcatctaccgcatgcgagatgtgtatcccagggtactgaaacattggaatcgccacctcgtcccaccgccgccgccattcatccgtgagacagttaaccagaatagccgccgccttgaggttacatcttatgctgtgattgaggatggctcccacatctgcatatccattgagggcgctggcacctactgcatgcacacggtcagccacacgtggaaccgggtcggcgagtggacactacccttccgtggcaagattgagtacgtgcccgagctcaaactctggtttggcacctctgccgagtctgggcacctggctgcggctgacctctctgccatggactcccagccacagctagtgggtacttggaaggaacttgatccgccagagggttggaaggaatgcaaggattctcaggttgtcaacctcggctccggtaggttctgtatagcaaggttctttaagaaaaatccagtggacgtacgttctggtgacgaactaccgggccagagttttgctgtccttaccggcgtggaggtggtgaatcgagggtgtgatgcggaagtggaactccggatggtcactcacaaatcgaggcgagtcaacagcactacaatcgagacattgttctgattttatccattatgtgtcatctgaattagtaaaagccatcttttcttggcatctatttcttgtgtttctctctgttctcagtgtattgttcttcgatgctgaaactgattcaacttatgtacgctcttgatttacaaatttctgttgtgcttc

SEQ ID NO: 14963 - protein, 386 aa, Zea mays subsp. mays
  misc_feature (1)..(386): Ceres Seq. ID no. 12341278
MSRTFKSTTGLSRRFLNLIAANHSPGVKSLHRIGLGRIFNSTPGPIPNGDRLESAAGQEDYMVRPRALDIIRLPTPVMSFRSSASFESKEWKLDCFPLSDCKVFCMDQSGRGFLFDANSCGVSTVAHLHTPKVKPISLSIPQPNVDEDDHNDEWGSKLFILESMPEEPEVNCQFEAFIYRMRDVYPRVLKHWNRHLVPPPPPFIRETVNQNSRRLEVTSYAVIEDGSHICISIEGAGTYCMHTVSHTWNRVGEWTLPFRGKIEYVPELKLWFGTSAESGHLAAADLSAMDSQPQLVGTWKELDPPEGWKECKDSQVVNLGSGRFCIARFFKKNPVDVRSGDELPGQSFAVLTGVEVVNRGCDAEVELRMVTHKSRRVNSTTIETLF

SEQ ID NO: 14964 - protein, 325 aa, Zea mays subsp. mays
  misc_feature (1)..(325): Ceres Seq. ID no. 12341279
MVRPRALDIIRLPTPVMSFRSSASFESKEWKLDCFPLSDCKVFCMDQSGRGFLFDANSCGVSTVAHLHTPKVKPISLSIPQPNVDEDDHNDEWGSKLFILESMPEEPEVNCQFEAFIYRMRDVYPRVLKHWNRHLVPPPPPFIRETVNQNSRRLEVTSYAVIEDGSHICISIEGAGTYCMHTVSHTWNRVGEWTLPFRGKIEYVPELKLWFGTSAESGHLAAADLSAMDSQPQLVGTWKELDPPEGWKECKDSQVVNLGSGRFCIARFFKKNPVDVRSGDELPGQSFAVLTGVEVVNRGCDAEVELRMVTHKSRRVNSTTIETLF

SEQ ID NO: 14965 - protein, 309 aa, Zea mays subsp. mays
  misc_feature (1)..(309): Ceres Seq. ID no. 12341280
MSFRSSASFESKEWKLDCFPLSDCKVFCMDQSGRGFLFDANSCGVSTVAHLHTPKVKPISLSIPQPNVDEDDHNDEWGSKLFILESMPEEPEVNCQFEAFIYRMRDVYPRVLKHWNRHLVPPPPPFIRETVNQNSRRLEVTSYAVIEDGSHICISIEGAGTYCMHTVSHTWNRVGEWTLPFRGKIEYVPELKLWFGTSAESGHLAAADLSAMDSQPQLVGTWKELDPPEGWKECKDSQVVNLGSGRFCIARFFKKNPVDVRSGDELPGQSFAVLTGVEVVNRGCDAEVELRMVTHKSRRVNSTTIETLF

SEQ ID NO: 14966 - DNA, 1587 bp, Zea mays subsp. mays
  misc_feature (1)..(1587): Ceres Seq. ID no. 12341285
ctggaaacaaaccacggagccgtgaccgaggggagcggcggcggcgcaaggtgtcttcctctccgtcgccggcaacgtcgacaccgctggcaagcttctctccggttgtccctgctccagtaagagtaggcgaggacgagcctcccccatcctgggtgttggtgcctgacccattttctcaagataagatgttcagaggttctcctaagatagtagctttatctaaagctgctcaaaagaaggcttctcctaaagctgcaacaacaaagaaatgtggcggtggtgttgagagagctacatggaatgttgaattggagaagagtcttgttgacttgttgttttaacacaacatgcctccatatagggctcaaaatgggtggagtccagatgcttggaataaaatagtttctgaattccacaagaagcatgaatatgttacattcaacaagatccaaattcaggaaaaggagagggaattgaaaagggaatacaagatattgaaggaggcaagaaaacaaagtggagtttcttggaatgaaaaaagatgcatgatcattgctgaaccaacgatatgggacaacattatcactacatttcctagagctaagaagttccgcaagaagtcttttcctctctttgatgccttgggtgaattatatgatggtcacatcgcacaagggacttggaacattacctctactcaaccagtacaaaattctaatgatggagagcaactaaaaaccatagaagtggaagatgaagatactaatgaaccagaagaagatgcaagaatagaacaagatgaagatatagtaattgttgaaagggttgaacagaggttacctaaaaggtcaggtgcaccaactgtcaatcaagagaaggagacaaaaagagtgaggaaagatgcactagaagggctgatagggaggtaccttgatgtgaaaacgaagcaagttgcagatgaggctgcacaatcagcaaaagtaaaggatgttgctcaagataatgatttttctatcaagaggtgtatttctgttcttaagactatggatatgacaagagatgagaaggtcaaagcagctgaggtgttcaacataccaaattacagggaaacatttatttgtttcaatgatgatgagccagaagtcgctctcctttggctaagagggaagatggataaactctaaaggcaggtctggtggaacacggacaggctctgacttcgttcgagaccatccatttgattcttgcaccggttcttttctcagttcagttgaaagctagcactagatgcctacacggaatagaaggtccaccacagtccacagtcgttcatccaagcagctgtgtagatgtcgcctccttttattttgtcccttttctggttgtcatgtccctttttctggttgtcacgttgagctcttggtttgcagtttcatgttggtgtgcattgtctgaatagaaaactgaaaggctgttgtttcagtttcatgttggtgtgcgtcctctgaatagaaaactgaaaagttgtttcagtttcatgttggtgtgcgtcctctgaatagaaaactgaaaggctgttgttcc

SEQ ID NO: 14967 - protein, 278 aa, Zea mays subsp. mays
  misc_feature (1)..(278): Ceres Seq. ID no. 12341286
MPPYRAQNGWSPDAWNKIVSEFHKKHEYVTFNKIQIQEKERELKREYKILKEARKQSGVSWNEKRCMIIAEPTIWDNIITTFPRAKKFRKKSFPLFDALGELYDGHIAQGTWNITSTQPVQNSNDGEQLKTIEVEDEDTNEPEEDARIEQDEDIVIVERVEQRLPKRSGAPTVNQEKETKRVRKDALEGLIGRYLDVKTKQVADEAAQSAKVKDVAQDNDFSIKRCISVLKTMDMTRDEKVKAAEVFNIPNYRETFICFNDDEPEVALLWLRGKMDKL

SEQ ID NO: 14968 - protein, 212 aa, Zea mays subsp. mays
  misc_feature (1)..(212): Ceres Seq. ID no. 12341287
MIIAEPTIWDNIITTFPRAKKFRKKSFPLFDALGELYDGHIAQGTWNITSTQPVQNSNDGEQLKTIEVEDEDTNEPEEDARIEQDEDIVIVERVEQRLPKRSGAPTVNQEKETKRVRKDALEGLIGRYLDVKTKQVADEAAQSAKVKDVAQDNDFSIKRCISVLKTMDMTRDEKVKAAEVFNIPNYRETFICFNDDEPEVALLWLRGKMDKL

SEQ ID NO: 14969 - DNA, 1152 bp, Zea mays subsp. mays
  misc_feature (1)..(1152): Ceres Seq. ID no. 12341292
aacccaatcgtctctccaccacccaactcctcctgcctgtgctctcctcctttttctccactccgcttttgcttggttccatcgggccggagagggagaagctagctagctagcagcagctctgttggtgtgtgtgtgtgtgtgtgtgtggagggtagctgcagctggggctagctggaaaggtcgggagccatggggaggggccgggtggagctgaagcggatcgagaacaagatcaaccgccaggtcaccttcgccaagcgccgcaacggcctgctcaagaaggcgtacgagctctccgtgctctgcgacgccgaagtcgcgctcatcatcttctccaaccgcggcaagctctacgagttctgcagcggacagagcattaccaaaacacttgagaggtatgaaaaaaacagttatggaggaccagatactgctgtacagaacaaggagaacgagttagtccagagcagtcgtaatgagtacctcaagctgaaagcgagggtggataatttacagaggactcagaggaatttgcttggtgaagatctgggttcacttggtgtcaaagagcttgatcagcttgagaagcaaattgattcatccttaagtcacataagatccacaaggacacagcatatgcttgatcagctcactgatcttcagaggagggagcaaatgatgtgtgaagcaaataagtgccttagaagaaagctggaggagaccagcaaccaggtgcatggccaagtgtgggagcacggtgccaacttattactcggctacgagcggcactcctcgccacagcaagccccatcacatgttggcaatggattattctttcatcccctggaagctgcagcagagccaaccctgcagatcgggttcgctcccgagcatatgaataacttcatgccggcatggctaccctgaagatggatctttgaggcaaagggaataaataaagatgcgatggcagaatcatattgtactgcaagagtgacaattgtgtgttccactcacatatatgacctagttttgtgtgtctatatgtcgaaacccatatgtctgtgattttattatatgttatgtaagcacaaatgaaacatgccggactagttgcttttgcttgtctatgtatttgtatctgttctgtgt

SEQ ID NO: 14970 - protein, 244 aa, Zea mays subsp. mays
  misc_feature (1)..(244): Ceres Seq. ID no. 12341293
MGRGRVELKRIENKINRQVTFAKRRNGLLKKAYELSVLCDAEVALIIFSNRGKLYEFCSGQSITKTLERYEKNSYGGPDTAVQNKENELVQSSRNEYLKLKARVDNLQRTQRNLLGEDLGSLGVKELDQLEKQIDSSLSHIRSTRTQHMLDQLTDLQRREQMMCEANKCLRRKLEETSNQVHGQVWEHGANLLLGYERHSSPQQAPSHVGNGLFFHPLEAAAEPTLQIGFAPEHMNNFMPAWLP

SEQ ID NO: 14971 - DNA, 1311 bp, Zea mays subsp. mays
  misc_feature (1)..(1311): Ceres Seq. ID no. 12341306
ttcttcttcttccttcccttcctactcgagccggtggaggtcagcggggattgaggaggaggaggggaagaggcgaggcaggaaatcaagcgggaatccaagaaccgtaaggatgaccgtggtggagaggagatgaaggattaccagctggagaatctgtaccacaaataatcagtggtcgcctcataactatgaacagcatccacacctctgcagttgacttcgtgaaggcaatagaagcagtctccaaccatcagaacatctttttgaagaccagattctgcacctactacaaggctgtaatgcctaatggctcaacatactctgtaaaaaaacttaattctagtgacaagattttccaaattgggagccaggagaagttttctcatgaaattgaggttctagggaaactgaccaattcgaatgtcatggttccattggcctacatcttgactgcagattgtgcctacctaatctatgagcatgcatacaatggcactgtatctgatttgctacatggtggaaaatcagaagttatagactggccgtcacgatatagcgttgctttgggggtggcccaagggctgacatttcttcatgggtgcactcagccggttttgcttcttgatctgtcaacaaggaccatccacttgaagtcaaaaaatgagcctcagattggagatatcgagctttacaagattattgacccttccaggagtacgggaagcttttcaaccattgctggaacagttggttatattccaccagaatatgcatacactatgaggctgacgatggctggcaacgtctatagctttggagtcattttgcttgagctgctgacaggaaaaaaatcggtcagtaatggcactgagttagccaagtgggctctcagtctttcaggcaggcctgatgaaagggagcagatccttgacaccagggtctcaggaacttcaattgctgttcatagccagatgctgtcggtcctgaacatcgctctctcttgtgttgcattctctccggacgctcggccaaagatgcgcaacgtcttgaggatgctcttcaatgcaaagtgaatcagaagcagcctgcaatcagatcatagataaattttgggtgcagttccagcctcgcgtagtttatggatgtcagtgataagtatacaggctgcccttatatagttccataggagatagaaccctagcttatagtagatcattatatgttttatgaattgtgtaattaggtatctgctttgcagtgagtggctatatggtttataagctgtcaaatgtagaggtgcttataagc

SEQ ID NO: 14972 - protein, 294 aa, Zea mays subsp. mays
  misc_feature (1)..(294): Ceres Seq. ID no. 12341307
MNSIHTSAVDFVKAIEAVSNHQNIFLKTRFCTYYKAVMPNGSTYSVKKLNSSDKIFQIGSQEKFSHEIEVLGKLTNSNVMVPLAYILTADCAYLIYEHAYNGTVSDLLHGGKSEVIDWPSRYSVALGVAQGLTFLHGCTQPVLLLDLSTRTIHLKSKNEPQIGDIELYKIIDPSRSTGSFSTIAGTVGYIPPEYAYTMRLTMAGNVYSFGVILLELLTGKKSVSNGTELAKWALSLSGRPDEREQILDTRVSGTSIAVHSQMLSVLNIALSCVAFSPDARPKMRNVLRMLFNAK

SEQ ID NO: 14973 - protein, 257 aa, Zea mays subsp. mays
  misc_feature (1)..(257): Ceres Seq. ID no. 12341308
MPNGSTYSVKKLNSSDKIFQIGSQEKFSHEIEVLGKLTNSNVMVPLAYILTADCAYLIYEHAYNGTVSDLLHGGKSEVIDWPSRYSVALGVAQGLTFLHGCTQPVLLLDLSTRTIHLKSKNEPQIGDIELYKIIDPSRSTGSFSTIAGTVGYIPPEYAYTMRLTMAGNVYSFGVILLELLTGKKSVSNGTELAKWALSLSGRPDEREQILDTRVSGTSIAVHSQMLSVLNIALSCVAFSPDARPKMRNVLRMLFNAK

SEQ ID NO: 14974 - protein, 215 aa, Zea mays subsp. mays
  misc_feature (1)..(215): Ceres Seq. ID no. 12341309
MVPLAYILTADCAYLIYEHAYNGTVSDLLHGGKSEVIDWPSRYSVALGVAQGLTFLHGCTQPVLLLDLSTRTIHLKSKNEPQIGDIELYKIIDPSRSTGSFSTIAGTVGYIPPEYAYTMRLTMAGNVYSFGVILLELLTGKKSVSNGTELAKWALSLSGRPDEREQILDTRVSGTSIAVHSQMLSVLNIALSCVAFSPDARPKMRNVLRMLFNAK

SEQ ID NO: 14975 - DNA, 902 bp, Zea mays subsp. mays
  misc_feature (1)..(902): Ceres Seq. ID no. 12341316
gtacctgtacgtcttctctatagagggagcaattggagagagagaaaagaaagaaagaaacaaagaacggcgaaaaatggtcgatgccggcgacataacggccggagggccgccacgcgctcacgaggaggagcaagcgggaactccggcatacggttcggtggtcctcggcggcacttttgaccgcctccacgacggccaccgccgccttctcaaggcctccgcggatttggggagagaccggatcgtggtgggcgtctgcacgggacctatgctcgccaagaaggagtatgcggagcttattgagcccgtcgacaagcgcatcaagggtgtggaggattacatcaagtctataaagccagaactgatagtacaagtggagcctattgaggacccttatggcccatccataactgatgagaagttggatgccattattgtcagtaaggagacattaaatggtggactggctgtaaataggaaaagagaagagaaagggttcccactgttgaaggttgaggttgttgatctcctttccggcggtgtggagggggaaaaattgagttcttctgctttaaggaaacttgaggcagaacaagctcaacaaagtgaaacaaaatctggtagccttgaagcttcttagggaggaaattgaatactttgatctggttagctgaatgcacaaatacgggggtgatctgctccaagctcagtgtgaacaaaaaatatgatcagagctgacagtttggttacctttctagaggaataatcttcgaacactggcccatggccctgtaacagtattgctctaaccttctaaaatcaacctggcaacatagactctcccctactaaccaaatttacaaattttgtattggcaatgccatctgaatgttaaaagg

SEQ ID NO: 14976 - protein, 213 aa, Zea mays subsp. mays
  misc_feature (1)..(213): Ceres Seq. ID no. 12341317
YLYVFSIEGAIGEREKKERNKERRKMVDAGDITAGGPPRAHEEEQAGTPAYGSVVLGGTFDRLHDGHRRLLKASADLGRDRIVVGVCTGPMLAKKEYAELIEPVDKRIKGVEDYIKSIKPELIVQVEPIEDPYGPSITDEKLDAIIVSKETLNGGLAVNRKREEKGFPLLKVEVVDLLSGGVEGEKLSSSALRKLEAEQAQQSETKSGSLEAS

SEQ ID NO: 14977 - protein, 188 aa, Zea mays subsp. mays
  misc_feature (1)..(188): Ceres Seq. ID no. 12341318
MVDAGDITAGGPPRAHEEEQAGTPAYGSVVLGGTFDRLHDGHRRLLKASADLGRDRIVVGVCTGPMLAKKEYAELIEPVDKRIKGVEDYIKSIKPELIVQVEPIEDPYGPSITDEKLDAIIVSKETLNGGLAVNRKREEKGFPLLKVEVVDLLSGGVEGEKLSSSALRKLEAEQAQQSETKSGSLEAS

SEQ ID NO: 14978 - protein, 123 aa, Zea mays subsp. mays
  misc_feature (1)..(123): Ceres Seq. ID no. 12341319
MLAKKEYAELIEPVDKRIKGVEDYIKSIKPELIVQVEPIEDPYGPSITDEKLDAIIVSKETLNGGLAVNRKREEKGFPLLKVEVVDLLSGGVEGEKLSSSALRKLEAEQAQQSETKSGSLEAS

SEQ ID NO: 14979 - DNA, 1697 bp, Zea mays subsp. mays
  misc_feature (1)..(1697): Ceres Seq. ID no. 12341336
acaaaccgagcggcggccgccgcctcccttttcgtctctgactttttctacaagctcattcttcctcccccgatctcgggagcagccgaagcatgtcctggcggtggactctcgcgcgccgcgtcgccacgctggccgcgatcggtggcggcggtgcccaggcgcagaggctcctgtccacctcgtcagccggcggtggcactggcctcctgggtcggcactacatacccctcgcctcccagattcggagcaaggtagttggttgcagaggagctgctcttgtgagctccagatggttgcatgaggcccaataccaggttcgccaggacggggcttccagggctcaggaacagcaagatccatttgaattagtcgccgatgagctatcacttcttgcaaataggttacgatccatggtggctgctgaggtccccaaactggcatcagcagctgagtactttttcaaggtgggagcagagggaaaaagattccgacctacggttttgttgctcatggcatcagctctgaaatttcctttgtcagagtcaacagaaggaagagttctcagtatattggcagataaactccgcacaaggcaacagaacattgctgagataactgaaatgattcatgtcgcaagccttctgcatgatgatgttcttgatgatgctgatactaggcgtggtgtcagttcattgaatctcatcatggggaacaagctttctgtgctggctggtgatttccttctgtctagagcatgtgtggcccttgcagcacttgggaacacagaggtggtttctctaatggcaactgctgtagaacatctagttactggtgaaactatgcagatctcaacaagcagagagcaacggcgaagcatggagtactacctgcagaagacatactacaaaacggcatcattgatatcaaatagttgcaaggctgttgctattcttgcagggcacacaactgaggtctcggtgcttgcatatgaatatggtcgaaacctgggtctagccttccagttaattgatgatgttcttgatttcaccggcacctctgcatcccttgggaagggttcattgtctgatattcgccacggaattattactgccccgatgctatatgcgatggaggaattcccacaactgcaagaagttgttgaccggggttttgataatcctgcaaatgttgaaattgcccttgactatctccagaagagccgtgggattgaaaagacaaaagagcttgcacgagaacatgctgatcgtgcagtcaaggctatagaatctctacctgatagcgacgacgaggatgttctgacttcaaggcgtgctcttattgatatcacagaaagagtcatcacacggacaaaataggaaggtgttcggcgtccataaggtgaatggagagctgaacctcgcctttggcctagtgtttcacttggattttcttttttgtatacttcggttcattgcattcttttcgcagccaaaaccccaagttttgtgtatcattgctgaaatttaggattaagaaatggccctgcatttctgggaagcttctagaggttttggctgcatgtggcaacaaaatatatgtcaccgattgcaatggcaccagatatcgtgtagccatataagtgtgggagcattgtacccaatatacactcccgtaaagactaagatagtactacc

SEQ ID NO: 14980 - protein, 428 aa, Zea mays subsp. mays
  misc_feature (1)..(428): Ceres Seq. ID no. 12341337
MSWRWTLARRVATLAAIGGGGAQAQRLLSTSSAGGGTGLLGRHYIPLASQIRSKVVGCRGAALVSSRWLHEAQYQVRQDGASRAQEQQDPFELVADELSLLANRLRSMVAAEVPKLASAAEYFFKVGAEGKRFRPTVLLLMASALKFPLSESTEGRVLSILADKLRTRQQNIAEITEMIHVASLLHDDVLDDADTRRGVSSLNLIMGNKLSVLAGDFLLSRACVALAALGNTEVVSLMATAVEHLVTGETMQISTSREQRRSMEYYLQKTYYKTASLISNSCKAVAILAGHTTEVSVLAYEYGRNLGLAFQLIDDVLDFTGTSASLGKGSLSDIRHGIITAPMLYAMEEFPQLQEVVDRGFDNPANVEIALDYLQKSRGIEKTKELAREHADRAVKAIESLPDSDDEDVLTSRRALIDITERVITRTK

SEQ ID NO: 14981 - protein, 321 aa, Zea mays subsp. mays
  misc_feature (1)..(321): Ceres Seq. ID no. 12341338
MVAAEVPKLASAAEYFFKVGAEGKRFRPTVLLLMASALKFPLSESTEGRVLSILADKLRTRQQNIAEITEMIHVASLLHDDVLDDADTRRGVSSLNLIMGNKLSVLAGDFLLSRACVALAALGNTEVVSLMATAVEHLVTGETMQISTSREQRRSMEYYLQKTYYKTASLISNSCKAVAILAGHTTEVSVLAYEYGRNLGLAFQLIDDVLDFTGTSASLGKGSLSDIRHGIITAPMLYAMEEFPQLQEVVDRGFDNPANVEIALDYLQKSRGIEKTKELAREHADRAVKAIESLPDSDDEDVLTSRRALIDITERVITRTK

SEQ ID NO: 14982 - protein, 288 aa, Zea mays subsp. mays
  misc_feature (1)..(288): Ceres Seq. ID no. 12341339
MASALKFPLSESTEGRVLSILADKLRTRQQNIAEITEMIHVASLLHDDVLDDADTRRGVSSLNLIMGNKLSVLAGDFLLSRACVALAALGNTEVVSLMATAVEHLVTGETMQISTSREQRRSMEYYLQKTYYKTASLISNSCKAVAILAGHTTEVSVLAYEYGRNLGLAFQLIDDVLDFTGTSASLGKGSLSDIRHGIITAPMLYAMEEFPQLQEVVDRGFDNPANVEIALDYLQKSRGIEKTKELAREHADRAVKAIESLPDSDDEDVLTSRRALIDITERVITRTK

SEQ ID NO: 14983 - DNA, 1328 bp, Zea mays subsp. mays
  misc_feature (1)..(1328): Ceres Seq. ID no. 12341356
accggatgacccagcgtgcctcgtgcgcgcctcccttgtctgcaaggcttggcggaagctcctctctagccgcatcttcctccgccgctaccgcagattccacggcgcgccgcccctgcttggcttcctctacaacatctacgacgaacgcccctgtgctcgattcgtcgtcgccgccgacgccgccaccacattccccttctctgcaccggcgttcgaccaattcgatttgtggttcattgagtgccgccacgggcgcgcgctgctacaaactttcgagcggcatgcgcccgcgcgcctcgtcgtctgggacctcatcacgggcgaccagcagcacataccaattcccgtgcccgggtacccttacttctgccgcaccgcagctgttctctgcgccgcggatggctgcgaccatcttgactgccacgggggccgatacctcgtcgtcgtcataggcgcctacgaagaagatactctcaggtgggcgagcgtttactcatcagagactggcgtatgggctacgtcatcctccattcaaattgatgcctacgtcgagcaaaggcccagcctccttgccggtgacgcgctctactttagcgcacaggaaggcaaaatgattgtcaaatacgacctcaatggacagagcctacatgtgatcaatgcgccggatatgtttgagccaacagagggcattgctgtgaccgtggaggacggtggtttgggactcgccggagtgaaggatggcaacctccacctttggtcatggcaggttggtcctggcggcattgcggaatgggtgcaaggcagaatcgtaaagttgaggacgctcttccctattcttaaaccgctggactcacttgatgtgattggcttccaagagggcacagataccattttcattagcatagatatggaggtcttcgcagtcatgctcagatcggagcaggtgaagaaggtaggcaagacgggctccaaatatgccatggcaccctatgtgagcttctacactccagatcttgcgaagggcagattgctatcaccatgaagatgcagtgatccatccattaacatggccgtggcactattgacttcttaaggagatgatgagttaaagtgtttttccagtttggacggttatggaaaaaaagcaagttaccatgttcattcagaaaagtttagtttcttacctgtgcagtttaagtaaggaactgtaagaacaggatatcatcgtcaaaatggctagtctattagttaggctgttcaagagattggttggttttattgtggccttttcgctattgttattttataagggatgccctgtgtcc

SEQ ID NO: 14984 - protein, 347 aa, Zea mays subsp. mays
  misc_feature (1)..(347): Ceres Seq. ID no. 12341357
PDDPACLVRASLVCKAWRKLLSSRIFLRRYRRFHGAPPLLGFLYNIYDERPCARFVVAADAATTFPFSAPAFDQFDLWFIECRHGRALLQTFERHAPARLVVWDLITGDQQHIPIPVPGYPYFCRTAAVLCAADGCDHLDCHGGRYLVVVIGAYEEDTLRWASVYSSETGVWATSSSIQIDAYVEQRPSLLAGDALYFSAQEGKMIVKYDLNGQSLHVINAPDMFEPTEGIAVTVEDGGLGLAGVKDGNLHLWSWQVGPGGIAEWVQGRIVKLRTLFPILKPLDSLDVIGFQEGTDTIFISIDMEVFAVMLRSEQVKKVGKTGSKYAMAPYVSFYTPDLAKGRLLSP

SEQ ID NO: 14985 - DNA, 2052 bp, Zea mays subsp. mays
  misc_feature (1)..(2052): Ceres Seq. ID no. 12341362
tctcacctccctcgcactccattggatttgggggagctcggggggcgcgggccactgatgatccccggaacgagcaccgatccgtggcgaggaaactccaccgggtagccggcccgggagcgcggggcacggcgatggcgggcgccggggcagcggccaatggcggcaggaacaagtacgcggttctcgatcggagcgaggagcgacagacggacgctaggacggagcggcggaggaggccgttggcgcccgagagcgagagggggagaagggagcggttcgtgtacgcctgcgcggtcttcgcctccctcaacgccgtcctgctcggctacgatgttggcgtaatgagtggcgcgatcatctacatgcagaaagacctccacataaccgagtttcagcaagaaatcctagtaggctgtctgagcgtggtctcactcttgggaagcctatcaggggggcgaacatctgacgcaattggcagaaaatggacaatgggcctcggtgcaattgtgttccagataggcgcgaccatcatgacgtttgctccatcattcactgtgcttatgatagggaggctccttgctggggttggcattggctttggtgccatggtatctggagtgtacattgctgagatctcccccgcaggtgcccgagggacgctcacatcccttcctgagatctgcatcaattttgggatccttcttggctacgtttccaattatgccttctcaggcctttctgagcacatcaattggaggattatgcttggtgtcggtatcctcccatcagtcttcattggctttgcgcttttcgtgatcccggagtcccctaggtggttgatgatggagaagagagtttcagaagcaagggcagtgctgctgcagattagcgagtctgaagctgaagctgaagaacggctggctgagatcgaggaagccgcaggtctgatgaaatcaatgaaatctgaggacaaagaagtgtggagggaacttttgaacccgtctcccgccgtccgtcggatgctgtacgctggttgcggtattcagttgttccaacagatcacaggaattgatgctactgtctattacagcccaacaattttcaaagatgctggcatcaagtctgatcaggagcttctcgctgcaactgttgctgtgggtttcactaagacagtgttcatcttggttgcaattttcctaattgatagagttggacggaagccacttctttatgtgagcaccattggcatgaccatctgcttatttctcttgggggttgcacttacactgcaaaaccatgcggtggggcttatgtctccacgtgttggtatcgacctagcaattttcgcagtttgtggcaacgtggcattcttttcaattggcatgggaccaatatgttgggtcttgtcctcagaggtatttcctttaagattacgagctcaagggtcagcgcttggtcaagtaggtggtagagtgagcagtggtttggtttccatgtcattcctttctatggcccgtgctatatcagtggcaggaatgttcttcgtctttgctgcaatatccactatctctgtactgtttgtgtacttttgtgtgccagaaacaaaagggaaaacactggagcagatcgaaatgatgtttgaaagtggggacgaatggggaggaggtgaaattgagcttgaggatacacagcatttaataccgagtatcaagaagtctgtgcctcttggttgatatttgtagcatcaataaaattcttattagctccatgtttcaatgacgagccaaccaaaccagctggattctgaactttggtttcgagtgatctggccacactgagccacgaccgatctgataaaagataagcttgatagacataggtgcaacgtagaagattaattgtgatgttagttcaaaatgtcaatgattttactgggaggcggtctgtaatgtatgatcttacatctcttgtaccttcttacatctctcgtacctcccagcggaagaatatactcgcagaaaagttttctactgtgcatttttttataac

SEQ ID NO: 14986 - protein, 577 aa, Zea mays subsp. mays
  misc_feature (1)..(577): Ceres Seq. ID no. 12341363
SPPSHSIGFGGARGARATDDPRNEHRSVARKLHRVAGPGARGTAMAGAGAAANGGRNKYAVLDRSEERQTDARTERRRRPLAPESERGRRERFVYACAVFASLNAVLLGYDVGVMSGAIIYMQKDLHITEFQQEILVGCLSVVSLLGSLSGGRTSDAIGRKWTMGLGAIVFQIGATIMTFAPSFTVLMIGRLLAGVGIGFGAMVSGVYIAEISPAGARGTLTSLPEICINFGILLGYVSNYAFSGLSEHINWRIMLGVGILPSVFIGFALFVIPESPRWLMMEKRVSEARAVLLQISESEAEAEERLAEIEEAAGLMKSMKSEDKEVWRELLNPSPAVRRMLYAGCGIQLFQQITGIDATVYYSPTIFKDAGIKSDQELLAATVAVGFTKTVFILVAIFLIDRVGRKPLLYVSTIGMTICLFLLGVALTLQNHAVGLMSPRVGIDLAIFAVCGNVAFFSIGMGPICWVLSSEVFPLRLRAQGSALGQVGGRVSSGLVSMSFLSMARAISVAGMFFVFAAISTISVLFVYFCVPETKGKTLEQIEMMFESGDEWGGGEIELEDTQHLIPSIKKSVPLG

SEQ ID NO: 14987 - protein, 533 aa, Zea mays subsp. mays
  misc_feature (1)..(533): Ceres Seq. ID no. 12341364
MAGAGAAANGGRNKYAVLDRSEERQTDARTERRRRPLAPESERGRRERFVYACAVFASLNAVLLGYDVGVMSGAIIYMQKDLHITEFQQEILVGCLSVVSLLGSLSGGRTSDAIGRKWTMGLGAIVFQIGATIMTFAPSFTVLMIGRLLAGVGIGFGAMVSGVYIAEISPAGARGTLTSLPEICINFGILLGYVSNYAFSGLSEHINWRIMLGVGILPSVFIGFALFVIPESPRWLMMEKRVSEARAVLLQISESEAEAEERLAEIEEAAGLMKSMKSEDKEVWRELLNPSPAVRRMLYAGCGIQLFQQITGIDATVYYSPTIFKDAGIKSDQELLAATVAVGFTKTVFILVAIFLIDRVGRKPLLYVSTIGMTICLFLLGVALTLQNHAVGLMSPRVGIDLAIFAVCGNVAFFSIGMGPICWVLSSEVFPLRLRAQGSALGQVGGRVSSGLVSMSFLSMARAISVAGMFFVFAAISTISVLFVYFCVPETKGKTLEQIEMMFESGDEWGGGEIELEDTQHLIPSIKKSVPLG

SEQ ID NO: 14988 - protein, 463 aa, Zea mays subsp. mays
  misc_feature (1)..(463): Ceres Seq. ID no. 12341365
MSGAIIYMQKDLHITEFQQEILVGCLSVVSLLGSLSGGRTSDAIGRKWTMGLGAIVFQIGATIMTFAPSFTVLMIGRLLAGVGIGFGAMVSGVYIAEISPAGARGTLTSLPEICINFGILLGYVSNYAFSGLSEHINWRIMLGVGILPSVFIGFALFVIPESPRWLMMEKRVSEARAVLLQISESEAEAEERLAEIEEAAGLMKSMKSEDKEVWRELLNPSPAVRRMLYAGCGIQLFQQITGIDATVYYSPTIFKDAGIKSDQELLAATVAVGFTKTVFILVAIFLIDRVGRKPLLYVSTIGMTICLFLLGVALTLQNHAVGLMSPRVGIDLAIFAVCGNVAFFSIGMGPICWVLSSEVFPLRLRAQGSALGQVGGRVSSGLVSMSFLSMARAISVAGMFFVFAAISTISVLFVYFCVPETKGKTLEQIEMMFESGDEWGGGEIELEDTQHLIPSIKKSVPLG

SEQ ID NO: 14989 - DNA, 1406 bp, Zea mays subsp. mays
  misc_feature (1)..(1406): Ceres Seq. ID no. 12341374
aaaaattgcaagagtttgagccaacacacacagagagaggacaactcctcacaactctcccttccctcctgtaggggccaaaagggttagagagtaggagaagtagttccctagcccaacacaagaaaaacaagctcgatctcctcatcaccctaatccaagcaactgctttgtgtgttgggaaattcttgtgacccctgttatattattatccgtgtagctactagcttcattcccccctttgtacccatcaaatggctggcatgtctctgcaacacccctgggcgtttgctttcggtctactaggtaacgtcatctccttcatgaccttcctggccccgataccgacgttctaccgcatctacaagagcaagtcgacggaaggcttccagtcggttccctacgtggttgccctgttcagcgccatgctgtggatcttctacgcactgatcaagtccaacgagaccttcctcatcaccatcaacgccgccggctgcgtcatcgagaccatctacgtcgtcatgtacttcgtctacgcgcccaagaaagccaagctgttcacggccaagatcatggtcctcctcaatggcggcgtctttggggtcatcctcctgctcacccttctcctcttcaagggcagtaagcgcgttgtgctgcttggctggatctgcgtcggtttctccgtcagtgtcttcgtcgcgccactcagcatcatgagacgagtgatccagacgaagagcgtggagtacatgcccttctccctctccctctcgctcaccctcagcgccgtcgtctggttcctctacggcctcctcatcaaggacaaatacgtcgcgcttccaaacatcctggggttcaccttcggcgtggtccagatggtgctctacgtgttgtacatgaacaagacgccggtggcggcgactgccgagggcaaggatgccggcaagctttcctcagctgcagacgagcacgtcctcgtcaacatcgccaagctcagcccagccctcccggagaggagctccggggtgcacccagtcacccagatggcgggcgttcccgtcaggagctgcgctgctgaagcaaccgcgccggcgatgctgcccaacagggacgtggtcgacgtcttcgtcagccgacacagccccgccgtccacgtggcatagattctcgatcgatcgcgtgcatggcccatgcatgcgcccgccacacgtacgctagcttttatatattcgaaggacttgctgctggtcgtgagcatatatatgatggagaaaatgattaagtagtatatatgtaagtaattaactgccatggaagcttgctaatggatggaggcagaggccagaacgatgaagggggaagctatacatatatgtgtgtaatatagatatatggggtttgtgtcc

SEQ ID NO: 14990 - protein, 302 aa, Zea mays subsp. mays
  misc_feature (1)..(302): Ceres Seq. ID no. 12341375
MAGMSLQHPWAFAFGLLGNVISFMTFLAPIPTFYRIYKSKSTEGFQSVPYVVALFSAMLWIFYALIKSNETFLITINAAGCVIETIYVVMYFVYAPKKAKLFTAKIMVLLNGGVFGVILLLTLLLFKGSKRVVLLGWICVGFSVSVFVAPLSIMRRVIQTKSVEYMPFSLSLSLTLSAVVWFLYGLLIKDKYVALPNILGFTFGVVQMVLYVLYMNKTPVAATAEGKDAGKLSSAADEHVLVNIAKLSPALPERSSGVHPVTQMAGVPVRSCAAEATAPAMLPNRDVVDVFVSRHSPAVHVA

SEQ ID NO: 14991 - protein, 299 aa, Zea mays subsp. mays
  misc_feature (1)..(299): Ceres Seq. ID no. 12341376
MSLQHPWAFAFGLLGNVISFMTFLAPIPTFYRIYKSKSTEGFQSVPYVVALFSAMLWIFYALIKSNETFLITINAAGCVIETIYVVMYFVYAPKKAKLFTAKIMVLLNGGVFGVILLLTLLLFKGSKRVVLLGWICVGFSVSVFVAPLSIMRRVIQTKSVEYMPFSLSLSLTLSAVVWFLYGLLIKDKYVALPNILGFTFGVVQMVLYVLYMNKTPVAATAEGKDAGKLSSAADEHVLVNIAKLSPALPERSSGVHPVTQMAGVPVRSCAAEATAPAMLPNRDVVDVFVSRHSPAVHVA

SEQ ID NO: 14992 - protein, 279 aa, Zea mays subsp. mays
  misc_feature (1)..(279): Ceres Seq. ID no. 12341377
MTFLAPIPTFYRIYKSKSTEGFQSVPYVVALFSAMLWIFYALIKSNETFLITINAAGCVIETIYVVMYFVYAPKKAKLFTAKIMVLLNGGVFGVILLLTLLLFKGSKRVVLLGWICVGFSVSVFVAPLSIMRRVIQTKSVEYMPFSLSLSLTLSAVVWFLYGLLIKDKYVALPNILGFTFGVVQMVLYVLYMNKTPVAATAEGKDAGKLSSAADEHVLVNIAKLSPALPERSSGVHPVTQMAGVPVRSCAAEATAPAMLPNRDVVDVFVSRHSPAVHVA

SEQ ID NO: 14993 - DNA, 1576 bp, Zea mays subsp. mays
  misc_feature (1)..(1576): Ceres Seq. ID no. 12341390
atccgccgcttccgcttcgtcccaaatcccttttggcgggagacgagcagcaggctgcctccacttcccgcgcaaagcagtaaatcggagtaaccatggacggcggatcctccacaccggcgagccccccaccgacggtatccgcgtcggcggcgaatatggaggagtaccggaactggaagaagaacgcggcggtgctttacgacctcgtcatctcccacccgctcgagtggccatcgctcaccgtgcagtggctcccatcggagtcctcggcccgcagccaccggctcgtcgtgggtacgcacacctccgacgaggcccccaacaacctcatggtcttggacgcggtgctaccgctcccacctcgcctcgctgcagccgtcgctgcctcgggcggcgccgtcccgttcccatccgtatccgtctcgcgcgtggcgccacaccgtggcgaggtcaaccgcgcgcgctgcatgccgcagcgtccctatacggtggccaccaaaacgtgcgtcgacgaggtgcacgtgtaccatctcggcgatgacgacggcagcgggaagagcggcgccgaagttgtgctcaaggggcatgaggcggagggttatggcttgtcatggagcccgatgaaggaggggtggctgctgagcggctcgtatgataagaagatttgcttgtgggacatctcctctgggagtggcgctcctgttctggatgcacaacaggtgtttgtggctcatgaggatctcgttgaagatgttgcttggcacctgaaggatgaacatatatttggatctgttggggatgactgtaagttgatgatgtgggacttgcgtacaaacaaaccagaacaatctattcttgcacatcgaaaggaggtcaactctttgtcattcaatccattcaatgaatggatattggctacagcatctggagacacaactatcaacctatttgacatgcgaaaactatctagaagcttgcatacttttgacagtcatgaggcggaggtgtttcaggttgaatggaatccaaatttggctactgtattagcttcatctgccgcagacaagagagtgatgatatgggatattaataggattggcgatgagcagtcagaggaagacgcagacgacggaccaccggagctgctgttcgttcatggaggccacacagacaagatatcagagctgtcgtggaatcctagcgagaaatgggccattgccagcgtgtctgaagacaacatcctgcagatatgggagatggcagaaagcatatactgtgatgacctctccatgcaggttaactgactcgtgcctcgaagcataaagccagagtgggcatctataagaactctttaaatccgtgacatgcattaggctatctccagcagatctcctatcacatcctttatgttatcccctattttcaaacttctctctgcaaagagtcagttattgacttgagtaatcttgatagtctgaatctgattgagcctttaggcataaatgtaactttgaaattgtagggtcagggttgacttcttttccagtttggaacttactactccctgcagttc

SEQ ID NO: 14994 - protein, 403 aa, Zea mays subsp. mays
  misc_feature (1)..(403): Ceres Seq. ID no. 12341391
MDGGSSTPASPPPTVSASAANMEEYRNWKKNAAVLYDLVISHPLEWPSLTVQWLPSESSARSHRLVVGTHTSDEAPNNLMVLDAVLPLPPRLAAAVAASGGAVPFPSVSVSRVAPHRGEVNRARCMPQRPYTVATKTCVDEVHVYHLGDDDGSGKSGAEVVLKGHEAEGYGLSWSPMKEGWLLSGSYDKKICLWDISSGSGAPVLDAQQVFVAHEDLVEDVAWHLKDEHIFGSVGDDCKLMMWDLRTNKPEQSILAHRKEVNSLSFNPFNEWILATASGDTTINLFDMRKLSRSLHTFDSHEAEVFQVEWNPNLATVLASSAADKRVMIWDINRIGDEQSEEDADDGPPELLFVHGGHTDKISELSWNPSEKWAIASVSEDNILQIWEMAESIYCDDLSMQVN

SEQ ID NO: 14995 - protein, 382 aa, Zea mays subsp. mays
  misc_feature (1)..(382): Ceres Seq. ID no. 12341392
MEEYRNWKKNAAVLYDLVISHPLEWPSLTVQWLPSESSARSHRLVVGTHTSDEAPNNLMVLDAVLPLPPRLAAAVAASGGAVPFPSVSVSRVAPHRGEVNRARCMPQRPYTVATKTCVDEVHVYHLGDDDGSGKSGAEVVLKGHEAEGYGLSWSPMKEGWLLSGSYDKKICLWDISSGSGAPVLDAQQVFVAHEDLVEDVAWHLKDEHIFGSVGDDCKLMMWDLRTNKPEQSILAHRKEVNSLSFNPFNEWILATASGDTTINLFDMRKLSRSLHTFDSHEAEVFQVEWNPNLATVLASSAADKRVMIWDINRIGDEQSEEDADDGPPELLFVHGGHTDKISELSWNPSEKWAIASVSEDNILQIWEMAESIYCDDLSMQVN

SEQ ID NO: 14996 - protein, 324 aa, Zea mays subsp. mays
  misc_feature (1)..(324): Ceres Seq. ID no. 12341393
MVLDAVLPLPPRLAAAVAASGGAVPFPSVSVSRVAPHRGEVNRARCMPQRPYTVATKTCVDEVHVYHLGDDDGSGKSGAEVVLKGHEAEGYGLSWSPMKEGWLLSGSYDKKICLWDISSGSGAPVLDAQQVFVAHEDLVEDVAWHLKDEHIFGSVGDDCKLMMWDLRTNKPEQSILAHRKEVNSLSFNPFNEWILATASGDTTINLFDMRKLSRSLHTFDSHEAEVFQVEWNPNLATVLASSAADKRVMIWDINRIGDEQSEEDADDGPPELLFVHGGHTDKISELSWNPSEKWAIASVSEDNILQIWEMAESIYCDDLSMQVN

SEQ ID NO: 14997 - DNA, 1377 bp, Zea mays subsp. mays
  misc_feature (1)..(1377): Ceres Seq. ID no. 12341432
acaatccatgcggcggcatatggcgcccatcaaggagcaaaaacacacgacaagcgcagaacagcaggtgatgctggatgccgagctccagctgtggaaccacaccttcggctacgtcaagtccatggcgctcaaggccgcgatcgacctcggcatacccgaggccatccaccagcacggcggcacggccaccctcccacaaatagtcaccagggtcacgctccacccgtccaagacaccatgcctgcggcgcctcatgcgcgtgctcaccctcaccggcgtcttcggcgcgcaggaggcgcacgacgacgacggcggctgtgacgacgagctcgtctacacgctcacgccggcatcccgtctcctcgtcggctcaccggggcagaacgtgggccctttcctgaccgtgatgctcggccccatcttcatgtcgtccttcctcgacctccgcgggtggttccagcacgagacgccggacccgtcccccttcaagatgacgcacgggcgggacatatgggagctggccgcccacgacgccgccttcggcaggctcttcgacgccggcatggtcgctgacagcagcttcatcatggacgtcgtggtcagggagtgtggtggcgtgttcgaggggatcagctccctcgtcgacgtcgccggcgggctcggtggcgccacacagaccatcgcgaaggcgttcccgaacctggagtgcagcgtgctggatctcccaaacgtcgtcgccagcgctcccactgataccgccgtgaagtatgtcgccggtgacatgttcgagagcgttccggcggcagacgctgtcttcctcaagggtgatgccgactgtgtcaagatactgaagaactgcaagaaggccataccggctcaaggaggcaaggtgataatactggatatcgtggttggagcagggtcgtcatgcgaccggaagaatgtggagacgcaatgcttgtttgatctcttcatcatgtttatcaacggtgccgaacgagatgagcgacagtggaagaagatcatctttgaagctggctttacatcttacaagatcatacctgtcctaggcattagatccataattgaagtctgcctatagaaactaatataattaaggatgaaaacgggtcaggttcgggttgagttgagcaaaattctacccgggatggcatccttaaagtctacataaacccactcacgatcgtacccacgagtgcaattctaaacccgcacgtaaaccggtcaggtttgaggtattgtatacttttaaataataattcaactctctctactactgtacgtcacaccttttccttcgttcacctctccttgctcccccatatttaaatagtaataaagttaaaattattc

SEQ ID NO: 14998 - protein, 367 aa, Zea mays subsp. mays
  misc_feature (1)..(367): Ceres Seq. ID no. 12341433
QSMRRHMAPIKEQKHTTSAEQQVMLDAELQLWNHTFGYVKSMALKAAIDLGIPEAIHQHGGTATLPQIVTRVTLHPSKTPCLRRLMRVLTLTGVFGAQEAHDDDGGCDDELVYTLTPASRLLVGSPGQNVGPFLTVMLGPIFMSSFLDLRGWFQHETPDPSPFKMTHGRDIWELAAHDAAFGRLFDAGMVADSSFIMDVVVRECGGVFEGISSLVDVAGGLGGATQTIAKAFPNLECSVLDLPNVVASAPTDTAVKYVAGDMFESVPAADAVFLKGDADCVKILKNCKKAIPAQGGKVIILDIVVGAGSSCDRKNVETQCLFDLFIMFINGAERDERQWKKIIFEAGFTSYKIIPVLGIRSIIEVCL

SEQ ID NO: 14999 - protein, 365 aa, Zea mays subsp. mays
  misc_feature (1)..(365): Ceres Seq. ID no. 12341434
MRRHMAPIKEQKHTTSAEQQVMLDAELQLWNHTFGYVKSMALKAAIDLGIPEAIHQHGGTATLPQIVTRVTLHPSKTPCLRRLMRVLTLTGVFGAQEAHDDDGGCDDELVYTLTPASRLLVGSPGQNVGPFLTVMLGPIFMSSFLDLRGWFQHETPDPSPFKMTHGRDIWELAAHDAAFGRLFDAGMVADSSFIMDVVVRECGGVFEGISSLVDVAGGLGGATQTIAKAFPNLECSVLDLPNVVASAPTDTAVKYVAGDMFESVPAADAVFLKGDADCVKILKNCKKAIPAQGGKVIILDIVVGAGSSCDRKNVETQCLFDLFIMFINGAERDERQWKKIIFEAGFTSYKIIPVLGIRSIIEVCL

SEQ ID NO: 15000 - protein, 361 aa, Zea mays subsp. mays
  misc_feature (1)..(361): Ceres Seq. ID no. 12341435
MAPIKEQKHTTSAEQQVMLDAELQLWNHTFGYVKSMALKAAIDLGIPEAIHQHGGTATLPQIVTRVTLHPSKTPCLRRLMRVLTLTGVFGAQEAHDDDGGCDDELVYTLTPASRLLVGSPGQNVGPFLTVMLGPIFMSSFLDLRGWFQHETPDPSPFKMTHGRDIWELAAHDAAFGRLFDAGMVADSSFIMDVVVRECGGVFEGISSLVDVAGGLGGATQTIAKAFPNLECSVLDLPNVVASAPTDTAVKYVAGDMFESVPAADAVFLKGDADCVKILKNCKKAIPAQGGKVIILDIVVGAGSSCDRKNVETQCLFDLFIMFINGAERDERQWKKIIFEAGFTSYKIIPVLGIRSIIEVCL

SEQ ID NO: 15001 - DNA, 1024 bp, Zea mays subsp. mays
  misc_feature (1)..(1024): Ceres Seq. ID no. 12341440
ataaattcctccgctccccttcgccgcttcctgtcgcgccgccgctcccctcccaacccactagctcaaaaccctagagctctcgcctgctcgcctccgccgccggagcgagctccccatcttcatccgtcaaccatggcgacccagatcagcaagaagaagaagttcgtcagcgacggtgttttctacgccgagctcaatgagatgctgacgcgggagctggcggaggacggctactctggcgtggaggtgcgcgtcacgccgatgcgcacggagatcatcatccgcgccacgcgcacgcagaacgtgctcggcgagaagggccgtaggatcagggagctcacctccgtcgtccagaagaggttcaacttccctgagaatggcgttgagctttatgccgagaaggtcgtcaaccgtgggctctgtgccatcgcgcaggccgagtccctccgttacaagctcctcggtggccttgccgtccgcagggcttgctacggtgttcttcgttatgttatggagagtggtgccaagggttgtgaggtgatcgtgagtggaaagctcagggcccaaagagccaagtccatgaagttcaaggatggctacatgatctcatctggtcaaccagtgaacgagtacattgactcggctgtgagacacgttcttctcagacagggtgttcttggcatcaaggtgaagatcatgcttgactgggacccgaagggcaaggttggcccgatcactcctcttccggacctggtgaccatccacaccccgaaggacgaggacgagccgcgccctccggtcttggcacctcctgaggtgtaaggtcccaactgtgtccttgaaatggcagtttgatcgggtcctagataggtttctatcttacgataaggacaatgctaaggcagttggttaccttaatctttatggacagatgctatgtgttgcttctgtggcacttttgtttaagctaagttttgcggagacaagatacttatatatgttcccgatgaaattatggttc

SEQ ID NO: 15002 - protein, 274 aa, Zea mays subsp. mays
  misc_feature (1)..(274): Ceres Seq. ID no. 12341441
INSSAPLRRFLSRRRSPPNPLAQNPRALACSPPPPERAPHLHPSTMATQISKKKKFVSDGVFYAELNEMLTRELAEDGYSGVEVRVTPMRTEIIIRATRTQNVLGEKGRRIRELTSVVQKRFNFPENGVELYAEKVVNRGLCAIAQAESLRYKLLGGLAVRRACYGVLRYVMESGAKGCEVIVSGKLRAQRAKSMKFKDGYMISSGQPVNEYIDSAVRHVLLRQGVLGIKVKIMLDWDPKGKVGPITPLPDLVTIHTPKDEDEPRPPVLAPPEV

SEQ ID NO: 15003 - protein, 229 aa, Zea mays subsp. mays
  misc_feature (1)..(229): Ceres Seq. ID no. 12341442
MATQISKKKKFVSDGVFYAELNEMLTRELAEDGYSGVEVRVTPMRTEIIIRATRTQNVLGEKGRRIRELTSVVQKRFNFPENGVELYAEKVVNRGLCAIAQAESLRYKLLGGLAVRRACYGVLRYVMESGAKGCEVIVSGKLRAQRAKSMKFKDGYMISSGQPVNEYIDSAVRHVLLRQGVLGIKVKIMLDWDPKGKVGPITPLPDLVTIHTPKDEDEPRPPVLAPPEV

SEQ ID NO: 15004 - protein, 206 aa, Zea mays subsp. mays
  misc_feature (1)..(206): Ceres Seq. ID no. 12341443
MLTRELAEDGYSGVEVRVTPMRTEIIIRATRTQNVLGEKGRRIRELTSVVQKRFNFPENGVELYAEKVVNRGLCAIAQAESLRYKLLGGLAVRRACYGVLRYVMESGAKGCEVIVSGKLRAQRAKSMKFKDGYMISSGQPVNEYIDSAVRHVLLRQGVLGIKVKIMLDWDPKGKVGPITPLPDLVTIHTPKDEDEPRPPVLAPPEV

SEQ ID NO: 15005 - DNA, 1139 bp, Zea mays subsp. mays
  misc_feature (1)..(1139): Ceres Seq. ID no. 12341467
atatatagaatcttttaaaatgcaagggtgtcatactcgcagtcgcacagacaagtagataatcgctcgagccatcgagggccagcctgtgctgttggaagcgtggatgcggccgggctcagccgttgatcgttgcgcggtggccgtgagtcgtgtgactcgtgaccaaccaaaccgttcagctcccccatgacgtgtgcgtgacctcactctcagccagagatccacaaccggtgaaccgccgcgaatcctcggcctcgcatccgccggtggccgccgggggcgtggagcaccaacttttcacctgctgtgagacccccactcacctccacggaagcacacacccgaagaagaagagaaggcgagaaccatggcgccacctgccgtgtccatctcgcccatctgctgcgtcccataccccgcctccggcccccgtcgcgctcgcacgcccccctcctccctcagaaggttccccagattcgcagcccggaggagtagcgggggcggcgggggcacgcgcccggagcccaaaccagatgacaacgagagcaaagccgtcctcgacgccttcttcctcgggaaggccttcgcagaggcgctcacggagcgggtcgagtcggtggtgggcgaggtgttcagcgtcgtcgggcagtggcaggccgagcagcagaagcaagtgcaggatttccaggaggaagtagttcaaagagcccaaaaggctaaggagaaagctgcaactgaagtcagtgatgataagggggcgaagtctctaagggaaccttcagcaacaattgtggcgactacaactacgtcatctcccccagctactcccacacagacagaatagttgtagacttcttggtggcagtgaagagttgttgctgcaagttgatgcagttctttgtgcagccaaaaagtctgtagttggctttcacatgatatatgtcgatggatagtatatctgctagtgaaacatccagcatttctagtgacaaacccagcatctcaattataaaaaaaaactaatttacatttttttcatatgaatggaagtactttttgcatctagtgcgttctggtatatgtgtaatatatgttatatgccattcttaagaaatgcagcttcaaaaaccttgggt

SEQ ID NO: 15006 - protein, 158 aa, Zea mays subsp. mays
  misc_feature (1)..(158): Ceres Seq. ID no. 12341468
MAPPAVSISPICCVPYPASGPRRARTPPSSLRRFPRFAARRSSGGGGGTRPEPKPDDNESKAVLDAFFLGKAFAEALTERVESVVGEVFSVVGQWQAEQQKQVQDFQEEVVQRAQKAKEKAATEVSDDKGAKSLREPSATIVATTTTSSPPATPTQTE

SEQ ID NO: 15007 - DNA, 1732 bp, Zea mays subsp. mays
  misc_feature (1)..(1732): Ceres Seq. ID no. 12341485
aacttcgacccggccggccctatcaaaagctggccccttccacagcgcactccctcaccttcctccacggctccaccatcccctcccctgccctgcccccaccgccccgcttccttccgccttgctccgttgcttcctcccaccacagtccactccactcgccggccctgcagctcagtatttgactgagactggtggtggagctgctagcagcgagcctgctacttcctggtcctgacggtgcgttcagacctcagaccagtgccgacgacgagctgtgaggagagggcaaggaagcaagcctgtgaggaaggcggcgatggagaggtacgaggtgatcaaggacataggatcgggcaacttcggggtggccaagctggtccgggacgtcaggaccaaggagctcttcgccgtcaagttcatcgagcgggggatgaagattgatgagaatgtccaaagggagatcatgaaccacaggtcactgaggcatccaaacatagttaaatttaaggaggttgtgctaactcccacacatttggccatagttatggaatatgctgctggtggtgagctatttgaaaggatctgtaatgctggaagatttagtgaggatgaggcgagatttttcttccaacaactgatttcaggagttagttattgccactcaatgcaaatatgccatagagatttgaaactagaaaacactctcctggatgatagtatagcacctcggctaaagatatgtgattttggttactccaagtcctctgtgttgcactctcaaccaaaatcaactgtcgggacaccagcttacattgctcctgaggtccttgctagaaaggaatatgatggaaaggtcgccgatgtttggtcatgtggagttactctgtatgtgatgcttgttggtgcctatccctttgaggaccccgacgaaccgaagaatttccgcaagacgcttactcggattatcagcgtccagtacgcggttcctgattttgtccgagtttcaatggagtgcaggcatctgctgtctcggatctttgtggcgaaacctgagcaacggataaccatcccagagatcaagaaccacccatggttcttgaagaacctgcccatcgagatgaccgacgagtaccagatgaacctacagctagtcgacatgaatgtcccctcgcaaagcctggaggagatcatgtccatcatactggaggcccggaagcccggcgacgggctgaagcatgcgggacagctccccggccttgggagcatggagctggatgacattgatgttgacgacatagacgttgaggacagtggcgactttgtatgtgccttgtgacgcggttcaggctgtccggcaccgttgctgcggtggactctcccccactctcctggtctttgtgtcttgctgttattccatgttgtttgtttcagcgagctccgagctcccattttgttgttgtaatatcacatgttttgtgtaaccaaggtagtgacgctgtggataaataatagacgttatgtgttgtattcttgctgaattgttgttcagctccttctgtttgccctgtatgaactgggcagtttcatgagtaccacaatgtgtatgttgatggctctgtcttcccttgtctcagcctgatattttgacctgctgcatgtagccaatgtgttttttcttgtatttttgctagaagcaatcttatgagttacgagtactattaccaccctg

SEQ ID NO: 15008 - protein, 339 aa, Zea mays subsp. mays
  misc_feature (1)..(339): Ceres Seq. ID no. 12341486
MERYEVIKDIGSGNFGVAKLVRDVRTKELFAVKFIERGMKIDENVQREIMNHRSLRHPNIVKFKEVVLTPTHLAIVMEYAAGGELFERICNAGRFSEDEARFFFQQLISGVSYCHSMQICHRDLKLENTLLDDSIAPRLKICDFGYSKSSVLHSQPKSTVGTPAYIAPEVLARKEYDGKVADVWSCGVTLYVMLVGAYPFEDPDEPKNFRKTLTRIISVQYAVPDFVRVSMECRHLLSRIFVAKPEQRITIPEIKNHPWFLKNLPIEMTDEYQMNLQLVDMNVPSQSLEEIMSIILEARKPGDGLKHAGQLPGLGSMELDDIDVDDIDVEDSGDFVCAL

SEQ ID NO: 15009 - protein, 301 aa, Zea mays subsp. mays
  misc_feature (1)..(301): Ceres Seq. ID no. 12341487
MKIDENVQREIMNHRSLRHPNIVKFKEVVLTPTHLAIVMEYAAGGELFERICNAGRFSEDEARFFFQQLISGVSYCHSMQICHRDLKLENTLLDDSIAPRLKICDFGYSKSSVLHSQPKSTVGTPAYIAPEVLARKEYDGKVADVWSCGVTLYVMLVGAYPFEDPDEPKNFRKTLTRIISVQYAVPDFVRVSMECRHLLSRIFVAKPEQRITIPEIKNHPWFLKNLPIEMTDEYQMNLQLVDMNVPSQSLEEIMSIILEARKPGDGLKHAGQLPGLGSMELDDIDVDDIDVEDSGDFVCAL

SEQ ID NO: 15010 - protein, 290 aa, Zea mays subsp. mays
  misc_feature (1)..(290): Ceres Seq. ID no. 12341488
MNHRSLRHPNIVKFKEVVLTPTHLAIVMEYAAGGELFERICNAGRFSEDEARFFFQQLISGVSYCHSMQICHRDLKLENTLLDDSIAPRLKICDFGYSKSSVLHSQPKSTVGTPAYIAPEVLARKEYDGKVADVWSCGVTLYVMLVGAYPFEDPDEPKNFRKTLTRIISVQYAVPDFVRVSMECRHLLSRIFVAKPEQRITIPEIKNHPWFLKNLPIEMTDEYQMNLQLVDMNVPSQSLEEIMSIILEARKPGDGLKHAGQLPGLGSMELDDIDVDDIDVEDSGDFVCAL

SEQ ID NO: 15011 - DNA, 1461 bp, Zea mays subsp. mays
  misc_feature (1)..(1461): Ceres Seq. ID no. 12341538
cttttctttccagcctcaaatcccgtttttcccatcccgtgaagaaccatggcacggtactccccaccgtcgctgcgctgcttcttccgctgcgccgccagctccgcctcccgagccgtaggcagcggcactcggaagaagaaccttgtattcttgggctctccccaggtcgccgcctcggtcctggacaagctgctgggcgcgtccggctccccggaatccgcatttcaggtggctgccgtcgtgacgcagccgccggccgccaagaacagggggaggaagttgatgccgtcggccgtcgcgcagttagcgctcgatcgcgggttcccagaggaactcatcttcacgccagaacgagcccgagaagagtcgttcctgtcggccttgaaggaagtggaaccggatgtttgcataactgctgcttacgggaacattctgccccagaaatttcttgatatcccatcgtgcggcacagttaatatacacccaagtttgttgcctctatatcgtggtgcagctcctgtgcagagggcactgcaggatggtgttgcagaaacaggtgtttcccttgcatatactgtccgtgcattggatgcaggtccagtgattgcgtgtgaaaggttttctgttgatgaatgtattaaggcaccagagctactttctatgctgtttcatttaggatccaagctattgattaatgaacttccatccattcttgatggttcggctaaagataaggcacaaccacaggatgactccaaagctacactggcaccaaagttaaattctgaggagtcatggctatcgtttgacgaagaagctaaagtgctgcataacaaggtgcgggcatttgcaggatggcctgggacgcgcgcaaagctgcaactcataaaccaaaacagtgtacccgatgtactagagattaaggttatcagcacgaaggtttcaacatcatgtgtcaaagttggagatgaaaacgagatactattctctgggagctcgttgctgattccttgcagtggttcgacctggctcgaggtgttggagcttcaactccctggaaagaaagtaacaaaggcacaagatttttggaatggtttgcgtggtcagaagctgatgaaattgccatagggggatatctgcattcgcagcacaggagtgtgcctatatgcatagcaagggttattgaggtcagtcattgcgcgaacataagcagggtagtgctagaagcctatatgcggagatctcggttttatgactaccttttccttctggtaaacttggtgctataaactcgtaactcagttacattaggcatgccatttgtattgcttcctcaatttcagaaaacacactgctgtaactatttcagttattcaatttttcactgtcataactgagctacaaacatttgagaaataatacagttatgtggtgagtaataaggcaataatttgccgt

SEQ ID NO: 15012 - protein, 360 aa, Zea mays subsp. mays
  misc_feature (1)..(360): Ceres Seq. ID no. 12341539
MARYSPPSLRCFFRCAASSASRAVGSGTRKKNLVFLGSPQVAASVLDKLLGASGSPESAFQVAAVVTQPPAAKNRGRKLMPSAVAQLALDRGFPEELIFTPERAREESFLSALKEVEPDVCITAAYGNILPQKFLDIPSCGTVNIHPSLLPLYRGAAPVQRALQDGVAETGVSLAYTVRALDAGPVIACERFSVDECIKAPELLSMLFHLGSKLLINELPSILDGSAKDKAQPQDDSKATLAPKLNSEESWLSFDEEAKVLHNKVRAFAGWPGTRAKLQLINQNSVPDVLEIKVISTKVSTSCVKVGDENEILFSGSSLLIPCSGSTWLEVLELQLPGKKVTKAQDFWNGLRGQKLMKLP

SEQ ID NO: 15013 - protein, 281 aa, Zea mays subsp. mays
  misc_feature (1)..(281): Ceres Seq. ID no. 12341540
MPSAVAQLALDRGFPEELIFTPERAREESFLSALKEVEPDVCITAAYGNILPQKFLDIPSCGTVNIHPSLLPLYRGAAPVQRALQDGVAETGVSLAYTVRALDAGPVIACERFSVDECIKAPELLSMLFHLGSKLLINELPSILDGSAKDKAQPQDDSKATLAPKLNSEESWLSFDEEAKVLHNKVRAFAGWPGTRAKLQLINQNSVPDVLEIKVISTKVSTSCVKVGDENEILFSGSSLLIPCSGSTWLEVLELQLPGKKVTKAQDFWNGLRGQKLMKLP

SEQ ID NO: 15014 - DNA, 1722 bp, Zea mays subsp. mays
  misc_feature (1)..(1722): Ceres Seq. ID no. 12341549
atcgcctccacgaacaaaccacacaccccacctaccccggccggaccggcaggcagcacaacatggacctcgccctcctggagaaggccctgctgggcctgttcgccgcggctgtggtggccatcgccgtggccaagctgagcggcaagcggtaccgcctcccaccggggcccccgggcgcccccgtggttggaaactggctgcaggtgggcgacgacctgaaccaccgcaacctgatggccatggcgaagcggttcggcgacatcttcctgctgcgcatgggcgtgcgcaacctggtggtggtgtcgaccccggagctggccaaggaggtgctccacacgcagggcgtggagttcggctcccgcacccgcaacgtggtgttcgacatcttcacgggcaaggggcaggacatggtgttcacggtgtacggcgaccactggcgcaagatgcggcgcatcatgaccgtccccttcttcaccaacaaggtggtggcccagaaccgcgccgggtgggaggaggaggcccggctggtggtggaggacgtgaggaaggaccccgaggccgcggccggcggcgtcgtgctccgccgccgcctccagctgatgatgtacaacgacatgttccgcatcatgttcgaccgccggttcgacagcgagcacgaccccgctcttcaacaagctcaaggcgctcaacgcggagcgcagccgcctgtcgcagagcttcgagtacaactacggcgacttcatccccgtgctccgccccttcctccgcggctacctcaaccgctgccacgacctcaagacgcgccgcatgaagttcttcgaggacaacttcgtacaggagcgcaagaaggtgatggctcagactggtgagatccggtgcgccatggatcacatcctcgaggccgagaggaagggcgagatcaaccacgacaacgtcctctacatcgtcgagaacatcaacgtcgcagcgatcgagacgacactgtggtcgatcgagtggggcatcgccgagctggtgaaccacccggccatccagcacaagctccgggaggagctcgcctccgtgctgggcgccggcgtgcctgtgacggagccggacctcgagcgcctcccctaccttcaggccatcgtcaaggagacgctccgcctgcgcatggccatcccgctgctggtcccccacatgaacctcaacgacggcaagctcgccggctacgacatccccgccgagtccaagatcctcgtcaatgcctggttcctcgccaacgaccccaagaggtgggtgcggcccgacgagttccggcccgagcgcttcctggaggaggagaagtccgtggaggcccacggcaacgacttccgcttcgtgccctttggggtcggccgccggagctgccctgggatcatcctcgcgctgcctatcatcggcatcaccctgggccggctggtgcagaacttccagctgctgccgccgccggggctggacaagatcgacaccacggagaagcccggccagttcagcaaccagatcgccaagcatgccaccatcgtctgcaagcccctcgaggcctagaaatcaatgcctgtttcctgcacgcgcccccgcagatgaagcactatgtattttgtcttttttttgtgtgttgtgtttttttactaagaggagatgtatttcttgtttgtaaaatgcacttagtcaaatgagtcgagattatgttgatcatcg

SEQ ID NO: 15015 - protein, 289 aa, Zea mays subsp. mays
  misc_feature (1)..(289): Ceres Seq. ID no. 12341550
RLHEQTTHPTYPGRTGRQHNMDLALLEKALLGLFAAAVVAIAVAKLSGKRYRLPPGPPGAPVVGNWLQVGDDLNHRNLMAMAKRFGDIFLLRMGVRNLVVVSTPELAKEVLHTQGVEFGSRTRNVVFDIFTGKGQDMVFTVYGDHWRKMRRIMTVPFFTNKVVAQNRAGWEEEARLVVEDVRKDPEAAAGGVVLRRRLQLMMYNDMFRIMFDRRFDSEHDPALQQAQGAQRGAQPPVAELRVQLRRLHPRAPPLPPRLPQPLPRPQDAPHEVLRGQLRTGAQEGDGSDW

SEQ ID NO: 15016 - protein, 270 aa, Zea mays subsp. mays
  misc_feature (1)..(270): Ceres Seq. ID no. 12341551
SPPRTNHTPHLPRPDRQAAQHGPRPPGEGPAGPVRRGCGGHRRGQAERQAVPPPTGAPGRPRGWKLAAGGRRPEPPQPDGHGEAVRRHLPAAHGRAQPGGGVDPGAGQGGAPHAGRGVRLPHPQRGVRHLHGQGAGHGVHGVRRPLAQDAAHHDRPLLHQQGGGPEPRRVGGGGPAGGGGREEGPRGRGRRRRAPPPPPADDVQRHVPHHVRPPVRQRARPRSSTSSRRSTRSAAACRRASSTTTATSSPCSAPSSAATSTAATTSRRAA

SEQ ID NO: 15017 - protein, 269 aa, Zea mays subsp. mays
  misc_feature (1)..(269): Ceres Seq. ID no. 12341552
MDLALLEKALLGLFAAAVVAIAVAKLSGKRYRLPPGPPGAPVVGNWLQVGDDLNHRNLMAMAKRFGDIFLLRMGVRNLVVVSTPELAKEVLHTQGVEFGSRTRNVVFDIFTGKGQDMVFTVYGDHWRKMRRIMTVPFFTNKVVAQNRAGWEEEARLVVEDVRKDPEAAAGGVVLRRRLQLMMYNDMFRIMFDRRFDSEHDPALQQAQGAQRGAQPPVAELRVQLRRLHPRAPPLPPRLPQPLPRPQDAPHEVLRGQLRTGAQEGDGSDW

SEQ ID NO: 15018 - DNA, 1078 bp, Zea mays subsp. mays
  misc_feature (1)..(1078): Ceres Seq. ID no. 12341568
gtaccaggctataccagcatcagcgaagagccggcgttcttgagacttgagagaggagagcgaccgacgacctcgaagcttggcctgcgcggtggtgacgatggatgtcaaatgccggcgtctggaggggaaggtggccgtcgtgacggcgtccacgcaggggatcggcctagccatcgccgagcgcctcggcctggagggcgccgccgccgtcgtctcctcccgcaagcagaagaacgtggacgaggccgtggaggggctcaaggccaaggggatcaccgtggtgggcgccgtctgccacgtatccgacgcacagcaacgcaagaacatcatcgagacggccgtcaagaactttgggcacattgatattcttgtctccaacgctgctgcaaatcctactgtgaatgtcatacttgaaatgaaagaggttgttctcgataagttgtgggatattaacgtcaaggcttctattcttcttattcaggatgctgctccccacctacgggcagggtcatctgtgatccttatttcttcaattgctggttacaatcctgagcaaggattgacaatgtatggtgttacaaagaccgctctctttggtctcacaaaggctcttgctggtgagatgggacccgatattcgtgttaattgtatagcccctggttttgttccgacacggtttgctagtttcttcatagacaacgagaccattaggaaaaagcttaacgagaggactatgcttaagagattgggttccgtggaagatatggcggcagctgccgcattcctggcatctgacgatgcatcattcatcacagctgaaaccattgttgttgctggaggggtgccgtcgagattgtaaatttggctcaagtttgtaccgattgttactaggttggtgacatagcaactatactgtaataatccactctgaaaatgtgggtcgtgctaagttggccaccgttagatctaataattttttaggtgtcttggtatttgtttgagataataatctactcagattatctgtcacttagttcaaattttattggattatataatataaatagataatccc

SEQ ID NO: 15019 - protein, 253 aa, Zea mays subsp. mays
  misc_feature (1)..(253): Ceres Seq. ID no. 12341569
MDVKCRRLEGKVAVVTASTQGIGLAIAERLGLEGAAAVVSSRKQKNVDEAVEGLKAKGITVVGAVCHVSDAQQRKNIIETAVKNFGHIDILVSNAAANPTVNVILEMKEVVLDKLWDINVKASILLIQDAAPHLRAGSSVILISSIAGYNPEQGLTMYGVTKTALFGLTKALAGEMGPDIRVNCIAPGFVPTRFASFFIDNETIRKKLNERTMLKRLGSVEDMAAAAAFLASDDASFITAETIVVAGGVPSRL

SEQ ID NO: 15020 - protein, 147 aa, Zea mays subsp. mays
  misc_feature (1)..(147): Ceres Seq. ID no. 12341570
MKEVVLDKLWDINVKASILLIQDAAPHLRAGSSVILISSIAGYNPEQGLTMYGVTKTALFGLTKALAGEMGPDIRVNCIAPGFVPTRFASFFIDNETIRKKLNERTMLKRLGSVEDMAAAAAFLASDDASFITAETIVVAGGVPSRL

SEQ ID NO: 15021 - DNA, 1605 bp, Zea mays subsp. mays
  misc_feature (1)..(1605): Ceres Seq. ID no. 12341578
atttataaacactgccaattagtccgcgccggacctccaacccgcccccacggcccacgccatcctccacaccccccacgccggacaaccggggctcgccgcgccgctacgctcccaagccggaactccgaactcgccgcgccgttctcactgtggcaccagagctgctcgatctgccccgccctcgcccctcgcccctcgcccccttgccggaggggcgcgaactcgcaaaaattattgggtgtgcatttatacacccatgttctttgctgaccctgtctggtagcagattaaggtttggttgcggaaaatattggtgggttgtccaccatgacgagtccgccaagggtgagcatggagatcaccgacgacatgctcaagagcatggaggtcggcctagctttccgggactataatggtagaattagttctatggattttcacagcaaggctaccaactatcttgtgacagctagcgacgatgaatcaatccgcctatacgacactcaaaatgcagtatgtttgaagactattaatagcaaaaaatatggggtcgaactagtgtgcttcactgataacccaaatattgtcttatattcatcaaaaaatggctgggatgaatctctgcgtctactctcactgaatgataatcggtttcttagatattttaaaggtcaccttgacagggttgtctgcatctcattttgctctgagaaagaaaattttctctctggttcacttgaccgtactgttctcttatgggatcaacgggctgaaaaatcacagggcttactgcgtgtgcaagggaggcctgcagtttcatatgacgatcagggcatggtatttgcagttgcctatggtggtcacataaggatgtttgatgctcgaaaatttgaaaaggggccttttgagatcttctctgttggtaataacgattcagaggcccatgtcataaagttcagcagtgatggcaggcggattctgttaaccactaaagctggacgtgtccatgtgctagattcattccatggcaatagcattgcgtcgtgcaatgtgaagccagtggtaaccaactcaacactggaggcgtcgttcagccctgatggaaaccatatcatatctggctccggtgacggtagtgtttatgcttggaatgttaggagtggaaaggtcgcgcgctggggaagcacagacgacgaaccgccgctggtaaggtgggctccaggatccttgatgttcgtgacaggatcatcagaactgtcatgctgggttccggacctgtctaagctgggatcctttaccattagcaagtaggtgaaaatgatgagaggtggactgcccttgcaaaccctgttcgtccctgtatggtatgtcgtgtggctggttgaagcgactcatcctttagccaggtggccgtggtaaacttgcaacctgttacaattgaatgacttgtatagagcatcggctgtggcgatctggcttctgaagccagcggctagacaatgaagatggatccatgctttagttctgtaaaccggagattgtagctgagtattgctgtatctctttgtttctggaaggcgtcttggctcgtaaagattctgg

SEQ ID NO: 15022 - protein, 327 aa, Zea mays subsp. mays
  misc_feature (1)..(327): Ceres Seq. ID no. 12341579
MTSPPRVSMEITDDMLKSMEVGLAFRDYNGRISSMDFHSKATNYLVTASDDESIRLYDTQNAVCLKTINSKKYGVELVCFTDNPNIVLYSSKNGWDESLRLLSLNDNRFLRYFKGHLDRVVCISFCSEKENFLSGSLDRTVLLWDQRAEKSQGLLRVQGRPAVSYDDQGMVFAVAYGGHIRMFDARKFEKGPFEIFSVGNNDSEAHVIKFSSDGRRILLTTKAGRVHVLDSFHGNSIASCNVKPVVTNSTLEASFSPDGNHIISGSGDGSVYAWNVRSGKVARWGSTDDEPPLVRWAPGSLMFVTGSSELSCWVPDLSKLGSFTISK

SEQ ID NO: 15023 - protein, 319 aa, Zea mays subsp. mays
  misc_feature (1)..(319): Ceres Seq. ID no. 12341580
MEITDDMLKSMEVGLAFRDYNGRISSMDFHSKATNYLVTASDDESIRLYDTQNAVCLKTINSKKYGVELVCFTDNPNIVLYSSKNGWDESLRLLSLNDNRFLRYFKGHLDRVVCISFCSEKENFLSGSLDRTVLLWDQRAEKSQGLLRVQGRPAVSYDDQGMVFAVAYGGHIRMFDARKFEKGPFEIFSVGNNDSEAHVIKFSSDGRRILLTTKAGRVHVLDSFHGNSIASCNVKPVVTNSTLEASFSPDGNHIISGSGDGSVYAWNVRSGKVARWGSTDDEPPLVRWAPGSLMFVTGSSELSCWVPDLSKLGSFTISK

SEQ ID NO: 15024 - protein, 313 aa, Zea mays subsp. mays
  misc_feature (1)..(313): Ceres Seq. ID no. 12341581
MLKSMEVGLAFRDYNGRISSMDFHSKATNYLVTASDDESIRLYDTQNAVCLKTINSKKYGVELVCFTDNPNIVLYSSKNGWDESLRLLSLNDNRFLRYFKGHLDRVVCISFCSEKENFLSGSLDRTVLLWDQRAEKSQGLLRVQGRPAVSYDDQGMVFAVAYGGHIRMFDARKFEKGPFEIFSVGNNDSEAHVIKFSSDGRRILLTTKAGRVHVLDSFHGNSIASCNVKPVVTNSTLEASFSPDGNHIISGSGDGSVYAWNVRSGKVARWGSTDDEPPLVRWAPGSLMFVTGSSELSCWVPDLSKLGSFTISK

SEQ ID NO: 15025 - DNA, 1345 bp, Zea mays subsp. mays
  misc_feature (1)..(1345): Ceres Seq. ID no. 12341582
gcgcgactagactagccttcagccttctccagttctcctctcctcctcgttttttcccctcctcaacgcctggacggaactgaagccagccagcctgcccagccaaggtgaccggagacaagtaaaaatctcgccggtcttctcacagaccacaaacattgcgcttgctgcccagctataagtactcgccggactaggcggccaactcatcccatcccatttcatccatctcggagcagaggcaacgcaatccggcaaaaaggcgcttctttcttgccctgttcgggacaggacacagacacagagccaggagacggaaccgtcggaggctaagcttcttcttcgtctttcctgggcgcgctcaagtggcgatggcatttgcggtctccgacgagctgctgggcaccttcgtgccgattgcggtgtactggctctactcggggctctacgtcgtcctggacgggctcgggatggacgactacaggctccatcccaagggggaggaggaggccaagaacatcgtttccaggtccacggtcgtcaggggcgtccttgttcagcaggcgtttcaaatcgctgtctcccttcttctcttcacggttcttggtgatgagaatgaggctgcgaggaagcaacctccggctctggtgttggcattgcaatttatcgttgcaatgttcgtcatggacacatggcagtatttcatgcacagatacatgcacatcaacaagttcttgtacaagcacgtccactctaagcaccacacccttgtcgtcccctacgcttttggagctctgtacaaccaccccctggagggactcatcctggacaccatcggtggcgcgctctcgttcctcatctctggcatgaccccgaggactggcatattcttcttctcgttcgcgaccatcaagaccgtcgacgaccactgtggtctgtggcttcctgggaacatcctccatgtattcttcagcaacaacagcgcttaccatgacatccaccatcagctctacggcaacaagtacaacttctctcagcccttctttgtcatgtgggacaagatccttggaacatacatgccttacactctggagacccgcaagggaggtggtctcgaggcgcgcccggttaagctcaaccaagcacagcagaccaaggctgattgagcagtgtggtttctcctgtttatctactacttcccctgattttttccccttctgactgcatttgtactgtagaagtatttcctgtccatatagtaaaatcatttaggcaaatgccatgttgtacccaacagatatagcaaataaaacatcttgttaatggagatccattgatgtttgtt

SEQ ID NO: 15026 - protein, 264 aa, Zea mays subsp. mays
  misc_feature (1)..(264): Ceres Seq. ID no. 12341583
MAFAVSDELLGTFVPIAVYWLYSGLYVVLDGLGMDDYRLHPKGEEEAKNIVSRSTVVRGVLVQQAFQIAVSLLLFTVLGDENEAARKQPPALVLALQFIVAMFVMDTWQYFMHRYMHINKFLYKHVHSKHHTLVVPYAFGALYNHPLEGLILDTIGGALSFLISGMTPRTGIFFFSFATIKTVDDHCGLWLPGNILHVFFSNNSAYHDIHHQLYGNKYNFSQPFFVMWDKILGTYMPYTLETRKGGGLEARPVKLNQAQQTKAD

SEQ ID NO: 15027 - protein, 231 aa, Zea mays subsp. mays
  misc_feature (1)..(231): Ceres Seq. ID no. 12341584
MDDYRLHPKGEEEAKNIVSRSTVVRGVLVQQAFQIAVSLLLFTVLGDENEAARKQPPALVLALQFIVAMFVMDTWQYFMHRYMHINKFLYKHVHSKHHTLVVPYAFGALYNHPLEGLILDTIGGALSFLISGMTPRTGIFFFSFATIKTVDDHCGLWLPGNILHVFFSNNSAYHDIHHQLYGNKYNFSQPFFVMWDKILGTYMPYTLETRKGGGLEARPVKLNQAQQTKAD

SEQ ID NO: 15028 - protein, 163 aa, Zea mays subsp. mays
  misc_feature (1)..(163): Ceres Seq. ID no. 12341585
MFVMDTWQYFMHRYMHINKFLYKHVHSKHHTLVVPYAFGALYNHPLEGLILDTIGGALSFLISGMTPRTGIFFFSFATIKTVDDHCGLWLPGNILHVFFSNNSAYHDIHHQLYGNKYNFSQPFFVMWDKILGTYMPYTLETRKGGGLEARPVKLNQAQQTKAD

SEQ ID NO: 15029 - DNA, 1149 bp, Zea mays subsp. mays
  misc_feature (1)..(1149): Ceres Seq. ID no. 12341590
cccgttcccatcagatcggatcgatcactcgacgagacatctcgcctcctcggccaatcggcatggcggcgctgctgctccgtagactcgccggaacccaccgcggccgcgtcccgctgggggccgccgccgccgccgcctgcggtggagcgacgctcttctacgcgtcgtcttcccccaccgttgcgcacttggaggagacgggcaaagccgctgagcaagttgcacttaaccctgataagtggctagagttcaagctccaagagaaggcaacagtcagtcacaactcacagttattcaggttttcatttgatccatcaactaaactgggacttgatgttgcctcgtgcctcatcacaagggcacctataggcgaggaagctgagggaagaaggaaatatgtgattcgcccgtacacacctatctctgatccagactctaaagggtattttgacctattgatcaaggtttatcctgatggaaaaatgagtcagtattttgcaagtttgaagccaggagatgttgttgaagtcaaagggcccattgaaaagctcagatacaacccgaacatgaaaaaacaaattgggatgatcgctggtggttctggtataacaccaatgctgcaggttgtcagggctatcctcaaaaaccctaatgacaacactcaggtctccttaatttacgccaatgtgtcaccagatgatatcttgctcaaaagagaactggatagacttgccagtagctatcctaacttcaaggtattttatacagttgataaaccgtcaactgactggaggggtggtgttggttttgtatcaaaggacatggttttgaaaggtttgccaggcccagcggaggactctctgattcttgtttgtggtccaccaggaatgatgaatcacatatctggagacaaggccaaggatagatcacagggcgagctctctggcgttctgaaagacttaggatacaccgcagagatggtatacaaattctgagaagacagtagtagactctgctgacgcacacacattcttgctgccctgcagtcaataaaccacacctgaactttttgttgttgttgcagcatctggctctgaactggaaacagttttgacttgtttccctatgtaataataatgctcatcc

SEQ ID NO: 15030 - protein, 331 aa, Zea mays subsp. mays
  misc_feature (1)..(331): Ceres Seq. ID no. 12341591
RSHQIGSITRRDISPPRPIGMAALLLRRLAGTHRGRVPLGAAAAAACGGATLFYASSSPTVAHLEETGKAAEQVALNPDKWLEFKLQEKATVSHNSQLFRFSFDPSTKLGLDVASCLITRAPIGEEAEGRRKYVIRPYTPISDPDSKGYFDLLIKVYPDGKMSQYFASLKPGDVVEVKGPIEKLRYNPNMKKQIGMIAGGSGITPMLQVVRAILKNPNDNTQVSLIYANVSPDDILLKRELDRLASSYPNFKVFYTVDKPSTDWRGGVGFVSKDMVLKGLPGPAEDSLILVCGPPGMMNHISGDKAKDRSQGELSGVLKDLGYTAEMVYKF

SEQ ID NO: 15031 - protein, 311 aa, Zea mays subsp. mays
  misc_feature (1)..(311): Ceres Seq. ID no. 12341592
MAALLLRRLAGTHRGRVPLGAAAAAACGGATLFYASSSPTVAHLEETGKAAEQVALNPDKWLEFKLQEKATVSHNSQLFRFSFDPSTKLGLDVASCLITRAPIGEEAEGRRKYVIRPYTPISDPDSKGYFDLLIKVYPDGKMSQYFASLKPGDVVEVKGPIEKLRYNPNMKKQIGMIAGGSGITPMLQVVRAILKNPNDNTQVSLIYANVSPDDILLKRELDRLASSYPNFKVFYTVDKPSTDWRGGVGFVSKDMVLKGLPGPAEDSLILVCGPPGMMNHISGDKAKDRSQGELSGVLKDLGYTAEMVYKF

SEQ ID NO: 15032 - protein, 170 aa, Zea mays subsp. mays
  misc_feature (1)..(170): Ceres Seq. ID no. 12341593
MSQYFASLKPGDVVEVKGPIEKLRYNPNMKKQIGMIAGGSGITPMLQVVRAILKNPNDNTQVSLIYANVSPDDILLKRELDRLASSYPNFKVFYTVDKPSTDWRGGVGFVSKDMVLKGLPGPAEDSLILVCGPPGMMNHISGDKAKDRSQGELSGVLKDLGYTAEMVYKF

SEQ ID NO: 15033 - DNA, 1881 bp, Zea mays subsp. mays
  misc_feature (1)..(1881): Ceres Seq. ID no. 12341608
aggcagagcactgcacgccaccttatctctaaccggagatcaaagaagtagccgttaacgatggcttccgacgagctcgcaaaggccgtcgagcccaggaagaagggcaacgtcaagtatgcctccatatgtgccatcctggcctccatggcctctgtcatccttggctatgacattggggtgatgagtggagcggccatgtacatcaagaaggacctgaatatcacggacgtgcagctggagatcctgatcgggatcctcagtctctactcgctgttcggatccttcgctggcgcgcggacgtccgacaggatcgggcgccgcttgaccgtcgtgttcgccgctgtcatcttcttcgtgggctcgttgctcatgggtttcgccgtcaactacggcatgctcatggcgggccgcttcgtggccggagtcggtgtgggctacgggggcatgatcgcgcccgtgtacacggccgagatctcgcctgcggcgtcccgtggcttcctgaccaccttcccggaggtgttcatcaacatcggcatcctgcttggctacctgtccaacttcgcgttcgcgcgcctcccgctccacctcggctggcgcgtcatgctcgccattggcgcagttccgtccggcctgctcgcgctcctggtgttctgcatgcccgagtcgcctcggtggctggtcttgaagggccgcctcgcggacgccagggctgtgctagagaagacctctgccacgccagaggaggccgccgagcggctggccgacatcaaggccgcggcggggattccgaagggcctcgacggggacgtagtcaccgtacccggcaaggagcaaggcggcggtgagttgcaggtgtggaagaagctcatcctgtccccgaccccggctgtccgacgcatactgctctcggccgtgggtctccacttcttccagcaggcttctggcagcgactccgtcgtccagtacagcgcccgcctgttcaagagcgcggggatcaccgacgacaacaagctcctgggcgtcacctgcgcggtgggcgtgaccaagacgttcttcatcctggtggccacgttcctgctggaccgcgcggggcgtcggcctctgctgctgatcagcacgggcgggatgatcgtctcgctcatctgcctcgggtcggggctcaccgtcgcggggcatcacccggacaccaaggtcgcgtgggccgtcgccctgtgcatcgcgtccaccctgtcctacatcgccttcttctccatcggcctcgggcccatcacgggcgtgtacacctcggaaatattcccgctgcaggtgcgcgcgctgggcttcgcggtgggtgtggcgagcaaccgcgtcaccagcgccgtcatctccatgaccttcctgtccctctccaaggccatcaccatcggcggcagcttcttcctctactccggcatcgccgcggtcgcttgggttttcttcttcacgtgcctcccggagacacgcggccggacgctggaggagatgggcaagctgttcggcatgccagacacgggcatggctgaagaagcagaagacgccgcagccaaggagaaggtggtggaactgcctagcagcaagtaggtggctatcccagagcacaggtcaagtgaagtagatggacaagatcattgtcttttcaactaattagatgggcaagaataactaagactgccctatgaggtgtcgtggttcaaccagagatcattctgctccttttcttttcccttcctttttcgagtaccattcccattcgtcgtggtcagtacgatgttgggtcgttgggagttagtggtgtcagagtccgcgtgtgctttgcaagccagggctgaacccacaatcatcagtaacaaaaattcttcc

SEQ ID NO: 15034 - protein, 513 aa, Zea mays subsp. mays
  misc_feature (1)..(513): Ceres Seq. ID no. 12341609
MASDELAKAVEPRKKGNVKYASICAILASMASVILGYDIGVMSGAAMYIKKDLNITDVQLEILIGILSLYSLFGSFAGARTSDRIGRRLTVVFAAVIFFVGSLLMGFAVNYGMLMAGRFVAGVGVGYGGMIAPVYTAEISPAASRGFLTTFPEVFINIGILLGYLSNFAFARLPLHLGWRVMLAIGAVPSGLLALLVFCMPESPRWLVLKGRLADARAVLEKTSATPEEAAERLADIKAAAGIPKGLDGDVVTVPGKEQGGGELQVWKKLILSPTPAVRRILLSAVGLHFFQQASGSDSVVQYSARLFKSAGITDDNKLLGVTCAVGVTKTFFILVATFLLDRAGRRPLLLISTGGMIVSLICLGSGLTVAGHHPDTKVAWAVALCIASTLSYIAFFSIGLGPITGVYTSEIFPLQVRALGFAVGVASNRVTSAVISMTFLSLSKAITIGGSFFLYSGIAAVAWVFFFTCLPETRGRTLEEMGKLFGMPDTGMAEEAEDAAAKEKVVELPSSK

SEQ ID NO: 15035 - protein, 484 aa, Zea mays subsp. mays
  misc_feature (1)..(484): Ceres Seq. ID no. 12341610
MASVILGYDIGVMSGAAMYIKKDLNITDVQLEILIGILSLYSLFGSFAGARTSDRIGRRLTVVFAAVIFFVGSLLMGFAVNYGMLMAGRFVAGVGVGYGGMIAPVYTAEISPAASRGFLTTFPEVFINIGILLGYLSNFAFARLPLHLGWRVMLAIGAVPSGLLALLVFCMPESPRWLVLKGRLADARAVLEKTSATPEEAAERLADIKAAAGIPKGLDGDVVTVPGKEQGGGELQVWKKLILSPTPAVRRILLSAVGLHFFQQASGSDSVVQYSARLFKSAGITDDNKLLGVTCAVGVTKTFFILVATFLLDRAGRRPLLLISTGGMIVSLICLGSGLTVAGHHPDTKVAWAVALCIASTLSYIAFFSIGLGPITGVYTSEIFPLQVRALGFAVGVASNRVTSAVISMTFLSLSKAITIGGSFFLYSGIAAVAWVFFFTCLPETRGRTLEEMGKLFGMPDTGMAEEAEDAAAKEKVVELPSSK

SEQ ID NO: 15036 - protein, 472 aa, Zea mays subsp. mays
  misc_feature (1)..(472): Ceres Seq. ID no. 12341611
MSGAAMYIKKDLNITDVQLEILIGILSLYSLFGSFAGARTSDRIGRRLTVVFAAVIFFVGSLLMGFAVNYGMLMAGRFVAGVGVGYGGMIAPVYTAEISPAASRGFLTTFPEVFINIGILLGYLSNFAFARLPLHLGWRVMLAIGAVPSGLLALLVFCMPESPRWLVLKGRLADARAVLEKTSATPEEAAERLADIKAAAGIPKGLDGDVVTVPGKEQGGGELQVWKKLILSPTPAVRRILLSAVGLHFFQQASGSDSVVQYSARLFKSAGITDDNKLLGVTCAVGVTKTFFILVATFLLDRAGRRPLLLISTGGMIVSLICLGSGLTVAGHHPDTKVAWAVALCIASTLSYIAFFSIGLGPITGVYTSEIFPLQVRALGFAVGVASNRVTSAVISMTFLSLSKAITIGGSFFLYSGIAAVAWVFFFTCLPETRGRTLEEMGKLFGMPDTGMAEEAEDAAAKEKVVELPSSK

SEQ ID NO: 15037 - DNA, 844 bp, Zea mays subsp. mays
  misc_feature (1)..(844): Ceres Seq. ID no. 12341621
gcatgctaggtaaggttgagcgtgtcacagatgttgtattcactcttgatgatggtactggcaagatagatgtgaatcgctgggaaaatgaggcttccgatgctaaggagatggctgatgctaataacgagaactatgtcatagtcattggcggtttgaaaggttttcaaggaaagcgccatgtagttgcctatgctgtgcggcgtgtgacaaacttcaatgaaataacctgtcactttctgcactgcattcaggtgcatatggagctcacagggttaaagatctattcttcagctgcaacatatggaggagtagcccatgccccatcacagccaaatccggttgatggaaactacatatccaacttggtcttgagtgtttttcatgacccatctgtcatggaccaggagcatggactgcacatcaaagatgtcatagatcgtctcaaactaccagatgatgtagtcagtgcggccatccaaggtcatgttgatgtgggcaacatttacaacacaattgatgacttccactacaaatctgtccggaatggatgaccacgttgcaagtccagcgttcaggctccgtgtaggtatggagccgtttcaaggaagaagaaatgtaaaccctcttcaggatcgcctatattttgcagataggcttcatggtcaacagcttagcatatcggtttaggtgtgtattgctctcatatgtaatgatacataagatgtgagtagactaggtctacctgcaggacatcagtccgttcctacggaaatttgttatgaacgttttacattctaagacctatataaccgtgaagcacgcaaatcaagaatagaaccgc

SEQ ID NO: 15038 - protein, 183 aa, Zea mays subsp. mays
  misc_feature (1)..(183): Ceres Seq. ID no. 12341622
MLGKVERVTDVVFTLDDGTGKIDVNRWENEASDAKEMADANNENYVIVIGGLKGFQGKRHVVAYAVRRVTNFNEITCHFLHCIQVHMELTGLKIYSSAATYGGVAHAPSQPNPVDGNYISNLVLSVFHDPSVMDQEHGLHIKDVIDRLKLPDDVVSAAIQGHVDVGNIYNTIDDFHYKSVRNG

SEQ ID NO: 15039 - protein, 147 aa, Zea mays subsp. mays
  misc_feature (1)..(147): Ceres Seq. ID no. 12341623
MADANNENYVIVIGGLKGFQGKRHVVAYAVRRVTNFNEITCHFLHCIQVHMELTGLKIYSSAATYGGVAHAPSQPNPVDGNYISNLVLSVFHDPSVMDQEHGLHIKDVIDRLKLPDDVVSAAIQGHVDVGNIYNTIDDFHYKSVRNG

SEQ ID NO: 15040 - protein, 97 aa, Zea mays subsp. mays
  misc_feature (1)..(97): Ceres Seq. ID no. 12341624
MELTGLKIYSSAATYGGVAHAPSQPNPVDGNYISNLVLSVFHDPSVMDQEHGLHIKDVIDRLKLPDDVVSAAIQGHVDVGNIYNTIDDFHYKSVRNG

SEQ ID NO: 15041 - DNA, 1562 bp, Zea mays subsp. mays
  misc_feature (1)..(1562): Ceres Seq. ID no. 12341687
aagagattgataataataataatagttcggtgcctttttctagcggggaggaggcaggcggcgcaatctggcaccggccatcacgttccctccggccgcttccccctccctgccctccctttccccagatccgaagccattaaaaccagcggatctcacctcggggcgcgtccgcggcatctgggcaagcgagtggtagagcccgcagccatgagatggtatgcatcggtagcctcctgagggcgctggtcctgagtgcggcggcgtctgcgggcaggcgccgggggcccaggatcctgtgtggccacgaggcggatgtacgcgtgactcctcggcacggacacggctggcgcagattccgggcagtcacgggaaggatgatgctggactcctctgactgtgcctctgctgccgccgccgcggagacggggcaggtgcagccgcagcgccgcgcggtgggggccgtgcccctggcgcacgacggcggctacgccagcggcggatgggagagagaagatggcaaactgagttgtggatactcaagttttagaggcaagagagctacgatggaagatttctatgatgtaaaactaactgaaattgatggacaagctgttagcctgtttggtgttttcgacggtcatggaggatcacgtgctgctgagtatttgagggagcacttgtttgataaccttctcaagcaccctgatttcttgacagatacaaagcttgcgataagtgaaacatatcagaaaacagatacagatttcttggaatcagaagcaagcgctttcagggatgatggttcaacagcttcaactgcacttttggtgggtgaccatttatatgttgcaaatgttggtgattctcgtgccgttatttcaaaagctggcaaagctatggcgctttcagaagatcacaaacctaacagaattgatgagcgaaagagaattgaaaatgctggtggtattgtcatttgggctggcacttggagggtgggtggtgtattggcaatgtcccgtgcatttggcaatcgtttactgaagccatatgtggtggcagaacctgaaattcaggaagaacaggtcagtggtgggctggaatgcctggttcttgctagtgatgggctttgggatgttgtggaaaatgaggaagctgttttccttgggagatcggaggacacgccagagtctgcagctaggaaattgacagagattgcttactctcgcggcagcgctgacaatatcacatgcatcgtggtccaatttcaccatgacaaaaccggatgagccgtatggctgccaatttcagttgtaccctgcttcagtctattattatcctgcaagctgggtggtggccggtgggcttctcccagatttaccctgcttcatgctattattatcctgcaagccgggcggtggggtttctcagatctatcgctcatgtagcaactttcaagcactcgtccattgattcttttgttgtcttgtaggaaacatttgttccgacaggtgtagtagacacttttaaactgataattcaataaacgtatgtttacggct

SEQ ID NO: 15042 - protein, 357 aa, Zea mays subsp. mays
  misc_feature (1)..(357): Ceres Seq. ID no. 12341688
MVCIGSLLRALVLSAAASAGRRRGPRILCGHEADVRVTPRHGHGWRRFRAVTGRMMLDSSDCASAAAAAETGQVQPQRRAVGAVPLAHDGGYASGGWEREDGKLSCGYSSFRGKRATMEDFYDVKLTEIDGQAVSLFGVFDGHGGSRAAEYLREHLFDNLLKHPDFLTDTKLAISETYQKTDTDFLESEASAFRDDGSTASTALLVGDHLYVANVGDSRAVISKAGKAMALSEDHKPNRIDERKRIENAGGIVIWAGTWRVGGVLAMSRAFGNRLLKPYVVAEPEIQEEQVSGGLECLVLASDGLWDVVENEEAVFLGRSEDTPESAARKLTEIAYSRGSADNITCIVVQFHHDKTG

SEQ ID NO: 15043 - protein, 303 aa, Zea mays subsp. mays
  misc_feature (1)..(303): Ceres Seq. ID no. 12341689
MMLDSSDCASAAAAAETGQVQPQRRAVGAVPLAHDGGYASGGWEREDGKLSCGYSSFRGKRATMEDFYDVKLTEIDGQAVSLFGVFDGHGGSRAAEYLREHLFDNLLKHPDFLTDTKLAISETYQKTDTDFLESEASAFRDDGSTASTALLVGDHLYVANVGDSRAVISKAGKAMALSEDHKPNRIDERKRIENAGGIVIWAGTWRVGGVLAMSRAFGNRLLKPYVVAEPEIQEEQVSGGLECLVLASDGLWDVVENEEAVFLGRSEDTPESAARKLTEIAYSRGSADNITCIVVQFHHDKTG

SEQ ID NO: 15044 - protein, 302 aa, Zea mays subsp. mays
  misc_feature (1)..(302): Ceres Seq. ID no. 12341690
MLDSSDCASAAAAAETGQVQPQRRAVGAVPLAHDGGYASGGWEREDGKLSCGYSSFRGKRATMEDFYDVKLTEIDGQAVSLFGVFDGHGGSRAAEYLREHLFDNLLKHPDFLTDTKLAISETYQKTDTDFLESEASAFRDDGSTASTALLVGDHLYVANVGDSRAVISKAGKAMALSEDHKPNRIDERKRIENAGGIVIWAGTWRVGGVLAMSRAFGNRLLKPYVVAEPEIQEEQVSGGLECLVLASDGLWDVVENEEAVFLGRSEDTPESAARKLTEIAYSRGSADNITCIVVQFHHDKTG

SEQ ID NO: 15045 - DNA, 1223 bp, Zea mays subsp. mays
  misc_feature (1)..(1223): Ceres Seq. ID no. 12341691
gtcggccttggcccaagccaaggaccctttcgcttctctcagtctacgactaggcggcggcggcggccttcacgcacgagccttcgccgcctatacttgcgcttcgtcgagccggtgaattgtggtctaagaacaagagggaaggatctttctccagacttcgcaattttggacgacgaggttttgtgttatctggtttgtcgggatggatgccaaaaagttcctgcagctggtcgaagagaagaaaaggaggatcctcgagaagaaagaagccccactaaagtggcagcagaagcttgaagcagcagttaacgtcaaagctgatgcagaagcgaaggcgaaaaaactaaaatcaagaaagcataggaggagaggagattcttcctcggactctgacagtgactatgacagcgatgttgatcggaaacaccggaggaggaaggatcgtagaaggaacaagaagcatgagcattctgactctgatgatgccaggagacgcaagcataggtccagaaagggctcagactcaagtgatgagagcaaccgtgaatatgaaagcgggtctgaagaagaacgtacaaagaagaagcgttcgcacagaagaaagcatcacagacactcttcaatgtcagactctgaagacaacagtgatgaggatgagcggagatctgccaaggaccattctcagccccgcagacgccaccatcagtcttctgatgatggctcggacaagatcaggtcgagacatgggaagcgtctgagatcaagttacgagaatgctcggccagattccaacaaccataagcatctcaggagccaatccttggaggagtcatcagatgatagagatgatgatggatcagagaagataagaaatggcaaaaggtatcacaagaatcatcaccgtcaccaccatcatcatcgtcaccatcagcaccaccatgaaagacataatagctcagcagaacctaatgacaggaggcaagtactgaaagatgaccagagggcccttgaaggtagcagtgcagactgaaggtatccaccagaggacggaaagattgattctccattcgtgatgttcccagttatttgttgtgctgataacatttctttgatttgggctatgaaacgtggtcattctaccaattatgttggttttgagaatttggtaatactgagttaacaatgaagcatgattatctgaaatgtttaagtattagatc

SEQ ID NO: 15046 - protein, 275 aa, Zea mays subsp. mays
  misc_feature (1)..(275): Ceres Seq. ID no. 12341692
MDAKKFLQLVEEKKRRILEKKEAPLKWQQKLEAAVNVKADAEAKAKKLKSRKHRRRGDSSSDSDSDYDSDVDRKHRRRKDRRRNKKHEHSDSDDARRRKHRSRKGSDSSDESNREYESGSEEERTKKKRSHRRKHHRHSSMSDSEDNSDEDERRSAKDHSQPRRRHHQSSDDGSDKIRSRHGKRLRSSYENARPDSNNHKHLRSQSLEESSDDRDDDGSEKIRNGKRYHKNHHRHHHHHRHHQHHHERHNSSAEPNDRRQVLKDDQRALEGSSAD

SEQ ID NO: 15047 - DNA, 1183 bp, Zea mays subsp. mays
  misc_feature (1)..(1183): Ceres Seq. ID no. 12341715
aataatttggctaaggcttgtgctgcctatcgtgactttgtatcacaaaatgctataagagttaaaacttcttgttttttcttaaaaagttttggactagggtagtggggttttaaattttgctgagatacttctacctgcctgtaaggactagggtagtggggttttaaattttgcccacaaatgtaaacttttggcctaatccacctgaatagacaggatttaacactattatttgcagcactgataaccttattttgcagtgtttacttgcacaatgtgcgcttttttcctccttgcccatgttatcctaaaaattgaggaagttcttacatttgtcgacggacagagtactagatcttatattatcaacatccactaccttaacgagctggcatctgctggttacattctgctcccttcatgtagcattatggatgaagttctttgagcataagccttttgattcaagaactgtcatgggatttggagtacttaacggaatctccattgggctcctcaacttgagtcttggcttcaactctgttgggttttaccagatgactaagctggcaatcatcccgtgcactgtcattttagagacacttttcttcaggaagaagttcagtcggagtatccagatgtccctttctgtgcttcttcttggtgttggtgttgcaactgtcactgatctgcaactcaatgctgtgggatccatactgtccttgctggcaattatcacgacttgcattgctcaaattatgacaaacactatccagaagaagttcaaggtctcatcaacccaactgctttaccagtcttgcccttaccaatcactgaccctgtttctcattggccccttccttgatggctttttgactaaccaaaatgtctttgcttttaattatacatctcaagttgtgtttttcatcgtcctgtcatgcttgatatctgtttcagtgaacttcagcactttccttgtgatcggaaagacatctcctgttacttaccaagtcctgggccatcttaaaacatgccttgttcttgcttttggttatgttttgcttcacgatccgtttagctggagaaacatacttggaatcctaattgctgtagttggaatggtcttgtattcatacttctgcacagtggagacccagcaaaaaaatgttgaagtctcccc

SEQ ID NO: 15048 - protein, 248 aa, Zea mays subsp. mays
  misc_feature (1)..(248): Ceres Seq. ID no. 12341716
MKFFEHKPFDSRTVMGFGVLNGISIGLLNLSLGFNSVGFYQMTKLAIIPCTVILETLFFRKKFSRSIQMSLSVLLLGVGVATVTDLQLNAVGSILSLLAIITTCIAQIMTNTIQKKFKVSSTQLLYQSCPYQSLTLFLIGPFLDGFLTNQNVFAFNYTSQVVFFIVLSCLISVSVNFSTFLVIGKTSPVTYQVLGHLKTCLVLAFGYVLLHDPFSWRNILGILIAVVGMVLYSYFCTVETQQKNVEVS

SEQ ID NO: 15049 - protein, 234 aa, Zea mays subsp. mays
  misc_feature (1)..(234): Ceres Seq. ID no. 12341717
MGFGVLNGISIGLLNLSLGFNSVGFYQMTKLAIIPCTVILETLFFRKKFSRSIQMSLSVLLLGVGVATVTDLQLNAVGSILSLLAIITTCIAQIMTNTIQKKFKVSSTQLLYQSCPYQSLTLFLIGPFLDGFLTNQNVFAFNYTSQVVFFIVLSCLISVSVNFSTFLVIGKTSPVTYQVLGHLKTCLVLAFGYVLLHDPFSWRNILGILIAVVGMVLYSYFCTVETQQKNVEVS

SEQ ID NO: 15050 - protein, 207 aa, Zea mays subsp. mays
  misc_feature (1)..(207): Ceres Seq. ID no. 12341718
MTKLAIIPCTVILETLFFRKKFSRSIQMSLSVLLLGVGVATVTDLQLNAVGSILSLLAIITTCIAQIMTNTIQKKFKVSSTQLLYQSCPYQSLTLFLIGPFLDGFLTNQNVFAFNYTSQVVFFIVLSCLISVSVNFSTFLVIGKTSPVTYQVLGHLKTCLVLAFGYVLLHDPFSWRNILGILIAVVGMVLYSYFCTVETQQKNVEVS

SEQ ID NO: 15051 - DNA, 1027 bp, Zea mays subsp. mays
  misc_feature (1)..(1027): Ceres Seq. ID no. 12341742
ctcaataaaatatgtactcggaatcggaagaagctgccttccttttccatccgcggaacgacgcacgcggacgcctccttgttccgggtcctactcccgccgcctagaggcctcgccctcccccctccggcgaaaaccgattctctccggcgtttcctggtcccttagtgcaagcaaggacaccgctcctctagcgagctccgttctgaagcggcaagaaagatgattaatcttttcaaaataaagggtcaaaagaaagaggaggcagcaagtctgctggaaaggcccctgttaagaaacagtctgctggggagctccgtcttcataaagatattagtgagctcaacctgccgaagaccacgtcaatttcttttcccaatggcaaggatgatctgatgaattttgagaccaccatccgacctgatgaaggatattacatgggaggcactttcgttttcacctttcaagtgtccccatcttatcctcatgatcctccgaaggtcaaatgcaagaccaaggtgtaccatccaaatattgatctggaaggcaatgtatgtctgaacattctgcgcgaagattggaagcctgttctcaacatcaacactgttatttatggcctgaatcttctttttacgcaaccaaacgacgaggatcctctgaaccacgaagctgcagttgtccttcgtgacaatccaaagatgtttgaggcaaatgtgagaagagccatggctggaggctacgtcggccaacactatttccaaagatgtgcttgacttgatgtggtggtggcttgaaaacgatcaacagagcccctccccctgtatcagcaccagcgcgcccagctttgtgtgcggaaagtacttctggaagcaaaatccaaaccgttcatggtgtgatactgtgatgcatctgtttgcccgcctttgtgatgtgtggtatagtggtggtgcataatgacatggaaatgcttctctaactgtatcattcattccataaatcctaaacgaggaatgggaagtggattgtt

SEQ ID NO: 15052 - protein, 125 aa, Zea mays subsp. mays
  misc_feature (1)..(125): Ceres Seq. ID no. 12341743
MNFETTIRPDEGYYMGGTFVFTFQVSPSYPHDPPKVKCKTKVYHPNIDLEGNVCLNILREDWKPVLNINTVIYGLNLLFTQPNDEDPLNHEAAVVLRDNPKMFEANVRRAMAGGYVGQHYFQRCA

SEQ ID NO: 15053 - protein, 111 aa, Zea mays subsp. mays
  misc_feature (1)..(111): Ceres Seq. ID no. 12341744
MGGTFVFTFQVSPSYPHDPPKVKCKTKVYHPNIDLEGNVCLNILREDWKPVLNINTVIYGLNLLFTQPNDEDPLNHEAAVVLRDNPKMFEANVRRAMAGGYVGQHYFQRCA

SEQ ID NO: 15054 - protein, 74 aa, Zea mays subsp. mays
  misc_feature (1)..(74): Ceres Seq. ID no. 12341745
SIKYVLGIGRSCLPFPSAERRTRTPPCSGSYSRRLEASPSPLRRKPILSGVSWSLSASKDTAPLASSVLKRQER

SEQ ID NO: 15055 - DNA, 881 bp, Zea mays subsp. mays
  misc_feature (1)..(881): Ceres Seq. ID no. 12341797
tctctctttcttccccagcaatgcaattccgcagacagacgcaggcggcaggcggcaggcggcggcgcaccgcaccgcttcttcctcttctatctctcatctacagccttcgctgcgccgccatggccaccacccgcttgctgccgctgctccgacgccgcctcgccgccgcaatcgccggatcgcctgctccctactccctccgaggaccctcatttcctgcaccagcagctgcagggctaaggtccctcctaacagttgctggagcgagcgatactgcaacagaaccccaggaccaacagcattccgaaacaactcccccgccggcttctgtcccgacaccggagtccggtctcaaagtcagggacacctccaacctgaagatctcaccaaggcatgacctcgccatgatctttacgtgcaaggtgtgcgagaccaggtccatgaagatggccagcagggactcgtacgagaacggagtcgtggtcgtgcggtgcggtggctgcaacaacctccacctcatggcggacaggcttggctggtttggggagccagggagcatcgaggacttcctagcgacgcaaggggaggaggtgaagaaaggttcgacagatactatcagctttactttggacgacttggctgggtctcaggtcagttctaaggggccttccgaacaaaattaatatgatagtgtttggtccagtaagaacctgtagaagcctctctttactataaagaagatgcgcgtgtcacctgtgtgttgaagaaaaaaacgcctctagaagcctaccttaactgttgcacctgtagttctgcttaacttcatggcttttcatgtgtagctttcgagcccatcaaatatgcgatgttgttattct

SEQ ID NO: 15056 - protein, 227 aa, Zea mays subsp. mays
  misc_feature (1)..(227): Ceres Seq. ID no. 12341798
SLSSPAMQFRRQTQAAGGRRRRTAPLLPLLSLIYSLRCAAMATTRLLPLLRRRLAAAIAGSPAPYSLRGPSFPAPAAAGLRSLLTVAGASDTATEPQDQQHSETTPPPASVPTPESGLKVRDTSNLKISPRHDLAMIFTCKVCETRSMKMASRDSYENGVVVVRCGGCNNLHLMADRLGWFGEPGSIEDFLATQGEEVKKGSTDTISFTLDDLAGSQVSSKGPSEQN

SEQ ID NO: 15057 - protein, 221 aa, Zea mays subsp. mays
  misc_feature (1)..(221): Ceres Seq. ID no. 12341799
MQFRRQTQAAGGRRRRTAPLLPLLSLIYSLRCAAMATTRLLPLLRRRLAAAIAGSPAPYSLRGPSFPAPAAAGLRSLLTVAGASDTATEPQDQQHSETTPPPASVPTPESGLKVRDTSNLKISPRHDLAMIFTCKVCETRSMKMASRDSYENGVVVVRCGGCNNLHLMADRLGWFGEPGSIEDFLATQGEEVKKGSTDTISFTLDDLAGSQVSSKGPSEQN

SEQ ID NO: 15058 - protein, 187 aa, Zea mays subsp. mays
  misc_feature (1)..(187): Ceres Seq. ID no. 12341800
MATTRLLPLLRRRLAAAIAGSPAPYSLRGPSFPAPAAAGLRSLLTVAGASDTATEPQDQQHSETTPPPASVPTPESGLKVRDTSNLKISPRHDLAMIFTCKVCETRSMKMASRDSYENGVVVVRCGGCNNLHLMADRLGWFGEPGSIEDFLATQGEEVKKGSTDTISFTLDDLAGSQVSSKGPSEQN

SEQ ID NO: 15059 - DNA, 789 bp, Zea mays subsp. mays
  misc_feature (1)..(789): Ceres Seq. ID no. 12341823
gaactagagaaaagcaacttgcaggcaaaatcaaaggaaactgaagaagctggactcaaaatgctgagaaagagtttaaatttcaaggcaacaccaatgcccagcttttataaggaaccacctccccccaaggttgagttgaagaagatacctacaacaagagctaggtcaccaaagcttggtcgctccaagaacacatcctcaggagggacagaagggaatccaaatcctccagctcgttcagctcgactgagtctcgatgaaagggtctcccaaaatggtgtcaagaaagcacctgctgcaaatgcagcgaagaagccccagcggaaatctctacctaaactgccttcagagcaaacaaccaaagttgacattgcaccatctgttccatctgcagaagagctagaaaacaagttgccgacgaagggtggtcttgatcgagagccgatccgcgctcaaattacacctgacgaacctggactcactgcataggaacctatcaagccgactcctatgaaaggagggagttgtgccccagcttcctttatcacattttgctatttctgcagtaaactgctggctggtattatgtattagaattagtctcagcaccaggagcttgaagagtggcaagtgacaccgtgtattctttatcttagtttctgttgacataccaggtatttgtagttggcagacaggcagaatttcatattattctccagggctaccagtcaattaagttgccgtccaagtaagatatgtacacgattttgcaaagctttgtgattc

SEQ ID NO: 15060 - protein, 163 aa, Zea mays subsp. mays
  misc_feature (1)..(163): Ceres Seq. ID no. 12341824
ELEKSNLQAKSKETEEAGLKMLRKSLNFKATPMPSFYKEPPPPKVELKKIPTTRARSPKLGRSKNTSSGGTEGNPNPPARSARLSLDERVSQNGVKKAPAANAAKKPQRKSLPKLPSEQTTKVDIAPSVPSAEELENKLPTKGGLDREPIRAQITPDEPGLTA

SEQ ID NO: 15061 - protein, 143 aa, Zea mays subsp. mays
  misc_feature (1)..(143): Ceres Seq. ID no. 12341825
MLRKSLNFKATPMPSFYKEPPPPKVELKKIPTTRARSPKLGRSKNTSSGGTEGNPNPPARSARLSLDERVSQNGVKKAPAANAAKKPQRKSLPKLPSEQTTKVDIAPSVPSAEELENKLPTKGGLDREPIRAQITPDEPGLTA

SEQ ID NO: 15062 - protein, 131 aa, Zea mays subsp. mays
  misc_feature (1)..(131): Ceres Seq. ID no. 12341826
MPSFYKEPPPPKVELKKIPTTRARSPKLGRSKNTSSGGTEGNPNPPARSARLSLDERVSQNGVKKAPAANAAKKPQRKSLPKLPSEQTTKVDIAPSVPSAEELENKLPTKGGLDREPIRAQITPDEPGLTA

SEQ ID NO: 15063 - DNA, 1232 bp, Zea mays subsp. mays
  misc_feature (1)..(1232): Ceres Seq. ID no. 12341884
atccacaagaggagaagaaacaatcaaccagcaacactcttctcttataacatagtacagcgaaggtaactcacatggcaacttccatgggttgtctcgtcttgctctgccttgtttcttctctccttcccagtgccgtccttggccacccatggggtggcttgttcccacagttctatgaccattcgtgccccaaggcgaaggagattgtgcagtccattgtggcacaggctgtggccaaggagaccaggatggcggcatctttagtcagactgcatttccatgactgctttgtcaagggctgcgatgcttcggtgctgttggacaacagcagcagcatagttagtgagaaagggtccaacccgaacaggaactccctcagggggtttgaggtgatcgaccagattaaggctgctcttgaggctgcctgcccaggcacagtctcctgtgccgacattgttgcccttgcggctcgtgattccaccgccctggttggtggaccatactgggacgtgccacttggccggagagactcgctcggtgcaagcatccagggctccaacaatgacatcccagcccccaacaacacactccccactatcatcaccaagttcaagcgccagggcctcaatgttgttgatgttgtcgccctctcaggtggtcacaccattggtatgtctcggtgcactagtttccggcagaggctatacaaccagacaggcaatggcatggctgacagcacactggatgtatcctacgccgcaaagctgaggcagggatgcccccgctctggtggtgacaacaacctcttccccttggacttcatcacccctgccaagtttgacaatttttactacaagaacctcctggccggcaagggccttctaagctctgatgagattctgttaaccaagagcgctgagacagcggccctcgtgaaggcatatgctgctgatgtcaatctcttcttccagcactttgcacagtctatggtgaatatgggaaacatctcgccactgacagggtcacaaggtgagatcaggaagaactgcaggaggctcaacaatgaccactgagggcactgaagtcgcttgatgtgctgaattgtttgtgatgttggtggcgtattttgtttaaataagtaagcatggctgtgattttatcatatgatcgatctttggggttttatttaacacattgtaaaatgtgtatctattaataactcaatgtat

SEQ ID NO: 15064 - protein, 333 aa, Zea mays subsp. mays
  misc_feature (1)..(333): Ceres Seq. ID no. 12341885
MATSMGCLVLLCLVSSLLPSAVLGHPWGGLFPQFYDHSCPKAKEIVQSIVAQAVAKETRMAASLVRLHFHDCFVKGCDASVLLDNSSSIVSEKGSNPNRNSLRGFEVIDQIKAALEAACPGTVSCADIVALAARDSTALVGGPYWDVPLGRRDSLGASIQGSNNDIPAPNNTLPTIITKFKRQGLNVVDVVALSGGHTIGMSRCTSFRQRLYNQTGNGMADSTLDVSYAAKLRQGCPRSGGDNNLFPLDFITPAKFDNFYYKNLLAGKGLLSSDEILLTKSAETAALVKAYAADVNLFFQHFAQSMVNMGNISPLTGSQGEIRKNCRRLNNDH

SEQ ID NO: 15065 - protein, 329 aa, Zea mays subsp. mays
  misc_feature (1)..(329): Ceres Seq. ID no. 12341886
MGCLVLLCLVSSLLPSAVLGHPWGGLFPQFYDHSCPKAKEIVQSIVAQAVAKETRMAASLVRLHFHDCFVKGCDASVLLDNSSSIVSEKGSNPNRNSLRGFEVIDQIKAALEAACPGTVSCADIVALAARDSTALVGGPYWDVPLGRRDSLGASIQGSNNDIPAPNNTLPTIITKFKRQGLNVVDVVALSGGHTIGMSRCTSFRQRLYNQTGNGMADSTLDVSYAAKLRQGCPRSGGDNNLFPLDFITPAKFDNFYYKNLLAGKGLLSSDEILLTKSAETAALVKAYAADVNLFFQHFAQSMVNMGNISPLTGSQGEIRKNCRRLNNDH

SEQ ID NO: 15066 - protein, 274 aa, Zea mays subsp. mays
  misc_feature (1)..(274): Ceres Seq. ID no. 12341887
MAASLVRLHFHDCFVKGCDASVLLDNSSSIVSEKGSNPNRNSLRGFEVIDQIKAALEAACPGTVSCADIVALAARDSTALVGGPYWDVPLGRRDSLGASIQGSNNDIPAPNNTLPTIITKFKRQGLNVVDVVALSGGHTIGMSRCTSFRQRLYNQTGNGMADSTLDVSYAAKLRQGCPRSGGDNNLFPLDFITPAKFDNFYYKNLLAGKGLLSSDEILLTKSAETAALVKAYAADVNLFFQHFAQSMVNMGNISPLTGSQGEIRKNCRRLNNDH

SEQ ID NO: 15067 - DNA, 678 bp, Zea mays subsp. mays
  misc_feature (1)..(678): Ceres Seq. ID no. 12341959
atcggcaagcgaagcactccactccactccactccacctgttagaaacaagctagctcaagttctctcaacttcttgccaggaaagcgcgcaggaggtcgacgggaacgaccatggtcagcgccaagagacttgtgcaaatggccaagaagtggcagaggatggccgccacggcaaggaggcggatcgcactggcgccgccggcaaaaggagccgccgagggatcgtcgccgccgtgcagcacctcgcgtgtagctgtagccggcaagggccactgcgtggtgtactcggcggacggcaggcggttcgaggtcccgctgccgtacctcgacaccgccgtcttcggcgtgctcctcggcatgtcgcgggaggagttcgggttcgccggtggcgacggcaggatcacggtgccctgtgacgccgccgtcatggagtacgtcatgtgtttgcttcggaganacgcgtcggaanaggtggtgagggcgttcctgagctccgtggtgagccggccttgcagccactgtggaaatggctcgctggtgcagtccaccacgggagttcgccagcaagctgctgtttctagcttntgagctgaggattaattagcacttagctagattgttttattattattattattattattattattattattattattattattattattatt

SEQ ID NO: 15068 - protein, 158 aa, Zea mays subsp. mays
  misc_feature (1)..(158): Ceres Seq. ID no. 12341960
  misc_feature (116)..(116): Xaa is any aa, unknown or other
  misc_feature (120)..(120): Xaa is any aa, unknown or other
  misc_feature (158)..(158): Xaa is any aa, unknown or other
MVSAKRLVQMAKKWQRMAATARRRIALAPPAKGAAEGSSPPCSTSRVAVAGKGHCVVYSADGRRFEVPLPYLDTAVFGVLLGMSREEFGFAGGDGRITVPCDAAVMEYVMCLLRRXASEXVVRAFLSSVVSRPCSHCGNGSLVQSTTGVRQQAAVSSX

SEQ ID NO: 15069 - protein, 149 aa, Zea mays subsp. mays
  misc_feature (1)..(149): Ceres Seq. ID no. 12341961
  misc_feature (107)..(107): Xaa is any aa, unknown or other
  misc_feature (111)..(111): Xaa is any aa, unknown or other
  misc_feature (149)..(149): Xaa is any aa, unknown or other
MAKKWQRMAATARRRIALAPPAKGAAEGSSPPCSTSRVAVAGKGHCVVYSADGRRFEVPLPYLDTAVFGVLLGMSREEFGFAGGDGRITVPCDAAVMEYVMCLLRRXASEXVVRAFLSSVVSRPCSHCGNGSLVQSTTGVRQQAAVSSX

SEQ ID NO: 15070 - protein, 142 aa, Zea mays subsp. mays
  misc_feature (1)..(142): Ceres Seq. ID no. 12341962
  misc_feature (100)..(100): Xaa is any aa, unknown or other
  misc_feature (104)..(104): Xaa is any aa, unknown or other
  misc_feature (142)..(142): Xaa is any aa, unknown or other
MAATARRRIALAPPAKGAAEGSSPPCSTSRVAVAGKGHCVVYSADGRRFEVPLPYLDTAVFGVLLGMSREEFGFAGGDGRITVPCDAAVMEYVMCLLRRXASEXVVRAFLSSVVSRPCSHCGNGSLVQSTTGVRQQAAVSSX

SEQ ID NO: 15071 - DNA, 764 bp, Zea mays subsp. mays
  misc_feature (1)..(764): Ceres Seq. ID no. 12341984
taaagttcagcagtgatggcaggcggattctgttaaccactaaagctggacgtgtccatgtgctagattcattccatggcaatagcattgcgtcgtgcaatgtgaagccagtggtaaccaactcaacactggaggcgtcgttcagccctgatggaaaccatatcatatctggctccggtgacggtagtgtttatgcttggaatgttaggagtggaaaggtcgcgcgctggggaagcacagacgacgaaccgccgctggtaaggtgggctccaggatccttgatgttcgtgacaggatcatcagaactgtcatgctgggttccggacctgtctaagctgggatcctttaccattagcaagtaggtgaaaatgataagaggtggactgcccttgcaaaccctgctcgtccctgtatgctctgtcgtgtggctactcatcctttagccaggtggccgtggtaaacttgcaacctgttacaattgaatgactcgtgtagagcatcggcagtggcgatctggcttctgaagccagcggctagacaatgaagatggatccatgctttagttctgtaaaccggagattgtagctgagtattgctgcatctccttgtttctggaaggcatcttggctcgtaaagattctgcaactcagaccagatggctaatatagagagagcaaagaaacaatggatagctgggctgcttgttctgttttcagttggattccttgaactgatgtgtgattccgttgtgcatgcaccgattc

SEQ ID NO: 15072 - protein, 119 aa, Zea mays subsp. mays
  misc_feature (1)..(119): Ceres Seq. ID no. 12341985
KFSSDGRRILLTTKAGRVHVLDSFHGNSIASCNVKPVVTNSTLEASFSPDGNHIISGSGDGSVYAWNVRSGKVARWGSTDDEPPLVRWAPGSLMFVTGSSELSCWVPDLSKLGSFTISK

SEQ ID NO: 15073 - DNA, 724 bp, Zea mays subsp. mays
  misc_feature (1)..(724): Ceres Seq. ID no. 12342043
aagtatctcaggcagcatgcacgaacaattgctgggaagtctcagttctttgtaaattcatttgctaaagcccttgaggttattccacgccaactttgcgataatgctggatttgatgccactgacgttctcaataagctgaggcagaaacatgcatctggtgaaggtgctaattatggtgtagacataaacactggcggaattactgattcctttgcaaactttgtttgggaacctgctgttgtaaagatcaatgctataaatgctgcaaccgaagcttcctgccttattcttagcgtcgacgagacagtgaaaaacccaaagtcggagagcgcacaaggtgaggctgctgccggtgcgatggctggtcgcggtcgaggtgcaatgcgaggacgtggtggcaggggcatgcgcaggcgataaactgggtcaagtagatcatggtgagatttttttgcatgtttgcgagtgcttttgtgccttgcacatgtatggacgctgcacttactattgtgcgcttttggttgtgaagcagtcgtagactttttttttgtttcagaagagatgcaccaggcgtttatcagtgtaccgtccgctggatgtgttatagtagacctgagctttggattctaatttgtttgacatttatcttggtttattggcttgtcttttgaacaatgagaaaatcagtgttgtagtttgcgatcctcgtgcgctcaagcgt

SEQ ID NO: 15074 - protein, 140 aa, Zea mays subsp. mays
  misc_feature (1)..(140): Ceres Seq. ID no. 12342044
KYLRQHARTIAGKSQFFVNSFAKALEVIPRQLCDNAGFDATDVLNKLRQKHASGEGANYGVDINTGGITDSFANFVWEPAVVKINAINAATEASCLILSVDETVKNPKSESAQGEAAAGAMAGRGRGAMRGRGGRGMRRR

SEQ ID NO: 15075 - DNA, 861 bp, Zea mays subsp. mays
  misc_feature (1)..(861): Ceres Seq. ID no. 12342053
aacgaagagagggaaaacaagtgtggaagagggaaaactggaaaaggcacagcaaaccgagaaaatggcggctcggcgtgggcgagagtgggacggggacgagcagggcgcggcgctgccaacgccggcgcccctcggcgcgccggtcgtctgccttctcagctccgccggagacctagccgccggcgccttcgtaggctccctcgtcggatacggaaaaggtttgatcacaaaccaaggcacgaaggcttgtcttagcattgctggatcttctgcaaagacatttgctgctcttgctggtgtccaaagtttcatcatgtgcttgctaagaagactgcgtgggaaagatgacatgatcaatgcgggtatggcaggttgttgcacaggcattgctttgagctttccaggtgcgccccaggcaatgttccacagctgtgtcaccttcgcagcattctcatgcataatggacggtctcagcaagcagcaggcagcaatggcactcacacttgatgtgaaatctccaactgtcaagtatgaggagggccgggtcatcccaccattcactcttccgccgcttctggatgcattggatcctctaggttcattctgccagacccttatcaagcctaagcattaggagtgcgctgaggcttgttaccccaaaaaggcagtttcgatctatagtttggcactgtatgctctataaccgttctgaatttgtctccagtcatgctgttcaagtttggtaactgtagtggcgctataggacatatgcccattttttgtcaatggtacattttttatgaaacttgctgaagagattataaccataagattgttcattggtgaagatttgatagt

SEQ ID NO: 15076 - protein, 211 aa, Zea mays subsp. mays
  misc_feature (1)..(211): Ceres Seq. ID no. 12342054
TKRGKTSVEEGKLEKAQQTEKMAARRGREWDGDEQGAALPTPAPLGAPVVCLLSSAGDLAAGAFVGSLVGYGKGLITNQGTKACLSIAGSSAKTFAALAGVQSFIMCLLRRLRGKDDMINAGMAGCCTGIALSFPGAPQAMFHSCVTFAAFSCIMDGLSKQQAAMALTLDVKSPTVKYEEGRVIPPFTLPPLLDALDPLGSFCQTLIKPKH

SEQ ID NO: 15077 - protein, 190 aa, Zea mays subsp. mays
  misc_feature (1)..(190): Ceres Seq. ID no. 12342055
MAARRGREWDGDEQGAALPTPAPLGAPVVCLLSSAGDLAAGAFVGSLVGYGKGLITNQGTKACLSIAGSSAKTFAALAGVQSFIMCLLRRLRGKDDMINAGMAGCCTGIALSFPGAPQAMFHSCVTFAAFSCIMDGLSKQQAAMALTLDVKSPTVKYEEGRVIPPFTLPPLLDALDPLGSFCQTLIKPKH

SEQ ID NO: 15078 - protein, 106 aa, Zea mays subsp. mays
  misc_feature (1)..(106): Ceres Seq. ID no. 12342056
MCLLRRLRGKDDMINAGMAGCCTGIALSFPGAPQAMFHSCVTFAAFSCIMDGLSKQQAAMALTLDVKSPTVKYEEGRVIPPFTLPPLLDALDPLGSFCQTLIKPKH

SEQ ID NO: 15079 - DNA, 695 bp, Zea mays subsp. mays
  misc_feature (1)..(695): Ceres Seq. ID no. 12342067
aaaaacctcccacgcacattcttggcagctactctactcaatggcgctgtcctcctccggccacccggcgacgacccgcctgctcttctcgcttctgctcgtgggctcggcggcgggcttgccggagcgggcggccatcgacagggtcaaccggcgaggcccttccctcggcctcgtcatgtcctacgtcgacgaggccaccgcgctgcaggcctccggctacttccagccttggcgtgccctccctttcgttgacctctacggacggcggtatcacatcggcagcattcggggcgtgaacgtgatatacgcactgacagggcaacgcaggctgaacgccgccgtcacagtacagacgctcatcgacgtcttcagcgtgtccggcattgttcactacggcacggcagggagctgcaacgactccatctccttcggcgacgtcagtgtccccaggctcgtcgcctacacgggtgcctggacatggaagaagttcagatcaccgagagagtcatcggcggaattgagcttcggcgaatacaacgtcccagacggaggaggaggggagaatctgctcggatccctcaagtacagaaacgaggagctttactcggccggcaagcccatggaagaggtcttctggctgcctgtgcattcggcatggttcagaactgcagaacagctcacggtggaacttg

SEQ ID NO: 15080 - protein, 231 aa, Zea mays subsp. mays
  misc_feature (1)..(231): Ceres Seq. ID no. 12342068
KTSHAHSWQLLYSMALSSSGHPATTRLLFSLLLVGSAAGLPERAAIDRVNRRGPSLGLVMSYVDEATALQASGYFQPWRALPFVDLYGRRYHIGSIRGVNVIYALTGQRRLNAAVTVQTLIDVFSVSGIVHYGTAGSCNDSISFGDVSVPRLVAYTGAWTWKKFRSPRESSAELSFGEYNVPDGGGGENLLGSLKYRNEELYSAGKPMEEVFWLPVHSAWFRTAEQLTVEL

SEQ ID NO: 15081 - protein, 218 aa, Zea mays subsp. mays
  misc_feature (1)..(218): Ceres Seq. ID no. 12342069
MALSSSGHPATTRLLFSLLLVGSAAGLPERAAIDRVNRRGPSLGLVMSYVDEATALQASGYFQPWRALPFVDLYGRRYHIGSIRGVNVIYALTGQRRLNAAVTVQTLIDVFSVSGIVHYGTAGSCNDSISFGDVSVPRLVAYTGAWTWKKFRSPRESSAELSFGEYNVPDGGGGENLLGSLKYRNEELYSAGKPMEEVFWLPVHSAWFRTAEQLTVEL

SEQ ID NO: 15082 - protein, 172 aa, Zea mays subsp. mays
  misc_feature (1)..(172): Ceres Seq. ID no. 12342070
MSYVDEATALQASGYFQPWRALPFVDLYGRRYHIGSIRGVNVIYALTGQRRLNAAVTVQTLIDVFSVSGIVHYGTAGSCNDSISFGDVSVPRLVAYTGAWTWKKFRSPRESSAELSFGEYNVPDGGGGENLLGSLKYRNEELYSAGKPMEEVFWLPVHSAWFRTAEQLTVEL

SEQ ID NO: 15083 - DNA, 1574 bp, Zea mays subsp. mays
  misc_feature (1)..(1574): Ceres Seq. ID no. 12342075
atagggacggagacggagccacggtcgcacagagcagtcttcgctacggccacgggagtagctctggccatgcggccctcaacggctacctgtgctatcctccctccgcctacctgctcctcccgtcgtttcccgctccgcagcttcatcggtctccggtggtccgccccccgtttccaggttagggagcgagctggtgcgtccgtagcggttgtcaatggcaagccgggatgcagcttcagactcggagtacctactttaaatgtttgtcaatctcgccaaaggtctgttgtcattagaaatgaacatgctcaaaatgctgaccttccacgaaaatattcaaaaagagagaagaaaccatttcctatcccagtgctggagttaaggcgccgagcaaaggagaggatgaaggctgcacaagggaaaccgaaacaaccaatgcctccaccaaaaaatggaatgttagtgcgtagacttataccagttgcatacaaagtgtacaatgcaagaattttgctgatcaacaacttgaagaggcttatgaaagtagtaccagtaaaaggctgcaagtattgcagcgagatacatgttggatctgttggacatcctttccgaacatgccgaggaatgtcatcagatcaacgtagaggagaacatgactggggaagtactctagtggaggcagttttcttacccgtcgaagcctatcatctagaggaccgtctagggaatcgcattcctcatgatcagaggtttactgtaccccgcattcccgctctcgtggaactttgcatccaagctggagttgacctccccgagtaccccacaaagtgtcgaagaaagcctatcattaaaatcggaagaaaagagtttgttgatgcaaatgaagacgacctaccagaaccagagcctgacagatttaggcagccacttcttgaggaactacgttatgatgagattattgctccatctagcccagaggagacggtggctcttgccgaggagacacttgaagcgtgggaggccgttcgggacggagccttgaagcttatgaagggctatgcagtgagggtttgtggatactgccctgaggtgcatgttgggccaactggccacaaagcacggaactgtggagcttttaagcaccagcagaggaatggacaacatggatggcaagcagcggtgctcgatgacctgatacctcctaggtacgtgtggcacatgcctgaatcgggggaagaactgcagagggagctaaagaccttctacggtcaggcaccagctgttgttgagatgtgcattcagggtggcgcaaaagttccggagaagtacaaagccactatgagactagacataggaatcccctctagtttgaaggaggctgaaatggtcgtctgatcctcccaatgatctgggcagatttgatcaacctgtaattgagttttttcttttgtgttgaaaagatgatgtcgtcaccaagctccatcgtggcttgacataggttgaatctgttagccaatgtgtatatatccgaactcagatgagataattctcgttcggttttctttcagtcc

SEQ ID NO: 15084 - protein, 465 aa, Zea mays subsp. mays
  misc_feature (1)..(465): Ceres Seq. ID no. 12342076
IGTETEPRSHRAVFATATGVALAMRPSTATCAILPPPTCSSRRFPLRSFIGLRWSAPRFQVRERAGASVAVVNGKPGCSFRLGVPTLNVCQSRQRSVVIRNEHAQNADLPRKYSKREKKPFPIPVLELRRRAKERMKAAQGKPKQPMPPPKNGMLVRRLIPVAYKVYNARILLINNLKRLMKVVPVKGCKYCSEIHVGSVGHPFRTCRGMSSDQRRGEHDWGSTLVEAVFLPVEAYHLEDRLGNRIPHDQRFTVPRIPALVELCIQAGVDLPEYPTKCRRKPIIKIGRKEFVDANEDDLPEPEPDRFRQPLLEELRYDEIIAPSSPEETVALAEETLEAWEAVRDGALKLMKGYAVRVCGYCPEVHVGPTGHKARNCGAFKHQQRNGQHGWQAAVLDDLIPPRYVWHMPESGEELQRELKTFYGQAPAVVEMCIQGGAKVPEKYKATMRLDIGIPSSLKEAEMVV

SEQ ID NO: 15085 - protein, 442 aa, Zea mays subsp. mays
  misc_feature (1)..(442): Ceres Seq. ID no. 12342077
MRPSTATCAILPPPTCSSRRFPLRSFIGLRWSAPRFQVRERAGASVAVVNGKPGCSFRLGVPTLNVCQSRQRSVVIRNEHAQNADLPRKYSKREKKPFPIPVLELRRRAKERMKAAQGKPKQPMPPPKNGMLVRRLIPVAYKVYNARILLINNLKRLMKVVPVKGCKYCSEIHVGSVGHPFRTCRGMSSDQRRGEHDWGSTLVEAVFLPVEAYHLEDRLGNRIPHDQRFTVPRIPALVELCIQAGVDLPEYPTKCRRKPIIKIGRKEFVDANEDDLPEPEPDRFRQPLLEELRYDEIIAPSSPEETVALAEETLEAWEAVRDGALKLMKGYAVRVCGYCPEVHVGPTGHKARNCGAFKHQQRNGQHGWQAAVLDDLIPPRYVWHMPESGEELQRELKTFYGQAPAVVEMCIQGGAKVPEKYKATMRLDIGIPSSLKEAEMVV

SEQ ID NO: 15086 - protein, 330 aa, Zea mays subsp. mays
  misc_feature (1)..(330): Ceres Seq. ID no. 12342078
MKAAQGKPKQPMPPPKNGMLVRRLIPVAYKVYNARILLINNLKRLMKVVPVKGCKYCSEIHVGSVGHPFRTCRGMSSDQRRGEHDWGSTLVEAVFLPVEAYHLEDRLGNRIPHDQRFTVPRIPALVELCIQAGVDLPEYPTKCRRKPIIKIGRKEFVDANEDDLPEPEPDRFRQPLLEELRYDEIIAPSSPEETVALAEETLEAWEAVRDGALKLMKGYAVRVCGYCPEVHVGPTGHKARNCGAFKHQQRNGQHGWQAAVLDDLIPPRYVWHMPESGEELQRELKTFYGQAPAVVEMCIQGGAKVPEKYKATMRLDIGIPSSLKEAEMVV

SEQ ID NO: 15087 - DNA, 1244 bp, Zea mays subsp. mays
  misc_feature (1)..(1244): Ceres Seq. ID no. 12342112
gttcgccgctcttcgctcctcggtcctcagccctcacacgccgcccgcccgcgacgaagcccgcatagccgccgccaagcgccggagttgccacctaccgcgcgcccatctgccgccgatgctgcgcactcatctgctacccgaggcttggcggcggccactgccccaggaggcaggagcgcgacaccaaagtccgcgcatttccttccaccgagccgcaccaagatccgggatccaaggtggccaagttcgttgcggcggccctgaacttcgatggctgtcctcgtcacggaattcgtcctcagattcacagccatggactacaatgtgcgtgaatgcagactataccactcctgctgattctgtcgccacctcggagcaagcaggtggtgaagctgaggccaccttagaaacaggtggtgaagctgcggccaccttggagcaaacaggtggcgaaaccgaagagccgaccattgtagcacctgctaatgaatatacagtgcaggaggctgctcctcagcagaagtgtgcaaagatacacgacttttgcctagggataccttttggtggacttttactctccatgggccttattggatttctcttctggaggagccctgcgagtcttacctttggtgttgcacctggccttgccatattggccctggctgtacttagcctcaatgtctggaggagcgggaagtccagcttaccgttcatactggcgcaagcaggcattgccgctgcggtagcatggaagcacggccaggcgtacaccactacgaggaagctgcttccgtggggcttctacgtcgcgctaagtgccgcaatgatctgcttctactcctacgttcttcttgccggagggaatccgcctcctaagaaggcgaaggcgaaggctgctgcttgatttgatgttgaaggcattcaccggagcgtctcataattgcactacctttctctggtaaatagggttgtggtatggcctctgtttacttagtaaaagactgaggagataagactgtcccccctatgctgcataactgttgttgtttcctttatatatacatgatcaataagggctgggttggttccattccatcccactacccatctcatttatggtggtaaatagggttggcctttcttttttggctttggtttgaagtgtttgacgagattttgtacatttcctttttagagagaagcacattctatcacaagaggctcgacatgctattgcc

SEQ ID NO: 15088 - protein, 302 aa, Zea mays subsp. mays
  misc_feature (1)..(302): Ceres Seq. ID no. 12342113
FAALRSSVLSPHTPPARDEARIAAAKRRSCHLPRAHLPPMLRTHLLPEAWRRPLPQEAGARHQSPRISFHRAAPRSGIQGGQVRCGGPELRWLSSSRNSSSDSQPWTTMCVNADYTTPADSVATSEQAGGEAEATLETGGEAAATLEQTGGETEEPTIVAPANEYTVQEAAPQQKCAKIHDFCLGIPFGGLLLSMGLIGFLFWRSPASLTFGVAPGLAILALAVLSLNVWRSGKSSLPFILAQAGIAAAVAWKHGQAYTTTRKLLPWGFYVALSAAMICFYSYVLLAGGNPPPKKAKAKAAA

SEQ ID NO: 15089 - protein, 263 aa, Zea mays subsp. mays
  misc_feature (1)..(263): Ceres Seq. ID no. 12342114
MLRTHLLPEAWRRPLPQEAGARHQSPRISFHRAAPRSGIQGGQVRCGGPELRWLSSSRNSSSDSQPWTTMCVNADYTTPADSVATSEQAGGEAEATLETGGEAAATLEQTGGETEEPTIVAPANEYTVQEAAPQQKCAKIHDFCLGIPFGGLLLSMGLIGFLFWRSPASLTFGVAPGLAILALAVLSLNVWRSGKSSLPFILAQAGIAAAVAWKHGQAYTTTRKLLPWGFYVALSAAMICFYSYVLLAGGNPPPKKAKAKAAA

SEQ ID NO: 15090 - protein, 194 aa, Zea mays subsp. mays
  misc_feature (1)..(194): Ceres Seq. ID no. 12342115
MCVNADYTTPADSVATSEQAGGEAEATLETGGEAAATLEQTGGETEEPTIVAPANEYTVQEAAPQQKCAKIHDFCLGIPFGGLLLSMGLIGFLFWRSPASLTFGVAPGLAILALAVLSLNVWRSGKSSLPFILAQAGIAAAVAWKHGQAYTTTRKLLPWGFYVALSAAMICFYSYVLLAGGNPPPKKAKAKAAA

SEQ ID NO: 15091 - DNA, 1018 bp, Zea mays subsp. mays
  misc_feature (1)..(1018): Ceres Seq. ID no. 12342116
accagaacacttgagcagactagcaaggccttcagaccgggagggctccctgtcctgtcccccgcgccgccgcggatggccggagccaccacgccggcatcaggcgccctcgtcaggctctgcctgccttcgctcctcctctttctgtaccggtgctgcagatgtgaggctgttgagatggagagaacccttgcgatgatcaagcccgatggtttgtcaggtaagtacacagaagcaatcaaggaggtcatcttggattctggatttcatatcgtcaaagaaaccgaggtccagcttgatgctgagagggcatctgtcttctatgcggagcattcccagagaagcttctttgacagcctagtcaagtacataacaagtggtccagttcttgctatggttctggaaagacctgacgccgttgcgcaatggcgcactttgattggaccaactgatgcaaaaaaggccaaaacctctcatccaaacagcattagagcaatgtgtgggctggactctgagaaaaattgcgtgcatggttcggattcaccagaatctgcagacagagagatctcatttttcttcggagaagctgaatccgtaactgtggaacatgatgagctatagacgccacactggtatcagtggcaatattggccggctcattggacaacgtgggagagtatcgactctgctgcttctagtgttcgtcatgcttcttttatgaactaaacccgaagacgctgcaatttgaggaggggatgtcagttgtcacagaggagagagtcatttttagggctagtttggaaatctcatttttttcaagagatttttattttcctaaaggaaattagtttatttttctttgagaaaatagaattcccttgggaaattagagtttctaaacgagcccttaatttcgtaaaattatgtccggagtccatatttcctatcggagcaccatggtccttgaacttgcaaaactatatggtgcaaaccaaatattgttttttcatccgtgttg

SEQ ID NO: 15092 - protein, 206 aa, Zea mays subsp. mays
  misc_feature (1)..(206): Ceres Seq. ID no. 12342117
TRTLEQTSKAFRPGGLPVLSPAPPRMAGATTPASGALVRLCLPSLLLFLYRCCRCEAVEMERTLAMIKPDGLSGKYTEAIKEVILDSGFHIVKETEVQLDAERASVFYAEHSQRSFFDSLVKYITSGPVLAMVLERPDAVAQWRTLIGPTDAKKAKTSHPNSIRAMCGLDSEKNCVHGSDSPESADREISFFFGEAESVTVEHDEL

SEQ ID NO: 15093 - protein, 181 aa, Zea mays subsp. mays
  misc_feature (1)..(181): Ceres Seq. ID no. 12342118
MAGATTPASGALVRLCLPSLLLFLYRCCRCEAVEMERTLAMIKPDGLSGKYTEAIKEVILDSGFHIVKETEVQLDAERASVFYAEHSQRSFFDSLVKYITSGPVLAMVLERPDAVAQWRTLIGPTDAKKAKTSHPNSIRAMCGLDSEKNCVHGSDSPESADREISFFFGEAESVTVEHDEL

SEQ ID NO: 15094 - protein, 147 aa, Zea mays subsp. mays
  misc_feature (1)..(147): Ceres Seq. ID no. 12342119
MERTLAMIKPDGLSGKYTEAIKEVILDSGFHIVKETEVQLDAERASVFYAEHSQRSFFDSLVKYITSGPVLAMVLERPDAVAQWRTLIGPTDAKKAKTSHPNSIRAMCGLDSEKNCVHGSDSPESADREISFFFGEAESVTVEHDEL

SEQ ID NO: 15095 - DNA, 1685 bp, Zea mays subsp. mays
  misc_feature (1)..(1685): Ceres Seq. ID no. 12342127
aaatagtcaaataccaacataccaactttatcttatttactttatttttcttagaatagacttacgtttagccttagcagtagctttccaatctatagtcttcacctccttcacatctacgtcatcttatgatactttgatggtatgattctgaagcaattttagaaccattcctctctgacgagatcccttctaaaaggtgggacctaggtctcgtttgaaatcctcgtcacggacaattcgcagagaggacattaaagctctacatatcacagatattataggataatgcacacattatccaatgcaagaatatgagatattgaacggcgtcatcaacactgggcttttccatttctccaacgtccacgagacgccgccacgccatcggcatgggcagggcagcagcacgacttctaccgcgtcccattattgcccagttccatctccatccccaccatctcgtccaccagtcgtgtcttccctatctccacgctaccgcacctgtcgccgccgcctccgccctctttgctcccggccccacttcaagcccaagcgtccgcgtctcccgcccgcgccgccacgcctcgatgtccgccgccgccgattcctcctcctccattggtaaaccttccgtccacccaatgctgccgcccgctggcgctttttccgtaattcacctgattggccaattccagttctgttctggtgtaattgttatttccgcgttgcatgatcacagtagtatcgggtgatgcagcggttagctcgctctcacccgagagcatcgagcacaacgatctgctcatagttgggcctggcgtgctcggccgaatcgtcgctgagatgtggaaacaggaatatccaggttgcaaggtttatggccagactgcaaccacagatcatcacagtgaattgactgatattggtatcattccctccttgaaggggtccgtaccaggtccaaaatttccatatgttatcttctgtgctcctccatatcgttctgaggattatgctggagatctgagagtagcagcttcaaattggaatggaaaaggctctttcctattcacctcgagtactgctgtgtatgactgcagtgacaatggattctgcagtgaggattctccttgtgtacccattggtcaaagcactcgtactgatgtgcttctaaaagctgaaaatgttgtccttgaggcaggcggctgtgttcttaggctagtaggactttatatcagatcggggtcctcatgtttactggctgtcaaaaggaaccttggatgtgcgtcctgatcatatactcaatctgatacattatgaagatgcagcctctcttgtaatttccatcatgaaaaagagattacggagctgcatctttgtgggttgtgacaacgagcctctgtccaggctagagatcatggaccgtgtcaacagaagcaggaaatttgacacacagtttcatggcttcactgggactgatggttcgctggggaagaggatggacaactccaaaactcgggcaaagcttggatggcagcccaagtatccgagctttacagagttccttggtctcagcaatctctaactttcatgcgatgtcactaaatacctgttattaaagatgaatatactgatacataaaagagatgatgacagatttggaagtggaatgttgtttgctt

SEQ ID NO: 15096 - protein, 187 aa, Zea mays subsp. mays
  misc_feature (1)..(187): Ceres Seq. ID no. 12342128
MITVVSGDAAVSSLSPESIEHNDLLIVGPGVLGRIVAEMWKQEYPGCKVYGQTATTDHHSELTDIGIIPSLKGSVPGPKFPYVIFCAPPYRSEDYAGDLRVAASNWNGKGSFLFTSSTAVYDCSDNGFCSEDSPCVPIGQSTRTDVLLKAENVVLEAGGCVLRLVGLYIRSGSSCLLAVKRNLGCAS

SEQ ID NO: 15097 - protein, 149 aa, Zea mays subsp. mays
  misc_feature (1)..(149): Ceres Seq. ID no. 12342129
MWKQEYPGCKVYGQTATTDHHSELTDIGIIPSLKGSVPGPKFPYVIFCAPPYRSEDYAGDLRVAASNWNGKGSFLFTSSTAVYDCSDNGFCSEDSPCVPIGQSTRTDVLLKAENVVLEAGGCVLRLVGLYIRSGSSCLLAVKRNLGCAS

SEQ ID NO: 15098 - protein, 120 aa, Zea mays subsp. mays
  misc_feature (1)..(120): Ceres Seq. ID no. 12342130
MGRAAARLLPRPIIAQFHLHPHHLVHQSCLPYLHATAPVAAASALFAPGPTSSPSVRVSRPRRHASMSAAADSSSSIGKPSVHPMLPPAGAFSVIHLIGQFQFCSGVIVISALHDHSSIG

SEQ ID NO: 15099 - DNA, 1661 bp, Zea mays subsp. mays
  misc_feature (1)..(1661): Ceres Seq. ID no. 12342131
aacgagcgccaccgccttgatcccgcccgctcctccccagatctcctcgccattgccgccgccctgccaggattcgcgccctactcgcccagatccgaccgcggctctgattttccaactgacgcaggagcggtgggtctgaccgggcgcgacccgtcttctcatgggcgagacagcgtgatccctgcggctcgattgtaaattcgtgatctttcggggcattccttggtttgtctgtcggtgctggtggtgctgcgtttggagggccgcggagatgggcgtcggcggggagaagttccagctggggacggtgggggcgctgagcctctccgtggtgtcctctgtctccattgtcatctgcaacaaggcgctcatgagctccctcggctttaacttcgccactaccttgacgagctggcatctgctggttacattctgctcccttcatgtagcattatggatgaagttctttgagcataagccttttgattcaagaactgtcatgggatttggagtacttaacggaatctccattgggctcctcaacttgagtcttggcttcaactctgttgggttttaccagatgactaagctggcaatcatcccgtgcactgtcattttagagacacttttcttcaggaagaagttcagtcggagtatccagatgtccctttctgtgcttcttcttggtgttggtgttgcaactgtcactgatctgcaactcaatgctgtgggatccatactgtccttgctggcaattatcacgacttgcattgctcaaattatgacaaacactatccagaagaagttcaaggtctcatcaacccaactgctttaccagtcttgcccttaccaatcactgaccctgtttctcattggccccttccttgatggctttttgactaaccaaaatgtctttgcttttaattatacatctcaagttgtgtttttcatcgtcctgtcatgcttgatatctgtttcagtgaacttcagcactttccttgtgatcggaaagacatctcctgttacttaccaagtcctgggccatcttaaaacatgccttgttcttgcttttggttatgttttgcttcacgatccgtttagctggagaaacatacttggaatcctaattgctgtagttggaatggtcttgtattcatacttctgcacagtggagacccagcaaaaaaatgttgaagtctccccacaacaggtgaaagaaagcgaggcaggccctttgatcgcagactctatgagcaaagttgaaaacgggggtggtggtgttgatgacgagcctttgaaggtacccatgtggagctcaaagtactcgcgggagtgaaaaggtcacgatggcatggcaccatacaggattcaatttagtaggcagatagtagggttggaagccaacccagagtgtaatgaacatttcagttacatttttgggcttctttagtgtcgcagtctactagcagttaaaggatctgtttcttggaaggatcctaccttcagggctctcagacctaccttgaaactagacagcaggtattgtatgattgtatctcgatatgctccacatcctcttactgtaacttccaactggtacatggcgtgcctatatccaaagatagacctcattctttttgtatcaagaagatccgggt

SEQ ID NO: 15100 - protein, 354 aa, Zea mays subsp. mays
  misc_feature (1)..(354): Ceres Seq. ID no. 12342132
MGVGGEKFQLGTVGALSLSVVSSVSIVICNKALMSSLGFNFATTLTSWHLLVTFCSLHVALWMKFFEHKPFDSRTVMGFGVLNGISIGLLNLSLGFNSVGFYQMTKLAIIPCTVILETLFFRKKFSRSIQMSLSVLLLGVGVATVTDLQLNAVGSILSLLAIITTCIAQIMTNTIQKKFKVSSTQLLYQSCPYQSLTLFLIGPFLDGFLTNQNVFAFNYTSQVVFFIVLSCLISVSVNFSTFLVIGKTSPVTYQVLGHLKTCLVLAFGYVLLHDPFSWRNILGILIAVVGMVLYSYFCTVETQQKNVEVSPQQVKESEAGPLIADSMSKVENGGGGVDDEPLKVPMWSSKYSRE

SEQ ID NO: 15101 - protein, 321 aa, Zea mays subsp. mays
  misc_feature (1)..(321): Ceres Seq. ID no. 12342133
MSSLGFNFATTLTSWHLLVTFCSLHVALWMKFFEHKPFDSRTVMGFGVLNGISIGLLNLSLGFNSVGFYQMTKLAIIPCTVILETLFFRKKFSRSIQMSLSVLLLGVGVATVTDLQLNAVGSILSLLAIITTCIAQIMTNTIQKKFKVSSTQLLYQSCPYQSLTLFLIGPFLDGFLTNQNVFAFNYTSQVVFFIVLSCLISVSVNFSTFLVIGKTSPVTYQVLGHLKTCLVLAFGYVLLHDPFSWRNILGILIAVVGMVLYSYFCTVETQQKNVEVSPQQVKESEAGPLIADSMSKVENGGGGVDDEPLKVPMWSSKYSRE

SEQ ID NO: 15102 - protein, 292 aa, Zea mays subsp. mays
  misc_feature (1)..(292): Ceres Seq. ID no. 12342134
MKFFEHKPFDSRTVMGFGVLNGISIGLLNLSLGFNSVGFYQMTKLAIIPCTVILETLFFRKKFSRSIQMSLSVLLLGVGVATVTDLQLNAVGSILSLLAIITTCIAQIMTNTIQKKFKVSSTQLLYQSCPYQSLTLFLIGPFLDGFLTNQNVFAFNYTSQVVFFIVLSCLISVSVNFSTFLVIGKTSPVTYQVLGHLKTCLVLAFGYVLLHDPFSWRNILGILIAVVGMVLYSYFCTVETQQKNVEVSPQQVKESEAGPLIADSMSKVENGGGGVDDEPLKVPMWSSKYSRE

SEQ ID NO: 15103 - DNA, 1546 bp, Zea mays subsp. mays
  misc_feature (1)..(1546): Ceres Seq. ID no. 12342194
agggaagcttcttccactacagtccttgaggccgcccatcaacgactagacgctggtcaagctgcaccaaccctagccccataaccctaggtccctcctccacgcccccttccagagaggcgaggaaggaggcgaaaggaaccatggattcctccggcggcggcggtggagcgcagatcaagggtatggcgacgcacgggggccgctacgtgctgtacaacgtgtacggaaacctcttcgaggtctcctccaagtacgccccacccatccgccccatcggtcgcggcgcctacggcattgtctgcgcggctgtcaactcgcagtcaggggaggaggttgcgatcaagaaggttggcaatgcgttcgacaaccacatcgacgccaagcggacgctcagggaaatcaagctgctgcgccacatggaccatgagaacatccttgccttaaaggatgtaattcggcccccaactagagagaactttaatgacgtgtacattgttactgagttaatggatacagatctccatcagatcgtacgctcaaatcagccattgactgatgatcattgccagtacttcttgtatcagttgttacgagggctaaaatatgtgcactcagcaaatatattgcaccgcgatctgaagccgagcaatttgttcctaaatgcaaattgtgacctcaagattgcagactttgggcttgcaaggaccacttcagagacagatctcatgacagagtatgtggtcactcgttggtaccgggcaccagagctgctgttgaactgttcacagtatactgctgccattgatgtctggtcagttggatgcatactaggtgaaatcgttactcgtcaacccctgtttcctggacgggattacatccagcaattaaaattgatcactgagctcataggctctccagatgatgcaagcctgggatttcttcgaagtgataatgcaaaaagatacatgaaacaactaccacagtttccaagacaggacttccgcctgcgtttccgcaacatgtctcctggcgcagtcgatttgttggaaaggatgcttgtgtttgatccaagcagacggattacagttgatgaggctctgcatcatccatacttggcttcacttcatgagatcaatgatgaacctacctgccctgcacctttcagctttgattttgagcaaccatcctttacagaagcgcatataaaagaactcatctggagggaatctttagcatttaacccagagcctccctactaatatcaaaaggatgatgagttatctgctagaggcatatgaagatctctaggtccagcggacgcaagaacttatgtctgtgtcagtgtgcgttgattatttacgtgctgtttgttgggcatacgggcatgggttggtgctgcaattgcaactctattatggcttgtgagagcaaacaaacgtctgtattcattttcagatgcctgaacccaggcttgtattataccgcttgactccataaattattcttgtgtatctatgcttgtaattttgcagacaattactcg

SEQ ID NO: 15104 - protein, 372 aa, Zea mays subsp. mays
  misc_feature (1)..(372): Ceres Seq. ID no. 12342195
MDSSGGGGGAQIKGMATHGGRYVLYNVYGNLFEVSSKYAPPIRPIGRGAYGIVCAAVNSQSGEEVAIKKVGNAFDNHIDAKRTLREIKLLRHMDHENILALKDVIRPPTRENFNDVYIVTELMDTDLHQIVRSNQPLTDDHCQYFLYQLLRGLKYVHSANILHRDLKPSNLFLNANCDLKIADFGLARTTSETDLMTEYVVTRWYRAPELLLNCSQYTAAIDVWSVGCILGEIVTRQPLFPGRDYIQQLKLITELIGSPDDASLGFLRSDNAKRYMKQLPQFPRQDFRLRFRNMSPGAVDLLERMLVFDPSRRITVDEALHHPYLASLHEINDEPTCPAPFSFDFEQPSFTEAHIKELIWRESLAFNPEPPY

SEQ ID NO: 15105 - protein, 358 aa, Zea mays subsp. mays
  misc_feature (1)..(358): Ceres Seq. ID no. 12342196
MATHGGRYVLYNVYGNLFEVSSKYAPPIRPIGRGAYGIVCAAVNSQSGEEVAIKKVGNAFDNHIDAKRTLREIKLLRHMDHENILALKDVIRPPTRENFNDVYIVTELMDTDLHQIVRSNQPLTDDHCQYFLYQLLRGLKYVHSANILHRDLKPSNLFLNANCDLKIADFGLARTTSETDLMTEYVVTRWYRAPELLLNCSQYTAAIDVWSVGCILGEIVTRQPLFPGRDYIQQLKLITELIGSPDDASLGFLRSDNAKRYMKQLPQFPRQDFRLRFRNMSPGAVDLLERMLVFDPSRRITVDEALHHPYLASLHEINDEPTCPAPFSFDFEQPSFTEAHIKELIWRESLAFNPEPPY

SEQ ID NO: 15106 - protein, 280 aa, Zea mays subsp. mays
  misc_feature (1)..(280): Ceres Seq. ID no. 12342197
MDHENILALKDVIRPPTRENFNDVYIVTELMDTDLHQIVRSNQPLTDDHCQYFLYQLLRGLKYVHSANILHRDLKPSNLFLNANCDLKIADFGLARTTSETDLMTEYVVTRWYRAPELLLNCSQYTAAIDVWSVGCILGEIVTRQPLFPGRDYIQQLKLITELIGSPDDASLGFLRSDNAKRYMKQLPQFPRQDFRLRFRNMSPGAVDLLERMLVFDPSRRITVDEALHHPYLASLHEINDEPTCPAPFSFDFEQPSFTEAHIKELIWRESLAFNPEPPY

SEQ ID NO: 15107 - DNA, 923 bp, Zea mays subsp. mays
  misc_feature (1)..(923): Ceres Seq. ID no. 12342226
acaaaagttttagttccaactgggagagctagcatggcaagttcgcgctgctttgagaacccgccggtgctggagccggccagcggaggaggcgaggtggttgacgacttcggcgggcagaaggcctacgtcagcggctccgccgggtccaaggccgccgtcgtcctcatctccgacgccttcgggttcgaagcgccaaacctgaggaagatagccgacaaagttgcttcgctcggttacttcgttgtggtgcccgatttcctgcatggggatccatatgaccccagcaataatgcccatagcaatcctggaacgtggatacagtcgcacaatccgcaaacggcattcgaagaggcaaaaccggtaattgcggctataaaggagaagggtgtgtcgagcatcggagctgcaggttactgttggggcgcaaaggtggttgtggaactggcgaaagttcacgagatccaggctgctgtgttggcacacccttctttactaactgtcgatgatatgaaagatgtcaagtgccccatttccatacttggagctgaaatcgacaggtcagccccgcctgaattgctaaagcagtttgagcaagttctttcagcgaaccccgaggtcgatcactttgtcaaggtttttcctggcgtagcgcatggatgggctgtgaggtacagcgacgacgacgcagcggctgtcacgagtgcggaggaagctttgcgcgacatgagccactggttcaacaagtacctgaactgaattatgtggcggcatatgtgcgtgcaataagctcctaatggtgaacattatgcagggcccccatgctatgcgtgtgttttaaaagtcctcttagtggtggtatttgtactggtctcttacgcaatttttataacatttatcgagaataaagtgatgacacggtg

SEQ ID NO: 15108 - protein, 252 aa, Zea mays subsp. mays
  misc_feature (1)..(252): Ceres Seq. ID no. 12342227
TKVLVPTGRASMASSRCFENPPVLEPASGGGEVVDDFGGQKAYVSGSAGSKAAVVLISDAFGFEAPNLRKIADKVASLGYFVVVPDFLHGDPYDPSNNAHSNPGTWIQSHNPQTAFEEAKPVIAAIKEKGVSSIGAAGYCWGAKVVVELAKVHEIQAAVLAHPSLLTVDDMKDVKCPISILGAEIDRSAPPELLKQFEQVLSANPEVDHFVKVFPGVAHGWAVRYSDDDAAAVTSAEEALRDMSHWFNKYLN

SEQ ID NO: 15109 - protein, 241 aa, Zea mays subsp. mays
  misc_feature (1)..(241): Ceres Seq. ID no. 12342228
MASSRCFENPPVLEPASGGGEVVDDFGGQKAYVSGSAGSKAAVVLISDAFGFEAPNLRKIADKVASLGYFVVVPDFLHGDPYDPSNNAHSNPGTWIQSHNPQTAFEEAKPVIAAIKEKGVSSIGAAGYCWGAKVVVELAKVHEIQAAVLAHPSLLTVDDMKDVKCPISILGAEIDRSAPPELLKQFEQVLSANPEVDHFVKVFPGVAHGWAVRYSDDDAAAVTSAEEALRDMSHWFNKYLN

SEQ ID NO: 15110 - DNA, 1775 bp, Zea mays subsp. mays
  misc_feature (1)..(1775): Ceres Seq. ID no. 12342268
ctcggtgctctcgagtctcgagagtcgagactcaggggacctgatttcctcgtccggccatggcgaccggtggcaagtccgctgcccctcagccacctcccgccgcgtcctcctcctccgaacgcgcgctggagtcagtccacttctcttccggaaaccctcgcatcgaggagacccgcggcgtcgtcgtcctccaccccgacccgcccgcggccgcctcctggtctcatgtcccgttggggagtaagccgcgggtgtgcgtgctcgccgtgcccaaccacatgacctacgccgacttctgccgtttctgcggcgccttcgtccctcacacactcgagatgcgcatcgtcagaactgatggagcagaggaccagtacagcgttcttataaattttgacactcagagctccacagacagcttctataagcacttcaacgggaagcagttctcttcgctggaggggggtgtctgccatgtccgttttgtggaagaggtgcactacactgaattgattgagcatgcacatacctcagttacaaacttggctgagcaacctacatgcccagtatgtcttgaacgacttgaccaagatcctggaggtattctcacaacaatctgcaaccattctttccactgctcgtgcatatcaaaatggacagactcctcatgcccggtctgtagatattgtcagcagcaaccagagaaatccatgtgttctatttgcggaacttcggagaatctttggatatgtctaatctgtggccatgttggctgtggaaggtacaagggtggacatgctattgaacactggaaggaaactcaacattgttattcacttgagttagagacacaaaaagtgtgggactatgctggggacaactatgtacatcggcttattcagtcaaaaacagatggaaagctagttgagtacaatttccatggtgatcacacagcagagagcacgtgttcactatgcagtggtgatgccgcaatggatgaagctctactgaacagtaaatttgaagctattgttgaagagtacaatgatctcgtcacatttcaacttgaaaagcaaagaaattactatgagtcacttctactagaagtcaaggaggaaactgagaaagaaatttctgctgctactgagaaagccatgagcacaaaactccaaaagttggaagtaaagtttgacaagtgtatggaagagaaaaaatttcttgatgaagtaaatggcaatcttgtcaagaatcaggagatgtggattgaaactatacgaaaagcacaagcaagggagcaagctgcgctcagattaaaagatgagaagatcgaaaaacttcaggaagagctaagaggtttgatagcccatttcgactgccaaagtgacactgcacaagcttcaaatgcgatctcgagcgatataccagggggcatgattcttccggtagcatcagaatcgtcctcgagcggcggcgttgttggtggcactggaaacggggagcaaaattgagtaaactgcgccctgtataaagcacgtttggatcttagggacctaggtatattcttgcttccaaacccccaccgttgtaggttcagttagggtaatacacacttgttagctgtcacctcactgcccctcgattctactgtcactagccgctagtagtgtggtactagggatgaaaacgatttcatttttttttggtttttcgaaattcgtttccgatttttcgaccgtatttaatggttatggtatttttcgaaaacataattggtc

SEQ ID NO: 15111 - protein, 482 aa, Zea mays subsp. mays
  misc_feature (1)..(482): Ceres Seq. ID no. 12342269
MATGGKSAAPQPPPAASSSSERALESVHFSSGNPRIEETRGVVVLHPDPPAAASWSHVPLGSKPRVCVLAVPNHMTYADFCRFCGAFVPHTLEMRIVRTDGAEDQYSVLINFDTQSSTDSFYKHFNGKQFSSLEGGVCHVRFVEEVHYTELIEHAHTSVTNLAEQPTCPVCLERLDQDPGGILTTICNHSFHCSCISKWTDSSCPVCRYCQQQPEKSMCSICGTSENLWICLICGHVGCGRYKGGHAIEHWKETQHCYSLELETQKVWDYAGDNYVHRLIQSKTDGKLVEYNFHGDHTAESTCSLCSGDAAMDEALLNSKFEAIVEEYNDLVTFQLEKQRNYYESLLLEVKEETEKEISAATEKAMSTKLQKLEVKFDKCMEEKKFLDEVNGNLVKNQEMWIETIRKAQAREQAALRLKDEKIEKLQEELRGLIAHFDCQSDTAQASNAISSDIPGGMILPVASESSSSGGVVGGTGNGEQN

SEQ ID NO: 15112 - protein, 408 aa, Zea mays subsp. mays
  misc_feature (1)..(408): Ceres Seq. ID no. 12342270
MTYADFCRFCGAFVPHTLEMRIVRTDGAEDQYSVLINFDTQSSTDSFYKHFNGKQFSSLEGGVCHVRFVEEVHYTELIEHAHTSVTNLAEQPTCPVCLERLDQDPGGILTTICNHSFHCSCISKWTDSSCPVCRYCQQQPEKSMCSICGTSENLWICLICGHVGCGRYKGGHAIEHWKETQHCYSLELETQKVWDYAGDNYVHRLIQSKTDGKLVEYNFHGDHTAESTCSLCSGDAAMDEALLNSKFEAIVEEYNDLVTFQLEKQRNYYESLLLEVKEETEKEISAATEKAMSTKLQKLEVKFDKCMEEKKFLDEVNGNLVKNQEMWIETIRKAQAREQAALRLKDEKIEKLQEELRGLIAHFDCQSDTAQASNAISSDIPGGMILPVASESSSSGGVVGGTGNGEQN

SEQ ID NO: 15113 - protein, 389 aa, Zea mays subsp. mays
  misc_feature (1)..(389): Ceres Seq. ID no. 12342271
MRIVRTDGAEDQYSVLINFDTQSSTDSFYKHFNGKQFSSLEGGVCHVRFVEEVHYTELIEHAHTSVTNLAEQPTCPVCLERLDQDPGGILTTICNHSFHCSCISKWTDSSCPVCRYCQQQPEKSMCSICGTSENLWICLICGHVGCGRYKGGHAIEHWKETQHCYSLELETQKVWDYAGDNYVHRLIQSKTDGKLVEYNFHGDHTAESTCSLCSGDAAMDEALLNSKFEAIVEEYNDLVTFQLEKQRNYYESLLLEVKEETEKEISAATEKAMSTKLQKLEVKFDKCMEEKKFLDEVNGNLVKNQEMWIETIRKAQAREQAALRLKDEKIEKLQEELRGLIAHFDCQSDTAQASNAISSDIPGGMILPVASESSSSGGVVGGTGNGEQN

SEQ ID NO: 15114 - DNA, 1701 bp, Zea mays subsp. mays
  misc_feature (1)..(1701): Ceres Seq. ID no. 12342304
atcttgcgcttaatccagtccgttcaattcttgacatccgaacaccccgccgacgcagccctagattccgcattcctctctgtcacctccgcggcgccgccagcccgccatcacataacttcggcttctatcccttcgtaaacccttctctcttcttcccgcggcctgctcgttctatctgtccagcagacttgaggttccgagcggccggaaaccagcggcaaccgtcggcatggcgctcgtattgcattctggggctggaaacaaaaatgccttcaaggcacttattgctgcagaatacagtggggtcaaggttgagttgaccaaggattttgagatgggtgtctcgaacaagacccctgagtttctaaagatgaacccccttgggaaggttcctgttctggagactcctgatggccctgtttttgagagtaatgctattgcgcgctatgttgctcgcttgaaggatgacaaccctcttttcgggtcttcccgtattgaacaagcccacgttgagcagtggatggactttgctgcaacagaagttgatcctggtgttggatggtacttgtatccaaggcttgggtacatcccttatgctcacacgactgaggaaacagctattgcttcattgaagagatcccttggtgctctgaacacacatcttgccttgaacacataccttgttggacattctgttactctagctgacattgtattgacatgcaacctctaccatggaattgcacggatcttgaccaaaagcttcacttctgatttccctcatgttgagaggtatttctggaccatggttaaccaacctaatttcaagaaggtcattggtgaggtcaagcaggcagagtctgtacctcctgttcttaaaaagggtgttcctcctaaggagtcaaaggcaaaggatgtgaagaaagaaactccaaaggaggcccccaagccaaaggtggttgaggtaccagcagaagaggaagcaccaaagccaaagccaaagaatcctcttgacttgctgccaccaagcaagatggtccttgatgactggaagaggctatactcaaacacaaagaccaacttccgggaggttgccatcaaaggtttctgggacatgtatgacccagagggctactctctgtggttctgtgactacaagtacaatgacgagaacaccgtctcctttgtgaccctgaacaaggttggtggattcctgcagcggatggacctgtgccgcaagtacgcctttggcaagatgctcgtggtaggttctgagccacccttcaagctgaagggcctttggctcttccgtggccaggaggttcccaagtttgtaatggatgaggtctatgacatggagctctacgagtggaccaaggtcgacatctctgatgaggcccagaaggagcgtgtcaatgccatgatcgaggaccaggaaccctttgagggcgaggccttgcttgacgcgaaatgcttcaagtgagtgtgctttatccagagctgtttagccctcgaattggatgtctatgttgatctggtatatcttgctatgaactggttaaggtttgtgctggtttgagaatttttgtttaccttctcatcatttaagtgtttcgccgtaacaattttggtcatgtttttgaaagcctgtttgtattcgcgtcgtagttggggctatttatgcagactatccgattt

SEQ ID NO: 15115 - protein, 417 aa, Zea mays subsp. mays
  misc_feature (1)..(417): Ceres Seq. ID no. 12342305
MALVLHSGAGNKNAFKALIAAEYSGVKVELTKDFEMGVSNKTPEFLKMNPLGKVPVLETPDGPVFESNAIARYVARLKDDNPLFGSSRIEQAHVEQWMDFAATEVDPGVGWYLYPRLGYIPYAHTTEETAIASLKRSLGALNTHLALNTYLVGHSVTLADIVLTCNLYHGIARILTKSFTSDFPHVERYFWTMVNQPNFKKVIGEVKQAESVPPVLKKGVPPKESKAKDVKKETPKEAPKPKVVEVPAEEEAPKPKPKNPLDLLPPSKMVLDDWKRLYSNTKTNFREVAIKGFWDMYDPEGYSLWFCDYKYNDENTVSFVTLNKVGGFLQRMDLCRKYAFGKMLVVGSEPPFKLKGLWLFRGQEVPKFVMDEVYDMELYEWTKVDISDEAQKERVNAMIEDQEPFEGEALLDAKCFK

SEQ ID NO: 15116 - protein, 382 aa, Zea mays subsp. mays
  misc_feature (1)..(382): Ceres Seq. ID no. 12342306
MGVSNKTPEFLKMNPLGKVPVLETPDGPVFESNAIARYVARLKDDNPLFGSSRIEQAHVEQWMDFAATEVDPGVGWYLYPRLGYIPYAHTTEETAIASLKRSLGALNTHLALNTYLVGHSVTLADIVLTCNLYHGIARILTKSFTSDFPHVERYFWTMVNQPNFKKVIGEVKQAESVPPVLKKGVPPKESKAKDVKKETPKEAPKPKVVEVPAEEEAPKPKPKNPLDLLPPSKMVLDDWKRLYSNTKTNFREVAIKGFWDMYDPEGYSLWFCDYKYNDENTVSFVTLNKVGGFLQRMDLCRKYAFGKMLVVGSEPPFKLKGLWLFRGQEVPKFVMDEVYDMELYEWTKVDISDEAQKERVNAMIEDQEPFEGEALLDAKCFK

SEQ ID NO: 15117 - protein, 370 aa, Zea mays subsp. mays
  misc_feature (1)..(370): Ceres Seq. ID no. 12342307
MNPLGKVPVLETPDGPVFESNAIARYVARLKDDNPLFGSSRIEQAHVEQWMDFAATEVDPGVGWYLYPRLGYIPYAHTTEETAIASLKRSLGALNTHLALNTYLVGHSVTLADIVLTCNLYHGIARILTKSFTSDFPHVERYFWTMVNQPNFKKVIGEVKQAESVPPVLKKGVPPKESKAKDVKKETPKEAPKPKVVEVPAEEEAPKPKPKNPLDLLPPSKMVLDDWKRLYSNTKTNFREVAIKGFWDMYDPEGYSLWFCDYKYNDENTVSFVTLNKVGGFLQRMDLCRKYAFGKMLVVGSEPPFKLKGLWLFRGQEVPKFVMDEVYDMELYEWTKVDISDEAQKERVNAMIEDQEPFEGEALLDAKCFK

SEQ ID NO: 15118 - DNA, 1803 bp, Zea mays subsp. mays
  misc_feature (1)..(1803): Ceres Seq. ID no. 12342358
gcatcgccgccccccgtcccgacgaattggaatacggaaagcgaaagatgatggatctcgccgacccccagcagcagcagcggctcatcgccggcgcggcgctgctgctggcaaccgcggccttcctcaggctcctcctggagctcccgctcccggggcggcaagcgcctgccgcccaccatcccgggggcgccggtgatcggcggcctcgtcaagttcatgcgcgggcccatccccatgatccgggagcagtacgcccgcctcggcagcgtcttcaccgtccccatcatcacccgcaggatcacgttcctcgtcggccctgaggtgtccgcgcacttcttcaagggcaacgaggccgagatgagccagcaggaggtgtacaggttcaacgtgcccacgttcggcccccggggtcgtcttcgacgtcgactactccgtcaggcaggagcagttcaggttctttaccgaggcgctccgggcgaacaagctgcgcagctatgtcgaccagatggttgctgaggctgaggagtacttctcaaagtggggagaaagtggcactgttgatttgaagtatgagttggagcacctcatcatactgacagctagccggtgcttgctgggaagggaggtgcgagaaaagctgttcgacgatgtttctgctctcttccatgaccttgacaacgggatgcagccaatcagtgtactcttcccatacctcccaatccctgcacataagcgccgcgacagggcacgtgcacgtctggcagaaatctttgccaccatcatcaagtcccgcaaggcctctggacagtctgaagaagacatgctgcagtgcttcattgattccaagtacaagaatgggcgttccaccagtgagggcgaggtaaccgggctacttatcgcagcactcttcgctgggcagcacaccagctctatcacctcaacctggactggagcatacatgcttcggttcaagcagtacttcgcagaggctgtagaggagcagaaggatgtcatgaaacggcacggcgacaagattgatcatgacatcctcgcggagatggacgtcctctaccggtgcatcaaggaggccctccgtctccacccgccgctaatcatgttgcttcgtcaatcacacagcgacttcaccgtgacaacaaaggaaggcaaagtgtatgacatccccaagggccacatcgtcgcgacatcaccatccttcgccaacaggctgccccacatctacaagaaccctgactcatatgaccctgaccggttcggtcccggaagggaggaggacaaggctgcaggtgccttctcgtacatctccttcggtggtggcaggcatgggtgcctcggtgagcccttcgcctaccttcagatcaaggcgatctggacgcacctactgaggaactttgagttcgagctggtatcgccgttcccagagaacgactggaacgccatggtggttggcatcaagggcgaggtgatggttaactacaagaggcggaagcttgtcgtggacaactaagattgtggtcgccagtctctatctcttagatgcttgcttgcttctttttgattcgattgctttcacctgtctgtcagcatttgttcggtgcaagttctgctgcacacacgccagctttgtaggggtgtttctgttgtttaggattctgtaatttgcttcaccatgggggtctgccatgatgtgcaacatccgcttgttagctagcttcctagctcagcattccccttagtcaaatctgtaacctgtagcatctataagcgtgtggctttattgtc

SEQ ID NO: 15119 - protein, 339 aa, Zea mays subsp. mays
  misc_feature (1)..(339): Ceres Seq. ID no. 12342359
MVAEAEEYFSKWGESGTVDLKYELEHLIILTASRCLLGREVREKLFDDVSALFHDLDNGMQPISVLFPYLPIPAHKRRDRARARLAEIFATIIKSRKASGQSEEDMLQCFIDSKYKNGRSTSEGEVTGLLIAALFAGQHTSSITSTWTGAYMLRFKQYFAEAVEEQKDVMKRHGDKIDHDILAEMDVLYRCIKEALRLHPPLIMLLRQSHSDFTVTTKEGKVYDIPKGHIVATSPSFANRLPHIYKNPDSYDPDRFGPGREEDKAAGAFSYISFGGGRHGCLGEPFAYLQIKAIWTHLLRNFEFELVSPFPENDWNAMVVGIKGEVMVNYKRRKLVVDN

SEQ ID NO: 15120 - protein, 280 aa, Zea mays subsp. mays
  misc_feature (1)..(280): Ceres Seq. ID no. 12342360
MQPISVLFPYLPIPAHKRRDRARARLAEIFATIIKSRKASGQSEEDMLQCFIDSKYKNGRSTSEGEVTGLLIAALFAGQHTSSITSTWTGAYMLRFKQYFAEAVEEQKDVMKRHGDKIDHDILAEMDVLYRCIKEALRLHPPLIMLLRQSHSDFTVTTKEGKVYDIPKGHIVATSPSFANRLPHIYKNPDSYDPDRFGPGREEDKAAGAFSYISFGGGRHGCLGEPFAYLQIKAIWTHLLRNFEFELVSPFPENDWNAMVVGIKGEVMVNYKRRKLVVDN

SEQ ID NO: 15121 - protein, 234 aa, Zea mays subsp. mays
  misc_feature (1)..(234): Ceres Seq. ID no. 12342361
MLQCFIDSKYKNGRSTSEGEVTGLLIAALFAGQHTSSITSTWTGAYMLRFKQYFAEAVEEQKDVMKRHGDKIDHDILAEMDVLYRCIKEALRLHPPLIMLLRQSHSDFTVTTKEGKVYDIPKGHIVATSPSFANRLPHIYKNPDSYDPDRFGPGREEDKAAGAFSYISFGGGRHGCLGEPFAYLQIKAIWTHLLRNFEFELVSPFPENDWNAMVVGIKGEVMVNYKRRKLVVDN

SEQ ID NO: 15122 - DNA, 935 bp, Zea mays subsp. mays
  misc_feature (1)..(935): Ceres Seq. ID no. 12342362
gaggaagggaaggtggtggtgctgaactactccttgatggccaatttcgtgatggtttatgggtatgttcctggggcacagtctgaggtttgccggttgtgcttggagttgccggggctggagcctctactttatctggatggcgatcagctgaatggagtgcatgagaagggagttcatgatctgtggagagtgctgaaggatgagatttgcctgccactgatgatatcattgtgccaactgaacggtctgcgcttgccgccttgcttgatggctttgcctgctgatctcaagactaaggtattggggtttttacctggggttgatcttgcaaaggttgagtgcacatgcaaggaaatgatgaatcttgcatcagatgatagtatctggaagaagcttgtatccaagtttgaaaattatggcgagggctctaggctggcaggcaagaatgcaaaggccatatttgtagaagcttggcaggccaataagagacggcagaagaggcccaatccaaccttttggaactatggctggggaaacagtccttatagccgcccacttaggctgccattgattggtggggactcggacagacttccttttattgggaatcatggttctgttgggcgccactttggaaatcaacgaaggaatatctcaccgaactgcattcttgatggtcaccgtcataacttcctttgaagccatgtcaatgagttttacttgtatgttaagagtgttttataaggacttcaatggtgcatatacggttagaccgccttgttcatatcgtcaagtcgcacacttatgcttgtgcacagcactcttatgatcttatcctaatatatccccttagtatcttagatcgtatctttactatctttttttggtaccaaatgtaatccagtgtcctagtaataaagtacccttgttct

SEQ ID NO: 15123 - protein, 233 aa, Zea mays subsp. mays
  misc_feature (1)..(233): Ceres Seq. ID no. 12342363
EEGKVVVLNYSLMANFVMVYGYVPGAQSEVCRLCLELPGLEPLLYLDGDQLNGVHEKGVHDLWRVLKDEICLPLMISLCQLNGLRLPPCLMALPADLKTKVLGFLPGVDLAKVECTCKEMMNLASDDSIWKKLVSKFENYGEGSRLAGKNAKAIFVEAWQANKRRQKRPNPTFWNYGWGNSPYSRPLRLPLIGGDSDRLPFIGNHGSVGRHFGNQRRNISPNCILDGHRHNFL

SEQ ID NO: 15124 - protein, 221 aa, Zea mays subsp. mays
  misc_feature (1)..(221): Ceres Seq. ID no. 12342364
MANFVMVYGYVPGAQSEVCRLCLELPGLEPLLYLDGDQLNGVHEKGVHDLWRVLKDEICLPLMISLCQLNGLRLPPCLMALPADLKTKVLGFLPGVDLAKVECTCKEMMNLASDDSIWKKLVSKFENYGEGSRLAGKNAKAIFVEAWQANKRRQKRPNPTFWNYGWGNSPYSRPLRLPLIGGDSDRLPFIGNHGSVGRHFGNQRRNISPNCILDGHRHNFL

SEQ ID NO: 15125 - protein, 216 aa, Zea mays subsp. mays
  misc_feature (1)..(216): Ceres Seq. ID no. 12342365
MVYGYVPGAQSEVCRLCLELPGLEPLLYLDGDQLNGVHEKGVHDLWRVLKDEICLPLMISLCQLNGLRLPPCLMALPADLKTKVLGFLPGVDLAKVECTCKEMMNLASDDSIWKKLVSKFENYGEGSRLAGKNAKAIFVEAWQANKRRQKRPNPTFWNYGWGNSPYSRPLRLPLIGGDSDRLPFIGNHGSVGRHFGNQRRNISPNCILDGHRHNFL

SEQ ID NO: 15126 - DNA, 717 bp, Zea mays subsp. mays
  misc_feature (1)..(717): Ceres Seq. ID no. 12342442
ctcctcccatcccgtgcagccggcctcaccgccggcgacgggacgcggagacccgggctgccggtaccgtcagccgtgctccttcctctcttcgtcgcccccgccaaaaccttcatctgccggggctgcaccggcggcgcggggacaacaaaagctcgagatccggtgactgatctcttcgttcctcggttcactttgatattccaacaaaggtcacattgctagactcccagattggttcctaacaatgagggcacatgaacgagctgccagtttggctcttgcctgtctgagcttggctccacttctggttaacgtaaacccaaatgtgaatgtggtattgacagcatgccttactgtctatgtgggttgctaccgatctgtgaagccaactccaccttctgagaccatgtccaaggagcatgctatgcggttccctttagttggaagcgctatgcttttatcactgttccttctattcaagtttctctcaaaagatttggtcaacgctgtgctcactgcctactttttcattctaggcattgttgctctctccgcaacactgcttccttctataaaacgttttcttccaaaagagtggaatgataatctcatcgtctggcgggctccattcttccactcactctcggtggagttcacaaagtcccagattgttgcctcaatacctggatttttcttttgcttgtggtatgcgtc

SEQ ID NO: 15127 - protein, 156 aa, Zea mays subsp. mays
  misc_feature (1)..(156): Ceres Seq. ID no. 12342443
MRAHERAASLALACLSLAPLLVNVNPNVNVVLTACLTVYVGCYRSVKPTPPSETMSKEHAMRFPLVGSAMLLSLFLLFKFLSKDLVNAVLTAYFFILGIVALSATLLPSIKRFLPKEWNDNLIVWRAPFFHSLSVEFTKSQIVASIPGFFFCLWYA

SEQ ID NO: 15128 - protein, 102 aa, Zea mays subsp. mays
  misc_feature (1)..(102): Ceres Seq. ID no. 12342444
MSKEHAMRFPLVGSAMLLSLFLLFKFLSKDLVNAVLTAYFFILGIVALSATLLPSIKRFLPKEWNDNLIVWRAPFFHSLSVEFTKSQIVASIPGFFFCLWYA

SEQ ID NO: 15129 - protein, 96 aa, Zea mays subsp. mays
  misc_feature (1)..(96): Ceres Seq. ID no. 12342445
MRFPLVGSAMLLSLFLLFKFLSKDLVNAVLTAYFFILGIVALSATLLPSIKRFLPKEWNDNLIVWRAPFFHSLSVEFTKSQIVASIPGFFFCLWYA

SEQ ID NO: 15130 - DNA, 1809 bp, Zea mays subsp. mays
  misc_feature (1)..(1809): Ceres Seq. ID no. 12342466
agtctcggcaatgatgctcctctgattctccccacccgtggctgcgcccatccgtctacaagtaccacctggccgcgcggttggttccaatttccagacggcagtccactggtttttgcttgcatatcctttgtttaggccagagttgagttgtgttccaacttccaagtcttgggttgcggaatcgccggcctcgctcaatcgatggaaaaccataatccattacattctcagattgctgaagtgaaaatggacatctcagcatcagcttctgttgcatcagggaacaaattctgcaagggtggtgcctgtgatttctctgattccagtaactcctcgaaagatgccaaggagagatccacgtccatgaggaagcttataatcgcagtgatcctttgcatcatattcatgacggtggaagtggtcgggggcatcaaagcaaacagtcttgccatcttaactgatgcggcgcaccttctttctgatgtggcagcatttgccatatcgttattctctctctgggctgctggatgggaagcaacaccgcagcagtcatatgggttcttccggattgagattcttggtgccttggtctccattcagctcatatggctacttgctggcatactggtatatgaggctattgtaaggctcattaacgagagtggcgatgtgcagggctccctcatgtttgctgtgtcggcgtttggactgtttgtcaacattataatggctgtattgctaggccatgaccacgggcacggccatggacacagccatggacatccacatgaccatggtcatggtgattcagacgatggccattctcaccatgaagaaccagaacagggccatgttcatcatcatgagcatagccatggaagttctattactgtcacaacacatcaccaccaccactcaggcactggacaacaccatgacgctgaggagccactgatcaagcacgaggccgactgtgagggcacccaatctgctgctaagaagcctcgacgcaatataaacgtacacagcgcttaccttcatgtgcttggggactccatccagagcatcggggtgatgatcggcggggctatcatctggtacaagcccgagtggaaaatcatcgatctgatctgcaccctcatcttctcggtggtcgtgctgttcaccacgatcaggatgctgcgcaacatcctcgaggtcctgatggagagcacgccccgtgagatcgacgccaccaggctggagagggggctctgcgagatggaaggcgtggttgccgtccacgagctgcatatctgggccatcacagtggggaaggtgctactggcttgccatgtgacggtcgccagggaagccgacgcagacgagatccttgacaaggtgattgggtacatcaagacggagtacaacatcagccatgtgaccattcaggtcgagcgtgaatagagggggagctgtcttttgggctgtcagggcataaatggcgtcacgccttcactggttatcttactctgtcggttaaaacttttttttggcacctgggaaggcatcaggcagccatcggagtcttgatgtgcttgcaagttcatctgtggttcaagctttgatggtcagtagtgttatctgttactactagtctattaggcgggggtaggcgtcaaccagtgtgtacgggtttgattttcggtcatgctgttaacagcattgcggttcgtcgaactggatatgtagtttagtacgctgtgtcatcacctcttgtgtaagggaacgcttcttttctgtggtatggaagatgtgaacttcgtg

SEQ ID NO: 15131 - protein, 414 aa, Zea mays subsp. mays
  misc_feature (1)..(414): Ceres Seq. ID no. 12342467
MENHNPLHSQIAEVKMDISASASVASGNKFCKGGACDFSDSSNSSKDAKERSTSMRKLIIAVILCIIFMTVEVVGGIKANSLAILTDAAHLLSDVAAFAISLFSLWAAGWEATPQQSYGFFRIEILGALVSIQLIWLLAGILVYEAIVRLINESGDVQGSLMFAVSAFGLFVNIIMAVLLGHDHGHGHGHSHGHPHDHGHGDSDDGHSHHEEPEQGHVHHHEHSHGSSITVTTHHHHHSGTGQHHDAEEPLIKHEADCEGTQSAAKKPRRNINVHSAYLHVLGDSIQSIGVMIGGAIIWYKPEWKIIDLICTLIFSVVVLFTTIRMLRNILEVLMESTPREIDATRLERGLCEMEGVVAVHELHIWAITVGKVLLACHVTVAREADADEILDKVIGYIKTEYNISHVTIQVERE

SEQ ID NO: 15132 - protein, 399 aa, Zea mays subsp. mays
  misc_feature (1)..(399): Ceres Seq. ID no. 12342468
MDISASASVASGNKFCKGGACDFSDSSNSSKDAKERSTSMRKLIIAVILCIIFMTVEVVGGIKANSLAILTDAAHLLSDVAAFAISLFSLWAAGWEATPQQSYGFFRIEILGALVSIQLIWLLAGILVYEAIVRLINESGDVQGSLMFAVSAFGLFVNIIMAVLLGHDHGHGHGHSHGHPHDHGHGDSDDGHSHHEEPEQGHVHHHEHSHGSSITVTTHHHHHSGTGQHHDAEEPLIKHEADCEGTQSAAKKPRRNINVHSAYLHVLGDSIQSIGVMIGGAIIWYKPEWKIIDLICTLIFSVVVLFTTIRMLRNILEVLMESTPREIDATRLERGLCEMEGVVAVHELHIWAITVGKVLLACHVTVAREADADEILDKVIGYIKTEYNISHVTIQVERE

SEQ ID NO: 15133 - protein, 360 aa, Zea mays subsp. mays
  misc_feature (1)..(360): Ceres Seq. ID no. 12342469
MRKLIIAVILCIIFMTVEVVGGIKANSLAILTDAAHLLSDVAAFAISLFSLWAAGWEATPQQSYGFFRIEILGALVSIQLIWLLAGILVYEAIVRLINESGDVQGSLMFAVSAFGLFVNIIMAVLLGHDHGHGHGHSHGHPHDHGHGDSDDGHSHHEEPEQGHVHHHEHSHGSSITVTTHHHHHSGTGQHHDAEEPLIKHEADCEGTQSAAKKPRRNINVHSAYLHVLGDSIQSIGVMIGGAIIWYKPEWKIIDLICTLIFSVVVLFTTIRMLRNILEVLMESTPREIDATRLERGLCEMEGVVAVHELHIWAITVGKVLLACHVTVAREADADEILDKVIGYIKTEYNISHVTIQVERE

SEQ ID NO: 15134 - DNA, 1082 bp, Zea mays subsp. mays
  misc_feature (1)..(1082): Ceres Seq. ID no. 12342470
aagcattatcggcgcatgtccacgttgattcatcaatcagttccacaatccacttgcctcggccgctatcgtgaccgggaacaacaactgcgagatggccacggtggagacctcgggcacggcgatagggtcctccgggagatgggcactacacggcaagacagccctcgtcaccggcggcacccgcggcatcgggcgtgcggtagtggaggagctggcggcgctgggggcggccgtgcacacatgctcccggaaggcggaggagctcggcgagcgcatcaaggagtgggaggccaggggattcagcgttaccgggtccgtctgcgacctctccgagagggaccagcgggagcggttgctccgcgaggttgccgaccgcttcggcggcaagctcaacatcctcgtaaacaatgtaggaacaaacataaggaaaccaactactgagtttactgcagaggaatactcgtttctgatggctactaatcttgaatctgcatatcacttgtgccaaattgcacatcctcttttgaaattatctgggtcaggcagcattatattcatatcatctgttgctggagcgataggaatctttagtggaactatatatgctatgactaaaggtgccattaaccagctaaccaagaatttagcttgtgaatgggctaaggacaacataagagccaactctgtcgctccgtggtacatcaccacttcacttacggaaggaattttggcaaataagaactttgaggaacaagttgtgagtcgaactccgcttggacgtgtcggagaacctggagaagtatcggcacttgttgcttttctttgcatgccgggttccacttatattagcggccagacgattgcggtcgacggaggtatgactgtgaacgggttttaccctcccaagccctaggcggcagctgccatgtttctttgtgctgaggaaacgacaatagctgttgttcttggttgttgagaaaaaaaatctaataaaatgtatgtaaaggtaaggttgtcatgttgatactgttcattacattacataattctatcagggcaatgtgaagaacgttgtgttt

SEQ ID NO: 15135 - protein, 273 aa, Zea mays subsp. mays
  misc_feature (1)..(273): Ceres Seq. ID no. 12342471
MATVETSGTAIGSSGRWALHGKTALVTGGTRGIGRAVVEELAALGAAVHTCSRKAEELGERIKEWEARGFSVTGSVCDLSERDQRERLLREVADRFGGKLNILVNNVGTNIRKPTTEFTAEEYSFLMATNLESAYHLCQIAHPLLKLSGSGSIIFISSVAGAIGIFSGTIYAMTKGAINQLTKNLACEWAKDNIRANSVAPWYITTSLTEGILANKNFEEQVVSRTPLGRVGEPGEVSALVAFLCMPGSTYISGQTIAVDGGMTVNGFYPPKP

SEQ ID NO: 15136 - protein, 147 aa, Zea mays subsp. mays
  misc_feature (1)..(147): Ceres Seq. ID no. 12342472
MATNLESAYHLCQIAHPLLKLSGSGSIIFISSVAGAIGIFSGTIYAMTKGAINQLTKNLACEWAKDNIRANSVAPWYITTSLTEGILANKNFEEQVVSRTPLGRVGEPGEVSALVAFLCMPGSTYISGQTIAVDGGMTVNGFYPPKP

SEQ ID NO: 15137 - protein, 147 aa, Zea mays subsp. mays
  misc_feature (1)..(147): Ceres Seq. ID no. 12342473
KHYRRMSTLIHQSVPQSTCLGRYRDREQQLRDGHGGDLGHGDRVLREMGTTRQDSPRHRRHPRHRACGSGGAGGAGGGRAHMLPEGGGARRAHQGVGGQGIQRYRVRLRPLREGPAGAVAPRGCRPLRRQAQHPRKQCRNKHKETNY

SEQ ID NO: 15138 - DNA, 1300 bp, Zea mays subsp. mays
  misc_feature (1)..(1300): Ceres Seq. ID no. 12342524
aaataagcacttgttcatcatcatcagagtaaacacagcagaaccctagcgcgccgttcctccgacgactcacatcccacccactcacccaccccatggcggccaagctctccaccagcgccgacgccccggcctcggtgcggctctccgcagcagcgcaggcggctgcgatccagccctcctctccgcgcttcttcttctcctcgctggccgggaccaacccggcctccccgcatcgccgcatcgccattgccgtcgatctctccgacgagtccgccttcgccgtcaagtgggccgtgcagaactacctccgccccggggacgccgtcgtgctgctccacgtgcgccccacctccgttctctacggcgccgactggggttccatcccggtctccgtcgctgacgaggccgacgctgccgaggacgccgccgccgccgccgagggcggcccctccgaggaggagctgcagaagaagcgggaggaggaatacgacgccttcacctctaccaaggcgcaggacctcgcgcagccgcttgtcgatgcccagatccccttcaagatccatgtcgtcaaggaccacgacatgaaggagcgcctctgcctcgaggctgagcgccttggcctgtccgctatgatcatggggagccgcggttttggggcctctcggaaaggcggcaaggggaggcttgggagtgttagtgattactgtgtacaccactgtgtatgccccgttgtggttgttcgctaccctgatgatgctgcagatgccagtggagatgcatcaggggcgacagatgagttgcacactgtaccagaggacgaacctgtttatcacgatgcgcctgaggtgcagaaagaaaactgaggcaatggccgcaagcagctgaagaacgaaggaaaacatggggcctgtagtgactagtgaggcgattctgtgtatctgaaagatgggactggctgtttatcttcgcttctgtatatcaactgcgtgtcatgatcagtggctgcttcgcgtttgagtttcatatcggagtcctagatcatcgaagtctttgttggtttgcttgtgagatgtttatgttgtgaacaccatgtagagtactcttctcgtaggtagaagctgccttgaagatgcttatgcagttatgctggggtctgggctctcttgtcttgttttgcggagccggtgatgagctttatgttctcaaatggtagttatctacacggtattatgtgctctgttcagcctgtttactgtattgcatattcgtcaatggagaatcactacttattattctc

SEQ ID NO: 15139 - protein, 256 aa, Zea mays subsp. mays
  misc_feature (1)..(256): Ceres Seq. ID no. 12342525
MAAKLSTSADAPASVRLSAAAQAAAIQPSSPRFFFSSLAGTNPASPHRRIAIAVDLSDESAFAVKWAVQNYLRPGDAVVLLHVRPTSVLYGADWGSIPVSVADEADAAEDAAAAAEGGPSEEELQKKREEEYDAFTSTKAQDLAQPLVDAQIPFKIHVVKDHDMKERLCLEAERLGLSAMIMGSRGFGASRKGGKGRLGSVSDYCVHHCVCPVVVVRYPDDAADASGDASGATDELHTVPEDEPVYHDAPEVQKEN

SEQ ID NO: 15140 - DNA, 1710 bp, Zea mays subsp. mays
  misc_feature (1)..(1710): Ceres Seq. ID no. 12342530
cttcctcgtccgttccggcgtcctctctcccccagacccccaccccatgccaacgcccaccccgccgtctccgtccccgtctccctcttctggaacttgccctctgctccggatcggcgcgggccgtcgttttgccatggcatttccatcttgggcgactctgttcttcgccgggatgatggtggtgttggcagcggtggaagcggaagcggaagctggaggagggagcgtctgcttcgaccggatgttcggtttcggggactcgctcacggataccggcaacttcctgctctccgtgcctgacgacttcccggaccccgcgcggaacctcccctacggccagaccttcttcgggcgtccctccggccgctattccgacggccgcaacctgctcgacttcttcgcagaggcatttgggttgccatatgtgccaccttacctaggcagtggggacttccagaatggcgcaaactttgcagtcggcggcgcaactgctctcaatggctcgttcttccgtgagcgcggtgtggagcctacatggacgcctcactcccttgatgagcagatgcaatggttcaagaagcttctcccattcattgcaccatctgagacagagctaaatgaaataatgtccaagtcacttttgtttgtgggagagattggcggaaatgattacaaccatttaatcgttagggagaaatctgttgatgagctacatgaaattgttcctaatgttgttggcgccataagctcgggcatcacggaccttataaatcttggagcaaagaagttagttgttccagggaacttcccaatagggtgtgtcccattatatcttgcaatctttcagagccaaaaggagggttactatgaggaacaaacaggctgcattaagtggctcaatgaatttgctgagtaccataataggatgcttcaggaggagttggagaaactcaggaatcttcaccctgatgtaaccatcatttatgctgattattacggtgctgcattgaacatattccgtgccccactcaagtttggcttcacagtcccactgaatgcgtgctgcggaagtgacgctccgtacaactgttccccttcaatactgtgcgggcgtcctggatctacagtgtgccctgacccatcaaaatacatctcatgggatggtctacacttcaccgaggcgagttacaaagttgtcatccaaggagtactaggggggtacgccaaacctcctctttcagaagcctgcaagggtgcggagttcaaagtttctcaacttcaccaatgtacagataatccaacaaacaccgtatcatacgatgccttgagctcttttatttgatctgatgagctcaagtacttttagatttgtgctggtaaaaaaagtgcagtttagagttacagtgggcagtgtagatgctgcaggaccgggtatcttggacacttctcagagcggagaagagatccatcgatctagagtcatgtagttctacaatcaacttggctgctgggaggaggtaaaaaaaggtggggattttgtagtgtggaaatttgcaatcaccgaagggatacaggtggtcatactgctatataggaacctagatctatgattctgcttctgagggcaatgtatgcagatatgggctcagttgccttttaacagatacatgcatatatacagtgtaaatttgttgattcacattaacc

SEQ ID NO: 15141 - protein, 447 aa, Zea mays subsp. mays
  misc_feature (1)..(447): Ceres Seq. ID no. 12342531
FLVRSGVLSPPDPHPMPTPTPPSPSPSPSSGTCPLLRIGAGRRFAMAFPSWATLFFAGMMVVLAAVEAEAEAGGGSVCFDRMFGFGDSLTDTGNFLLSVPDDFPDPARNLPYGQTFFGRPSGRYSDGRNLLDFFAEAFGLPYVPPYLGSGDFQNGANFAVGGATALNGSFFRERGVEPTWTPHSLDEQMQWFKKLLPFIAPSETELNEIMSKSLLFVGEIGGNDYNHLIVREKSVDELHEIVPNVVGAISSGITDLINLGAKKLVVPGNFPIGCVPLYLAIFQSQKEGYYEEQTGCIKWLNEFAEYHNRMLQEELEKLRNLHPDVTIIYADYYGAALNIFRAPLKFGFTVPLNACCGSDAPYNCSPSILCGRPGSTVCPDPSKYISWDGLHFTEASYKVVIQGVLGGYAKPPLSEACKGAEFKVSQLHQCTDNPTNTVSYDALSSFI

SEQ ID NO: 15142 - protein, 432 aa, Zea mays subsp. mays
  misc_feature (1)..(432): Ceres Seq. ID no. 12342532
MPTPTPPSPSPSPSSGTCPLLRIGAGRRFAMAFPSWATLFFAGMMVVLAAVEAEAEAGGGSVCFDRMFGFGDSLTDTGNFLLSVPDDFPDPARNLPYGQTFFGRPSGRYSDGRNLLDFFAEAFGLPYVPPYLGSGDFQNGANFAVGGATALNGSFFRERGVEPTWTPHSLDEQMQWFKKLLPFIAPSETELNEIMSKSLLFVGEIGGNDYNHLIVREKSVDELHEIVPNVVGAISSGITDLINLGAKKLVVPGNFPIGCVPLYLAIFQSQKEGYYEEQTGCIKWLNEFAEYHNRMLQEELEKLRNLHPDVTIIYADYYGAALNIFRAPLKFGFTVPLNACCGSDAPYNCSPSILCGRPGSTVCPDPSKYISWDGLHFTEASYKVVIQGVLGGYAKPPLSEACKGAEFKVSQLHQCTDNPTNTVSYDALSSFI

SEQ ID NO: 15143 - protein, 402 aa, Zea mays subsp. mays
  misc_feature (1)..(402): Ceres Seq. ID no. 12342533
MAFPSWATLFFAGMMVVLAAVEAEAEAGGGSVCFDRMFGFGDSLTDTGNFLLSVPDDFPDPARNLPYGQTFFGRPSGRYSDGRNLLDFFAEAFGLPYVPPYLGSGDFQNGANFAVGGATALNGSFFRERGVEPTWTPHSLDEQMQWFKKLLPFIAPSETELNEIMSKSLLFVGEIGGNDYNHLIVREKSVDELHEIVPNVVGAISSGITDLINLGAKKLVVPGNFPIGCVPLYLAIFQSQKEGYYEEQTGCIKWLNEFAEYHNRMLQEELEKLRNLHPDVTIIYADYYGAALNIFRAPLKFGFTVPLNACCGSDAPYNCSPSILCGRPGSTVCPDPSKYISWDGLHFTEASYKVVIQGVLGGYAKPPLSEACKGAEFKVSQLHQCTDNPTNTVSYDALSSFI

SEQ ID NO: 15144 - DNA, 1329 bp, Zea mays subsp. mays
  misc_feature (1)..(1329): Ceres Seq. ID no. 12342558
aaaatgtgcagcccacctccaatcccgtagaagatagtgctgccctgccgaatgccgcccacctccaatcccgtagaagacaaagagagagggagagaactggacggcggcggcggcggagacgacgatgcagtggtacttggtggccgcgctcctcaccatcctcaccagctcccagggaatattgaccaccctttcccagagcaatggcaaatacaattatgattatgccacaattccttttttagctgagctcttcaagttatctgtctcaggcttcttcctctggaaggaatgccattcttcatctccaccaaggatgacaaaggaatggaggagcgtgcgactatatgttgttccttcagttatatacctcatccacaacaatgtccagtttgcgacattgacctatgttgacccatctacctatcagataatgggaaacttgaaaattgtcacgactgggattttgtttaggcttgtcctaaaaaggaagttgtccaatatacaatggatggcaattgttttattggctgttggtacaactacaagccaggttaaaggatgtggagattcaccatgtgattctcttttctcagcaccattggagggttacttgcttggaatactttctgcttgtctttcagctctagctggtgtgtacacagaatatttgatgaagaagaataatgatagtttgtactggcaaaatgtacaattatatacgtaggtttggagttatctttaacatgggctggctaatttatggcgattttaaagctggatttgagctaggtccatggtggcagcgcctttttaatggttattcgatcacaacatggatggtagtgttcaatttaggatctactggtcttctagtatcatggttgatgaaatattctgacaatatagtcaaggtgtactcaacttcaatggcaatgcttttaacgatggttttatctatatatcttttcagtgtgaaagctacaattcagctcttcttgggcattatcatttgtataatttccctgcagatgtattttatgcctgtgcacatgcttattgagttgccacaaactttgcctgtaacatcaaagtaggttcatggcattgttagctaacccattgatcagctgagggtagggcactgttgattgagtggttaattgactatctgcagcccagctctatttgagtcatatatttggagatttatggttgtaatctcaacagctatggatatagacagctaggttagtttcatgttgcaggaaaggtgaatcaactgtcaagtgagcatgtaatgccaatacaaatggattgaaagtt

SEQ ID NO: 15145 - protein, 200 aa, Zea mays subsp. mays
  misc_feature (1)..(200): Ceres Seq. ID no. 12342559
MQWYLVAALLTILTSSQGILTTLSQSNGKYNYDYATIPFLAELFKLSVSGFFLWKECHSSSPPRMTKEWRSVRLYVVPSVIYLIHNNVQFATLTYVDPSTYQIMGNLKIVTTGILFRLVLKRKLSNIQWMAIVLLAVGTTTSQVKGCGDSPCDSLFSAPLEGYLLGILSACLSALAGVYTEYLMKKNNDSLYWQNVQLYT

SEQ ID NO: 15146 - protein, 136 aa, Zea mays subsp. mays
  misc_feature (1)..(136): Ceres Seq. ID no. 12342560
MIVCTGKMYNYIRRFGVIFNMGWLIYGDFKAGFELGPWWQRLFNGYSITTWMVVFNLGSTGLLVSWLMKYSDNIVKVYSTSMAMLLTMVLSIYLFSVKATIQLFLGIIICIISLQMYFMPVHMLIELPQTLPVTSK

SEQ ID NO: 15147 - protein, 136 aa, Zea mays subsp. mays
  misc_feature (1)..(136): Ceres Seq. ID no. 12342561
MTKEWRSVRLYVVPSVIYLIHNNVQFATLTYVDPSTYQIMGNLKIVTTGILFRLVLKRKLSNIQWMAIVLLAVGTTTSQVKGCGDSPCDSLFSAPLEGYLLGILSACLSALAGVYTEYLMKKNNDSLYWQNVQLYT

SEQ ID NO: 15148 - DNA, 1410 bp, Zea mays subsp. mays
  misc_feature (1)..(1410): Ceres Seq. ID no. 12342569
gctcagataatagcgacacctcctttcctctccctcgaggtgtctctcccagaacgcacagcacagtcgcagaacaggaaggcagagagcagcgccgcgatgagaggaggaggagcggggcccactgcggcgttcatgtccgacgagccgcctccagccgacgcggaagaggtggaggagaactccggcgccgaggaggaggacgaggagacggtggtggagcaggacgacgacgagctggagctggggctctgcctcggctccaagcaacagcagcagcagcatccgccgccgtgccggatcctcacggcccgggacctgcagccgaggtccctgtcaccggattcctccgtgtcctcttcctcccccgcggcaggtgcaggtaccgcggcgccaagcaagagggccaaggcggatgcggcgcccaactcgccagggacggtcgcgtctggccacccacagagctttggagtggtgggatggccacccataagaactttcaggatgaacagcctatttaaccaggccaaagagaatgcatcggaggctggcgccaagaagcccatcgtcgaacctgacatcaggaagacaaggaggagagaaagaaaggccggaccgtcggttgggtgaaggtgaacatggaaggagatatcattggaaggaaggtcgatctcaatgcccatcgctcttacaagacccttgcctcagcacttgagctcatgttcatgaagccgtccattggtctttgcacttctagcagttcaaagactctaaagctattagacagctcatcggagtatcagctcacctatgaggacagggacggggactggatgcttgttggagatgttccctgggagatgtttgtaggttcagtgaagaggctcaagatcatgagaacctcagacgccaaaggtctcggtccacgattccaagggtctcacagacccacagcagcttgcacgagaggcaggacgtgaaaccaccgatgtgcgtttggtgctaacaccgctggtgaagcttgaactgtgtttgatatcacgtaacagtaacagcagcccatatcgctggcatagttgtgagattacggggctgtttggtttactgtctaaggcgccacaacatggctaacttttctgtctaagtttagttcttcaattcgaacgactaaacttagacagcttcattgtgtctagtggaaatagtagaagtatttttttttttttgcttcttccctgtggtgccctcgttgaacttttctcatgggctatacgagcatcatcgcccccagctcttctgtccacactgtttttacctgtgaggaatggtcgcccaaagtgttggtttttatccttgtgtttgctatggcagaagtatctgcactgctgtttcatatctgtgttcatatct

SEQ ID NO: 15149 - protein, 209 aa, Zea mays subsp. mays
  misc_feature (1)..(209): Ceres Seq. ID no. 12342570
AQIIATPPFLSLEVSLPERTAQSQNRKAESSAAMRGGGAGPTAAFMSDEPPPADAEEVEENSGAEEEDEETVVEQDDDELELGLCLGSKQQQQQHPPPCRILTARDLQPRSLSPDSSVSSSSPAAGAGTAAPSKRAKADAAPNSPGTVASGHPQSFGVVGWPPIRTFRMNSLFNQAKENASEAGAKKPIVEPDIRKTRRRERKAGPSVG

SEQ ID NO: 15150 - protein, 176 aa, Zea mays subsp. mays
  misc_feature (1)..(176): Ceres Seq. ID no. 12342571
MRGGGAGPTAAFMSDEPPPADAEEVEENSGAEEEDEETVVEQDDDELELGLCLGSKQQQQQHPPPCRILTARDLQPRSLSPDSSVSSSSPAAGAGTAAPSKRAKADAAPNSPGTVASGHPQSFGVVGWPPIRTFRMNSLFNQAKENASEAGAKKPIVEPDIRKTRRRERKAGPSVG

SEQ ID NO: 15151 - protein, 172 aa, Zea mays subsp. mays
  misc_feature (1)..(172): Ceres Seq. ID no. 12342572
SDNSDTSFPLPRGVSPRTHSTVAEQEGREQRRDERRRSGAHCGVHVRRAASSRRGRGGGELRRRGGGRGDGGGAGRRRAGAGALPRLQATAAAASAAVPDPHGPGPAAEVPVTGFLRVLFLPRGRCRYRGAKQEGQGGCGAQLARDGRVWPPTELWSGGMATHKNFQDEQPI

SEQ ID NO: 15152 - DNA, 1395 bp, Zea mays subsp. mays
  misc_feature (1)..(1395): Ceres Seq. ID no. 12342650
gctagggttacgcgtccacggcgacgacctctgcgcagagcgtgctgcgattggccggccttcctgggatcctccccgcgcccgacacccggaaacgcgcgcgcgcgcgagggagagacagagtgaggaaacgagggaaggagacgacgcgctcgcctattggccgccggctccgctccttcgcgcccagtgcgacggccacggcctgagcggcgctgccagcaaggcggctagtatgagcagcatggagtcgcggccgggccgaacgaacctggtggagcccatagggcacggcgccgcgctgccgtccggcggccaggcagtgcagccgtggtggacgagctccggggctgtgctcggtgcagtctcgccagccgtcgtggcggtggcgcccgggagcgggacggggattagcctgtcgagcagcccggcaggtggtagtggtggtggcggcgcggctaaaggagccgcgagtgacgagagcagcgaggattcacggagatctggggaaccaaaagatggaagcgctagtcaagaaaagaaccatgccacatcgcagatacccgctctggcgccagagtatttggcaccatactcgcagctggaactgaaccaatcaattgcttctgcagcatatcagtacccagatccttactatgcaggcatggttgctccctatggaagtcatgctgtggctcattttcagctacctggactaactcaatctcgaatgccattacctcttgaagtatccgaggagcctgtttatgtaaatgccaagcagtaccatggtatcttaagacgacggcagtcccgtgctaaggctgaacttgagaaaaaggtggtcaaagccagaaagccataccttcacgagtctcgtcatcagcacgcgatgaggagggcaagaggaaacgggggacgcttcctgaacacaaagaaaagtgacagtggtgctcccaatggaggcgaaaacgccgagcatctccatgtccctcccgacttactacagctacgacagaacgaggcttgaagtagcggtatggctctggcatccttgaacagcagttcctgtccacgggcgtaggcattcgagaccggattcatatagctctccacagcatacgcgcagccatctctgcggtaacgcacgttctcctgaacgagctttgtagcgagataggtatgcaagtgcaatctgggcgcaggaatccatcatcaagtgcccaatgcccatggggtaggtacgctgtttcaggcaattcattcttggctttcacgttccacccttgtgtaactggtgtgttgtaaatgtgtggaaaactaagcttgtgctctgtatcgggccgttcagcggaactgcaaaacgcctgtataattaagatcgaactttggatt

SEQ ID NO: 15153 - protein, 342 aa, Zea mays subsp. mays
  misc_feature (1)..(342): Ceres Seq. ID no. 12342651
LGLRVHGDDLCAERAAIGRPSWDPPRARHPETRARARERQSEETREGDDALAYWPPAPLLRAQCDGHGLSGAASKAASMSSMESRPGRTNLVEPIGHGAALPSGGQAVQPWWTSSGAVLGAVSPAVVAVAPGSGTGISLSSSPAGGSGGGGAAKGAASDESSEDSRRSGEPKDGSASQEKNHATSQIPALAPEYLAPYSQLELNQSIASAAYQYPDPYYAGMVAPYGSHAVAHFQLPGLTQSRMPLPLEVSEEPVYVNAKQYHGILRRRQSRAKAELEKKVVKARKPYLHESRHQHAMRRARGNGGRFLNTKKSDSGAPNGGENAEHLHVPPDLLQLRQNEA

SEQ ID NO: 15154 - protein, 264 aa, Zea mays subsp. mays
  misc_feature (1)..(264): Ceres Seq. ID no. 12342652
MSSMESRPGRTNLVEPIGHGAALPSGGQAVQPWWTSSGAVLGAVSPAVVAVAPGSGTGISLSSSPAGGSGGGGAAKGAASDESSEDSRRSGEPKDGSASQEKNHATSQIPALAPEYLAPYSQLELNQSIASAAYQYPDPYYAGMVAPYGSHAVAHFQLPGLTQSRMPLPLEVSEEPVYVNAKQYHGILRRRQSRAKAELEKKVVKARKPYLHESRHQHAMRRARGNGGRFLNTKKSDSGAPNGGENAEHLHVPPDLLQLRQNEA

SEQ ID NO: 15155 - protein, 261 aa, Zea mays subsp. mays
  misc_feature (1)..(261): Ceres Seq. ID no. 12342653
MESRPGRTNLVEPIGHGAALPSGGQAVQPWWTSSGAVLGAVSPAVVAVAPGSGTGISLSSSPAGGSGGGGAAKGAASDESSEDSRRSGEPKDGSASQEKNHATSQIPALAPEYLAPYSQLELNQSIASAAYQYPDPYYAGMVAPYGSHAVAHFQLPGLTQSRMPLPLEVSEEPVYVNAKQYHGILRRRQSRAKAELEKKVVKARKPYLHESRHQHAMRRARGNGGRFLNTKKSDSGAPNGGENAEHLHVPPDLLQLRQNEA

SEQ ID NO: 15156 - DNA, 817 bp, Zea mays subsp. mays
  misc_feature (1)..(817): Ceres Seq. ID no. 12342710
atccggcatcccgatcctgtgtgtctctactctgcactcctcgattcgattcccccgacccagcaggcgggaaatggcgaacggtggggccgaggcatcgccgctgcggccccggcggcgcgccggctccagggacccgttcctcatcgtgtgccgcttcttcggcgtcgtcacggccgccgccgcgctgctctgcgtcgccgccaacgtcctctccgcggtctactccttccgcggtggcgctgacatcatcggcggcgtgttccggtgctacgcggtggtgttctccgtcttcgtcgccgttctcgagaccgagtgggcacccgtcatcaggctctggaagatatttgagtacttgccggcaaggggaatgctgcagacctttgttgctatcatgactaaggcgtacccaaatgttgagaggagcgagctgattttgatccaggagatcgctacctacatgcttcttgtgtgtggagctgtctacataatcgcaggtatactatgtcttggtgttttaaaacgttctaggcagcataaagcaacatcacaggagcaagcggccaaggatctggaggagctagagaagaggagagaggagcttgagtctctgttaactgctgagcggtcagagatggcctgatgtcgacctaccatctctcttctggtgtaaataagtgttttttttcattctctgttgaatgttggtagcgtgcatactgctttgccgtgaccattttgtttcagcatgttgtttcagctgggttctagacattcgtgtaatgcactgtttacttatatgatgatctcctgttgt

SEQ ID NO: 15157 - protein, 213 aa, Zea mays subsp. mays
  misc_feature (1)..(213): Ceres Seq. ID no. 12342711
SGIPILCVSTLHSSIRFPRPSRREMANGGAEASPLRPRRRAGSRDPFLIVCRFFGVVTAAAALLCVAANVLSAVYSFRGGADIIGGVFRCYAVVFSVFVAVLETEWAPVIRLWKIFEYLPARGMLQTFVAIMTKAYPNVERSELILIQEIATYMLLVCGAVYIIAGILCLGVLKRSRQHKATSQEQAAKDLEELEKRREELESLLTAERSEMA

SEQ ID NO: 15158 - protein, 189 aa, Zea mays subsp. mays
  misc_feature (1)..(189): Ceres Seq. ID no. 12342712
MANGGAEASPLRPRRRAGSRDPFLIVCRFFGVVTAAAALLCVAANVLSAVYSFRGGADIIGGVFRCYAVVFSVFVAVLETEWAPVIRLWKIFEYLPARGMLQTFVAIMTKAYPNVERSELILIQEIATYMLLVCGAVYIIAGILCLGVLKRSRQHKATSQEQAAKDLEELEKRREELESLLTAERSEMA

SEQ ID NO: 15159 - protein, 131 aa, Zea mays subsp. mays
  misc_feature (1)..(131): Ceres Seq. ID no. 12342713
PASRSCVSLLCTPRFDSPDPAGGKWRTVGPRHRRCGPGGAPAPGTRSSSCAASSASSRPPPRCSASPPTSSPRSTPSAVALTSSAACSGATRWCSPSSSPFSRPSGHPSSGSGRYLSTCRQGECCRPLLLS

SEQ ID NO: 15160 - DNA, 901 bp, Zea mays subsp. mays
  misc_feature (1)..(901): Ceres Seq. ID no. 12342757
aaccaacccactcatcactcctcactcactcactcaaaacgaaagccagctcagctcagctctgctcagctcatctgctcacacctcacacccacaggccggccgccacagcaccgcggatagcagagcggcagctaggtcggtcgtcgtcgtcgtcgtcagccatgagcaaggacaagcaccacaagcacgagcaccacctgcggcgttgctgcgggtgcatggcgtcgtgcctcctggcgctggtcctcatcgtggccttcgtctcgctggtggtgtacctggcgctgcgcccctcgaagccgtccttctacctgcaggacctgcagctgcgcaggcccatctcgctgggcgacccgtcgctgacggcgtcggcgcaggtgacgctggcctcccgcaaccccaacgaccgcgtgggcatcttctacaagcgcctggacgtgttcgtcacctaccgcgacgaggccgtgacggtgcccgtgtctctgccgccgcagtaccagggccaccgcgacttcaccgtctggtcccccgtgctgtcggccgagtccgtgcccgtggccgcctacgtcgccgacgccatgaagcaggacgtcgccgcgggcttcgtcgcgctgcaggtcaaggtggacggccgcgtcaagtggaaggtcggcagctgggtctccggcagctaccacctcttcgtcagctgccccgccgtgctctccgcgggctaccccggcgtcaacaacaccgtgtcgtcgctcaagttcgcccagcccacaggatgcagcgtcgaggtgtgagtttgtgaccaaacaagtgccctgccctgccccctacgtattgttgcgtgctactcaaatttcatcttttgggtgcgacggccgccgttaactgggctcttttaattttgtcc

SEQ ID NO: 15161 - protein, 264 aa, Zea mays subsp. mays
  misc_feature (1)..(264): Ceres Seq. ID no. 12342758
TNPLITPHSLTQNESQLSSALLSSSAHTSHPQAGRHSTADSRAAARSVVVVVVSHEQGQAPQARAPPAALLRVHGVVPPGAGPHRGLRLAGGVPGAAPLEAVLLPAGPAAAQAHLAGRPVADGVGAGDAGLPQPQRPRGHLLQAPGRVRHLPRRGRDGARVSAAAVPGPPRLHRLVPRAVGRVRARGRLRRRRHEAGRRRGLRRAAGQGGRPRQVEGRQLGLRQLPPLRQLPRRALRGLPRRQQHRVVAQVRPAHRMQRRGVSL

SEQ ID NO: 15162 - protein, 261 aa, Zea mays subsp. mays
  misc_feature (1)..(261): Ceres Seq. ID no. 12342759
PTHSSLLTHSLKTKASSAQLCSAHLLTPHTHRPAATAPRIAERQLGRSSSSSSAMSKDKHHKHEHHLRRCCGCMASCLLALVLIVAFVSLVVYLALRPSKPSFYLQDLQLRRPISLGDPSLTASAQVTLASRNPNDRVGIFYKRLDVFVTYRDEAVTVPVSLPPQYQGHRDFTVWSPVLSAESVPVAAYVADAMKQDVAAGFVALQVKVDGRVKWKVGSWVSGSYHLFVSCPAVLSAGYPGVNNTVSSLKFAQPTGCSVEV

SEQ ID NO: 15163 - protein, 207 aa, Zea mays subsp. mays
  misc_feature (1)..(207): Ceres Seq. ID no. 12342760
MSKDKHHKHEHHLRRCCGCMASCLLALVLIVAFVSLVVYLALRPSKPSFYLQDLQLRRPISLGDPSLTASAQVTLASRNPNDRVGIFYKRLDVFVTYRDEAVTVPVSLPPQYQGHRDFTVWSPVLSAESVPVAAYVADAMKQDVAAGFVALQVKVDGRVKWKVGSWVSGSYHLFVSCPAVLSAGYPGVNNTVSSLKFAQPTGCSVEV

SEQ ID NO: 15164 - DNA, 777 bp, Zea mays subsp. mays
  misc_feature (1)..(777): Ceres Seq. ID no. 12342769
gggcaactcgaagaagccgcgtgcgttatcctttgagcagtttgggcgctgagcaagtccagtgagagagggagagcggcgagaggatggctgggatggcatcgctgcagggcgccatggcgtcgctctccatctccgcgctaggcgcggcgacggcgagcagcagcagcttctggggcaaccggctcgccacctactccgcgccgcagcctggggtaaggtttatggtcaagatatgcccaattgaaatgagacttaagagatgggagcgaaagaagtgtaaaccaaacagtcttcctgtgctgcacaagatgcatgttaggatcggggacacggtacaggttattgcaggccgtgagaaaggaaaggttggagaagtcacacgccttttcaagcacaacagcacggtgatcgtgaaggacctgaacttgaagtcgaagcacaagaaaggcacagacgatgaacccggtgaaatcgtcatgattgaaggccccattcatagctcaaatgtgatgctctactctaaggagaagagtgtggtaagcagggttggccacaaattcctggaggacgggaccaaggtccgatacctggtcaagaccggtgaagtaatcgacagtgttgagaagtgggtaaaggtttttaaggaaggaaattcggagtaacagttttagcatgaaaacctgcaaaatgctctgaacgctgactgcgtcttgcatgttgaattgagcctgtttatccctctatgttgttatttacgccagtttttccccctgt

SEQ ID NO: 15165 - protein, 192 aa, Zea mays subsp. mays
  misc_feature (1)..(192): Ceres Seq. ID no. 12342770
MAGMASLQGAMASLSISALGAATASSSSFWGNRLATYSAPQPGVRFMVKICPIEMRLKRWERKKCKPNSLPVLHKMHVRIGDTVQVIAGREKGKVGEVTRLFKHNSTVIVKDLNLKSKHKKGTDDEPGEIVMIEGPIHSSNVMLYSKEKSVVSRVGHKFLEDGTKVRYLVKTGEVIDSVEKWVKVFKEGNSE

SEQ ID NO: 15166 - protein, 189 aa, Zea mays subsp. mays
  misc_feature (1)..(189): Ceres Seq. ID no. 12342771
MASLQGAMASLSISALGAATASSSSFWGNRLATYSAPQPGVRFMVKICPIEMRLKRWERKKCKPNSLPVLHKMHVRIGDTVQVIAGREKGKVGEVTRLFKHNSTVIVKDLNLKSKHKKGTDDEPGEIVMIEGPIHSSNVMLYSKEKSVVSRVGHKFLEDGTKVRYLVKTGEVIDSVEKWVKVFKEGNSE

SEQ ID NO: 15167 - protein, 182 aa, Zea mays subsp. mays
  misc_feature (1)..(182): Ceres Seq. ID no. 12342772
MASLSISALGAATASSSSFWGNRLATYSAPQPGVRFMVKICPIEMRLKRWERKKCKPNSLPVLHKMHVRIGDTVQVIAGREKGKVGEVTRLFKHNSTVIVKDLNLKSKHKKGTDDEPGEIVMIEGPIHSSNVMLYSKEKSVVSRVGHKFLEDGTKVRYLVKTGEVIDSVEKWVKVFKEGNSE

SEQ ID NO: 15168 - DNA, 1336 bp, Zea mays subsp. mays
  misc_feature (1)..(1336): Ceres Seq. ID no. 12342777
agatagatagagtagtagtaggttgttagctgaggggaggcatcgatggctggagccaagagaggaatcctgctcgtcctgtgcctggccgtcgtcttggtggcgctcgggagtggcggcgtggaggcgaggaagcgagggaagcagtccctggggttctacgagctgcgtcggggcgagttctccatggtcgtcaccaactggggcgccaccatcctctccgtcaggctccccgataagaacgggcacatcgacgacgtcgttcttggctacaagaacatcggatcgtacgtcaacgacacgacctacttcggcgcgctggtggggcgcgtggcgaaccgcatcgccggcgggcggttcaccatcagggaccacgcctaccacacgtatcggaacgacggcaacaacacgctccacggcgggccaccgcgggttcaaccaggtgttctggtccgtccgggagcgcgtcacgggggagttcccgcacatcaccttcgcctaccgcagctacgacggcgagcaagggttcccgggcaacctggacgtgctggtcacctacaagatcgacggcgactgctcgtacagcgtcaccatgtacgcgcggccgctggacaagcccacccccgtgaacctggcgcagcacacgtactggaacctccgcggccacggcaacggcaccgtcctgcgccacgccgtccagatcttcgcgtccgcggtcacgcccgtgggccgcggcctcatcccgacgggcgcggtcacccccgtcgccggcactccgttnnanttccgcgccnngtcggcgcccggcgcgcacatcgccgaggtcgagggtgggtacgacatcaactacgtgctggacggcgagacggacgggcaaggcgtgcgcaaggtggccgtggtcagcgaggcggactccgggcgcgtcatggagctntgggccgaccagccgggcctgcagttctacactggcaacatgcttaagggcgacgagggcaagggcggcgccgtctaccccaaatacgctgggatgtgcctggagacgcaagactacccggacgccgtgcacgagccggccttcccggccgaggtgtaccgccctggccaactctacaagcactacatgctctacaagttctcaatcagcaagtaggaacttctagtacctctcgtgcctgatgcctcatagtttcggtaggtttgcaacctgttgcgactagtaataagggttctgagtctttttttttagaaaaaattgcaacagaaatgtatggttcgagttcgtccaaactttgtctagtcaacattttctgccatttgaatgccatcttaatagtct

SEQ ID NO: 15169 - protein, 311 aa, Zea mays subsp. mays
  misc_feature (1)..(311): Ceres Seq. ID no. 12342778
  misc_feature (246)..(246): Xaa is any aa, unknown or other
  misc_feature (247)..(247): Xaa is any aa, unknown or other
  misc_feature (250)..(250): Xaa is any aa, unknown or other
  misc_feature (297)..(297): Xaa is any aa, unknown or other
MAGAKRGILLVLCLAVVLVALGSGGVEARKRGKQSLGFYELRRGEFSMVVTNWGATILSVRLPDKNGHIDDVVLGYKNIGSYVNDTTYFGALVGRVANRIAGGRFTIRDHAYHTYRNDGNNTLHGGPPRVQPGVLVRPGARHGGVPAHHLRLPQLRRRARVPGQPGRAGHLQDRRRLLVQRHHVRAAAGQAHPREPGAAHVLEPPRPRQRHRPAPRRPDLRVRGHARGPRPHPDGRGHPRRRHSVXXPRXVGARRAHRRGRGWVRHQLRAGRRDGRARRAQGGRGQRGGLRARHGAXGRPAGPAVLHWQHA

SEQ ID NO: 15170 - protein, 264 aa, Zea mays subsp. mays
  misc_feature (1)..(264): Ceres Seq. ID no. 12342779
  misc_feature (199)..(199): Xaa is any aa, unknown or other
  misc_feature (200)..(200): Xaa is any aa, unknown or other
  misc_feature (203)..(203): Xaa is any aa, unknown or other
  misc_feature (250)..(250): Xaa is any aa, unknown or other
MVVTNWGATILSVRLPDKNGHIDDVVLGYKNIGSYVNDTTYFGALVGRVANRIAGGRFTIRDHAYHTYRNDGNNTLHGGPPRVQPGVLVRPGARHGGVPAHHLRLPQLRRRARVPGQPGRAGHLQDRRRLLVQRHHVRAAAGQAHPREPGAAHVLEPPRPRQRHRPAPRRPDLRVRGHARGPRPHPDGRGHPRRRHSVXXPRXVGARRAHRRGRGWVRHQLRAGRRDGRARRAQGGRGQRGGLRARHGAXGRPAGPAVLHWQHA

SEQ ID NO: 15171 - protein, 185 aa, Zea mays subsp. mays
  misc_feature (1)..(185): Ceres Seq. ID no. 12342780
  misc_feature (63)..(63): Xaa is any aa, unknown or other
  misc_feature (64)..(64): Xaa is any aa, unknown or other
  misc_feature (68)..(68): Xaa is any aa, unknown or other
  misc_feature (114)..(114): Xaa is any aa, unknown or other
MYARPLDKPTPVNLAQHTYWNLRGHGNGTVLRHAVQIFASAVTPVGRGLIPTGAVTPVAGTPXXFRAXSAPGAHIAEVEGGYDINYVLDGETDGQGVRKVAVVSEADSGRVMEXWADQPGLQFYTGNMLKGDEGKGGAVYPKYAGMCLETQDYPDAVHEPAFPAEVYRPGQLYKHYMLYKFSISK

SEQ ID NO: 15172 - DNA, 1711 bp, Zea mays subsp. mays
  misc_feature (1)..(1711): Ceres Seq. ID no. 12342793
agaaacgtactgactgtccaccactccgctaaccaaagtccaaagccaacgcaagcaatccttcggacttcggtgggggaaatggaggccgccgcagccgccgagacggggctcgcccagaaaccggttgtgctgtacccttcgccggggatgggccacctggtctccatgatcgagcttggcaagatcctcggcgcgcggggactgtccgtaataattgtcgtcgtcgagcctcccttcaacacgggcgctacggcgcctttcctcgccggcgtctccgcggccaacccgtccatctccttccaccgcctgcccaaagtcgagcgcctcccgcccgtcaagacgaagcaccaggaggcgctcaccttcgaggtcacccgcgtctccaatccgcacctccgcgagttcctggccgccgcgtccccagccgtgctcgtcgtcgacttcttctgcagcatcgccctggacgtggcggaggagctccgcgtgcccgcctacttcttcttcacctcgggcgccgaggtcctggccttcttcctgcacctcccggcgatccacgagcggaccgccgcgagcttccaggacatggggaaggagctcgtgcacgtgccgggcatcccgtcattcccggcgacgcactccatcctgcccaccatggagcgcgacgacgtggcctacgacggcttcctaaagggctgcaccgacctctgccgctcccagggcatcatggtcaacacgttccgctcgctggagcagcgcgccgtcgagaccgtggccgcgggccactgcacgccccccggcctcccgaccccgcccatctactgcatcgggccgctcatcaagtccgaggaggtgctgggcaagggcggcgaggagtgcctggcgtggctggacgcgcagcccagggccagcgtggtgttcctctgcttcggcagcatcggccggttcagcgtggagcagatcagggaggtggcggccggcctggaagccagcgggcagcggttcttgtgggtggtccgagccccgcccagcgacgacccggccaagaagttcgagaggccgccggagccggacctggatgcgctcctcccggaggggttcctagcccggaccaaggataggggtctcgtggtcaggtcgtgggcgccgcagcgggacgtgctggcgcacgcgtccgtgggcggcttcgtgacgcactgcggctggaactcggtcctggaggcggtgatggcgggcgtgccgatggtggcgtggccgctctacgcggagcagcggctcaaccgggtgtttctggagaaggagatgcagctggccgtggccgtggaagggtacgacagcgacgagggcctcgtggcggccgaggaggttgctgccaaggtgcgatggctcatggagtccgatggcgggaggatgctccggaagcgcacgctggcggccatgcggcaggccaaggacgcgctgcgtgagggcggtgagtcggaggccacactgaccggattggtggacgagtggaaacgcatttgacgcggtatgtggggattgggaacgtgtgacgttacgcgacggatgaagtgccggtcatcatttttttaaataaaatatatattagtaatatattcatgtatttttcaataaaagatacaatttattgcattatactcgtgcgtgcggcgtgccaacaataataagatatctactctttattagattg

SEQ ID NO: 15173 - protein, 507 aa, Zea mays subsp. mays
  misc_feature (1)..(507): Ceres Seq. ID no. 12342794
RNVLTVHHSANQSPKPTQAILRTSVGEMEAAAAAETGLAQKPVVLYPSPGMGHLVSMIELGKILGARGLSVIIVVVEPPFNTGATAPFLAGVSAANPSISFHRLPKVERLPPVKTKHQEALTFEVTRVSNPHLREFLAAASPAVLVVDFFCSIALDVAEELRVPAYFFFTSGAEVLAFFLHLPAIHERTAASFQDMGKELVHVPGIPSFPATHSILPTMERDDVAYDGFLKGCTDLCRSQGIMVNTFRSLEQRAVETVAAGHCTPPGLPTPPIYCIGPLIKSEEVLGKGGEECLAWLDAQPRASVVFLCFGSIGRFSVEQIREVAAGLEASGQRFLWVVRAPPSDDPAKKFERPPEPDLDALLPEGFLARTKDRGLVVRSWAPQRDVLAHASVGGFVTHCGWNSVLEAVMAGVPMVAWPLYAEQRLNRVFLEKEMQLAVAVEGYDSDEGLVAAEEVAAKVRWLMESDGGRMLRKRTLAAMRQAKDALREGGESEATLTGLVDEWKRI

SEQ ID NO: 15174 - protein, 480 aa, Zea mays subsp. mays
  misc_feature (1)..(480): Ceres Seq. ID no. 12342795
MEAAAAAETGLAQKPVVLYPSPGMGHLVSMIELGKILGARGLSVIIVVVEPPFNTGATAPFLAGVSAANPSISFHRLPKVERLPPVKTKHQEALTFEVTRVSNPHLREFLAAASPAVLVVDFFCSIALDVAEELRVPAYFFFTSGAEVLAFFLHLPAIHERTAASFQDMGKELVHVPGIPSFPATHSILPTMERDDVAYDGFLKGCTDLCRSQGIMVNTFRSLEQRAVETVAAGHCTPPGLPTPPIYCIGPLIKSEEVLGKGGEECLAWLDAQPRASVVFLCFGSIGRFSVEQIREVAAGLEASGQRFLWVVRAPPSDDPAKKFERPPEPDLDALLPEGFLARTKDRGLVVRSWAPQRDVLAHASVGGFVTHCGWNSVLEAVMAGVPMVAWPLYAEQRLNRVFLEKEMQLAVAVEGYDSDEGLVAAEEVAAKVRWLMESDGGRMLRKRTLAAMRQAKDALREGGESEATLTGLVDEWKRI

SEQ ID NO: 15175 - protein, 457 aa, Zea mays subsp. mays
  misc_feature (1)..(457): Ceres Seq. ID no. 12342796
MGHLVSMIELGKILGARGLSVIIVVVEPPFNTGATAPFLAGVSAANPSISFHRLPKVERLPPVKTKHQEALTFEVTRVSNPHLREFLAAASPAVLVVDFFCSIALDVAEELRVPAYFFFTSGAEVLAFFLHLPAIHERTAASFQDMGKELVHVPGIPSFPATHSILPTMERDDVAYDGFLKGCTDLCRSQGIMVNTFRSLEQRAVETVAAGHCTPPGLPTPPIYCIGPLIKSEEVLGKGGEECLAWLDAQPRASVVFLCFGSIGRFSVEQIREVAAGLEASGQRFLWVVRAPPSDDPAKKFERPPEPDLDALLPEGFLARTKDRGLVVRSWAPQRDVLAHASVGGFVTHCGWNSVLEAVMAGVPMVAWPLYAEQRLNRVFLEKEMQLAVAVEGYDSDEGLVAAEEVAAKVRWLMESDGGRMLRKRTLAAMRQAKDALREGGESEATLTGLVDEWKRI

SEQ ID NO: 15176 - DNA, 874 bp, Zea mays subsp. mays
  misc_feature (1)..(874): Ceres Seq. ID no. 12342813
tccaactctgcgccgcaatccactcaagaaggttagccctcgtggtctcggatttggataatcctccgccgaggtatgaaacaggaggcggccaccagcatagtggtgacccaggaggacgtcctgcaccactacaaggagcctccaccccgccgcgaggacgatccgccagcactggctgcgtcgctgtcgttgccgtcgtcactgtcggaggacaatggcgacgccatgccgcagccatcttcatacgcggtcttgccgcgccgggatggcgagctggtgtctgcggaggagctgctgctggtgccgccgctcaacttcgccatggtggaccacggcgtgtaccgctccggattcccggacgcctccaacttgccgtttcttgagacgctccgactccgctccgtcctgtgcctgtgcccggagccatacccggaggctaatctggagttcctccgtgcccacgggatcaagctcttccagttcggaatcgacggctccaaggaaccatttgtgaacataccagaagatagaatccgtgaagctctagaagtcatcctagatgcaagcaaccatccggttcttattcactgcaagcgaggaaagcatcgaaccggctgtgtggttggatgctttaggaaattgcaacgctggtgtctaacttcaatatttgacgaataccagcgttttgctgctgccaaaacaagagtttctgacctacggttcatggagctatttgatgtatcgagcataaagcatttagcatttgagtcgtctgtatgatagtaacattggtgcatgataacaactcaatactggttccattacggtgtcatctttttcatttaagaaaaaaaatcatttctaaaaatgc

SEQ ID NO: 15177 - protein, 235 aa, Zea mays subsp. mays
  misc_feature (1)..(235): Ceres Seq. ID no. 12342814
MKQEAATSIVVTQEDVLHHYKEPPPRREDDPPALAASLSLPSSLSEDNGDAMPQPSSYAVLPRRDGELVSAEELLLVPPLNFAMVDHGVYRSGFPDASNLPFLETLRLRSVLCLCPEPYPEANLEFLRAHGIKLFQFGIDGSKEPFVNIPEDRIREALEVILDASNHPVLIHCKRGKHRTGCVVGCFRKLQRWCLTSIFDEYQRFAAAKTRVSDLRFMELFDVSSIKHLAFESSV

SEQ ID NO: 15178 - protein, 184 aa, Zea mays subsp. mays
  misc_feature (1)..(184): Ceres Seq. ID no. 12342815
MPQPSSYAVLPRRDGELVSAEELLLVPPLNFAMVDHGVYRSGFPDASNLPFLETLRLRSVLCLCPEPYPEANLEFLRAHGIKLFQFGIDGSKEPFVNIPEDRIREALEVILDASNHPVLIHCKRGKHRTGCVVGCFRKLQRWCLTSIFDEYQRFAAAKTRVSDLRFMELFDVSSIKHLAFESSV

SEQ ID NO: 15179 - protein, 152 aa, Zea mays subsp. mays
  misc_feature (1)..(152): Ceres Seq. ID no. 12342816
MVDHGVYRSGFPDASNLPFLETLRLRSVLCLCPEPYPEANLEFLRAHGIKLFQFGIDGSKEPFVNIPEDRIREALEVILDASNHPVLIHCKRGKHRTGCVVGCFRKLQRWCLTSIFDEYQRFAAAKTRVSDLRFMELFDVSSIKHLAFESSV

SEQ ID NO: 15180 - DNA, 1161 bp, Zea mays subsp. mays
  misc_feature (1)..(1161): Ceres Seq. ID no. 12342860
tcccctctgccccgctctgtcatctttgactgcccctgtccggttcctcccctccatcccactccacgccacgccacccccaccggccaagcaaacacgctgcacatttcagttcagacggtccaagaacagcaccaagaaagactccttgccgctcttcttgcttggctactgactaggagagctccctgccgctggttgatcaacagaggcaggcggacggcatggtcagctctatgccgctgtcctcgctgctgctgctgctctccgcagccagcttcggcggcggcgtaaggctcggcgatggtggctacgaggactggaggctcggcaccgccacctacgtcaaggagttccagtcacaccctctcaatgatggcggtggcgcctgcgggtacggcgacctggacatcttcaggtacgggcgctacacgacggggctgagcgcggcgctgttcgggcgcggcggcgcctgcggcggctgctacgagctgcggtgcgtcaaccacatccagtggtgcctccggggcagccccacggtggtggtgacggcgacggacttctgcccggccaacatgggcctcgccgacgacgacgccggcggctggtgcaacttcccgcgggagcacctcgagctgtcggaggccgcgttcctccgcgtcgccaaggccaaggccggcatcgtgccggtgcagttccggagggtgagctgcgacagggccggcggcatgcggttcaccatcaccggtagcgcccacttcctgcaggtgctcatcaccaacgtggcggcggacggcgaggtggcggccgtgaaggtgaaggggtcgaggacggggtggatcccgatggggcggaactggggccagaactggcagtgcgacgccgacctccgcgcccagccgctgtcgttcgaggtcaccggcgggaggggcaggacggtcaccgcctacagcgtggcgccggcggactggatgttcgcgcagacgttcgagggcaagcagttcgccgagtagagatcgacgccgaaaaccaactctccggcggtggtgatgtaagtagaattatacggatgtcttcttgctcgcgagtcgtgaccggcgactcgagaaaacgagacgtattgaatggcgaaaggatttccagtcacaagaaagtggcagt

SEQ ID NO: 15181 - protein, 262 aa, Zea mays subsp. mays
  misc_feature (1)..(262): Ceres Seq. ID no. 12342861
MVSSMPLSSLLLLLSAASFGGGVRLGDGGYEDWRLGTATYVKEFQSHPLNDGGGACGYGDLDIFRYGRYTTGLSAALFGRGGACGGCYELRCVNHIQWCLRGSPTVVVTATDFCPANMGLADDDAGGWCNFPREHLELSEAAFLRVAKAKAGIVPVQFRRVSCDRAGGMRFTITGSAHFLQVLITNVAADGEVAAVKVKGSRTGWIPMGRNWGQNWQCDADLRAQPLSFEVTGGRGRTVTAYSVAPADWMFAQTFEGKQFAE

SEQ ID NO: 15182 - protein, 258 aa, Zea mays subsp. mays
  misc_feature (1)..(258): Ceres Seq. ID no. 12342862
MPLSSLLLLLSAASFGGGVRLGDGGYEDWRLGTATYVKEFQSHPLNDGGGACGYGDLDIFRYGRYTTGLSAALFGRGGACGGCYELRCVNHIQWCLRGSPTVVVTATDFCPANMGLADDDAGGWCNFPREHLELSEAAFLRVAKAKAGIVPVQFRRVSCDRAGGMRFTITGSAHFLQVLITNVAADGEVAAVKVKGSRTGWIPMGRNWGQNWQCDADLRAQPLSFEVTGGRGRTVTAYSVAPADWMFAQTFEGKQFAE

SEQ ID NO: 15183 - protein, 145 aa, Zea mays subsp. mays
  misc_feature (1)..(145): Ceres Seq. ID no. 12342863
MGLADDDAGGWCNFPREHLELSEAAFLRVAKAKAGIVPVQFRRVSCDRAGGMRFTITGSAHFLQVLITNVAADGEVAAVKVKGSRTGWIPMGRNWGQNWQCDADLRAQPLSFEVTGGRGRTVTAYSVAPADWMFAQTFEGKQFAE

SEQ ID NO: 15184 - DNA, 1252 bp, Zea mays subsp. mays
  misc_feature (1)..(1252): Ceres Seq. ID no. 12343013
ttaccattacggcattacctacaccgtcgcctaatttgccaacgcccgccgccgttccgatggaaaccgccgagccggcgcgcgtccaagccctcgctgaggccggcgtgttccgcctcccggcgcagtacatccagccgcctgagcacagaccgaccccctcgccttctcctattgccgcggcgctctccgtgccggtcgtcgacctctcaacctccaccgccaccgacgccgtccgcgccgcgtgcgcggactggggcgcctttcacgtggtcggccacggcgtgccgggggagctcctcgacgcggtgcgcgcggcagggctcgcgttcttccgcgcgcccatggaggacaagctccggttcgcctgcgacccggccaggggcgccgcctcggaagggtacggcagccgcatgctcgccaacgacgactccgtgctcgactggcgcgactactttgaccaccacacgctcccggagtcccgctgtgatcccgcccgctggcccgacttcgtccccggttacagagatactattgcaaaatacagccacagcatgaaggatcttgctaaaaaattgttgtgcatcatctcagaaaatctgagcctgccaccatcttatatacaagaggcggttggagaagttttccagaacattactattagctactattctccgtgtccacaacctgatcttgctcttgggttacaatctcattctgatatgggcgcaataacacttctgatacaagatgatgttggtgggcttgaagtattaaaggatggaatgtggatacctgtgcctgctttgcgtgatggcatccttgtgattctcgctgatcagacagagatcatcaccaatggaagatacaagagttcagttcatcgagctgttgtcaatgctgagcgtgcccgcttatcagtagcaacattttatgatccatcaaaatcaaggaaaatatgcactgccccgcagcttgtgagtgagaatgaaccacaaaagtatcgggatgtaatttatggtgactatgtctcatcttggtatagcaaaggtccagagggcaagcgaaacatcgatgccctcctgattcagcactagagccataggtatgccttaaaacagggttgggccactcatctgtttcctaaacttctaatgcatgtacaatatatcagtttccaactttaaacaatcaggataaggaaaccaacttgtatactggatgcagtgcaataaagtaccttttcattgtc

SEQ ID NO: 15185 - protein, 364 aa, Zea mays subsp. mays
  misc_feature (1)..(364): Ceres Seq. ID no. 12343014
TITALPTPSPNLPTPAAVPMETAEPARVQALAEAGVFRLPAQYIQPPEHRPTPSPSPIAAALSVPVVDLSTSTATDAVRAACADWGAFHVVGHGVPGELLDAVRAAGLAFFRAPMEDKLRFACDPARGAASEGYGSRMLANDDSVLDWRDYFDHHTLPESRCDPARWPDFVPGYRDTIAKYSHSMKDLAKKLLCIISENLSLPPSYIQEAVGEVFQNITISYYSPCPQPDLALGLQSHSDMGAITLLIQDDVGGLEVLKDGMWIPVPALRDGILVILADQTEIITNGRYKSSVHRAVVNAERARLSVATFYDPSKSRKICTAPQLVSENEPQKYRDVIYGDYVSSWYSKGPEGKRNIDALLIQH

SEQ ID NO: 15186 - protein, 345 aa, Zea mays subsp. mays
  misc_feature (1)..(345): Ceres Seq. ID no. 12343015
METAEPARVQALAEAGVFRLPAQYIQPPEHRPTPSPSPIAAALSVPVVDLSTSTATDAVRAACADWGAFHVVGHGVPGELLDAVRAAGLAFFRAPMEDKLRFACDPARGAASEGYGSRMLANDDSVLDWRDYFDHHTLPESRCDPARWPDFVPGYRDTIAKYSHSMKDLAKKLLCIISENLSLPPSYIQEAVGEVFQNITISYYSPCPQPDLALGLQSHSDMGAITLLIQDDVGGLEVLKDGMWIPVPALRDGILVILADQTEIITNGRYKSSVHRAVVNAERARLSVATFYDPSKSRKICTAPQLVSENEPQKYRDVIYGDYVSSWYSKGPEGKRNIDALLIQH

SEQ ID NO: 15187 - protein, 250 aa, Zea mays subsp. mays
  misc_feature (1)..(250): Ceres Seq. ID no. 12343016
MEDKLRFACDPARGAASEGYGSRMLANDDSVLDWRDYFDHHTLPESRCDPARWPDFVPGYRDTIAKYSHSMKDLAKKLLCIISENLSLPPSYIQEAVGEVFQNITISYYSPCPQPDLALGLQSHSDMGAITLLIQDDVGGLEVLKDGMWIPVPALRDGILVILADQTEIITNGRYKSSVHRAVVNAERARLSVATFYDPSKSRKICTAPQLVSENEPQKYRDVIYGDYVSSWYSKGPEGKRNIDALLIQH

SEQ ID NO: 15188 - DNA, 903 bp, Zea mays subsp. mays
  misc_feature (1)..(903): Ceres Seq. ID no. 12343059
acagcggcgtcgggtctatccgggtctatccgcgaacacgtgagaactctccagaaactgctttctcctccacttcatctctctcgctttccctctataaaaagaccccttctaggaattgagggagacagcaagcagcgatccgaagctcaatcaattcactcaaacctcttccccaaatcttcgattagattctcgttgacaagaagactagaaccgaacctgaccatgtcgctgatccgccgcagcaacgtgttcgatcccttctccctcgacctctgggacccctttgagggcttccccttcggctccggcaacagcagcagtctcttcccctcgttcccgcggaccagctcggagaccgcggccttcgctggcgcgcggatcgactggaaggagactccagaggcgcacgtgttcaaggccgacgtaccggggctgaagaaggaggaggtcaaggtggaggtcgaggacggcaacgtccttcagatcagcggcgagcgcaacaaggagcaggaggagaagacggacaccctggcaccgcgtggagcggagcagcgggaggttcctgcgcaggttccgactgcccgagaacgccaagacggagcagatcacggccgccatggagaacggcgtgcttacagtcactgtgccgaaggaggacgccaagaagcctgaagtgaagtccattcagatctccggctagacctcggtctgcggtcgtcgtacctgcgtggtttgaggaacggcagttcgcctcggtcgttctgtgaaataaaattgggttacaagaattatggcgtttgtcaatatggtcgtaatgtcgtaggatggtggaatgtggtcacaaactttgcgtatgttgggtctacttgtggtgtctgaatctatgtatggatgtcg

SEQ ID NO: 15189 - protein, 225 aa, Zea mays subsp. mays
  misc_feature (1)..(225): Ceres Seq. ID no. 12343060
TAASGLSGSIREHVRTLQKLLSPPLHLSRFPSIKRPLLGIEGDSKQRSEAQSIHSNLFPKSSIRFSLTRRLEPNLTMSLIRRSNVFDPFSLDLWDPFEGFPFGSGNSSSLFPSFPRTSSETAAFAGARIDWKETPEAHVFKADVPGLKKEEVKVEVEDGNVLQISGERNKEQEEKTDTLAPRGAEQREVPAQVPTARERQDGADHGRHGERRAYSHCAEGGRQEA

SEQ ID NO: 15190 - protein, 149 aa, Zea mays subsp. mays
  misc_feature (1)..(149): Ceres Seq. ID no. 12343061
MSLIRRSNVFDPFSLDLWDPFEGFPFGSGNSSSLFPSFPRTSSETAAFAGARIDWKETPEAHVFKADVPGLKKEEVKVEVEDGNVLQISGERNKEQEEKTDTLAPRGAEQREVPAQVPTARERQDGADHGRHGERRAYSHCAEGGRQEA

SEQ ID NO: 15191 - DNA, 1545 bp, Zea mays subsp. mays
  misc_feature (1)..(1545): Ceres Seq. ID no. 12343144
agccttccaatctctaggagaaacgtcttgccctccactccaacatcgacacgactactcgtccgactagaaccaaacttttcaatccatcgttcgcagttcagttcacacttcacaggcgagcgcgaccatggatacccaagcacgtccggttccccgcgtcaagctcggcacccagggattcgaggtgtccaagctggggttcgggtgcatggggctgacgggcgcatacaactccccgctggacgacgaggccggcatcgccgtcatcgcgcacgctttcagccgcggagtcaccttgttcgacacctccgacgtatacgggcccctcaccaacgaaatcctcctcggcaaggcgctgaagcagctgccgcgggagcaggtgcaggtggccaccaagttcgggatacggcgtgacgagagcggcacgcggaccgtgtgcggccggccggagtacgttcgtgcctgctgcgaggccagcctgcgccgcctcggcatcgactgcatcgacctctactaccagcaccgcattgacaccacaattcccatcgaggagacgactggcgagctcaagaagctggtggaggagggtaaggtcaagtacatcggattgtcagaggcgagcccggacaccatcaggcgtgcacatgctgtgcacccgatcaccgcggtgcagatggagtggtctctctggtctcgcgacattgagcccgaaattgtgccgctctgcagagaattgggcattggaattgtaccatacagtcctcttggccgtgggttttttggtggaagaggagtgaaagagcaagtgtctgctgaatctaatctgcatgggatcccaaggtttgctccagaaaatttggagaagaacaagcaaatttatttgcgaatggaagaactggccaataagcaccagtgcagccctgctcagctagctttagcatgggttttgcatcaaggcgatgatgtggttcctataccagggacaaccaaaatcaagaatctagattccaacattgactccttgaaggtgaaactgacagacgaagatctgaaagaaatgggcagccagatacgggaagaagatgtggctggtgggagacaattcacctcatatgcacataccacctggaagtacgctgatacgccaaagaagcagagctaaaaaatacttgaaagcaacaatgatgatgcgattggtatggccctctccctgcagatgccctcaggaacattgtcgatgtccctttgtgaacagcctcttctagtaaataaataatgtatggagaagaacaatgaagggcccagtcttgttggaagtacgaataatgtacagttacaggaatgtgtgctaccatatatttcgtcgcatcagtttgagttgtggttgtgtgaacctaccatatatttcctcgcaaaagaataatgtatagttacagtaatgtgtgctatctcaatcagcatgcaggcaggaaaaacatggcaccatatgtagtacagtacatgaattctcgcttgtaatccacatttagacctgaaaatgcg

SEQ ID NO: 15192 - protein, 344 aa, Zea mays subsp. mays
  misc_feature (1)..(344): Ceres Seq. ID no. 12343145
MDTQARPVPRVKLGTQGFEVSKLGFGCMGLTGAYNSPLDDEAGIAVIAHAFSRGVTLFDTSDVYGPLTNEILLGKALKQLPREQVQVATKFGIRRDESGTRTVCGRPEYVRACCEASLRRLGIDCIDLYYQHRIDTTIPIEETTGELKKLVEEGKVKYIGLSEASPDTIRRAHAVHPITAVQMEWSLWSRDIEPEIVPLCRELGIGIVPYSPLGRGFFGGRGVKEQVSAESNLHGIPRFAPENLEKNKQIYLRMEELANKHQCSPAQLALAWVLHQGDDVVPIPGTTKIKNLDSNIDSLKVKLTDEDLKEMGSQIREEDVAGGRQFTSYAHTTWKYADTPKKQS

SEQ ID NO: 15193 - protein, 317 aa, Zea mays subsp. mays
  misc_feature (1)..(317): Ceres Seq. ID no. 12343146
MGLTGAYNSPLDDEAGIAVIAHAFSRGVTLFDTSDVYGPLTNEILLGKALKQLPREQVQVATKFGIRRDESGTRTVCGRPEYVRACCEASLRRLGIDCIDLYYQHRIDTTIPIEETTGELKKLVEEGKVKYIGLSEASPDTIRRAHAVHPITAVQMEWSLWSRDIEPEIVPLCRELGIGIVPYSPLGRGFFGGRGVKEQVSAESNLHGIPRFAPENLEKNKQIYLRMEELANKHQCSPAQLALAWVLHQGDDVVPIPGTTKIKNLDSNIDSLKVKLTDEDLKEMGSQIREEDVAGGRQFTSYAHTTWKYADTPKKQS

SEQ ID NO: 15194 - DNA, 2103 bp, Zea mays subsp. mays
  misc_feature (1)..(2103): Ceres Seq. ID no. 12343158
acattggaacgcgaacgctctcggatccatccacctccaaagtccaaaagcgaagcctacgcccgccccaacggtgaaaacgtcggaaccctagatccctctcacggtcgcgcctgtgctccaaaaccttagatccgacatgcatcagcccagagcccgctacccacccgggtatggctccagcgggggaggcggtggcgggggaggcggtagtggaggaggaagaggaggcagcggcggcggaggaaaccacaactactacggccggaacacacatccacagcatcaacaccactaccagcagcagcagcagcactcgcataggaactcctcgcaccagcagcagtggctgcggcgagaccagggccccgccgttgcggggccagtgtctggaaacgctgtgcctaagacggcgcctcagcttgacgctgttgactcgagttctcaagattggaaggctcaactaaatataccagctccagacacacgctacaggacagaggatgtcactgcaacaaaaggcaatgagtttgaggattatttcttgaaacgtgagttgcttatgggaatatatgagaagggatttgaaaggccatctcctattcaagaagaaagcattcctattgcgttgactggaagtgatattcttgcaagggcgaaaaatggcactggaaagactgctgccttttgcattccggcacttgaaaaaattgatcctgaaaataatgcaattcaagttgttatactagtaccaacaagggaactggctctgcaaacttcacaagtgtgtaaagagcttgggaaatacctaaacattgaagttatggttagcactggaggaaccagcttgaaggatgacatcatgcgtttataccaacctgttcatctactcgttgggactcctggccgaatacttgatcttaccaggaagggcatttgtgtgctgaaagattgttcaatgcttgtcatggatgaggcagacaagctattagctccagagtttcagccttctgtggaggcacttattcatttccttccacctagtcgacaactgttgatgttttcagcaacctttcctgtaactgtcaaggaattcaaagagaaatatctgcctagaccttatgtgattaatctaatggacgaactgaccctgaaaggaatcacacaatattatgcttttgttgaagaaaggcagaaagttcattgcctgaatacacttttctcaaagcttcaaattaatcaatccattatattctgcaactctgttaatagagttgagctgctggctaaaaaaataactgaactcggttattcatgcttctacattcatgctaagatgttgcaagaccacagaaatcgagtatttcatgattttcgtaatggtgcttgcagaaaccttgtgtgcacagatctgtttaccagaggaattgatattcaggctgttaatgtggttattaattttgacttccctaagacatctgagacatatttacacagggttggccgttctgggagatatggacaccttggtttagcagtgaacttgatcacttatgaggaccgtttcaacttgtataggattgagcaagagcttggaacagaaattaagacaatacccccgcagatcgacctggccgtatactgccaatgatgaatgcgacattcaggagcatcaaacacttctctttctatttgagaaacttatcaggcaaatacgtttgtacatagcaacccatcagggctttgttttggcaccttgatgacgtttgtaagcttacctggattagtagaggaagtgcttcctgtaggcactgatactaacccgtttagctgaggacatgcacgctgggctgcttggaggcccagaactatgatgagatgagacaatatcttacctcacttgacattttcactcgacttgtttgccagtctcagttctacttgacttgcctgttctcatttgattcatcttccgttttcttctttcctaatgttatgatgcatatggatgtctttctgtagctgtatgatgtgttgagtttattttttcttggtgtatgtatacagcttaacttgaaattatttccatatcaacttctttgc

SEQ ID NO: 15195 - protein, 503 aa, Zea mays subsp. mays
  misc_feature (1)..(503): Ceres Seq. ID no. 12343159
MHQPRARYPPGYGSSGGGGGGGGGSGGGRGGSGGGGNHNYYGRNTHPQHQHHYQQQQQHSHRNSSHQQQWLRRDQGPAVAGPVSGNAVPKTAPQLDAVDSSSQDWKAQLNIPAPDTRYRTEDVTATKGNEFEDYFLKRELLMGIYEKGFERPSPIQEESIPIALTGSDILARAKNGTGKTAAFCIPALEKIDPENNAIQVVILVPTRELALQTSQVCKELGKYLNIEVMVSTGGTSLKDDIMRLYQPVHLLVGTPGRILDLTRKGICVLKDCSMLVMDEADKLLAPEFQPSVEALIHFLPPSRQLLMFSATFPVTVKEFKEKYLPRPYVINLMDELTLKGITQYYAFVEERQKVHCLNTLFSKLQINQSIIFCNSVNRVELLAKKITELGYSCFYIHAKMLQDHRNRVFHDFRNGACRNLVCTDLFTRGIDIQAVNVVINFDFPKTSETYLHRVGRSGRYGHLGLAVNLITYEDRFNLYRIEQELGTEIKTIPPQIDLAVYCQ

SEQ ID NO: 15196 - protein, 362 aa, Zea mays subsp. mays
  misc_feature (1)..(362): Ceres Seq. ID no. 12343160
MGIYEKGFERPSPIQEESIPIALTGSDILARAKNGTGKTAAFCIPALEKIDPENNAIQVVILVPTRELALQTSQVCKELGKYLNIEVMVSTGGTSLKDDIMRLYQPVHLLVGTPGRILDLTRKGICVLKDCSMLVMDEADKLLAPEFQPSVEALIHFLPPSRQLLMFSATFPVTVKEFKEKYLPRPYVINLMDELTLKGITQYYAFVEERQKVHCLNTLFSKLQINQSIIFCNSVNRVELLAKKITELGYSCFYIHAKMLQDHRNRVFHDFRNGACRNLVCTDLFTRGIDIQAVNVVINFDFPKTSETYLHRVGRSGRYGHLGLAVNLITYEDRFNLYRIEQELGTEIKTIPPQIDLAVYCQ

SEQ ID NO: 15197 - protein, 275 aa, Zea mays subsp. mays
  misc_feature (1)..(275): Ceres Seq. ID no. 12343161
MVSTGGTSLKDDIMRLYQPVHLLVGTPGRILDLTRKGICVLKDCSMLVMDEADKLLAPEFQPSVEALIHFLPPSRQLLMFSATFPVTVKEFKEKYLPRPYVINLMDELTLKGITQYYAFVEERQKVHCLNTLFSKLQINQSIIFCNSVNRVELLAKKITELGYSCFYIHAKMLQDHRNRVFHDFRNGACRNLVCTDLFTRGIDIQAVNVVINFDFPKTSETYLHRVGRSGRYGHLGLAVNLITYEDRFNLYRIEQELGTEIKTIPPQIDLAVYCQ

SEQ ID NO: 15198 - DNA, 998 bp, Zea mays subsp. mays
  misc_feature (1)..(998): Ceres Seq. ID no. 12343213
aacagtgaaccaaacaaaagcctcgagccagtgtggtgtggggtcgcgtgctctcttctatcctgctctgctagtgtcaggattccgccctatccatcccatcaacctcagctaaggtccccagcggcggcgaggcgatggcggcgcctgtgacggtgtacggaccgatgctctcaccagctgtggcccgcgtggcggcctgcctcctggagaaggacgtgccgttccagatcgagccggtggacatgtccaagggcgagcacaagtcgccgtccttcctcaagctccagcccttcggacaggtccctgccttcaaggaccacctcacaaccgtctttgagtcaagggctatttgccgttacatatgcgaccagtatgcggactctggtaatcaggccctcttcggcaagaaagaagacggcgcggttggccgcgctgccattgaacagtggatagagtctgaaggccagagctttaacccaccgagcttggctattatcttccagctcgcatttgcaccgatgatgggccggaccactgacctggctgtggttgagcagaatgaagcgaagcttgcgaaggtgcttgatgtgtatgaccaacggctgggggagagccagtattttgctggtgatgatttctcccctggccgaccttgtgcacttgcccaatgcagatttccttgtgaacagaaccagcaaggctggcttgatcaccgagagaaagaatcttgctagatggtgggatgatgtctcgtcccgacctgcatggaaaaaggtcactgagatgcagagcacgccgaggccctcttagagcttttttttgggtttctttgagcagcttctgatggcaattagttgcattctccttgttttgtcatcaagtccttgtctgtaccgtttcctgttctcttatttatcggtcttaattcttgatctatgtatggtttggatctgttcttctggtcctttagtttatataagtacctacaattcttc

SEQ ID NO: 15199 - protein, 199 aa, Zea mays subsp. mays
  misc_feature (1)..(199): Ceres Seq. ID no. 12343214
MAAPVTVYGPMLSPAVARVAACLLEKDVPFQIEPVDMSKGEHKSPSFLKLQPFGQVPAFKDHLTTVFESRAICRYICDQYADSGNQALFGKKEDGAVGRAAIEQWIESEGQSFNPPSLAIIFQLAFAPMMGRTTDLAVVEQNEAKLAKVLDVYDQRLGESQYFAGDDFSPGRPCALAQCRFPCEQNQQGWLDHREKESC

SEQ ID NO: 15200 - protein, 189 aa, Zea mays subsp. mays
  misc_feature (1)..(189): Ceres Seq. ID no. 12343215
MLSPAVARVAACLLEKDVPFQIEPVDMSKGEHKSPSFLKLQPFGQVPAFKDHLTTVFESRAICRYICDQYADSGNQALFGKKEDGAVGRAAIEQWIESEGQSFNPPSLAIIFQLAFAPMMGRTTDLAVVEQNEAKLAKVLDVYDQRLGESQYFAGDDFSPGRPCALAQCRFPCEQNQQGWLDHREKESC

SEQ ID NO: 15201 - protein, 163 aa, Zea mays subsp. mays
  misc_feature (1)..(163): Ceres Seq. ID no. 12343216
MSKGEHKSPSFLKLQPFGQVPAFKDHLTTVFESRAICRYICDQYADSGNQALFGKKEDGAVGRAAIEQWIESEGQSFNPPSLAIIFQLAFAPMMGRTTDLAVVEQNEAKLAKVLDVYDQRLGESQYFAGDDFSPGRPCALAQCRFPCEQNQQGWLDHREKESC

SEQ ID NO: 15202 - DNA, 942 bp, Zea mays subsp. mays
  misc_feature (1)..(942): Ceres Seq. ID no. 12343221
attacctggcgcggagaggagagggagtgagtcgagatccattcccaactgcacctgcgcgcctcgactggtagcccgaaccctagctagcaggtcggaggcgagagagcagccatggcgcggtgcctcgcgctcgtctccctccttctcctcggcctcgcctccgccgcctccgctgccgatgcgccctttgtcgtcgcgcacaagaaggtttcgctctcccgccccaagccgggcgtcgagcgcgtcgccgtctccctcgacctctacaaccagggatccgcgactgcctatgatgtgtcacttaatgacgactcttggccaacacaagcatttgagcttgtcactggagagaaatcgaagacattggaaaggcttgaccctggtgccactgctacacacacatatgtcctggagaccaaaacacagggcaggttccagggttcaccagctattattacgtaccgtgttcccacaaagactgctcttcaggaggcctactcaactcccatcttcccactggatattctcgctgagagacttcctgagaagaagtttgaatgggctaagaggcttgtggcgaaatatgggtcacttgtgtctgttgtctcatttgttggattgtttatctacctcgttgcgagcccgtcgaagagcagctcaaaaggaagcaagaagagacgttgatctacttatagttcggcgcagttgaagttgtagctggtggtttttgcctggaggaactcttggtagtttgagctgagcgaaagctttaaattttacatttactcaccacaccatgaactgcaacgaagtgagcatctgttagaaaagtggaccagtaattttggttggttatttatttcctgtttctctgtcagactcttaactcggaggacctgtaactaggaaagttacttttgcttgaaagaacattttggc

SEQ ID NO: 15203 - protein, 236 aa, Zea mays subsp. mays
  misc_feature (1)..(236): Ceres Seq. ID no. 12343222
LPGAERRGSESRSIPNCTCAPRLVARTLASRSEAREQPWRGASRSSPSFSSASPPPPPLPMRPLSSRTRRFRSPAPSRASSASPSPSTSTTRDPRLPMMCHLMTTLGQHKHLSLSLERNRRHWKGLTLVPLLHTHMSWRPKHRAGSRVHQLLLRTVFPQRLLFRRPTQLPSSHWIFSLRDFLRRSLNGLRGLWRNMGHLCLLSHLLDCLSTSLRARRRAAQKEARRDVDLLIVRRS

SEQ ID NO: 15204 - protein, 190 aa, Zea mays subsp. mays
  misc_feature (1)..(190): Ceres Seq. ID no. 12343223
MARCLALVSLLLLGLASAASAADAPFVVAHKKVSLSRPKPGVERVAVSLDLYNQGSATAYDVSLNDDSWPTQAFELVTGEKSKTLERLDPGATATHTYVLETKTQGRFQGSPAIITYRVPTKTALQEAYSTPIFPLDILAERLPEKKFEWAKRLVAKYGSLVSVVSFVGLFIYLVASPSKSSSKGSKKRR

SEQ ID NO: 15205 - protein, 176 aa, Zea mays subsp. mays
  misc_feature (1)..(176): Ceres Seq. ID no. 12343224
MRPLSSRTRRFRSPAPSRASSASPSPSTSTTRDPRLPMMCHLMTTLGQHKHLSLSLERNRRHWKGLTLVPLLHTHMSWRPKHRAGSRVHQLLLRTVFPQRLLFRRPTQLPSSHWIFSLRDFLRRSLNGLRGLWRNMGHLCLLSHLLDCLSTSLRARRRAAQKEARRDVDLLIVRRS

SEQ ID NO: 15206 - DNA, 743 bp, Zea mays subsp. mays
  misc_feature (1)..(743): Ceres Seq. ID no. 12343252
aaaaaagccaaaagcccgaaaccagaggcgggtagggttctagctgcaggcgacggccatggccgcctccgccgccgccccggcgctgcttcgacgcctcttctgcagctctattccagcctcctcctccgtactgcgcgctaccttttgctcctccgccggcttcggctcgtcttctccgtcctccatattcggcgacgccaccgaggtcgccaacgtgccaccgctcaccacgcccaacctcttcgtcagtggcctttcaaggttaacgacagatgagaagctccagggtgcatttgctcctttcgggaggctccttgaagcaaaagtggtgacggatagagtttctgggaggtcaaagggtttcggtttcgtgagatatgccaccatagaagaggccgagagagcgcggcaggagatgaacgccaagttcctggatggatgggtcatcttcgttgaccctgccaagccaaggcagccaaagcccgctcctcagcaggacactggttcatcgcatgctggcttcacgacgaacaagactgtaggatggtgcggctaggctcattgatctgtcgcgatatttcacggcacaaaacttggattgcaggggtggatctaggggtgttagtcacccggataaaatttataaattctttagaaaaacacagttaaagttcaagaaaatttgtatcatgtagcaaacctgaccttgctacccgataatatttttggttagattcgcc

SEQ ID NO: 15207 - protein, 166 aa, Zea mays subsp. mays
  misc_feature (1)..(166): Ceres Seq. ID no. 12343253
MAASAAAPALLRRLFCSSIPASSSVLRATFCSSAGFGSSSPSSIFGDATEVANVPPLTTPNLFVSGLSRLTTDEKLQGAFAPFGRLLEAKVVTDRVSGRSKGFGFVRYATIEEAERARQEMNAKFLDGWVIFVDPAKPRQPKPAPQQDTGSSHAGFTTNKTVGWCG

SEQ ID NO: 15208 - protein, 92 aa, Zea mays subsp. mays
  misc_feature (1)..(92): Ceres Seq. ID no. 12343254
KKAKSPKPEAGRVLAAGDGHGRLRRRPGAASTPLLQLYSSLLLRTARYLLLLRRLRLVFSVLHIRRRHRGRQRATAHHAQPLRQWPFKVNDR

SEQ ID NO: 15209 - DNA, 1047 bp, Zea mays subsp. mays
  misc_feature (1)..(1047): Ceres Seq. ID no. 12343255
ctaatcgaaaaaccctatgttcatgccaccatggaagggcttcgtattggagcaccgattatgcaggtttatcatgagaaatcttttatcttacctgatgtttcaagggtgcttgcttgcctttatgagaaggatgtcaagtttgagactcacacagcctcatacaggagcctactcggattgcaggcatcatctcatgctccagttccattctatgaaggccctacttttctagaagaatccagagaaatctgccgttatatagcagaaaagtatgaaaatcaaggatatccgttcctccttggaaaggatgcccttgagagggcttcaattgaacaatggctccacaacgaggagcatgctttcaaccctccgagccgggccttgttctttcatttggcctttcccctgggtgaaggagaagatgatgatattgatgttcatacaaggaagctagaagaggttctggaagtttatgagcaaaggctcagtgacagcgaattccttgttggaaacaagttcactcttgccgaccttgttcacctgccaaattcccactatatcaaagcatctaacaagtttctttacctttatgattcgaggaaaaatgtaaggaggtggtgggatgctatttctgaccggagttcttggaagaaagtgctgaggtatatgaagagcgtggaggagaagaacaaacaagaagaactcaagaagcagcagcagcagcaggaagaggctcctagaacctccaccgacccaactcgggtagactcgagaaagcagagcagaacagagcctcggacaatattggttcctcctgctgataacgagtcatcagcttcgatagttcctcgaacaaagaagcctcttcctggtgatcacttagtgtctactcaacaaattgatggtgttggtatgccagccacaaattgatggtgatggtcgtcttagtggtgtttgtcttgtcttttattgtttggttctttaacaagagttatatttttaccttctgaccaaagagttgtttaacaggatagtcattgtacg

SEQ ID NO: 15210 - protein, 310 aa, Zea mays subsp. mays
  misc_feature (1)..(310): Ceres Seq. ID no. 12343256
LIEKPYVHATMEGLRIGAPIMQVYHEKSFILPDVSRVLACLYEKDVKFETHTASYRSLLGLQASSHAPVPFYEGPTFLEESREICRYIAEKYENQGYPFLLGKDALERASIEQWLHNEEHAFNPPSRALFFHLAFPLGEGEDDDIDVHTRKLEEVLEVYEQRLSDSEFLVGNKFTLADLVHLPNSHYIKASNKFLYLYDSRKNVRRWWDAISDRSSWKKVLRYMKSVEEKNKQEELKKQQQQQEEAPRTSTDPTRVDSRKQSRTEPRTILVPPADNESSASIVPRTKKPLPGDHLVSTQQIDGVGMPATN

SEQ ID NO: 15211 - protein, 300 aa, Zea mays subsp. mays
  misc_feature (1)..(300): Ceres Seq. ID no. 12343257
MEGLRIGAPIMQVYHEKSFILPDVSRVLACLYEKDVKFETHTASYRSLLGLQASSHAPVPFYEGPTFLEESREICRYIAEKYENQGYPFLLGKDALERASIEQWLHNEEHAFNPPSRALFFHLAFPLGEGEDDDIDVHTRKLEEVLEVYEQRLSDSEFLVGNKFTLADLVHLPNSHYIKASNKFLYLYDSRKNVRRWWDAISDRSSWKKVLRYMKSVEEKNKQEELKKQQQQQEEAPRTSTDPTRVDSRKQSRTEPRTILVPPADNESSASIVPRTKKPLPGDHLVSTQQIDGVGMPATN

SEQ ID NO: 15212 - protein, 290 aa, Zea mays subsp. mays
  misc_feature (1)..(290): Ceres Seq. ID no. 12343258
MQVYHEKSFILPDVSRVLACLYEKDVKFETHTASYRSLLGLQASSHAPVPFYEGPTFLEESREICRYIAEKYENQGYPFLLGKDALERASIEQWLHNEEHAFNPPSRALFFHLAFPLGEGEDDDIDVHTRKLEEVLEVYEQRLSDSEFLVGNKFTLADLVHLPNSHYIKASNKFLYLYDSRKNVRRWWDAISDRSSWKKVLRYMKSVEEKNKQEELKKQQQQQEEAPRTSTDPTRVDSRKQSRTEPRTILVPPADNESSASIVPRTKKPLPGDHLVSTQQIDGVGMPATN

SEQ ID NO: 15213 - DNA, 954 bp, Zea mays subsp. mays
  misc_feature (1)..(954): Ceres Seq. ID no. 12343259
gccatgttcttgttttagttttccatgctctacatattgtatcaaattgttgcatggatgaggtttccatgctctctagattgatgtaaagatgaaagttaccttacctggagtacatgatgcctctggatttttctagctacttatcagtagcacattgtataccgagatgtgtttgtgatgttattttagtagtgtgataagtgttgtctgttatgctcttaaatggaggcatttgaccatccaatttagcttttctatgtgaagtcaatgaagcagaacctcttttttttgtgtgtgcacaaccacggcaatcctacgagccataaaccagagctagtactgaacaatttcactacacgccttggtcatcgtgttggaaggatgatccagtctctcttccctcaagatcccaatttccgcgggcgccgtgttgtgaccttccacaaccagcgagactacatatttttccgccatcacaggtacatcttcgagacaaaagaaaagaaggttgcttcgaaggaaaagacatctggaagcaaaagcggatctgagaagcagcaagtgatttgtcggcttcaggaatgtgggcctcgcttcaccctcaagctgctcaccttgcagcatgggaccttcgacacgaggagcggggagtacgagtgggttcacaagccggatatggatacgagcaggcggagattcttcttgtgatgccccaactccatcctgcggaacttcttttcttaaaaaaaagactttgacccctgttttgctgaagcagttttgtggaaccatcagtgagcagcaagtgatacggacttttatttttattttttattgttctggtttcggcgccagtgcgttggacaccaaaaccaaaagtgccggatgctccgatcctaaggcctgaacagtctatgcctccgtgatcagattaactcagatgattatccg

SEQ ID NO: 15214 - protein, 146 aa, Zea mays subsp. mays
  misc_feature (1)..(146): Ceres Seq. ID no. 12343260
MKQNLFFLCVHNHGNPTSHKPELVLNNFTTRLGHRVGRMIQSLFPQDPNFRGRRVVTFHNQRDYIFFRHHRYIFETKEKKVASKEKTSGSKSGSEKQQVICRLQECGPRFTLKLLTLQHGTFDTRSGEYEWVHKPDMDTSRRRFFL

SEQ ID NO: 15215 - protein, 108 aa, Zea mays subsp. mays
  misc_feature (1)..(108): Ceres Seq. ID no. 12343261
MIQSLFPQDPNFRGRRVVTFHNQRDYIFFRHHRYIFETKEKKVASKEKTSGSKSGSEKQQVICRLQECGPRFTLKLLTLQHGTFDTRSGEYEWVHKPDMDTSRRRFFL

SEQ ID NO: 15216 - protein, 94 aa, Zea mays subsp. mays
  misc_feature (1)..(94): Ceres Seq. ID no. 12343262
MGPSTRGAGSTSGFTSRIWIRAGGDSSCDAPTPSCGTSFLKKKTLTPVLLKQFCGTISEQQVIRTFIFIFYCSGFGASALDTKTKSAGCSDPKA

SEQ ID NO: 15217 - DNA, 1556 bp, Zea mays subsp. mays
  misc_feature (1)..(1556): Ceres Seq. ID no. 12343265
ctaatcgaaaaattctagaattgacgaaggtggctgtgccgagttctccacaccgctggagacttccaggtgcttcaggaaaccgagggggcgttgagataggtaaaaaaaaggaactccggcgaggtcgcccccggtagtggccggtgatgagttcgctcgggctccggctccggcttcggcgacctggagcgaggagttcggagatgcagtcttccagcgctcaagcagttttcgacttcgtctcaccgcttcccgcagactcctgagaggaaatttgtgacaaaaatatctgctctggaaatttgtaatgagattgtgaatggccttctacaatctgactctgctccccttcggttattagatgatcctgagaaatgaaccattgtggagaagttgcaagaagaaattgcttaggacaactaacatctgaggcatccaagcaggatttgtgaagcaacgaacacaacgcgcgccaaggcgcgcataagttactagttcgaaaaacaacaacgacctcgccttcttcacgtacgaggagaagcggaagctcgggtacggcacgcagcgggagcgcctgggaaaggactccatcaagcccttcgacgcctgctgcctctgcctcaagccgctcatcggcccgctctgctgccccaagggccacacattctgtaaggagtgcatcctcgagtgcctcctctaccagaagaaggacatcaagcgcaagctagctgcacatgaggtccagaaaaagcaagagaaggaagaggaagaggagaagctaattctgcagaaggctaaggagttggatgcctttgaccagcagaatcatggacctgttccccagtaccatgatcgcagtggttcgcaagacaagaatggttttcatggagcaaataatgtgaaggtcacttcttttgaagacgaagcccttcgcaatatgaaggcattctggctcccttcagctactcctgaagctacggtcaaggtagacgtgccctccatccacactgtttgcccggaggggcaggagaagctcaagttgaaatcgctcttccctatctcgttcacggaagaaactgctgatcagaagagcagtaaggcagtggaaaaaaagagctacatgtgccctagttgcaagtccactatcacaaataccatgtcccttgtggcggtcagcacctgtggccatgtcttctgcaagaaatgttatgacaagtttctagtgaaggataaagcttgcttggagtgcagcaaaccattcagggagaggaatctggttccattggagaaaggaggaaccgggtttgctgcacatgatgaacgcctagaggcaagatatttcaagcatttgggtagtggctctgggttaggactagtgaagcctgcaccagaaacttactaaccttgaataattatagccgttgttgtattgtttaccttggtgtcatgaaattatataacctagaaatgagaactccatcaagttcccaattgccgctgtaacttctatatacatgtatgcagatgttgattttaggtatctttaagacctt

SEQ ID NO: 15218 - protein, 154 aa, Zea mays subsp. mays
  misc_feature (1)..(154): Ceres Seq. ID no. 12343266
MKAFWLPSATPEATVKVDVPSIHTVCPEGQEKLKLKSLFPISFTEETADQKSSKAVEKKSYMCPSCKSTITNTMSLVAVSTCGHVFCKKCYDKFLVKDKACLECSKPFRERNLVPLEKGGTGFAAHDERLEARYFKHLGSGSGLGLVKPAPETY

SEQ ID NO: 15219 - protein, 93 aa, Zea mays subsp. mays
  misc_feature (1)..(93): Ceres Seq. ID no. 12343267
MCPSCKSTITNTMSLVAVSTCGHVFCKKCYDKFLVKDKACLECSKPFRERNLVPLEKGGTGFAAHDERLEARYFKHLGSGSGLGLVKPAPETY

SEQ ID NO: 15220 - protein, 81 aa, Zea mays subsp. mays
  misc_feature (1)..(81): Ceres Seq. ID no. 12343268
MSLVAVSTCGHVFCKKCYDKFLVKDKACLECSKPFRERNLVPLEKGGTGFAAHDERLEARYFKHLGSGSGLGLVKPAPETY

SEQ ID NO: 15221 - DNA, 1807 bp, Zea mays subsp. mays
  misc_feature (1)..(1807): Ceres Seq. ID no. 12343300
agcgaattagtgaaaagaagacaataaataaatacaacgaatgcagcgagcgaggtggaggtggggggaaaagggcgaggtgacaccgtgacagagagaaggcgagggagggatcacgaggtgtgcttcctcctccgcccaatcctgcccaaccaaatccgccagcgccgcctcctttacactcccacctctgtcccggagcaaaaaagggagggagaggctcgcttcttggatcgcggggtcacgggacgcgcgccgcgggccggtacgctgctgctggcggactgctcgacccttgcctaccagctgctgcctgctgctgcttccttggctggcgccggcgagagacggaggcgaggcgacgacgatggaccgggcggcgctcaccgtgggcccggggatggacatgcccataatgcacgacggcgaccgctacgagctcgtccgcgacatcggctccggcaacttcggcgtcgcgcgcctcatgcgcaaccgcgccgacggccagctcgtcgccgtcaagtacatcgagcgaggcgagaagattgacgagaacgtgcagcgggagatcatcaaccaccgctccctgcggcaccccaacatcatccgcttcaaggaggtcatcctcaccccgacgcacctcgccatcgtcatggagtacgcctccggcggggagctcttcgagcgcatctgcaacgctggcaggttcagcgaggacgaggcgcgtttctttttccagcaactcatatcaggggtcagctactgccattccatgcaagtatgccatcgcgacttgaagctagagaacaccctgttggacgggagcaccgcgcctcgcctcaagatatgtgattttggctactcaaagtcatcagttctacactcgcagccgaaatctacagtgggaactcctgcatacattgctcctgaggttcttctgaagaaggaatacgatggaaaggtcgctgatgtgtggtcatgtggagtaacgctgtacgtgatgctggtcggtgcatatccgtttgaggacccagattagcctaagaatttcaggaagacaattcagagaatattgggtgtgcagtactcaattccagactatgtccacatatctccagagtgccaaaatcttgtctctaggattttcgtcgccgacccagccaccaggatcaccatccctgagataaggaaccatccatggttcttgaagaacctgccagctgacctaatggatgacagcacgatgagcaagcagtacgaggagcctgagcaaccgatgcagagcatggatgagatcatgcagatcctggccgaggcgaccattccagcagctggtccccgtggactcaatcagttcctgaacgacggccttgacctcgacgatgacatggacgacctggactcagataccgatcttgacctggaaagcagtggggaaatcgtgtatgctatttgacagcagcgaggcaatgtgtatcatcagtcgtgctcagatcgtttgttgcgccataggttaccgagataattagagagacaggggggaggtatctgctggagatgctgctcgtgtctgatgccgtgatgcccccttttttcatcctgttatgtttggctgttgtttggttgtggtgcacctccagtgttttacaacagtttggcccttcggaattggttgtgctagaacctcgtccatctaagaagaccctttgtttttgcatccccagctaagagacagtgaagtacttgtataattatactgtttgtgtcatatgtatttggtgtaggaaaataaagaaactccattgcc

SEQ ID NO: 15222 - protein, 223 aa, Zea mays subsp. mays
  misc_feature (1)..(223): Ceres Seq. ID no. 12343301
MDRAALTVGPGMDMPIMHDGDRYELVRDIGSGNFGVARLMRNRADGQLVAVKYIERGEKIDENVQREIINHRSLRHPNIIRFKEVILTPTHLAIVMEYASGGELFERICNAGRFSEDEARFFFQQLISGVSYCHSMQVCHRDLKLENTLLDGSTAPRLKICDFGYSKSSVLHSQPKSTVGTPAYIAPEVLLKKEYDGKVADVWSCGVTLYVMLVGAYPFEDPD

SEQ ID NO: 15223 - protein, 212 aa, Zea mays subsp. mays
  misc_feature (1)..(212): Ceres Seq. ID no. 12343302
MDMPIMHDGDRYELVRDIGSGNFGVARLMRNRADGQLVAVKYIERGEKIDENVQREIINHRSLRHPNIIRFKEVILTPTHLAIVMEYASGGELFERICNAGRFSEDEARFFFQQLISGVSYCHSMQVCHRDLKLENTLLDGSTAPRLKICDFGYSKSSVLHSQPKSTVGTPAYIAPEVLLKKEYDGKVADVWSCGVTLYVMLVGAYPFEDPD

SEQ ID NO: 15224 - protein, 210 aa, Zea mays subsp. mays
  misc_feature (1)..(210): Ceres Seq. ID no. 12343303
MPIMHDGDRYELVRDIGSGNFGVARLMRNRADGQLVAVKYIERGEKIDENVQREIINHRSLRHPNIIRFKEVILTPTHLAIVMEYASGGELFERICNAGRFSEDEARFFFQQLISGVSYCHSMQVCHRDLKLENTLLDGSTAPRLKICDFGYSKSSVLHSQPKSTVGTPAYIAPEVLLKKEYDGKVADVWSCGVTLYVMLVGAYPFEDPD

SEQ ID NO: 15225 - DNA, 1703 bp, Zea mays subsp. mays
  misc_feature (1)..(1703): Ceres Seq. ID no. 12343304
gcgtttagagagagagaagacagggagaaggaggaagagccgccgcggtggaccgggtgatttggcgtttccttgtcctcggcagggttgtcaggggattcgtcaggacacgggcaagctttgtacgctaccaattcagcgaataaccgacgggggtgcgtggaattgctcaccggagcaaaccctccgccgccgaaccaccatccgctgtgagcgaataaccggcatccccagggcgccgtcgatcccggtcggccatctcccggtgcctggtaactgatcgttaatttcatcgatgggtgccatggaggaccgcagctccaagcaggcaggcgcgggcttggtggcccacctccacgacgacctccttgtggagatcctctcccgcgtccccgccaagtccatctgccggttcaagtgcgtgtccaaggcctggctcgacctcattgccggtcccgaccaccgtaagaagctccgccaacccatgcagggactcatctacatgaatccagagaaggaccgccacagcttcagcttcctggacctgccactgacagtaggatccgtgcctcaggacgttgtcgaccctgcaggcttcatctccttcctgacggaacagcctgagatccatcgcctcgtcttactggattcctgcaatggtctgatcctattccagcaccttatggagctgccgcactacaacagtttgggctatgtcgtgtgcaacccgaccacgaagcaatggcgagccgtgcccgagcccgactgcagctcccatgtaccaatgaactacacatatttggcttttgatccgactgtatcctcccacttccacttggtccggttcaaaaagaatcgcgagtacatggagcccatgtcggtgcatgcttactcgtctaaaactgggatatggacctatagccaaactgagaaagaagaagaagaatggcagaatcaggtctacttatctataagtaatcgatgcgcctttgttaatggcttcctgcatttgctagtttggggctcgaacaaaatgcagatactcatcgtagatgtacaaggacgtccaagaaggatgatcagactgccagacgcggctgctggtaattgtgagggatgctactgtgtttactttggccaatcccaggggcatctgcactgcattactaaacaattattcgacttcaacgaagagaaatacgagctgtccatctgggctcttcaggattacgaagcacaagagtgggtgctgaaggacactgtgagctccctccagctctttggaggaaattgccccacaagtgtcgcattggagttgtacagcgaggtggccagcatgcatctggatcgcaatgtggtcttcttcttttcacactgtgaacgtagattcatagcatatgacatggacagcaaggaagtgagtgttttcagcagttccaaagctatacacaggtggaaggttggttgctatgttccttgtttctcaccggcgcctctcaaataagcactacaagcaattagtgcgtggtctaatacaagtatgagctgctagcaacttagttagactgtaataaggtcaagtgaagtatttcgtccatgagtgtttggtctaattagttccgcaagcctgttgaggcatttatatatatatgtagtctatatttatggatgctagttaaattaatggatacgttgtatgattt

SEQ ID NO: 15226 - protein, 402 aa, Zea mays subsp. mays
  misc_feature (1)..(402): Ceres Seq. ID no. 12343305
MGAMEDRSSKQAGAGLVAHLHDDLLVEILSRVPAKSICRFKCVSKAWLDLIAGPDHRKKLRQPMQGLIYMNPEKDRHSFSFLDLPLTVGSVPQDVVDPAGFISFLTEQPEIHRLVLLDSCNGLILFQHLMELPHYNSLGYVVCNPTTKQWRAVPEPDCSSHVPMNYTYLAFDPTVSSHFHLVRFKKNREYMEPMSVHAYSSKTGIWTYSQTEKEEEEWQNQVYLSISNRCAFVNGFLHLLVWGSNKMQILIVDVQGRPRRMIRLPDAAAGNCEGCYCVYFGQSQGHLHCITKQLFDFNEEKYELSIWALQDYEAQEWVLKDTVSSLQLFGGNCPTSVALELYSEVASMHLDRNVVFFFSHCERRFIAYDMDSKEVSVFSSSKAIHRWKVGCYVPCFSPAPLK

SEQ ID NO: 15227 - protein, 399 aa, Zea mays subsp. mays
  misc_feature (1)..(399): Ceres Seq. ID no. 12343306
MEDRSSKQAGAGLVAHLHDDLLVEILSRVPAKSICRFKCVSKAWLDLIAGPDHRKKLRQPMQGLIYMNPEKDRHSFSFLDLPLTVGSVPQDVVDPAGFISFLTEQPEIHRLVLLDSCNGLILFQHLMELPHYNSLGYVVCNPTTKQWRAVPEPDCSSHVPMNYTYLAFDPTVSSHFHLVRFKKNREYMEPMSVHAYSSKTGIWTYSQTEKEEEEWQNQVYLSISNRCAFVNGFLHLLVWGSNKMQILIVDVQGRPRRMIRLPDAAAGNCEGCYCVYFGQSQGHLHCITKQLFDFNEEKYELSIWALQDYEAQEWVLKDTVSSLQLFGGNCPTSVALELYSEVASMHLDRNVVFFFSHCERRFIAYDMDSKEVSVFSSSKAIHRWKVGCYVPCFSPAPLK

SEQ ID NO: 15228 - protein, 339 aa, Zea mays subsp. mays
  misc_feature (1)..(339): Ceres Seq. ID no. 12343307
MQGLIYMNPEKDRHSFSFLDLPLTVGSVPQDVVDPAGFISFLTEQPEIHRLVLLDSCNGLILFQHLMELPHYNSLGYVVCNPTTKQWRAVPEPDCSSHVPMNYTYLAFDPTVSSHFHLVRFKKNREYMEPMSVHAYSSKTGIWTYSQTEKEEEEWQNQVYLSISNRCAFVNGFLHLLVWGSNKMQILIVDVQGRPRRMIRLPDAAAGNCEGCYCVYFGQSQGHLHCITKQLFDFNEEKYELSIWALQDYEAQEWVLKDTVSSLQLFGGNCPTSVALELYSEVASMHLDRNVVFFFSHCERRFIAYDMDSKEVSVFSSSKAIHRWKVGCYVPCFSPAPLK

SEQ ID NO: 15229 - DNA, 1670 bp, Zea mays subsp. mays
  misc_feature (1)..(1670): Ceres Seq. ID no. 12343352
acacgtttcaccatcaataggacaaaagcagcaccagccaccaggcagactccctcgactccgactctacgcgacacacgagcgcaggggctcaaacgcgaaaaaaaagaggccccaacgcccactccaccggccaatcacccgccggcgcgccatggcggccgccgccgggggactccgtcaagcagccgctcctccaccgcgcgtacccgtcccacgccgcgtcggcctcctcgccggccctcccgtccgttcccccggggggcgggggccgccgcttcccagggggcctcgacgtgcccaacctgaagaagcgcggcggcggcacgcgcagctggatccgcgtcgaggccgccacggcctccgtgcagacgctggagatcgacaaggccaccatgatgcggcgctgcgagctccccgcgcgcgacctccgcctgctcgacccgctcttcgtgtacccgtccacggtcctgggccgcgagcgcgcaatcgtcgtcaacctcgagcagatcaggtgcgtcatcaccgccgacgaggtgctcctgctcaactccctcgacagctacgtcctccagtatgccgccgagctccagcgccgcctgctccagcgcgcggagggcgacgagctacccttcgaattccgagcgctcgagctcgccctcgaggccgcatgctccttcctcgatgcacaggctgcggaattggagattgaagcatatccattactggatgaactgacatccaaaatcagtactctcaatttggaacgtgcccggcgattaaaaagtagactagttgcattgaccagaagagttcaaaaagtcagagatgaaatagaacaactaatggatgatgatggtgatatggctgagatgtatctcaccgaaaaaaagatgaggatggaatcatctgtctttggtgaccagtctttgttgggctacaattcagcaggcgctgttggggcttcagtttcagctcctgtatctccagtctcatcgcctacagaatcacgaaaactggagaaatctttcagtttgtgtagaagtaggcatgacagtacgaagggctcagataacacaatgacagagcatatccaggagctggagatgttactggaagcttattttgttgttatcgacagcactctgaacaagctgacatcgcttaaagagtacatcgatgacactgaagacttcatcaacattcagctggacaatgtgcggaaccagctgatccagtttgaattgctgctaacgaccgcaacatttgttgtggccattttcggagtggttgctgggatattcgggatgaactttgagacatcagttttcgaaatagagaatgcattccagtgggtccttgtaattacttcagtgaccggcgttttcatcttctgctcctttctttggttcttcaagtacaagagattgatgcctttgtagagaatgtatatgccctcctcccataggaccgatgaatcaatttcaaccctgttaagaggcacttgatcagaagcctgaacctctgccgatgtaaattaccattcttttagaggtttacggcatgagtaccgagaatccgggtgaaaattgtaaccttcttgacatgatccctgtgctgtataagagaaaatcatattacagtttatacaaataataccgaccaattct

SEQ ID NO: 15230 - protein, 348 aa, Zea mays subsp. mays
  misc_feature (1)..(348): Ceres Seq. ID no. 12343353
MMRRCELPARDLRLLDPLFVYPSTVLGRERAIVVNLEQIRCVITADEVLLLNSLDSYVLQYAAELQRRLLQRAEGDELPFEFRALELALEAACSFLDAQAAELEIEAYPLLDELTSKISTLNLERARRLKSRLVALTRRVQKVRDEIEQLMDDDGDMAEMYLTEKKMRMESSVFGDQSLLGYNSAGAVGASVSAPVSPVSSPTESRKLEKSFSLCRSRHDSTKGSDNTMTEHIQELEMLLEAYFVVIDSTLNKLTSLKEYIDDTEDFINIQLDNVRNQLIQFELLLTTATFVVAIFGVVAGIFGMNFETSVFEIENAFQWVLVITSVTGVFIFCSFLWFFKYKRLMPL

SEQ ID NO: 15231 - protein, 347 aa, Zea mays subsp. mays
  misc_feature (1)..(347): Ceres Seq. ID no. 12343354
MRRCELPARDLRLLDPLFVYPSTVLGRERAIVVNLEQIRCVITADEVLLLNSLDSYVLQYAAELQRRLLQRAEGDELPFEFRALELALEAACSFLDAQAAELEIEAYPLLDELTSKISTLNLERARRLKSRLVALTRRVQKVRDEIEQLMDDDGDMAEMYLTEKKMRMESSVFGDQSLLGYNSAGAVGASVSAPVSPVSSPTESRKLEKSFSLCRSRHDSTKGSDNTMTEHIQELEMLLEAYFVVIDSTLNKLTSLKEYIDDTEDFINIQLDNVRNQLIQFELLLTTATFVVAIFGVVAGIFGMNFETSVFEIENAFQWVLVITSVTGVFIFCSFLWFFKYKRLMPL

SEQ ID NO: 15232 - protein, 236 aa, Zea mays subsp. mays
  misc_feature (1)..(236): Ceres Seq. ID no. 12343355
HVSPSIGQKQHQPPGRLPRLRLYATHERRGSNAKKKRPQRPLHRPITRRRAMAAAAGGLRQAAAPPPRVPVPRRVGLLAGPPVRSPGGRGPPLPRGPRRAQPEEARRRHAQLDPRRGRHGLRADAGDRQGHHDAALRAPRARPPPARPALRVPVHGPGPRARNRRQPRADQVRHHRRRGAPAQLPRQLRPPVCRRAPAPPAPARGGRRATLRIPSARARPRGRMLLPRCTGCGIGD

SEQ ID NO: 15233 - DNA, 1105 bp, Zea mays subsp. mays
  misc_feature (1)..(1105): Ceres Seq. ID no. 12343379
agcccaaaatcaattcggatccgcctccatggctgccgcttcgcagctcctctctctgttcttcctcctcctcctccctgcttgtgatgccatctactgcgacgaagacgactgctacgacctcctaggggttaagcaggacgcgaacgcgtcagacatcaagaaagcgtactacaagctctctctcaaacaccacccggacaagaatcccgatccggagtcgcggaagctcttcgtcaagatcgccaatgcttacgagattctgaaggatgaatccactagggcgcagtatgactttgccattgaacatccggaggaggttttctataacacagctcagtactatagggcatactatggacataaaacggatcctcgtgcagtgttgattggtcttcttctaattgtttcagcatttcaatacattaatcagctaacgaggtataaccaggccatgaaaagtgtcaagcaaactcctgcttacaaaaataggttaaaagctttggagtatgagcgaacaggaggaattgctagcaaaaagaagggcatcaagcaggtggataagaaagttgaagaagagctaagtaatgaagttgaattgcaaattcatggggttgaaaaaccgtctgtttggaggctgtttggtgtccaatttatactttggccttactctgttggcaaggcgcttacttggaagatttgttggttttggagataccgggtaaagaaattaccatatacatgggaggatgcttgctacttgacctggatttcactccaaatacctgcgaatgcatggaaaaatatggatgagtccaggaaggaggaccttgtgagaagacacctctgggaaaagagcaacatggagaggtatacttcagggacgaggaaggaaccaaagcgtaggaggtagctgtgcaacatttttgacctgagactacagcaactttaaacaatacaacatactcctatattggagtgaaaagttattgaccaggcttgagttcaccgatagctaattgctagggtccccgggaagtggcatggctaaggaatcatgtttggaggacaattcatgtaataaagtgatcaaggcgacttttgc

SEQ ID NO: 15234 - protein, 303 aa, Zea mays subsp. mays
  misc_feature (1)..(303): Ceres Seq. ID no. 12343380
AQNQFGSASMAAASQLLSLFFLLLLPACDAIYCDEDDCYDLLGVKQDANASDIKKAYYKLSLKHHPDKNPDPESRKLFVKIANAYEILKDESTRAQYDFAIEHPEEVFYNTAQYYRAYYGHKTDPRAVLIGLLLIVSAFQYINQLTRYNQAMKSVKQTPAYKNRLKALEYERTGGIASKKKGIKQVDKKVEEELSNEVELQIHGVEKPSVWRLFGVQFILWPYSVGKALTWKICWFWRYRVKKLPYTWEDACYLTWISLQIPANAWKNMDESRKEDLVRRHLWEKSNMERYTSGTRKEPKRRR

SEQ ID NO: 15235 - protein, 294 aa, Zea mays subsp. mays
  misc_feature (1)..(294): Ceres Seq. ID no. 12343381
MAAASQLLSLFFLLLLPACDAIYCDEDDCYDLLGVKQDANASDIKKAYYKLSLKHHPDKNPDPESRKLFVKIANAYEILKDESTRAQYDFAIEHPEEVFYNTAQYYRAYYGHKTDPRAVLIGLLLIVSAFQYINQLTRYNQAMKSVKQTPAYKNRLKALEYERTGGIASKKKGIKQVDKKVEEELSNEVELQIHGVEKPSVWRLFGVQFILWPYSVGKALTWKICWFWRYRVKKLPYTWEDACYLTWISLQIPANAWKNMDESRKEDLVRRHLWEKSNMERYTSGTRKEPKRRR

SEQ ID NO: 15236 - protein, 152 aa, Zea mays subsp. mays
  misc_feature (1)..(152): Ceres Seq. ID no. 12343382
MKSVKQTPAYKNRLKALEYERTGGIASKKKGIKQVDKKVEEELSNEVELQIHGVEKPSVWRLFGVQFILWPYSVGKALTWKICWFWRYRVKKLPYTWEDACYLTWISLQIPANAWKNMDESRKEDLVRRHLWEKSNMERYTSGTRKEPKRRR

SEQ ID NO: 15237 - DNA, 580 bp, Zea mays subsp. mays
  misc_feature (1)..(580): Ceres Seq. ID no. 12343636
ataatggcataattccatatttctccagctgttccgccgagcgaacgacccacaaccagaagccacccattggcgtacgcgaggcgatcggagcatcccgtcccaagaggagaaactccggccggcgacgcgggggaaaatggggaagacgccggtgcggatgaaggcggtggtgtacgcgctgtcgcccttccagcagaaggtgatgccggggctgtggaaggacatcaccaccaagatccaccacaaggtcaccgagaactggatctccgccacgctcctcctcacccccgtcgtcggcacctaccaatacgccatgtggtacaaagagcaggagaagctttcccacagatactaaatgggatgtcctccaagttgctgcggcttgtcgcagttgaattttccatgatgggttgtataatctgtcaatgtcatttctttgctcagttttagttcaacccattttcacctttccatatgcatatacggtatctgtgcctggcaaacatattttgaggctagctaaatatgaaccttttgtctcttaagttgttaaataaagcaaattatctgacagttt

SEQ ID NO: 15238 - protein, 72 aa, Zea mays subsp. mays; identical to SEQ ID NO: 14412
  misc_feature (1)..(72): Ceres Seq. ID no. 12343637

SEQ ID NO: 15239 - protein, 65 aa, Zea mays subsp. mays
  misc_feature (1)..(65): Ceres Seq. ID no. 12343638
MKAVVYALSPFQQKVMPGLWKDITTKIHHKVTENWISATLLLTPVVGTYQYAMWYKEQEKLSHRY

SEQ ID NO: 15240 - protein, 53 aa, Zea mays subsp. mays
  misc_feature (1)..(53): Ceres Seq. ID no. 12343639
NGIIPYFSSCSAERTTHNQKPPIGVREAIGASRPKRRNSGRRRGGKWGRRRCG

SEQ ID NO: 15241 - DNA, 771 bp, Zea mays subsp. mays
  misc_feature (1)..(771): Ceres Seq. ID no. 12343659
acctgcgcattttgtaaaggtacgaggagctaggtgaggcaccaccaccaaccgggctccgactccgagttcatcacgcacgcatggaaggctcggcggcacaggcgccggggaagaccgtcctgagggtggtggcgatctccggctcgctgcgcagggcgtcggccaacaccggcctcatccgcgccgccgcggagatctgcagggagtcgatcccggggctggaggtggagcacgtggacatctcggagctgccgctgctgaacaccgacctggagggcccgggccccggcgcgttcccggcggccgtcgaggcgttccgcggcaaggtgcgcgccgccgactgcttcctgttcgcgtcgcccgagtacaactactccatctcgggcccgctgaagaacgcgctggactgggggtcgcgcccgcccaactgctggggcgacagggccgccgccatcctcagcgcgtcgggcgggtcggggggcagccgctcgcagtaccacgtccgccaggtcggcgttttcctcgacctccacttcgtcaacaagcccgaggtgttcaccagggcgcaccagccgcccagaaagttcgaccacgacggcaacctcgtcgacccggacaccaaggaccaggtcaccaaggtgctcctggcgctgcaggctctcgcgctcaggctgcagctggggaagctcgctgttgctgcacactcttcttgaacgtcgtcgtcgtcgggggtgcactaaactacactacacatcgtcgccgagctcc

SEQ ID NO: 15242 - protein, 210 aa, Zea mays subsp. mays
  misc_feature (1)..(210): Ceres Seq. ID no. 12343660
MEGSAAQAPGKTVLRVVAISGSLRRASANTGLIRAAAEICRESIPGLEVEHVDISELPLLNTDLEGPGPGAFPAAVEAFRGKVRAADCFLFASPEYNYSISGPLKNALDWGSRPPNCWGDRAAAILSASGGSGGSRSQYHVRQVGVFLDLHFVNKPEVFTRAHQPPRKFDHDGNLVDPDTKDQVTKVLLALQALALRLQLGKLAVAAHSS

SEQ ID NO: 15243 - DNA, 1655 bp, Zea mays subsp. mays
  misc_feature (1)..(1655): Ceres Seq. ID no. 12343676
aaataaaactgaaatagcgaggaagggacgggttcggcctctctgcccgaattcccgattgcgcctcctccgactccgagattccgtcagccatggacgggctcctgtcgaagctccgcagcctggacgcgtaccccaaggtgaacgaggacttctacagccgcaccctctccggcggcatcatcacgctcgtctcctctgctgtcatgctcctcctcttcgtctccgagctccgattatatctccatgcagttactgagacaacactaagggttgatacttcaaggggagaaacacttcgcataaattttgatgtcacctttccagcccttcaatgttctataattagcctggatgcaatggacatcagtggacaggagcacctagatgtgaaacatgatgtattcaagcagcgaattgatgcccatggcaatgttattgcgactaggcaagatgtagttggtgggatgaagatggaggcacctctacaacatcatggtggaaggcttgaacacaatgaaacctattgtggctcttgttatggtgcacaagaatctgatgatcaatgttgtaacacatgtgaagatgttcgtgaagcctataggaaaaaaggttggggtgtatcgaatccagatttgcttgaccagtgcaaaagggagggctttcttcaaagtataaaggacgaagaaggcgaaggatgcaatatttatggttttattgaagttaataaggttgctgggaatttccattttgctccagggaaaagtttccagcagtcaaatgtgcacgttcatgacttgctcccgttccagaaggacagcttcaatgtcagtcataagataaacagactaagttttggagaatactttccaggtgttgttaatccacttgatggggcaaattgggtgcagcattcatcatatggaatgtatcaatacttcatcaaggttgttcctacagtctacacggacataaatgaacacattattctctctaatcagttctctgtaacggaacattttagaagtggtgagagtggtcggatgcaggctcttcctggtgtgttcttcttttatgacctttctccaatcaaggtcacattcacggaacaacatgtgtcatttttacactttttaactaatgtttgcgctattgttggaggtgtgttcaccgtttctggaatcatagattcgtttgtataccatagtcaaagagcaatcaagaagaagatggaaatcggcaaattcaactgatgttgccttactattgctgcaattaagtagctcctgttgcagctccaagatccagaaatgcaatgtggcttttcctcgaactcttggcacagttgcgtagttgacaaacaattgctcatcagataactcttgatgtgcttgccaacttgcttccggcaaagataccagcgagcaagatggtcatcttgtatacttcgatgttacatttttgtacgcttagtctgacaagaaaacattttacttcctccagctgcaggtgttcgtgtactgttgtaaatttgtggtagagggagcctatctgtagttttttttacaattatgtgtttgtaccagtttttctgagacatttgtagcttagacaggtaaaggttgtttgaaatacatataaaccatttttgaagc

SEQ ID NO: 15244 - protein, 386 aa, Zea mays subsp. mays
  misc_feature (1)..(386): Ceres Seq. ID no. 12343677
MDGLLSKLRSLDAYPKVNEDFYSRTLSGGIITLVSSAVMLLLFVSELRLYLHAVTETTLRVDTSRGETLRINFDVTFPALQCSIISLDAMDISGQEHLDVKHDVFKQRIDAHGNVIATRQDVVGGMKMEAPLQHHGGRLEHNETYCGSCYGAQESDDQCCNTCEDVREAYRKKGWGVSNPDLLDQCKREGFLQSIKDEEGEGCNIYGFIEVNKVAGNFHFAPGKSFQQSNVHVHDLLPFQKDSFNVSHKINRLSFGEYFPGVVNPLDGANWVQHSSYGMYQYFIKVVPTVYTDINEHIILSNQFSVTEHFRSGESGRMQALPGVFFFYDLSPIKVTFTEQHVSFLHFLTNVCAIVGGVFTVSGIIDSFVYHSQRAIKKKMEIGKFN

SEQ ID NO: 15245 - protein, 348 aa, Zea mays subsp. mays
  misc_feature (1)..(348): Ceres Seq. ID no. 12343678
MLLLFVSELRLYLHAVTETTLRVDTSRGETLRINFDVTFPALQCSIISLDAMDISGQEHLDVKHDVFKQRIDAHGNVIATRQDVVGGMKMEAPLQHHGGRLEHNETYCGSCYGAQESDDQCCNTCEDVREAYRKKGWGVSNPDLLDQCKREGFLQSIKDEEGEGCNIYGFIEVNKVAGNFHFAPGKSFQQSNVHVHDLLPFQKDSFNVSHKINRLSFGEYFPGVVNPLDGANWVQHSSYGMYQYFIKVVPTVYTDINEHIILSNQFSVTEHFRSGESGRMQALPGVFFFYDLSPIKVTFTEQHVSFLHFLTNVCAIVGGVFTVSGIIDSFVYHSQRAIKKKMEIGKFN

SEQ ID NO: 15246 - protein, 297 aa, Zea mays subsp. mays
  misc_feature (1)..(297): Ceres Seq. ID no. 12343679
MDISGQEHLDVKHDVFKQRIDAHGNVIATRQDVVGGMKMEAPLQHHGGRLEHNETYCGSCYGAQESDDQCCNTCEDVREAYRKKGWGVSNPDLLDQCKREGFLQSIKDEEGEGCNIYGFIEVNKVAGNFHFAPGKSFQQSNVHVHDLLPFQKDSFNVSHKINRLSFGEYFPGVVNPLDGANWVQHSSYGMYQYFIKVVPTVYTDINEHIILSNQFSVTEHFRSGESGRMQALPGVFFFYDLSPIKVTFTEQHVSFLHFLTNVCAIVGGVFTVSGIIDSFVYHSQRAIKKKMEIGKFN

SEQ ID NO: 15247 - DNA, 826 bp, Zea mays subsp. mays
  misc_feature (1)..(826): Ceres Seq. ID no. 12343683
caaaacatgttcttcttccgctgcaagatagcaacacaggcgaggatcccaagacccgagccgtgtagccgtgtaggctgctacagtctcttcctccccgtcaagccgcggcggtcgttgccccggccctcatataatatagtcgccgcctccttgtcaccgccgattcgattaggttgatacagggaggagtcgcgaggggacgtagatgccgacgctgacaaagctgtacagcatgaaggaggctgccctccacaacacgcccgacgactgctgggtcgtcgtcgacggcaagatttatgatgtgaccaagtatttggaggaccatcctgggggcgccgatgttctgctcgaagcaaccggtaaggatgctacagaagaatttgacgatgcagggcacagcaagagtgccaaggagctaatgcaggactacttcgttggggagttggactcggacccaactcctgagattcctgagatggaggttttcagaaaggaacaggacacgggatttgccaggaagcttatggacgacgtggtgcaatattggtcgatcccagccgctgtaattgggatatcagctgttgttgccatattgtatgcgcgaaggaagtgaaagccgatgtgcatgtgccgagcttgggcagatgaccccttttagagggatcagcccatggtgcatggatatatcatatatcatatctcctgtccagaaccaaattacattattatgttcgattcttaaacacttaatggcaaacatttgccggattgatggcattattttgtcgacacgacaatcaattgatggatttattactcttgg

SEQ ID NO: 15248 - protein, 135 aa, Zea mays subsp. mays
  misc_feature (1)..(135): Ceres Seq. ID no. 12343684
MPTLTKLYSMKEAALHNTPDDCWVVVDGKIYDVTKYLEDHPGGADVLLEATGKDATEEFDDAGHSKSAKELMQDYFVGELDSDPTPEIPEMEVFRKEQDTGFARKLMDDVVQYWSIPAAVIGISAVVAILYARRK

SEQ ID NO: 15249 - protein, 126 aa, Zea mays subsp. mays
  misc_feature (1)..(126): Ceres Seq. ID no. 12343685
MKEAALHNTPDDCWVVVDGKIYDVTKYLEDHPGGADVLLEATGKDATEEFDDAGHSKSAKELMQDYFVGELDSDPTPEIPEMEVFRKEQDTGFARKLMDDVVQYWSIPAAVIGISAVVAILYARRK

SEQ ID NO: 15250 - protein, 75 aa, Zea mays subsp. mays
  misc_feature (1)..(75): Ceres Seq. ID no. 12343686
MREGSESRCACAELGQMTPFRGISPWCMDISYIISPVQNQITLLCSILKHLMANICRIDGIILSTRQSIDGFITL

SEQ ID NO: 15251 - DNA, 1479 bp, Zea mays subsp. mays
  misc_feature (1)..(1479): Ceres Seq. ID no. 12343690
gcatctccctttaccattgtctcccccctcgtccgtcctcctcgccgccgcagaccaccgccgccgccgccgctgccgctgcgaacccttgtgaatcttcgttgtccgggctgtggggggcaggcatggcgctccggaggctgctgcaggggagcgtcctgccgcggataatcggcagggatttggcaccggccgtggcgccgttttcaacggagtctggggagaccattcgtgccacgctctttcccggcgatggcatcgggccagagatcgctgagtctgtcaagcaggtattcaatgttgcaggggtaccaattgaatgggaagaacactatgtcagtacagaagttgatcccagaacagagagttttttgacttgggaaagcctggagtcagtgcgtagaaataaagttggcttgaaaggacctatggctacacctattggaaagggccatcgatctttgaatcttacattaaggaaagaacttgggctctatgccaatgtcagaccttgcaacagcctcccaggttacaagaccagatacgatgatgttaaccttgtaacaattcgtgaaaatactgaaggagaatatagtggtcttgagcatcaggttgtgagaggtgttgtggaaagtttgaaaattattacacgccaagcaagtttgagagtggcagagtatgctttccattatgccaaggccaatggccgggaaagagtctctgcgatccacaaagccaatattatgaggaagacagatggtcttttcctcaagtgttgccgtgaagtggctgaaaagtaccctgaaattcaatacgaggaggtcatcattgacaattgctgtatgacgcttgtgaagaatcctggtctttttgacgtattagtgatgccaaatctctatggtgacattattagtgatctatgtgctggtttgatcgggggcttgggcctaacacccagttgcaatattggtgaaggtggcattttctggcagaagctgttcatggttctgctcctgatattgctggcaagaacctcgcgaacccgactgctcttatgctgagtgctgtcatgttgttgcgccacatgcaattcaacgacaaagcagaccggatccacaacgccatcctccagaccatcgccgaggggaagtacaggactgctgatcttggtggaaaggcatcgacatcagagtttacaaacgcagtctgtgatcacatctgagaaacggatgtgattcttccttctgattgttttgtcatcctaatattttttgtcacatatgagaggagctttagctttaagaggttaactggcagcacctcgaacttctttggggtgtttaacacggtttgagaccgtcaaataattttgtcacatttcttgctgttcagaaattctttcaacattggaatggagccaagaattgtctgtaataatcaacatcagcattataacagtatgtagggtttatcttattc

SEQ ID NO: 15252 - protein, 352 aa, Zea mays subsp. mays
  misc_feature (1)..(352): Ceres Seq. ID no. 12343691
ISLYHCLPPRPSSSPPQTTAAAAAAAANPCESSLSGLWGAGMALRRLLQGSVLPRIIGRDLAPAVAPFSTESGETIRATLFPGDGIGPEIAESVKQVFNVAGVPIEWEEHYVSTEVDPRTESFLTWESLESVRRNKVGLKGPMATPIGKGHRSLNLTLRKELGLYANVRPCNSLPGYKTRYDDVNLVTIRENTEGEYSGLEHQVVRGVVESLKIITRQASLRVAEYAFHYAKANGRERVSAIHKANIMRKTDGLFLKCCREVAEKYPEIQYEEVIIDNCCMTLVKNPGLFDVLVMPNLYGDIISDLCAGLIGGLGLTPSCNIGEGGIFWQKLFMVLLLILLARTSRTRLLLC

SEQ ID NO: 15253 - protein, 311 aa, Zea mays subsp. mays
  misc_feature (1)..(311): Ceres Seq. ID no. 12343692
MALRRLLQGSVLPRIIGRDLAPAVAPFSTESGETIRATLFPGDGIGPEIAESVKQVFNVAGVPIEWEEHYVSTEVDPRTESFLTWESLESVRRNKVGLKGPMATPIGKGHRSLNLTLRKELGLYANVRPCNSLPGYKTRYDDVNLVTIRENTEGEYSGLEHQVVRGVVESLKIITRQASLRVAEYAFHYAKANGRERVSAIHKANIMRKTDGLFLKCCREVAEKYPEIQYEEVIIDNCCMTLVKNPGLFDVLVMPNLYGDIISDLCAGLIGGLGLTPSCNIGEGGIFWQKLFMVLLLILLARTSRTRLLLC

SEQ ID NO: 15254 - protein, 210 aa, Zea mays subsp. mays
  misc_feature (1)..(210): Ceres Seq. ID no. 12343693
MATPIGKGHRSLNLTLRKELGLYANVRPCNSLPGYKTRYDDVNLVTIRENTEGEYSGLEHQVVRGVVESLKIITRQASLRVAEYAFHYAKANGRERVSAIHKANIMRKTDGLFLKCCREVAEKYPEIQYEEVIIDNCCMTLVKNPGLFDVLVMPNLYGDIISDLCAGLIGGLGLTPSCNIGEGGIFWQKLFMVLLLILLARTSRTRLLLC

SEQ ID NO: 15255 - DNA, 991 bp, Zea mays subsp. mays
  misc_feature (1)..(991): Ceres Seq. ID no. 12343786
gttgtgcgtcttttcctcagcagcaaccggagagcggctgctcgcctgctcctcctcctagggaaaggacagcggcggcggcggcggcggcgagaagttgggcctgaagcccggacgctttctcccgagataccgcaatactgctagagcactgtcactaatgtttgcttatgacaatggagtcacctacaactgccgctggtggtgaactggagagctacttctccttgggtttgacagtatcccactcacagaaagataatgctgaatttccaaaggttctgttgcttctctcagcgtatcttgacaagacagttcagcagaatgaagagttactagactccagtaaaataaaggagtcgaccactatctttcatggtcagagggtgcctgaacttagtataaagctgtatgcagagcgtattttcaagtatgcaaagtgcagcccatcttgctttgtgctagcacttatctacatggagagatatctacaacaaccaaacatttacatgacgtcatttagtgttcatcgcctgcttattacaagtgttgttgttgctgccaaattcatagatgatgcgtttttcaataatgcatactacgggagagttggaggaattagcacaagagagatgaatatgcttgaactggatttattgttcggtctggacttcaggctcaaagtggatatagagactttcgaaagctactgcttacagttggaggaagcactggttcttgttttggagagaccaattcaggtccaagaggccaacgtaactaaacacttgatttgtaacagcagcgccgatgagacttgcaaacacgagctcgggcttgaaaggtacagcagtcaggctgtccaagggtgtagttggtaaatgtgattgggcagatagttttgaaaaaagtgtatgggtccgagtattggtaattcttttatttgacatttaagttgttcagttggccttgtttagtagggccgttattc

SEQ ID NO: 15256 - protein, 236 aa, Zea mays subsp. mays
  misc_feature (1)..(236): Ceres Seq. ID no. 12343787
MTMESPTTAAGGELESYFSLGLTVSHSQKDNAEFPKVLLLLSAYLDKTVQQNEELLDSSKIKESTTIFHGQRVPELSIKLYAERIFKYAKCSPSCFVLALIYMERYLQQPNIYMTSFSVHRLLITSVVVAAKFIDDAFFNNAYYGRVGGISTREMNMLELDLLFGLDFRLKVDIETFESYCLQLEEALVLVLERPIQVQEANVTKHLICNSSADETCKHELGLERYSSQAVQGCSW

SEQ ID NO: 15257 - protein, 234 aa, Zea mays subsp. mays
  misc_feature (1)..(234): Ceres Seq. ID no. 12343788
MESPTTAAGGELESYFSLGLTVSHSQKDNAEFPKVLLLLSAYLDKTVQQNEELLDSSKIKESTTIFHGQRVPELSIKLYAERIFKYAKCSPSCFVLALIYMERYLQQPNIYMTSFSVHRLLITSVVVAAKFIDDAFFNNAYYGRVGGISTREMNMLELDLLFGLDFRLKVDIETFESYCLQLEEALVLVLERPIQVQEANVTKHLICNSSADETCKHELGLERYSSQAVQGCSW

SEQ ID NO: 15258 - protein, 134 aa, Zea mays subsp. mays
  misc_feature (1)..(134): Ceres Seq. ID no. 12343789
MERYLQQPNIYMTSFSVHRLLITSVVVAAKFIDDAFFNNAYYGRVGGISTREMNMLELDLLFGLDFRLKVDIETFESYCLQLEEALVLVLERPIQVQEANVTKHLICNSSADETCKHELGLERYSSQAVQGCSW

SEQ ID NO: 15259 - DNA, 1232 bp, Zea mays subsp. mays
  misc_feature (1)..(1232): Ceres Seq. ID no. 12343790
atcagttactactgcctgcctgcctgcctgcgtctctcctccaggtccaggctccaggaatccaccccccacctcctcggattctttccccctctccagctcccccgtcctgcagccgcctgcactgtgctgccgccccgttcgcctcccggcctccagcctcctcggttcccgcgggagggccatgaagttaaggacaaaacgacctgaatggaagtcccttgtgcctctacaactgagcagattgagcaggaaatctgccatgcgtttctttttgttccccaaggttcagtcggctggtcaatcgccagatgataccccagtttatcttaatgtgtatgatttgacgccaatgaacggttatatatattgggcaggcctgggcatatttcactcaggaattgaagttcatggtgttgaatatgcattcggagcacatgactttcccaccagtggggtctttgaggtagaacctcgccaatgccctggtttcagattcagaaaatcaatatttcttggtacaacatgcttggatccaatccaagttaggcagttcatggagctgcagtcagtaaactacaacggcgatacttaccatcttatcacgaagaactgtaaccacttctgcaaggatatgtgctacaagttgaccggtaacaaaattcccaaatgggtgaatcggctcgccagaataggcgccatttgcaactgccttctcccggagtcgcttaagatctctccggttggccatgacccaaacagtcaatccgaagactcggagaagaggcgtctgaggaacccattcagctgcttctcttcgatctcgagccaccggcagctgccgtcgtcatctcctttcccaccatctcctgtgaaagggggcctcccccgttgctcgtcgaggaaaagcagcacggcgtctccgaaaaataggtagcctgccctggggcgcgcccctgcgtaacttccgagtcgtcgtgctaattcctgcggtgtcaacatctggatccgcacggcgagtgctgtgctgtgctgcgctgtagctttctgtcaggtacttgttttttggtcggtaaaaatcagatgcctgatgttgtatcatgtaaaaaacccctagcgacgtgtgctgctgatctgcctcgcaagatctgttgggagggtgaattgccactcggttctacccgccgcctatgtactctactcagggatttgtatattaatccattattctt

SEQ ID NO: 15260 - protein, 311 aa, Zea mays subsp. mays
  misc_feature (1)..(311): Ceres Seq. ID no. 12343791
SVTTACLPACVSPPGPGSRNPPPTSSDSFPLSSSPVLQPPALCCRPVRLPASSLLGSRGRAMKLRTKRPEWKSLVPLQLSRLSRKSAMRFFLFPKVQSAGQSPDDTPVYLNVYDLTPMNGYIYWAGLGIFHSGIEVHGVEYAFGAHDFPTSGVFEVEPRQCPGFRFRKSIFLGTTCLDPIQVRQFMELQSVNYNGDTYHLITKNCNHFCKDMCYKLTGNKIPKWVNRLARIGAICNCLLPESLKISPVGHDPNSQSEDSEKRRLRNPFSCFSSISSHRQLPSSSPFPPSPVKGGLPRCSSRKSSTASPKNR

SEQ ID NO: 15261 - protein, 250 aa, Zea mays subsp. mays
  misc_feature (1)..(250): Ceres Seq. ID no. 12343792
MKLRTKRPEWKSLVPLQLSRLSRKSAMRFFLFPKVQSAGQSPDDTPVYLNVYDLTPMNGYIYWAGLGIFHSGIEVHGVEYAFGAHDFPTSGVFEVEPRQCPGFRFRKSIFLGTTCLDPIQVRQFMELQSVNYNGDTYHLITKNCNHFCKDMCYKLTGNKIPKWVNRLARIGAICNCLLPESLKISPVGHDPNSQSEDSEKRRLRNPFSCFSSISSHRQLPSSSPFPPSPVKGGLPRCSSRKSSTASPKNR

SEQ ID NO: 15262 - protein, 224 aa, Zea mays subsp. mays
  misc_feature (1)..(224): Ceres Seq. ID no. 12343793
MRFFLFPKVQSAGQSPDDTPVYLNVYDLTPMNGYIYWAGLGIFHSGIEVHGVEYAFGAHDFPTSGVFEVEPRQCPGFRFRKSIFLGTTCLDPIQVRQFMELQSVNYNGDTYHLITKNCNHFCKDMCYKLTGNKIPKWVNRLARIGAICNCLLPESLKISPVGHDPNSQSEDSEKRRLRNPFSCFSSISSHRQLPSSSPFPPSPVKGGLPRCSSRKSSTASPKNR

SEQ ID NO: 15263 - DNA, 770 bp, Zea mays subsp. mays
  misc_feature (1)..(770): Ceres Seq. ID no. 12343798
gcgcttcagcagcagcggcttccactgtagtcccaagccggcgtgaccattccaaatcttccgcacccatctctcgccgcctcgcctgcaccggagactggccctagtgcccgcgcgcctgcgaggtatcgaacacccaaagatggcaatggcaaccttcacatcatccccagttctctgcagcttcaggaccatcgaacagaagaaggcccctctgctgaacaacagcacaaaacggccgcttcacttgggcttcccaaggagcgtgccgacgtcgccgagcttgagagagaggctagacctgcgcgtcgccgctgtctacaaggtgaagctcctcggccccgaagggcaggagagcgtgctcgacgtgccagaggacagctacatcctggacgcggccgaggaggccggtctcgacctgccctactcctgccgcgccggcgcgtgctccacgtgcgccggcaagctcctggagggctccgtcgaccaggcagaccagtcgttcctcgacgaggcgcaggtcggtgccgggtacgcgctcacctgcgtcgcgtacccgacgtctgactgcgtcatccagacgcacagggaggaagacttgtactagcccgggccggtccccgggcatggatcaacccagggccggccctgagggtgtgcagggtatgccaccgctcagggcccccaatatcagtagggccccgtatgtctagataatgtccaaatacatatatgttacaggtaaatctatattctcgtttttttgttgt

SEQ ID NO: 15264 - protein, 154 aa, Zea mays subsp. mays
  misc_feature (1)..(154): Ceres Seq. ID no. 12343799
MAMATFTSSPVLCSFRTIEQKKAPLLNNSTKRPLHLGFPRSVPTSPSLRERLDLRVAAVYKVKLLGPEGQESVLDVPEDSYILDAAEEAGLDLPYSCRAGACSTCAGKLLEGSVDQADQSFLDEAQVGAGYALTCVAYPTSDCVIQTHREEDLY

SEQ ID NO: 15265 - protein, 152 aa, Zea mays subsp. mays
  misc_feature (1)..(152): Ceres Seq. ID no. 12343800
MATFTSSPVLCSFRTIEQKKAPLLNNSTKRPLHLGFPRSVPTSPSLRERLDLRVAAVYKVKLLGPEGQESVLDVPEDSYILDAAEEAGLDLPYSCRAGACSTCAGKLLEGSVDQADQSFLDEAQVGAGYALTCVAYPTSDCVIQTHREEDLY

SEQ ID NO: 15266 - DNA, 697 bp, Zea mays subsp. mays
  misc_feature (1)..(697): Ceres Seq. ID no. 12343840
gcaaagaggaatacgattcagcttagctcagctccaccaccaccaagaacaagatctcgacgaagcagccagacgacaggcaggtagcaccggggtcaacgcggcagacaaacaggctctcccgctcgtcagctagcagccatgagtaccatgaagttttgccgtgaatgcaacaacatcctgtaccccaaggaggaccgggagcagaaggtgctcctctacgcctgccggaactgcgaccaccaggaggtcgcggacaacaactgcgtgtaccggaacgtggtgcaccacagcgccggggagttcacccaggtgctccaggacgtggccggcgaccccacgctgccccgcaccaagtccgtgcgctgctcctcctgcggccacggcgaggccgtcttcttccaggccactgcgagaggggaggaagggatgacgctcttcttcgtctgctgcaacccgagctgcggcaaccgttggagagaataatggacggttcctctggcgcaacagccaggacgacatgattttttttgcaagattttcatccgacagacctgctgctcccccccatatgagcatgtcaactgattggattggattggattggattgtactactatgttcccagtgcgttcagacatttcaataacttgccggcagggtaaacttccctgtggcctgtgcttcattcatttgt

SEQ ID NO: 15267 - protein, 118 aa, Zea mays subsp. mays
  misc_feature (1)..(118): Ceres Seq. ID no. 12343841
MQQHPVPQGGPGAEGAPLRLPELRPPGGRGQQLRVPERGAPQRRGVHPGAPGRGRRPHAAPHQVRALLLLRPRRGRLLPGHCERGGRDDALLRLLQPELRQPLERIMDGSSGATARTT

SEQ ID NO: 15268 - protein, 114 aa, Zea mays subsp. mays
  misc_feature (1)..(114): Ceres Seq. ID no. 12343842
MSTMKFCRECNNILYPKEDREQKVLLYACRNCDHQEVADNNCVYRNVVHHSAGEFTQVLQDVAGDPTLPRTKSVRCSSCGHGEAVFFQATARGEEGMTLFFVCCNPSCGNRWRE

SEQ ID NO: 15269 - protein, 111 aa, Zea mays subsp. mays
  misc_feature (1)..(111): Ceres Seq. ID no. 12343843
MKFCRECNNILYPKEDREQKVLLYACRNCDHQEVADNNCVYRNVVHHSAGEFTQVLQDVAGDPTLPRTKSVRCSSCGHGEAVFFQATARGEEGMTLFFVCCNPSCGNRWRE

SEQ ID NO: 15270 - DNA, 1558 bp, Zea mays subsp. mays
  misc_feature (1)..(1558): Ceres Seq. ID no. 12343899
aagcaaccggggccgagagagacgagatgaggcctgcctcttctccctccgtcacacgcgagacggagacgcgtctgaagctgaggcctgtataaaagcgctaaagatccctcgctctcttcccccccgtgcgctgtgtcccgtctctgcagcaagttctgtcttcgtccatccatccgtccccgtctcactgcctgtggcccgtgggtagcggttgtcgatcagcttacccacgccggcgtgttctccctgacatggtcggccggatggagcggcagaccgcgtcgtcgtcagcgtcatgctcccccgccgccgccgccaccacctcctcctcgtcctgcggcggcaagaagcggcctgatatcctcaacatgatccggaatgcatcctgtcttaattcgtcgtctgctgataccggcaagggaaggagtaaattgtcgaccaacaaagttacacatggattccacctggtggaaggcaagtccggccatgacatggaagactaccatgtggcagagtacaagtatgtgaagaatcatgagcttggtctctttgccatttttgatggccatttaggagataaggtgccaagttacttgaaagctaacctttttagcaacataatgaaagagcctctcttctggtctagccctcaagaagcaataaagaatgcatactgctctacaaacaagtatattctagaaaataccaaacaacttggaccaggtggttcgacagcagttactgctattgtagttgatggtaaggacatgtggatagcaaatgtaggcgactctagagctgttgtgtgtgaaagaggctctgctaagcagctcactgttgaccatgagccccatgaaactaatgaaagacagaggattgaaaagcacggtggctttgtgacgacatttcctggtgatgttcctcgggtgaatggtcagctcgctgttgctagggcatttggtgaccaaagcctcaaggcccacttgagctctgaacctgatattagtcatgtaccaataaactcaagtatagagtttgtcatacttgccagtgatggattgtggaaggtaatgaagaaccaggaagccgtcgatctcgtgaagtcaatcaaggatccacaggcagcagcgaaacgattgaccactgaagcgttggcaaggaagagcaaggatgatatctcttgcattgtcatccgtttccgctgctgagttaccctctctccacggcactgatatccagtcttcacctcatgatttagattgagacaatttgtctttgccgaattttctgatagaatatgctgtacctatcatagctgtcgacaggcctggaactaattagggtagtgaagacttgagagctggttggtgagtgtgtgcagggtgcctattcgcctgtgcatatgttgactctgcatccgttgatccggacttgggcgactgtcaggaccttagtgcttgtgtgcttgtgatggtaatggacctaatggctaatggtggtaagggaacttgttgataccaaatttggttaatttagttttttttcatggctcgcc

SEQ ID NO: 15271 - protein, 318 aa, Zea mays subsp. mays
  misc_feature (1)..(318): Ceres Seq. ID no. 12343900
MVGRMERQTASSSASCSPAAAATTSSSSCGGKKRPDILNMIRNASCLNSSSADTGKGRSKLSTNKVTHGFHLVEGKSGHDMEDYHVAEYKYVKNHELGLFAIFDGHLGDKVPSYLKANLFSNIMKEPLFWSSPQEAIKNAYCSTNKYILENTKQLGPGGSTAVTAIVVDGKDMWIANVGDSRAVVCERGSAKQLTVDHEPHETNERQRIEKHGGFVTTFPGDVPRVNGQLAVARAFGDQSLKAHLSSEPDISHVPINSSIEFVILASDGLWKVMKNQEAVDLVKSIKDPQAAAKRLTTEALARKSKDDISCIVIRFRC

SEQ ID NO: 15272 - protein, 314 aa, Zea mays subsp. mays
  misc_feature (1)..(314): Ceres Seq. ID no. 12343901
MERQTASSSASCSPAAAATTSSSSCGGKKRPDILNMIRNASCLNSSSADTGKGRSKLSTNKVTHGFHLVEGKSGHDMEDYHVAEYKYVKNHELGLFAIFDGHLGDKVPSYLKANLFSNIMKEPLFWSSPQEAIKNAYCSTNKYILENTKQLGPGGSTAVTAIVVDGKDMWIANVGDSRAVVCERGSAKQLTVDHEPHETNERQRIEKHGGFVTTFPGDVPRVNGQLAVARAFGDQSLKAHLSSEPDISHVPINSSIEFVILASDGLWKVMKNQEAVDLVKSIKDPQAAAKRLTTEALARKSKDDISCIVIRFRC

SEQ ID NO: 15273 - protein, 279 aa, Zea mays subsp. mays
  misc_feature (1)..(279): Ceres Seq. ID no. 12343902
MIRNASCLNSSSADTGKGRSKLSTNKVTHGFHLVEGKSGHDMEDYHVAEYKYVKNHELGLFAIFDGHLGDKVPSYLKANLFSNIMKEPLFWSSPQEAIKNAYCSTNKYILENTKQLGPGGSTAVTAIVVDGKDMWIANVGDSRAVVCERGSAKQLTVDHEPHETNERQRIEKHGGFVTTFPGDVPRVNGQLAVARAFGDQSLKAHLSSEPDISHVPINSSIEFVILASDGLWKVMKNQEAVDLVKSIKDPQAAAKRLTTEALARKSKDDISCIVIRFRC

SEQ ID NO: 15274 - DNA, 1213 bp, Zea mays subsp. mays
  misc_feature (1)..(1213): Ceres Seq. ID no. 12343903
aaggtcttctcaaagataccacttctagaactctgtgatctggctgctggtgctgaggcaaacagcgagcatcctctatcaaaagctatcgttgagcacacaaagaagctcaaggaacaatatggatctcacagtgatcacatgatggaatctagggactttgaggtgcatccaggagcaggtgtcagtgcccatatcgaaggcaggctggttttggttggaaacaaaaggctgatgcaggaatttgaagttccgttgagtcctgaggtggaggcgtacatgtccgaaacagaagagcttgctaggacctgcgtacttgttgctatcgataagatcatctgtggggccctcgctgtttcggatcctctgaagcctaaggcaggccaagtcatttcttaccttaagtcaatgggcatctccagtatcatggtgaccggtgataattgggctaccgcaaaatcaattgcaaaggaagttgggatcagccaggtgtttgccgagatcgacccagtgggaaaagctgaaaagatcaaagacttgcagatgcaagggttgacggtggcaatggttggcgatggggtaaacgactccccagcattggcggcggcagacgtgggcatggcgatcggtgctggcacagacgtggccatcgaggctgctgacatcgttctaatgaagagcaaccttgaggacgtcatcaccgccattgatctctcgcgcaagaccctctccaggatccggctgaactacgtgtgggccctgggctacaacgtcctgggcatgccgatcgccgccggcgtcctgttccctttcacgggcatccggctgcccccttggctcgccggggcatgcatggctgcctcgtcggtgagcgtcgtctgctcctccctgctcctccagctctacaagaaaccgctgcacgttgaagacgcgcccaggcccagggaggactcagatttggtgtgactgcgagtgaggactgatccctcgatctcgatgtgtactaacgagagcttgctggcgtcactgatgcttaacgagccaacacctgatcgatccgtgtacagcaagcaacacgttttggaacagttcgccaattgattgtgcaataattcaagacaaggtttataactttatatgatactagtacaatgacagcacataatcatagattttttttcggaaattacaagaaaacatttgctcttttgcc

SEQ ID NO: 15275 - protein, 321 aa, Zea mays subsp. mays
  misc_feature (1)..(321): Ceres Seq. ID no. 12343904
KVFSKIPLLELCDLAAGAEANSEHPLSKAIVEHTKKLKEQYGSHSDHMMESRDFEVHPGAGVSAHIEGRLVLVGNKRLMQEFEVPLSPEVEAYMSETEELARTCVLVAIDKIICGALAVSDPLKPKAGQVISYLKSMGISSIMVTGDNWATAKSIAKEVGISQVFAEIDPVGKAEKIKDLQMQGLTVAMVGDGVNDSPALAAADVGMAIGAGTDVAIEAADIVLMKSNLEDVITAIDLSRKTLSRIRLNYVWALGYNVLGMPIAAGVLFPFTGIRLPPWLAGACMAASSVSVVCSSLLLQLYKKPLHVEDAPRPREDSDLV

SEQ ID NO: 15276 - protein, 274 aa, Zea mays subsp. mays
  misc_feature (1)..(274): Ceres Seq. ID no. 12343905
MMESRDFEVHPGAGVSAHIEGRLVLVGNKRLMQEFEVPLSPEVEAYMSETEELARTCVLVAIDKIICGALAVSDPLKPKAGQVISYLKSMGISSIMVTGDNWATAKSIAKEVGISQVFAEIDPVGKAEKIKDLQMQGLTVAMVGDGVNDSPALAAADVGMAIGAGTDVAIEAADIVLMKSNLEDVITAIDLSRKTLSRIRLNYVWALGYNVLGMPIAAGVLFPFTGIRLPPWLAGACMAASSVSVVCSSLLLQLYKKPLHVEDAPRPREDSDLV

SEQ ID NO: 15277 - protein, 273 aa, Zea mays subsp. mays
  misc_feature (1)..(273): Ceres Seq. ID no. 12343906
MESRDFEVHPGAGVSAHIEGRLVLVGNKRLMQEFEVPLSPEVEAYMSETEELARTCVLVAIDKIICGALAVSDPLKPKAGQVISYLKSMGISSIMVTGDNWATAKSIAKEVGISQVFAEIDPVGKAEKIKDLQMQGLTVAMVGDGVNDSPALAAADVGMAIGAGTDVAIEAADIVLMKSNLEDVITAIDLSRKTLSRIRLNYVWALGYNVLGMPIAAGVLFPFTGIRLPPWLAGACMAASSVSVVCSSLLLQLYKKPLHVEDAPRPREDSDLV

SEQ ID NO: 15278 - DNA, 1859 bp, Zea mays subsp. mays
  misc_feature (1)..(1859): Ceres Seq. ID no. 12343907
acacaccccatgccttgcctcctcctcctgcctgcctgcctgcctttccctcgccgctcgcggcaagatccacatgcagtagtaggagtaggagcagcaagcaacaagggagggagggagcgaggtcttgggctctcgctctcttgttagttcctgcgtgcttgccctgccctggatcggctttcaaatcgggaacaacgacagatccgaggctttctcgaatcgggcaggtccatcaaatcgcaagtttagccagccccagccccagccccaggcacagccagctagccgtcaaatcactcacactcatcaaatcaaaggggaccaaaaggatatctcctggctcctgcccctctcccctctcctctcctagcgagctactcgtataaaattcccctttcgactctccccccacccacatacctgactctcctccgatctctcagcacgctcctcttctgctaccttgctttccctgctgcgatccgttccttgctctattagtattagctagccggccggccggatcgatcgagcaaggagaggcgccccagcagtcctcgtcggatcgatccatctcgtcgacagcgtcagcgcctcaggtggatcggagcggaggtggtggaccggagctagtagctgccagccacacatttcggtcgtcggaaccacatatcatgatgtcgtcctcgtcctcgtcctcgtcgtcggccgcctgctgcttcccgctggaccacctcgcgccgtcccccaccgagcagctctgctacgtgcactgcaactgctgcgacaccatcctcgccgtcggcgtgccctgcagcagcctgttcaagacggtgacggtgcgctgcggccactgcgccaacctactctccgtnaacctccgcggcctcctgctcccgcccgccgcgccggcgccgcccaaccatctcaacttcgctcactccttgctgtcacccacatccccgcatggcctcttggacgagttggctctccagcaggcgccgagcttcctgatggagcaggcgagtgccaacctgagcagcaccatgacgggccgcagcagcaacagcagctgcgccagcaacctgccgccgccggcgccgatgcctgcagctcagcctgtgcagcaggaagccgaactgcccaagaccgccccgtcggtaaacaggcctccggagaagcggcagagagtcccgtcggcatacaaccggttcatcaaggacgagatccagcgcatcaaggccggcaacccggacatcacccaccgggaggcgttcagcgcagccgcaaagaattgggcccatttcccacacatccacttcggcctcatgccggaccagggcctcaagaagaccttcaagactcatcaggatggcgctgaagacatgctactcaaagacgatctctacgccgcagcggctgcagctgcagcagccaacatgggcatcactccattctaataactctggttaggcatgtgttctgaatcagctggcacgtcgtagtggctatcgccctttgtgctgcattctagggtttcgtctcagatcttgatctcaacatcgatcgtgtgtcgtttaattagagtactttccagtgtggggatagaaatggagaataatcaagttagagcgcgcatcaagtaggccactgatgatccgtaggtacagacttgattgtctcctctatatatcccttttcatttcatgttctctctctttttcctattttttgttcctggaccccttcaactcgccagtagagagctcgttgtgcctctccaatcccatgtttgcgtatgtctgctcaacaacatgtttttaccatggagaacaagttgaacatctgttagatct

SEQ ID NO: 15279 - protein, 261 aa, Zea mays subsp. mays
  misc_feature (1)..(261): Ceres Seq. ID no. 12343908
  misc_feature (67)..(67): Xaa is any aa, unknown or other
MMSSSSSSSSSAACCFPLDHLAPSPTEQLCYVHCNCCDTILAVGVPCSSLFKTVTVRCGHCANLLSXNLRGLLLPPAAPAPPNHLNFAHSLLSPTSPHGLLDELALQQAPSFLMEQASANLSSTMTGRSSNSSCASNLPPPAPMPAAQPVQQEAELPKTAPSVNRPPEKRQRVPSAYNRFIKDEIQRIKAGNPDITHREAFSAAAKNWAHFPHIHFGLMPDQGLKKTFKTHQDGAEDMLLKDDLYAAAAAAAAANMGITPF

SEQ ID NO: 15280 - protein, 260 aa, Zea mays subsp. mays
  misc_feature (1)..(260): Ceres Seq. ID no. 12343909
  misc_feature (66)..(66): Xaa is any aa, unknown or other
MSSSSSSSSSAACCFPLDHLAPSPTEQLCYVHCNCCDTILAVGVPCSSLFKTVTVRCGHCANLLSXNLRGLLLPPAAPAPPNHLNFAHSLLSPTSPHGLLDELALQQAPSFLMEQASANLSSTMTGRSSNSSCASNLPPPAPMPAAQPVQQEAELPKTAPSVNRPPEKRQRVPSAYNRFIKDEIQRIKAGNPDITHREAFSAAAKNWAHFPHIHFGLMPDQGLKKTFKTHQDGAEDMLLKDDLYAAAAAAAAANMGITPF

SEQ ID NO: 15281 - protein, 148 aa, Zea mays subsp. mays
  misc_feature (1)..(148): Ceres Seq. ID no. 12343910
MEQASANLSSTMTGRSSNSSCASNLPPPAPMPAAQPVQQEAELPKTAPSVNRPPEKRQRVPSAYNRFIKDEIQRIKAGNPDITHREAFSAAAKNWAHFPHIHFGLMPDQGLKKTFKTHQDGAEDMLLKDDLYAAAAAAAAANMGITPF

SEQ ID NO: 15282 - DNA, 1338 bp, Zea mays subsp. mays
  misc_feature (1)..(1338): Ceres Seq. ID no. 12343920
gttcccggcctaaacggaggcggccgtataaaggcattctcctcgcgccccacccggcggttatcttcaccaccatatcgacatcgacgccagcgagccaaggacagaacagccggcgcccggccctaaaactgccgtgcagcgggagagaagcgagggaaagatggaccggtaccagagagtggagaagcagagggaggaggcacccatcaaggaaaacgagatccgcattaccacgcaggggaggatgcgcaactacatcacctacgccaccggcttgcttcaggacaaaggttctgatgaggttgtattcaaggccatggggagggctatcaataagactgtcatggttgtggaattgatcaagaggaggattgttggcctccatcagaataccaccactggatctactgatattactgatatgtgggagccattggaggaaggcctacttccgcttgagacaacaagacatgtctctatgataactataactctttcaaagaaggagctggacacatcatctatcggatatcaatctcctttgcctgctgatgaagtgaagcctttggttaaatatgataatgacgaagatgcacactcacctggtggccgtggaaggggtcgtggtggtcgaggccgtgggcggggcagggacaggggaagaggtggacgtggaaatgggttcaatgactatgctgatgccggttgggaagacgatcacgcccctgcatatatgggcaatggatatgcccgtggaagaggtcgtagtttcaggggccgtggcaggagaggcggctacaataaccagcctgaataccaacaagacggaggttattacgaggaggcacctgtccatgctccagctttaggtcgaggtcgtggtcgtgggagaggtccattcagaggcagaggacgtggtggcaacgcaaacggcgtgatgcacgctgctgcggacagtgcataagctgttcgttaccagtccaggctggttgtttgttggatgcctgctccaagtatgaagatgtatcatctgttgttatcagttaacgtcattacttggcataagattgacattctgtgtcggagtgcagccaggttttgatacttgactagatctgtagggtagcgtctttacagtgctttctcctttcacagtagatgtcttaaactaattgtagtttcgtaaaggtttagagcagggcattctttctatttttaaatataaaaacgaagtcttggtgtatgttcaaatgtgcacgtttttatatgtgctgtttttgaaatgcgagttagattaagttcgtggtacactgtgaatgaaatgcgagtcagatg

SEQ ID NO: 15283 - protein, 267 aa, Zea mays subsp. mays
  misc_feature (1)..(267): Ceres Seq. ID no. 12343921
MDRYQRVEKQREEAPIKENEIRITTQGRMRNYITYATGLLQDKGSDEVVFKAMGRAINKTVMVVELIKRRIVGLHQNTTTGSTDITDMWEPLEEGLLPLETTRHVSMITITLSKKELDTSSIGYQSPLPADEVKPLVKYDNDEDAHSPGGRGRGRGGRGRGRGRDRGRGGRGNGFNDYADAGWEDDHAPAYMGNGYARGRGRSFRGRGRRGGYNNQPEYQQDGGYYEEAPVHAPALGRGRGRGRGPFRGRGRGGNANGVMHAAADSA

SEQ ID NO: 15284 - protein, 239 aa, Zea mays subsp. mays
  misc_feature (1)..(239): Ceres Seq. ID no. 12343922
MRNYITYATGLLQDKGSDEVVFKAMGRAINKTVMVVELIKRRIVGLHQNTTTGSTDITDMWEPLEEGLLPLETTRHVSMITITLSKKELDTSSIGYQSPLPADEVKPLVKYDNDEDAHSPGGRGRGRGGRGRGRGRDRGRGGRGNGFNDYADAGWEDDHAPAYMGNGYARGRGRSFRGRGRRGGYNNQPEYQQDGGYYEEAPVHAPALGRGRGRGRGPFRGRGRGGNANGVMHAAADSA

SEQ ID NO: 15285 - protein, 215 aa, Zea mays subsp. mays
  misc_feature (1)..(215): Ceres Seq. ID no. 12343923
MGRAINKTVMVVELIKRRIVGLHQNTTTGSTDITDMWEPLEEGLLPLETTRHVSMITITLSKKELDTSSIGYQSPLPADEVKPLVKYDNDEDAHSPGGRGRGRGGRGRGRGRDRGRGGRGNGFNDYADAGWEDDHAPAYMGNGYARGRGRSFRGRGRRGGYNNQPEYQQDGGYYEEAPVHAPALGRGRGRGRGPFRGRGRGGNANGVMHAAADSA

SEQ ID NO: 15286 - DNA, 1245 bp, Zea mays subsp. mays
  misc_feature (1)..(1245): Ceres Seq. ID no. 12343927
aaaacgttatgtttattcgatttcgtgtcctgtccgtttgacgaccgagccctgccccccttttccagtttccttctcccttcctgccgctgcggcggtggcggcaacgactcgcgcgggccggtcctaggttctcccggagcggttcggcgggatgggcacgccggagttccccaacctgggaaagcactgcagcgtcggagactgcaaccagatcgacttcctccccttcacctgcgaccgctgcgaccatgtcttttgccttgatcaccgaagttatacatcacaccaatgcccaaatgcaaacatgaaagacgtcactgtcctcatctgcccactctgtgctaaaggtgttcgcctcaatccaagtgaagacccaaatatcacctgggatactcatgttaacactgattgtgatccatcaaattaccaaaaagtgatgaagaaaaagaaatgccctgttcctgggtgcagagagacactgacattttccaacaccatcagatgcaaagattgcaccagagaacactgcctaaagcacagatttgggcctgatcataagtgcccaggaccaagaaaagtggattctggctttccctttgtaagcatgctaaggagaagtcagaaagcggagacacgctcaaatagcagtaacaacaatggttcttcgtggtggagctccagtcttgtgaatgcagcaacgaatttcaaatcatcagccgaagctggaatgcagaagctgagcaccgtgactagccaagccttccagaaggctaaggatgggatcgccccaaatagcagcagcagcagtggtgaccttgtggagcaatgtgttcactgcccagcaagattttccaccgtgggggccttaattgaacatgttgagaaatcccaccagatcaactcacaaccaagtcatggccgagtgacgattgatgtttgcccaaaatgcagcaaggcgttccgggatcctgtgttgcttgtggagcatgttgagaaggagcatggaggaacgtcaagagtgtagtgtaaagcttcgtgtgtgctcttaacctttgtaatgtgtaacttttcgttaccttttctcatttcatcaatttgattatactctacacttttgggctcaacatttgcccacaggacaagtatattacgctggattgaaggcaaagcagccattgtccatcattatagaaactgaagtaagatttgttaagaaaatgttaatatctgtcgcaactggtg

SEQ ID NO: 15287 - protein, 290 aa, Zea mays subsp. mays
  misc_feature (1)..(290): Ceres Seq. ID no. 12343928
MGTPEFPNLGKHCSVGDCNQIDFLPFTCDRCDHVFCLDHRSYTSHQCPNANMKDVTVLICPLCAKGVRLNPSEDPNITWDTHVNTDCDPSNYQKVMKKKKCPVPGCRETLTFSNTIRCKDCTREHCLKHRFGPDHKCPGPRKVDSGFPFVSMLRRSQKAETRSNSSNNNGSSWWSSSLVNAATNFKSSAEAGMQKLSTVTSQAFQKAKDGIAPNSSSSSGDLVEQCVHCPARFSTVGALIEHVEKSHQINSQPSHGRVTIDVCPKCSKAFRDPVLLVEHVEKEHGGTSRV

SEQ ID NO: 15288 - protein, 239 aa, Zea mays subsp. mays
  misc_feature (1)..(239): Ceres Seq. ID no. 12343929
MKDVTVLICPLCAKGVRLNPSEDPNITWDTHVNTDCDPSNYQKVMKKKKCPVPGCRETLTFSNTIRCKDCTREHCLKHRFGPDHKCPGPRKVDSGFPFVSMLRRSQKAETRSNSSNNNGSSWWSSSLVNAATNFKSSAEAGMQKLSTVTSQAFQKAKDGIAPNSSSSSGDLVEQCVHCPARFSTVGALIEHVEKSHQINSQPSHGRVTIDVCPKCSKAFRDPVLLVEHVEKEHGGTSRV

SEQ ID NO: 15289 - protein, 195 aa, Zea mays subsp. mays
  misc_feature (1)..(195): Ceres Seq. ID no. 12343930
MKKKKCPVPGCRETLTFSNTIRCKDCTREHCLKHRFGPDHKCPGPRKVDSGFPFVSMLRRSQKAETRSNSSNNNGSSWWSSSLVNAATNFKSSAEAGMQKLSTVTSQAFQKAKDGIAPNSSSSSGDLVEQCVHCPARFSTVGALIEHVEKSHQINSQPSHGRVTIDVCPKCSKAFRDPVLLVEHVEKEHGGTSRV

SEQ ID NO: 15290 - DNA, 1950 bp, Zea mays subsp. mays
  misc_feature (1)..(1950): Ceres Seq. ID no. 12343962
aactaatcactacctctccctctccgtcgcgacacaggccacggcgggcggcggcggaggcttccgtgcggctcttggcggattgaacgcccactcgagctgcgccggcggctgtttcagccgtccttagatagaccctgctttcctcccgggcgaatcaaagttgcacaaatgccgacaccagtgaagtcggtgctccccgtggtgctcctcggctgcggcggcgtcggccgctacctcctccgccacatcgtctcctgtcgtcccctccacgccaaccagggcgtggccatccgggtggtgggcgtcgccgatagctcctccctgctcgtcgccgaagatgtccactccaccggcctcgatgacgcgctcctcacccagctctgcgccgccaagtccgcaggctctcccctctcctccctgctcggccgagggcactgtcagctgttcaagaaccctgaggctaggggcaaagtcatagacgccgctaccacacttggaagtacaactggtctggtgctagttgactgttctgcaacttatgacactgttagcctgctgaaagatgctgtggatcatggatgctgtgtcgtattggcaaacaagaaacctcttaccggtgcttatgaggattttcagaagttggtctccaacttccgtcggataagatttgaatctactgttggagcaggtttgcctgtgatagcttctgtaacccgtattattgcatctggagaccctattactcgtattgttggcagtctgagtggtacacttgggtatgtgatgagtgagcttgaggatggaaagaaatttagtgaagttgtaaaaactgccaagtctcttggctatacagaaccagatccacgtgatgatcttggtggaatggatgtggctagaaaggcattgatcctggctaggcttcttgggcaacagataagcatggagagtatcaatgttgagagtttatatcctagtgaattaggacctgatgcagtgtccacaaaggacttccttgaaagtggtttagtgcaacttgacaagagcatggaagaaagaatcagagcagcatcttcgagaggaaacgttcttcgttacgtctgtgagattgaaagcgcagggtgccaagtaggccttaaagagctcccaaaggattctgcgctgggtagattgaggggaagtgacaatgtggtcgagatatacagcagatgttaccagagctcccctctggtgatccagggcgcaggagctggcaacgacaccactgccgccggcgtccttgctgacataatcgacctccaagacctgttccagacgatggcttgatcgttgatcggcatccacaccagtacaccatcttgatttttgcaaggcaccagagcgtttgatactttgatcggtgccagtggaatcccccactgcccactggttggcttcgctccttgtcatgtgtgcattttgttcacgggcatgctctcaggctgagagcctgagacgtctgacattcgaaatgtaattttgagcaggcgtgtgggggatttctttacagtttacataaaggaactttgtttcagtgaaataatgtcgcggtctccacattaaactaataaacagtccgagctacattgccgctatctgatagtgaaataatatcgctggcagcctgaaaccgtgaacgagagacgtgggaaattgatgcaattcaccctgatgcagattcggcaattgatgcaaggttgcaattcagtgtcctgaaatgtctacgaggagaggagaggagatgagatggctggaattttaaatactactcttgcatcacgcaattcaattctgtgttccgttattatatatcgttcactgatgcgacagcatagcagactagtagtcaataataatttttgttggaattgccacgaacccgccaccataaggcattgttcgtttctactc

SEQ ID NO: 15291 - protein, 384 aa, Zea mays subsp. mays
  misc_feature (1)..(384): Ceres Seq. ID no. 12343963
MPTPVKSVLPVVLLGCGGVGRYLLRHIVSCRPLHANQGVAIRVVGVADSSSLLVAEDVHSTGLDDALLTQLCAAKSAGSPLSSLLGRGHCQLFKNPEARGKVIDAATTLGSTTGLVLVDCSATYDTVSLLKDAVDHGCCVVLANKKPLTGAYEDFQKLVSNFRRIRFESTVGAGLPVIASVTRIIASGDPITRIVGSLSGTLGYVMSELEDGKKFSEVVKTAKSLGYTEPDPRDDLGGMDVARKALILARLLGQQISMESINVESLYPSELGPDAVSTKDFLESGLVQLDKSMEERIRAASSRGNVLRYVCEIESAGCQVGLKELPKDSALGRLRGSDNVVEIYSRCYQSSPLVIQGAGAGNDTTAAGVLADIIDLQDLFQTMA

SEQ ID NO: 15292 - DNA, 1271 bp, Zea mays subsp. mays
  misc_feature (1)..(1271): Ceres Seq. ID no. 12343984
atccaaacaaaagtactacactgaactcaatcatcctcagcggaggaaagcagagcacggcacagcgagtcgcagagggatagatccgagcacaagcaggccccgatggcgacgacggcgacgaaccggcgggtgatcctcaaggagtacgtggagggatacccacgcgaggagcacatggagctgctccggggcgccgaggttcccctccgcctgacgggcgccgagccggccgggtccgtcctcgtcaggaacctctacctctcctgcgacccctacatgcggcccaagatgtcgcgcccgctgcgggagtcctacacggccgccttcgtcccgggcgacaccatcacgggctacggcgtcgcgcgcgtggtcgactcctccgacccgcgcctcgcgcccggggacctcgtctggggcatcaccggctgggaggactacagcgtcgtgacgccgcccgccaccaggctcctctccaagatctcccaccacggggccggggagggggcgggcgtgccgctgtcctactacaccggcatcctcggcatgccggggctcaccgcgtacgtgggcttccacgagatctgcgcgccgaagaagggcgagaccgtgttcgtgtccgccgcgtccggcgccgtcggccagctggtgggccagttcgccaggctcgccggctgccacgtcgtcggcagcgccgggtcccgggagaaggtggagctgctcaagaccaggttcggcttccacgacgccttcaactacaaggaggagcccgacctcggcgccgcgctcaagcgctgcttccccgacggcatcgacatctacttcgagaacgtcggcggcgccatgctcgacgccgtcctgctcaacatgcgcgtgcacggacggatcgccgtctgcgggctcatctcgcagtacaacctggcggacggggagaaggacgccgtgcgcaacctcgccgccgtcatctccaagcgcctccgcctgcaggggttcatcgagcccgaccacaagcacctctacccgcagtacgaggcgtgggtgctgccgtacatcagggacggcacgctcgcctacgtcgaggacgtcgccgaggggctcgagagcgcgcccaaggcgctcataggactcttccacggtcgcaacgtcggaaagcagctcgtccgcgtcgccgacgacgagtgagacgcgcctcacttcgattggaccagacgatccatgtgtcgctgttgctatgtttcgattccccattttcatgaataattaattgtgcc

SEQ ID NO: 15293 - protein, 358 aa, Zea mays subsp. mays
  misc_feature (1)..(358): Ceres Seq. ID no. 12343985
MATTATNRRVILKEYVEGYPREEHMELLRGAEVPLRLTGAEPAGSVLVRNLYLSCDPYMRPKMSRPLRESYTAAFVPGDTITGYGVARVVDSSDPRLAPGDLVWGITGWEDYSVVTPPATRLLSKISHHGAGEGAGVPLSYYTGILGMPGLTAYVGFHEICAPKKGETVFVSAASGAVGQLVGQFARLAGCHVVGSAGSREKVELLKTRFGFHDAFNYKEEPDLGAALKRCFPDGIDIYFENVGGAMLDAVLLNMRVHGRIAVCGLISQYNLADGEKDAVRNLAAVISKRLRLQGFIEPDHKHLYPQYEAWVLPYIRDGTLAYVEDVAEGLESAPKALIGLFHGRNVGKQLVRVADDE

SEQ ID NO: 15294 - protein, 334 aa, Zea mays subsp. mays
  misc_feature (1)..(334): Ceres Seq. ID no. 12343986
MELLRGAEVPLRLTGAEPAGSVLVRNLYLSCDPYMRPKMSRPLRESYTAAFVPGDTITGYGVARVVDSSDPRLAPGDLVWGITGWEDYSVVTPPATRLLSKISHHGAGEGAGVPLSYYTGILGMPGLTAYVGFHEICAPKKGETVFVSAASGAVGQLVGQFARLAGCHVVGSAGSREKVELLKTRFGFHDAFNYKEEPDLGAALKRCFPDGIDIYFENVGGAMLDAVLLNMRVHGRIAVCGLISQYNLADGEKDAVRNLAAVISKRLRLQGFIEPDHKHLYPQYEAWVLPYIRDGTLAYVEDVAEGLESAPKALIGLFHGRNVGKQLVRVADDE

SEQ ID NO: 15295 - protein, 300 aa, Zea mays subsp. mays
  misc_feature (1)..(300): Ceres Seq. ID no. 12343987
MRPKMSRPLRESYTAAFVPGDTITGYGVARVVDSSDPRLAPGDLVWGITGWEDYSVVTPPATRLLSKISHHGAGEGAGVPLSYYTGILGMPGLTAYVGFHEICAPKKGETVFVSAASGAVGQLVGQFARLAGCHVVGSAGSREKVELLKTRFGFHDAFNYKEEPDLGAALKRCFPDGIDIYFENVGGAMLDAVLLNMRVHGRIAVCGLISQYNLADGEKDAVRNLAAVISKRLRLQGFIEPDHKHLYPQYEAWVLPYIRDGTLAYVEDVAEGLESAPKALIGLFHGRNVGKQLVRVADDE

SEQ ID NO: 15296 - DNA, 1439 bp, Zea mays subsp. mays
  misc_feature (1)..(1439): Ceres Seq. ID no. 12343992
atctttgcgcttggggcaatgacgcagcttatgaggtcataccgaggcgcgtcaattgctggttgaaaactatttccaaaccccctctttggcccactgggccactgagaatttctggaagggctccttttcctcggataagcaatcttgagtcctgggtcttcgctgccagtgccagcacgcttgtggccaagaaacgttgggggcagtttggacctcggagcagcatcatccatggcgggagaggaggccgggaggaggggcgttccctctctgctgaacccgccgtccgcttccagcgaggggcagcaagagcacatcgcctctgatgtcacacagctcatcggatggacacctctggtcgagctcaagcgaatcgccgccaaggaaggggtatgcgcgcgcatcgtcggcaaggtggaggcgtaccagcctctgtgctccgtcaaggatcgcagcgctctgagaatgatcgaagacgcagaggagagggggctgatctcgcccggcaccacgacgctcgtggagccgacgagcggcaacctggggctgggcctggtcctcgtcgccctccgcaagggctacaggttcgtcgcggtcatgccaggccagtactcgctcgacaagcagatcctgctgacatacatgggcgcagagctgtacgtaacagatccatccctcgggttcccgggcataaccgccaaggtcgaggagctcaagaaggagctgcccaacgtgcacgtcctcgaccagttctccaacagagcgaatcctgaagcgcatgttagatggactgggcctgagatctggaaggacaccgccggcaaggtggacgtattcgtggccggttcaggctcgggaggcacggtgtctggcgtcggcaagtacctcaagacgcagaaccccagcgtcaaggtcatctgcgttgagcctgccgagagcccagttgtttcaggcggggaaccaggcagccacaagatccagggaatagggccgggattcataccggaagtgctggacacctccgtcatcgacgaggccgtcacggtgaccaccgaggaggcgatggcgggcgcccggaggctggccagggaggagggcctgctcgtcggcatctcttccggagccaacctggcggcctgcttgaaggtcgcggcgcgagaagagagcaaggggaagatgatcgtcaccgtgtttccgagcgggggcgagaggtacatgacctccgacctgttcgccgccgccagagaggagtgtattgccatgacgttttgatcttcccccccaccccacagaaacatgtacggattaactggaggataaaaggacaaccgatatgttactccctcagttattgaaatagtattcgttttggccttgtaaccttttgttttgcaatcagctaaagttggttacaagaattgatgtgctctaacttt

SEQ ID NO: 15297 - protein, 346 aa, Zea mays subsp. mays
  misc_feature (1)..(346): Ceres Seq. ID no. 12343993
MAGEEAGRRGVPSLLNPPSASSEGQQEHIASDVTQLIGWTPLVELKRIAAKEGVCARIVGKVEAYQPLCSVKDRSALRMIEDAEERGLISPGTTTLVEPTSGNLGLGLVLVALRKGYRFVAVMPGQYSLDKQILLTYMGAELYVTDPSLGFPGITAKVEELKKELPNVHVLDQFSNRANPEAHVRWTGPEIWKDTAGKVDVFVAGSGSGGTVSGVGKYLKTQNPSVKVICVEPAESPVVSGGEPGSHKIQGIGPGFIPEVLDTSVIDEAVTVTTEEAMAGARRLAREEGLLVGISSGANLAACLKVAAREESKGKMIVTVFPSGGERYMTSDLFAAAREECIAMTF

SEQ ID NO: 15298 - protein, 268 aa, Zea mays subsp. mays
  misc_feature (1)..(268): Ceres Seq. ID no. 12343994
MIEDAEERGLISPGTTTLVEPTSGNLGLGLVLVALRKGYRFVAVMPGQYSLDKQILLTYMGAELYVTDPSLGFPGITAKVEELKKELPNVHVLDQFSNRANPEAHVRWTGPEIWKDTAGKVDVFVAGSGSGGTVSGVGKYLKTQNPSVKVICVEPAESPVVSGGEPGSHKIQGIGPGFIPEVLDTSVIDEAVTVTTEEAMAGARRLAREEGLLVGISSGANLAACLKVAAREESKGKMIVTVFPSGGERYMTSDLFAAAREECIAMTF

SEQ ID NO: 15299 - protein, 224 aa, Zea mays subsp. mays
  misc_feature (1)..(224): Ceres Seq. ID no. 12343995
MPGQYSLDKQILLTYMGAELYVTDPSLGFPGITAKVEELKKELPNVHVLDQFSNRANPEAHVRWTGPEIWKDTAGKVDVFVAGSGSGGTVSGVGKYLKTQNPSVKVICVEPAESPVVSGGEPGSHKIQGIGPGFIPEVLDTSVIDEAVTVTTEEAMAGARRLAREEGLLVGISSGANLAACLKVAAREESKGKMIVTVFPSGGERYMTSDLFAAAREECIAMTF

SEQ ID NO: 15300 - DNA, 1420 bp, Zea mays subsp. mays
  misc_feature (1)..(1420): Ceres Seq. ID no. 12344013
attcaacgtagggtacattatataataataagctaatagcagcgccacgcaccgacaccaatacgccatgggttccatcatggagcaacgctgcaacaacgatcagcaggcgctgctcgacgctcagctcgagctctggcacagcacgttcgcgttcatcaagtccatggcgttcaagtcggcgctggagctcggcatcgccgacgccatccactgccacggcggcaccgccacgctcacccagatagccaccaaggccgcgctccacccgtccaagacaccgtgcctgcgcaggctcatgcgcgcgctcacagtcgccggcatcttcagcgtcgccaagaactcgtccgacgatgacggcgatcagcacgtctacggcctcactccggcctcccgacttcttgtcggctcgtcacagaacttggctccaacactgagcctcatccttaacaacgtcttcgtggccccgttccttgacctcggcacgtggttcgagagcgcgctgccggccacagacctgccgctcttcgagctgtcccaccggaagaacgtgtgggacgtcgtcggccacgacccgtccgtgagccagctcttcaacgccgggatggtcgcggatacccgcttcctcatggacatcgccgtcagggagtgcggcgacgtgtttcaggggatacgctccctggtcgacgttggcggcggccatggcgcggcggcgcaggccatctctgcggcgttccctgccatacagtgcaccgtgctggaccttgcacacgtggtcgcaaccgctcccgcttgcgctgggctcagcttcgttgctggcgacatgtttgaggccattccgccagcgaatgctgtcttcctcaagtggatcatgcacgactggggtgacactgagtgtgtcacgatactaaagaactgcaagaaagctatacctccacgagatgcaggcggcaaggtgataatagtagataccgtggttggtgcagggcctccaaaccttaagaacaaagagacacaggtcatgtctgatctcttctttatgatcgtcaacggccttgagagagatgagcaggaatggaggaacgtcatctttgaagctggtttcagtgactacataatcataccagttttaggtgttcgatcaatcatcgagctatacccctgaaatataatccagcttcctcagccggcggccagctcatcacctacatgttgaatgctttggcgtgtggatctgtgtgtgtgttttttcctttaagaacagtgtgcatgtgtgtttaataaattggtatatatagttatatactcactaaaaggatggtttatgtatgcatgtatgcaagtgttccaaccattattatgtctccaaagtgaagaagttgcgtttttcaattttaaggaatgaactccaggattttct

SEQ ID NO: 15301 - protein, 365 aa, Zea mays subsp. mays
  misc_feature (1)..(365): Ceres Seq. ID no. 12344014
MGSIMEQRCNNDQQALLDAQLELWHSTFAFIKSMAFKSALELGIADAIHCHGGTATLTQIATKAALHPSKTPCLRRLMRALTVAGIFSVAKNSSDDDGDQHVYGLTPASRLLVGSSQNLAPTLSLILNNVFVAPFLDLGTWFESALPATDLPLFELSHRKNVWDVVGHDPSVSQLFNAGMVADTRFLMDIAVRECGDVFQGIRSLVDVGGGHGAAAQAISAAFPAIQCTVLDLAHVVATAPACAGLSFVAGDMFEAIPPANAVFLKWIMHDWGDTECVTILKNCKKAIPPRDAGGKVIIVDTVVGAGPPNLKNKETQVMSDLFFMIVNGLERDEQEWRNVIFEAGFSDYIIIPVLGVRSIIELYP

SEQ ID NO: 15302 - protein, 361 aa, Zea mays subsp. mays
  misc_feature (1)..(361): Ceres Seq. ID no. 12344015
MEQRCNNDQQALLDAQLELWHSTFAFIKSMAFKSALELGIADAIHCHGGTATLTQIATKAALHPSKTPCLRRLMRALTVAGIFSVAKNSSDDDGDQHVYGLTPASRLLVGSSQNLAPTLSLILNNVFVAPFLDLGTWFESALPATDLPLFELSHRKNVWDVVGHDPSVSQLFNAGMVADTRFLMDIAVRECGDVFQGIRSLVDVGGGHGAAAQAISAAFPAIQCTVLDLAHVVATAPACAGLSFVAGDMFEAIPPANAVFLKWIMHDWGDTECVTILKNCKKAIPPRDAGGKVIIVDTVVGAGPPNLKNKETQVMSDLFFMIVNGLERDEQEWRNVIFEAGFSDYIIIPVLGVRSIIELYP

SEQ ID NO: 15303 - protein, 332 aa, Zea mays subsp. mays
  misc_feature (1)..(332): Ceres Seq. ID no. 12344016
MAFKSALELGIADAIHCHGGTATLTQIATKAALHPSKTPCLRRLMRALTVAGIFSVAKNSSDDDGDQHVYGLTPASRLLVGSSQNLAPTLSLILNNVFVAPFLDLGTWFESALPATDLPLFELSHRKNVWDVVGHDPSVSQLFNAGMVADTRFLMDIAVRECGDVFQGIRSLVDVGGGHGAAAQAISAAFPAIQCTVLDLAHVVATAPACAGLSFVAGDMFEAIPPANAVFLKWIMHDWGDTECVTILKNCKKAIPPRDAGGKVIIVDTVVGAGPPNLKNKETQVMSDLFFMIVNGLERDEQEWRNVIFEAGFSDYIIIPVLGVRSIIELYP

SEQ ID NO: 15304 - DNA, 1831 bp, Zea mays subsp. mays
  misc_feature (1)..(1831): Ceres Seq. ID no. 12344017
agcgtggcctcccgttctgacttcggagtccctcggtctcaacgactagttgagagctcgcggctccgttcgggcgaggggaggaggttcatgaggctgctgtaggctccgttgcagccgccgcgggcgggagtccgtgattttggacgccccaccgcggcaagatccggaagcgcgttggctgttgtgccgtgagtttcagtttcggtggtcgattgcttcagcctgctgagaagtaggaggggcggccatggcggggtcgaggttcgggtcgttcaagtcggagaagggcgactccgcctccgcagcggcggcagcgggtggagcggcgcagaggagggacccgtacgaggtgctcggggtgggccgcaccgccaccgaccaggagatcaagagtgcgttccgacgcatggcgctcaagtaccatccggacaagaatggcgatgaccctgttgcatcagacaggttccaggaagtcacattctcctataacatcctgtcagatcccgataagaggcggcagtacgatacatcaggatttgatgcaatcgaatctgatagtcaggaactggagctggacttgtcgagtctcaacactgtaaacacggtgtttgcagctctttttagtaagcttggtgtgccaattaaaacaactgtttcagctacagttttagaggaggcattgaatggttcggttatggtttctcaactccagctaggaaactcagtgcagagaaaggtggaaaagcaatcggcccatttctattctgtggatataactgaaaaacaagctaaaatggggctagtttgtcgtgttcactcaaacgataaaagcaaattcaagttgctatattttgagcttgaagaaaatggcgggcttagtcttgcactacaggaagacagtgtgaaggttgggaaagttactgctgcagggatgtatttccttggttttcctgtgtaccgttttgaacaaaataacctggcagctgctgcaaaagattctgatggtgcattctttaaaagattggatagctttcagccatgtgacatacatgaactgaaacctggaacacacttctttgctgtctacggtgacaacttcttcaagagcgctagttatactatagaggttgtatgtggtgaatcttttcctgccgaaaaggagatgctacgaaatgtggaggccaagatactcacaaaacgagctgaactttccaaatttgagtcagagtatagggaggttttggcgaagttcactgaaatgaccagcaaatacacacaagaaatgcaagcgattgatggccttctgaaggaaaggaatgagatccatgcttcctataccaacaatccacctctaaaacggagttccagcaggaataaagccaagtcgccttcgaaagtggccaaaactggtacagaaaaacatcatcagaaggaaaagaaggtgaaggatcactgcatggagggatgtggaagtgacagcgataactcaagtgaaaagaaatcaaaagagcggttcccaaggaagaaatggctgaaccttccattcaaacttgacaggagaaagacgtgctgagcaatgtattatatgttccgttgctattctatcctgttatgcataatcctgagctgaactcacatttcttctctttctcatgcttttataggaagtccctctcggcccaacactagattgatatacagagaatttccactgtggcctcccgaaccaagccctctcccactgctaccaccttccttcgttgtacccggattatttcgtgtaaagatcacatgtgatcctaagaattaaaacgtgagtcgttttagc

SEQ ID NO: 15305 - protein, 441 aa, Zea mays subsp. mays
  misc_feature (1)..(441): Ceres Seq. ID no. 12344018
MAGSRFGSFKSEKGDSASAAAAAGGAAQRRDPYEVLGVGRTATDQEIKSAFRRMALKYHPDKNGDDPVASDRFQEVTFSYNILSDPDKRRQYDTSGFDAIESDSQELELDLSSLNTVNTVFAALFSKLGVPIKTTVSATVLEEALNGSVMVSQLQLGNSVQRKVEKQSAHFYSVDITEKQAKMGLVCRVHSNDKSKFKLLYFELEENGGLSLALQEDSVKVGKVTAAGMYFLGFPVYRFEQNNLAAAAKDSDGAFFKRLDSFQPCDIHELKPGTHFFAVYGDNFFKSASYTIEVVCGESFPAEKEMLRNVEAKILTKRAELSKFESEYREVLAKFTEMTSKYTQEMQAIDGLLKERNEIHASYTNNPPLKRSSSRNKAKSPSKVAKTGTEKHHQKEKKVKDHCMEGCGSDSDNSSEKKSKERFPRKKWLNLPFKLDRRKTC

SEQ ID NO: 15306 - protein, 388 aa, Zea mays subsp. mays
  misc_feature (1)..(388): Ceres Seq. ID no. 12344019
MALKYHPDKNGDDPVASDRFQEVTFSYNILSDPDKRRQYDTSGFDAIESDSQELELDLSSLNTVNTVFAALFSKLGVPIKTTVSATVLEEALNGSVMVSQLQLGNSVQRKVEKQSAHFYSVDITEKQAKMGLVCRVHSNDKSKFKLLYFELEENGGLSLALQEDSVKVGKVTAAGMYFLGFPVYRFEQNNLAAAAKDSDGAFFKRLDSFQPCDIHELKPGTHFFAVYGDNFFKSASYTIEVVCGESFPAEKEMLRNVEAKILTKRAELSKFESEYREVLAKFTEMTSKYTQEMQAIDGLLKERNEIHASYTNNPPLKRSSSRNKAKSPSKVAKTGTEKHHQKEKKVKDHCMEGCGSDSDNSSEKKSKERFPRKKWLNLPFKLDRRKTC

SEQ ID NO: 15307 - protein, 292 aa, Zea mays subsp. mays
  misc_feature (1)..(292): Ceres Seq. ID no. 12344020
MVSQLQLGNSVQRKVEKQSAHFYSVDITEKQAKMGLVCRVHSNDKSKFKLLYFELEENGGLSLALQEDSVKVGKVTAAGMYFLGFPVYRFEQNNLAAAAKDSDGAFFKRLDSFQPCDIHELKPGTHFFAVYGDNFFKSASYTIEVVCGESFPAEKEMLRNVEAKILTKRAELSKFESEYREVLAKFTEMTSKYTQEMQAIDGLLKERNEIHASYTNNPPLKRSSSRNKAKSPSKVAKTGTEKHHQKEKKVKDHCMEGCGSDSDNSSEKKSKERFPRKKWLNLPFKLDRRKTC

SEQ ID NO: 15308 - DNA, 1862 bp, Zea mays subsp. mays
  misc_feature (1)..(1862): Ceres Seq. ID no. 12344032
ctcgttccctcgagaactgtaccatcacgcgccgcccgcccgcccttgattgagcagggactgggagagagggtgaaagggggcaagaaaacgcttcttgttgccgctgtgcttctgcggatccgtggctgcgcacgccggcggggaagaggagtcgctggcggcgcgcctccagtctttcttcacctccgtgctctccgggctcttcggccaggccgaggccgaggacgaggacgaagagatgcccacgcgcaaccacaacgctgccgcggctgccgctccgcagcatcaccatcacaaccgaggtggtgctcccgctcttggaaagagcaaggccgtgcccggccgagctgatgccatgaaccggcgagcccccctcggcgatattggcaacctcgtcagcgtccgcccagccgaagggaaacctcagctgcaggagcagatcaatcgccccatcacgcgaagcttcggcgctcagctcgtgaagaacgtgcaggcgaatgccgcaatcaagaatgccgcaatcctacccgcgaggcatgcgccgaggcaggaaaggaaggctcctgccaagcagccgcctcctgaggatgtcatagtactcagctccgactctgaacaaagcaggacgcagttggagagcagcgctagctccgtccggtcgaggaagaaggtcatcaacaccctttcttctgtgctctcggctcgctcaaaggctgcctgtggaatcactgacaagaggcggcaagtagtagtgatcgaagacatcgacaagttggacgtcaacaatgagctcgcagttgtggaatacattgaggacatctacacgttctacaagattgctcagcatgacagacggccatgtgattatatagacacccaagtcgagatcaaccctaagatgagggctatcctagctgattggataattgaagtacaccacaagttcgctctgatgccggagactctctacttgaccatgtacatcatcgatcagtacctctcgctgcaaccagtcctgcgaagggagctgcagctggtcggtgtttcagctatgctgatcgcctgcaagtacgaggagatttgggccccagaggtgaacgatttcattcttatatcagacagtgcatacagcagggagcagatcctttcgatggagaagggaatcctgaatagcctggagtggaacctcactgtccctacagtatacatgttccttgttcgttttctgaaggcggcaaccttgggcaacaaagttgagaaagagatggagaatatggtcttcttcttcgctgaactggcgctgatgcagtacggcttggtgacgcggctgccttcgctggtcgctgcttcggttgtctacgcagccaggctcactctcaagagggctcccctctggaccgacaccctcaagcaccacacgggcttcagagagtcagagacagagctaatcgagtgcacgaagttgctggtcagcgcacactcgtccaccgctgacagcaagctgaggtctgtatacaagaagtattccagtgagcagttcggaggtgtcgcgcttcgcccacccgcagccgcagtggagatcaagtaaacgaagataacttcgtgctagtgtttgttagtataatgtaatggaaggcgagcctgacattcgctagggtctatccgtctatgtttgcttgtcggggtagtcaagaaagtttgaatgcttgaggcagccgtttgtttggtaggctgttctcagagtccaggtgttatctgacttgtgatggcatgttgtgtttcatgtgatggatatcattagaatcctaatctagtacgatatctattcatgaatataaatggtatttattcatttgttc

SEQ ID NO: 15309 - protein, 449 aa, Zea mays subsp. mays
  misc_feature (1)..(449): Ceres Seq. ID no. 12344033
MPTRNHNAAAAAAPQHHHHNRGGAPALGKSKAVPGRADAMNRRAPLGDIGNLVSVRPAEGKPQLQEQINRPITRSFGAQLVKNVQANAAIKNAAILPARHAPRQERKAPAKQPPPEDVIVLSSDSEQSRTQLESSASSVRSRKKVINTLSSVLSARSKAACGITDKRRQVVVIEDIDKLDVNNELAVVEYIEDIYTFYKIAQHDRRPCDYIDTQVEINPKMRAILADWIIEVHHKFALMPETLYLTMYIIDQYLSLQPVLRRELQLVGVSAMLIACKYEEIWAPEVNDFILISDSAYSREQILSMEKGILNSLEWNLTVPTVYMFLVRFLKAATLGNKVEKEMENMVFFFAELALMQYGLVTRLPSLVAASVVYAARLTLKRAPLWTDTLKHHTGFRESETELIECTKLLVSAHSSTADSKLRSVYKKYSSEQFGGVALRPPAAAVEIK

SEQ ID NO: 15310 - protein, 410 aa, Zea mays subsp. mays
  misc_feature (1)..(410): Ceres Seq. ID no. 12344034
MNRRAPLGDIGNLVSVRPAEGKPQLQEQINRPITRSFGAQLVKNVQANAAIKNAAILPARHAPRQERKAPAKQPPPEDVIVLSSDSEQSRTQLESSASSVRSRKKVINTLSSVLSARSKAACGITDKRRQVVVIEDIDKLDVNNELAVVEYIEDIYTFYKIAQHDRRPCDYIDTQVEINPKMRAILADWIIEVHHKFALMPETLYLTMYIIDQYLSLQPVLRRELQLVGVSAMLIACKYEEIWAPEVNDFILISDSAYSREQILSMEKGILNSLEWNLTVPTVYMFLVRFLKAATLGNKVEKEMENMVFFFAELALMQYGLVTRLPSLVAASVVYAARLTLKRAPLWTDTLKHHTGFRESETELIECTKLLVSAHSSTADSKLRSVYKKYSSEQFGGVALRPPAAAVEIK

SEQ ID NO: 15311 - protein, 229 aa, Zea mays subsp. mays
  misc_feature (1)..(229): Ceres Seq. ID no. 12344035
MRAILADWIIEVHHKFALMPETLYLTMYIIDQYLSLQPVLRRELQLVGVSAMLIACKYEEIWAPEVNDFILISDSAYSREQILSMEKGILNSLEWNLTVPTVYMFLVRFLKAATLGNKVEKEMENMVFFFAELALMQYGLVTRLPSLVAASVVYAARLTLKRAPLWTDTLKHHTGFRESETELIECTKLLVSAHSSTADSKLRSVYKKYSSEQFGGVALRPPAAAVEIK

SEQ ID NO: 15312 - DNA, 1314 bp, Zea mays subsp. mays
  misc_feature (1)..(1314): Ceres Seq. ID no. 12344048
gtacaagcctttggagacatcgtgtccgtcagttatttctcttcctcctccaaaccaccgatgtcgctaccggttctatccctgcgctgccattgctcgtccgcatcctccttggatttccctcccaggaaggttagggttttctgatgcgctcatacatggggcagcaagaagatgggatgtctgatggcttgtacacttacaagcatcaccgcgagcgaggagctgatatccacaccatctttgtgaagaagagcaaattcaggattctgctgtcatttatcggcacaacgttccttcttgtgtctgtttgctgcgccctgttatcgaaggatggtttatgtctttgttccctttggagcatttcatttgccagtgtaattgcgaaatgcctgcgatgtgaccctgtgaagaaagagtcattggtgatcatgccgacttttggaattcaattagagcaacacttttggagtggaagagttcatcgcaaatttgtgcccattggcaagattctaagaccagtgctgaatgagcatgtgacccctgtctcatgctactggagcttggccttgcttgtacgcgaagaatatgagctcatgcttgttttcaagagcttgaatccaccagtcaagatgttggttccaatctggaaagcgttatgtgcattcgtagactccaaaagtgttgctcaatataatgctagtcagctgatcacacagagagagactgtgagtagggagattaggaagatactgactgagagggctagattcttcaacattgctcttgatgacgtctccatcacaagcctgagctttgggaaggagtttactcatgccattgaagcgaagcaggttgctgcacaggaagctgagcgtgctaagttcattgtcgagaaagctgaacaagataagagaagtgcaattatcagggctcagggagaggctaagagtgcggagctgattggtcaagccatagcgaacaaccctgccttccttgccctgaggcagattgaagctgcaagggagatctcccacaccatttcggcctcagccaacaaggtgttcctggactccaacgacctgctgctcaacctccagcagctgaatgtatcgagcaagcagaagaaatgatgtcacaacgttatcccatttcttctgagtttgcagtcagtagtggatgcctttgtaccagacattgtgaggaacgctcggttttggatgtagtttcgccaatcttcctgttatgtggaacttgcgagtatttgctcaaaggcaagcaagctgacaggttttgtttaaacgtaactacagg

SEQ ID NO: 15313 - protein, 328 aa, Zea mays subsp. mays
  misc_feature (1)..(328): Ceres Seq. ID no. 12344049
MRSYMGQQEDGMSDGLYTYKHHRERGADIHTIFVKKSKFRILLSFIGTTFLLVSVCCALLSKDGLCLCSLWSISFASVIAKCLRCDPVKKESLVIMPTFGIQLEQHFWSGRVHRKFVPIGKILRPVLNEHVTPVSCYWSLALLVREEYELMLVFKSLNPPVKMLVPIWKALCAFVDSKSVAQYNASQLITQRETVSREIRKILTERARFFNIALDDVSITSLSFGKEFTHAIEAKQVAAQEAERAKFIVEKAEQDKRSAIIRAQGEAKSAELIGQAIANNPAFLALRQIEAAREISHTISASANKVFLDSNDLLLNLQQLNVSSKQKK

SEQ ID NO: 15314 - protein, 324 aa, Zea mays subsp. mays
  misc_feature (1)..(324): Ceres Seq. ID no. 12344050
MGQQEDGMSDGLYTYKHHRERGADIHTIFVKKSKFRILLSFIGTTFLLVSVCCALLSKDGLCLCSLWSISFASVIAKCLRCDPVKKESLVIMPTFGIQLEQHFWSGRVHRKFVPIGKILRPVLNEHVTPVSCYWSLALLVREEYELMLVFKSLNPPVKMLVPIWKALCAFVDSKSVAQYNASQLITQRETVSREIRKILTERARFFNIALDDVSITSLSFGKEFTHAIEAKQVAAQEAERAKFIVEKAEQDKRSAIIRAQGEAKSAELIGQAIANNPAFLALRQIEAAREISHTISASANKVFLDSNDLLLNLQQLNVSSKQKK

SEQ ID NO: 15315 - protein, 317 aa, Zea mays subsp. mays
  misc_feature (1)..(317): Ceres Seq. ID no. 12344051
MSDGLYTYKHHRERGADIHTIFVKKSKFRILLSFIGTTFLLVSVCCALLSKDGLCLCSLWSISFASVIAKCLRCDPVKKESLVIMPTFGIQLEQHFWSGRVHRKFVPIGKILRPVLNEHVTPVSCYWSLALLVREEYELMLVFKSLNPPVKMLVPIWKALCAFVDSKSVAQYNASQLITQRETVSREIRKILTERARFFNIALDDVSITSLSFGKEFTHAIEAKQVAAQEAERAKFIVEKAEQDKRSAIIRAQGEAKSAELIGQAIANNPAFLALRQIEAAREISHTISASANKVFLDSNDLLLNLQQLNVSSKQKK

SEQ ID NO: 15316 - DNA, 1248 bp, Zea mays subsp. mays
  misc_feature (1)..(1248): Ceres Seq. ID no. 12344056
gtgctttcatcattccgctccccacacccctgttcgtggcggcctccgcccctccctctcaggctctcaccaccgtctgctggtggttgccgcggcgccgctcctccctcgtggtggcggtggaggactacggtcggggatcgacggcttcttcgtccgttggttggcaggcgaggcgatacatcaaccaaccaaaagaaatgtcagctggcaggcaagcatactggtgttaccagtgccgacagagggtgaggccacggggccgggagatggtttgtccctactgcgattctgggtttgtggctgaaatggatgatgtagatgctctcatgagccacttcgttgggacggatcctgatttccatcgcgacccacggttcgggatcatggaggcgatctccgccgtgatgcggcatggtatggcagggatgaaccgggaggttgatgtcagagggaggccgaacttcttttcagacctggagatggagttcggttcagggccatggctgctcttccgtggccagctccccggccacctcaccgaggacaacggtttcgatgttttcgtcaatggacgacgtggcggcggcggcggcggcggcggcatgaggagggccaacatcgcggactacttcgttggccctggactggatgatcttatcgagcagttgacccagaatgatcgccgaggaccaccacctgctgcacagtcctcgatcgacgctatgcccacagtgaagatcacccagaggcatctcagtggggactcgcactgccctatctgcaaggagaagttcgagatgggatccgaagaagcaagagagatgccatgcaagcacctgtaccactccgactgcatagttccttggttagagcagcacaattcctgccccgtttgccgttacgagctcccgccacagggctctgccaccggtgctagctgctcgcgcgcgagatcaaccgaccagagccagagctcaagtagttcaagcagcagcgggagaaccagtgggcgtcaaaggagaaggaacccgttctcgttcctgtggcctttccgctcatcaagtagttctcgctagattagcctctggtaatctttgctcaggttcgaaatactgtttgtttttttgggtcaaatacgctggtctaatgggctttaatgtggtgggatctcaatctgtactgtatggtttgttaatgatcgccacacgatgcttctccttgcaagtatattattattaccacggt

SEQ ID NO: 15317 - protein, 358 aa, Zea mays subsp. mays
  misc_feature (1)..(358): Ceres Seq. ID no. 12344057
AFIIPLPTPLFVAASAPPSQALTTVCWWLPRRRSSLVVAVEDYGRGSTASSSVGWQARRYINQPKEMSAGRQAYWCYQCRQRVRPRGREMVCPYCDSGFVAEMDDVDALMSHFVGTDPDFHRDPRFGIMEAISAVMRHGMAGMNREVDVRGRPNFFSDLEMEFGSGPWLLFRGQLPGHLTEDNGFDVFVNGRRGGGGGGGGMRRANIADYFVGPGLDDLIEQLTQNDRRGPPPAAQSSIDAMPTVKITQRHLSGDSHCPICKEKFEMGSEEAREMPCKHLYHSDCIVPWLEQHNSCPVCRYELPPQGSATGASCSRARSTDQSQSSSSSSSSGRTSGRQRRRNPFSFLWPFRSSSSSR

SEQ ID NO: 15318 - protein, 292 aa, Zea mays subsp. mays
  misc_feature (1)..(292): Ceres Seq. ID no. 12344058
MSAGRQAYWCYQCRQRVRPRGREMVCPYCDSGFVAEMDDVDALMSHFVGTDPDFHRDPRFGIMEAISAVMRHGMAGMNREVDVRGRPNFFSDLEMEFGSGPWLLFRGQLPGHLTEDNGFDVFVNGRRGGGGGGGGMRRANIADYFVGPGLDDLIEQLTQNDRRGPPPAAQSSIDAMPTVKITQRHLSGDSHCPICKEKFEMGSEEAREMPCKHLYHSDCIVPWLEQHNSCPVCRYELPPQGSATGASCSRARSTDQSQSSSSSSSSGRTSGRQRRRNPFSFLWPFRSSSSSR

SEQ ID NO: 15319 - protein, 269 aa, Zea mays subsp. mays
  misc_feature (1)..(269): Ceres Seq. ID no. 12344059
MVCPYCDSGFVAEMDDVDALMSHFVGTDPDFHRDPRFGIMEAISAVMRHGMAGMNREVDVRGRPNFFSDLEMEFGSGPWLLFRGQLPGHLTEDNGFDVFVNGRRGGGGGGGGMRRANIADYFVGPGLDDLIEQLTQNDRRGPPPAAQSSIDAMPTVKITQRHLSGDSHCPICKEKFEMGSEEAREMPCKHLYHSDCIVPWLEQHNSCPVCRYELPPQGSATGASCSRARSTDQSQSSSSSSSSGRTSGRQRRRNPFSFLWPFRSSSSSR

SEQ ID NO: 15320 - DNA, 1892 bp, Zea mays subsp. mays
  misc_feature (1)..(1892): Ceres Seq. ID no. 12344080
aaagcaacggacccccattcgcatccgcctccttttccttggagccgaagaagagggaaaggaagggaggacagccgccgccgccgccatcaccaccgtcaggatgcattccacgaacctcctgctcgaggagcccatccggatggcctccatcctcgagccctccaagcccagctacttcccggcgatgaccaagatcgtcggcactctcggccccaagtcgcgctccgtcgacacgatctccgcctgcctcaaggccggcatgtccgtcgcccggttcgatttctcgtggggggacgccgcgtaccaccaggagacgctggagaacctcaagctctccatcaagtccaccaagaagctctgcgcgtgtcatgctcgacaccgtgggcccggagctgcaggtggtgaacaagagcgagaccccgatctccctcgaggagaatggcacggtcgttctcacccctcaccgggggccaagacgcctcctccagcttgctgcccatcaacttctctggactcgccaaggcggtgacaccaggggcaacaatattcgtgggacaatacttgttcactggcagtgagaccacctcagtttggttggaggtttctgaagtgaaaggagatgatgtggtgtgtataatcaagaacacagccaccttggctgggtcactgttcacgctgcattgctcccagattcacattgacttgcccaccctgtctgatgaggataaggatgtcattagaaaatggggtactcccaataagattgacttcctttctctgtcctacacaagacatgcagaggatgtgcgccaggcacgggaattcctgtcaaaattgggcgatctaagccagactctgatttttgccaaaattgagaatgtcgagggcctgaaccaatttgatgaaatactggctgaggcagatggtatcattttatcaagagggaacctgggaattgatcttccacctgagaaggtctttttgtttcaaaaatctgctcttcacaagtgcaacatggctggaaagcctgctgttgtcactcgtgttgtggacagtatgactgacaacctcaggcctactcgggcggaggcaactgatgtggccaatgcagtacttgacgggagtgatgccattctccttggtgctgagactcttcgaggtttatatccagttgagactatttcgacagtgggcagaatttgtgctgaggctgagaaggtattcaaccaagatttatacttcaagcaaactgtgaaatatgtcggagaacccatgacccacttggagtccattgcttcctcagcggtgcgagctgctatcaaagttaaggcttcggtgatcatttgcttcacctcttctgggagggctgcaaggctcatcgccaagtacaggcccaccatgcctgttctttctgttgtcattcctcgtctgaagacaaaccaactgagatggagtttcactggtgcttttgaggcaagacagtcgctgatagttagaggcctctttccgatgcttgctgatcctcggcatccagccgaatcaaccagtaatacaaatgagtcagttctgaaggttgctctagaccatggcaaggcatgtggtgtgatcaagtcccatgaccgtgttgtcgtttgccagaaggtgggagattcatcggttgtgaagatcattgagctggacgactagggcatactttgccgattttttttttttgacgaggccggaatttgttggctatatgtataatcctatagctttctttacaaatgagcagtttttccctatggtgccatcataggacttgcttagcgatttaaaactcgattatgtgccacctaaaatgggcagatggaacaatgaaatcatactgtgccctttatccgttgctt

SEQ ID NO: 15321 - protein, 415 aa, Zea mays subsp. mays
  misc_feature (1)..(415): Ceres Seq. ID no. 12344081
MARSFSPLTGGQDASSSLLPINFSGLAKAVTPGATIFVGQYLFTGSETTSVWLEVSEVKGDDVVCIIKNTATLAGSLFTLHCSQIHIDLPTLSDEDKDVIRKWGTPNKIDFLSLSYTRHAEDVRQAREFLSKLGDLSQTLIFAKIENVEGLNQFDEILAEADGIILSRGNLGIDLPPEKVFLFQKSALHKCNMAGKPAVVTRVVDSMTDNLRPTRAEATDVANAVLDGSDAILLGAETLRGLYPVETISTVGRICAEAEKVFNQDLYFKQTVKYVGEPMTHLESIASSAVRAAIKVKASVIICFTSSGRAARLIAKYRPTMPVLSVVIPRLKTNQLRWSFTGAFEARQSLIVRGLFPMLADPRHPAESTSNTNESVLKVALDHGKACGVIKSHDRVVVCQKVGDSSVVKIIELDD

SEQ ID NO: 15322 - protein, 223 aa, Zea mays subsp. mays
  misc_feature (1)..(223): Ceres Seq. ID no. 12344082
MAGKPAVVTRVVDSMTDNLRPTRAEATDVANAVLDGSDAILLGAETLRGLYPVETISTVGRICAEAEKVFNQDLYFKQTVKYVGEPMTHLESIASSAVRAAIKVKASVIICFTSSGRAARLIAKYRPTMPVLSVVIPRLKTNQLRWSFTGAFEARQSLIVRGLFPMLADPRHPAESTSNTNESVLKVALDHGKACGVIKSHDRVVVCQKVGDSSVVKIIELDD

SEQ ID NO: 15323 - protein, 209 aa, Zea mays subsp. mays
  misc_feature (1)..(209): Ceres Seq. ID no. 12344083
MTDNLRPTRAEATDVANAVLDGSDAILLGAETLRGLYPVETISTVGRICAEAEKVFNQDLYFKQTVKYVGEPMTHLESIASSAVRAAIKVKASVIICFTSSGRAARLIAKYRPTMPVLSVVIPRLKTNQLRWSFTGAFEARQSLIVRGLFPMLADPRHPAESTSNTNESVLKVALDHGKACGVIKSHDRVVVCQKVGDSSVVKIIELDD

SEQ ID NO: 15324 - DNA, 1289 bp, Zea mays subsp. mays
  misc_feature (1)..(1289): Ceres Seq. ID no. 12344120
aagagagagaaaacgaaacgccgctccctcgcctcatcccttccctcctcctgcatcctacctccctggtacccgtcacgttcaccacgttcgcccgctcattcaccggcggcgtcgcccagctcggcctcccgccgcccacggaggccaggtccccgggccgcccgctcggtccgccacagaggcaaggcatggtggcgtctttagacaatgtgaggggcttgactttagccatgtcatctagtgcattcattggttctagctttgtgatcaagaaagttggattgaagaaggctggggataatggggtgcgtgcagcttctggaggcttctcatatctatatgagccgttatggtggttgggaatgataactatgattctaggcgaggtagccaattttgcagcatatgcatttgcccctgccgtacttgttactcctctaggagctctaagcatcatatttagtgcagtgctcgcacacttcattctgaaagaaaatttgcacatgtttggcgttgttggttgcatactatgtgttgttggttctgttggtatagttttgcatgccccaaaggagagaaaaattgattctatgaaggaaatatggcatcttgcaacacagccaggttttattgtttattcatgcgtggcagtggcctgcgttctttttttgatatttcgggttgttgagcgctctgggcacagattgatgcttgtttacatagcaatctgttcattaatgggatctcttacggttatcagtgtaaaagcagttgccattgctctaaagctatcatttggtggatcaaatcaattcatctacgtccagacatggttcttcatagtagtagtcactatttgctgcttggtgcaattaaactacttaaacaaggctctggactcgttcaacacggctgtggtttctcctgtatactacgtgatgttcaccattcttaccattgttgcaaatatgatcatgtacaaggactgggcctcgcagactgcaacgcagatcgcaacacagctatgtgggtttgtgaccattgtcgcggggacttttctgcttcacaagactagggatatgggaaatccaccaccaccaccacctgaccaaatgtgcctgcaagaagccggggaatgtgctccacggtcaatgaccagttctagctgaacacactaagatgtcaaaatctcacagcctctatggactgaattggaattttgagctatatggtgacctttgtagatatattaggaaggagtaaagattggagtgcccagcagttgg

SEQ ID NO: 15325 - protein, 389 aa, Zea mays subsp. mays
  misc_feature (1)..(389): Ceres Seq. ID no. 12344121
ERENETPLPRLIPSLLLHPTSLVPVTFTTFARSFTGGVAQLGLPPPTEARSPGRPLGPPQRQGMVASLDNVRGLTLAMSSSAFIGSSFVIKKVGLKKAGDNGVRAASGGFSYLYEPLWWLGMITMILGEVANFAAYAFAPAVLVTPLGALSIIFSAVLAHFILKENLHMFGVVGCILCVVGSVGIVLHAPKERKIDSMKEIWHLATQPGFIVYSCVAVACVLFLIFRVVERSGHRLMLVYIAICSLMGSLTVISVKAVAIALKLSFGGSNQFIYVQTWFFIVVVTICCLVQLNYLNKALDSFNTAVVSPVYYVMFTILTIVANMIMYKDWASQTATQIATQLCGFVTIVAGTFLLHKTRDMGNPPPPPPDQMCLQEAGECAPRSMTSSS

SEQ ID NO: 15326 - protein, 326 aa, Zea mays subsp. mays
  misc_feature (1)..(326): Ceres Seq. ID no. 12344122
MVASLDNVRGLTLAMSSSAFIGSSFVIKKVGLKKAGDNGVRAASGGFSYLYEPLWWLGMITMILGEVANFAAYAFAPAVLVTPLGALSIIFSAVLAHFILKENLHMFGVVGCILCVVGSVGIVLHAPKERKIDSMKEIWHLATQPGFIVYSCVAVACVLFLIFRVVERSGHRLMLVYIAICSLMGSLTVISVKAVAIALKLSFGGSNQFIYVQTWFFIVVVTICCLVQLNYLNKALDSFNTAVVSPVYYVMFTILTIVANMIMYKDWASQTATQIATQLCGFVTIVAGTFLLHKTRDMGNPPPPPPDQMCLQEAGECAPRSMTSSS

SEQ ID NO: 15327 - protein, 312 aa, Zea mays subsp. mays
  misc_feature (1)..(312): Ceres Seq. ID no. 12344123
MSSSAFIGSSFVIKKVGLKKAGDNGVRAASGGFSYLYEPLWWLGMITMILGEVANFAAYAFAPAVLVTPLGALSIIFSAVLAHFILKENLHMFGVVGCILCVVGSVGIVLHAPKERKIDSMKEIWHLATQPGFIVYSCVAVACVLFLIFRVVERSGHRLMLVYIAICSLMGSLTVISVKAVAIALKLSFGGSNQFIYVQTWFFIVVVTICCLVQLNYLNKALDSFNTAVVSPVYYVMFTILTIVANMIMYKDWASQTATQIATQLCGFVTIVAGTFLLHKTRDMGNPPPPPPDQMCLQEAGECAPRSMTSSS

SEQ ID NO: 15328 - DNA, 1338 bp, Zea mays subsp. mays
  misc_feature (1)..(1338): Ceres Seq. ID no. 12344124
gtccccgccccactgctgcccattcctctcatcccagcgaacgaccctccagcacgccatccgcttagccgccccggagcattgccatcgtcgccgccaccttctatcccagtgtggagcgggagagaacccgtctgcactcagaagctggtttaatccggtgggagcacaagtcgtgtctaaaatattcagattgctaagatgttgggtcatggtctagtaactgatccctcaagaaccttacgatgtccagttaattcaagggtatcaagtgcacccttggggcttgtttcttcgttgaatttcaacaggggatgcaagggaaagaacaaaatattcaatgtggatagacacaccaagtatagtacttctttctgttatgcgccaagaaatgccagaatcacaccactagcaactgcatcatttggggatatggctgattcttcaactcctatctttccccgaatccatgtaaaagatccatatcagcgtctcggaatcagcagggaagcatcagaagaagaaattcgagctgctaggaactatctgataagcaagtatgcaggccacaagccaagtgttgatgcaattgagtctgcccatgacaggattatcatgcagagtttctttgataggaaaaaaccaaaaatgaatctcaagaaaaaatttagggaacttagtcagtcacgtgcagtgaaggctattcaaggcagatttcaaacaccacgtagcaaagtcatttggcagacagctattgcttttgtcttgcttggagtgcttacccttgctttccctaccgaagaagggccaaccctccaggtggccatctcttgtgcagcaaatatctatttcatttatcagagggtcaaaagtggatggcgagcattcttttatgggtttggttctttctttgcttcctggttccttggcaccttcttgatggtatctgtaattccccctatactccccggtccaagaaacttggaagtgagcaccgcgtgtgttacttatgtgctccttttcatatcgtcgaccttcttgaagtaagagatctttgtgtttccatgttagcgcaaagtcttgcaggagttataaacatggtatcatgcttcaaatagcttgtacaatccatcggctttttctttgcttgtttcacgtttatggagttggaaatgctagttccttagtgagttgatagtagttttcaggttgcaatgtgagatgtagaacgttttttttttgctttggcccgtgatatcttgagcagggtctaacacctcaagtaggtattttcggttgatgtattaaatacagttgtgttcgaatagatcatatgag

SEQ ID NO: 15329 - protein, 281 aa, Zea mays subsp. mays
  misc_feature (1)..(281): Ceres Seq. ID no. 12344125
MLGHGLVTDPSRTLRCPVNSRVSSAPLGLVSSLNFNRGCKGKNKIFNVDRHTKYSTSFCYAPRNARITPLATASFGDMADSSTPIFPRIHVKDPYQRLGISREASEEEIRAARNYLISKYAGHKPSVDAIESAHDRIIMQSFFDRKKPKMNLKKKFRELSQSRAVKAIQGRFQTPRSKVIWQTAIAFVLLGVLTLAFPTEEGPTLQVAISCAANIYFIYQRVKSGWRAFFYGFGSFFASWFLGTFLMVSVIPPILPGPRNLEVSTACVTYVLLFISSTFLK

SEQ ID NO: 15330 - protein, 204 aa, Zea mays subsp. mays
  misc_feature (1)..(204): Ceres Seq. ID no. 12344126
MADSSTPIFPRIHVKDPYQRLGISREASEEEIRAARNYLISKYAGHKPSVDAIESAHDRIIMQSFFDRKKPKMNLKKKFRELSQSRAVKAIQGRFQTPRSKVIWQTAIAFVLLGVLTLAFPTEEGPTLQVAISCAANIYFIYQRVKSGWRAFFYGFGSFFASWFLGTFLMVSVIPPILPGPRNLEVSTACVTYVLLFISSTFLK

SEQ ID NO: 15331 - protein, 143 aa, Zea mays subsp. mays
  misc_feature (1)..(143): Ceres Seq. ID no. 12344127
MQSFFDRKKPKMNLKKKFRELSQSRAVKAIQGRFQTPRSKVIWQTAIAFVLLGVLTLAFPTEEGPTLQVAISCAANIYFIYQRVKSGWRAFFYGFGSFFASWFLGTFLMVSVIPPILPGPRNLEVSTACVTYVLLFISSTFLK

SEQ ID NO: 15332 - DNA, 1622 bp, Zea mays subsp. mays
  misc_feature (1)..(1622): Ceres Seq. ID no. 12344128
aaaaaaaaaacaccaacccacccaccagcctattatactcaacgcgacgaactcatctcaccaccgcgccctccgccggatggagcggccagacgtgacggtcaagcaggaggaagacgaagtggtggtggtgttggacgccgacggcgatgcttgcgggcactggccgggagcccgcgcggcgccggagccttggcagacgccggtgggatccgcggttccgccgttccttgcgaagacgttcgagcttgtggaggacccggcgacggacgccgtgatatcgtggggcgccgcgcggaacagcttcgtggtgtgggatccacacgccttcgcggcggggcaccttccgcgccgcttcaagcacggcaacttctccaccttcctccggcagctgaacacctacgtccgtaatcacatatctcaattcgtaattaacaaacattgcaatggattccgcaaggtgagcccggacaggtgggagttcgcgcacgccgacttcctcgcggggcagcggcacctcctcgtgaacatccggcggcgccgcgggggcgtcgcgggacccacagcatctccgtcttcggcgggagccggcggcgaccgtgatagcgagctcgagaggctgcggcgggaccgggaggcgctggcgagggagctgacgcggctgcggcgcgagcaggaggaggcccgcgcgcagctgctggacatggagcggcgcgtgcggggcacggagcggcggcaggagcagtgcaccgccttcctggcgcgcgccatccggaacccgaccttcctggacggcctgctggcgcgccgctgtggcgcgcacgtagaggccggcaggaagcggcggctgctcgatgccgctgcggccggccctgacccagcggacgtcctcgacatcgaggagctggcgatggttgcgggcgccgaggtcggtgtggcttccatcccagccgttgcagcggcgcagatttccaacacagccaacgccacggacatgatatggtacgagcttctcggggaggagcaggtggagatcgacgccgaggtgcacgacctcgtcgtggccgccgcggctgccactgatgagttggcgcagccgtgggcggagatggacgagaaagaggttgcggagcttgtgcggcagatagactgccttgcctcgccgagtccctgatcagtgatcaccacgaggtggagaccgtgcagctagttgcacctgtaatatggtgctccctacggagagcaactacctaccactagtccactattagccatgcattgcctgtgtcactggcaatgccattggcatatgacggctgctgaagtacaatggtggcgctggtactgtggtacggtactgcagtgcgccacgctctggattggaccctaatggtcatttggtgtgtagtgtcgttagccttgctgtttgattgtggttattggattattaggtctgcgatatgctaatttggattctgcatctgttttgtgggatccgacagtggcggtatgctgcacacaaaccggccgtggtgatggatgcagcagcctgatccagttagttgatgtattcttaagaatttgaccaaagagcaactctaaccaagccttaaatttttgcc

SEQ ID NO: 15333 - protein, 390 aa, Zea mays subsp. mays
  misc_feature (1)..(390): Ceres Seq. ID no. 12344129
KKKHQPTHQPIILNATNSSHHRALRRMERPDVTVKQEEDEVVVVLDADGDACGHWPGARAAPEPWQTPVGSAVPPFLAKTFELVEDPATDAVISWGAARNSFVVWDPHAFAAGHLPRRFKHGNFSTFLRQLNTYVRNHISQFVINKHCNGFRKVSPDRWEFAHADFLAGQRHLLVNIRRRRGGVAGPTASPSSAGAGGDRDSELERLRRDREALARELTRLRREQEEARAQLLDMERRVRGTERRQEQCTAFLARAIRNPTFLDGLLARRCGAHVEAGRKRRLLDAAAAGPDPADVLDIEELAMVAGAEVGVASIPAVAAAQISNTANATDMIWYELLGEEQVEIDAEVHDLVVAAAAATDELAQPWAEMDEKEVAELVRQIDCLASPSP

SEQ ID NO: 15334 - protein, 364 aa, Zea mays subsp. mays
  misc_feature (1)..(364): Ceres Seq. ID no. 12344130
MERPDVTVKQEEDEVVVVLDADGDACGHWPGARAAPEPWQTPVGSAVPPFLAKTFELVEDPATDAVISWGAARNSFVVWDPHAFAAGHLPRRFKHGNFSTFLRQLNTYVRNHISQFVINKHCNGFRKVSPDRWEFAHADFLAGQRHLLVNIRRRRGGVAGPTASPSSAGAGGDRDSELERLRRDREALARELTRLRREQEEARAQLLDMERRVRGTERRQEQCTAFLARAIRNPTFLDGLLARRCGAHVEAGRKRRLLDAAAAGPDPADVLDIEELAMVAGAEVGVASIPAVAAAQISNTANATDMIWYELLGEEQVEIDAEVHDLVVAAAAATDELAQPWAEMDEKEVAELVRQIDCLASPSP

SEQ ID NO: 15335 - DNA, 1462 bp, Zea mays subsp. mays
  misc_feature (1)..(1462): Ceres Seq. ID no. 12344135
tttttctcagccctctcagtctcacacaccacaccagagcagcgcagccgagcatgcactcatcacatcagctcctcgtctcctagctttcctattcctgccttgataattggccaattgttcgatctccttctttactaccccctttgctttcgttgctgctactactactgttccatctcctaggtttcgttgttgtccctgcaggccgccactgagtgatttgttagcagataagatttagatctcccagataaaaaaaagaggttgagaggagagctagcactaggcactagcaagcctgctgtgaggtgaatatggatccagtcgcagcatccatacacggtcatcatcttcctccaccgttcaacacccgggacttccatcaccatctccagcaacagcagcagcagctcaagaccgaggacgaccacggcagcggcgcgccaggactgttcggcagccgcggcaccaagggcgaccacgagaataatgaccagaacagtggaaacagcaacggaagtggcggaggaggaggcgacgagctggcgctggttccaccatccggcgccgggccagagggtggagagcccaccctacgccgcccgaaaggccggccggcggggtccaagaacaagccgaagccgcccatcatcatcacgagggacagcgccaacacgctccggacgcacgtcatggaggtggccagcggctgcgacatctccgagagcatcacggccttcgcgcgccgcaggcagcgcggggtctgcgtcctcagcggcgccggcaccgtgaccaacgtcaccctgcggcagccggcctcccagggcgcggtcgtcgccctccacggccttcgagatcctgtccctctccggctcctttctcccgccgcccgcgccgcccgaagccacggggctcaccgtctaccttgccggcggccaggggcaggtggtgggcggcagcgtcgtcggcgcgctgacagcagccggggccggtggtgataatggcggcatctttcgccaacgcggtgtacgagcggttgccgttggaggaggatgacatgctcgctgcgcaagcacaggccgacagtgcaggaattctcgcgggtgcgcagctcgccggcgctgtggatccaagcctcttccagggactgccaccgaacctgatgtgcaacgtgcagatgccgccagaagcagcctacggatggagcccgggcgccgccggtggccgtccggcgccgttctaataactgataagagcgcgcacgcggcttagatatggttaagtgatttagctttcttcttcgatcttttgcttgaatttttatcgtggagaatttccgtgggaattgcatatgatttcgcatgttaattagtaagctatcttaatactgtttcagaatatgtagctcgatttctgccatttcgtttcgctattccttgtgtcgtcgtaactcttgttc

SEQ ID NO: 15336 - protein, 227 aa, Zea mays subsp. mays
  misc_feature (1)..(227): Ceres Seq. ID no. 12344136
MDPVAASIHGHHLPPPFNTRDFHHHLQQQQQQLKTEDDHGSGAPGLFGSRGTKGDHENNDQNSGNSNGSGGGGGDELALVPPSGAGPEGGEPTLRRPKGRPAGSKNKPKPPIIITRDSANTLRTHVMEVASGCDISESITAFARRRQRGVCVLSGAGTVTNVTLRQPASQGAVVALHGLRDPVPLRLLSPAARAARSHGAHRLPCRRPGAGGGRQRRRRADSSRGRW

SEQ ID NO: 15337 - DNA, 1551 bp, Zea mays subsp. mays
  misc_feature (1)..(1551): Ceres Seq. ID no. 12344145
attcctactccgagtcgccacctgcatttgtctatcggtcaggagcatggaggggagacggctttcacgccagcagttgcgctcgctaccggacgccgcgtccttctcgccggaagtcgcggccagcccggggctcgtcggctccggccagttgggtctcggtctctcggcggcgttcgagactctgccgccgattttggtagaagtgaatggctttacaaggacactgattttgaataggccaaagcagttaaatgcactctcctcgaccatgattatgggactcttgaggtgtttcactgcttatgagaaagacgatggagttaaattgttgattatgaagggtaaaggaagagcattttgtgctggaggtgatgttgctgcagttgttcgatctatacataaagacagctggaaatatggtgctgatttcttccgaaatgaatttttgttgaattacataattgcaacttataccaaacctcaggtttctcttcttagtggaatcgtcatgggtggaggtgctggcgtttctttacatggaaggtttagagttgccaccgataacacggtttttgcaatgccagaaacagctctgggtctctttccagatataggggcctcatattttctgtctcggcttcctggattctatggagagtatgttggtcttgctggtgccagattggatggtggggaaatgcttgcatgtggtctggcaactcattttgtccagtcaaatagtctgctatcgctggaagaatcacttaaaaaggtggatacttccaatgcttttgcagtgtgtggtatcatcgatcaatttgctcaacaaccatcactgaaagaaagcagctctttgaataggttggaaatcatcaacaaatgcttttccaaaaggacagtcgaagaaattatatccgctcttgaagtagaggcctcaaattcggcagatgaatgggttgctacaacaatccagtccttgaagaaggcttctcctaccagtctgaaaatctctctgagatcgataagagaagggaggacacaaactgttggggagtgcttgcagcgggaatatagaatggtctgccatgtcatgcgtggtgacttcagcagagacttctttgagggatgcagggctatattgctagataaagatcgaaacccaaagtggatgcctccaaggttggaacaagtgcatgatgaggctgttgaacagtatttctccagaattgatgatccacagtgggaagacttgaacctacctgctagacgctcccacggaagaaatatcgagtccaagctttgatcgaaggtcatgggagaaaggtggaactctggaacggagcctcggtagtggtcagaataacacattattgcacatcatctcaagtttgaagagtctgcagactattgataaaataaaaacatgaatgtgccatataggtcaacttgtatcacagaaagaaactctttgctgtttatacgtggagactggagtcatatgcatttttaaataattataagtaataaaatcgaaaaagaaatcgttgg

SEQ ID NO: 15338 - protein, 434 aa, Zea mays subsp. mays
  misc_feature (1)..(434): Ceres Seq. ID no. 12344146
FLLRVATCICLSVRSMEGRRLSRQQLRSLPDAASFSPEVAASPGLVGSGQLGLGLSAAFETLPPILVEVNGFTRTLILNRPKQLNALSSTMIMGLLRCFTAYEKDDGVKLLIMKGKGRAFCAGGDVAAVVRSIHKDSWKYGADFFRNEFLLNYIIATYTKPQVSLLSGIVMGGGAGVSLHGRFRVATDNTVFAMPETALGLFPDIGASYFLSRLPGFYGEYVGLAGARLDGGEMLACGLATHFVQSNSLLSLEESLKKVDTSNAFAVCGIIDQFAQQPSLKESSSLNRLEIINKCFSKRTVEEIISALEVEASNSADEWVATTIQSLKKASPTSLKISLRSIREGRTQTVGECLQREYRMVCHVMRGDFSRDFFEGCRAILLDKDRNPKWMPPRLEQVHDEAVEQYFSRIDDPQWEDLNLPARRSHGRNIESKL

SEQ ID NO: 15339 - protein, 419 aa, Zea mays subsp. mays
  misc_feature (1)..(419): Ceres Seq. ID no. 12344147
MEGRRLSRQQLRSLPDAASFSPEVAASPGLVGSGQLGLGLSAAFETLPPILVEVNGFTRTLILNRPKQLNALSSTMIMGLLRCFTAYEKDDGVKLLIMKGKGRAFCAGGDVAAVVRSIHKDSWKYGADFFRNEFLLNYIIATYTKPQVSLLSGIVMGGGAGVSLHGRFRVATDNTVFAMPETALGLFPDIGASYFLSRLPGFYGEYVGLAGARLDGGEMLACGLATHFVQSNSLLSLEESLKKVDTSNAFAVCGIIDQFAQQPSLKESSSLNRLEIINKCFSKRTVEEIISALEVEASNSADEWVATTIQSLKKASPTSLKISLRSIREGRTQTVGECLQREYRMVCHVMRGDFSRDFFEGCRAILLDKDRNPKWMPPRLEQVHDEAVEQYFSRIDDPQWEDLNLPARRSHGRNIESKL

SEQ ID NO: 15340 - protein, 344 aa, Zea mays subsp. mays
  misc_feature (1)..(344): Ceres Seq. ID no. 12344148
MIMGLLRCFTAYEKDDGVKLLIMKGKGRAFCAGGDVAAVVRSIHKDSWKYGADFFRNEFLLNYIIATYTKPQVSLLSGIVMGGGAGVSLHGRFRVATDNTVFAMPETALGLFPDIGASYFLSRLPGFYGEYVGLAGARLDGGEMLACGLATHFVQSNSLLSLEESLKKVDTSNAFAVCGIIDQFAQQPSLKESSSLNRLEIINKCFSKRTVEEIISALEVEASNSADEWVATTIQSLKKASPTSLKISLRSIREGRTQTVGECLQREYRMVCHVMRGDFSRDFFEGCRAILLDKDRNPKWMPPRLEQVHDEAVEQYFSRIDDPQWEDLNLPARRSHGRNIESKL

SEQ ID NO: 15341 - DNA, 1315 bp, Zea mays subsp. mays
  misc_feature (1)..(1315): Ceres Seq. ID no. 12344153
accgaaaaaaaaattccccatgtgggaacgtggtggttgttcgcggggacggcgactggtacttttttgtcgctgcggagacggggagtcttccgactcttccccaacgggaattcctcactcacatccctacgcacgaacggaaacgccccgtgctgcgctcgcagtctcgcatggagtccaccactgctgctgctaccgcggcggcggcgccggcaccggtgctgctggtgacgaacgacgacggaatcgacgcgccggggctccgcttccttgtcgaccgtctcgtcgccgcagggcgataccgcgtactcgtctgcgcgcccgacacagacaaatcgggtgtgagccactgcatcacatggcgccctgcactccgctgtaaacgtgttgatataataggtgctacagcatttggagtttcaggaactcctgctgactgtgcttctttaggcatctctggaaaactatttgatggtttggttcctgatctggtacttagtggaatcaacattggaaataattgtgggtaccatgtcatttattctggaacagttgctggtgctagggaggcattcttatacgggattcctgcaatagctatgtcatatgattgggttgcgggtcggagcagtgttaatgacctcaaggtgtctgcagaggtctgcatgcctctgataaatgctatcgtgactgagatcaagaatgggacttaccctcaaggatcattcttgaatgtagatgtacctacagatgctgcgcaccacaagggctacaaaattacaaaacaaggaacatatatggcagaattagttgggagcagacggtttacaagaagcctgcagtagaaagttaccagacagcaaacatggatgttgatggtgaaaaggatagcgaactagttacttcagaaaatgacctactgtttaagagagtgattgtagggagaagttccaatggagtggaaggagaggaaacggaccataattccctagttgatggatatatcactgttactcctttgggtgctctttcccgcacagaaccagacgccataccctatttcaaagcttgtgtctcacgtctggttgataatttctcttctcctggctcttctttttctagaagcagaggatgagccatgaaatttctaaagctgtttatttatcgcaatgatcaagttccacactgctttttcctaccccataacattgttaccatacatgggcaatattgccattcttgctacctgaatgttattactgcaatcagcatgtgtattctgcttcatagcctatgtcagaattatgcattc

SEQ ID NO: 15342 - protein, 281 aa, Zea mays subsp. mays
  misc_feature (1)..(281): Ceres Seq. ID no. 12344154
RKKNSPCGNVVVVRGDGDWYFFVAAETGSLPTLPQREFLTHIPTHERKRPVLRSQSRMESTTAAATAAAAPAPVLLVTNDDGIDAPGLRFLVDRLVAAGRYRVLVCAPDTDKSGVSHCITWRPALRCKRVDIIGATAFGVSGTPADCASLGISGKLFDGLVPDLVLSGINIGNNCGYHVIYSGTVAGAREAFLYGIPAIAMSYDWVAGRSSVNDLKVSAEVCMPLINAIVTEIKNGTYPQGSFLNVDVPTDAAHHKGYKITKQGTYMAELVGSRRFTRSLQ

SEQ ID NO: 15343 - protein, 224 aa, Zea mays subsp. mays
  misc_feature (1)..(224): Ceres Seq. ID no. 12344155
MESTTAAATAAAAPAPVLLVTNDDGIDAPGLRFLVDRLVAAGRYRVLVCAPDTDKSGVSHCITWRPALRCKRVDIIGATAFGVSGTPADCASLGISGKLFDGLVPDLVLSGINIGNNCGYHVIYSGTVAGAREAFLYGIPAIAMSYDWVAGRSSVNDLKVSAEVCMPLINAIVTEIKNGTYPQGSFLNVDVPTDAAHHKGYKITKQGTYMAELVGSRRFTRSLQ

SEQ ID NO: 15344 - DNA, 1565 bp, Zea mays subsp. mays
  misc_feature (1)..(1565): Ceres Seq. ID no. 12344180
aaacgatctccggggaatattttattccgtgggattccgatgcggccagtcgtcctcctcctcctcccctctctctcccgtttcttctagtagtagtacaaataaagaagaagctgagctgctcgaggcacggcgagggaggggagggagacacaaggcgagtgtccctactccgagggcagtccggtgtgcaagcgcatagcatagcaggagccacaagaaaaaaagccccatggattccttctcgccgagtggccggatgacacggacggcagcatcatctctggcagcgcgcgcggtcctcgcgctcctcctcatcggggtatccggttccggagccacccaggcagcgtctccccacacccaccacagtcggcagctggatgtgaaccacaaggagccagtccagacgtttcggcccatcaacattgcccaccgagggtcaaatggcgaactgcccgaagagacagcggccgcctacctgagggcgatcgaagaaggcgcggacttcatcgagacgaacgtactcgcgtccaaggacgggcatctcgtctgcttccacgatgtgacgctggacgcgaccaccgacgtcgcggaccacgcggagttcgctggcaggaagaggacctacgaggtccaaggagaagatgtcaccggatggttcatcgtggacttcactcttgaagagctcagatcactgagggtgaagcagcggttcagtttcagggaccagcggtacaacggcaagtaccagatcattacgttcgaagagtacatcctgatcgcgctctacgctgacaggaccgtcgggatctacccggagatcaagaaccccgtgttcatcaaccagcacgtgaagtggtcggacggaaagcgattcgaggacaagttcgtggagacgctgctcaggtacggctacggaggcgagtacatgtccgatggctggctccggcagccgctgttcatccagtccttcgcgccgacctcgctcatctacgtctccaacatgacggactcccccaagctgctcctgatcgacgacacgacggtcccgacgcaggacaccaaccagtcgtaccacgagataacctcggacgcctacctcgcgttcatcgggagctacgtggtggggatcgggccgtggaaggacacgctggtgcctccggacccgacagacaaccgcctgggacgccccgccgacctcgtcgcgcgagcgcacgctctgcgtctccaggtgcacccgtacaccttcaggaacgagaaccagtacctgcacttcgacttccggcaggacccctacgccgagtacgcgtactggctcgacgaggtcgccgtcgacgggctgttcaccgatttcactggtagtctgcacaagtaccaggagtggactaggccgtaccggaaggagcaggagaagacgagcccggaggcactcttgcgcgagatcgcgggcatgctcaagaacgacggctatgactgatgacttaggttgccttcagttttccccgtctgtcactctctctgtaatggttaactaaataataaagcgacggtttcatggatgc

SEQ ID NO: 15345 - protein, 415 aa, Zea mays subsp. mays
  misc_feature (1)..(415): Ceres Seq. ID no. 12344181
MDSFSPSGRMTRTAASSLAARAVLALLLIGVSGSGATQAASPHTHHSRQLDVNHKEPVQTFRPINIAHRGSNGELPEETAAAYLRAIEEGADFIETNVLASKDGHLVCFHDVTLDATTDVADHAEFAGRKRTYEVQGEDVTGWFIVDFTLEELRSLRVKQRFSFRDQRYNGKYQIITFEEYILIALYADRTVGIYPEIKNPVFINQHVKWSDGKRFEDKFVETLLRYGYGGEYMSDGWLRQPLFIQSFAPTSLIYVSNMTDSPKLLLIDDTTVPTQDTNQSYHEITSDAYLAFIGSYVVGIGPWKDTLVPPDPTDNRLGRPADLVARAHALRLQVHPYTFRNENQYLHFDFRQDPYAEYAYWLDEVAVDGLFTDFTGSLHKYQEWTRPYRKEQEKTSPEALLREIAGMLKNDGYD

SEQ ID NO: 15346 - protein, 406 aa, Zea mays subsp. mays
  misc_feature (1)..(406): Ceres Seq. ID no. 12344182
MTRTAASSLAARAVLALLLIGVSGSGATQAASPHTHHSRQLDVNHKEPVQTFRPINIAHRGSNGELPEETAAAYLRAIEEGADFIETNVLASKDGHLVCFHDVTLDATTDVADHAEFAGRKRTYEVQGEDVTGWFIVDFTLEELRSLRVKQRFSFRDQRYNGKYQIITFEEYILIALYADRTVGIYPEIKNPVFINQHVKWSDGKRFEDKFVETLLRYGYGGEYMSDGWLRQPLFIQSFAPTSLIYVSNMTDSPKLLLIDDTTVPTQDTNQSYHEITSDAYLAFIGSYVVGIGPWKDTLVPPDPTDNRLGRPADLVARAHALRLQVHPYTFRNENQYLHFDFRQDPYAEYAYWLDEVAVDGLFTDFTGSLHKYQEWTRPYRKEQEKTSPEALLREIAGMLKNDGYD

SEQ ID NO: 15347 - DNA, 1356 bp, Zea mays subsp. mays
  misc_feature (1)..(1356): Ceres Seq. ID no. 12344215
ctcagctcggtggaggccctcaagtccgacgcgctccgttcccctttccctttccgaagcttctcgaccccccatcccctccctgacatggccgacaacgcgaaggccgcggcggcgcatgcgaggccggagtcgtcgcaggaggaggaggaggactggaaggaggccgagggggacgtcgccgaagtcgaccgcgccgctaccaatggcgccggcgaggggggcgtgcccacagacaggccgatccgggtctacgccgacggcatctacgacctcttccacttcggccacgccaagtcgctggagcaggccaagaagtcgtttccaaacacatatcttcttgttggatgctgcaatgatgagttgacacataaattcaaaggaagaactgttatgactgaggatgagcgatatgagtcacttcgtcattgcaagtgggttgatgaagtcattccagatgctccatgggtggtgacagaagagttcttggataagcataacattgattttgttgctcatgattctctgccgtatgctgatgctagtggagctggtaacgatgtttatgaacatgtaaaaaagcttggtaagtttaaggagactcagcgcactgatgggatatcaacatcggacattataatgcggattgttaaagattataatgagtatgttatgcggaatctggccaggggctacactagaaaggatcttggtgttagttatgtcaaggaaaaacgactgcgagtgaacatgggacttaaaaacctgcgtgacagagtgaaacagcaccaagaaaaagtaggggagaagtggagcacggttgcaaaactccaggaagagtgggtggaaaatgcagaccgctgggtggctggtttcttagagaagtttgaggaagggtgccactcaatggggacagccatcaaggagaggatccaggagaggctcatcaaggcacaatccagcgactttggcagcctcctacagtacgacagctacgattctgatgaagccaaagaaaacgacgaggacgaagacgaagatgaactctttgaagacgtcaaggaatagcacctccgtacatatacaatggttttgtagctgcaaattgtgttgtgagtcagttgcctctctctggttggtgatctttatatatggtctcaaaggtaggtcaggttgcaatgtttgtagctgctcttggtgtttgttcaggcaacgcatggttgtaaaagctgtggaaagactcttgtgcagtcaaggatacagattccgatggttacctttgggttagaacatatacggctgtaaaattggaagtcgaggtggttaaaactctgatatcttgtctgttttctttcc

SEQ ID NO: 15348 - protein, 355 aa, Zea mays subsp. mays
  misc_feature (1)..(355): Ceres Seq. ID no. 12344216
LSSVEALKSDALRSPFPFRSFSTPHPLPDMADNAKAAAAHARPESSQEEEEDWKEAEGDVAEVDRAATNGAGEGGVPTDRPIRVYADGIYDLFHFGHAKSLEQAKKSFPNTYLLVGCCNDELTHKFKGRTVMTEDERYESLRHCKWVDEVIPDAPWVVTEEFLDKHNIDFVAHDSLPYADASGAGNDVYEHVKKLGKFKETQRTDGISTSDIIMRIVKDYNEYVMRNLARGYTRKDLGVSYVKEKRLRVNMGLKNLRDRVKQHQEKVGEKWSTVAKLQEEWVENADRWVAGFLEKFEEGCHSMGTAIKERIQERLIKAQSSDFGSLLQYDSYDSDEAKENDEDEDEDELFEDVKE

SEQ ID NO: 15349 - protein, 326 aa, Zea mays subsp. mays
  misc_feature (1)..(326): Ceres Seq. ID no. 12344217
MADNAKAAAAHARPESSQEEEEDWKEAEGDVAEVDRAATNGAGEGGVPTDRPIRVYADGIYDLFHFGHAKSLEQAKKSFPNTYLLVGCCNDELTHKFKGRTVMTEDERYESLRHCKWVDEVIPDAPWVVTEEFLDKHNIDFVAHDSLPYADASGAGNDVYEHVKKLGKFKETQRTDGISTSDIIMRIVKDYNEYVMRNLARGYTRKDLGVSYVKEKRLRVNMGLKNLRDRVKQHQEKVGEKWSTVAKLQEEWVENADRWVAGFLEKFEEGCHSMGTAIKERIQERLIKAQSSDFGSLLQYDSYDSDEAKENDEDEDEDELFEDVKE

SEQ ID NO: 15350 - protein, 224 aa, Zea mays subsp. mays
  misc_feature (1)..(224): Ceres Seq. ID no. 12344218
MTEDERYESLRHCKWVDEVIPDAPWVVTEEFLDKHNIDFVAHDSLPYADASGAGNDVYEHVKKLGKFKETQRTDGISTSDIIMRIVKDYNEYVMRNLARGYTRKDLGVSYVKEKRLRVNMGLKNLRDRVKQHQEKVGEKWSTVAKLQEEWVENADRWVAGFLEKFEEGCHSMGTAIKERIQERLIKAQSSDFGSLLQYDSYDSDEAKENDEDEDEDELFEDVKE

SEQ ID NO: 15351 - DNA, 1414 bp, Zea mays subsp. mays
  misc_feature (1)..(1414): Ceres Seq. ID no. 12344282
tccacccgtccgatctaaccgtcccaccgcccaagccactcgagggccgatcttgctgctgctgctccgccctccctcctcctcggcaccgtctcgtccgaccatggctgctgactcgggcaagatgccgtccgccggcggcaaggcgccgccacccaagtcatccgactccggcacaggcatcatgaagaggctcccgcgcctggcgctcgtcttcctggtggcgctgctgtaccggcagctgcaggccccggctcccagggtccccggaacgcccggcgggcccccggtgacgtcgccgaggatcaggctcaaggacggaaggcacctcgcgtaccacgagtcgggcgtccccagggagcaggccaggtacaggatcgtcttcatgcacgggttcgactcgtgcaggtacgacgtgctccgggtgtcgccggagctggcccaggagctggggcgtctacctgctctccttcgaccgccccgggtacggggagagcgacccgcacccggctaggaccgacaagagcgtcgccctggacatcgagcagctcgccgacgccatggagctcggcgacaggttctacctcgccggcttctccatgggcggggagatcatgtggagctgcctcaagtacatcccgcacaggctttccggcgtagccatcctgggccccgtgggcaacttctggtggtccggcctccccgcgaacgtgtccctggaggcctggaacgtgcaggtggcgcaggacaagtgggccgtgggcgtggcgcaccacgctccctggctcacctactggtggaacacccagaagctgttcccggcctccagcgtcatcgccttcaacccggccatcatgtcccgggcggacatggcactcatccccagcttcgcctacaggacccacgcctaccaggcgcggcagcagggggagcacgagagcctgcaccgcgacatgatggtcggcttcggcaagtggagctggagcccgctggacctggaggacccgttccccgacggcgacggcaaggtgcacctgtggcacggcgccgaggacctcatcgtgcccgtggggctgtcgaggcacatcagcaagagcctgccgtgggtgcgctaccacgagctgcccacggccggccacctcttccccatggccgacgggatggccgacgtcatcgtcaagtcgctgctgctgggcgacgagtgacgattgtcatctcccgtcgtcgtcgtcgagtcgatctccctctccctcttcctccccccctgctttttcctgtgcgcgcgagtctttttgagtctttgtagtgcagtgagagaatgctacggacatgtctttgcgatcgttactcctattcctatataatatatgatatatagataaagaaatattaacgggatgtttagtttctaaag

SEQ ID NO: 15352 - protein, 214 aa, Zea mays subsp. mays
  misc_feature (1)..(214): Ceres Seq. ID no. 12344283
MELGDRFYLAGFSMGGEIMWSCLKYIPHRLSGVAILGPVGNFWWSGLPANVSLEAWNVQVAQDKWAVGVAHHAPWLTYWWNTQKLFPASSVIAFNPAIMSRADMALIPSFAYRTHAYQARQQGEHESLHRDMMVGFGKWSWSPLDLEDPFPDGDGKVHLWHGAEDLIVPVGLSRHISKSLPWVRYHELPTAGHLFPMADGMADVIVKSLLLGDE

SEQ ID NO: 15353 - protein, 201 aa, Zea mays subsp. mays
  misc_feature (1)..(201): Ceres Seq. ID no. 12344284
MGGEIMWSCLKYIPHRLSGVAILGPVGNFWWSGLPANVSLEAWNVQVAQDKWAVGVAHHAPWLTYWWNTQKLFPASSVIAFNPAIMSRADMALIPSFAYRTHAYQARQQGEHESLHRDMMVGFGKWSWSPLDLEDPFPDGDGKVHLWHGAEDLIVPVGLSRHISKSLPWVRYHELPTAGHLFPMADGMADVIVKSLLLGDE

SEQ ID NO: 15354 - protein, 196 aa, Zea mays subsp. mays
  misc_feature (1)..(196): Ceres Seq. ID no. 12344285
MWSCLKYIPHRLSGVAILGPVGNFWWSGLPANVSLEAWNVQVAQDKWAVGVAHHAPWLTYWWNTQKLFPASSVIAFNPAIMSRADMALIPSFAYRTHAYQARQQGEHESLHRDMMVGFGKWSWSPLDLEDPFPDGDGKVHLWHGAEDLIVPVGLSRHISKSLPWVRYHELPTAGHLFPMADGMADVIVKSLLLGDE

SEQ ID NO: 15355 - DNA, 2066 bp, Zea mays subsp. mays
  misc_feature (1)..(2066): Ceres Seq. ID no. 12344306
ctccatggccgttaagcccacatccatcatcgccgcctccgccacagcacgccatggagaccagcaagtcgccaccgctctactcggcgccgcgggagccctctgccacgacagtgatgctgtgtccgtgcctggcgttcttcctcctcgctctcatcatcacctccatcgcactcactgtccactttcgcctctactgccacactcctcttgcccacctcatctccccgcaccgctgcccccaccacatctgacctccgtctccgcccgcatcgctggcgtggtcctgcttcccagaggcgtgttccctctgctgccgccgagatcccgatacgttatgggttcccctctcctcgcgacgccggcatgcggggcttacgacgtgctctggggcttcgcagccggaaggttcctctccatcttggctgcctccgacgaagatcagggctcgtcggagcaggaggcggctgcgagcaacccggagggcgtggaccgcgtctgcgcggccatcgcggacgtcgtcgcctccggtgccgacgcgaacctggaggcggcgctatccgcgctctcgccaccgctctgcgaagcggtcgtgctcgctgtgctccaccgcttcaagcacgcacataggccgtcctaccgcttcttcaggtgggccacagtgtccggtggctttacccacaccaccattacctactgcaagatgttacacatcttaggcaagacgaggcagttcgagtcgatggttgcgatgatccaagagatggggaaggcgggggccctgtccatggacgccttcaaggttgccattaagtccttcgctgcggctggtgagatcaagaatgcggttggcgtgttcgagttgatgagaaagaacggtttcgatgatggggtggaatcattcaattgcttgctcgttgctttagccaaagagggattaggtagggaggccaggcaggtgtttgacaaaatgcatggccagtactctccagacctgcgctcttatactgcactgatgctggcatggtgcaatgcgaggaatctggttgaggcggggcgggtttggaatgagatgctggagaagggaatggatccagatgttgttgtccacaacacaatgattgaggggttgctgcgtgggcagaggcgacccgaggccgtgaagatgtttgagctgatgaaggcaaaggggcctccaccaaatgtgtggacttacacaatgttaatccgtgaccattgtaagcaggggaagatggacatggcaatggagtgctttgaggagatgcaggaggctaaatgccaaccagatgttgctacctatacatgtttgctggttggatatgggaatgcaaaacaaatggacagagtgactgctgtgttggaggagatgacacagaagggatgcccccctgatgctcggacttacaatgcactgattaagttgctaacaaataggaatatgccagacgatgctgcaaggatatacaagaagatgatcaagaagggacttgagcccacaatccatacttacaacatgatgatgaagtcatatttcgttggtgatagcaactatgcaatgggttgtgcagtgtgggaggagatgcaccagaggggtatttgccctgatgtgaactcttacacagtgttcattaatcggcatatacgacatggcaggccagaggaggcatataaatatatcgaggagatgattaataaagggatgaaagctccacaaatagactataataagtttgctgcagatttctcaaaggctgggaaaccagatatattgtttgagttggctcagaaagtgaaatttgctgggaaattagatgtatctaatgtgttctatcagtgggcagatagaatgaagagtcgggtgaagagaaatgtaccttcagattggtaatagaatgttctaagattactatgctgccagcaggaatgtggcatgctgtgatggtgcttgaaatttgattactaaggagaactgctacctttttcagtttgccattgtacggtaatgtgccattgaagaattgcgtgcgttaatatccgttggtctg

SEQ ID NO: 15356 - protein, 635 aa, Zea mays subsp. mays
  misc_feature (1)..(635): Ceres Seq. ID no. 12344307
SMAVKPTSIIAASATARHGDQQVATALLGAAGALCHDSDAVSVPGVLPPRSHHHLHRTHCPLSPLLPHSSCPPHLPAPLPPPHLTSVSARIAGVVLLPRGVFPLLPPRSRYVMGSPLLATPACGAYDVLWGFAAGRFLSILAASDEDQGSSEQEAAASNPEGVDRVCAAIADVVASGADANLEAALSALSPPLCEAVVLAVLHRFKHAHRPSYRFFRWATVSGGFTHTTITYCKMLHILGKTRQFESMVAMIQEMGKAGALSMDAFKVAIKSFAAAGEIKNAVGVFELMRKNGFDDGVESFNCLLVALAKEGLGREARQVFDKMHGQYSPDLRSYTALMLAWCNARNLVEAGRVWNEMLEKGMDPDVVVHNTMIEGLLRGQRRPEAVKMFELMKAKGPPPNVWTYTMLIRDHCKQGKMDMAMECFEEMQEAKCQPDVATYTCLLVGYGNAKQMDRVTAVLEEMTQKGCPPDARTYNALIKLLTNRNMPDDAARIYKKMIKKGLEPTIHTYNMMMKSYFVGDSNYAMGCAVWEEMHQRGICPDVNSYTVFINRHIRHGRPEEAYKYIEEMINKGMKAPQIDYNKFAADFSKAGKPDILFELAQKVKFAGKLDVSNVFYQWADRMKSRVKRNVPSDW

SEQ ID NO: 15357 - protein, 634 aa, Zea mays subsp. mays
  misc_feature (1)..(634): Ceres Seq. ID no. 12344308
MAVKPTSIIAASATARHGDQQVATALLGAAGALCHDSDAVSVPGVLPPRSHHHLHRTHCPLSPLLPHSSCPPHLPAPLPPPHLTSVSARIAGVVLLPRGVFPLLPPRSRYVMGSPLLATPACGAYDVLWGFAAGRFLSILAASDEDQGSSEQEAAASNPEGVDRVCAAIADVVASGADANLEAALSALSPPLCEAVVLAVLHRFKHAHRPSYRFFRWATVSGGFTHTTITYCKMLHILGKTRQFESMVAMIQEMGKAGALSMDAFKVAIKSFAAAGEIKNAVGVFELMRKNGFDDGVESFNCLLVALAKEGLGREARQVFDKMHGQYSPDLRSYTALMLAWCNARNLVEAGRVWNEMLEKGMDPDVVVHNTMIEGLLRGQRRPEAVKMFELMKAKGPPPNVWTYTMLIRDHCKQGKMDMAMECFEEMQEAKCQPDVATYTCLLVGYGNAKQMDRVTAVLEEMTQKGCPPDARTYNALIKLLTNRNMPDDAARIYKKMIKKGLEPTIHTYNMMMKSYFVGDSNYAMGCAVWEEMHQRGICPDVNSYTVFINRHIRHGRPEEAYKYIEEMINKGMKAPQIDYNKFAADFSKAGKPDILFELAQKVKFAGKLDVSNVFYQWADRMKSRVKRNVPSDW

SEQ ID NO: 15358 - protein, 523 aa, Zea mays subsp. mays
  misc_feature (1)..(523): Ceres Seq. ID no. 12344309
MGSPLLATPACGAYDVLWGFAAGRFLSILAASDEDQGSSEQEAAASNPEGVDRVCAAIADVVASGADANLEAALSALSPPLCEAVVLAVLHRFKHAHRPSYRFFRWATVSGGFTHTTITYCKMLHILGKTRQFESMVAMIQEMGKAGALSMDAFKVAIKSFAAAGEIKNAVGVFELMRKNGFDDGVESFNCLLVALAKEGLGREARQVFDKMHGQYSPDLRSYTALMLAWCNARNLVEAGRVWNEMLEKGMDPDVVVHNTMIEGLLRGQRRPEAVKMFELMKAKGPPPNVWTYTMLIRDHCKQGKMDMAMECFEEMQEAKCQPDVATYTCLLVGYGNAKQMDRVTAVLEEMTQKGCPPDARTYNALIKLLTNRNMPDDAARIYKKMIKKGLEPTIHTYNMMMKSYFVGDSNYAMGCAVWEEMHQRGICPDVNSYTVFINRHIRHGRPEEAYKYIEEMINKGMKAPQIDYNKFAADFSKAGKPDILFELAQKVKFAGKLDVSNVFYQWADRMKSRVKRNVPSDW

SEQ ID NO: 15359 - DNA, 1407 bp, Zea mays subsp. mays
  misc_feature (1)..(1407): Ceres Seq. ID no. 12344326
aataaaccccgcgccgccgctgccgcctcctgtcccggtcggatcctccgcgccgctcgcgccgccctcatcttcccagccccaacgcgacgcaccacaagggccctcgccatgtcgaagaaagtaggacgagcgaagaaagcagcgggcggcggcgagctgtcccgcttcctggagtcgcatctccagaccattagcgacaccttccagatgatggcggagtcggctccgggggccttggaccggacggagtggtctgaggtcgttaagctcggcgaccaggtctccaggcaggccaccgtcgctggaatgctctggagcggtgacttgcctgatgtagagaccctcaaagagaacatcgttgcttatttcaacatcctacagggatttcttttggtttgccacggaagcatggtcggtgctgggcctactctacacaagtccatctttgggtctgcaaaagacgtggttgactctagcttctcattgttcaagcatgctgtctctgcttatgaatctcgcagccctgaccgcaacacaactataccccaggtcacaggaactgtatgggaagcttgtgctgctctcaagaaggtgcctgcatcaaactgcattgccataggacgagccatgaccaggataggtgtgtgtctgaaagatgttctccgagaaatgaatgagctccctattggtgattctggtgttagtactgctgagaagtcttccaatggtgttgtcgacacaacgagttgttctgatagagatgagaggtctgatcttgatttagatgatgatgacgacgacgacgacgacgagttcactgaagaagaggttgctgttgccaagttggttattaacgtggtatctgattccttggttgtagtgaaagaggcaattcgtttcattactggtttgctcaggagctctggtaacaaagacaaagatgaggacaaagttgagccaatggagaaattgctgagccactgcaaggagatcgcggaccaggtcaatgatcttggggcttctgtatacccaccacaagactcgtctgagatggagctcgctataaaaagactgtacaatggcatcaacgggatgcgcaaggaaatagggaacctcggtggcgcacctgagagcacctttgccgcccttgaaggattcgaaaagtgccttggatctctgcgggccaggttagctgatgatgtggtgaacgagatggaaggtcttaatattagccattagcacgtactgttcagatttttccatagcagtgttatgccagtatatcttctggttttgcacgatggaaggagcttctgtggtttcagtaaatgaggcgtccggtctctgtactgatggcgttgttgcgggtcatcgattgtaaaggaagtgggcctggattgctgc

SEQ ID NO: 15360 - protein, 413 aa, Zea mays subsp. mays
  misc_feature (1)..(413): Ceres Seq. ID no. 12344327
NKPRAAAAASCPGRILRAARAALIFPAPTRRTTRALAMSKKVGRAKKAAGGGELSRFLESHLQTISDTFQMMAESAPGALDRTEWSEVVKLGDQVSRQATVAGMLWSGDLPDVETLKENIVAYFNILQGFLLVCHGSMVGAGPTLHKSIFGSAKDVVDSSFSLFKHAVSAYESRSPDRNTTIPQVTGTVWEACAALKKVPASNCIAIGRAMTRIGVCLKDVLREMNELPIGDSGVSTAEKSSNGVVDTTSCSDRDERSDLDLDDDDDDDDDEFTEEEVAVAKLVINVVSDSLVVVKEAIRFITGLLRSSGNKDKDEDKVEPMEKLLSHCKEIADQVNDLGASVYPPQDSSEMELAIKRLYNGINGMRKEIGNLGGAPESTFAALEGFEKCLGSLRARLADDVVNEMEGLNISH

SEQ ID NO: 15361 - protein, 376 aa, Zea mays subsp. mays
  misc_feature (1)..(376): Ceres Seq. ID no. 12344328
MSKKVGRAKKAAGGGELSRFLESHLQTISDTFQMMAESAPGALDRTEWSEVVKLGDQVSRQATVAGMLWSGDLPDVETLKENIVAYFNILQGFLLVCHGSMVGAGPTLHKSIFGSAKDVVDSSFSLFKHAVSAYESRSPDRNTTIPQVTGTVWEACAALKKVPASNCIAIGRAMTRIGVCLKDVLREMNELPIGDSGVSTAEKSSNGVVDTTSCSDRDERSDLDLDDDDDDDDDEFTEEEVAVAKLVINVVSDSLVVVKEAIRFITGLLRSSGNKDKDEDKVEPMEKLLSHCKEIADQVNDLGASVYPPQDSSEMELAIKRLYNGINGMRKEIGNLGGAPESTFAALEGFEKCLGSLRARLADDVVNEMEGLNISH

SEQ ID NO: 15362 - protein, 343 aa, Zea mays subsp. mays
  misc_feature (1)..(343): Ceres Seq. ID no. 12344329
MMAESAPGALDRTEWSEVVKLGDQVSRQATVAGMLWSGDLPDVETLKENIVAYFNILQGFLLVCHGSMVGAGPTLHKSIFGSAKDVVDSSFSLFKHAVSAYESRSPDRNTTIPQVTGTVWEACAALKKVPASNCIAIGRAMTRIGVCLKDVLREMNELPIGDSGVSTAEKSSNGVVDTTSCSDRDERSDLDLDDDDDDDDDEFTEEEVAVAKLVINVVSDSLVVVKEAIRFITGLLRSSGNKDKDEDKVEPMEKLLSHCKEIADQVNDLGASVYPPQDSSEMELAIKRLYNGINGMRKEIGNLGGAPESTFAALEGFEKCLGSLRARLADDVVNEMEGLNISH

SEQ ID NO: 15363 - DNA, 1568 bp, Zea mays subsp. mays
  misc_feature (1)..(1568): Ceres Seq. ID no. 12344338
gaccacatctcttctgaatcttagtcataaccttcttgacgggtctattccttcaaacatcaactctttaggtgaactagagattcttgatctttctcacaatgccctgtctggtgctgtgccatcttcactatggagcctgcaaagcttgacactgctggacctttcctataataatctgtctgggtctattcctagattcggtccaagtcaaactgtagatattgtcggaaatcctggtcttgtaattgtaaatggtacaggaaacaataatgacactcctactactggtaagaaaaagaggcactatttggtcgtcatcatcttcaccattgccggtacacttgttggattatgtgtgcttgttcttattattgtgatgtcattatcaaagagagtgtatcgtgttgaagatgaaggattaccagctggagaatctgtaccacaaataatcagtggtcgcctcataactatgaacagcatccacacctctgcagttgacttcgtgaaggcaatagaagcagtctccaaccatcagaacatctttttgaagaccagattctgcacctactacaaggctgtaatgcctaatggctcaacatactctgtaaaaaaacttaattctagtgacaagattttccaaattgggagccaggagaagttttctcatgaaattgaggttctagggaaactgaccaattcgaatgtcatggttccattggcctacatcttgactgcagattgtgcctacctaatctatgagcatgcatacaatggcactgtatctgatttgctacatggtggaaaatcagaagttatagactggccgtcacgatatagcgttgctttgggggtggcccaagggctgacatttcttcatgggtgcactcagccggttttgcttcttgatctgtcaacaaggaccatccacttgaagtcaaaaaatgagcctcagattggagatatcgagctttacaagattattgacccttccaggagtacgggaagcttttcaaccattgctggaacagttggttatattccaccagaatatgcatacactatgaggctgacgatggctggcaacgtctatagctttggagtcattttgcttgagctgctgacaggaaaaaaatcggtcagtaatggcactgagttagccaagtgggctctcagtctttcaggcaggcctgatgaaagggagcagatccttgacaccagggtctcaggaacttcaattgctgttcatagccagatgctgtcggtcctgaacattgctctctcttgtgttgcattctctccggacgcacggccaaagatgcgcaacgtcttgaggatgctcttcaatgcaaagtgaatcagaagcagcctgcaatcatatcatagataaattttgggtgcagttccagcctcgcgtagtttatggatgtcagtgataagtatacaggctgcccttatatagttccataggagatagaaccctagcttatagtagatcattatatgttttattaattgtgtaattaggtatctgctttgcagtgagtggctatatggtttataagctg

SEQ ID NO: 15364 - protein, 451 aa, Zea mays subsp. mays
  misc_feature (1)..(451): Ceres Seq. ID no. 12344339
TTSLLNLSHNLLDGSIPSNINSLGELEILDLSHNALSGAVPSSLWSLQSLTLLDLSYNNLSGSIPRFGPSQTVDIVGNPGLVIVNGTGNNNDTPTTGKKKRHYLVVIIFTIAGTLVGLCVLVLIIVMSLSKRVYRVEDEGLPAGESVPQIISGRLITMNSIHTSAVDFVKAIEAVSNHQNIFLKTRFCTYYKAVMPNGSTYSVKKLNSSDKIFQIGSQEKFSHEIEVLGKLTNSNVMVPLAYILTADCAYLIYEHAYNGTVSDLLHGGKSEVIDWPSRYSVALGVAQGLTFLHGCTQPVLLLDLSTRTIHLKSKNEPQIGDIELYKIIDPSRSTGSFSTIAGTVGYIPPEYAYTMRLTMAGNVYSFGVILLELLTGKKSVSNGTELAKWALSLSGRPDEREQILDTRVSGTSIAVHSQMLSVLNIALSCVAFSPDARPKMRNVLRMLFNAK

SEQ ID NO: 15365 - protein, 325 aa, Zea mays subsp. mays
  misc_feature (1)..(325): Ceres Seq. ID no. 12344340
MSLSKRVYRVEDEGLPAGESVPQIISGRLITMNSIHTSAVDFVKAIEAVSNHQNIFLKTRFCTYYKAVMPNGSTYSVKKLNSSDKIFQIGSQEKFSHEIEVLGKLTNSNVMVPLAYILTADCAYLIYEHAYNGTVSDLLHGGKSEVIDWPSRYSVALGVAQGLTFLHGCTQPVLLLDLSTRTIHLKSKNEPQIGDIELYKIIDPSRSTGSFSTIAGTVGYIPPEYAYTMRLTMAGNVYSFGVILLELLTGKKSVSNGTELAKWALSLSGRPDEREQILDTRVSGTSIAVHSQMLSVLNIALSCVAFSPDARPKMRNVLRMLFNAK

SEQ ID NO: 15366 - protein, 294 aa, Zea mays subsp. mays; identical to SEQ ID NO: 14972
  misc_feature (1)..(294): Ceres Seq. ID no. 12344341

SEQ ID NO: 15367 - DNA, 1254 bp, Zea mays subsp. mays
  misc_feature (1)..(1254): Ceres Seq. ID no. 12344350
atccattctctgccaagctttccgactcccagccaacacgaaatggcggcggcggccgcacccgtgtccctggtcttcttgtgcacgcgtgggcagcagcagctggtacttgtcgacgccaccaagccccctctgcccctgcgcagccgcgctttctccgtccgcgccgctcagcagcagcagcagcaccgcgcccgcccacggccccctcgcaggaacaagccccccggacccgcgcgccgtccgcccagggtccctctggaccaagatgaatacgacggcggctatgatgaccgggaggaggggaggttcgctgggggcacccgggccgccgccatgcccaagccaccggccggcttcgtgctggatgaccagggcaggtgcatcgccgcagcatccaagcgcatcgtcaccatcatcgacgacaccaacaaccgccccttggagtgcataatcaggagagtattccggagctcgcaggaccacgactgcatgcttctctgcccagttgacatgcctgtgcaggtcctcaagagcacaaatttcagtggctgggtagctgtcgatgacgaccaactcaagcaaatcattccatctgttgcctatgcccttgccagagtacatatgcactttgtagaaagcggattctgttatacagcaaggggtggcttctgctttcctgaagaggccattcaagagtttcatgattccggtgaaggtgtgccttttgaaggtgtagagatttgctgcttcaatttggatggtgcacactatatgatttatacaccagttgatcctcttctttttgtcgcaatcaaggataaggatggtgtgctacgcatcgctgaggatgatctgatggaagaccctgcagttctggatgcggtagatgaagagacagaatttacagctctagtggaggaggaggaggcccttcttgaaacggtacttggtgaaaggtgatggatgccagggagtacttgtacaggaagaggaagagagactcgtctgattgtagtagaatagaatggaatggaatggaatggagtgcatttgcaactgtaagcagctgcaacctgcaatacttggagtggagtgatggacaacgcagttgataagcaactgctgctgctaatctttgtctagtgtaggatagatagctcaatgggacgatcaaagctatttatgatgtgctcatgtgtttgaattaattaataaaattaccccaatctgaatagaatacctggtggatgg

SEQ ID NO: 15368 - protein, 320 aa, Zea mays subsp. mays
  misc_feature (1)..(320): Ceres Seq. ID no. 12344351
IHSLPSFPTPSQHEMAAAAAPVSLVFLCTRGQQQLVLVDATKPPLPLRSRAFSVRAAQQQQQHRARPRPPRRNKPPGPARRPPRVPLDQDEYDGGYDDREEGRFAGGTRAAAMPKPPAGFVLDDQGRCIAAASKRIVTIIDDTNNRPLECIIRRVFRSSQDHDCMLLCPVDMPVQVLKSTNFSGWVAVDDDQLKQIIPSVAYALARVHMHFVESGFCYTARGGFCFPEEAIQEFHDSGEGVPFEGVEICCFNLDGAHYMIYTPVDPLLFVAIKDKDGVLRIAEDDLMEDPAVLDAVDEETEFTALVEEEEALLETVLGER

SEQ ID NO: 15369 - protein, 306 aa, Zea mays subsp. mays
  misc_feature (1)..(306): Ceres Seq. ID no. 12344352
MAAAAAPVSLVFLCTRGQQQLVLVDATKPPLPLRSRAFSVRAAQQQQQHRARPRPPRRNKPPGPARRPPRVPLDQDEYDGGYDDREEGRFAGGTRAAAMPKPPAGFVLDDQGRCIAAASKRIVTIIDDTNNRPLECIIRRVFRSSQDHDCMLLCPVDMPVQVLKSTNFSGWVAVDDDQLKQIIPSVAYALARVHMHFVESGFCYTARGGFCFPEEAIQEFHDSGEGVPFEGVEICCFNLDGAHYMIYTPVDPLLFVAIKDKDGVLRIAEDDLMEDPAVLDAVDEETEFTALVEEEEALLETVLGER

SEQ ID NO: 15370 - protein, 208 aa, Zea mays subsp. mays
  misc_feature (1)..(208): Ceres Seq. ID no. 12344353
MPKPPAGFVLDDQGRCIAAASKRIVTIIDDTNNRPLECIIRRVFRSSQDHDCMLLCPVDMPVQVLKSTNFSGWVAVDDDQLKQIIPSVAYALARVHMHFVESGFCYTARGGFCFPEEAIQEFHDSGEGVPFEGVEICCFNLDGAHYMIYTPVDPLLFVAIKDKDGVLRIAEDDLMEDPAVLDAVDEETEFTALVEEEEALLETVLGER

SEQ ID NO: 15371 - DNA, 1225 bp, Zea mays subsp. mays
  misc_feature (1)..(1225): Ceres Seq. ID no. 12344366
gtgacagaggcatagagcaaaagccaaactggcagccagcacagcagagcgccactcgactcatcctttcggttcccctcccccctccgcgttccacaaccctcgagaagcttccaccctcccctcctgcgacgccgccagagccgcggaaaccctacccaccccggccgctcacgcaccgggcgcccgcagccgccggtcgcgtgcctgccgccgacaccgcccaaagcgattggatctcgagatcgtcgaagccacgatggaggactgggattctgaagaattccagccagttgtgcctgttgtgaaagccgagccacttaaaaatcagtgggctgatgaagatgttgaagaagatgatgtaaaagaatcatgggaagaagaggaggaggaggagaaacctaagccagcgccagtggaaaaggtcgctgcaaaacctagcactaaggctcctgctaaaaagggaaaacaacaagcattgacaagtgctgaagaaccagatgagcctcctcttagtcccacttcacagaaaattcgccaacaaagacttgtggaagaagctgacttcaagtcgaccaccgagctttttgcaaagaagggcagtgagcaaaagtcactagatacttttattccaaagtccaagagtgactttgcggaatacgcggagcttattgcaaacaaactacgcccctatgagaaaagctttcactacatggctctgcttaagaatgtcatgagactttccatgacatcgttgaaaggtgcggacgccaaagatatatcttcttccgtgacggcaattgctaacgagaagatcaaggctgagaaggaggctgcagcaggcaaaaagaaacaaggagcgaaaaagaagcaactccacatcgagaaaggagacgacgacttcatccccggccggggtggtggctacgatgaccccgatgagtacgacttcatgtgatctggctgggagggatagtaggtttctgttatgtatacctttggcgggcagagaatatatcacaagagtttgcggcatactattgcatggaacatgcgttatctattcgagaatgatttttgactctgcaggataagaagagcacttgtgatctggatgcatgggtgttttcttatttatccttgaatctttgtgttatttttttttcaacattgcattttttgccaaatgtactatctggttactccgtgagtcatgaaagcaatt

SEQ ID NO: 15372 - protein, 232 aa, Zea mays subsp. mays
  misc_feature (1)..(232): Ceres Seq. ID no. 12344367
MEDWDSEEFQPVVPVVKAEPLKNQWADEDVEEDDVKESWEEEEEEEKPKPAPVEKVAAKPSTKAPAKKGKQQALTSAEEPDEPPLSPTSQKIRQQRLVEEADFKSTTELFAKKGSEQKSLDTFIPKSKSDFAEYAELIANKLRPYEKSFHYMALLKNVMRLSMTSLKGADAKDISSSVTAIANEKIKAEKEAAAGKKKQGAKKKQLHIEKGDDDFIPGRGGGYDDPDEYDFM

SEQ ID NO: 15373 - DNA, 1228 bp, Zea mays subsp. mays
  misc_feature (1)..(1228): Ceres Seq. ID no. 12344372
actgcttgcagttgcgccacgcccgccaccccgccaggccgccactagggtttttcggggcctcgccatcgtctccgaccccgtgtctccgaacaacatcgcgcggccgccgcctcctcccagtcgccatggtcaggctcaccgccgacctgatatggaagagcccgcacttcttcaacgccgtcaaggagcgcgagctcgacctccgaggcaacaagatcgccgtcatcgagaatgtcggagccaccgaggaccagtttgacacaattgacttgtcggataatgagattgtcaagcttgaaaacttcccatacttgaatcgtcttggcactctactagttaataataacagaatcacacgtatcaatcccaatcttggcgagtttttgccaaagctgcatacgctggtgctcacgaataatcgtctgacaaatcttgcggagattgatcccctggcatctcttccaaagctacaattccttagcttactggataatactgtaactaagcagccagattacaggctgtatgtgatccataaattgaagcatttgcgtttgctggatttcaagaaagtgaaacaacaggagagagttgcggcagcgaaaaagttccactcaaaggaagcagaggaagaggcaaagaaggtgcctgccaaaacgtttactcctggtctgcctgatgctcaggacatcacaatggagccacaaggtcctaaagtagttgctccaactcctgaacaaatcacagctatcaaggctgctattgcaaatgcccacactctcgaggaagctgcaaggctagaacaggtactaagcactggccaagttcctgctgaatttgcagtgcccaagcccgatgcaaacatggccgaagcttcagatggagccgagaagatggacacagatggtgagaaccaagagggcggtgaggctgatgggcagaaacaaggcgaaggaagcacaagcaccccaattcaggaggattgaaggcatggtgacatgggctgggtcatccattgtctgagttttaggtttgccagttttcgtgggggtgcaggaaagagctagagccttgttgccgcagaactccccctctatggatcgcatgtggatgctaacaacattcttgcttatttttgcagtagatggtactgagaacagaatcagatgttgtaaactatacatacagtcgtgcatgttgccgaatgaaccattgtttcggtcgt

SEQ ID NO: 15374 - protein, 328 aa, Zea mays subsp. mays
  misc_feature (1)..(328): Ceres Seq. ID no. 12344373
CLQLRHARHPARPPLGFFGASPSSPTPCLRTTSRGRRLLPVAMVRLTADLIWKSPHFFNAVKERELDLRGNKIAVIENVGATEDQFDTIDLSDNEIVKLENFPYLNRLGTLLVNNNRITRINPNLGEFLPKLHTLVLTNNRLTNLAEIDPLASLPKLQFLSLLDNTVTKQPDYRLYVIHKLKHLRLLDFKKVKQQERVAAAKKFHSKEAEEEAKKVPAKTFTPGLPDAQDITMEPQGPKVVAPTPEQITAIKAAIANAHTLEEAARLEQVLSTGQVPAEFAVPKPDANMAEASDGAEKMDTDGENQEGGEADGQKQGEGSTSTPIQED

SEQ ID NO: 15375 - protein, 286 aa, Zea mays subsp. mays
  misc_feature (1)..(286): Ceres Seq. ID no. 12344374
MVRLTADLIWKSPHFFNAVKERELDLRGNKIAVIENVGATEDQFDTIDLSDNEIVKLENFPYLNRLGTLLVNNNRITRINPNLGEFLPKLHTLVLTNNRLTNLAEIDPLASLPKLQFLSLLDNTVTKQPDYRLYVIHKLKHLRLLDFKKVKQQERVAAAKKFHSKEAEEEAKKVPAKTFTPGLPDAQDITMEPQGPKVVAPTPEQITAIKAAIANAHTLEEAARLEQVLSTGQVPAEFAVPKPDANMAEASDGAEKMDTDGENQEGGEADGQKQGEGSTSTPIQED

SEQ ID NO: 15376 - DNA, 572 bp, Zea mays subsp. mays
  misc_feature (1)..(572): Ceres Seq. ID no. 12344387
aacgcgcagtcttcttcagaattccctgatcacgttccaggcagctgagagcccgcgtactagccggacaggaggcgacagcgacaccgcgagacgtgccatcatgttggaaggaaaggcggtggtggaggacaccgacatgccggcgaagatgcaagcccaggcgatgtcggcggcgtccagggccctggatcgcttcgacgtcctcgactgccggagcatcgcgtcccacatcaagaaggagtttgacgcgatccatggccccggatggcaatgcgtggttggctccggcttcggctgctacatcacgcacagcaaggggagcttcatctacttccgcctggagtcgctcaggttcctcgtcttcaaaggggcggcagcatgatgacaagccccacggctaacatcgcgagttcacgaccaggcaaagcaggtggaggatgggtttttttttcaccggcctttgtggacggcttgcctcgctgtatacgatatcaccatggtaataccaaccagtagattgaaacgttgtgggagattatattggaaacaatggaatttcatcacttgtc

SEQ ID NO: 15377 - protein, 127 aa, Zea mays subsp. mays
  misc_feature (1)..(127): Ceres Seq. ID no. 12344388
TRSLLQNSLITFQAAESPRTSRTGGDSDTARRAIMLEGKAVVEDTDMPAKMQAQAMSAASRALDRFDVLDCRSIASHIKKEFDAIHGPGWQCVVGSGFGCYITHSKGSFIYFRLESLRFLVFKGAAA

SEQ ID NO: 15378 - protein, 93 aa, Zea mays subsp. mays
  misc_feature (1)..(93): Ceres Seq. ID no. 12344389
MLEGKAVVEDTDMPAKMQAQAMSAASRALDRFDVLDCRSIASHIKKEFDAIHGPGWQCVVGSGFGCYITHSKGSFIYFRLESLRFLVFKGAAA

SEQ ID NO: 15379 - protein, 83 aa, Zea mays subsp. mays
  misc_feature (1)..(83): Ceres Seq. ID no. 12344390
MAMRGWLRLRLLHHAQQGELHLLPPGVAQVPRLQRGGSMMTSPTANIASSRPGKAGGGWVFFSPAFVDGLPRCIRYHHGNTNQ

SEQ ID NO: 15380 - DNA, 1447 bp, Zea mays subsp. mays
  misc_feature (1)..(1447): Ceres Seq. ID no. 12344474
accaaaccaggaaactgcaaacctacccccggtcgccgactcgccggcctcgactctccggtctccgcccagactacaaatggagctctgcacctgcgtggcccgcagttctgcgcccccctcttctagctgccgcgcggtgccattcccgcgagttctctcccatcgcatttggagccgatcgggatactgcactgtctgctttaccccgtcaagccctgttgctaggagtcgattctctactctaatgacgactgcacacaacacagggaccccagatctagttgacttcaattgggatgatcttgggtttcaactgatcccaacggacttcatgtatttaatgagctgttcttcagatggggtgtttatgaatggtaaattagtgccatatgggtcaattgagctgaatccagcagccgccgtgctgaattatggtcagggattgcttgaaggtctacgagcacatagaaaagaggatggatcaatccttctttttcgtccacatgaaaatgcacggcggatggaaattggtgcagaccggttatgcatgcctgcaccaagtgtagagcaattcctagaagctgtgaaactaactgttctggcaaacaagcattgggtgcctccttttggtaaaggttctttgtatatcagaccgcagctaattggaagtggggctatccttggtgtggcacctgccccacagtacacattcattgtgtttgtttgcccagttgggcattatttcaagggtggtctagctccaatcagcttgttaactgaggaagaataccaccgtgctgcacctggtggaactggtgaaataaaaactattgggaactatgcttcggttgtcagtgctcagagaagagccaaggaaaaaggccattctgatgttttatacttagatccagtccataataagtttgttgaggaagtttcttcttgtaatatattcatggtgaagggcaatattatttctactccactgttaacggggacaattcttcctggaatcacaaggagaagtgtgattgaaatttctcagaatcttggatttcaggttgaggagcgtcttatcacaatagatgaactgcttggggctgatgaagtcttttgtacaggaacagctgttgtattgtcacctgttgggagcatcacttaccgtggaagaagagtggagtatgggaagaaccaggaggccggagtcgtgtcccaacaactctatgccgcactcacagctatccagaaaggtctcacggaggacagcatgggatggacgttgcagctaacttagcagctttttttcacatgatcgagctctacaactcttatttccgttttctcgataagtctcacttctatcaacttgttcttctgttgaaacagagtactttaaaaggaatccccaataatgactttccctgtatattgctgatatgttggc

SEQ ID NO: 15381 - protein, 431 aa, Zea mays subsp. mays
  misc_feature (1)..(431): Ceres Seq. ID no. 12344475
PNQETANLPPVADSPASTLRSPPRLQMELCTCVARSSAPPSSSCRAVPFPRVLSHRIWSRSGYCTVCFTPSSPVARSRFSTLMTTAHNTGTPDLVDFNWDDLGFQLIPTDFMYLMSCSSDGVFMNGKLVPYGSIELNPAAAVLNYGQGLLEGLRAHRKEDGSILLFRPHENARRMEIGADRLCMPAPSVEQFLEAVKLTVLANKHWVPPFGKGSLYIRPQLIGSGAILGVAPAPQYTFIVFVCPVGHYFKGGLAPISLLTEEEYHRAAPGGTGEIKTIGNYASVVSAQRRAKEKGHSDVLYLDPVHNKFVEEVSSCNIFMVKGNIISTPLLTGTILPGITRRSVIEISQNLGFQVEERLITIDELLGADEVFCTGTAVVLSPVGSITYRGRRVEYGKNQEAGVVSQQLYAALTAIQKGLTEDSMGWTLQLT

SEQ ID NO: 15382 - protein, 405 aa, Zea mays subsp. mays
  misc_feature (1)..(405): Ceres Seq. ID no. 12344476
MELCTCVARSSAPPSSSCRAVPFPRVLSHRIWSRSGYCTVCFTPSSPVARSRFSTLMTTAHNTGTPDLVDFNWDDLGFQLIPTDFMYLMSCSSDGVFMNGKLVPYGSIELNPAAAVLNYGQGLLEGLRAHRKEDGSILLFRPHENARRMEIGADRLCMPAPSVEQFLEAVKLTVLANKHWVPPFGKGSLYIRPQLIGSGAILGVAPAPQYTFIVFVCPVGHYFKGGLAPISLLTEEEYHRAAPGGTGEIKTIGNYASVVSAQRRAKEKGHSDVLYLDPVHNKFVEEVSSCNIFMVKGNIISTPLLTGTILPGITRRSVIEISQNLGFQVEERLITIDELLGADEVFCTGTAVVLSPVGSITYRGRRVEYGKNQEAGVVSQQLYAALTAIQKGLTEDSMGWTLQLT

SEQ ID NO: 15383 - protein, 349 aa, Zea mays subsp. mays
  misc_feature (1)..(349): Ceres Seq. ID no. 12344477
MTTAHNTGTPDLVDFNWDDLGFQLIPTDFMYLMSCSSDGVFMNGKLVPYGSIELNPAAAVLNYGQGLLEGLRAHRKEDGSILLFRPHENARRMEIGADRLCMPAPSVEQFLEAVKLTVLANKHWVPPFGKGSLYIRPQLIGSGAILGVAPAPQYTFIVFVCPVGHYFKGGLAPISLLTEEEYHRAAPGGTGEIKTIGNYASVVSAQRRAKEKGHSDVLYLDPVHNKFVEEVSSCNIFMVKGNIISTPLLTGTILPGITRRSVIEISQNLGFQVEERLITIDELLGADEVFCTGTAVVLSPVGSITYRGRRVEYGKNQEAGVVSQQLYAALTAIQKGLTEDSMGWTLQLT

SEQ ID NO: 15384 - DNA, 1638 bp, Zea mays subsp. mays
  misc_feature (1)..(1638): Ceres Seq. ID no. 12344499
tgatttctctctgcctgcccagaatcccgccagttgccttccacttccgccagactccgcgttcctcctgagcagctgccgccggcccgagagtggagggggaggcaggcgcccaggcggccaatggggacggggagcgcgacggcggcgcaggccctggcgctcgccgccttgctcctcgcctgctctggcgtcgcagtcgtcacggcgcaggacatcgagcggatccaaggaagtgccggcgacgtgctggaggacgaccccgtcgggcggctcaaggtgtacgtgtacgagctgccccccaagtacaacaagaacgtggtggcgaaggactcgcggtgcctgagccacatgttcgccacggagatcttcatgcaccgcttcctgctggcgagcgcggtccggaccctgaacccggacgaggcggactggttctacaccccggtctacaccacgtgcgacctcacgccgtggggccatcccctcaccgtcaagtccccgcggatgatgaggagcgccatccagtacgtctccaagcgctggccctactggaacaggacggagggggccgaccatttcttcgtcactccacatgactttggagcgtgcttctacttccaggaagagaaggccatccagcgaggtgtcctcccggtgctgcgccgcgctacgctggtccagacgtttgggcagaagaaccatgtctgcctcagggaaggctccatcaccatcccgccatacgctccgcctcacaagataagagctcatatcgtcccgccagagacgcctcggtcgatcttcgtctacttccgcggcctgttctacgacaccgcgaacgaccccgagggtggttactatgcaaggggcgcccgtgcgtcggtgtgggagaacttcaagaacaacgcgctgttcgacatctcgacggagcacccgccgacgtactacgaggacatgcagcgcgccatcttctgcctgtgcccgctgggctgggcgccgtggagcccgcgcctggtggaggccgtggtgttcggctgcatccccgtcatcatcgccgacgacatcgtgctgcccttcgcggacgccatcccgtgggaggagatcgccgtgttcgtgcccgaggacgacgtcctgaggctggacaccatcctcacgtccatccccatggacgagatcctccgcaagcagaggctgctggccaacccgtccatgaagcaggcgatgctgttcccgcagcccgcggagccgagggacgccttccaccaggtcctcaacgggctggcgcgcaagctgccccacgccaaggacgtcttcctcaagcccggccagaaggtgctcaactggacagagggcaccccaggatgacctcaagccgtggtaggccgtggctgctgctcttttggaaacgacacaaccagatcgatgatggtgaggctgatgaatgaacgacacaacaaccattggttaaatgtaaagctcttaatcctcttgctcctccaacctttcttctttttgaggcaatgtgcatgtcttgcctgtatatattacatgacaatcagggtggccggccggggcaagacaagttgaggtgccaacatactaatagtattagtattatattctagcatgtatgttttgacg

SEQ ID NO: 15385 - protein, 412 aa, Zea mays subsp. mays
  misc_feature (1)..(412): Ceres Seq. ID no. 12344500
MGTGSATAAQALALAALLLACSGVAVVTAQDIERIQGSAGDVLEDDPVGRLKVYVYELPPKYNKNVVAKDSRCLSHMFATEIFMHRFLLASAVRTLNPDEADWFYTPVYTTCDLTPWGHPLTVKSPRMMRSAIQYVSKRWPYWNRTEGADHFFVTPHDFGACFYFQEEKAIQRGVLPVLRRATLVQTFGQKNHVCLREGSITIPPYAPPHKIRAHIVPPETPRSIFVYFRGLFYDTANDPEGGYYARGARASVWENFKNNALFDISTEHPPTYYEDMQRAIFCLCPLGWAPWSPRLVEAVVFGCIPVIIADDIVLPFADAIPWEEIAVFVPEDDVLRLDTILTSIPMDEILRKQRLLANPSMKQAMLFPQPAEPRDAFHQVLNGLARKLPHAKDVFLKPGQKVLNWTEGTPG

SEQ ID NO: 15386 - protein, 336 aa, Zea mays subsp. mays
  misc_feature (1)..(336): Ceres Seq. ID no. 12344501
MFATEIFMHRFLLASAVRTLNPDEADWFYTPVYTTCDLTPWGHPLTVKSPRMMRSAIQYVSKRWPYWNRTEGADHFFVTPHDFGACFYFQEEKAIQRGVLPVLRRATLVQTFGQKNHVCLREGSITIPPYAPPHKIRAHIVPPETPRSIFVYFRGLFYDTANDPEGGYYARGARASVWENFKNNALFDISTEHPPTYYEDMQRAIFCLCPLGWAPWSPRLVEAVVFGCIPVIIADDIVLPFADAIPWEEIAVFVPEDDVLRLDTILTSIPMDEILRKQRLLANPSMKQAMLFPQPAEPRDAFHQVLNGLARKLPHAKDVFLKPGQKVLNWTEGTPG

SEQ ID NO: 15387 - protein, 329 aa, Zea mays subsp. mays
  misc_feature (1)..(329): Ceres Seq. ID no. 12344502
MHRFLLASAVRTLNPDEADWFYTPVYTTCDLTPWGHPLTVKSPRMMRSAIQYVSKRWPYWNRTEGADHFFVTPHDFGACFYFQEEKAIQRGVLPVLRRATLVQTFGQKNHVCLREGSITIPPYAPPHKIRAHIVPPETPRSIFVYFRGLFYDTANDPEGGYYARGARASVWENFKNNALFDISTEHPPTYYEDMQRAIFCLCPLGWAPWSPRLVEAVVFGCIPVIIADDIVLPFADAIPWEEIAVFVPEDDVLRLDTILTSIPMDEILRKQRLLANPSMKQAMLFPQPAEPRDAFHQVLNGLARKLPHAKDVFLKPGQKVLNWTEGTPG

SEQ ID NO: 15388 - DNA, 1217 bp, Zea mays subsp. mays
  misc_feature (1)..(1217): Ceres Seq. ID no. 12344527
ctcttcagtctcctcgcgccaacgaccacatcccaccgaacaccgatcaaggtaaacctgttcgctgctccgccagaagccgaggtcgagctgttcacggcagcgagcatgcaccacgatcccaaccccttcgacgagggcgccgacgagaaccccttctcgaatggaggcggaggagcgcgtggcggaggcgtcaagccgcagtacgggttccggccgacggagcccgcggggttcggcggcgggcaggggcgatgcgaccaccgacatccctctggacaccatgaacgattcgaaggggcaaggcgaaggagctgtctcagtgggagtcagatctcaggaggagggagtcggatatcaggaggagggaggaagctctcaagagcgctggggtgcccatggaggacaagaactggccgcctttcttcccaatcatccaccatgatattgccaatgagataccagcaaacgctcagaagttgcagtatcttgcgtttgcgagctggcttggtattgtgctttgcctcttttggaattttattgctgtcatagtctgttggatcagagggggagattctaaactatttttcctggctaccatctatggtatgcttggcatccctttgtcctacttgatgtggtatagacctctgtaccgagcaatgagaactgacagtgctttcagctttggatggtttttcctttgttacctgctccatattggtttttgcatatttgctgccattgctcctgcagttgtattccgtggaaaatcattaacgggtatactggcagcgatcgacaccttttctgatcatgcaatagttgggatcttttactttgtcggatttgccttgttttgcttggagacacttgtgagcatatgggttcttcagaaagtatacatgtacttcagagggcacaagtaggctatggaagcacttgcaatagtcaaccaactaccatctcatctgattgccatgtggttttgtatgttaggacaacgtatatttttccgtttgcattgtggagggtaagtacgactatatgtataattttcggtttgcatggtggagggtaaatacgactatattgtagcgtctctctcgactgatctgtttttaaccccaattctttgctcatatacaaattgtgctttgtatgcacttttgtttgctaccaaggctgcacattgtatgcacttctgttggtgcctt

SEQ ID NO: 15389 - protein, 183 aa, Zea mays subsp. mays
  misc_feature (1)..(183): Ceres Seq. ID no. 12344528
LFSLLAPTTTSHRTPIKVNLFAAPPEAEVELFTAASMHHDPNPFDEGADENPFSNGGGGARGGGVKPQYGFRPTEPAGFGGGQGRCDHRHPSGHHERFEGARRRSCLSGSQISGGGSRISGGGRKLSRALGCPWRTRTGRLSSQSSTMILPMRYQQTLRSCSILRLRAGLVLCFASFGILLLS

SEQ ID NO: 15390 - protein, 176 aa, Zea mays subsp. mays
  misc_feature (1)..(176): Ceres Seq. ID no. 12344529
MEDKNWPPFFPIIHHDIANEIPANAQKLQYLAFASWLGIVLCLFWNFIAVIVCWIRGGDSKLFFLATIYGMLGIPLSYLMWYRPLYRAMRTDSAFSFGWFFLCYLLHIGFCIFAAIAPAVVFRGKSLTGILAAIDTFSDHAIVGIFYFVGFALFCLETLVSIWVLQKVYMYFRGHK

SEQ ID NO: 15391 - protein, 147 aa, Zea mays subsp. mays
  misc_feature (1)..(147): Ceres Seq. ID no. 12344530
MHHDPNPFDEGADENPFSNGGGGARGGGVKPQYGFRPTEPAGFGGGQGRCDHRHPSGHHERFEGARRRSCLSGSQISGGGSRISGGGRKLSRALGCPWRTRTGRLSSQSSTMILPMRYQQTLRSCSILRLRAGLVLCFASFGILLLS

SEQ ID NO: 15392 - DNA, 1561 bp, Zea mays subsp. mays
  misc_feature (1)..(1561): Ceres Seq. ID no. 12344531
acaacaagcagaagcagaagcagaagctagcagctagtagacgagcgacgagtagctagctagctagctatctagagagctcatcatatcgctgctcgctctcatccaccattatagagaagagcagatcgagctgcagctggcagaggccgagttgttgctagctagctcctgcttgctaaatttgcatcgtatccgatccattccatgaagaagtcgtcgatgatggcgcccatgacgatcatggcgagagttgccgctgtgctcgtcctctcgtcggctgccatggcttccgccgcaggagcagctgggctggacatgaatttctacggcagcacgtgcccgcgcgtggaggccatcgtcaaggaggagatggtggcgatcctcaaggcggcgccgacgctggccggcccgctgctccgcctccatttccacgactgcttcgtcaggggctgcgacgcctccgtgctcctggactcgactcccaccagcacggcggagaaggacgccaccccgaacctcaccctccggggcttcggctccgtgcagcgcgtcaaggaccggctggaggaggcgtgcccgggcaccgtctcctgctccgacgtcctggcgctcatggcgcgcgacgccgtcgtgctggccaacggcccctcctggcccgtcgcgctgggccgccgcgacggccgcgtctccctcgccaacgagaccaaccagctgcccccgcccaccgccaacttcacccgcctcgtcagcatgttcgccgccaagggcctctccgtcagggacctcgtcgtgctctccggcggccacaccctcggcaccgcgcactgcaacctcttcagcgaccgcctctacaacttcaccggcgccaacagcctcgccgacgtcgacccggcgctcgacgccgcctacctcgcccgcctcaggtccaggtgccggagcctcgccgacaacaccacgctcaacgagatggaccccggcagcttcctcagcttcgactccagctactacagcctggtggccaggcgccgggggctcttccactccgacgccgcgctgctcaccgacccggccaccagggcgtacgtccagcgccaggccacggggctcttcaccgccgagttcttccgcgacttcgccgactccatggtcaagatgtccaccatcgacgtgctcaccggccagcagcagggcgagatcagaaagaaatgcaacctcgtcaactgacaaataatacgtacattaattgctgctggttttgacgatgcctttcacttacgttcatccacttaattcatgcatccatgttggttgggttcattcaattattatattcgttgcttacctttacttttgcttggttaatcttaattaaatcgtgtgagttttcttttcttttcttgagtatatatatgtatgtacgtagagcgtgatgagtgtcttttcaagtttattgtttttttttactttttcctctcgtgcatatggttcaaatccatgatgatgatgtaatgcatgtaattaataatgacaatcaagtcaataaacacacatgcaattt

SEQ ID NO: 15393 - protein, 339 aa, Zea mays subsp. mays
  misc_feature (1)..(339): Ceres Seq. ID no. 12344532
MKKSSMMAPMTIMARVAAVLVLSSAAMASAAGAAGLDMNFYGSTCPRVEAIVKEEMVAILKAAPTLAGPLLRLHFHDCFVRGCDASVLLDSTPTSTAEKDATPNLTLRGFGSVQRVKDRLEEACPGTVSCSDVLALMARDAVVLANGPSWPVALGRRDGRVSLANETNQLPPPTANFTRLVSMFAAKGLSVRDLVVLSGGHTLGTAHCNLFSDRLYNFTGANSLADVDPALDAAYLARLRSRCRSLADNTTLNEMDPGSFLSFDSSYYSLVARRRGLFHSDAALLTDPATRAYVQRQATGLFTAEFFRDFADSMVKMSTIDVLTGQQQGEIRKKCNLVN

SEQ ID NO: 15394 - protein, 334 aa, Zea mays subsp. mays
  misc_feature (1)..(334): Ceres Seq. ID no. 12344533
MMAPMTIMARVAAVLVLSSAAMASAAGAAGLDMNFYGSTCPRVEAIVKEEMVAILKAAPTLAGPLLRLHFHDCFVRGCDASVLLDSTPTSTAEKDATPNLTLRGFGSVQRVKDRLEEACPGTVSCSDVLALMARDAVVLANGPSWPVALGRRDGRVSLANETNQLPPPTANFTRLVSMFAAKGLSVRDLVVLSGGHTLGTAHCNLFSDRLYNFTGANSLADVDPALDAAYLARLRSRCRSLADNTTLNEMDPGSFLSFDSSYYSLVARRRGLFHSDAALLTDPATRAYVQRQATGLFTAEFFRDFADSMVKMSTIDVLTGQQQGEIRKKCNLVN

SEQ ID NO: 15395 - protein, 333 aa, Zea mays subsp. mays
  misc_feature (1)..(333): Ceres Seq. ID no. 12344534
MAPMTIMARVAAVLVLSSAAMASAAGAAGLDMNFYGSTCPRVEAIVKEEMVAILKAAPTLAGPLLRLHFHDCFVRGCDASVLLDSTPTSTAEKDATPNLTLRGFGSVQRVKDRLEEACPGTVSCSDVLALMARDAVVLANGPSWPVALGRRDGRVSLANETNQLPPPTANFTRLVSMFAAKGLSVRDLVVLSGGHTLGTAHCNLFSDRLYNFTGANSLADVDPALDAAYLARLRSRCRSLADNTTLNEMDPGSFLSFDSSYYSLVARRRGLFHSDAALLTDPATRAYVQRQATGLFTAEFFRDFADSMVKMSTIDVLTGQQQGEIRKKCNLVN

SEQ ID NO: 15396 - DNA, 1405 bp, Zea mays subsp. mays
  misc_feature (1)..(1405): Ceres Seq. ID no. 12344535
gccgccgccgccattcccatggttttccatgctcggttgcgagccagcaattccatttcagtgtcctccctcgtctcgagaccttgccccatccagcccaacgctccgtccatcaactgaatagcttggcggtgtaaccctttcgtgtgcgatgagctcctcgccgttgatcaccgccgcggcgtcggctgccgtggtggcgctggctgtcgccaaccgcgtgctctacaagctcgcgcttgtgcctctcaaggcgtaccctttcttcctcgcccagctcaccaccttcgggtacgttgccgtgtacttctcgatgctctacacgaggtaccgcactgggttggtgactagagacatgctggcgctccccaagcaccggttcgtcgctatcggtttgctggaggcacttggagtctttgctggcatgtctgctggagctatgctaccagggcctgcgattcctatactgtcccagtcattcttggtctggcagcttatcttctctgccctgcttttagggaggacatattcggccagacaagtcattggttgcttcctagtagtttctggtgtgattcttgctgttgcaagtggagcggatgatggccagcttctttcagatgtaaagttaatttggccagcactcatgatcgcttcatcagcatttcacgctggtgcatctattctgaaggaagctgttttcattgatggtgcaaaacgtcttaaggggaagcggccagacatatttgtggtcaattcatttggatctggatttcaggctgtttttgtctttcttcttcttccattcctttctaatttgaggggaattaagtttgctgagcttcctgcttatttaaatggtggtgctgagtgcttcttaaatgtcgcagaaagtccaatcgactgcggaggagctccattcctgcctttgctgtttataatggtgaatatggcattcaatgtctctctcctcaatttggtgaagatgtcatctgccattgtggcttcacttacagcaacatcagcagtgccaatatcgatctatattctttcacttcctttgccctacatccctcatggcacggaattaagcacgtctttcatcattggtgccgtgatattgctgatgggcctgattctgtataaccttcctcaatcgtcactgaaacaattgaaggctgattgaaggtaaagtgacacactgccacatgccttgtaacagagagtttactgattgatattttatggtgaaattgatttccacactgaactatacgaagcatgtgactcattcagattttgtattatgaatgttatcgaaattaagattttctaaaacgcaagcaacatgtgtatgtagtagggacatttttaatacttaccctatagtctggaagtgtgatct

SEQ ID NO: 15397 - protein, 344 aa, Zea mays subsp. mays
  misc_feature (1)..(344): Ceres Seq. ID no. 12344536
MSSSPLITAAASAAVVALAVANRVLYKLALVPLKAYPFFLAQLTTFGYVAVYFSMLYTRYRTGLVTRDMLALPKHRFVAIGLLEALGVFAGMSAGAMLPGPAIPILSQSFLVWQLIFSALLLGRTYSARQVIGCFLVVSGVILAVASGADDGQLLSDVKLIWPALMIASSAFHAGASILKEAVFIDGAKRLKGKRPDIFVVNSFGSGFQAVFVFLLLPFLSNLRGIKFAELPAYLNGGAECFLNVAESPIDCGGAPFLPLLFIMVNMAFNVSLLNLVKMSSAIVASLTATSAVPISIYILSLPLPYIPHGTELSTSFIIGAVILLMGLILYNLPQSSLKQLKAD

SEQ ID NO: 15398 - protein, 290 aa, Zea mays subsp. mays
  misc_feature (1)..(290): Ceres Seq. ID no. 12344537
MLYTRYRTGLVTRDMLALPKHRFVAIGLLEALGVFAGMSAGAMLPGPAIPILSQSFLVWQLIFSALLLGRTYSARQVIGCFLVVSGVILAVASGADDGQLLSDVKLIWPALMIASSAFHAGASILKEAVFIDGAKRLKGKRPDIFVVNSFGSGFQAVFVFLLLPFLSNLRGIKFAELPAYLNGGAECFLNVAESPIDCGGAPFLPLLFIMVNMAFNVSLLNLVKMSSAIVASLTATSAVPISIYILSLPLPYIPHGTELSTSFIIGAVILLMGLILYNLPQSSLKQLKAD

SEQ ID NO: 15399 - protein, 276 aa, Zea mays subsp. mays
  misc_feature (1)..(276): Ceres Seq. ID no. 12344538
MLALPKHRFVAIGLLEALGVFAGMSAGAMLPGPAIPILSQSFLVWQLIFSALLLGRTYSARQVIGCFLVVSGVILAVASGADDGQLLSDVKLIWPALMIASSAFHAGASILKEAVFIDGAKRLKGKRPDIFVVNSFGSGFQAVFVFLLLPFLSNLRGIKFAELPAYLNGGAECFLNVAESPIDCGGAPFLPLLFIMVNMAFNVSLLNLVKMSSAIVASLTATSAVPISIYILSLPLPYIPHGTELSTSFIIGAVILLMGLILYNLPQSSLKQLKAD

SEQ ID NO: 15400 - DNA, 1265 bp, Zea mays subsp. mays
  misc_feature (1)..(1265): Ceres Seq. ID no. 12344563
gtgttacgatcccaaatcttcactcctgatgaaatctagaatccaatgagcaatctcgactgacgcctgcttcaccagattatggcgacaccggcgggcctccttctcgcctcgccgccggtgatatcaggtgtcgcggcggtggcggcgtgcgccgcgatggcagtattctacgtcgctgtcctctatgccccgacggtcatcctccggttcccacccccaacctcactccacaccttcttccaccgtcgcttcgcctgtgccgccgtcgcatccgccgcctccgtccttgccactgcgtccctcctccgaatctggagcctcagcgacttcgctgatatgtttgctgtgttcggcattaggaaggatcacttgattcaggccgtggctattccacttctcctgacatccctagtgtatgctgggtcattcgtcgctagagtgtggctcctagtgagctcgtggggcggtggcgatgaggtggagataggctgcgcacagaggcttgcacaatggatccaagctgctgttgcggatgttatggtttggcggaactatgtagtggcaccatttactgaggagctggttttcagggcatgcatgatacctcttctgctctgtgggggattcaaaatgtctacaattatatttctgagtccaatcttcttcagtctagcgcacttgaaccattttttcgaactacaccagcagggatgtaactttatgagagcgctattgattgtaggtgtccagttaggctacactgtcatttttgggtggtatgcaacattcttgttaatccgaacagggaatctgttatgtccaattactgctcacgtcttctgtaatatgatgggtttacctgttttctcgtcaccacgaacaaaaggagcggcattggtagcgtttctggctggttcaatagccttcttttggctgcttttccctgcaacaagtcctgaactgtacaacagcagttttgatcgctgcagttgctggcatggcttttgcaattggaaataacatagaactagattggaaagcaatgggtcctaacttgaagctactaacaattgaaacctccaggccctagctgacactgctgacggattttctatttgcagaaactccatatgaatgtcttaaaacgttttgtagaaatgtgtcccttgttttagcttaagactcgagcttaaactagcaaaagattgtattttgccacttgttaaatacgtgctgatcatgaaatcgctgtcaatcccttc

SEQ ID NO: 15401 - protein, 313 aa, Zea mays subsp. mays
  misc_feature (1)..(313): Ceres Seq. ID no. 12344564
MATPAGLLLASPPVISGVAAVAACAAMAVFYVAVLYAPTVILRFPPPTSLHTFFHRRFACAAVASAASVLATASLLRIWSLSDFADMFAVFGIRKDHLIQAVAIPLLLTSLVYAGSFVARVWLLVSSWGGGDEVEIGCAQRLAQWIQAAVADVMVWRNYVVAPFTEELVFRACMIPLLLCGGFKMSTIIFLSPIFFSLAHLNHFFELHQQGCNFMRALLIVGVQLGYTVIFGWYATFLLIRTGNLLCPITAHVFCNMMGLPVFSSPRTKGAALVAFLAGSIAFFWLLFPATSPELYNSSFDRCSCWHGFCNWK

SEQ ID NO: 15402 - protein, 287 aa, Zea mays subsp. mays
  misc_feature (1)..(287): Ceres Seq. ID no. 12344565
MAVFYVAVLYAPTVILRFPPPTSLHTFFHRRFACAAVASAASVLATASLLRIWSLSDFADMFAVFGIRKDHLIQAVAIPLLLTSLVYAGSFVARVWLLVSSWGGGDEVEIGCAQRLAQWIQAAVADVMVWRNYVVAPFTEELVFRACMIPLLLCGGFKMSTIIFLSPIFFSLAHLNHFFELHQQGCNFMRALLIVGVQLGYTVIFGWYATFLLIRTGNLLCPITAHVFCNMMGLPVFSSPRTKGAALVAFLAGSIAFFWLLFPATSPELYNSSFDRCSCWHGFCNWK

SEQ ID NO: 15403 - protein, 227 aa, Zea mays subsp. mays
  misc_feature (1)..(227): Ceres Seq. ID no. 12344566
MFAVFGIRKDHLIQAVAIPLLLTSLVYAGSFVARVWLLVSSWGGGDEVEIGCAQRLAQWIQAAVADVMVWRNYVVAPFTEELVFRACMIPLLLCGGFKMSTIIFLSPIFFSLAHLNHFFELHQQGCNFMRALLIVGVQLGYTVIFGWYATFLLIRTGNLLCPITAHVFCNMMGLPVFSSPRTKGAALVAFLAGSIAFFWLLFPATSPELYNSSFDRCSCWHGFCNWK

SEQ ID NO: 15404 - DNA, 1877 bp, Zea mays subsp. mays
  misc_feature (1)..(1877): Ceres Seq. ID no. 12344575
ctctcctctcgctcgcgtccgcacaaatcccgtgctcccccgtctgaaaaccctccccacctccggcggcggcggcggcgctggcgaccgggtgtcttctccggcgagtctcccccctagtaacaagaaaatatggatgtacctgttgatgaccctgtggagaacctcactggaagtcctagtacccttggcaatgaggaagaagccactacttatgctaatgtgcaagatcagtccaaggaagaaccagaaaagctttacgaggaacccaaagacccaatgcaagacgagttgggtaaccaagggcatgtgagcatgaacaatgaagatgtgggaggccagaacaaagtggaccaagctacccccacagagcacggcgaggaagctggggtgaagcagcatgatgctacagttcctgatgacaagaaatggcctgggtggcctggagagagtgtgttccgtatactggttcctaccacaaaggtgggtgccgtcattgggcgcaaaggggatttcatcaagaaaatgtgtgaggaatcaagagcccgcatcaaggttcttgagggaccaccagctgtgccagaaagagctgtaatgatttcagcaaaggatgaaccagacacagagctacctccagctgttgatgggttgcttagagttcatagaaggataacagatggtttagaaactgaaactgatcagcctcaacgagctactgtcaacactgggccgacaaggctactggttccagcttcccaagctggcagcctaattgggaagcaaggagcaactattaagtcaatacaggatgcttcaaagtgcgttctccggattgttgagaatgttccacctgttgcattaaacgatgacagagttgtagagatacagggtgaacctcatgattctcacaaagccgtagaactgattgcaagtcatttaagaaaatttcttgttgaccgcagtgtcctccctttgtttgaaacacagattaaagcacacaatatgcacagagagcaacctatgcctcctccacaggcatggggcccccctcctccgtcaccctggggtcatccaccaccaaaccttcctcctggtggcccaggttatgttgggaacccacactacatgcctccacggccacaagagaactattatcctcctcccgatgtgccccctgtagaaaagcagccacactatggaatttcttcatatggacgagatgcacctccaagtgctcccccagggaatcaaaaccaagcacatgggtcatctcaggtgacacacagcatgcaagttcctctttcctatgctgatgctgtgataggggcagctggtgccagtatcagctacatccgcaggcatagtggagcaactataagtattcaagaaggcgctcctggcgagatgacagtggagattacaggaagtgcttcacaagtacagactgctcaacagctaatcaagaatttcatggctgaagcttctccccagggaccaccagccccaggtccacacggtcaaccagtggacacgggttacggctcgtacccaccttacgtggagcatcctatgggtctcctccaggtgctccagctccagcgcctcacaacggtggaagttatggtgctgcaccatactcgtcgagctatggatactaatccggagcaagagcttgcctcagacttagggaaggagggttatcgttatggttttgtttgctagtctattcatctgttgagaactcaagattgttattgttaggacgtgtgaactttggtgttctaggctgctttcagacgccagtgtcgatatactctctttgctttattgttgcggaatttatcgtaatatgttattttaatgttcaagaaaaaacc

SEQ ID NO: 15405 - protein, 529 aa, Zea mays subsp. mays
  misc_feature (1)..(529): Ceres Seq. ID no. 12344576
MDVPVDDPVENLTGSPSTLGNEEEATTYANVQDQSKEEPEKLYEEPKDPMQDELGNQGHVSMNNEDVGGQNKVDQATPTEHGEEAGVKQHDATVPDDKKWPGWPGESVFRILVPTTKVGAVIGRKGDFIKKMCEESRARIKVLEGPPAVPERAVMISAKDEPDTELPPAVDGLLRVHRRITDGLETETDQPQRATVNTGPTRLLVPASQAGSLIGKQGATIKSIQDASKCVLRIVENVPPVALNDDRVVEIQGEPHDSHKAVELIASHLRKFLVDRSVLPLFETQIKAHNMHREQPMPPPQAWGPPPPSPWGHPPPNLPPGGPGYVGNPHYMPPRPQENYYPPPDVPPVEKQPHYGISSYGRDAPPSAPPGNQNQAHGSSQVTHSMQVPLSYADAVIGAAGASISYIRRHSGATISIQEGAPGEMTVEITGSASQVQTAQQLIKNFMAEASPQGPPAPGPHGQPVDTGYGSYPPYVEHPMGLLQVLQLQRLTTVEVMVLHHTRRAMDTNPEQELASDLGKEGYRYGFVC

SEQ ID NO: 15406 - protein, 480 aa, Zea mays subsp. mays
  misc_feature (1)..(480): Ceres Seq. ID no. 12344577
MQDELGNQGHVSMNNEDVGGQNKVDQATPTEHGEEAGVKQHDATVPDDKKWPGWPGESVFRILVPTTKVGAVIGRKGDFIKKMCEESRARIKVLEGPPAVPERAVMISAKDEPDTELPPAVDGLLRVHRRITDGLETETDQPQRATVNTGPTRLLVPASQAGSLIGKQGATIKSIQDASKCVLRIVENVPPVALNDDRVVEIQGEPHDSHKAVELIASHLRKFLVDRSVLPLFETQIKAHNMHREQPMPPPQAWGPPPPSPWGHPPPNLPPGGPGYVGNPHYMPPRPQENYYPPPDVPPVEKQPHYGISSYGRDAPPSAPPGNQNQAHGSSQVTHSMQVPLSYADAVIGAAGASISYIRRHSGATISIQEGAPGEMTVEITGSASQVQTAQQLIKNFMAEASPQGPPAPGPHGQPVDTGYGSYPPYVEHPMGLLQVLQLQRLTTVEVMVLHHTRRAMDTNPEQELASDLGKEGYRYGFVC

SEQ ID NO: 15407 - protein, 468 aa, Zea mays subsp. mays
  misc_feature (1)..(468): Ceres Seq. ID no. 12344578
MNNEDVGGQNKVDQATPTEHGEEAGVKQHDATVPDDKKWPGWPGESVFRILVPTTKVGAVIGRKGDFIKKMCEESRARIKVLEGPPAVPERAVMISAKDEPDTELPPAVDGLLRVHRRITDGLETETDQPQRATVNTGPTRLLVPASQAGSLIGKQGATIKSIQDASKCVLRIVENVPPVALNDDRVVEIQGEPHDSHKAVELIASHLRKFLVDRSVLPLFETQIKAHNMHREQPMPPPQAWGPPPPSPWGHPPPNLPPGGPGYVGNPHYMPPRPQENYYPPPDVPPVEKQPHYGISSYGRDAPPSAPPGNQNQAHGSSQVTHSMQVPLSYADAVIGAAGASISYIRRHSGATISIQEGAPGEMTVEITGSASQVQTAQQLIKNFMAEASPQGPPAPGPHGQPVDTGYGSYPPYVEHPMGLLQVLQLQRLTTVEVMVLHHTRRAMDTNPEQELASDLGKEGYRYGFVC

SEQ ID NO: 15408 - DNA, 1299 bp, Zea mays subsp. mays
  misc_feature (1)..(1299): Ceres Seq. ID no. 12344579
attcttccactccacctcgcccgtggcccgtacccgtcgtcgtcgtccacacagccacaagctgctgctgctgctgcgcgtgcttcctcttcagttcagctgaggtagcggcgcctcacccatcccccccgctacatacacatatctccttcttcgaagaactcggtcctttgggagcgagcaggagcaggagcaggacaggaccaggaagatcattatcaggagaagctaggcggggatatggcgaacgctggcggcggggcggccggggaaggggagtggctcaaggtcgcccagctcagggccctcgtccaggaggaccaccgcgccaaggaggtggacaacctgacgctgcgtcggttcctgcgcgcgcgcggccacaacgtggacaaggcggccgccatgctgctcaagttcctcaggtggcgggcggaggcggcgcccggcggcggcaccgtgcgggaggagcaggtgcgcggggagctggagcaggacaagatctacatgggcggcgtcgacaggaccggccgccccatcatcgtcggcttgctcgccaagcactactccgccaaccgcgacatggcggagttcaagagttttgtggtctacttcttcgacaagatctgtgccaggatccccagagggcaggagaagttcctcgccatcatggatctcaagggctggggctacgcaaactgcgacgtccgggcctacatcgcggccattgagatcatgcagaactactacccggagcggctgggcaaggcgctgatgatcaacgtgccctacatcttcctcaaggtgtggaagacgatgatctaccccttcatcgacgccaacaccagggacaagttcgtgttcgtggatgacaagagcctgcgggagacgctgcggcgggagatcgacgagagccagctcccggagttccttggcgggaagatgcctctcgtctccctcaaggactacgcccagcagcctcagcccgtttgcgagtgagtctgtcgtagcgatggtggccggccggtgacgtgagcgacccaaagccgaaagctgattcgatctagactaagctaatacagcctacaagagggaggaagagaggccctacccgtggaattaagtcattagtttgtggtccaattcaataagaaagtaaatgtggtgtgtgaagatggtatggcattatcagtctttaatcccatattatacatttagatagaagaaaatcaacttatatgtggtagtgttccctactttttatatgagataaataaagggatacggagaatgctgcacgcc

SEQ ID NO: 15409 - protein, 251 aa, Zea mays subsp. mays
  misc_feature (1)..(251): Ceres Seq. ID no. 12344580
MANAGGGAAGEGEWLKVAQLRALVQEDHRAKEVDNLTLRRFLRARGHNVDKAAAMLLKFLRWRAEAAPGGGTVREEQVRGELEQDKIYMGGVDRTGRPIIVGLLAKHYSANRDMAEFKSFVVYFFDKICARIPRGQEKFLAIMDLKGWGYANCDVRAYIAAIEIMQNYYPERLGKALMINVPYIFLKVWKTMIYPFIDANTRDKFVFVDDKSLRETLRREIDESQLPEFLGGKMPLVSLKDYAQQPQPVCE

SEQ ID NO: 15410 - protein, 241 aa, Zea mays subsp. mays
  misc_feature (1)..(241): Ceres Seq. ID no. 12344581
SSTPPRPWPVPVVVVHTATSCCCCCACFLFSSAEVAAPHPSPPLHTHISFFEELGPLGASRSRSRTGPGRSLSGEARRGYGERWRRGGRGRGVAQGRPAQGPRPGGPPRQGGGQPDAASVPARARPQRGQGGRHAAQVPQVAGGGGARRRHRAGGAGARGAGAGQDLHGRRRQDRPPHHRRLARQALLRQPRHGGVQEFCGLLLRQDLCQDPQRAGEVPRHHGSQGLGLRKLRRPGLHRGH

SEQ ID NO: 15411 - protein, 197 aa, Zea mays subsp. mays
  misc_feature (1)..(197): Ceres Seq. ID no. 12344582
MLLKFLRWRAEAAPGGGTVREEQVRGELEQDKIYMGGVDRTGRPIIVGLLAKHYSANRDMAEFKSFVVYFFDKICARIPRGQEKFLAIMDLKGWGYANCDVRAYIAAIEIMQNYYPERLGKALMINVPYIFLKVWKTMIYPFIDANTRDKFVFVDDKSLRETLRREIDESQLPEFLGGKMPLVSLKDYAQQPQPVCE

SEQ ID NO: 15412 - DNA, 1323 bp, Zea mays subsp. mays
  misc_feature (1)..(1323): Ceres Seq. ID no. 12344625
gcatcggtccaccgagccacaccacaccaccgtctcgcggagaaactcctccaaaacccccaaaccctttcaatcggcggcaatggcggcgccggtggccgacgatgcctcggcatccccaggctacgtcctccgctccacacttgaggggcaccgccgcgccgtatcaacagttaagttctccccggatggccgccttctcgcctccgcctccgccgacaagcttcttcgcgtgtggtcttcctccgatctcacccccgttgcggagctcgagggccatggagagggtgtctcagacctctctttctcccccgacggccgcctccttgcctccgcctccgatgatcgcaccgtccgcatctgggacctcgccgtcggcggaggggcccgcctcgtcaagacgctcacgggccacaccaactacgccttctgcgtctccttcagcccccatggcaacgtcctcgcctccgggtcctttgacgagacggtgcgcgtgtgggaggtcaggtccggtaagtgcctccgcgtgctgccggcccattctgaacccgtcaccgccgtggacttcgatcgcgagggcgacatgattgtgtcagggagctacgacgggctctgccgcgtctgggactcggccaccggtcactgcgtcaaaaccctcatcgacgacgagagcccaccagtgtcctttgccaagttctcccccaatggcaagtttatcctcgcggcaacgcttgacagcaccttgaggctttggaatttctcagctggaaagtttctgaagacatataccggacatgttaacacaaagtactgcatcccagcggcgttttctatcacgaatagcaagtatattgtcagtggctccgaggacaaatgtgtctacctatgggacctccagtcaagaagaatagtgcagaaactggaaggccatactgatactgtcattgcggtctcatgtcatcccaaggaaaacatgatcgcatccggggcgcttgacaatgacaagaccgtgaaagtttgggtccaaaaggaagaagattgatgagcggcctggttacgctcttatctacattggctgtcatgtggactgactaatggtaagcaaaatatgcagcttcccaagcaactaaagtttgctgcagtggagaatgtgatgctcctggcatgtgtaactgagtgagtgctatattgtctattcagcagctcggcgatgatattagtgaactcaagtgttctgtagagctattcctgggaggctgggatcatgtaagaaagactcaacacaacaatgcttgaacttcatttgttgtgtttctgattccc

SEQ ID NO: 15413 - protein, 346 aa, Zea mays subsp. mays
  misc_feature (1)..(346): Ceres Seq. ID no. 12344626
HRSTEPHHTTVSRRNSSKTPKPFQSAAMAAPVADDASASPGYVLRSTLEGHRRAVSTVKFSPDGRLLASASADKLLRVWSSSDLTPVAELEGHGEGVSDLSFSPDGRLLASASDDRTVRIWDLAVGGGARLVKTLTGHTNYAFCVSFSPHGNVLASGSFDETVRVWEVRSGKCLRVLPAHSEPVTAVDFDREGDMIVSGSYDGLCRVWDSATGHCVKTLIDDESPPVSFAKFSPNGKFILAATLDSTLRLWNFSAGKFLKTYTGHVNTKYCIPAAFSITNSKYIVSGSEDKCVYLWDLQSRRIVQKLEGHTDTVIAVSCHPKENMIASGALDNDKTVKVWVQKEED

SEQ ID NO: 15414 - protein, 319 aa, Zea mays subsp. mays
  misc_feature (1)..(319): Ceres Seq. ID no. 12344627
MAAPVADDASASPGYVLRSTLEGHRRAVSTVKFSPDGRLLASASADKLLRVWSSSDLTPVAELEGHGEGVSDLSFSPDGRLLASASDDRTVRIWDLAVGGGARLVKTLTGHTNYAFCVSFSPHGNVLASGSFDETVRVWEVRSGKCLRVLPAHSEPVTAVDFDREGDMIVSGSYDGLCRVWDSATGHCVKTLIDDESPPVSFAKFSPNGKFILAATLDSTLRLWNFSAGKFLKTYTGHVNTKYCIPAAFSITNSKYIVSGSEDKCVYLWDLQSRRIVQKLEGHTDTVIAVSCHPKENMIASGALDNDKTVKVWVQKEED

SEQ ID NO: 15415 - protein, 194 aa, Zea mays subsp. mays
  misc_feature (1)..(194): Ceres Seq. ID no. 12344628
IGPPSHTTPPSRGETPPKPPNPFNRRQWRRRWPTMPRHPQATSSAPHLRGTAAPYQQLSSPRMAAFSPPPPPTSFFACGLPPISPPLRSSRAMERVSQTSLSPPTAASLPPPPMIAPSASGTSPSAEGPASSRRSRATPTTPSASPSAPMATSSPPGPLTRRCACGRSGPVSASACCRPILNPSPPWTSIARAT

SEQ ID NO: 15416 - DNA, 1591 bp, Zea mays subsp. mays
  misc_feature (1)..(1591): Ceres Seq. ID no. 12344661
gtctacgatgccgttgcgcacctcttctctctcgccgccccgagacccccacgcttccctctccgcccccgaactgtggcgcctccccccgccgccgcagcgatgccactcgcggcagagcccgacgacgctcatgaggaaagggagaatcagcagctgctaattacgacgaagggagggcccgggcttgagggactggtggtggggagctactgccacgatgtgctaatccggggcgggcgcatagtgggggagacgctcggcggggctgcggccttcgtgtccaacgtgctcgacgccgcttcgccccagggcgccgcgctcaacgagacatccccctttgtcgttgtggccaaggtgggtcacgacttcatctacgcccgcgcgccggcgtccgcgcggcatccgcctctgctctgctcgtccccaaccacctccttccacgcccagttctcggagaccgccgcctcggcgcacgcccccgaccgggagctccggcgcatgcgcgcctgcgacccgatctaccccgccgaccttcccgaccgccgcttcgcctacggcctcgctgtcggcgtcgccggggaggtgctaccggagacgctcgagcagatgatcaggctctgccgcacggtgctcgtggacgcgcaggcgctgatccgggcgttcgacggtgacggcgccgtcggtcacgtggcgcttggcgataccccgtacgcgcggcttctgccccgagtggcgttcgttaaggcgtcgtcggaggaggcgccatacgttggggtggaaacgacgaggcggcagtgctgtgtgatcgtcacggaggggagggacggctgccggctgtactgggacggtggggaggcgcacgttgcgccgttccccgccgtacaggtggaccctactggcgccggagacagttttctcgcgggctttgcagccggattgctgtgggggttgtcggcgacggacgccgcgctgctggggaacttctttggcgccgctgctgtatcgcaggtcggcgtgcccaccttccatcccaagatgttgcaggcagttaaagaaatacttgaagagaagacaaggaaacgatctagtccatgtatgaacggcgctagttttaccttggagaagtcaaatatgcacaacgagttacacgcagctctccaagaagctgcggtgctgatgtctgaacagcagcaggctgatccggcgaacggcagtggcggtgatatttgctcggcataggtacctcacagtgaagctgaagcagtcgaacgccaaactgaagtttgtggcaaaataaccagcactgcagtcctgaactcctgatctcacattgagatctgtaaacatggtgccaacaagtggaggaagtttgtacatacgctctctccggcctttacactactattctgctggcaaggccgtcagggatcgtttctaccttgctatcgctgacgaggaaatgaagacaactgaacagttgagctgtggcgcttgcacgcaccatgttttctccgctgaacaagtgcgcatttttgagctttcgggcattcgtgctgttaactttttaccattctatatgtcgacttct

SEQ ID NO: 15417 - protein, 413 aa, Zea mays subsp. mays
  misc_feature (1)..(413): Ceres Seq. ID no. 12344662
VYDAVAHLFSLAAPRPPRFPLRPRTVAPPPAAAAMPLAAEPDDAHEERENQQLLITTKGGPGLEGLVVGSYCHDVLIRGGRIVGETLGGAAAFVSNVLDAASPQGAALNETSPFVVVAKVGHDFIYARAPASARHPPLLCSSPTTSFHAQFSETAASAHAPDRELRRMRACDPIYPADLPDRRFAYGLAVGVAGEVLPETLEQMIRLCRTVLVDAQALIRAFDGDGAVGHVALGDTPYARLLPRVAFVKASSEEAPYVGVETTRRQCCVIVTEGRDGCRLYWDGGEAHVAPFPAVQVDPTGAGDSFLAGFAAGLLWGLSATDAALLGNFFGAAAVSQVGVPTFHPKMLQAVKEILEEKTRKRSSPCMNGASFTLEKSNMHNELHAALQEAAVLMSEQQQADPANGSGGDICSA

SEQ ID NO: 15418 - protein, 379 aa, Zea mays subsp. mays
  misc_feature (1)..(379): Ceres Seq. ID no. 12344663
MPLAAEPDDAHEERENQQLLITTKGGPGLEGLVVGSYCHDVLIRGGRIVGETLGGAAAFVSNVLDAASPQGAALNETSPFVVVAKVGHDFIYARAPASARHPPLLCSSPTTSFHAQFSETAASAHAPDRELRRMRACDPIYPADLPDRRFAYGLAVGVAGEVLPETLEQMIRLCRTVLVDAQALIRAFDGDGAVGHVALGDTPYARLLPRVAFVKASSEEAPYVGVETTRRQCCVIVTEGRDGCRLYWDGGEAHVAPFPAVQVDPTGAGDSFLAGFAAGLLWGLSATDAALLGNFFGAAAVSQVGVPTFHPKMLQAVKEILEEKTRKRSSPCMNGASFTLEKSNMHNELHAALQEAAVLMSEQQQADPANGSGGDICSA

SEQ ID NO: 15419 - protein, 246 aa, Zea mays subsp. mays
  misc_feature (1)..(246): Ceres Seq. ID no. 12344664
MRACDPIYPADLPDRRFAYGLAVGVAGEVLPETLEQMIRLCRTVLVDAQALIRAFDGDGAVGHVALGDTPYARLLPRVAFVKASSEEAPYVGVETTRRQCCVIVTEGRDGCRLYWDGGEAHVAPFPAVQVDPTGAGDSFLAGFAAGLLWGLSATDAALLGNFFGAAAVSQVGVPTFHPKMLQAVKEILEEKTRKRSSPCMNGASFTLEKSNMHNELHAALQEAAVLMSEQQQADPANGSGGDICSA

SEQ ID NO: 15420 - DNA, 1615 bp, Zea mays subsp. mays
  misc_feature (1)..(1615): Ceres Seq. ID no. 12344675
aatccgaaccgcaaccctagatttcgcttcctctctgtcccctccgctgcgccgccataacataaatccgccgcccctctccctcagtaaacccctctcttcttcccgcggtctgctcgttcgatctgtgcagcagatctgaggtcccgggcgaccgtgaagcagcttcaatcgtcggcatggcgctcgtattgcatagtggggctggaaacaagaatgccttcaaagcacttattgctgcagaatacagtgggatcaaggttgagttgaccaaggattttgagatgggtgtctccaacaagacccctgagtttcttaagatgaacccccttgggaaggttcctgttctggagactcctgatggccctgtttttgagagtaatgctatcgcacgctatgttgctcgcttgaaggatgacaaccctctttttgggtcttcccgtattgaacaagcccacgttgagcaatggatggattttgccgcaacagaagttgatcctggtgttgcatggtacttgtatccaaggcttgggtacctcccttatgttagcacaactgaggaaacagctatttcttcattgaagaggtcgcttggtgctctgaacacacaccttgcttcaaacacataccttgttgggcatgctgttactctagctgacattgtaatgacatgcaacctctaccatggaattgcacggatcttgaccaagaccttcacgtctgatttccctcatgtcgagaggtatttctggaccatggttaaccagcctaacttcaagaaggtcattggtgaggtcaagcaggcagagtctgcacctcctattccgaaaaaggctgctccttctaaggagccaaaggcaaaggatgtcaagaaggaggctccaaaggaggcccccaagccaaaggtggttgaggcaccagcagaagaggaagcaccaaagccaaagccaaagaatcctcttgacttgctgccaccaagcaagatggtccttgatgactggaagaggctatactcaaacacaaagactaacttccgggaggttgccatcaaaggtttctgggacatgtacgacccagagggctactctttgtggttctgtgactacaagtacaatgatgagaacaccgtctcctttgtgaccctgaacaaggttggtggattcctgcagcggatggacctgtgccgcaagtacgcctttgggaagatgctcgtgataggctctgagccacccttcaagctgaagggcctttggctcttccgtggccaggatgttcccaagtttgtaatggacgaggtctatgacatcgagctctacgagtggaccaaggtggacatctctgatgaggcccagaaggagcgtgtcaatgcgatgattgaggaccaggagccctttgagggcgaggccttgcttgacgcgaaatgcttcaagtgagtgtgcttgcctggagacaactgtttagcccttgaatttgcctatggaagagtttgcccttttactagtgtcgatgttgatctggtataccttgctatgaactggttaaagtttgtgctggtttgggattttttgtgcatcttgtgatacctcaagtcttcatcatttaaatgtttagccgc

SEQ ID NO: 15421 - protein, 417 aa, Zea mays subsp. mays
  misc_feature (1)..(417): Ceres Seq. ID no. 12344676
MALVLHSGAGNKNAFKALIAAEYSGIKVELTKDFEMGVSNKTPEFLKMNPLGKVPVLETPDGPVFESNAIARYVARLKDDNPLFGSSRIEQAHVEQWMDFAATEVDPGVAWYLYPRLGYLPYVSTTEETAISSLKRSLGALNTHLASNTYLVGHAVTLADIVMTCNLYHGIARILTKTFTSDFPHVERYFWTMVNQPNFKKVIGEVKQAESAPPIPKKAAPSKEPKAKDVKKEAPKEAPKPKVVEAPAEEEAPKPKPKNPLDLLPPSKMVLDDWKRLYSNTKTNFREVAIKGFWDMYDPEGYSLWFCDYKYNDENTVSFVTLNKVGGFLQRMDLCRKYAFGKMLVIGSEPPFKLKGLWLFRGQDVPKFVMDEVYDIELYEWTKVDISDEAQKERVNAMIEDQEPFEGEALLDAKCFK

SEQ ID NO: 15422 - protein, 382 aa, Zea mays subsp. mays
  misc_feature (1)..(382): Ceres Seq. ID no. 12344677
MGVSNKTPEFLKMNPLGKVPVLETPDGPVFESNAIARYVARLKDDNPLFGSSRIEQAHVEQWMDFAATEVDPGVAWYLYPRLGYLPYVSTTEETAISSLKRSLGALNTHLASNTYLVGHAVTLADIVMTCNLYHGIARILTKTFTSDFPHVERYFWTMVNQPNFKKVIGEVKQAESAPPIPKKAAPSKEPKAKDVKKEAPKEAPKPKVVEAPAEEEAPKPKPKNPLDLLPPSKMVLDDWKRLYSNTKTNFREVAIKGFWDMYDPEGYSLWFCDYKYNDENTVSFVTLNKVGGFLQRMDLCRKYAFGKMLVIGSEPPFKLKGLWLFRGQDVPKFVMDEVYDIELYEWTKVDISDEAQKERVNAMIEDQEPFEGEALLDAKCFK

SEQ ID NO: 15423 - protein, 370 aa, Zea mays subsp. mays
  misc_feature (1)..(370): Ceres Seq. ID no. 12344678
MNPLGKVPVLETPDGPVFESNAIARYVARLKDDNPLFGSSRIEQAHVEQWMDFAATEVDPGVAWYLYPRLGYLPYVSTTEETAISSLKRSLGALNTHLASNTYLVGHAVTLADIVMTCNLYHGIARILTKTFTSDFPHVERYFWTMVNQPNFKKVIGEVKQAESAPPIPKKAAPSKEPKAKDVKKEAPKEAPKPKVVEAPAEEEAPKPKPKNPLDLLPPSKMVLDDWKRLYSNTKTNFREVAIKGFWDMYDPEGYSLWFCDYKYNDENTVSFVTLNKVGGFLQRMDLCRKYAFGKMLVIGSEPPFKLKGLWLFRGQDVPKFVMDEVYDIELYEWTKVDISDEAQKERVNAMIEDQEPFEGEALLDAKCFK

SEQ ID NO: 15424 - DNA, 1245 bp, Zea mays subsp. mays
  misc_feature (1)..(1245): Ceres Seq. ID no. 12344687
cttccttcacttctctgcttccgacctcgtagcgaatcggaccggggggctagggttccggtgcgcctctgcaatcggacgcgaggctaggctgggcatggagggaaccgctgcggcccggaagaggtcccggccggagacggcgaacggggctgccgccgccgggaagcgctccaaagacacggagtcatttcaaactggtctatcaagcaaatcgaagccttgcaccaagtttttcagtacgattgggtgcccgtttggcgagggatgtcattttctgcactttgtccctggtggttacccggcagttgcaaaaatgctgaatctaagtagctctgctgtatctgcgccatcaagaactcatgtggatcatgccgctcttaccggtgcctctcatccagcttctacggtcaagacacgcatgtgcaccaagtacaacactacagaaggctgcaagttcggtgataagtgccatttcgctcatagcgaaagagagcttgcgaagccagcctacatgtctcaagaaggacctcctatgggtggtcgatatggacgagctgaacctatgcaaccagctgccatgggccctccagcaggaaactttggtgcctcggcgactgccaagatcagtgtggacgcctctctggccggtggcataatcggcaagggtggggtcaacactaagcagataagtagaattacaggcgtcaagctctccatccgcgaccacgagtctaaccccaacctaaagaacatcgagctggaaggcaattttgaccagatcaagcaagccagcgacttggtgcgtgatctcatcgcaaccatcagcgcaagcatgccagcgaaaaatccatctgctgccgcggcaccagcaggaggaggccgaggcggtggtccagggggcaagagcagcaactacaagacgaagctgtgcgagaacttcttgaagggtgcctgtacttttggtgaccggtgccacttcgcccatggcgagacggagcagcggagaggtgctgcatgagagtcgaggtgctctaggcaatgagatgccatgtgctccctccttttgctactgtgaattttcgccttgcagcgctaggcggttggactgttgtgttgtgttgcgacgtcaatggattaaactctagatttcagctttctttttttaacatataagttcgagaaaacgttaaactgtcgtgcagcttgcattttgttggtcggtaagctagcagctggcctccc

SEQ ID NO: 15425 - protein, 339 aa, Zea mays subsp. mays
  misc_feature (1)..(339): Ceres Seq. ID no. 12344688
FLHFSASDLVANRTGGLGFRCASAIGREARLGMEGTAAARKRSRPETANGAAAAGKRSKDTESFQTGLSSKSKPCTKFFSTIGCPFGEGCHFLHFVPGGYPAVAKMLNLSSSAVSAPSRTHVDHAALTGASHPASTVKTRMCTKYNTTEGCKFGDKCHFAHSERELAKPAYMSQEGPPMGGRYGRAEPMQPAAMGPPAGNFGASATAKISVDASLAGGIIGKGGVNTKQISRITGVKLSIRDHESNPNLKNIELEGNFDQIKQASDLVRDLIATISASMPAKNPSAAAAPAGGGRGGGPGGKSSNYKTKLCENFLKGACTFGDRCHFAHGETEQRRGAA

SEQ ID NO: 15426 - protein, 307 aa, Zea mays subsp. mays
  misc_feature (1)..(307): Ceres Seq. ID no. 12344689
MEGTAAARKRSRPETANGAAAAGKRSKDTESFQTGLSSKSKPCTKFFSTIGCPFGEGCHFLHFVPGGYPAVAKMLNLSSSAVSAPSRTHVDHAALTGASHPASTVKTRMCTKYNTTEGCKFGDKCHFAHSERELAKPAYMSQEGPPMGGRYGRAEPMQPAAMGPPAGNFGASATAKISVDASLAGGIIGKGGVNTKQISRITGVKLSIRDHESNPNLKNIELEGNFDQIKQASDLVRDLIATISASMPAKNPSAAAAPAGGGRGGGPGGKSSNYKTKLCENFLKGACTFGDRCHFAHGETEQRRGAA

SEQ ID NO: 15427 - protein, 234 aa, Zea mays subsp. mays
  misc_feature (1)..(234): Ceres Seq. ID no. 12344690
MLNLSSSAVSAPSRTHVDHAALTGASHPASTVKTRMCTKYNTTEGCKFGDKCHFAHSERELAKPAYMSQEGPPMGGRYGRAEPMQPAAMGPPAGNFGASATAKISVDASLAGGIIGKGGVNTKQISRITGVKLSIRDHESNPNLKNIELEGNFDQIKQASDLVRDLIATISASMPAKNPSAAAAPAGGGRGGGPGGKSSNYKTKLCENFLKGACTFGDRCHFAHGETEQRRGAA

SEQ ID NO: 15428 - DNA, 1611 bp, Zea mays subsp. mays
  misc_feature (1)..(1611): Ceres Seq. ID no. 12344708
aaaagcctgtctagaaccaaacacccctctccaccgactgcaaataatccgactcccactgctgggtgccctgtcccctacctcgggttccgcgcagaggaaggtgagacaccaattccactcccaaaccccacgaaaaccctcgccgtcttcgtccaaatcactcgcttgatctctcctctccgaacccggcaaccccttgaactagggttccagcgacccaatgacggacggcgacgacgagtacaagcgcgaggagtcggtggccctgctggtcatcgtcttcctcgccgcgctctcgctcctttccgtcatcgctgccttcgcctactactgctacattactcgcaaggtctcccgtcgcctccaggcgttccatatccccaagcgttccagctcccatcatacgcttcctccccgggccctgccgccgcagcagcaggggacggacaacccgtccagtaactccaccagagatggtgtcggagcggcggcgatgtcggtggtggctgctggggagaggggcgtgcaggtgttcagctaccggcagcttcacgcggccacgggtgggtttgaccgggcgcacatggttgggcagggcagcttcgggaccgtgtaccgcggggtgctccccgacgggaggaaggtcgcggtcaagctcatggaccgcccagggaaacagggagaagatgagtttgagatggaggtggagttgctgagtaggctccgatcaccgtatttattgggcctgattggccattgttcggaaggtgaacactgtctacttgtatatgagttcatggccaatgggggtctccaggagcatctctatccaaacagaggttcatgtggtggaatctcaaaattggactgggacacaagaatgagaattgcacttgaagcagccaaaggtttggaatatcttcatgaacatgttaatccacctgttatacatagagacttcaagagtagcaatattctcctggacaaggacttccatgcaagaatttcagactttggtctagccaaacttggatctgatagagctggtggtcatgtctcaactcgagttttgggcacacaaggctatgttgcaccagagtatgcattggctgggcatttgactaccaaatcagatgtgtacagttatggtgttgtgcttttggaattgcttactggcagagtaccagttgatatgaagaggtctcctggagaaggtgttttagttaactgggcattgcctatgctcactgaccgagataaagttgtgcggatcttggatccagcatcggaaggtcaatattccttgaaagatgctgtccaagtggctgctattgctgccatgtgtgttcaaccagaggctgactataggccattaatggctgatgttgtccaatcgctggttccacttgtcaagaaccgttataatcagaaatcttgcaatcccaatgtgcaaccatcgaagccacttgactaggagaaaagctagtgtttgatctgcagtttgtgctcgtccttctggaacccttctcgagttctcgtctataacgaactactgttgagacagattcacacgcttcctaacaatgatttcgtctgctggtgccctcc

SEQ ID NO: 15429 - protein, 417 aa, Zea mays subsp. mays
  misc_feature (1)..(417): Ceres Seq. ID no. 12344709
MTDGDDEYKREESVALLVIVFLAALSLLSVIAAFAYYCYITRKVSRRLQAFHIPKRSSSHHTLPPRALPPQQQGTDNPSSNSTRDGVGAAAMSVVAAGERGVQVFSYRQLHAATGGFDRAHMVGQGSFGTVYRGVLPDGRKVAVKLMDRPGKQGEDEFEMEVELLSRLRSPYLLGLIGHCSEGEHCLLVYEFMANGGLQEHLYPNRGSCGGISKLDWDTRMRIALEAAKGLEYLHEHVNPPVIHRDFKSSNILLDKDFHARISDFGLAKLGSDRAGGHVSTRVLGTQGYVAPEYALAGHLTTKSDVYSYGVVLLELLTGRVPVDMKRSPGEGVLVNWALPMLTDRDKVVRILDPASEGQYSLKDAVQVAAIAAMCVQPEADYRPLMADVVQSLVPLVKNRYNQKSCNPNVQPSKPLD

SEQ ID NO: 15430 - protein, 326 aa, Zea mays subsp. mays
  misc_feature (1)..(326): Ceres Seq. ID no. 12344710
MSVVAAGERGVQVFSYRQLHAATGGFDRAHMVGQGSFGTVYRGVLPDGRKVAVKLMDRPGKQGEDEFEMEVELLSRLRSPYLLGLIGHCSEGEHCLLVYEFMANGGLQEHLYPNRGSCGGISKLDWDTRMRIALEAAKGLEYLHEHVNPPVIHRDFKSSNILLDKDFHARISDFGLAKLGSDRAGGHVSTRVLGTQGYVAPEYALAGHLTTKSDVYSYGVVLLELLTGRVPVDMKRSPGEGVLVNWALPMLTDRDKVVRILDPASEGQYSLKDAVQVAAIAAMCVQPEADYRPLMADVVQSLVPLVKNRYNQKSCNPNVQPSKPLD

SEQ ID NO: 15431 - protein, 296 aa, Zea mays subsp. mays
  misc_feature (1)..(296): Ceres Seq. ID no. 12344711
MVGQGSFGTVYRGVLPDGRKVAVKLMDRPGKQGEDEFEMEVELLSRLRSPYLLGLIGHCSEGEHCLLVYEFMANGGLQEHLYPNRGSCGGISKLDWDTRMRIALEAAKGLEYLHEHVNPPVIHRDFKSSNILLDKDFHARISDFGLAKLGSDRAGGHVSTRVLGTQGYVAPEYALAGHLTTKSDVYSYGVVLLELLTGRVPVDMKRSPGEGVLVNWALPMLTDRDKVVRILDPASEGQYSLKDAVQVAAIAAMCVQPEADYRPLMADVVQSLVPLVKNRYNQKSCNPNVQPSKPLD

SEQ ID NO: 15432 - DNA, 1060 bp, Zea mays subsp. mays
  misc_feature (1)..(1060): Ceres Seq. ID no. 12344755
gtcagctcttgcgagaagcacccaaattggagtactgtgaagtctgaaccggctggcctggccgttgctgagggagaggataaaagaacaccgaaatgccactcctgctgctcccaccaccggcgtgcaccacggcagcgacgtcgctcgctttcttgcggccccggccttcgcgggcgcgttgggccaacctctcttacgcgttcccccgcctgaggaaatacgggcgtcgccaccgcgagcccgtggccggccccagcctcgatgatgatggcggcgaggaggatgagacggaggcagaggactgggagtccgacgagggcgaggaagagatggaggtagacgaggaggagtttctggcgatgcggcccaaaccggcgggatttggcgaggggaaaacatattccactgacattgaggagcagcttctccgggagatgggctttggtgggggcgcggcgcggcgaggagaggcggccccggccaatcgccgcgccggggatagttccaccaaagtagctgccgcagatgtcagtgccgatggtgttcaagttcgtgtttggaacctcccaaaaaagaaaaacatacacaaggacctgaagcaagcttttaaagggtttcatggccttttatccattgatccagcagtttccgcaaataagaaaacccgtgatcctatttgtaagggttttgcatatctcaaactagagtctgctgaggctgcaacaaggttcgtggagatatactctcatcaaactgtgtcatttggcaagattcagaagccaatcagttgcggtatcatcgataaacgcagctctgttgagcattcaaataagcatccagtagtcaggcaatccctcaattaatgtccaagcaccaaaacttggtagcggcaagttgagtaacacatatctgtcatctagcacaagtaatcacgcacttctagggatctcaagttttacgaaaaagctttgataaacagatagattagacagttctctgtattccaaataactgtttgtatcaagcaatttggtagtttggtcttgtttttttaggg

SEQ ID NO: 15433 - protein, 256 aa, Zea mays subsp. mays
  misc_feature (1)..(256): Ceres Seq. ID no. 12344756
MPLLLLPPPACTTAATSLAFLRPRPSRARWANLSYAFPRLRKYGRRHREPVAGPSLDDDGGEEDETEAEDWESDEGEEEMEVDEEEFLAMRPKPAGFGEGKTYSTDIEEQLLREMGFGGGAARRGEAAPANRRAGDSSTKVAAADVSADGVQVRVWNLPKKKNIHKDLKQAFKGFHGLLSIDPAVSANKKTRDPICKGFAYLKLESAEAATRFVEIYSHQTVSFGKIQKPISCGIIDKRSSVEHSNKHPVVRQSLN

SEQ ID NO: 15434 - protein, 177 aa, Zea mays subsp. mays
  misc_feature (1)..(177): Ceres Seq. ID no. 12344757
MEVDEEEFLAMRPKPAGFGEGKTYSTDIEEQLLREMGFGGGAARRGEAAPANRRAGDSSTKVAAADVSADGVQVRVWNLPKKKNIHKDLKQAFKGFHGLLSIDPAVSANKKTRDPICKGFAYLKLESAEAATRFVEIYSHQTVSFGKIQKPISCGIIDKRSSVEHSNKHPVVRQSLN

SEQ ID NO: 15435 - protein, 167 aa, Zea mays subsp. mays
  misc_feature (1)..(167): Ceres Seq. ID no. 12344758
MRPKPAGFGEGKTYSTDIEEQLLREMGFGGGAARRGEAAPANRRAGDSSTKVAAADVSADGVQVRVWNLPKKKNIHKDLKQAFKGFHGLLSIDPAVSANKKTRDPICKGFAYLKLESAEAATRFVEIYSHQTVSFGKIQKPISCGIIDKRSSVEHSNKHPVVRQSLN

SEQ ID NO: 15436 - DNA, 1006 bp, Zea mays subsp. mays
  misc_feature (1)..(1006): Ceres Seq. ID no. 12344779
agatatggttttcggatacttgaaagcccatcttactctccttccggtcgccgcagtaaacccctaggaagaaaccccaccgcttctggccgccgccggctcaccggtgacggcatccaaatccatggcctcccgccaggcgctccacatcttcacgccctcccggcgggcgatgcacatcctcacgtcgtcccgcggcatcgcctcgaccccgcacctctcgtccttcggctggtttgataagatcaagtccaccatcactggcaagaagcccgaggaggcctccgaggcatcctccttcaccctcatccagttcgcagacacgatggagaaagcgaggaagctggggacgttcaagaacttcgttgccgggcgggccagcgaggccaccgtcgtgaacgtcttcgagaagcactccgctgtgctgcgctacctcggtgccatcgaccccaccggcgagaacctccgaaacactgacaaaattaacgcgaccaagcactgcaactgcacaattgctgacgtggagcacattctggccaagtacacatgggctaaagaggctcagaagaagattgcaaagctcaaggaagaagggaagccattaccgaagtcatttaacgaggtccaaaatctaatgggttctacaccagtggatgtcggcagaagtaatctggcaaagagtggtcagataagtaggaatgctttctgcccatgtggttctaagaaacgatataaaaggtgctgtggagcttcatgagatgaacaacaatcctctagttcactagcacatgcaggccaggtgcagcgtttgtaagctcttttctttgccaaactctaccaagctctttcgtggacaacacctgaatttgaagcttgcaatttgtaaagcactatgagcgagccctatgtttcagaaggctttctcttaaactctgatttcttgattggagttgttgtttaacattgattcagttcaaccatgcatgaatctaggtaatatatatcc

SEQ ID NO: 15437 - protein, 210 aa, Zea mays subsp. mays
  misc_feature (1)..(210): Ceres Seq. ID no. 12344780
MASRQALHIFTPSRRAMHILTSSRGIASTPHLSSFGWFDKIKSTITGKKPEEASEASSFTLIQFADTMEKARKLGTFKNFVAGRASEATVVNVFEKHSAVLRYLGAIDPTGENLRNTDKINATKHCNCTIADVEHILAKYTWAKEAQKKIAKLKEEGKPLPKSFNEVQNLMGSTPVDVGRSNLAKSGQISRNAFCPCGSKKRYKRCCGAS

SEQ ID NO: 15438 - protein, 194 aa, Zea mays subsp. mays
  misc_feature (1)..(194): Ceres Seq. ID no. 12344781
MHILTSSRGIASTPHLSSFGWFDKIKSTITGKKPEEASEASSFTLIQFADTMEKARKLGTFKNFVAGRASEATVVNVFEKHSAVLRYLGAIDPTGENLRNTDKINATKHCNCTIADVEHILAKYTWAKEAQKKIAKLKEEGKPLPKSFNEVQNLMGSTPVDVGRSNLAKSGQISRNAFCPCGSKKRYKRCCGAS

SEQ ID NO: 15439 - protein, 143 aa, Zea mays subsp. mays
  misc_feature (1)..(143): Ceres Seq. ID no. 12344782
MEKARKLGTFKNFVAGRASEATVVNVFEKHSAVLRYLGAIDPTGENLRNTDKINATKHCNCTIADVEHILAKYTWAKEAQKKIAKLKEEGKPLPKSFNEVQNLMGSTPVDVGRSNLAKSGQISRNAFCPCGSKKRYKRCCGAS

SEQ ID NO: 15440 - DNA, 1038 bp, Zea mays subsp. mays
  misc_feature (1)..(1038): Ceres Seq. ID no. 12344880
aaggcaggctgcgacgtcacggtttggaacaggaccaagagcaagtgcgatcccctcctcagtctcggtgccaagtacgagcctacaccggcccaagtcgcttcatcttgtgacgtgacattcgcgatgctcgctgatccacaaagcgcggctgaggttgcatgtgggtccagtggagctgctgaagggttggcccctgggaaaggctatgtcgatgtgtcgacggttgatggtgctacatccaagctgattggtgaacgcattacaagtactggagcatctttccttgaggctccagtttcaggctcgaaaaaaccagcagaagatgggctgctcatctttcttactgcaggtgatgagtccttgtacaagagagtggcgcccctccttgatgtcatggggaagtcaaggttttatcttggcgatgtaggcaatggtgctgcaatgaagctcgtggttaacatggtcatgggggagcatgatggtttccttctcagaagggttgctcctgagtgaaaaagtcggtttagacccgaatactctcgtcgaggttatttcccagggtgctatcagtgcccccatgttctctctcaagggcccatccatggttaaagctgcatatcctcctgcatttcctctgaagcatcaacagaaggacttgaggctcgcattggccctggcggaatcggtgtcccagtccattcctacagttgcagctgcgaacgagctgtacaaggctgcaaaatcgctcggccttagtgaccacgacttctcggcggttattgaagcgctgaaagccaaagtgcagagccagagctcacaatagtagttgcctgttcagcagagctcacagtagttgttgcctcttcagcagctaccattgaggcagcattttgtctcgatggatgaagttgacacttaggaaaatttctcaagatcgctacagaaaagtctcagaacaatacaatttctgtattcgtaaatattttctcaaacatcacaacgacgacatttccttaaggaagaaaaaaaactttc

SEQ ID NO: 15441 - protein, 171 aa, Zea mays subsp. mays
  misc_feature (1)..(171): Ceres Seq. ID no. 12344881
KAGCDVTVWNRTKSKCDPLLSLGAKYEPTPAQVASSCDVTFAMLADPQSAAEVACGSSGAAEGLAPGKGYVDVSTVDGATSKLIGERITSTGASFLEAPVSGSKKPAEDGLLIFLTAGDESLYKRVAPLLDVMGKSRFYLGDVGNGAAMKLVVNMVMGEHDGFLLRRVAPE

SEQ ID NO: 15442 - protein, 129 aa, Zea mays subsp. mays
  misc_feature (1)..(129): Ceres Seq. ID no. 12344882
MLADPQSAAEVACGSSGAAEGLAPGKGYVDVSTVDGATSKLIGERITSTGASFLEAPVSGSKKPAEDGLLIFLTAGDESLYKRVAPLLDVMGKSRFYLGDVGNGAAMKLVVNMVMGEHDGFLLRRVAPE

SEQ ID NO: 15443 - protein, 115 aa, Zea mays subsp. mays
  misc_feature (1)..(115): Ceres Seq. ID no. 12344883
MMVSFSEGLLLSEKVGLDPNTLVEVISQGAISAPMFSLKGPSMVKAAYPPAFPLKHQQKDLRLALALAESVSQSIPTVAAANELYKAAKSLGLSDHDFSAVIEALKAKVQSQSSQ

SEQ ID NO: 15444 - DNA, 934 bp, Zea mays subsp. mays
  misc_feature (1)..(934): Ceres Seq. ID no. 12344895
atcaatccctaatctcggcggatggctccttccttccccgcgctcgctcccacggcgaccgagctccaaaacaacgccgccgccagatccgcccgccaccggccgtcctcagctcatgccggctgcaccaagccagatccaaccccgcaccctcctccagcaccaccagctcgccctcctgtgtcccagctcccatcgccaccgcccccaccaccaccgccggcccgcccttccgacccagctgtaagccgtgcgccggcggccccccgccctaccaagagggtgaggtttgcattcactacaagcaccatgccgccccgcattcaccacccctcccccgtatcccgcagccataatgccacccccgccccgatagctggtttgaagcccccctggaagctacgaccgcattgaagatgaggatcttgaaggatggacgacgattcggtgcaggcgtggacgcgtcacccgcgtaggcctaggccgcgccccagcggcgcctcgcctgctctcagctcaagcccctagccgtcttatgcctcgtgtgaagatgctagagaagacaaaaggcaagcgctgatgatcctgcaagtggtaatgaatagagagcctataaagcgcctttctggcgcacaatctgaagctgcaaagcaaacgcaatgctgccgtcgggagattggaactacaatatctttgcatctctagctagtggatgttcctttggactgatgactttgccgtagaggttagccgtcactcgtcactggacagtgcgtttgctgctatatcaagaggttcttcttttttttaagcttggtttcaatgtatacaaagtttcgtttaaggaccctttgctaccgagtgtagtccaaaggctacttaactcataaacacatgagacacaaagatataggaggtattgatactttcattc

SEQ ID NO: 15445 - protein, 130 aa, Zea mays subsp. mays
  misc_feature (1)..(130): Ceres Seq. ID no. 12344896
MAPSFPALAPTATELQNNAAARSARHRPSSAHAGCTKPDPTPHPPPAPPARPPVSQLPSPPPPPPPPARPSDPAVSRAPAAPRPTKRVRFAFTTSTMPPRIHHPSPVSRSHNATPAPIAGLKPPWKLRPH

SEQ ID NO: 15446 - protein, 117 aa, Zea mays subsp. mays
  misc_feature (1)..(117): Ceres Seq. ID no. 12344897
QSLISADGSFLPRARSHGDRAPKQRRRQIRPPPAVLSSCRLHQARSNPAPSSSTTSSPSCVPAPIATAPTTTAGPPFRPSCKPCAGGPPPYQEGEVCIHYKHHAAPHSPPLPRIPQP

SEQ ID NO: 15447 - protein, 81 aa, Zea mays subsp. mays
  misc_feature (1)..(81): Ceres Seq. ID no. 12344898
SIPNLGGWLLPSPRSLPRRPSSKTTPPPDPPATGRPQLMPAAPSQIQPRTLLQHHQLALLCPSSHRHRPHHHRRPALPTQL

SEQ ID NO: 15448 - DNA, 828 bp, Zea mays subsp. mays
  misc_feature (1)..(828): Ceres Seq. ID no. 12344977
tgtagagagtttcaggtgctcagcaacaaggataggatctgatggtggagtcgcattgtctgaggcattggggacatgcactcgtctgaagaaacttgatcttagggacaacttgtttggtgttgatgcagggttagctctcagcgaaacccttccaaaactacctgatcttgttgagctttatctcagtgatctcaatcttgagaacaagggtactatagcaattgcaaaagccctcaaacagtcagcactgcagttggaggtccttgaaattgctggaaatgaaataaatgccaaagcagccccagatttggctgaatgtctagcagtaatgcagtcactcaagaagctgaccttggctgaaaatgaactgaaggacaatggtgctgtgataattgcaaaatcattggaagatggccactcagatctcaaggaacttgatgtgagcacgaacatgctgcagagggttggagctcggtgctttacgcgggcagtcgcaaataaaccagattttgtgcagctgaacatcaatggaaattttatctctgatgaaggggttgatgaggtgaaggaaattctgaaggctggtaagaaatctctggatgtgctgggcccactagatgagaatgaacctgatggagagcctgatgatgaggatgccgaggacgatgaggacgagctggatttgaagctgcagagtgtgaaggttgagcaggatgaggatgattgacgatccttaggttaaatatctttagctactcagtaatcatttggatgtccatgagctacgcaaacttttaattaaaaagaatgtactgaggcttttcc

SEQ ID NO: 15449 - protein, 242 aa, Zea mays subsp. mays
  misc_feature (1)..(242): Ceres Seq. ID no. 12344978
VESFRCSATRIGSDGGVALSEALGTCTRLKKLDLRDNLFGVDAGLALSETLPKLPDLVELYLSDLNLENKGTIAIAKALKQSALQLEVLEIAGNEINAKAAPDLAECLAVMQSLKKLTLAENELKDNGAVIIAKSLEDGHSDLKELDVSTNMLQRVGARCFTRAVANKPDFVQLNINGNFISDEGVDEVKEILKAGKKSLDVLGPLDENEPDGEPDDEDAEDDEDELDLKLQSVKVEQDEDD

SEQ ID NO: 15450 - protein, 132 aa, Zea mays subsp. mays
  misc_feature (1)..(132): Ceres Seq. ID no. 12344979
MQSLKKLTLAENELKDNGAVIIAKSLEDGHSDLKELDVSTNMLQRVGARCFTRAVANKPDFVQLNINGNFISDEGVDEVKEILKAGKKSLDVLGPLDENEPDGEPDDEDAEDDEDELDLKLQSVKVEQDEDD

SEQ ID NO: 15451 - DNA, 1687 bp, Zea mays subsp. mays
  misc_feature (1)..(1687): Ceres Seq. ID no. 12345075
gctccacgtcacgacgccgcatctaaccctccggcgactcatcgccggcgagccggtccgccacgccatagcctcgtcctgaagcgcacttaatcctacgtctcgttcctctctcgcccccggtaccctccataggcatgggaatggggtctgcgagagggggcgcagggggatggctccccggcgagcggtggcggcgggtcatcttcctcgctctggcggccgtctcgttcctcatctcactcatactcctcttcctatccgcgccgcgtctccgcctcccaagtgtcgtcctgccttacaccaccgcttccgcttctgccgtccgccgcgggcccggcgagccgccctgcctggtgtacctgctgaccggcgcgcgcggcgacgggcgccgcctcctcaggctcctcctcgcggtttaccacccgcgcaaccggtacgtgctccacctctccgccgacgcgccagacgacgagcgcctgagcctcgccaccggggtcgtcgccgcggcgcccgccgtgggagcattcgagaacgtggttattattggcaatcccaccgccgggacgcccgtggggtcctccggactcgcccggcacgctccgcgctgcggccgtgctgctccggctccacgctgactgggactggttcctcaccctcaatgccgccgactaccccctcgtcacacaggatgacctgattcatgtcctttcttctgtcccaagggatcttaacttcattgaccacaccggtgacgttggatcaaaagaacctgagaaagttcaacaaattatagtcgatgctggaatttacttgtcagggaggaccaacttctttcgaggaacacagaaacgagcagctcctgaggcttttaagttctttacaggttctccatgggtcatattaaaccggcaatttatagagtactgcattcttgcttgggagaatctccctaggattcttctcatgtacttcaacaatgtaatacaacctcaggaagggtatttccagacagtcatctgcaactcactggacttccgtaatttcactgtgaacaatgacttgaggttcatggtgcaagatgattccgctcagaaaaagtcccttttcacgagcagggaacattatggtcacatggtggatagtggggcacccttcgcaaggccgtttcaggagaatgatcctctgctggaccagatcgacggcaatatactcaagcgttggagccatggacagttcctggtgcttggtgcacaggaaggaagaggtggttcagtgatccatgttcccagtggggcgatgtgaatgttttgagaccaggtcctcaagcagtgatgttgcaccaatatgtaaatcggaccttagaagaagcaaagtctagcagcaattcatgcaggcggtagcagcattggcgtctagaacctcatgtcccatggttgaaagctttgagctttttccgcttatccactaagggttctccactctgctgaataaatagctgccacatgtctaagctgaaacaagcactcgtcgcacctggaacaaagccatggagggatgttcttttctgatattttcatgatgactatcatagtcacggatcaggagtttcactttggtctgtgattaatctgtgcaatccccatatttggctcatataacacttccaggcgctgataataggctg

SEQ ID NO: 15452 - protein, 175 aa, Zea mays subsp. mays
  misc_feature (1)..(175): Ceres Seq. ID no. 12345076
MAPRRAVAAGHLPRSGGRLVPHLTHTPLPIRAASPPPKCRPALHHRFRFCRPPRARRAALPGVPADRRARRRAPPPQAPPRGLPPAQPVRAPPLRRRARRRAPEPRHRGRRRGARRGSIRERGYYWQSHRRDARGVLRTRPARSALRPCCSGSTLTGTGSSPSMPPTTPSSHRMT

SEQ ID NO: 15453 - protein, 166 aa, Zea mays subsp. mays
  misc_feature (1)..(166): Ceres Seq. ID no. 12345077
MGMGSARGGAGGWLPGERWRRVIFLALAAVSFLISLILLFLSAPRLRLPSVVLPYTTASASAVRRGPGEPPCLVYLLTGARGDGRRLLRLLLAVYHPRNRYVLHLSADAPDDERLSLATGVVAAAPAVGAFENVVIIGNPTAGTPVGSSGLARHAPRCGRAAPAPR

SEQ ID NO: 15454 - protein, 164 aa, Zea mays subsp. mays
  misc_feature (1)..(164): Ceres Seq. ID no. 12345078
MGSARGGAGGWLPGERWRRVIFLALAAVSFLISLILLFLSAPRLRLPSVVLPYTTASASAVRRGPGEPPCLVYLLTGARGDGRRLLRLLLAVYHPRNRYVLHLSADAPDDERLSLATGVVAAAPAVGAFENVVIIGNPTAGTPVGSSGLARHAPRCGRAAPAPR

SEQ ID NO: 15455 - DNA, 1233 bp, Zea mays subsp. mays
  misc_feature (1)..(1233): Ceres Seq. ID no. 12345079
cccatttcctcttctccaaaccccactcaccgcaacgagccgccggatccatggccggcaaagacgggtccccgcctcctcccccgctcccatcctaccctgagatgatcgtggaggcaatccgggcgctgggactcgagaacggctgcaacaagactgcgatctcggactacatcaagggcagctacggctccaacctccctgcccagcacaacgccgtcctcacgggtcacctcgcccgcatgaaggctaccggcgagctcgccttcctcaggaacaactatctcctccccaacgaggacgaagcctccccgctgagcaccggtgggcacaagggccccgccgccgccgaggaggagtctactggcgtgttggacgttggtgacgatgtgttgcttgcttcccctctcgtcatcgacgctgacgccgtcgacattgatgtgcctgctccagctcccgttgtcaccgctgatgtcgacgatattgacgtgcctgctccagctcccgttgtcaccgctgatgtcaaccctgttcataccaagcggggacgcggacggcccccgaagcccaaggaccccgttgctgagggctacggtggtaagcccgctacagctcccgtcgccgccgctgccgtgcctgtcaagcgcgggcgcggacgtccgccgaaacccaagaaccccgtcgccgaggactcagctcccactgcggcttccgttgtcaccactgatggcaatgccgtgcctgtgaagcgtgggcgcggacgccccccaaagctcaaggaccccatcaatgtggccactgaccaggccaccagcggcatgctgagcccacgtggccgtgggcgcccgcccaagaaggccaaggtcgccgtggaagatcccagaggtgaacctgctgcagctcgagacgttgttgctgatgccagtgctgtacatgtcaagcgtgggcgtggacggcccccaagatgagtcctgcagctgcagtgactgggaagccgtctgagtcttaaaccatgaacattgaatcctatggtggtaatggtttgggagtagcttggtgtatcaaattgagttctgaactatcttatccagttgggtgcatagcatcggaagactaatctcaataatctggatggtttctgtacattgaatggcggatgatgcgtaatagttgactgctgctgaagacttgacttaatcattgctattttcttctcattgttgcgtgttaatt

SEQ ID NO: 15456 - protein, 321 aa, Zea mays subsp. mays
  misc_feature (1)..(321): Ceres Seq. ID no. 12345080
HFLFSKPHSPQRAAGSMAGKDGSPPPPPLPSYPEMIVEAIRALGLENGCNKTAISDYIKGSYGSNLPAQHNAVLTGHLARMKATGELAFLRNNYLLPNEDEASPLSTGGHKGPAAAEEESTGVLDVGDDVLLASPLVIDADAVDIDVPAPAPVVTADVDDIDVPAPAPVVTADVNPVHTKRGRGRPPKPKDPVAEGYGGKPATAPVAAAAVPVKRGRGRPPKPKNPVAEDSAPTAASVVTTDGNAVPVKRGRGRPPKLKDPINVATDQATSGMLSPRGRGRPPKKAKVAVEDPRGEPAAARDVVADASAVHVKRGRGRPPR

SEQ ID NO: 15457 - protein, 305 aa, Zea mays subsp. mays
  misc_feature (1)..(305): Ceres Seq. ID no. 12345081
MAGKDGSPPPPPLPSYPEMIVEAIRALGLENGCNKTAISDYIKGSYGSNLPAQHNAVLTGHLARMKATGELAFLRNNYLLPNEDEASPLSTGGHKGPAAAEEESTGVLDVGDDVLLASPLVIDADAVDIDVPAPAPVVTADVDDIDVPAPAPVVTADVNPVHTKRGRGRPPKPKDPVAEGYGGKPATAPVAAAAVPVKRGRGRPPKPKNPVAEDSAPTAASVVTTDGNAVPVKRGRGRPPKLKDPINVATDQATSGMLSPRGRGRPPKKAKVAVEDPRGEPAAARDVVADASAVHVKRGRGRPPR

SEQ ID NO: 15458 - protein, 287 aa, Zea mays subsp. mays
  misc_feature (1)..(287): Ceres Seq. ID no. 12345082
MIVEAIRALGLENGCNKTAISDYIKGSYGSNLPAQHNAVLTGHLARMKATGELAFLRNNYLLPNEDEASPLSTGGHKGPAAAEEESTGVLDVGDDVLLASPLVIDADAVDIDVPAPAPVVTADVDDIDVPAPAPVVTADVNPVHTKRGRGRPPKPKDPVAEGYGGKPATAPVAAAAVPVKRGRGRPPKPKNPVAEDSAPTAASVVTTDGNAVPVKRGRGRPPKLKDPINVATDQATSGMLSPRGRGRPPKKAKVAVEDPRGEPAAARDVVADASAVHVKRGRGRPPR

SEQ ID NO: 15459 - DNA, 1103 bp, Zea mays subsp. mays
  misc_feature (1)..(1103): Ceres Seq. ID no. 12345090
atgcatactctatcaactaacattgcgctgcattgcattgcaggccccgccgtctccgtggggcgacctggaggaggtgctggcgcgcgcggcgaccaaggaccgcacggtgatcatgacgcagatcaacgcggcgtggacgcgcccgggctcgctgctggacctcttcttcgagagcttccgcacgggggaaggcggcgtggcgcgcctcctggaccacctggtcatcgtcaccatggacccggccgcctacgagggctgcagggccgtgcacagccactgctacttcctccgcacgggcaacgccgtcgactaccgatcagagaaggtgttcatgagcaaggactacctggagatgatgtggggacgcaaccgcttccagcagacggtgctggagctgggatacaacttcctattcacggacgttgacgtgatgtggttccgcgacccgttccgccacatctccatggcggcggacatcgccatctccagcgacgtgtacatgggcgacccctacagcctgcgcaacttccccaacggcggcttcctcttcgtgcgggcgtcggacaagacggtcgccttctaccgggcgtggcagcaggggcggtggcgcttcctggggaagcacgagcaggacgtgttcaacctcatcaagcacgaggaggcgcccaggctggacctcgccatccagttcctcgacacagcctacatcagcggcttctgccagctcagcaaggacctcaacaggatctgcacgctccacgccaactgctgcgtcggcctcggcgccaagctccacgacctccgcggggtcctcgacgtctggaggaactacaccgccggcacacccgaggagcgacgcgcgggaaagttccagtggaagctaccgggcatctgcatccactgatatccattctttctcagccggcctctcgcctccttggtagtaaaagatccattcttttgattccatcatcaacaaattaaaggttatatatatactagtaacagatagttagaatttcatagctataagtatacagtagcagtatatgtttgtaatatatctgcacctgcaaatcaatttcattgtcggtaacccc

SEQ ID NO: 15460 - protein, 301 aa, Zea mays subsp. mays
  misc_feature (1)..(301): Ceres Seq. ID no. 12345091
CILYQLTLRCIALQAPPSPWGDLEEVLARAATKDRTVIMTQINAAWTRPGSLLDLFFESFRTGEGGVARLLDHLVIVTMDPAAYEGCRAVHSHCYFLRTGNAVDYRSEKVFMSKDYLEMMWGRNRFQQTVLELGYNFLFTDVDVMWFRDPFRHISMAADIAISSDVYMGDPYSLRNFPNGGFLFVRASDKTVAFYRAWQQGRWRFLGKHEQDVFNLIKHEEAPRLDLAIQFLDTAYISGFCQLSKDLNRICTLHANCCVGLGAKLHDLRGVLDVWRNYTAGTPEERRAGKFQWKLPGICIH

SEQ ID NO: 15461 - protein, 263 aa, Zea mays subsp. mays
  misc_feature (1)..(263): Ceres Seq. ID no. 12345092
MTQINAAWTRPGSLLDLFFESFRTGEGGVARLLDHLVIVTMDPAAYEGCRAVHSHCYFLRTGNAVDYRSEKVFMSKDYLEMMWGRNRFQQTVLELGYNFLFTDVDVMWFRDPFRHISMAADIAISSDVYMGDPYSLRNFPNGGFLFVRASDKTVAFYRAWQQGRWRFLGKHEQDVFNLIKHEEAPRLDLAIQFLDTAYISGFCQLSKDLNRICTLHANCCVGLGAKLHDLRGVLDVWRNYTAGTPEERRAGKFQWKLPGICIH

SEQ ID NO: 15462 - protein, 223 aa, Zea mays subsp. mays
  misc_feature (1)..(223): Ceres Seq. ID no. 12345093
MDPAAYEGCRAVHSHCYFLRTGNAVDYRSEKVFMSKDYLEMMWGRNRFQQTVLELGYNFLFTDVDVMWFRDPFRHISMAADIAISSDVYMGDPYSLRNFPNGGFLFVRASDKTVAFYRAWQQGRWRFLGKHEQDVFNLIKHEEAPRLDLAIQFLDTAYISGFCQLSKDLNRICTLHANCCVGLGAKLHDLRGVLDVWRNYTAGTPEERRAGKFQWKLPGICIH

SEQ ID NO: 15463 - DNA, 672 bp, Zea mays subsp. mays
  misc_feature (1)..(672): Ceres Seq. ID no. 12345138
catcaacaatgatgcctctaaggtgaactctcatggtccacatcagagttctggttccactttgctatgggagaaaaatgagcctccagtcaatcctacccgctacaacttgtccgcatttgcaataacactaaatgagttaacaccagagctcgaggagaagctgccaccgacggattcaaggctgagaccagatcaacggcacctggagaatggggagtacgagaaggccaatgctgaaaaactgcgcctcgagacacagcaacggatggcaaggaagatgcaggagagtggctggaaaccaagatggttccaaagggacagcgaggatggaacgtaccgctacgtcggaggttactgggaggcaagggagcagagaacatgggtcggctgcaatgacatatttggtaacttgtctagcagccagaagctcccaccatccgctctctacacgagctgaagtatataggggtgggtaaggccggaagggcatgttcagtagttgttgacatcgcattaaccagagggtttttctctcgtttctgttgtgttaagctgtgagctaacatgtttttcttgtcaattgtcacattgaagccaaggacatccaagcataacccaaccttttgtcgatactaggatacttatgagagatcttgtggacattattgc

SEQ ID NO: 15464 - protein, 152 aa, Zea mays subsp. mays
  misc_feature (1)..(152): Ceres Seq. ID no. 12345139
INNDASKVNSHGPHQSSGSTLLWEKNEPPVNPTRYNLSAFAITLNELTPELEEKLPPTDSRLRPDQRHLENGEYEKANAEKLRLETQQRMARKMQESGWKPRWFQRDSEDGTYRYVGGYWEAREQRTWVGCNDIFGNLSSSQKLPPSALYTS

SEQ ID NO: 15465 - protein, 88 aa, Zea mays subsp. mays
  misc_feature (1)..(88): Ceres Seq. ID no. 12345140
MGSTRRPMLKNCASRHSNGWQGRCRRVAGNQDGSKGTARMERTATSEVTGRQGSREHGSAAMTYLVTCLAARSSHHPLSTRAEVYRGG

SEQ ID NO: 15466 - protein, 81 aa, Zea mays subsp. mays
  misc_feature (1)..(81): Ceres Seq. ID no. 12345141
MLKNCASRHSNGWQGRCRRVAGNQDGSKGTARMERTATSEVTGRQGSREHGSAAMTYLVTCLAARSSHHPLSTRAEVYRGG

SEQ ID NO: 15467 - protein, 63 aa, Zea mays subsp. mays
  misc_feature (1)..(63): Ceres Seq. ID no. 12345142
MARKMQESGWKPRWFQRDSEDGTYRYVGGYWEAREQRTWVGCNDIFGNLSSSQKLPPSALYTS

SEQ ID NO: 15468 - DNA, 1790 bp, Zea mays subsp. mays
  misc_feature (1)..(1790): Ceres Seq. ID no. 12345156
acaatcacaggcctcccggcctcccgtgcgctattctctatcagcttacccagcacacagtacacactctaatctccacacgacccaatagatatacggggctgaaggatgaagcttagagcaaaagggatcggcctcctgcttctccttgtcttgcttgctctttgctccaccattgaagtcggcgaggcaagaagaggcaagcattggaggtcgtcgaggagctcaccgggctcatcccagctcaagaaagacaagggaaagaagagcagctcccgccggcagtacggcgccaaccggccaggtccgaagccaccggtcagctcgacaccaagctctggtgctgccaagggaaatcatcagaatccttaccaaccaagcccaagtccaagcccgaatgcccctgacatccctcctatgccaagccctgccaatggcagcaggcattccactcccgagccgccggctccaagctgtgggaagggtcaacagcagccatcacagccgccgccagcgacctcgcagggtgcagtattcaatgtggttgattttggagccaagggtgacggagttacagacgatactaaggcttttgaaggagcgtgggctgctgcctgcaaaaagggggcatgtacagttctcgtaccaccagaactagagttcctagttgggccaatctcgttctctgggccttactgcaaatcgaatattgtctttcagctggaaggaacaatcctagctccaaccagtgctaaatcctggggttcaggcttgctccagtggctcgagttcaccaaactaaatggaatggttattcaagggaacggcattataaatggcagagggcaacaatggtggacctactcagacacagaagacgaggatgatgatgacacgtacgatgtggagtttgaaagaatgccacagattaaacctacagcattgaggttttatggtagtttcaacgttgtagtggctggtatcactattgtcaacagctcacagtgtcatcttaagtttgacaactgtcaaggagtgatggtccatgacttgactatatcctcccctgagaacagtctcaacactgacggaatacacctgcagaactccaaagatgtcagcattcatcatacaaacctggcttgtggtgacgattgcatctccatccagacaggatgcagcaacataaatatacataacgtgaattgtggaccaggccatggaatcagcataggtggactaggccgagacaacacaaaagcatgcgtatcaaatgttacagtaagagatgtcaacatgttcagaaccatgaatggtgtcagaatcaagacctggcagggtggtgtaggattggttcaagacataaggttctcaaatatacaagtctcagaggttcaaacacccatcatcatagatcagttttattgtgacagaagcacttgcagaaatcaaacatcagcagtggcagtatcaggggttcaatatgagaatatcagaggaacatttacaatcaaacctgtccattttgcatgcagtgacagcttaccttgttcaggaatctctcttaccggtgtgcaactcagaccagtgcaagtaccccactaccacctgaataacccattctgctggcaagcttttggggagctctacactccaactgtccctcctatagcttgcttgcagattggaaaacctgctggcaataacttacagtcatatgatgacatatgctgaaacactcaaagtgcctttgtttgttgattggtgcttatccatgagtggtcgttgtg

SEQ ID NO: 15469 - protein, 541 aa, Zea mays subsp. mays
  misc_feature (1)..(541): Ceres Seq. ID no. 12345157
MKLRAKGIGLLLLLVLLALCSTIEVGEARRGKHWRSSRSSPGSSQLKKDKGKKSSSRRQYGANRPGPKPPVSSTPSSGAAKGNHQNPYQPSPSPSPNAPDIPPMPSPANGSRHSTPEPPAPSCGKGQQQPSQPPPATSQGAVFNVVDFGAKGDGVTDDTKAFEGAWAAACKKGACTVLVPPELEFLVGPISFSGPYCKSNIVFQLEGTILAPTSAKSWGSGLLQWLEFTKLNGMVIQGNGIINGRGQQWWTYSDTEDEDDDDTYDVEFERMPQIKPTALRFYGSFNVVVAGITIVNSSQCHLKFDNCQGVMVHDLTISSPENSLNTDGIHLQNSKDVSIHHTNLACGDDCISIQTGCSNINIHNVNCGPGHGISIGGLGRDNTKACVSNVTVRDVNMFRTMNGVRIKTWQGGVGLVQDIRFSNIQVSEVQTPIIIDQFYCDRSTCRNQTSAVAVSGVQYENIRGTFTIKPVHFACSDSLPCSGISLTGVQLRPVQVPHYHLNNPFCWQAFGELYTPTVPPIACLQIGKPAGNNLQSYDDIC

SEQ ID NO: 15470 - protein, 438 aa, Zea mays subsp. mays
  misc_feature (1)..(438): Ceres Seq. ID no. 12345158
MPSPANGSRHSTPEPPAPSCGKGQQQPSQPPPATSQGAVFNVVDFGAKGDGVTDDTKAFEGAWAAACKKGACTVLVPPELEFLVGPISFSGPYCKSNIVFQLEGTILAPTSAKSWGSGLLQWLEFTKLNGMVIQGNGIINGRGQQWWTYSDTEDEDDDDTYDVEFERMPQIKPTALRFYGSFNVVVAGITIVNSSQCHLKFDNCQGVMVHDLTISSPENSLNTDGIHLQNSKDVSIHHTNLACGDDCISIQTGCSNINIHNVNCGPGHGISIGGLGRDNTKACVSNVTVRDVNMFRTMNGVRIKTWQGGVGLVQDIRFSNIQVSEVQTPIIIDQFYCDRSTCRNQTSAVAVSGVQYENIRGTFTIKPVHFACSDSLPCSGISLTGVQLRPVQVPHYHLNNPFCWQAFGELYTPTVPPIACLQIGKPAGNNLQSYDDIC

SEQ ID NO: 15471 - protein, 308 aa, Zea mays subsp. mays
  misc_feature (1)..(308): Ceres Seq. ID no. 12345159
MVIQGNGIINGRGQQWWTYSDTEDEDDDDTYDVEFERMPQIKPTALRFYGSFNVVVAGITIVNSSQCHLKFDNCQGVMVHDLTISSPENSLNTDGIHLQNSKDVSIHHTNLACGDDCISIQTGCSNINIHNVNCGPGHGISIGGLGRDNTKACVSNVTVRDVNMFRTMNGVRIKTWQGGVGLVQDIRFSNIQVSEVQTPIIIDQFYCDRSTCRNQTSAVAVSGVQYENIRGTFTIKPVHFACSDSLPCSGISLTGVQLRPVQVPHYHLNNPFCWQAFGELYTPTVPPIACLQIGKPAGNNLQSYDDIC

SEQ ID NO: 15472 - DNA, 809 bp, Zea mays subsp. mays
  misc_feature (1)..(809): Ceres Seq. ID no. 12345167
ctctttcagggccttgaaatctcgccctcgttgcggtcgtccacatccttttctctcctcctcgccggcccaacctgattgttcttcaaccaagaggaagaaaggaaggaagggaccggaagcatcagccatgtcgaactcggcgtcgggaatggccgtctgtgatgaatgcaagctcaagttccaggagctcaaggcaaagaggagcttccgcttcatcgtgttcaagatcaacgagaacgtgcagcaggtggtggtggacaggctaggggagccaggcgagagctacgacgccttcacggcctgcttccccgccaacgagtgccgctacgccgtgttcgattttgacttcgtcactgacgagaactgccagaagagcaagatcttctttatctcttgggccccggatacatcgagggtgagaagcaagatgctgtacgcgagctccaaggaccggttcaagagggagctggatggcattcaggtggagctacaagcaaccgacccgagcgaaatgagcatggacatcgtcaagtcgcgagccctctgaaacagccccggccgctgcacctgcacgctgcaggggcgcatcggctcctgcatgcccgtgggtcgtcgaatccttgcttgtgtgttgggaacggtcttgtgttttcgtgtccttgttttcctggaagcaaaagccctgcattctgtatgagactgtatgccattttccatctttttctctccccatatctctgccctagtcccgctaccgctgtagactagaacttatttggtgtttgatctcgtggcattgtcgagcc

SEQ ID NO: 15473 - protein, 182 aa, Zea mays subsp. mays
  misc_feature (1)..(182): Ceres Seq. ID no. 12345168
SFRALKSRPRCGRPHPFLSSSPAQPDCSSTKRKKGRKGPEASAMSNSASGMAVCDECKLKFQELKAKRSFRFIVFKINENVQQVVVDRLGEPGESYDAFTACFPANECRYAVFDFDFVTDENCQKSKIFFISWAPDTSRVRSKMLYASSKDRFKRELDGIQVELQATDPSEMSMDIVKSRAL

SEQ ID NO: 15474 - protein, 139 aa, Zea mays subsp. mays
  misc_feature (1)..(139): Ceres Seq. ID no. 12345169
MSNSASGMAVCDECKLKFQELKAKRSFRFIVFKINENVQQVVVDRLGEPGESYDAFTACFPANECRYAVFDFDFVTDENCQKSKIFFISWAPDTSRVRSKMLYASSKDRFKRELDGIQVELQATDPSEMSMDIVKSRAL

SEQ ID NO: 15475 - protein, 132 aa, Zea mays subsp. mays
  misc_feature (1)..(132): Ceres Seq. ID no. 12345170
MAVCDECKLKFQELKAKRSFRFIVFKINENVQQVVVDRLGEPGESYDAFTACFPANECRYAVFDFDFVTDENCQKSKIFFISWAPDTSRVRSKMLYASSKDRFKRELDGIQVELQATDPSEMSMDIVKSRAL

SEQ ID NO: 15476 - DNA, 1918 bp, Zea mays subsp. mays
  misc_feature (1)..(1918): Ceres Seq. ID no. 12345175
gttctatctccttctccactgggccaactccgctctactctccaatcccaggcgaatccctcgtcttcttcgaccgcgtgtcggagcttcatcttctctggcccccctgccctgatttgccgctccgctctcccccccttccgccggaaaggggggaaattgatggcgaggctagtggctctggcatcggcggtggcggttctggtactcggcctcgcctgtgcagaggcggagccacagtgcacgcggcgccgcccgcccgcgccgccgcggccgcacagcgtgacgatcaccgagttcggggccgttggtgacggcgtcaccctcaacaccgtgtccttccagaacgccgtcttctacctgcgctccttcgccgacaagggcggcgcgcagctgtacattcccaggggccggtggctcaccggcagtttcaatctcaccagccaccttaccctcttcctggagagtggcgctgtcatcgttggcacgcaggacgtttcacagtggcctgttgttgaacctttgccatcatatggacgaggaatggaccttccaggttcgaggcatcgaagcttaataaacgggcagaatctaattgatgttgtaattacgggaaacaatggaacaatcgatggccagggttctacatggtggaactggtttcgttcgaataagttgaactatagccgccctcatcttgtggagtttgtggactctgagcaaatcgtcatttcgaacataacatttttaaattcccctgcttggagtatacatccagtgtattgcagcaatgtagtggtccatagtgtcacaattcagacttcattggatgctccacttaatcatggaatcgttccagattcttgctcaaatatgtgcatcgaggacagcagtatcagtgttagccacgacgccatatcactaaaaagcgggtgggacaagcaaggcattgctttcgggaggccaacctcagacatccacataagcagactggatctgcagtcctcactgggcgccgctctcacgttcgggagcgagatgtcgggcgggatctcagacgtccatgcggaccgcctcctcatccactcttcgttcagaggcgtcttcttcaagaccgcgccgggacgcggaggctatatcagagacaccgtgatctcagacgtccagatggaagacgtcgacgtcgccatcgcattcactggtgactggccaagccacccagatgaccagttcgacccgaccgcgctcccggtggtcagccacatcaccctgaagaacatgactggaacaagaatctcggtcgctggcgttttgtcaggaatcgccggcgacccgttcaccgacatctgcctctccaacatcaacttctcactggccgattcggccagtcccacctcccactggtcttgctccaacgtctccggatactccgagctggtcttccctgagccttgcctggatctgcagacccaatcctcagatgcctccatctgctccaccctccctagcttccacgccgccgccattgcagcagcgtaaatgcacagagtacaaagtgtccatcctttttcctgttcccggtcccctgcacacttcagaggatctctcaagccgccttttcctcccccgacaattctttgaagctataggcgcgctcccgtcgttgaagaaaagaatcgttcaccgtttttctccggccgtcggcttcgagggctcagctgcatcgcctttcttgcgggaggcaagcctggcggcggacggtcgacatcgagctgttaatttgcttgtacagttatgatttcttcattcaatctgtaagaaggaatttttgtggtagtagagggttgagtcgagtccagagagttgcttcatacgattgtcgatttggtgaataaaacacatgatggattcatgatcc

SEQ ID NO: 15477 - protein, 512 aa, Zea mays subsp. mays
  misc_feature (1)..(512): Ceres Seq. ID no. 12345176
VLSPSPLGQLRSTLQSQANPSSSSTACRSFIFSGPPALICRSALPPFRRKGGKLMARLVALASAVAVLVLGLACAEAEPQCTRRRPPAPPRPHSVTITEFGAVGDGVTLNTVSFQNAVFYLRSFADKGGAQLYIPRGRWLTGSFNLTSHLTLFLESGAVIVGTQDVSQWPVVEPLPSYGRGMDLPGSRHRSLINGQNLIDVVITGNNGTIDGQGSTWWNWFRSNKLNYSRPHLVEFVDSEQIVISNITFLNSPAWSIHPVYCSNVVVHSVTIQTSLDAPLNHGIVPDSCSNMCIEDSSISVSHDAISLKSGWDKQGIAFGRPTSDIHISRLDLQSSLGAALTFGSEMSGGISDVHADRLLIHSSFRGVFFKTAPGRGGYIRDTVISDVQMEDVDVAIAFTGDWPSHPDDQFDPTALPVVSHITLKNMTGTRISVAGVLSGIAGDPFTDICLSNINFSLADSASPTSHWSCSNVSGYSELVFPEPCLDLQTQSSDASICSTLPSFHAAAIAAA

SEQ ID NO: 15478 - protein, 458 aa, Zea mays subsp. mays
  misc_feature (1)..(458): Ceres Seq. ID no. 12345177
MARLVALASAVAVLVLGLACAEAEPQCTRRRPPAPPRPHSVTITEFGAVGDGVTLNTVSFQNAVFYLRSFADKGGAQLYIPRGRWLTGSFNLTSHLTLFLESGAVIVGTQDVSQWPVVEPLPSYGRGMDLPGSRHRSLINGQNLIDVVITGNNGTIDGQGSTWWNWFRSNKLNYSRPHLVEFVDSEQIVISNITFLNSPAWSIHPVYCSNVVVHSVTIQTSLDAPLNHGIVPDSCSNMCIEDSSISVSHDAISLKSGWDKQGIAFGRPTSDIHISRLDLQSSLGAALTFGSEMSGGISDVHADRLLIHSSFRGVFFKTAPGRGGYIRDTVISDVQMEDVDVAIAFTGDWPSHPDDQFDPTALPVVSHITLKNMTGTRISVAGVLSGIAGDPFTDICLSNINFSLADSASPTSHWSCSNVSGYSELVFPEPCLDLQTQSSDASICSTLPSFHAAAIAAA

SEQ ID NO: 15479 - protein, 331 aa, Zea mays subsp. mays
  misc_feature (1)..(331): Ceres Seq. ID no. 12345178
MDLPGSRHRSLINGQNLIDVVITGNNGTIDGQGSTWWNWFRSNKLNYSRPHLVEFVDSEQIVISNITFLNSPAWSIHPVYCSNVVVHSVTIQTSLDAPLNHGIVPDSCSNMCIEDSSISVSHDAISLKSGWDKQGIAFGRPTSDIHISRLDLQSSLGAALTFGSEMSGGISDVHADRLLIHSSFRGVFFKTAPGRGGYIRDTVISDVQMEDVDVAIAFTGDWPSHPDDQFDPTALPVVSHITLKNMTGTRISVAGVLSGIAGDPFTDICLSNINFSLADSASPTSHWSCSNVSGYSELVFPEPCLDLQTQSSDASICSTLPSFHAAAIAAA

SEQ ID NO: 15480 - DNA, 1878 bp, Zea mays subsp. mays
  misc_feature (1)..(1878): Ceres Seq. ID no. 12345179
atccgattggttggcctatttatctcccagtcccactccgtccactcgagctctccaccagctttccccttctctacggtccgggaatcggaagctcacggcagaagtttagccatggggcagacgcatcttttgttgctcgcttgtttctgggtcctgtcaacatgctccttgctacttgatgcttcctccgatggactgttaagaatcaacctgaacaagaagagactggacaaggaagctttgactgctgcgaaattggcgaagaaggagagcaaccttcgaaggtctgtgggtgctgaccagtatctcagtgcctcaactgatgacatagtccctttggacaactacctggacacccagtactttggacagatcagcatcggcacgccaccacagaacttcacagtgatattcgacactggaagctccaacttgtgggttcccctcatccaagtgctacttttcgatagcatgctacttacaccacagatacaagtcaaccaagtcgaagacttacacaaagaatggagaatcttgtacgataacatatggttctgggcaaatcgctggcttcttcagtgaggacaatgtgttggttggcaaccttgttgtgcaaaatcagaaatttattgagacaactcgagaaaccagccctactttcatcattgggaagtttgatggaattcttggtctcggatttcctgaaatttctgtaggaggagcccctccaatttggcagagcatgaaacagcagaaactggtcgcaaaggatgtcttctctttctggcttaatcgtgaccctgatgcatcttctggaggaggcgagcttgtctttggtggtgttgacccaaaacactacaaaggggaccatacatatgttcccgttacacgcaaaggctactggcagtttgacatgggagatcttattattggtggccactcaactggtttctgtgctggtggctgtgctgctattgtggactcagggacttcattgcttgctggtccaactaccatagtggctcaagtcaatcatgcaattggggctgagggaatcatcagtacagaatgcaaagaagtggtgagcgagtatggagagatgatccttgagttgctcatatcgcagacaagcccacagaaagtgtgcactcagattggtctctgtgtatttgatggtgcccattctgtcagcaatccaattgaatctgttgttgagaaacagaagcgtggttctgatcttttctgtactgcttgtgagatggctgttgtctggatacagaatcagctccgtgaaaacaagacaaaagaactcattttgaattatgctaatcagctctgtgagcgtctccctagccccaatggcgagtcaactgttgattgccatcagatctcaaagatgccaaatcttgcattcaccatagcaaacaagactttcaccttaacaccagagcagtacatagtgaagctggagcaagcaggacaaactatctgcatcagtgggtttatggcatttgacgtaccgcctcctcgtggtcctctctggatacttggtgatgtttttatgggtgcctaccacactgtttttgacttcggtgagaacaggattgggtttgccaaatctgcatgaggactggagttctgcgctttagtagcatgtccagtttgttatccgggtattgtacatatatatgttgccaactggtgtaatccgcagtgtttaatagtatatattcatgcagaaatctagaagattgtggcatgatatgtgtttgcaaatggagctatgctatgtatggagctccaggacctagagttttatgtaaagggagacgatgaggattagggcttttaacctattctcatcacgttattgtc

SEQ ID NO: 15481 - protein, 294 aa, Zea mays subsp. mays
  misc_feature (1)..(294): Ceres Seq. ID no. 12345180
MKQQKLVAKDVFSFWLNRDPDASSGGGELVFGGVDPKHYKGDHTYVPVTRKGYWQFDMGDLIIGGHSTGFCAGGCAAIVDSGTSLLAGPTTIVAQVNHAIGAEGIISTECKEVVSEYGEMILELLISQTSPQKVCTQIGLCVFDGAHSVSNPIESVVEKQKRGSDLFCTACEMAVVWIQNQLRENKTKELILNYANQLCERLPSPNGESTVDCHQISKMPNLAFTIANKTFTLTPEQYIVKLEQAGQTICISGFMAFDVPPPRGPLWILGDVFMGAYHTVFDFGENRIGFAKSA

SEQ ID NO: 15482 - protein, 237 aa, Zea mays subsp. mays
  misc_feature (1)..(237): Ceres Seq. ID no. 12345181
MGDLIIGGHSTGFCAGGCAAIVDSGTSLLAGPTTIVAQVNHAIGAEGIISTECKEVVSEYGEMILELLISQTSPQKVCTQIGLCVFDGAHSVSNPIESVVEKQKRGSDLFCTACEMAVVWIQNQLRENKTKELILNYANQLCERLPSPNGESTVDCHQISKMPNLAFTIANKTFTLTPEQYIVKLEQAGQTICISGFMAFDVPPPRGPLWILGDVFMGAYHTVFDFGENRIGFAKSA

SEQ ID NO: 15483 - protein, 194 aa, Zea mays subsp. mays
  misc_feature (1)..(194): Ceres Seq. ID no. 12345182
IRLVGLFISQSHSVHSSSPPAFPFSTVRESEAHGRSLAMGQTHLLLLACFWVLSTCSLLLDASSDGLLRINLNKKRLDKEALTAAKLAKKESNLRRSVGADQYLSASTDDIVPLDNYLDTQYFGQISIGTPPQNFTVIFDTGSSNLWVPLIQVLLFDSMLLTPQIQVNQVEDLHKEWRILYDNIWFWANRWLLQ

SEQ ID NO: 15484 - DNA, 1845 bp, Zea mays subsp. mays
  misc_feature (1)..(1845): Ceres Seq. ID no. 12345235
aaaacaaactccaagcccatccatcaccagtcctctgtcccctccccgaccgcaacgatctgctttgcatcttccccttcctccaattccagtcccatgcgtaatcgtctttcggaattgaatctctccatgtcatggcgctctgagcaagtacagctgcagtcagtgagagaaatgtaggcaccacaaatcggtccagcaaatccctgctcgtgctctaccaaaaaatccagtctttttccagcccaaatccgcctcttccgctgctgccataaagtccggactttacgaggctttcacgacgtgcgagatttctgttatcgatctccacgaacccgatagcctgccataaagtctgcacagacgcttcgcattgcttcaaccaaagatccatccaaactctgcaccccaaaagctagtacgatctcggggggacatgaagcgcctgcagtgcttcaagaagagcagcggcggcggcaatggtggcgggccggggaagcgcctggagcggcagctgtcgctgggcgagtacaagaaggcagtgtcgtggtccaagtacctcgtagcgccgccgggggctaggatccggagcggcggcgaggagctgtggagcgccgacctgtccaagctggagatccggggcaagtttgcgtcaggccggcacagccgcgtctactccggcaggtacaccggccgcgaggtggccatcaagatggtcagtcanccggaggaggacgccgcgctcgccgctgagctagagcgccagttcgcctccgaggtcgcgctcctacttcgcctccaccacccaaacatcatctcgtttgttgcagcatgcaagaaaccaccagtattctgcatcatcactgagttcatggcagggggctcccttaggaagtatctacatcagcaggagcctcactcagttcccctcaacctagtgctgaaattagctctagatatcgctcgcggaatgagctacctacactcccagggtatactccatagagacctgaaatcagagaacatacttctgggagaagatatgtcagtcaaagtcgcagatttcgggatttcatgcttggaatcacagtgtggaagtggcaaggggtttacaggaacctacaggtggatggctccggagatgatcaaagaggaacatcatactaggaaagtggacgtgtacagctttggaatcgtcatgtgggagatcttgactgctttggtcccgttcagcgacatgactccagagcaggctgctgttgctgttgccctgaagaatgcaaggccgccactgcctgcttcatgccctgtggcaataagccacctgatcatgcagtgctgggcgaccaaccctgacaaaagacctcagtttgatgacatcgtggcgatcctcgagagctacaaggaagcccttgatgaggacccgtcgttcttcttgtcgtatataccacctccaccggaccacggccaccaccaccatcatcagagccttctccggtgcttccctcgctccatgcgaaggtctgcatctctgaaagtatgatcaggccgggatgttgcctctgctcatcgatgctgtgtacaatatgcaccccctttcgactttctttgttttctatgcgcgcgtcggccctctattatgcggcattagcatgctatatgagctagtttatgctctcattttctccttgttggttaattatttccgtcattgatgccttgagtaatgtagagatgacaggcaggcatgcagcttccggttattatctatggatgccatttgcttttggtgatgggaaacatgaaagagccccagtaaatgtaatataattaagctctccatcc

SEQ ID NO: 15485 - protein, 368 aa, Zea mays subsp. mays
  misc_feature (1)..(368): Ceres Seq. ID no. 12345236
  misc_feature (96)..(96): Xaa is any aa, unknown or other
MKRLQCFKKSSGGGNGGGPGKRLERQLSLGEYKKAVSWSKYLVAPPGARIRSGGEELWSADLSKLEIRGKFASGRHSRVYSGRYTGREVAIKMVSXPEEDAALAAELERQFASEVALLLRLHHPNIISFVAACKKPPVFCIITEFMAGGSLRKYLHQQEPHSVPLNLVLKLALDIARGMSYLHSQGILHRDLKSENILLGEDMSVKVADFGISCLESQCGSGKGFTGTYRWMAPEMIKEEHHTRKVDVYSFGIVMWEILTALVPFSDMTPEQAAVAVALKNARPPLPASCPVAISHLIMQCWATNPDKRPQFDDIVAILESYKEALDEDPSFFLSYIPPPPDHGHHHHHQSLLRCFPRSMRRSASLKV

SEQ ID NO: 15486 - protein, 276 aa, Zea mays subsp. mays
  misc_feature (1)..(276): Ceres Seq. ID no. 12345237
  misc_feature (4)..(4): Xaa is any aa, unknown or other
MVSXPEEDAALAAELERQFASEVALLLRLHHPNIISFVAACKKPPVFCIITEFMAGGSLRKYLHQQEPHSVPLNLVLKLALDIARGMSYLHSQGILHRDLKSENILLGEDMSVKVADFGISCLESQCGSGKGFTGTYRWMAPEMIKEEHHTRKVDVYSFGIVMWEILTALVPFSDMTPEQAAVAVALKNARPPLPASCPVAISHLIMQCWATNPDKRPQFDDIVAILESYKEALDEDPSFFLSYIPPPPDHGHHHHHQSLLRCFPRSMRRSASLKV

SEQ ID NO: 15487 - protein, 223 aa, Zea mays subsp. mays
  misc_feature (1)..(223): Ceres Seq. ID no. 12345238
MAGGSLRKYLHQQEPHSVPLNLVLKLALDIARGMSYLHSQGILHRDLKSENILLGEDMSVKVADFGISCLESQCGSGKGFTGTYRWMAPEMIKEEHHTRKVDVYSFGIVMWEILTALVPFSDMTPEQAAVAVALKNARPPLPASCPVAISHLIMQCWATNPDKRPQFDDIVAILESYKEALDEDPSFFLSYIPPPPDHGHHHHHQSLLRCFPRSMRRSASLKV

SEQ ID NO: 15488 - DNA, 1755 bp, Zea mays subsp. mays
  misc_feature (1)..(1755): Ceres Seq. ID no. 12345239
gtcagtgatggctagacttctcactccctcccagcttcttcggacgcttcgcttgtctaatcgctgcaactgcagcttgctcgctgacttgccgccggcgagccccgctccgagcatctccgctgctgcttctgccgaatcccagagctccttctcccgcttgccccctttccctcctgtcacattgattcgattttcgtcgcccatggagctacaaattaagtgtaggaaccaattaaaagcttgccaaaactagggcggcggcatgcagcattcagcaataccctaggcgggctctcctcgcctccacagctccaggaagccgacccagagcagcacagcgccgcccattctgtctctctcggtctcggcagcgtaggcagcgtcaccctccgcttaaaccaccagcaccagctgctggtgcgccgccccgcccggcaccgccgctcctctacctcttcctggtggattgattattgtgagtttatccctgccccaatccatctgtccatggtccgcgtgggcttgtcttccgcgcccggggtcaatctgacagagcaaatcgataatgtttttgaccaactgatcaacaagatagaacatgcggattttgatacgcggcctttcttgaaacaattgaatgtgttaggccgctatgaaccaatcaagcggaatgtatattgcactaagagacgcattgaagattatggcatttcttgtcactgtaagccttctcctggttcatcagttgtgtgtggcagagactgccattgtggcatgcttttctcttgctgttcatcacaatgtgaatgtgatgacacatgcaccaataaatcattccagcacagacctcttaagaaaaccaaattgattaagacagagaaatgtggtcatggattggttgctgaggatgaaataaagaaaggagaatttgttattgagtatgttggagaagttattgatgacagaacatgtgagaataggctatggacaatgaaaaggctgcttgacactgacttctacctttgtgaggtcagtagtaatatggtcattgatgcaacaaacaagggaaaccggtcccgattcataaaccatagctgtgaaccaaacacagcgatgcagaaatggactgttgatggagagaccagggttggaatttttgcacttcgtgacataaagataggggaggagctgacctatgactataaatttgtccagtttggagcagctcaagtttgtcattgtgggtcttcgaactgcagaaaaatgctaggcacgacgaagtattcaggaagctcacagaatcatcatgccaagaagaaaaagcggaaaacaagttgtgagaattgcatacagcagtttcttcggctgtggcatccacataaaaaaatgtatgttggttgttggataattgacttcgatcaagaaactaaaatgcatactctgaagttcaatgatctccatactgaaaagttcaatttgaaggaagaagaatggcacttcttagaggtcgattttgatgaagattgatcattgaaggtaactgcaagagttggctgccatggtttgtgacagggttgccatggtttgctgcaccgccggcctactagttgggggttcatttgcgatggcagcatagacagacggacggccatttttcttccattttggagtaatagtccaagcctgaactgtgacattcgtgcatgcttatacgtgaaagtgtacctgagagcagattatacgtgaaagtgt

SEQ ID NO: 15489 - protein, 339 aa, Zea mays subsp. mays
  misc_feature (1)..(339): Ceres Seq. ID no. 12345240
MVRVGLSSAPGVNLTEQIDNVFDQLINKIEHADFDTRPFLKQLNVLGRYEPIKRNVYCTKRRIEDYGISCHCKPSPGSSVVCGRDCHCGMLFSCCSSQCECDDTCTNKSFQHRPLKKTKLIKTEKCGHGLVAEDEIKKGEFVIEYVGEVIDDRTCENRLWTMKRLLDTDFYLCEVSSNMVIDATNKGNRSRFINHSCEPNTAMQKWTVDGETRVGIFALRDIKIGEELTYDYKFVQFGAAQVCHCGSSNCRKMLGTTKYSGSSQNHHAKKKKRKTSCENCIQQFLRLWHPHKKMYVGCWIIDFDQETKMHTLKFNDLHTEKFNLKEEEWHFLEVDFDED

SEQ ID NO: 15490 - protein, 250 aa, Zea mays subsp. mays
  misc_feature (1)..(250): Ceres Seq. ID no. 12345241
MLFSCCSSQCECDDTCTNKSFQHRPLKKTKLIKTEKCGHGLVAEDEIKKGEFVIEYVGEVIDDRTCENRLWTMKRLLDTDFYLCEVSSNMVIDATNKGNRSRFINHSCEPNTAMQKWTVDGETRVGIFALRDIKIGEELTYDYKFVQFGAAQVCHCGSSNCRKMLGTTKYSGSSQNHHAKKKKRKTSCENCIQQFLRLWHPHKKMYVGCWIIDFDQETKMHTLKFNDLHTEKFNLKEEEWHFLEVDFDED

SEQ ID NO: 15491 - protein, 178 aa, Zea mays subsp. mays
  misc_feature (1)..(178): Ceres Seq. ID no. 12345242
MKRLLDTDFYLCEVSSNMVIDATNKGNRSRFINHSCEPNTAMQKWTVDGETRVGIFALRDIKIGEELTYDYKFVQFGAAQVCHCGSSNCRKMLGTTKYSGSSQNHHAKKKKRKTSCENCIQQFLRLWHPHKKMYVGCWIIDFDQETKMHTLKFNDLHTEKFNLKEEEWHFLEVDFDED

SEQ ID NO: 15492 - DNA, 1731 bp, Zea mays subsp. mays
  misc_feature (1)..(1731): Ceres Seq. ID no. 12345243
aagaattgttcggttacattttgcctgtttgctgtttttttcgtcggttcgcctcgtcttctccgcctggcccgagactcacactcaattcggtcgttttctgcattaacggagtcaggcccaggcctaacctcagtacatcagagcagccgaacacgcccgcggcaaccgccgccattctaccccaggtcggacggacccttgccggagacgagcacacgccacagcaggaattatcgggcgtagagcagcgcgaagcgagagatccaatggcggcggcggaggggcagtgggtgctcatggcaacggggcggacgccgaccaacattgcggtgatcaagtactgggggaagcgggacgaggcgctcatcctccccatcaacgacagcatcagcgtaacgctcgaccccgaccatctctccgccaccaccactgtcgccgtcagcccctcattcccttccgaccgcatgtggctcaatggcaaggagatctcgctattaggaggaaggtttcagagctgcctcagagaaatcagaaagcgtgctcgtgactttgaggacaaggagaagggcgtcaagatcaagaaagaggactgggacaagttgcatgttcacatagcctcgtacaacaacttccccactgctgctggtttggcctcttcagctgctggccttgcctgtttcgttttcacccttggaaagctgatgaatgcgaaagaagattatggagaactttcttcaatagcaaggcagggatctgggagtgcatgccgcagtatatatggtggttttgtgaaatggtgcatgggagaaaaagatgatggaagtgacagtattgccgtgcagcttgctgacgaaacacactggaatgatcttgtaattattattgcagtggtcagttcaaagcagaaggaaaccagtagcaccagtgggatgcgagatagtgttgaaacaagtcctctcttgcagtacagggcccagacagtggtgccaggtcgggtgttgaaaatggaagaagctatcaagaaccgtgactttgaatcctttgccaaattaacttgtgcggatagcaaccagtttcatgctgtatgcttagacacgagccctcctatcttctatatgaatgacacgtcacaccgaataattagccttgtggaaaaatggaaccactcagaaggaaccccacaggtcgcttacaccttcgatgctgggccaaacgctgttctaatcgcacaaaaccgtaaaactgcagcacatctcctccagaagctcctatactatttccctccacaggataatgatttgagcagctatctggttggcgataaatcgattctaggtgtcgccggattgcattccatgaaagacgtcgaggctcttccagcacctccagagacgaagataccggatcagaaattcaagggcgatgttagctacttcatctgcagcaggcttggcgctggtccaaaggttgtttctgacgaaggtcaagcattgatcgattcagtcaccggacttccaaaaggcgtgtagttctagatttaggttggaataatggtttaagctggggattaaagacaatggtatcatacaagcaacctgggccgggaagatacattaggctcgtgtcacgttggtttcgtgctgattgacttgacggtgtattggtcatgtattatgcatttgcgctggtgttcgttgctgtccaataaagatagaacacgttctcgcc

SEQ ID NO: 15493 - protein, 509 aa, Zea mays subsp. mays
  misc_feature (1)..(509): Ceres Seq. ID no. 12345244
ELFGYILPVCCFFRRFASSSPPGPRLTLNSVVFCINGVRPRPNLSTSEQPNTPAATAAILPQVGRTLAGDEHTPQQELSGVEQREARDPMAAAEGQWVLMATGRTPTNIAVIKYWGKRDEALILPINDSISVTLDPDHLSATTTVAVSPSFPSDRMWLNGKEISLLGGRFQSCLREIRKRARDFEDKEKGVKIKKEDWDKLHVHIASYNNFPTAAGLASSAAGLACFVFTLGKLMNAKEDYGELSSIARQGSGSACRSIYGGFVKWCMGEKDDGSDSIAVQLADETHWNDLVIIIAVVSSKQKETSSTSGMRDSVETSPLLQYRAQTVVPGRVLKMEEAIKNRDFESFAKLTCADSNQFHAVCLDTSPPIFYMNDTSHRIISLVEKWNHSEGTPQVAYTFDAGPNAVLIAQNRKTAAHLLQKLLYYFPPQDNDLSSYLVGDKSILGVAGLHSMKDVEALPAPPETKIPDQKFKGDVSYFICSRLGAGPKVVSDEGQALIDSVTGLPKGV

SEQ ID NO: 15494 - protein, 420 aa, Zea mays subsp. mays
  misc_feature (1)..(420): Ceres Seq. ID no. 12345245
MAAAEGQWVLMATGRTPTNIAVIKYWGKRDEALILPINDSISVTLDPDHLSATTTVAVSPSFPSDRMWLNGKEISLLGGRFQSCLREIRKRARDFEDKEKGVKIKKEDWDKLHVHIASYNNFPTAAGLASSAAGLACFVFTLGKLMNAKEDYGELSSIARQGSGSACRSIYGGFVKWCMGEKDDGSDSIAVQLADETHWNDLVIIIAVVSSKQKETSSTSGMRDSVETSPLLQYRAQTVVPGRVLKMEEAIKNRDFESFAKLTCADSNQFHAVCLDTSPPIFYMNDTSHRIISLVEKWNHSEGTPQVAYTFDAGPNAVLIAQNRKTAAHLLQKLLYYFPPQDNDLSSYLVGDKSILGVAGLHSMKDVEALPAPPETKIPDQKFKGDVSYFICSRLGAGPKVVSDEGQALIDSVTGLPKGV

SEQ ID NO: 15495 - protein, 410 aa, Zea mays subsp. mays
  misc_feature (1)..(410): Ceres Seq. ID no. 12345246
MATGRTPTNIAVIKYWGKRDEALILPINDSISVTLDPDHLSATTTVAVSPSFPSDRMWLNGKEISLLGGRFQSCLREIRKRARDFEDKEKGVKIKKEDWDKLHVHIASYNNFPTAAGLASSAAGLACFVFTLGKLMNAKEDYGELSSIARQGSGSACRSIYGGFVKWCMGEKDDGSDSIAVQLADETHWNDLVIIIAVVSSKQKETSSTSGMRDSVETSPLLQYRAQTVVPGRVLKMEEAIKNRDFESFAKLTCADSNQFHAVCLDTSPPIFYMNDTSHRIISLVEKWNHSEGTPQVAYTFDAGPNAVLIAQNRKTAAHLLQKLLYYFPPQDNDLSSYLVGDKSILGVAGLHSMKDVEALPAPPETKIPDQKFKGDVSYFICSRLGAGPKVVSDEGQALIDSVTGLPKGV

SEQ ID NO: 15496 - DNA, 1592 bp, Zea mays subsp. mays
  misc_feature (1)..(1592): Ceres Seq. ID no. 12345312
gtcgctgcctgctctgcttgctgcgccactccaaacccaacccaaaacccccacacgagatctgcgcagcaatggcgacgcggtgccacgtcctgctcctcctcgccgccgccttcgcgtccctcctcgcgctcgtggccgcggaagggggcgaagaggggccccgcgggcgccggctgctcgtcctcctggacgacctggccgtgcggtcgtcgcactcggccttcttcggctcgctccaggcgcgtgggttcgatctcgacttccgcctcgctgacgatccaaagctctcgctccaccgctacggccagtacctctacgacggcctcgtgctcttcgccccctccacaccacgttttggtggatcagtggaccagaacgcagtcctcgaatttattgatgctgggcatgacatgatcctggcggcagattcctctgcctctgatctcattcgtggcattgcaacagagtgtggggttgattttgatgaggatccagaggcaatggttattgaccatatgaactatgccgtcacagatgttgaaggtgatcacaccttgattgctggtgacgatcttatccattcggatgtgatactagggtctgaaaagattgaggctcctgtattgtttcgaggaattggacacatggctaatccatcaaacagtttggttctgaaggttctatcagcctctccatcagcatattcagctaatccaaagactaagttagcgtctcctccatcgctcactgggtcagctatatcattggtttcggttatgcaggcaagaaataatgctcgggtgctgttatctggatcactcgatctgtttagcaaccggttcctgaagtctggtgttcaaaaggctgatagcaaaacaagatatgagagagctggaaacgagcaatttgtggcagagataagcaaatgggttttccatgagaggggacatctaaaggctgttaatgttaggcatcacaaggttggggagaccaatgaaccaggcatgtaccgcattaatgatgacctggaatactctgttgagatctatgaatggtccggaacaagctggaagccgtatgttgctgatgatgtgcagcttcaatttttcatgatgagcccttacgttctgaaaactatgtcgactgacaacaagggtttgtattcaacaaccttcaaagttccagatgtttatggagttttccagttcaaagttgagtaccaaagactgggatatactggtctgtcttttacaaagcagattccagtacgtccttacagacataatgagtatgagagattcataacatcagcgtacccatactacaccgcctcattttcaacaatgggtgctttcttcgtattctcgtttgtgtacctgtaccacaaataaaggactcatgggagcgcacaagtctctggaggctgacgtgaccaagatctgtgggcactgaatgttgtgctataagccaagagttacccggcgccaattttatggaaccatgtttttgtactgccaacttagataacatttgacgaccgtgaccgcactcatgggaaatttactcgtgctaggatgttcgatctgccg

SEQ ID NO: 15497 - protein, 463 aa, Zea mays subsp. mays
  misc_feature (1)..(463): Ceres Seq. ID no. 12345313
RCLLCLLRHSKPNPKPPHEICAAMATRCHVLLLLAAAFASLLALVAAEGGEEGPRGRRLLVLLDDLAVRSSHSAFFGSLQARGFDLDFRLADDPKLSLHRYGQYLYDGLVLFAPSTPRFGGSVDQNAVLEFIDAGHDMILAADSSASDLIRGIATECGVDFDEDPEAMVIDHMNYAVTDVEGDHTLIAGDDLIHSDVILGSEKIEAPVLFRGIGHMANPSNSLVLKVLSASPSAYSANPKTKLASPPSLTGSAISLVSVMQARNNARVLLSGSLDLFSNRFLKSGVQKADSKTRYERAGNEQFVAEISKWVFHERGHLKAVNVRHHKVGETNEPGMYRINDDLEYSVEIYEWSGTSWKPYVADDVQLQFFMMSPYVLKTMSTDNKGLYSTTFKVPDVYGVFQFKVEYQRLGYTGLSFTKQIPVRPYRHNEYERFITSAYPYYTASFSTMGAFFVFSFVYLYHK

SEQ ID NO: 15498 - protein, 440 aa, Zea mays subsp. mays
  misc_feature (1)..(440): Ceres Seq. ID no. 12345314
MATRCHVLLLLAAAFASLLALVAAEGGEEGPRGRRLLVLLDDLAVRSSHSAFFGSLQARGFDLDFRLADDPKLSLHRYGQYLYDGLVLFAPSTPRFGGSVDQNAVLEFIDAGHDMILAADSSASDLIRGIATECGVDFDEDPEAMVIDHMNYAVTDVEGDHTLIAGDDLIHSDVILGSEKIEAPVLFRGIGHMANPSNSLVLKVLSASPSAYSANPKTKLASPPSLTGSAISLVSVMQARNNARVLLSGSLDLFSNRFLKSGVQKADSKTRYERAGNEQFVAEISKWVFHERGHLKAVNVRHHKVGETNEPGMYRINDDLEYSVEIYEWSGTSWKPYVADDVQLQFFMMSPYVLKTMSTDNKGLYSTTFKVPDVYGVFQFKVEYQRLGYTGLSFTKQIPVRPYRHNEYERFITSAYPYYTASFSTMGAFFVFSFVYLYHK

SEQ ID NO: 15499 - protein, 326 aa, Zea mays subsp. mays
  misc_feature (1)..(326): Ceres Seq. ID no. 12345315
MILAADSSASDLIRGIATECGVDFDEDPEAMVIDHMNYAVTDVEGDHTLIAGDDLIHSDVILGSEKIEAPVLFRGIGHMANPSNSLVLKVLSASPSAYSANPKTKLASPPSLTGSAISLVSVMQARNNARVLLSGSLDLFSNRFLKSGVQKADSKTRYERAGNEQFVAEISKWVFHERGHLKAVNVRHHKVGETNEPGMYRINDDLEYSVEIYEWSGTSWKPYVADDVQLQFFMMSPYVLKTMSTDNKGLYSTTFKVPDVYGVFQFKVEYQRLGYTGLSFTKQIPVRPYRHNEYERFITSAYPYYTASFSTMGAFFVFSFVYLYHK

SEQ ID NO: 15500 - DNA, 1036 bp, Zea mays subsp. mays
  misc_feature (1)..(1036): Ceres Seq. ID no. 12345362
ctacggcccacggaaccagtcagtcctctctccttccggcttccgctgctcttctttctttcctggcatcttggagacggcggcgagacgaggagaggactggaccatggctgcctcttcggctctcaggctaatcctgggctcctcgtcggcgtcgcgtcgccagattctgtccgagatgggatacaaattcacgcttcttagtgcggatatcgatgagaaagcgatcagaaaggagaacccagaggaactggtggtcgccttggctcatgcgaaagcagacgctattctggagaagatgcagaacaatgggatgatgaaagagattcttgattctcaagatactactctgatgataactgctgaccaggttgtgttgcatgatggagtgattagagaaaaacctagcacaccagaagaggcacggaaattcatcaaagggtactctgaaagccatgctgcgacgattggatctgtgcttgttacaaatgtgaagactggagctagaagggaaggatgggataaagcagaagtttatttccacaaaattcctgacgaagttgtggagagtttgatcgaggagggcgatgtgttctatgtcgctggtggtctccttgtggagcaccccttaacttcacctctcgtggaagccattgttggtacaattgatagtgtaatggggctccctaaggcgctcacggagaagctcatcaaggaatccctttcagagacatagctacaatcctatggactgaactgacctgtaatgcagaaatcatattggtggcggactggcggtggctaaatcagtttggcagcaatgtagtgtgagaatcatgtaaccattcctattttccaacaaaaaaggccgtcatgtgatcagcccactatgaacggaattcatccttggcttccatgaccataggtctgctgaatcattcgttttgttttctgtaatgtgttcggccgcaaggatttttaacgcctggcagattgcttgatttgatctatgaattcgtgctaggtgctctgtggc

SEQ ID NO: 15501 - protein, 244 aa, Zea mays subsp. mays
  misc_feature (1)..(244): Ceres Seq. ID no. 12345363
YGPRNQSVLSPSGFRCSSFFPGILETAARRGEDWTMAASSALRLILGSSSASRRQILSEMGYKFTLLSADIDEKAIRKENPEELVVALAHAKADAILEKMQNNGMMKEILDSQDTTLMITADQVVLHDGVIREKPSTPEEARKFIKGYSESHAATIGSVLVTNVKTGARREGWDKAEVYFHKIPDEVVESLIEEGDVFYVAGGLLVEHPLTSPLVEAIVGTIDSVMGLPKALTEKLIKESLSET

SEQ ID NO: 15502 - protein, 209 aa, Zea mays subsp. mays
  misc_feature (1)..(209): Ceres Seq. ID no. 12345364
MAASSALRLILGSSSASRRQILSEMGYKFTLLSADIDEKAIRKENPEELVVALAHAKADAILEKMQNNGMMKEILDSQDTTLMITADQVVLHDGVIREKPSTPEEARKFIKGYSESHAATIGSVLVTNVKTGARREGWDKAEVYFHKIPDEVVESLIEEGDVFYVAGGLLVEHPLTSPLVEAIVGTIDSVMGLPKALTEKLIKESLSET

SEQ ID NO: 15503 - protein, 185 aa, Zea mays subsp. mays
  misc_feature (1)..(185): Ceres Seq. ID no. 12345365
MGYKFTLLSADIDEKAIRKENPEELVVALAHAKADAILEKMQNNGMMKEILDSQDTTLMITADQVVLHDGVIREKPSTPEEARKFIKGYSESHAATIGSVLVTNVKTGARREGWDKAEVYFHKIPDEVVESLIEEGDVFYVAGGLLVEHPLTSPLVEAIVGTIDSVMGLPKALTEKLIKESLSET

SEQ ID NO: 15504 - DNA, 1228 bp, Zea mays subsp. mays
  misc_feature (1)..(1228): Ceres Seq. ID no. 12345382
ctctctgtcgcatttcccgtcctgtccttcccttacccggcggcttaaaccctagttctcactcccatcgccgcttcagctccgccgcagcagatggagttctggggtctcgaggtcaagcctggttccactgttaagtgtgagcctggatatggctttgtgctgcacctttcccaggctgctcttggggaatcgaagaagagtgataatgccttgatgtatgtcaaaattgatgatcagaaacttgccattggaaccctctctgttgacaagaacccacacatacaatttgatctggttttcgataaagagtttgagctgtcgcacacatcaaaaactaccagcgtcttcttcactggctacaaggttgagcagccattcgaggaagatgagccttcttccacaatggatcttgattctgaagatgaagacgaggagcgggatgttccagtagtcaaggaaaatggcaaagctgatgggaagaaacagaaaagtcaagaaaaggcagttgctgcaccttcaaaatcaagtccggattccaagaagagcaaggatgacgatgattctgatgaggacgagactgatgattctgatgaggatgagacggacgattctgatgagggtttatcttctgaagaaggcgatgatgattcaagtgatgaagatgataccagtgacgatgaggaggaagacactccaactcctaagaagcctgaggtaggcaagaagagagctgctgaaagttccgtgctgaaaactcctctatctgataagaaagcaaaggttgccacaccgtcatctcagaagacaggtggcaagaagggcgccgccgtccatgtggcaactccacacccagcaaaaggcaagaccattgtaaacaatgacaaatcggtcaagtctccaaaatctgcgccaaaatctggtgtcccttgcaaatcgtgcagcaagtcattcatcagtcagacggcacttcaggctcactcgaaggcgaagcatgggggcaagtgagtcgcaggtccaatagagtcaacaacaaatgcgaaacatgggagaggagggtaagcgagagtctcgaaagagtgtcggtggaagtaggcctaaccttattttgtttagagacgggctatgcgttcgatgtagcaaaacaaggctgtggtttgtgtacttcaatatttgggttgtgtgtttcgaatttttttttgaacgtgtctcggattgttgtggtgcc

SEQ ID NO: 15505 - protein, 304 aa, Zea mays subsp. mays
  misc_feature (1)..(304): Ceres Seq. ID no. 12345383
MEFWGLEVKPGSTVKCEPGYGFVLHLSQAALGESKKSDNALMYVKIDDQKLAIGTLSVDKNPHIQFDLVFDKEFELSHTSKTTSVFFTGYKVEQPFEEDEPSSTMDLDSEDEDEERDVPVVKENGKADGKKQKSQEKAVAAPSKSSPDSKKSKDDDDSDEDETDDSDEDETDDSDEGLSSEEGDDDSSDEDDTSDDEEEDTPTPKKPEVGKKRAAESSVLKTPLSDKKAKVATPSSQKTGGKKGAAVHVATPHPAKGKTIVNNDKSVKSPKSAPKSGVPCKSCSKSFISQTALQAHSKAKHGGK

SEQ ID NO: 15506 - protein, 263 aa, Zea mays subsp. mays
  misc_feature (1)..(263): Ceres Seq. ID no. 12345384
MYVKIDDQKLAIGTLSVDKNPHIQFDLVFDKEFELSHTSKTTSVFFTGYKVEQPFEEDEPSSTMDLDSEDEDEERDVPVVKENGKADGKKQKSQEKAVAAPSKSSPDSKKSKDDDDSDEDETDDSDEDETDDSDEGLSSEEGDDDSSDEDDTSDDEEEDTPTPKKPEVGKKRAAESSVLKTPLSDKKAKVATPSSQKTGGKKGAAVHVATPHPAKGKTIVNNDKSVKSPKSAPKSGVPCKSCSKSFISQTALQAHSKAKHGGK

SEQ ID NO: 15507 - protein, 200 aa, Zea mays subsp. mays
  misc_feature (1)..(200): Ceres Seq. ID no. 12345385
MDLDSEDEDEERDVPVVKENGKADGKKQKSQEKAVAAPSKSSPDSKKSKDDDDSDEDETDDSDEDETDDSDEGLSSEEGDDDSSDEDDTSDDEEEDTPTPKKPEVGKKRAAESSVLKTPLSDKKAKVATPSSQKTGGKKGAAVHVATPHPAKGKTIVNNDKSVKSPKSAPKSGVPCKSCSKSFISQTALQAHSKAKHGGK

SEQ ID NO: 15508 - DNA, 1067 bp, Zea mays subsp. mays
  misc_feature (1)..(1067): Ceres Seq. ID no. 12345390
tcgcattccccctcgatcggcctccctcccccaagatcctccactcgatcccaaacaaaccaacaaatccatccatcgcacatggacgcgttcttctcggcctcctccgcgtcggcgccctacggctacggcgccggcggatggagctacgactcgctcaagaacttccgccagatcacccctgccgtccagacccacctcaagctcgtctacctcaccctgtgcgcggcgctggcctcgtcggcggtgggcgcttacctgcacgtggtctggaacatcggcgggacgctgacaatgctcggttgcgtcggcagcatcgcctggctcttctcggtgcccgtctacgaggagaggaagaggtatgggctgctgatggcggctgccctcctggaaggcgcttcggtcggacccctcgtcaagctcgccgtggaatttgacccaagcatcctggtgacggcgttcgtggggactgccatcgcgttcgcgtgcttctccggcgcggccatggtggccaggcgcagggagtacctctacctgggcgggctgctctcgtcggggctctccatcctgctctggctgcagctcgccgcctccatcttcggccactccgcaaccagcttcatgttcgaggtctacttcgggctgctcatcttcctgggctacatggtgtacgacacgcaggagatcatcgagagggcgcaccgcggcgacatggaccacgtcaagcacgccctcaccctcttcaccgacttcgtggccgtcctcgtccgcgtcctcgtcatcatgctcaagaacgcggccgacaagtcggaggacaagaagaggaagaagaggtcgtgagcgtcgagaacggaagctctcccacatgcataggagtaactgccagggttccttcctggggtggaagtgtggaactgagcttgaatgttaagaagtgttcctttgttctcttcctctcttgatgactctgtaaatagctatgtcaatctggttaagtttggtttggttgcatgtgcctgtgttcgctgccctttggatagaatgcaaattaaagatgttgctattgc

SEQ ID NO: 15509 - protein, 279 aa, Zea mays subsp. mays
  misc_feature (1)..(279): Ceres Seq. ID no. 12345391
SHSPSIGLPPPRSSTRSQTNQQIHPSHMDAFFSASSASAPYGYGAGGWSYDSLKNFRQITPAVQTHLKLVYLTLCAALASSAVGAYLHVVWNIGGTLTMLGCVGSIAWLFSVPVYEERKRYGLLMAAALLEGASVGPLVKLAVEFDPSILVTAFVGTAIAFACFSGAAMVARRREYLYLGGLLSSGLSILLWLQLAASIFGHSATSFMFEVYFGLLIFLGYMVYDTQEIIERAHRGDMDHVKHALTLFTDFVAVLVRVLVIMLKNAADKSEDKKRKKRS

SEQ ID NO: 15510 - protein, 252 aa, Zea mays subsp. mays
  misc_feature (1)..(252): Ceres Seq. ID no. 12345392
MDAFFSASSASAPYGYGAGGWSYDSLKNFRQITPAVQTHLKLVYLTLCAALASSAVGAYLHVVWNIGGTLTMLGCVGSIAWLFSVPVYEERKRYGLLMAAALLEGASVGPLVKLAVEFDPSILVTAFVGTAIAFACFSGAAMVARRREYLYLGGLLSSGLSILLWLQLAASIFGHSATSFMFEVYFGLLIFLGYMVYDTQEIIERAHRGDMDHVKHALTLFTDFVAVLVRVLVIMLKNAADKSEDKKRKKRS

SEQ ID NO: 15511 - protein, 181 aa, Zea mays subsp. mays
  misc_feature (1)..(181): Ceres Seq. ID no. 12345393
MLGCVGSIAWLFSVPVYEERKRYGLLMAAALLEGASVGPLVKLAVEFDPSILVTAFVGTAIAFACFSGAAMVARRREYLYLGGLLSSGLSILLWLQLAASIFGHSATSFMFEVYFGLLIFLGYMVYDTQEIIERAHRGDMDHVKHALTLFTDFVAVLVRVLVIMLKNAADKSEDKKRKKRS

SEQ ID NO: 15512 - DNA, 1377 bp, Zea mays subsp. mays
  misc_feature (1)..(1377): Ceres Seq. ID no. 12345470
aaaacaaagcttttgttgtctctcacctactattcttcttgcctcctccctccaccagcatccctgagtctgccatgggcaactgctggggaaccaagattagctctgacaccgccgcctccccttccacatcaccgttccctcgcagcgagggtgagattctccggtgtgccaatgtcaggagcttcaccttgacggagctgatgacctccacccggaacttccggcccgacagcgtcctcggcgagggaggcttcggctccgtcttcaaggggtggatcgacgagaccaccttcgccccggccaggcccggcacagggatggtcatcgctgtcaagaagctcaaccagcagggattgcaggggcacagggagtggctggctgaagtcaactacctgggccagttgtctcaccccagtctcgtaaggctcgtagggtactgcctccaagacgagcagcgccttctcgtctacgagttcatgccgcgaggaagcttggagaaccatcttttcaggacctcacgtttccagccgctctcctggaacctacgaatcaaagtttgccctgggagcagccaagggccttgcgttcttgcacagcgacaaggccagagttatctaccgagatttcaagacatccaacgtgctcctggattcgacttttgtgtgtgttttcagaactacaacgccaagctgtctgacttcggtttggcaaaggacgggccaaccggcgaccagagccacgtgtccaccagagtcatgggcacctacggatatgctgctccggaatatctcgcaacaggtcatctcacgccgaagagcgacgtctacagcttcggcgtcgtgctgctggagatgctgtcgggccgccgcgccatggacaagaaccgcccggccaccgagcacaacctcgtcgactgggcgcgcccctacctcagcagcaagcgccgcgtctcccgcatcctggacgaccgcctggccggccactacccgctgccggccgtccaaagggcggcagcgctggcgctgcagtgcctctccgaggactccaggaagaggccaaccatggaccaggtcgtcgcgtcgctgcagcaactcacagccgcccaggaccacgacgatgcccaccggtcgtcgcgcaggtacccaaaagatcaccgtcaggctgcggcgctcaacaaccggaatctgaacgctcatcgccgcctgtccgccttgcctctacccgagtgaactaccatattcatattcgatcatcttttgtatcttcacaaaagtagtatgtaaatccgtggtgaagacctgggtaattagtgataaaacacaacttgattgttgattagatgtaaatggtggcttcaacttaaccggtttatgg

SEQ ID NO: 15513 - protein, 409 aa, Zea mays subsp. mays
  misc_feature (1)..(409): Ceres Seq. ID no. 12345471
NKAFVVSHLLFFLPPPSTSIPESAMGNCWGTKISSDTAASPSTSPFPRSEGEILRCANVRSFTLTELMTSTRNFRPDSVLGEGGFGSVFKGWIDETTFAPARPGTGMVIAVKKLNQQGLQGHREWLAEVNYLGQLSHPSLVRLVGYCLQDEQRLLVYEFMPRGSLENHLFRTSRFQPLSWNLRIKVCPGSSQGPCVLAQRQGQSYLPRFQDIQRAPGFDFCVCFQNYNAKLSDFGLAKDGPTGDQSHVSTRVMGTYGYAAPEYLATGHLTPKSDVYSFGVVLLEMLSGRRAMDKNRPATEHNLVDWARPYLSSKRRVSRILDDRLAGHYPLPAVQRAAALALQCLSEDSRKRPTMDQVVASLQQLTAAQDHDDAHRSSRRYPKDHRQAAALNNRNLNAHRRLSALPLPE

SEQ ID NO: 15514 - protein, 385 aa, Zea mays subsp. mays
  misc_feature (1)..(385): Ceres Seq. ID no. 12345472
MGNCWGTKISSDTAASPSTSPFPRSEGEILRCANVRSFTLTELMTSTRNFRPDSVLGEGGFGSVFKGWIDETTFAPARPGTGMVIAVKKLNQQGLQGHREWLAEVNYLGQLSHPSLVRLVGYCLQDEQRLLVYEFMPRGSLENHLFRTSRFQPLSWNLRIKVCPGSSQGPCVLAQRQGQSYLPRFQDIQRAPGFDFCVCFQNYNAKLSDFGLAKDGPTGDQSHVSTRVMGTYGYAAPEYLATGHLTPKSDVYSFGVVLLEMLSGRRAMDKNRPATEHNLVDWARPYLSSKRRVSRILDDRLAGHYPLPAVQRAAALALQCLSEDSRKRPTMDQVVASLQQLTAAQDHDDAHRSSRRYPKDHRQAAALNNRNLNAHRRLSALPLPE

SEQ ID NO: 15515 - protein, 342 aa, Zea mays subsp. mays
  misc_feature (1)..(342): Ceres Seq. ID no. 12345473
MTSTRNFRPDSVLGEGGFGSVFKGWIDETTFAPARPGTGMVIAVKKLNQQGLQGHREWLAEVNYLGQLSHPSLVRLVGYCLQDEQRLLVYEFMPRGSLENHLFRTSRFQPLSWNLRIKVCPGSSQGPCVLAQRQGQSYLPRFQDIQRAPGFDFCVCFQNYNAKLSDFGLAKDGPTGDQSHVSTRVMGTYGYAAPEYLATGHLTPKSDVYSFGVVLLEMLSGRRAMDKNRPATEHNLVDWARPYLSSKRRVSRILDDRLAGHYPLPAVQRAAALALQCLSEDSRKRPTMDQVVASLQQLTAAQDHDDAHRSSRRYPKDHRQAAALNNRNLNAHRRLSALPLPE

SEQ ID NO: 15516 - DNA, 465 bp, Zea mays subsp. mays
  misc_feature (1)..(465): Ceres Seq. ID no. 12345496
atgggcaggattatcaactctgacgaggtgcagtctgtggttaagccactcaacaaggaggtgaagcgcagggagaagaggaagaacccgctcacgaacatggctgctgtgctcaagctgaacccctacctcggcactgcccggaagatggccacccttgctgaggctgcccgagtcaaggcccggaaggagaagcttgattccaagaggaccaagcttacctcggaggagactgccaaggtcaaggctgccggcaaggcgtggtacaagaccatgatctcggacagtgactacaccgagtttgagaacttcaccaagtggctcggagtgacgcagtgaagcggcctttgagacctagttaagttttgattagttgtgtcgctgaacttgtattgagacgaaatagtattttatcaatctgtcttatcctgcatcttcacaacaagttacctatctgtggactct

SEQ ID NO: 15517 - protein, 112 aa, Zea mays subsp. mays
  misc_feature (1)..(112): Ceres Seq. ID no. 12345497
MGRIINSDEVQSVVKPLNKEVKRREKRKNPLTNMAAVLKLNPYLGTARKMATLAEAARVKARKEKLDSKRTKLTSEETAKVKAAGKAWYKTMISDSDYTEFENFTKWLGVTQ

SEQ ID NO: 15518 - protein, 79 aa, Zea mays subsp. mays
  misc_feature (1)..(79): Ceres Seq. ID no. 12345498
MAAVLKLNPYLGTARKMATLAEAARVKARKEKLDSKRTKLTSEETAKVKAAGKAWYKTMISDSDYTEFENFTKWLGVTQ

SEQ ID NO: 15519 - protein, 63 aa, Zea mays subsp. mays
  misc_feature (1)..(63): Ceres Seq. ID no. 12345499
MATLAEAARVKARKEKLDSKRTKLTSEETAKVKAAGKAWYKTMISDSDYTEFENFTKWLGVTQ

SEQ ID NO: 15520 - DNA, 1357 bp, Zea mays subsp. mays
  misc_feature (1)..(1357): Ceres Seq. ID no. 12345592
accatcaagctttcaggcagggcaagcaactcgagtagtagttgccagccacacctcctgtcttcctttttccttctcgcattgtggaggagaaggatcaagtgctcataagcaagctagcttgacgaagtataggaaattaggaatacaaataaactcatcctcctcatatataaacgctcgatctccagatatggccggcctgtccctgctgcatcccatggccttcgccttcggcctcctcggcaacatcatctccttcatgacctacctggccccactgccgacgttctaccggatctacaagaacaagtcgacggaggggttccagtcggtgccgtacgtggtggccctcttcagcgccatgctgtggatctactacgcgctgctcaagtccaacgagctcctgctcatcaccatcaactccgccggctgcgtcatcgagaccctctacatcgccatgtacctcctctacgcgcccaagaaggcaaagctgttcacggccaagatcctcctcctcctcaacgtgggcgtgttcgggctcatcctcctcctcacgctgctgctctccgccggacagcgccgcgtcgtcgtcctcggctgggtctgcgtcgccttctccgttagcgtcttcgtcgcgccgctcagcatcatccgccaggtggtgagaacaaggagcgtcgagttcatgcccttctcgctctccctctccctcaccgtcagcgccgtcgtctggttcctctacggcctcctcatcaaggacaaatacgtcgctctgccaaacgtcatcggcttcagcttcggcgtggtccagatgggtctctacgcgctctaccgcaacgcgacgcccagggtgcctgccaaggacgtggccgacgacgccagcaaggacaaggcgcccggcgaacatgtggtggtcaccattgccaagctgaccgcggcgacgacggcacctgcagctgccgtggcagaggatcttgtcaaggtccacgacggccacccggaggaagcagccaagggcgccgccaagccggcggagaacggcgcgggacgcagcgacgccgagcaagtctagattcctcgctcgatcagatcagaattcatgaagaagaacatgcgtatgtatgtgtatccggtaggtcgtaacataacataaattaagtgcgcatgcagtttggcaactcatgttgtttcatttcgttctcgcgcaatatgcgcatgtattaattttagattgtcattgttgtagttcttgcctccgattattattagtgtgtccgtcaccttccatgtaataacaaaaaaaatatatataaatggtcctattaaagcaaaagctaaagttcgtttttatgcc

SEQ ID NO: 15521 - protein, 357 aa, Zea mays subsp. mays
  misc_feature (1)..(357): Ceres Seq. ID no. 12345593
PSSFQAGQATRVVVASHTSCLPFSFSHCGGEGSSAHKQASLTKYRKLGIQINSSSSYINARSPDMAGLSLLHPMAFAFGLLGNIISFMTYLAPLPTFYRIYKNKSTEGFQSVPYVVALFSAMLWIYYALLKSNELLLITINSAGCVIETLYIAMYLLYAPKKAKLFTAKILLLLNVGVFGLILLLTLLLSAGQRRVVVLGWVCVAFSVSVFVAPLSIIRQVVRTRSVEFMPFSLSLSLTVSAVVWFLYGLLIKDKYVALPNVIGFSFGVVQMGLYALYRNATPRVPAKDVADDASKDKAPGEHVVVTIAKLTAATTAPAAAVAEDLVKVHDGHPEEAAKGAAKPAENGAGRSDAEQV

SEQ ID NO: 15522 - protein, 293 aa, Zea mays subsp. mays
  misc_feature (1)..(293): Ceres Seq. ID no. 12345594
MAGLSLLHPMAFAFGLLGNIISFMTYLAPLPTFYRIYKNKSTEGFQSVPYVVALFSAMLWIYYALLKSNELLLITINSAGCVIETLYIAMYLLYAPKKAKLFTAKILLLLNVGVFGLILLLTLLLSAGQRRVVVLGWVCVAFSVSVFVAPLSIIRQVVRTRSVEFMPFSLSLSLTVSAVVWFLYGLLIKDKYVALPNVIGFSFGVVQMGLYALYRNATPRVPAKDVADDASKDKAPGEHVVVTIAKLTAATTAPAAAVAEDLVKVHDGHPEEAAKGAAKPAENGAGRSDAEQV

SEQ ID NO: 15523 - protein, 284 aa, Zea mays subsp. mays
  misc_feature (1)..(284): Ceres Seq. ID no. 12345595
MAFAFGLLGNIISFMTYLAPLPTFYRIYKNKSTEGFQSVPYVVALFSAMLWIYYALLKSNELLLITINSAGCVIETLYIAMYLLYAPKKAKLFTAKILLLLNVGVFGLILLLTLLLSAGQRRVVVLGWVCVAFSVSVFVAPLSIIRQVVRTRSVEFMPFSLSLSLTVSAVVWFLYGLLIKDKYVALPNVIGFSFGVVQMGLYALYRNATPRVPAKDVADDASKDKAPGEHVVVTIAKLTAATTAPAAAVAEDLVKVHDGHPEEAAKGAAKPAENGAGRSDAEQV

SEQ ID NO: 15524 - DNA, 958 bp, Zea mays subsp. mays
  misc_feature (1)..(958): Ceres Seq. ID no. 12345616
agggttcgcggatcccccacgacacctataagcaccaaccctagcccaaaaccccgcttccacttcacagcctctccgcctccgctcctcgcgccgccgccgcgtctcctcctgtacaggtaaggagaggaagagggcgaaatggtgaagcacaacaacgtcatccccaacgggcacttcaagaagcactggcagaactatgtcaagacatggttcaaccagcccgcccgcaagcagaggcgccgcatcgctcgtcaaaagaaggctgtgaagatattcccccgcccgactgctggtcctctacgccccattgttcaatgccagactttaaagtacaacatgaagtcaagggctgggagaggctttacccttgaggagctgaaggctgctggcatcccaaagaagcttgctccaaccattggtatttctgttgatcaccgccgcaagaacaaatcccttgagggactgcaggccaatgtccagaggcttaagacatacaaggccaagctggttatcttcccaaggcgtgcacacaaggttaaggctggtgactctactccagaggagcttgccaccgctacccaggtccagggtgactacatgccatttactcgtggtgagaaacgttcagttgaggttgtgaaggtcacagatgagatgaagtcatttgctgcctatggcaagctccgccttgagcggatgaacaagaaacatcttggtgcccgccagaagaaggcagctgaggcagagaaggaagataagaagtgaagcggttgaagatagtaccctgttttgttctattcagtcattagtgaatgctactacttaaagtgcttgttctatgttttttttgcggtaatggaaatagagcccagacaaacattttggtgtcctactgtttgatgccttgtacttgtttgcgaactcagctatctaatgggttattggattcttgccc

SEQ ID NO: 15525 - protein, 208 aa, Zea mays subsp. mays
  misc_feature (1)..(208): Ceres Seq. ID no. 12345617
MVKHNNVIPNGHFKKHWQNYVKTWFNQPARKQRRRIARQKKAVKIFPRPTAGPLRPIVQCQTLKYNMKSRAGRGFTLEELKAAGIPKKLAPTIGISVDHRRKNKSLEGLQANVQRLKTYKAKLVIFPRRAHKVKAGDSTPEELATATQVQGDYMPFTRGEKRSVEVVKVTDEMKSFAAYGKLRLERMNKKHLGARQKKAAEAEKEDKK

SEQ ID NO: 15526 - protein, 142 aa, Zea mays subsp. mays
  misc_feature (1)..(142): Ceres Seq. ID no. 12345618
MKSRAGRGFTLEELKAAGIPKKLAPTIGISVDHRRKNKSLEGLQANVQRLKTYKAKLVIFPRRAHKVKAGDSTPEELATATQVQGDYMPFTRGEKRSVEVVKVTDEMKSFAAYGKLRLERMNKKHLGARQKKAAEAEKEDKK

SEQ ID NO: 15527 - DNA, 957 bp, Zea mays subsp. mays
  misc_feature (1)..(957): Ceres Seq. ID no. 12345627
aggagctgcccttcctcgtcttccacgctcgtcagtcatcagcatctcagcacccagagtcgacaaaattgaagaacatctagccggcgaaacatgagggggaagctcgacgagtgctgggacgagtgctgcgacaagtggggcgagtggaagtactgcctgctgtgcctcggcatcgtggtggccatcgtcctcatcgtggtgttcgtcgccgccttcggtttcgtgcgccacatcgacgtctccgtggacgacgcttcgctgacgcggttcgagctggcgacgtcgccggtgacgtcgctgtcgtacaacctgtccgtgaccctggtgatccgcaacccgaactgggccatgagcctcaagaacaccaagccgctggaggcgcagtacaagttcgacgaccagatgttcgaccgcttccagctggccgacaagggcgacaagcaccccgcccggcaagaccagagtgtaccacatcgcgcccccgggcacgacgagtagcgtcatgctcgggaacgccggcgaggccgagttccggaaggagaacgccacggggacgttccaggtggaggtggccgtcgacggggaggtgcgctacacggcgcgctacaccaagtgcaagatccaggcgtcgtgcccgctcaagctgcagctggcgccgccgggcaccgccgccgtcgtgttccagaaggtcacgtgcaagctcgccaaggcggagaagaactgttagatctagcttgcatagctggtggcatggcacacaagccttattgcattgcgttcgtgttgcgcggttttgtattcgtccatcggtggtggcgacgatttgattatgtttgttgacttttgttctgattgctgtgtgtggtgtgctcggttaatcaggatttctgctgtctgtacccgtgtgattgcaattttgcgcggaatgtgatctgtttcagctcagtttgtctg

SEQ ID NO: 15528 - protein, 135 aa, Zea mays subsp. mays
  misc_feature (1)..(135): Ceres Seq. ID no. 12345628
MRGKLDECWDECCDKWGEWKYCLLCLGIVVAIVLIVVFVAAFGFVRHIDVSVDDASLTRFELATSPVTSLSYNLSVTLVIRNPNWAMSLKNTKPLEAQYKFDDQMFDRFQLADKGDKHPARQDQSVPHRAPGHDE

SEQ ID NO: 15529 - protein, 74 aa, Zea mays subsp. mays
  misc_feature (1)..(74): Ceres Seq. ID no. 12345629
MLGNAGEAEFRKENATGTFQVEVAVDGEVRYTARYTKCKIQASCPLKLQLAPPGTAAVVFQKVTCKLAKAEKNC

SEQ ID NO: 15530 - DNA, 990 bp, Zea mays subsp. mays
  misc_feature (1)..(990): Ceres Seq. ID no. 12345649
gctccctatccaatcttctcctccctccctcccccgcgtcgcggcaagacgacctcgccgctccctgcctccctctccccgccgcaggtgctggagatgcaggcgactgccgcctccttcctcgcccgcccactcccgcggcttcgccgcattggcagctggggagcggatgcggcggtggtgcgtgagggcgttatcgcgctccctctgcggctgcgggggccgcggtgctccattagcctctccatcggcgccggcgccggcgctggcgccgaagctgaccacgagttcagctacgagcatgttccggtgttccctagataccgaatacgagatccctacaagcttcttggtgttgatcgtgatgcatctgaagaagagatccgaggtgcgaggaatttccttattcaacagtatgctgggcatgaaccgagtgaagaagctattgaaggtgcttatgagaagataattatgaagagctaccagcagcggaagaagacaaaaattaacttgaaaaccaagttaaagaagagagtagaggaatccccttcatgggtcaaagcacttcttggttgctttgaggtgccatcgatggatattatctccagaagattgtttttctttgctttcattgctggatggagcatagcaacttctgcagagaatggacctgcatttcagctcgcgatatcgctattctcatgcatatatttcctcaacgaaaagatgaagaaccttctaagggcatcaaccactgggtttggaatacttgttggcggttggatcattggttctctactggttccactggtcccaacattcatcatcccaccttcatggtctctagagctacttacctcactagttgcttacattttcttgtttctgggatccactttcctgaaatgaatctgtttcaatcttgtaactggaactgttggatcttttgagagggaaattacgatgactgatctctggatttgagttttc

SEQ ID NO: 15531 - protein, 302 aa, Zea mays subsp. mays
  misc_feature (1)..(302): Ceres Seq. ID no. 12345650
APYPIFSSLPPPRRGKTTSPLPASLSPPQVLEMQATAASFLARPLPRLRRIGSWGADAAVVREGVIALPLRLRGPRCSISLSIGAGAGAGAEADHEFSYEHVPVFPRYRIRDPYKLLGVDRDASEEEIRGARNFLIQQYAGHEPSEEAIEGAYEKIIMKSYQQRKKTKINLKTKLKKRVEESPSWVKALLGCFEVPSMDIISRRLFFFAFIAGWSIATSAENGPAFQLAISLFSCIYFLNEKMKNLLRASTTGFGILVGGWIIGSLLVPLVPTFIIPPSWSLELLTSLVAYIFLFLGSTFLK

SEQ ID NO: 15532 - protein, 270 aa, Zea mays subsp. mays
  misc_feature (1)..(270): Ceres Seq. ID no. 12345651
MQATAASFLARPLPRLRRIGSWGADAAVVREGVIALPLRLRGPRCSISLSIGAGAGAGAEADHEFSYEHVPVFPRYRIRDPYKLLGVDRDASEEEIRGARNFLIQQYAGHEPSEEAIEGAYEKIIMKSYQQRKKTKINLKTKLKKRVEESPSWVKALLGCFEVPSMDIISRRLFFFAFIAGWSIATSAENGPAFQLAISLFSCIYFLNEKMKNLLRASTTGFGILVGGWIIGSLLVPLVPTFIIPPSWSLELLTSLVAYIFLFLGSTFLK

SEQ ID NO: 15533 - protein, 155 aa, Zea mays subsp. mays
  misc_feature (1)..(155): Ceres Seq. ID no. 12345652
LPIQSSPPSLPRVAARRPRRSLPPSPRRRCWRCRRLPPPSSPAHSRGFAALAAGERMRRWCVRALSRSLCGCGGRGAPLASPSAPAPALAPKLTTSSATSMFRCSLDTEYEIPTSFLVLIVMHLKKRSEVRGISLFNSMLGMNRVKKLLKVLMRR

SEQ ID NO: 15534 - DNA, 761 bp, Zea mays subsp. mays
  misc_feature (1)..(761): Ceres Seq. ID no. 12345679
aattgccttaccttgccttgccttcccctccattccacctccacctcgccgcccgaatccccccacccaacaatcccccatggggtcgcaggccatcgaggcgcaccgcgcgggcgcggaggtgtaccgcggcgcggcgctgtgcgcggagaagtcgacggagctgctggcagaggcgcacctcccgctgggcctgctgccgctggccgacatggaggaggtcggctacaaccgcgccacgggcttcgtgtggctgcgccagaggaaggcgctcacgcacacgttccgcccgatcgcgcgccaggtctcgtacgccgccgaggtcaccgcgttcgtggaggaccggcggatgaagcgcatgaccggggtcaagaccaaggagctcctcatctgggtcaccctctccgacatgttcgtcgacagggacgacccgtccaagatcaccttcaagacgcccaccgggctcggcaggacctaccccgtctccgccttcgccaaggaaggcgccggtgacgacggcgcggcggccaagcacaaggatgatgcccccgccccgaccgccgccggtaaggctgctgccagcaagtgaggtggcggcgtccggagctttttaccttgccgtagtcgccatacttgcctcctcaataatggcgtttgtaccccctctacctgcttcaaattagtgtgttttatgaatggaaacgaccatccaactttccatccgtccttgcaatgccaatgtgtcacggggtgtttttact

SEQ ID NO: 15535 - protein, 195 aa, Zea mays subsp. mays
  misc_feature (1)..(195): Ceres Seq. ID no. 12345680
IALPCLAFPSIPPPPRRPNPPTQQSPMGSQAIEAHRAGAEVYRGAALCAEKSTELLAEAHLPLGLLPLADMEEVGYNRATGFVWLRQRKALTHTFRPIARQVSYAAEVTAFVEDRRMKRMTGVKTKELLIWVTLSDMFVDRDDPSKITFKTPTGLGRTYPVSAFAKEGAGDDGAAAKHKDDAPAPTAAGKAAASK

SEQ ID NO: 15536 - protein, 170 aa, Zea mays subsp. mays
  misc_feature (1)..(170): Ceres Seq. ID no. 12345681
NCLTLPCLPLHSTSTSPPESPHPTIPHGVAGHRGAPRGRGGVPRRGAVRGEVDGAAGRGAPPAGPAAAGRHGGGRLQPRHGLRVAAPEEGAHAHVPPDRAPGLVRRRGHRVRGGPADEAHDRGQDQGAPHLGHPLRHVRRQGRPVQDHLQDAHRARQDLPRLRLRQGRRR

SEQ ID NO: 15537 - protein, 169 aa, Zea mays subsp. mays
  misc_feature (1)..(169): Ceres Seq. ID no. 12345682
MGSQAIEAHRAGAEVYRGAALCAEKSTELLAEAHLPLGLLPLADMEEVGYNRATGFVWLRQRKALTHTFRPIARQVSYAAEVTAFVEDRRMKRMTGVKTKELLIWVTLSDMFVDRDDPSKITFKTPTGLGRTYPVSAFAKEGAGDDGAAAKHKDDAPAPTAAGKAAASK

SEQ ID NO: 15538 - DNA, 1757 bp, Zea mays subsp. mays
  misc_feature (1)..(1757): Ceres Seq. ID no. 12345695
gctgataacaacatcctatcgttcctgtagcccctttccgtgaccttgccaaagaatttgctcttctctgtgcgtgtgcaatttcttccgctacagctcaaggatccgctactgctgctgttttgggagattcgccatgggcggcggggccgttaacgaccacttcccgggggccagcgacccgctgctccccacgaagcgggatggggacggggacgaggacgacgcaggtgcctccgcgttccacgagttcgacggcgcctccttcgccggcgcggtgttcaacctctccaccaccatcgtcggcgcgggcatcatggccgctaccggccaccatgaaggtgctcggtctcgtccctgggctcgtcatgatagtgctcgccgcgctcctcaccgacgcctccatcgagctgctcgtgcggttcagccgggccgcgggcgcgcgctcctacagcgcggccatggccgacgccttcggatggtggggtaggaggctgctccaggtctgcgtcgtcatcaacaacgtcggcgtcatgattgtgtacatgatcattataggcgatgtgctttctggatccacttctggtggtgagcatcactatggtgtgttagaaggatggtttggaatacactggtggaatgggcgtttatttgttctccttgtcacaaccctttgtgtgttcactccactagcatgcttgaagcgtattgattcactaagctatacatccacaatatctgttgctttggcggttgtattcgttattattactgcaggaattgctgtcatcaagttgataggtggacaaattccaatgcccaagttgtttcccactgtttctgatttggcatctgtttgggaactttttacagcagtgccggttcttgtcactgcttacgtttgccattacaatgttcacccaattcataatgagctaaaggactctacccagattaagccaatagtacacacatcattgacactatgctcgaccatctacatcacaacaagtttctttggatatctcctctttggtgaatctacactctctgatgtgctctccaactttgattcaaatcttgggatcccatacagttcagtcctcaatgatgctgtcagagtgagctatgctgttcacctgatgcttgtgttccccatgatattccatgcattgaggcttaatttggatgggctcctcttcgcctctgcaaggcctctgtcttctgacaacagaagattcggcataattacagcatcgctcctcctagtgatttttgggtctgcaatcttcattcctagtatttgggatgcctttcagtttactggggcaactgctgctgtctgtatcgcctttattttcccagctgcgatcactttaagggattcacaaggtattgccaagaagtgggacaaaattctggcgatcttcatgattgttcttgctgttgtatcaaatgtagtagcggtctacagcgatgcctacaaaatattcaacaaggaaagtgctccttctaatgcctggatcggggagtcaactgaaaatagatcttcgtggtggcttgtacgttagttggccaataaaatattcatagttcatttaggctttgtttttggtgatttgttccacgggccatggtctgctcaaatctcattgagttttgtgtgtatatctacgataggtatgaaaatttgcacaaaccgaagtgctccggtaccataaaaataattgtgtcaaatctgaaattacagagttacg

SEQ ID NO: 15539 - protein, 455 aa, Zea mays subsp. mays
  misc_feature (1)..(455): Ceres Seq. ID no. 12345696
MGTGTRTTQVPPRSTSSTAPPSPARCSTSPPPSSARASWPLPATMKVLGLVPGLVMIVLAALLTDASIELLVRFSRAAGARSYSAAMADAFGWWGRRLLQVCVVINNVGVMIVYMIIIGDVLSGSTSGGEHHYGVLEGWFGIHWWNGRLFVLLVTTLCVFTPLACLKRIDSLSYTSTISVALAVVFVIITAGIAVIKLIGGQIPMPKLFPTVSDLASVWELFTAVPVLVTAYVCHYNVHPIHNELKDSTQIKPIVHTSLTLCSTIYITTSFFGYLLFGESTLSDVLSNFDSNLGIPYSSVLNDAVRVSYAVHLMLVFPMIFHALRLNLDGLLFASARPLSSDNRRFGIITASLLLVIFGSAIFIPSIWDAFQFTGATAAVCIAFIFPAAITLRDSQGIAKKWDKILAIFMIVLAVVSNVVAVYSDAYKIFNKESAPSNAWIGESTENRSSWWLVR

SEQ ID NO: 15540 - protein, 411 aa, Zea mays subsp. mays
  misc_feature (1)..(411): Ceres Seq. ID no. 12345697
MKVLGLVPGLVMIVLAALLTDASIELLVRFSRAAGARSYSAAMADAFGWWGRRLLQVCVVINNVGVMIVYMIIIGDVLSGSTSGGEHHYGVLEGWFGIHWWNGRLFVLLVTTLCVFTPLACLKRIDSLSYTSTISVALAVVFVIITAGIAVIKLIGGQIPMPKLFPTVSDLASVWELFTAVPVLVTAYVCHYNVHPIHNELKDSTQIKPIVHTSLTLCSTIYITTSFFGYLLFGESTLSDVLSNFDSNLGIPYSSVLNDAVRVSYAVHLMLVFPMIFHALRLNLDGLLFASARPLSSDNRRFGIITASLLLVIFGSAIFIPSIWDAFQFTGATAAVCIAFIFPAAITLRDSQGIAKKWDKILAIFMIVLAVVSNVVAVYSDAYKIFNKESAPSNAWIGESTENRSSWWLVR

SEQ ID NO: 15541 - protein, 400 aa, Zea mays subsp. mays
  misc_feature (1)..(400): Ceres Seq. ID no. 12345698
MIVLAALLTDASIELLVRFSRAAGARSYSAAMADAFGWWGRRLLQVCVVINNVGVMIVYMIIIGDVLSGSTSGGEHHYGVLEGWFGIHWWNGRLFVLLVTTLCVFTPLACLKRIDSLSYTSTISVALAVVFVIITAGIAVIKLIGGQIPMPKLFPTVSDLASVWELFTAVPVLVTAYVCHYNVHPIHNELKDSTQIKPIVHTSLTLCSTIYITTSFFGYLLFGESTLSDVLSNFDSNLGIPYSSVLNDAVRVSYAVHLMLVFPMIFHALRLNLDGLLFASARPLSSDNRRFGIITASLLLVIFGSAIFIPSIWDAFQFTGATAAVCIAFIFPAAITLRDSQGIAKKWDKILAIFMIVLAVVSNVVAVYSDAYKIFNKESAPSNAWIGESTENRSSWWLVR

SEQ ID NO: 15542 - DNA, 1434 bp, Zea mays subsp. mays
  misc_feature (1)..(1434): Ceres Seq. ID no. 12345709
gatccccgttctcgctacgcccctgtctctccccgccgccaccctgccccggcgccgtagagcacggcgctggcccttgtttccctcccccggccggacctcggaagtatgtctcgggccatcgaatcgacaatgaggcaatctcggcagtttgtgaatctgatcatgaccaatctttacaacggcgccaagtccctgcacttcgtggacctgaagcggcagccactatttaagacaccactgccacctacggcatctacagacggagacagatttgaaacacaagacgctttctctcagacacagccaactgaatccttggtgttggagagacttcgccttccccgtccgagcttccaattcgaaacttccactgcacaagatcgcagctggtacattaactgcttaccgctttccgatcgcgtggtgttctgctcggatcagtgtggacacaactttgtggttgatggtatcgcacgttgtcttgtaaccatgcccagcctccacaaacgtaagatgatgcccctctccatcttcatccccagcactgatgtcgaaggcggtggcagcctcttccttgtggataggtcacccggcatcactgctacaagggtggaatttgagtccttagtgtaccgcaaggcaagcttcagcaacacctactcctggcaggctcaactcctcccaccagcaccgtaccccctttacacctcctactcctggcaggctcaactcctcccaccagcaccgtaccccctttacaccaagattagctcctatgctgtgatcggtggtggttcccacatctgcttatcagtcaagaatgaaggcacctattgcctggacacaaccagacacacatggagcaaagtcggcacgtggacactacccttcgacggcaaggttgagtatgtaccggagctgaagctctggtttggcgcctctgccgatcggcagaagttggctgccactgacctctcttatttgagcagcactgttgactcagccacgggtttccaaccagaggtcctgggctcttggatggagctgaccctgccagagggatgggagcagaaaggaagaactcagcttgtcaacctgggctcaggcaggttctgcgtcgcaaggttcttgaatgagatgtttgatccatacgggagtggatatgttttattgaccggtgtggagatcgttcctcattttgacaatctcactggtaatgacgttagtagtggcagtggagatggcagcaaagggaaacttaaactccaaataattcctcataaatcaagggtgtatatgcccaccaccgccttagcgttgattcaagatgtgttctgaataagtttggggctttgcactcaacaccctgttataatgattatgtattgtgttaattattttatccattgctgttgtggacttggttaatcc

SEQ ID NO: 15543 - protein, 410 aa, Zea mays subsp. mays
  misc_feature (1)..(410): Ceres Seq. ID no. 12345710
MSRAIESTMRQSRQFVNLIMTNLYNGAKSLHFVDLKRQPLFKTPLPPTASTDGDRFETQDAFSQTQPTESLVLERLRLPRPSFQFETSTAQDRSWYINCLPLSDRVVFCSDQCGHNFVVDGIARCLVTMPSLHKRKMMPLSIFIPSTDVEGGGSLFLVDRSPGITATRVEFESLVYRKASFSNTYSWQAQLLPPAPYPLYTSYSWQAQLLPPAPYPLYTKISSYAVIGGGSHICLSVKNEGTYCLDTTRHTWSKVGTWTLPFDGKVEYVPELKLWFGASADRQKLAATDLSYLSSTVDSATGFQPEVLGSWMELTLPEGWEQKGRTQLVNLGSGRFCVARFLNEMFDPYGSGYVLLTGVEIVPHFDNLTGNDVSSGSGDGSKGKLKLQIIPHKSRVYMPTTALALIQDVF

SEQ ID NO: 15544 - protein, 402 aa, Zea mays subsp. mays
  misc_feature (1)..(402): Ceres Seq. ID no. 12345711
MRQSRQFVNLIMTNLYNGAKSLHFVDLKRQPLFKTPLPPTASTDGDRFETQDAFSQTQPTESLVLERLRLPRPSFQFETSTAQDRSWYINCLPLSDRVVFCSDQCGHNFVVDGIARCLVTMPSLHKRKMMPLSIFIPSTDVEGGGSLFLVDRSPGITATRVEFESLVYRKASFSNTYSWQAQLLPPAPYPLYTSYSWQAQLLPPAPYPLYTKISSYAVIGGGSHICLSVKNEGTYCLDTTRHTWSKVGTWTLPFDGKVEYVPELKLWFGASADRQKLAATDLSYLSSTVDSATGFQPEVLGSWMELTLPEGWEQKGRTQLVNLGSGRFCVARFLNEMFDPYGSGYVLLTGVEIVPHFDNLTGNDVSSGSGDGSKGKLKLQIIPHKSRVYMPTTALALIQDVF

SEQ ID NO: 15545 - protein, 391 aa, Zea mays subsp. mays
  misc_feature (1)..(391): Ceres Seq. ID no. 12345712
MTNLYNGAKSLHFVDLKRQPLFKTPLPPTASTDGDRFETQDAFSQTQPTESLVLERLRLPRPSFQFETSTAQDRSWYINCLPLSDRVVFCSDQCGHNFVVDGIARCLVTMPSLHKRKMMPLSIFIPSTDVEGGGSLFLVDRSPGITATRVEFESLVYRKASFSNTYSWQAQLLPPAPYPLYTSYSWQAQLLPPAPYPLYTKISSYAVIGGGSHICLSVKNEGTYCLDTTRHTWSKVGTWTLPFDGKVEYVPELKLWFGASADRQKLAATDLSYLSSTVDSATGFQPEVLGSWMELTLPEGWEQKGRTQLVNLGSGRFCVARFLNEMFDPYGSGYVLLTGVEIVPHFDNLTGNDVSSGSGDGSKGKLKLQIIPHKSRVYMPTTALALIQDVF

SEQ ID NO: 15546 - DNA, 729 bp, Zea mays subsp. mays
  misc_feature (1)..(729): Ceres Seq. ID no. 12345717
attcttttcaggaccgtcgaggatcgatcaggcgggcagaagcggtcgtcgccggacaaggcgcacaggtccaccatggacgccgtctaccaccaagagtcaccgttgacgagcaacggtgccgccaccgccggcgagaagctgggcgtggagcggttcgagctgccgctgatctacatctcgctctcgcggaaggagaaggaggacgatttccttgcgatgaagggcaccaagctgccccagcggcccaagaaaagggccaagaacgtggacaagaccctccaatttgtcttcccggggatgtggttgtccgatttgacgaggggacggtacgaggtgcgggagaagaaatgcgtgaagaagaagcgaagagggctgaaggggatggagagcatggacagcgactcggagtaataaggtggaggcgcggcgcagccatcttccatgggggtgggagtcgaggaagaaggggccctagagaaggaggaaaggaggagacgttgagggcaagagtgagtggtcgcggctgctcaccttgagccgccgccgcgctgggagcgtcggaggacggtggtgcttgccacacacagggctgtgtttctggcggtcgtgaggtttttttttgttccttgatgctgagctgcgtctccgcggccgctgtttgcagcatgtaaccctgaaactctgcatgcaattcactggtctagagaattgttcgtggattgtttc

SEQ ID NO: 15547 - protein, 178 aa, Zea mays subsp. mays
  misc_feature (1)..(178): Ceres Seq. ID no. 12345718
SFQDRRGSIRRAEAVVAGQGAQVHHGRRLPPRVTVDEQRCRHRRREAGRGAVRAAADLHLALAEGEGGRFPCDEGHQAAPAAQEKGQERGQDPPICLPGDVVVRFDEGTVRGAGEEMREEEAKRAEGDGEHGQRLGVIRWRRGAAIFHGGGSRGRRGPREGGKEETLRARVSGRGCSP

SEQ ID NO: 15548 - protein, 137 aa, Zea mays subsp. mays
  misc_feature (1)..(137): Ceres Seq. ID no. 12345719
ILFRTVEDRSGGQKRSSPDKAHRSTMDAVYHQESPLTSNGAATAGEKLGVERFELPLIYISLSRKEKEDDFLAMKGTKLPQRPKKRAKNVDKTLQFVFPGMWLSDLTRGRYEVREKKCVKKKRRGLKGMESMDSDSE

SEQ ID NO: 15549 - protein, 112 aa, Zea mays subsp. mays
  misc_feature (1)..(112): Ceres Seq. ID no. 12345720
MDAVYHQESPLTSNGAATAGEKLGVERFELPLIYISLSRKEKEDDFLAMKGTKLPQRPKKRAKNVDKTLQFVFPGMWLSDLTRGRYEVREKKCVKKKRRGLKGMESMDSDSE

SEQ ID NO: 15550 - DNA, 1751 bp, Zea mays subsp. mays
  misc_feature (1)..(1751): Ceres Seq. ID no. 12345721
tccccttctggtcgaatcgttattatcagtgggctagaacatactaatgcgagtgctgtgctgctaaatctaatctgcgtgcgattggtcgatgggcaggttcggtggagatcgccgccgttggcgtttcgatcgccatatttaaccaagtctccaaggtctgcatctaccctctcgttagcgtcacaacgtcgttcgtcgcggaggaagacgcgatcatcagtaaggccgtccgaggaaacagcagccaggaggaggacgtggagaaagcctcccacgtgggctttgatccggagaccagcaatctgcatgcatctggccctgcaggtatggcagaatgcgtgaactcgtgtatccctacggagtgcgcagcagatccctctggcaggcaagggcggtgcgagaagaggtacgtgccgtcggtcacgtcggcgctaatagtcggttccattctcggcctgcttcaggccgtcttcctggtcctttcggccagattcgtgctcaacatcatgggtgttaagtccggatccccgatgcaagggcctgcggtgcgctacctaacgataaggtcccttggtgcccccgctgtgctgctgtctctggccatgcaaggggttttccgggggttcaaggacaccaagacaccgttatacgctactgtggttggcgacgcggcgaacatcatactggacccgattttgatgtttgtttgccatatgggcgtcactggtgcggctattgctcatgttgtttctcagtacatgataacgttgatactgctgtgccggctcgtccagcgagttcacgttatcccacccagcattaaatctctgaaatttgggaggtttcttggatgtggattcctgctgctcgcaagggttgtcgcggtgacgttctgcgtcacgctggcggcgtccctggccgctcgccatggacccaccgtcatggcaggcttccagatctgctgccagctctggctggccacgtctcttctcgccgatggattggccgtggcaggacaggcggtgcttgcaagcgcgttcgccaagaacgacagtaagaaggtcgctgccgcgacatcccgtgtgttgcagctgagcattgtcctgggcatgggtctcaccgtcgtgctgggacttgctatgaggttcggggctggcattttcacaagcgacgtgcccgtgatccaagtcattcacagaggcatcccgtttgtcgccgggacgcagaccatcaattccctggccttcgtgtttgatggcatcaactttgcagcgtcagactacagatactctgcttactccatggttgctgttgcgtctgtgtcgataccatgcctgctgtacctttctgcgcataacggattcatcggtatatggatcgcattgacgatctacatgagtctgaggaccatagctagcacctggaggatgggggcagcgaggggaccatggacgtttctccggaactgatgatggattggcttggaactgatgatctgcggcacactgctgacagataaggctgcgccgcgctgcgcatgcgcctctcatgtagcatcagcgaagtatagtacgtgttctgctggtgtttaaagcttcggatatcggaggtagatgtagctatgggactatcccctcctgatcgtctgacttgtggccttgcgtggagagtttacgttgctccgttgatttatgttgtatcatgccaggatgtcagtttaataccatacatcggtaaagtgtctctct

SEQ ID NO: 15551 - protein, 380 aa, Zea mays subsp. mays
  misc_feature (1)..(380): Ceres Seq. ID no. 12345722
MAECVNSCIPTECAADPSGRQGRCEKRYVPSVTSALIVGSILGLLQAVFLVLSARFVLNIMGVKSGSPMQGPAVRYLTIRSLGAPAVLLSLAMQGVFRGFKDTKTPLYATVVGDAANIILDPILMFVCHMGVTGAAIAHVVSQYMITLILLCRLVQRVHVIPPSIKSLKFGRFLGCGFLLLARVVAVTFCVTLAASLAARHGPTVMAGFQICCQLWLATSLLADGLAVAGQAVLASAFAKNDSKKVAAATSRVLQLSIVLGMGLTVVLGLAMRFGAGIFTSDVPVIQVIHRGIPFVAGTQTINSLAFVFDGINFAASDYRYSAYSMVAVASVSIPCLLYLSAHNGFIGIWIALTIYMSLRTIASTWRMGAARGPWTFLRN

SEQ ID NO: 15552 - protein, 320 aa, Zea mays subsp. mays
  misc_feature (1)..(320): Ceres Seq. ID no. 12345723
MGVKSGSPMQGPAVRYLTIRSLGAPAVLLSLAMQGVFRGFKDTKTPLYATVVGDAANIILDPILMFVCHMGVTGAAIAHVVSQYMITLILLCRLVQRVHVIPPSIKSLKFGRFLGCGFLLLARVVAVTFCVTLAASLAARHGPTVMAGFQICCQLWLATSLLADGLAVAGQAVLASAFAKNDSKKVAAATSRVLQLSIVLGMGLTVVLGLAMRFGAGIFTSDVPVIQVIHRGIPFVAGTQTINSLAFVFDGINFAASDYRYSAYSMVAVASVSIPCLLYLSAHNGFIGIWIALTIYMSLRTIASTWRMGAARGPWTFLRN

SEQ ID NO: 15553 - protein, 312 aa, Zea mays subsp. mays
  misc_feature (1)..(312): Ceres Seq. ID no. 12345724
MQGPAVRYLTIRSLGAPAVLLSLAMQGVFRGFKDTKTPLYATVVGDAANIILDPILMFVCHMGVTGAAIAHVVSQYMITLILLCRLVQRVHVIPPSIKSLKFGRFLGCGFLLLARVVAVTFCVTLAASLAARHGPTVMAGFQICCQLWLATSLLADGLAVAGQAVLASAFAKNDSKKVAAATSRVLQLSIVLGMGLTVVLGLAMRFGAGIFTSDVPVIQVIHRGIPFVAGTQTINSLAFVFDGINFAASDYRYSAYSMVAVASVSIPCLLYLSAHNGFIGIWIALTIYMSLRTIASTWRMGAARGPWTFLRN

SEQ ID NO: 15554 - DNA, 1462 bp, Zea mays subsp. mays
  misc_feature (1)..(1462): Ceres Seq. ID no. 12345814
  misc_feature (1400)..(1400): n is a, c, t, g, unknown, or other
cctgtttgtttacccagattatctggcgtgtttctgttgggcggcgggcttctctgatccgataggggcaaaaacgattcggtagattataatggcaatgatgggtaatttctaggaaacttgaaagggtagtggggaagtgggaaaaaaataatctgaaataagcacctcctcacttgcttatggattatcataatccaaggggttagattatataatctgggcaaataagctagactgtttgtttgcctcttaggattatttaatccagattatataatctgggggtaaacaaacaggcccttaaagtctcttctttcccttttgtgatgggaacctttggccaattatgcagccgagcatttcgggctgccactgccgccaccgtcgcaggccaagggcaaggacttcaagaagggcgccaacttcgccatcaccggcgcgacggccctggagtactccttcttcaaggcgcacggcatcgaccagcgcatctggaacaccggctccatcaacacccagatcggctggctccaggacatgaagccgtccctctgtaaatcggagcaagactgcaaggattacttcagcaaatccctgttcgtcgtcggggagttcgggggcaacgactacaacgcgccgctcttctccggcgtcccattttctgatgtcaagacttacgtgccccttgttgcaaaggctatcgccaatggcgttgagaaactgatcgagcttggggcaacagacctcctggtgcctggcgttctcccaattggctgcttcccgttgtacctgacgctgtacaacaccagcagcaaagcagattacaacgcccggaccgggtgccttcggaggtacaaccgcctggccttccaccacaacagggagctgaagcagcagcttgacgagcttcagaagaagtaccccaagacgaagatcatgtatggagattacttcaaggctgcactgcagtttgtcgtcaaccctgggaaatttggtttcagcacggctttgcaagcgtgctgcggcgccggagggcagggcaactacaacttcaacctgaagaagaagtgtggcgagcagggcgcgagcgtgtgctccaacccgtcgtcgtacgtgagctgggatggcatccacatgaccgaagctgcgtacagaaaggtcgccgatggctggttgaatggcccgtatgctcagcccccaattctcaagtcatgatcgagattactaggctgtgcgtaacagccgccgcagctgcatgctgcggctagagatatatatgaggagtgtttcaggcaatagatatgctaagttatggtaaagctatttggtctgttcattggaagatctgtataaactgcgccggtatagatatgttcccagctgaaatggctctagcncagatgtgcatggcatgttctctgattcttttcatttgttctaaaaaaatattgcggcagtg

SEQ ID NO: 15555 - protein, 225 aa, Zea mays subsp. mays
  misc_feature (1)..(225): Ceres Seq. ID no. 12345815
MKPSLCKSEQDCKDYFSKSLFVVGEFGGNDYNAPLFSGVPFSDVKTYVPLVAKAIANGVEKLIELGATDLLVPGVLPIGCFPLYLTLYNTSSKADYNARTGCLRRYNRLAFHHNRELKQQLDELQKKYPKTKIMYGDYFKAALQFVVNPGKFGFSTALQACCGAGGQGNYNFNLKKKCGEQGASVCSNPSSYVSWDGIHMTEAAYRKVADGWLNGPYAQPPILKS

SEQ ID NO: 15556 - DNA, 1301 bp, Zea mays subsp. mays
  misc_feature (1)..(1301): Ceres Seq. ID no. 12345828
ctccccacccgcagcgcctcctcccattcccccaacggacattgcctaggaggctaggacagaaccacccagagcgcacaaccttatccgaatcgccgttgcatggaggccgtgcgcgcgtcggcggcgtgggttgccagtcgctcctcccatgtcacggtcgaccttcaagaaattgagaaggtagtggaccaaatccaaggagatgttccaaaagttcagtgggattacgaaggaattcactactttgacaatgggccactcacagtccagtacctgttcgtcttggatgcactaaacttctgcttctggccagataaggacttgagctatgaccatttggcttctggactgaagtcagccttggagaaagacaaaaatgcccttgattcagatcgtctccagaattacactgggccccagctccgccaacttctgaactggccacgaccactgccaattgaggaggaaagagtacgccttctccacgaggttgggcaggaacttaaaagaagctttggaggtcaggctgctaatctagtgaagtctgctggaaactctgctgcgactcttattgaactgattactcgacattttcctggtttccgggaccattcactctacaaggggcaccaggttttcctgtacaagagagcccagatctttgttgctgatttgtggggcgccttcaagggacaaaactatggcgagttccacgatatcaattccatcaccatatttgctgactacattgttccagcggtcctgagggagcttggagtacttaaatatggctcgaatctatcttgcttcatcgactcgaacagtgagatagtgcctggaagcgaggaggaagtggagatacgcgcgtgctccatctatgcagtggagaagatgagggacctgatcagcaagaagtttggaaagcagcttctgagcattgacattgatctctggctctggtcctgcggcgtgcagaacatggcgctgtcacatcaccgcactctgtcgatttactactagacagtcaggcaggcaggaagctgaccctgctggtgcgctcgttcagctggccgggcgttgtcgtcgcttgttcgtcctaaccataacggtgcatgtaggtgtcgagagttttgtctccttgggaatgcacacaggtgcaagatattgtaggcccgtcccatgaggatgcatggtagtacaacacttttttttttgtgatttagagacttgaactgctgcagttttcacatgaatgttatccctaaggacaaggcgggagcgagtgtttctctatctcc

SEQ ID NO: 15557 - protein, 306 aa, Zea mays subsp. mays
  misc_feature (1)..(306): Ceres Seq. ID no. 12345829
MEAVRASAAWVASRSSHVTVDLQEIEKVVDQIQGDVPKVQWDYEGIHYFDNGPLTVQYLFVLDALNFCFWPDKDLSYDHLASGLKSALEKDKNALDSDRLQNYTGPQLRQLLNWPRPLPIEEERVRLLHEVGQELKRSFGGQAANLVKSAGNSAATLIELITRHFPGFRDHSLYKGHQVFLYKRAQIFVADLWGAFKGQNYGEFHDINSITIFADYIVPAVLRELGVLKYGSNLSCFIDSNSEIVPGSEEEVEIRACSIYAVEKMRDLISKKFGKQLLSIDIDLWLWSCGVQNMALSHHRTLSIYY

SEQ ID NO: 15558 - DNA, 1656 bp, Zea mays subsp. mays
  misc_feature (1)..(1656): Ceres Seq. ID no. 12345858
atttcctacttcttccagactaaaaccccaggcctcgcgagtcgccgccgaccgccgcaaccacgcgctacgcccccgatggctcacctccagctcctcttctcatactcgcggcggaacccgcagcgccaccgcctgctctcactcttccacttctcctccgacgccaagtccagctccgcctcgccgccgcctcctcccatcaagcccgtctcctacgctccgaagccgcagcagcaggccccgcccgaggagtctgccgccccgacaaccccggacgttgcccctagggaccaatccccactgccacgacggcctcagcagccgatgccgccgcgggagtggacgcggcaggatatgcggtacgtgaaggacgcggcgcccgcgatctcgcccgtctcgtacccgtccagggtcgcgccgctgccggaggaccgtccggtcggcggcgaggtggaggaggtgcaggacggggggctgcagggggagtcggagcggatccagatgaacgcggtgcgtcccaccaggagcgtctttgggatgcacgaggaggataggctgccgtacccgacggtcatacccgtcgtcaagcggccgcagaaggtcgccattgatttaatcgacgccatccgcctagttaagactagtgcaaacgagaagaagcggaattttgttgaaactgttgaagctcatgtgatattaggtgttgatcctcgtcgtggtgaccagatggttcgtggcgccttaacattgcctcatggcactggcaagactgttagggtagcagtatttgctgaaggtcctggagcagacgaagctagagctgccggagcagatgttgttggtggtgatgagttgattgaggagatccgcacaggaggaggcaaactaagctttgacaagtgcatagcaaccccaatgttcatgccccgattgtcaaaggttgctaggatattgggtccacgtggtttgatgcctaatcctaagctaggatctgtgacgaatgatgtttctggtgcggtcaaagcggcaaaatcaggacgtgttgatttcaaaatagataaaactgctatagtgcatgttggccttgggaaggtaaactttactgaggagagtttacgtgaaaatattggtgcttttgtgcatgcacttttacttgctaagccagtgggcttaaagaaaacttcaaaatatgtcggatatgtgaagaagttcacactgagtagcacaatgggacccggacttcctgttaccataccatcactatctgtggccgccgatcactataacaaggttcaagtcagctaagtcaatacagtagaacatcgaatgtagctttctttctccaatagccgcggcctgcagatggcggcttgtttggcagtggagcttaaccattcagcaaggttgagatttgggtggcttgctgttttgttattggggataataccttttgtggacaaggatcattcaacaaacatcataacctataactttattttatccttgtcactgcaattttgagattgcgttgctggtctacctatgttatccagagtcttgtcatttgttgcacgaaatgtaatattgaaatacggtagttttagggcattacttatgataataagaaatgaagtattaaccatgattcgattc

SEQ ID NO: 15559 - protein, 435 aa, Zea mays subsp. mays
  misc_feature (1)..(435): Ceres Seq. ID no. 12345859
ISYFFQTKTPGLASRRRPPQPRATPPMAHLQLLFSYSRRNPQRHRLLSLFHFSSDAKSSSASPPPPPIKPVSYAPKPQQQAPPEESAAPTTPDVAPRDQSPLPRRPQQPMPPREWTRQDMRYVKDAAPAISPVSYPSRVAPLPEDRPVGGEVEEVQDGGLQGESERIQMNAVRPTRSVFGMHEEDRLPYPTVIPVVKRPQKVAIDLIDAIRLVKTSANEKKRNFVETVEAHVILGVDPRRGDQMVRGALTLPHGTGKTVRVAVFAEGPGADEARAAGADVVGGDELIEEIRTGGGKLSFDKCIATPMFMPRLSKVARILGPRGLMPNPKLGSVTNDVSGAVKAAKSGRVDFKIDKTAIVHVGLGKVNFTEESLRENIGAFVHALLLAKPVGLKKTSKYVGYVKKFTLSSTMGPGLPVTIPSLSVAADHYNKVQVS

SEQ ID NO: 15560 - protein, 409 aa, Zea mays subsp. mays
  misc_feature (1)..(409): Ceres Seq. ID no. 12345860
MAHLQLLFSYSRRNPQRHRLLSLFHFSSDAKSSSASPPPPPIKPVSYAPKPQQQAPPEESAAPTTPDVAPRDQSPLPRRPQQPMPPREWTRQDMRYVKDAAPAISPVSYPSRVAPLPEDRPVGGEVEEVQDGGLQGESERIQMNAVRPTRSVFGMHEEDRLPYPTVIPVVKRPQKVAIDLIDAIRLVKTSANEKKRNFVETVEAHVILGVDPRRGDQMVRGALTLPHGTGKTVRVAVFAEGPGADEARAAGADVVGGDELIEEIRTGGGKLSFDKCIATPMFMPRLSKVARILGPRGLMPNPKLGSVTNDVSGAVKAAKSGRVDFKIDKTAIVHVGLGKVNFTEESLRENIGAFVHALLLAKPVGLKKTSKYVGYVKKFTLSSTMGPGLPVTIPSLSVAADHYNKVQVS

SEQ ID NO: 15561 - protein, 326 aa, Zea mays subsp. mays
  misc_feature (1)..(326): Ceres Seq. ID no. 12345861
MPPREWTRQDMRYVKDAAPAISPVSYPSRVAPLPEDRPVGGEVEEVQDGGLQGESERIQMNAVRPTRSVFGMHEEDRLPYPTVIPVVKRPQKVAIDLIDAIRLVKTSANEKKRNFVETVEAHVILGVDPRRGDQMVRGALTLPHGTGKTVRVAVFAEGPGADEARAAGADVVGGDELIEEIRTGGGKLSFDKCIATPMFMPRLSKVARILGPRGLMPNPKLGSVTNDVSGAVKAAKSGRVDFKIDKTAIVHVGLGKVNFTEESLRENIGAFVHALLLAKPVGLKKTSKYVGYVKKFTLSSTMGPGLPVTIPSLSVAADHYNKVQVS

SEQ ID NO: 15562 - DNA, 1015 bp, Zea mays subsp. mays
  misc_feature (1)..(1015): Ceres Seq. ID no. 12345896
aaacctcctgccctagtctcctctctgtctcacagcacagcccctgctttccccccaccgtcccacggccgccacgccgccacgcttcttcttccctttcccgtccaacctccaaccctgccggctgccgcggcggcggattaacacaataccttggcgagagacgtaatagtttctgaactcaccgcgctacgcccgatgtcggagacggcggcgccgatcggcctgtcatgggctcccaagcttccttcctttgcaacgaccagcggcggcagcaagatcgaccacgcgccggatccgagcaccgcgcagggctcgctctggaagcgcacgagcgagctcgtggacgggctgttcgtgcccccgagggaccctaggcagctgaataagctggctaggaagaacgtcaaggacaccgccggcaagggctggttcgacatgcccgcgccgaccatcactcccgagttgaagaaggatctcgagattttgcagctgaggcatgtaattgacccaaaaaggcacttcaagcgggcaggaaagtccaaggcccttcccaagtacttccaagttggtacggttgttgagcctgcatctgagttctactcaagtaggctgaaaaatagggaacgcaaggcaacattggtggacgagctgctatcagatcaatctcttaagagctacaggatgcgcaaggtacgggaaattcaggagatccgtacaccaggaggcaaccaaaagtggaagaacaagggcaagaaaacactgaagagggcgaaggataggagaaaatgagactggtgcgcccagctttgtgctccagttgtgagggaaccaaggaacgccttcaagtcgctctagtgcttttctctcaactttgcagtatagattctggttccagtgtagtgttgtggacttcatgatgaattgatttgtatttctataaattttataatattgctgtaacagcggaattcagaaatatgagttggtagactctttcaagttagctagcttc

SEQ ID NO: 15563 - protein, 197 aa, Zea mays subsp. mays
  misc_feature (1)..(197): Ceres Seq. ID no. 12345897
MSETAAPIGLSWAPKLPSFATTSGGSKIDHAPDPSTAQGSLWKRTSELVDGLFVPPRDPRQLNKLARKNVKDTAGKGWFDMPAPTITPELKKDLEILQLRHVIDPKRHFKRAGKSKALPKYFQVGTVVEPASEFYSSRLKNRERKATLVDELLSDQSLKSYRMRKVREIQEIRTPGGNQKWKNKGKKTLKRAKDRRK

SEQ ID NO: 15564 - protein, 117 aa, Zea mays subsp. mays
  misc_feature (1)..(117): Ceres Seq. ID no. 12345898
MPAPTITPELKKDLEILQLRHVIDPKRHFKRAGKSKALPKYFQVGTVVEPASEFYSSRLKNRERKATLVDELLSDQSLKSYRMRKVREIQEIRTPGGNQKWKNKGKKTLKRAKDRRK

SEQ ID NO: 15565 - DNA, 1571 bp, Zea mays subsp. mays
  misc_feature (1)..(1571): Ceres Seq. ID no. 12345899
aacacatcacaagagagccaagggctagccgatcaacaacaccactagcctctcctatcctagctagctagcttccaccggccggaagaaaaaaaaatggtggcgagcaaggccgccccgttcgacgaggtgtcctcggtggaggcgggggcctacgggggccgcgacgacgacgggcggccgcgccggacgggcacggtgtggacggccagcgcccacattatcacggccgtcatcggctccggggtgctctcgctggcgtgggccatcgcgcagctgggctgggccgcgggccccgccgtcatgctgctcttcgccgtcgtcatctactacacctccacgctgctcgccgagtgctaccgctccggcgacccagtggcggggaagcgcaactacacctacatggacgccgtccgcgcaagcctcggcggcgccaagcgccatcaagagggcggactgcttccacgccaagggccacaagcacgcgtgccgcagctccagcaacccctacatgatcctcttcggcgtcgccgaggtcgtcttctcgcagataccggacttcgaccagatttggtggctctccatcgtcgccgccgtcatgtccttcacctacgccaccatcggcctcgtcctcggcatcatgcagaccgtcgccaacgggggcttccagggcagcctcaccgggatcagcatcggcgccggcgtcaccccgacggagaaggtctggcggagcctgcaggccttcggcaacatcgccttcgcctattcctactccatcatcctcatcgagatccaggacacggtcaaggcgccgccgccatccgaggccaaggtgatgaagagggcgaccatggtgagcgtggccaccacaacggtgttctacatgctgtgcgggtgcatgggctacgccgccttcggcgacgccgcgccggacaacctcctcaccggcttcggcttctacgagcccttctggctgctggacatcgccaacgtcgccatcgtcgtgcacctcgtcggcgcctaccaggtcttctgccagccgctcttcgccttcgtcgagaagtgggcagcggccacgtggcccgacagcgccttcatcgcccgggagttccgcgtgggccccttcgcgctcagcctgttccgcctcacctggcgcacggcgttcgtgtgcctcaccaccgtcgccgccatgctgctccccttcttcggcgacgtcgtcggcctgctcggcgccgtctccttctggccgctcaccgtctacttccccatcgagatgtacgtcgtgcagcgcgccgtgcgcaggtggagcacgcactggatctgcctccagatgctcagcgctgcgtgcctcctcgtgtccgtcgccgccgcagcgggctccatcgccgacgtcatcggcgcgctcaaggtgtaccgcccgttcagcggctagttcagataggggcccaacgaggcgtgtgccgtgcacatgagtagtgccagtggtatctctactggtcggggtgctacattgactgtggggtcccgggttgttgtaacttgtaagatatagccaaatgaaaaacaaagct

SEQ ID NO: 15566 - protein, 459 aa, Zea mays subsp. mays
  misc_feature (1)..(459): Ceres Seq. ID no. 12345900
MVASKAAPFDEVSSVEAGAYGGRDDDGRPRRTGTVWTASAHIITAVIGSGVLSLAWAIAQLGWAAGPAVMLLFAVVIYYTSTLLAECYRSGDPVAGKRNYTYMDAVRASLGGAKRHQEGGLLPRQGPQARVPQLQQPLHDPLRRRRGRLLADTGLRPDLVALHRRRRHVLHLRHHRPRPRHHADRRQRGLPGQPHRDQHRRRRHPDGEGLAEPAGLRQHRLRLFLLHHPHRDPGHGQGAAAIRGQGDEEGDHGERGHHNGVLHAVRVHGLRRLRRRRAGQPPHRLRLLRALLAAGHRQRRHRRAPRRRLPGLLPAALRLRREVGSGHVARQRLHRPGVPRGPLRAQPVPPHLAHGVRVPHHRRRHAAPLLRRRRRPARRRLLLAAHRLLPHRDVRRAARRAQVEHALDLPPDAQRCVPPRVRRRRSGLHRRRHRRAQGVPPVQRLVQIGAQRGVCRAHE

SEQ ID NO: 15567 - protein, 390 aa, Zea mays subsp. mays
  misc_feature (1)..(390): Ceres Seq. ID no. 12345901
MLLFAVVIYYTSTLLAECYRSGDPVAGKRNYTYMDAVRASLGGAKRHQEGGLLPRQGPQARVPQLQQPLHDPLRRRRGRLLADTGLRPDLVALHRRRRHVLHLRHHRPRPRHHADRRQRGLPGQPHRDQHRRRRHPDGEGLAEPAGLRQHRLRLFLLHHPHRDPGHGQGAAAIRGQGDEEGDHGERGHHNGVLHAVRVHGLRRLRRRRAGQPPHRLRLLRALLAAGHRQRRHRRAPRRRLPGLLPAALRLRREVGSGHVARQRLHRPGVPRGPLRAQPVPPHLAHGVRVPHHRRRHAAPLLRRRRRPARRRLLLAAHRLLPHRDVRRAARRAQVEHALDLPPDAQRCVPPRVRRRRSGLHRRRHRRAQGVPPVQRLVQIGAQRGVCRAHE

SEQ ID NO: 15568 - protein, 357 aa, Zea mays subsp. mays
  misc_feature (1)..(357): Ceres Seq. ID no. 12345902
MDAVRASLGGAKRHQEGGLLPRQGPQARVPQLQQPLHDPLRRRRGRLLADTGLRPDLVALHRRRRHVLHLRHHRPRPRHHADRRQRGLPGQPHRDQHRRRRHPDGEGLAEPAGLRQHRLRLFLLHHPHRDPGHGQGAAAIRGQGDEEGDHGERGHHNGVLHAVRVHGLRRLRRRRAGQPPHRLRLLRALLAAGHRQRRHRRAPRRRLPGLLPAALRLRREVGSGHVARQRLHRPGVPRGPLRAQPVPPHLAHGVRVPHHRRRHAAPLLRRRRRPARRRLLLAAHRLLPHRDVRRAARRAQVEHALDLPPDAQRCVPPRVRRRRSGLHRRRHRRAQGVPPVQRLVQIGAQRGVCRAHE

SEQ ID NO: 15569 - protein, 306 aa, Zea mays subsp. mays
  misc_feature (1)..(306): Ceres Seq. ID no. 12345903
MILFGVAEVVFSQIPDFDQIWWLSIVAAVMSFTYATIGLVLGIMQTVANGGFQGSLTGISIGAGVTPTEKVWRSLQAFGNIAFAYSYSIILIEIQDTVKAPPPSEAKVMKRATMVSVATTTVFYMLCGCMGYAAFGDAAPDNLLTGFGFYEPFWLLDIANVAIVVHLVGAYQVFCQPLFAFVEKWAAATWPDSAFIAREFRVGPFALSLFRLTWRTAFVCLTTVAAMLLPFFGDVVGLLGAVSFWPLTVYFPIEMYVVQRAVRRWSTHWICLQMLSAACLLVSVAAAAGSIADVIGALKVYRPFSG

SEQ ID NO: 15570 - DNA, 1510 bp, Zea mays subsp. mays
  misc_feature (1)..(1510): Ceres Seq. ID no. 12345944
acacgacgccgcgccccgcggaatccatcttctccatctccaactgtgctactgtaggagctgctgcaatcggggagagaaacgcgaccagtttgccggcaccaacacggcctgctgccacatctccggcatcttcttccgggttggggactgaaaactgtcgctgttagttggggttggggactctttcagtggtaagtccacatgcaggctgcagcaagcaactggacgatggtggcttccaggcagtcagagaacaatgcacaagaagaagcatcaccattgacgactcctaacgccaacatagccaggatcatcccttcgctgcccctcgagaccaggtggccaccgttccctctccgacggtacgccaatttttggctgcctgaggtaacattgaaggaaggcgtccccggcgttcattcctgcttcgagccgagacccaccgacgtgttcctcgcaagcttccccaagtctggcaccacctggctcaaggccctcgccttcgcgacgctgaagcgttccacgcatccgccgttcgacgacgaccatccgctgcgccattgcaaccctcatgactgtgtcaggttcctcgaacttgatttcaaccagcagaaggatgagctcgaggcgctcccgtccccgcgtgtgctggccacgcacctcccctactccctgctgcccggcagcatcaccggcgacggagagcgctcggggtgccggatcgtgtacgtttgccgggaacccaaggacgtgctggtctcctcctggctgttcacgagaaaggcagcgccggcttgtggggttgacgcccggtcgttcacgatccaggaggccttggagctgttctgtgatggccgctgtctcggcggcccacagtggaaccacgtcctccactactggaaggagagcgtgaggaggcctgacatggtgttgttccttcgttacgaggaggtgctgattgagcccgaggcgcacgtcagaaagctggccaatttcatgggctgtggattctccgaggaggaggaggagcgcggggtggtgagcgccatcgtggagctgtgtagcttggggaagctgaaagacatggaggtgaatagaaatgggagcactatgttggggatcaagaacgaaagcttcttcaggaagggtgttgttggggactggagcaagcatatgacgcaggagatggcgcagaggctagacaaggtcgtagaggatgcattgcaagggactggattcacctttgcgagcacagcatgatgaggcagtgcgctcatagtagttgcgaactgcagaataatgccaagatcaactcgttttatcggtgttgctggttggagatcatgccagtcatggtgagcattcttctttggtgatgaagggggaaatatggacatcatcttatcatttaacgaaaattgatttgtgtacaattcatttgtataactttgttacaaaccatatgttgtggcaccttggcacgccaaaaccatatgcattactgtgc

SEQ ID NO: 15571 - protein, 352 aa, Zea mays subsp. mays
  misc_feature (1)..(352): Ceres Seq. ID no. 12345945
MQAAASNWTMVASRQSENNAQEEASPLTTPNANIARIIPSLPLETRWPPFPLRRYANFWLPEVTLKEGVPGVHSCFEPRPTDVFLASFPKSGTTWLKALAFATLKRSTHPPFDDDHPLRHCNPHDCVRFLELDFNQQKDELEALPSPRVLATHLPYSLLPGSITGDGERSGCRIVYVCREPKDVLVSSWLFTRKAAPACGVDARSFTIQEALELFCDGRCLGGPQWNHVLHYWKESVRRPDMVLFLRYEEVLIEPEAHVRKLANFMGCGFSEEEEERGVVSAIVELCSLGKLKDMEVNRNGSTMLGIKNESFFRKGVVGDWSKHMTQEMAQRLDKVVEDALQGTGFTFASTA

SEQ ID NO: 15572 - protein, 343 aa, Zea mays subsp. mays
  misc_feature (1)..(343): Ceres Seq. ID no. 12345946
MVASRQSENNAQEEASPLTTPNANIARIIPSLPLETRWPPFPLRRYANFWLPEVTLKEGVPGVHSCFEPRPTDVFLASFPKSGTTWLKALAFATLKRSTHPPFDDDHPLRHCNPHDCVRFLELDFNQQKDELEALPSPRVLATHLPYSLLPGSITGDGERSGCRIVYVCREPKDVLVSSWLFTRKAAPACGVDARSFTIQEALELFCDGRCLGGPQWNHVLHYWKESVRRPDMVLFLRYEEVLIEPEAHVRKLANFMGCGFSEEEEERGVVSAIVELCSLGKLKDMEVNRNGSTMLGIKNESFFRKGVVGDWSKHMTQEMAQRLDKVVEDALQGTGFTFASTA

SEQ ID NO: 15573 - DNA, 1434 bp, Zea mays subsp. mays
  misc_feature (1)..(1434): Ceres Seq. ID no. 12345959
gacacacgaaattctcaggtcccggtcccgggtccaggcacccttctcgctcggttgctcgggagctttccccttcctgttcctgaagcttccgacatccgaccgcctcctcctcctcgttctactcgccgccccttctaggatcatccagaggcgtgccggtgaaacgcgagagcggtgaggcatggcgatgcagacgggggtcgcgacctccaaggtcctcatcctcgtcggtgcagggatgacgggctcgatcctgctgcggaatggccgcttatctgatgtgttgggagaactccaggagattatgaagggtgtaaatcaaggaactgcttcgggtccctatgacattgcacttattcaagctcagattcggaatttagcccaagaagtcagagatttgacattgtcaaagcccattaccatactgaatggcaaatctgactcgggaggcagtttatcatcctacatactgccagcagcagcagttggagcaatgggttattgctacatgtggtggaaggggttgtctctctcagatgtcatgtttgtcacaaaacacaacatggcaaatgctgttcagagcatgtcaaagcagttggagcaagtttcatcagcactagctgcaacaaaaagacatctaactcaacggcttgagaatttggatggcaaaatggatgaacaagtagaggtctccaaagctattagaaatgaggtcaatgatgttaaagatgacctgtctcaaattggatttgatgtcgaatcaattcagaaaatggttgctggattggagggaaagatcgagttacttgagaacaaacaggacgtggctaatactggtatctggtacctctgccaagtagcaggcggtttaaaagatggaataaacaccaggtttttccaggaaaccagtgagaagctgaagctctcacattcagctcaacctgaaaacaagccagtgaaggggcttgaatttttttcggaaagcgccatggaacagaaagtagctgactccaaaccaattgcggtgacagtcgacgctgagaagcctgagaaaaccgctgctgtaatgggcaccacagtgcacaggtctatcaggttctcatatcggaaggcaggccttgctttgtgatcaaatcctctccgcttgagatgcacgtggccttcctggttgcttttcttttttggcaacaaccttcctggttgctttgtctgatggtcagaaaacatggaagaataacctgcaactggagtgacagaatttcttttccccgcagtagacaggtgtgcgttatttggtctgatttgaaactatcttcagtccgctatcaatttttttccttggattttgattcattttatgtttcgacttgttgccttgtatactgtaaaggcattggaaagaatacataaaacacgaatgttttttttgcc

SEQ ID NO: 15574 - protein, 315 aa, Zea mays subsp. mays
  misc_feature (1)..(315): Ceres Seq. ID no. 12345960
MAMQTGVATSKVLILVGAGMTGSILLRNGRLSDVLGELQEIMKGVNQGTASGPYDIALIQAQIRNLAQEVRDLTLSKPITILNGKSDSGGSLSSYILPAAAVGAMGYCYMWWKGLSLSDVMFVTKHNMANAVQSMSKQLEQVSSALAATKRHLTQRLENLDGKMDEQVEVSKAIRNEVNDVKDDLSQIGFDVESIQKMVAGLEGKIELLENKQDVANTGIWYLCQVAGGLKDGINTRFFQETSEKLKLSHSAQPENKPVKGLEFFSESAMEQKVADSKPIAVTVDAEKPEKTAAVMGTTVHRSIRFSYRKAGLAL

SEQ ID NO: 15575 - protein, 313 aa, Zea mays subsp. mays
  misc_feature (1)..(313): Ceres Seq. ID no. 12345961
MQTGVATSKVLILVGAGMTGSILLRNGRLSDVLGELQEIMKGVNQGTASGPYDIALIQAQIRNLAQEVRDLTLSKPITILNGKSDSGGSLSSYILPAAAVGAMGYCYMWWKGLSLSDVMFVTKHNMANAVQSMSKQLEQVSSALAATKRHLTQRLENLDGKMDEQVEVSKAIRNEVNDVKDDLSQIGFDVESIQKMVAGLEGKIELLENKQDVANTGIWYLCQVAGGLKDGINTRFFQETSEKLKLSHSAQPENKPVKGLEFFSESAMEQKVADSKPIAVTVDAEKPEKTAAVMGTTVHRSIRFSYRKAGLAL

SEQ ID NO: 15576 - protein, 296 aa, Zea mays subsp. mays
  misc_feature (1)..(296): Ceres Seq. ID no. 12345962
MTGSILLRNGRLSDVLGELQEIMKGVNQGTASGPYDIALIQAQIRNLAQEVRDLTLSKPITILNGKSDSGGSLSSYILPAAAVGAMGYCYMWWKGLSLSDVMFVTKHNMANAVQSMSKQLEQVSSALAATKRHLTQRLENLDGKMDEQVEVSKAIRNEVNDVKDDLSQIGFDVESIQKMVAGLEGKIELLENKQDVANTGIWYLCQVAGGLKDGINTRFFQETSEKLKLSHSAQPENKPVKGLEFFSESAMEQKVADSKPIAVTVDAEKPEKTAAVMGTTVHRSIRFSYRKAGLAL

SEQ ID NO: 15577 - DNA, 684 bp, Zea mays subsp. mays
  misc_feature (1)..(684): Ceres Seq. ID no. 12345970
attggacggatcgagctggtactggcacactcgatccaatattttagctagctagcaagcaaagcaagccttgagcttgagcggcggctagcgcaatgggaggcgtggcgtcggagctggtaggagccagcagggagaggcagagcaggaagaggaagcagttccacacggtggagctcaagatcaggatggactgcgacggctgcgagctcaaggtcaggaacacccttgcccgcatgagaggggtggagtcggtggagatcaaccggaagcagcagaaggtgacggtgaaggggttcgtggaggcgcagcgggtgcttaggcgcacccagtccacggggaagcgcgtcgagctgtggccctacgtgccctacaccaacctctacgtcgcgccgccggtgtacgacaagagggcgccgccgggccacgtccgcagggtcgacgcactcatcgcgcccgccgccggccaggaagagcacctcgccacgctcttcagcgacgataaccccaacgcctgctcccttatgtgatgcctcatgctagctagagccgcctgctccccggccttatgcgatgctagctgcttgcttcatccacgctgtactagcgatgtacatgcattgtttgcatgaaaacgaactgatgctccgtagttacgcagtaatataataatctctatctttt

SEQ ID NO: 15578 - protein, 144 aa, Zea mays subsp. mays
  misc_feature (1)..(144): Ceres Seq. ID no. 12345971
MGGVASELVGASRERQSRKRKQFHTVELKIRMDCDGCELKVRNTLARMRGVESVEINRKQQKVTVKGFVEAQRVLRRTQSTGKRVELWPYVPYTNLYVAPPVYDKRAPPGHVRRVDALIAPAAGQEEHLATLFSDDNPNACSLM

SEQ ID NO: 15579 - protein, 113 aa, Zea mays subsp. mays
  misc_feature (1)..(113): Ceres Seq. ID no. 12345972
MDCDGCELKVRNTLARMRGVESVEINRKQQKVTVKGFVEAQRVLRRTQSTGKRVELWPYVPYTNLYVAPPVYDKRAPPGHVRRVDALIAPAAGQEEHLATLFSDDNPNACSLM

SEQ ID NO: 15580 - protein, 97 aa, Zea mays subsp. mays
  misc_feature (1)..(97): Ceres Seq. ID no. 12345973
MRGVESVEINRKQQKVTVKGFVEAQRVLRRTQSTGKRVELWPYVPYTNLYVAPPVYDKRAPPGHVRRVDALIAPAAGQEEHLATLFSDDNPNACSLM

SEQ ID NO: 15581 - DNA, 1372 bp, Zea mays subsp. mays
  misc_feature (1)..(1372): Ceres Seq. ID no. 12345991
gtgcgtgcgttacccgcgctcgagacaaggcgttgtctcactctcatcatccgtgcagtgctggacgatcgcttcttgtccccgtctcggcttctcgcctcttcggcggcagcggggcatcgattgcaatggacgcgcccttcttccacgagctcaggcggcaggcctcctcctacctgaccggcaagatccgctccgcgcggctggcgctcaccgacgtcaccccgacgcagctcttgacggaggaggcgacgaacggggacgcgtcgccgccgaacgtcaggacgatggggcgcatagcccggcaggcgttcgacgtcgacgagtacgtcaggatcacgggcgtcctgcacgggcgcctcgcgagcttcgaccgcaggcagtggcgggaggcgtacaaggcgctcctcctcctcgagcacctcctcacgcacgggccccgcagcgtcgcggtggagttccacaaggacagggaggccatcgaccggatggccaccttccaacacgtcgacgagaaaggcttcaactggggcctgacggtgaggagcaagtcggagcgcgtgctcaagctgctggagcgcggcccgttcctggaggaggagcgcgagcgggcgcgcaagatcgcgcgcgagatcacgggcttcggcagcttcagcctcagcgcaggcgcctcccaccacgccgtgtcgcagtcgcagccacccggtgacgacgggaaccgcggcgacggccggagcagctccaagcgcgaggagcggcagaggcacgacgacggcggccgattcgggcggagccactcgcagttcgaggagcggtggtggaagcacaaggacggtgacgacggcgacaaggagaatctgatacagagcccggagccgacagcacgggtcgcgccgcgggaagtggatgcggaggcggaggaggaggagctgcaccaccaccagctccatccgttccacgggttggggcaaaaacagcggccggaggcgacgctgctcctgagccagtgacgggatcagtcggttcgtgtcatggtgacgtgaaaagaaccgtgtgcttttctcccttcctccaaggctgcagggtcagtattttactgacactgcttggtgcatcaggcatctcatgcgccatgaatggccgcttgcttggcctcgtaaaatttctttccttcagttcggaacttcggatgccagaatgtactagagaccaccacatacaggcatgtctcaagcttccagtaactctctagaaaccacgtattctaggagtgcgagaatgggatcctcctgcccaagtgcagctgtgctaatcttttactctgaacctgtgaaccatctactgaaggaaagcaaaaggcagtagttattcc

SEQ ID NO: 15582 - protein, 335 aa, Zea mays subsp. mays
  misc_feature (1)..(335): Ceres Seq. ID no. 12345992
ACVTRARDKALSHSHHPCSAGRSLLVPVSASRLFGGSGASIAMDAPFFHELRRQASSYLTGKIRSARLALTDVTPTQLLTEEATNGDASPPNVRTMGRIARQAFDVDEYVRITGVLHGRLASFDRRQWREAYKALLLLEHLLTHGPRSVAVEFHKDREAIDRMATFQHVDEKGFNWGLTVRSKSERVLKLLERGPFLEEERERARKIAREITGFGSFSLSAGASHHAVSQSQPPGDDGNRGDGRSSSKREERQRHDDGGRFGRSHSQFEERWWKHKDGDDGDKENLIQSPEPTARVAPREVDAEAEEEELHHHQLHPFHGLGQKQRPEATLLLSQ

SEQ ID NO: 15583 - protein, 293 aa, Zea mays subsp. mays
  misc_feature (1)..(293): Ceres Seq. ID no. 12345993
MDAPFFHELRRQASSYLTGKIRSARLALTDVTPTQLLTEEATNGDASPPNVRTMGRIARQAFDVDEYVRITGVLHGRLASFDRRQWREAYKALLLLEHLLTHGPRSVAVEFHKDREAIDRMATFQHVDEKGFNWGLTVRSKSERVLKLLERGPFLEEERERARKIAREITGFGSFSLSAGASHHAVSQSQPPGDDGNRGDGRSSSKREERQRHDDGGRFGRSHSQFEERWWKHKDGDDGDKENLIQSPEPTARVAPREVDAEAEEEELHHHQLHPFHGLGQKQRPEATLLLSQ

SEQ ID NO: 15584 - protein, 240 aa, Zea mays subsp. mays
  misc_feature (1)..(240): Ceres Seq. ID no. 12345994
MGRIARQAFDVDEYVRITGVLHGRLASFDRRQWREAYKALLLLEHLLTHGPRSVAVEFHKDREAIDRMATFQHVDEKGFNWGLTVRSKSERVLKLLERGPFLEEERERARKIAREITGFGSFSLSAGASHHAVSQSQPPGDDGNRGDGRSSSKREERQRHDDGGRFGRSHSQFEERWWKHKDGDDGDKENLIQSPEPTARVAPREVDAEAEEEELHHHQLHPFHGLGQKQRPEATLLLSQ

SEQ ID NO: 15585 - DNA, 1282 bp, Zea mays subsp. mays
  misc_feature (1)..(1282): Ceres Seq. ID no. 12346078
ctactttacacctcctcttcttcttcttcctcgtgcagcagctgtccatcgccgctgggttttctttgttggcattgggttttggaggagaggtcaaggctgagactcggagacgaaatgggtcataggatgttcagtcccttgggcttccttcttcttgccatcgtcgtcctctatggtggaacagagcagaggcgagcggaggcagcagaaggagggagcccgcacaggctgctggccaccatctcggtgtccaagccgtcctaccccacggtcaccacgcccatgtcggcctacggcgacccggtctccacgccagccaccccgtactcaacgttcccgtcgctggcgaccgggaacggcggtgccggtgccggtgcaggcggcggtgctggtgtaggcgggggcggcggcggcggcgggacgtggtgcgtggccagccagagcgcgagcccgaccgcgctgcaggtcgcgctggactacgcctgcggctatggcgccgactgctccccgatccagcagggcgggagctgcttcaaccccgacaccgtccacgaccacgcgtcctacgcctttaacagctactaccagaagaaccccgccccaaccagctgcgacttcggcggcacggccaccatcaccaacaccgatcccagttcagggtcgtgccagtacccatcgtcaagcggtggcgctcagagcacgatgcccccgccatccccgacgagcatgccgccgacagtgcccaccgccccgatgaccccgacgccgatgacgccggacaccaccccgaccaccggcaccccggtctacggattgtccccacccgactacggctcattgtccccacccgactctggctcgatgtcccctcccggctacggatcgacgtctcccccggactacaacgacgtcggcgccgccgcgacgacggggcagggcggcgcggcgctggcgctggcgcttctgtgcgtcctggtcgcgacagtatctctgcacgtctccaaatgagagcggcggcataggaggaaattatgcatgcctgtttcggttgagacgttacatggcgcgccccgtgcgtggtggctgaaagacgcacgcacaggtccatcgccgaggatctccggtggtgtgctgcccggcgccgggggagcattcgagcagtgttgcaagtctgcttagtgttgtataagaaatgaggcgagcttctagcagcgcccgagttctagcagatgcaccagatgtttatacatacatacatacatgcttaaatatataatgg

SEQ ID NO: 15586 - protein, 336 aa, Zea mays subsp. mays
  misc_feature (1)..(336): Ceres Seq. ID no. 12346079
LLYTSSSSSSSCSSCPSPLGFLCWHWVLEERSRLRLGDEMGHRMFSPLGFLLLAIVVLYGGTEQRRAEAAEGGSPHRLLATISVSKPSYPTVTTPMSAYGDPVSTPATPYSTFPSLATGNGGAGAGAGGGAGVGGGGGGGGTWCVASQSASPTALQVALDYACGYGADCSPIQQGGSCFNPDTVHDHASYAFNSYYQKNPAPTSCDFGGTATITNTDPSSGSCQYPSSSGGAQSTMPPPSPTSMPPTVPTAPMTPTPMTPDTTPTTGTPVYGLSPPDYGSLSPPDSGSMSPPGYGSTSPPDYNDVGAAATTGQGGAALALALLCVLVATVSLHVSK

SEQ ID NO: 15587 - protein, 297 aa, Zea mays subsp. mays
  misc_feature (1)..(297): Ceres Seq. ID no. 12346080
MGHRMFSPLGFLLLAIVVLYGGTEQRRAEAAEGGSPHRLLATISVSKPSYPTVTTPMSAYGDPVSTPATPYSTFPSLATGNGGAGAGAGGGAGVGGGGGGGGTWCVASQSASPTALQVALDYACGYGADCSPIQQGGSCFNPDTVHDHASYAFNSYYQKNPAPTSCDFGGTATITNTDPSSGSCQYPSSSGGAQSTMPPPSPTSMPPTVPTAPMTPTPMTPDTTPTTGTPVYGLSPPDYGSLSPPDSGSMSPPGYGSTSPPDYNDVGAAATTGQGGAALALALLCVLVATVSLHVSK

SEQ ID NO: 15588 - protein, 293 aa, Zea mays subsp. mays
  misc_feature (1)..(293): Ceres Seq. ID no. 12346081
MFSPLGFLLLAIVVLYGGTEQRRAEAAEGGSPHRLLATISVSKPSYPTVTTPMSAYGDPVSTPATPYSTFPSLATGNGGAGAGAGGGAGVGGGGGGGGTWCVASQSASPTALQVALDYACGYGADCSPIQQGGSCFNPDTVHDHASYAFNSYYQKNPAPTSCDFGGTATITNTDPSSGSCQYPSSSGGAQSTMPPPSPTSMPPTVPTAPMTPTPMTPDTTPTTGTPVYGLSPPDYGSLSPPDSGSMSPPGYGSTSPPDYNDVGAAATTGQGGAALALALLCVLVATVSLHVSK

SEQ ID NO: 15589 - DNA, 1058 bp, Zea mays subsp. mays
  misc_feature (1)..(1058): Ceres Seq. ID no. 12346165
ctcacacgccggccgccgcgcaagagccgtggccccgtcgacgtccgcccgcacaggactctccgagtgtgggattgagccgtagttttttttttttggtggctcgggccgatatccggtactgtatgagggttgccaactactagactttaagatcgctgattcaatggaggcctccgaggcagcacctgcagcggcggccaccgtcatggaagcagaggatgtgagcggcgggaagggcgaatggtacgtgcttggggagcgggcgctgatggtgccgtacacgcgggagcacgtgccgcggtaccacgactggatgcaggacccggcgctgctggaggccaccgcgtcggagcccctctccctctcgcaggagttcgaggtccaccgctcatggaccctcgaccctctaaagcacaccttcatagtgttggataaggagctcatagagggagagttcgtgccgggcaacccgcacattgaagctatggttggtgatgtgaacatatatatgaatgactctgatgatgtgcagatcgcggagatagagattatgatagctgaacataagagccgtgggaagggtattggtcaagaagcaatcttactgatgatggcatttgcagtagagaaatatggaattcacacgttcagggcaaaaattagcgaatcaaatatggcatcgcttaagctcttcaggaagttgggcttcaaggatgcttcatacagtgtggtgttcaaggaggtgactctggaggcacccgctgactcactcccgttgagatttcctctgaccattggagactggtgacgtttgacatgccccaagttaattccatgcagacgacacaagaagctaatgctgtttgtctgtactatctgaccaaaatttactcgggctgatattgtatgaaaaaaatgaataaaacagttgcacagttgtgattcaattgcattagaccagtcgggtttttcatgtcactattttgaagaccccatatcttataaacaaatgtagacaagttttatctcataatttttttatagtatctcccgtc

SEQ ID NO: 15590 - protein, 214 aa, Zea mays subsp. mays
  misc_feature (1)..(214): Ceres Seq. ID no. 12346166
MEASEAAPAAAATVMEAEDVSGGKGEWYVLGERALMVPYTREHVPRYHDWMQDPALLEATASEPLSLSQEFEVHRSWTLDPLKHTFIVLDKELIEGEFVPGNPHIEAMVGDVNIYMNDSDDVQIAEIEIMIAEHKSRGKGIGQEAILLMMAFAVEKYGIHTFRAKISESNMASLKLFRKLGFKDASYSVVFKEVTLEAPADSLPLRFPLTIGDW

SEQ ID NO: 15591 - protein, 200 aa, Zea mays subsp. mays
  misc_feature (1)..(200): Ceres Seq. ID no. 12346167
MEAEDVSGGKGEWYVLGERALMVPYTREHVPRYHDWMQDPALLEATASEPLSLSQEFEVHRSWTLDPLKHTFIVLDKELIEGEFVPGNPHIEAMVGDVNIYMNDSDDVQIAEIEIMIAEHKSRGKGIGQEAILLMMAFAVEKYGIHTFRAKISESNMASLKLFRKLGFKDASYSVVFKEVTLEAPADSLPLRFPLTIGDW

SEQ ID NO: 15592 - protein, 179 aa, Zea mays subsp. mays
  misc_feature (1)..(179): Ceres Seq. ID no. 12346168
MVPYTREHVPRYHDWMQDPALLEATASEPLSLSQEFEVHRSWTLDPLKHTFIVLDKELIEGEFVPGNPHIEAMVGDVNIYMNDSDDVQIAEIEIMIAEHKSRGKGIGQEAILLMMAFAVEKYGIHTFRAKISESNMASLKLFRKLGFKDASYSVVFKEVTLEAPADSLPLRFPLTIGDW

SEQ ID NO: 15593 - DNA, 699 bp, Zea mays subsp. mays
  misc_feature (1)..(699): Ceres Seq. ID no. 12346268
ctcactctccctgctgcaacccaaccaagcccgcacgacacgacaccaagtcgaggagctcgagagggcaccaataatggccggcgtgaactccagcgtcgtcgggctcaagcccgccgcggcagtgccgcaggccgccgccgcctcatcgccggcgaagcgggtgcagctggccgcgcccgagggccgccgcgccgctctgctcggcctggnggncgtnttcgccgtcncggccaccaccgggtcggccaaggccacgatcttcgatgagtacctcgagaagagcaaggccaacaaggagctgaacgacaagaagaggctggccaccagtggagccaactttgcgcgcgcctacaccgtggagttcggcagctgccagttcccctacaacttcactgggtgccaggacctcgccaagcagaagaaagtccccttcatcagcgacgacctcgagattgagtgcgaggggaaggagaagttcaagtgcggctccaacgttttctggaagtggtgaagcagctagcagcagcgtctgatgggaatggaggagatcatcacctgtcttgtcgaccctagatatgtccaaactgcagggaaattaaatcttcatgtgtaattgtgctcattctgtttcaatcatctcaacatccgatcatgaacctcttgcattattaactggctcgatcgtcttctcagttc

SEQ ID NO: 15594 - protein, 170 aa, Zea mays subsp. mays
  misc_feature (1)..(170): Ceres Seq. ID no. 12346269
  misc_feature (71)..(71): Xaa is any aa, unknown or other
  misc_feature (72)..(72): Xaa is any aa, unknown or other
  misc_feature (73)..(73): Xaa is any aa, unknown or other
  misc_feature (77)..(77): Xaa is any aa, unknown or other
SLSLLQPNQARTTRHQVEELERAPIMAGVNSSVVGLKPAAAVPQAAAASSPAKRVQLAAPEGRRAALLGLXXXFAVXATTGSAKATIFDEYLEKSKANKELNDKKRLATSGANFARAYTVEFGSCQFPYNFTGCQDLAKQKKVPFISDDLEIECEGKEKFKCGSNVFWKW

SEQ ID NO: 15595 - protein, 145 aa, Zea mays subsp. mays
  misc_feature (1)..(145): Ceres Seq. ID no. 12346270
  misc_feature (46)..(46): Xaa is any aa, unknown or other
  misc_feature (47)..(47): Xaa is any aa, unknown or other
  misc_feature (48)..(48): Xaa is any aa, unknown or other
  misc_feature (52)..(52): Xaa is any aa, unknown or other
MAGVNSSVVGLKPAAAVPQAAAASSPAKRVQLAAPEGRRAALLGLXXXFAVXATTGSAKATIFDEYLEKSKANKELNDKKRLATSGANFARAYTVEFGSCQFPYNFTGCQDLAKQKKVPFISDDLEIECEGKEKFKCGSNVFWKW

SEQ ID NO: 15596 - protein, 89 aa, Zea mays subsp. mays
  misc_feature (1)..(89): Ceres Seq. ID no. 12346271
  misc_feature (71)..(71): Xaa is any aa, unknown or other
  misc_feature (72)..(72): Xaa is any aa, unknown or other
  misc_feature (74)..(74): Xaa is any aa, unknown or other
  misc_feature (77)..(77): Xaa is any aa, unknown or other
LTLPAATQPSPHDTTPSRGAREGTNNGRRELQRRRAQARRGSAAGRRRLIAGEAGAAGRARGPPRRSARPXXRXRRXGHHRVGQGHDLR

SEQ ID NO: 15597 - DNA, 1085 bp, Zea mays subsp. mays
  misc_feature (1)..(1085): Ceres Seq. ID no. 12346342
acacatcctcctccccccttcgtctctctctccctctctctctctgcctgcgcgcctgagagctgccaccgccaaggcgaaacggccgtcgccgcatgctgcggctgagctagagacgagaggcgagatggcggccgaggcgctggggttcatggcgcggggagccaccggcgggagggcggcggagctcgtcaccagggacttcctcggcgggtgcgccgccgccgaagacgacgccagggacgcgtccgccaggaatgacgccgtgcccgcgagggtgcaccagcagaagcacgcgtgcccggcggcgccgagggacctgaacctgttcccggtagccgccaccacgaagccctgcgccgcgacggcggcagcggcagcggcaccagcggtcgcgggcggcgccacggctacgtaccacagcgtgtgcacgatcgagaaggtgaagacggccctggagcggttcgagcgcggcaggcagcaccagtccccgcacccgcaccagcagcagcagcacagcggcgcgggcgcgtccccgtcgtcgtcttccgtgaccacgtcctccgtgaagcgccgcggcggcggcggcggcggcggcggcggcgtggagcagggcgacggctgcgactcgccctccggcggcgggatggtggccgcggcgtgccccaggtgcttcctgtacgtgctaatctcccggagcgacccgcggtgcccgcgctgcgagtcccacgtcccggccccgcngcgccagcgccggccgcgagcaagaagccgcggatcgacctcaacgtcggctacctgggcacatagcttgtggtttaggcatatggggcgatggcgtagcctcctagatggagcggctgccgtctcctaccgtaccgtacgtgacgccataaattttgcttaggctcgtgtaatgtgatgacccacggaccgagtcgggtacgtaggagtacgtagacaggggaggggggcgccgttttttgaactgaaacagaaatgcatgccctcccctgtcaggaaatttatggccgatcagacaccgcatacaagaacatgaatgaatggtgacactgctttctgtt

SEQ ID NO: 15598 - protein, 301 aa, Zea mays subsp. mays
  misc_feature (1)..(301): Ceres Seq. ID no. 12346343
  misc_feature (248)..(248): Xaa is any aa, unknown or other
HILLPPSSLSPSLSLPARLRAATAKAKRPSPHAAAELETRGEMAAEALGFMARGATGGRAAELVTRDFLGGCAAAEDDARDASARNDAVPARVHQQKHACPAAPRDLNLFPVAATTKPCAATAAAAAAPAVAGGATATYHSVCTIEKVKTALERFERGRQHQSPHPHQQQQHSGAGASPSSSSVTTSSVKRRGGGGGGGGGVEQGDGCDSPSGGGMVAAACPRCFLYVLISRSDPRCPRCESHVPAPXRQRRPRARSRGSTSTSATWAHSLWFRHMGRWRSLLDGAAAVSYRTVRDAINFA

SEQ ID NO: 15599 - protein, 259 aa, Zea mays subsp. mays
  misc_feature (1)..(259): Ceres Seq. ID no. 12346344
  misc_feature (206)..(206): Xaa is any aa, unknown or other
MAAEALGFMARGATGGRAAELVTRDFLGGCAAAEDDARDASARNDAVPARVHQQKHACPAAPRDLNLFPVAATTKPCAATAAAAAAPAVAGGATATYHSVCTIEKVKTALERFERGRQHQSPHPHQQQQHSGAGASPSSSSVTTSSVKRRGGGGGGGGGVEQGDGCDSPSGGGMVAAACPRCFLYVLISRSDPRCPRCESHVPAPXRQRRPRARSRGSTSTSATWAHSLWFRHMGRWRSLLDGAAAVSYRTVRDAINFA

SEQ ID NO: 15600 - protein, 251 aa, Zea mays subsp. mays
  misc_feature (1)..(251): Ceres Seq. ID no. 12346345
  misc_feature (198)..(198): Xaa is any aa, unknown or other
MARGATGGRAAELVTRDFLGGCAAAEDDARDASARNDAVPARVHQQKHACPAAPRDLNLFPVAATTKPCAATAAAAAAPAVAGGATATYHSVCTIEKVKTALERFERGRQHQSPHPHQQQQHSGAGASPSSSSVTTSSVKRRGGGGGGGGGVEQGDGCDSPSGGGMVAAACPRCFLYVLISRSDPRCPRCESHVPAPXRQRRPRARSRGSTSTSATWAHSLWFRHMGRWRSLLDGAAAVSYRTVRDAINFA

SEQ ID NO: 15601 - DNA, 1151 bp, Zea mays subsp. mays
  misc_feature (1)..(1151): Ceres Seq. ID no. 12346366
gaaagccggagcgtctctgccggtgcccaacgtgcaggcactagctcagacttggcatggatcaggcgagccggtgcctttccggtacgtcaggacagaagagatcgtcgccggcgaagtcgtcgccggctgcgccatcccggtcgtggatctcagcaggttgcttgacccgcggtcgtccgaagaggagctcgcaaacctcggctctgcctgtcagcactggggtttctttcagcttatcaaccatggggtgccggacgaggtgatccaggacacgaagaaagacatggtggagttcttcaagctccctgtggaagccaagaaggtgcacgcgcaggtaccgggcggcatcgagggctacggccaggccttcgtcttctccgagacccagaagctggattgggcggacatgatctacctcatgattagccccaaggagtcgcgggacctgaggttctggcccacccggcctccctccttcagggactctatcgaaaggtactcggccgagacggcgaaggtgacggcgtgcctgctgcggttcatggccaaggacttgggcgtggagccggagcgcctcctggaggagttccggggattgccgcagagcatgcggacgacctactacccgccgtgcaggctggccgccgatgtgcttggcctgtcgccgcacaccgacgccaccggcctgacgctgctgctccacgtcaacgacgtgcagggcctgcagatcaggagggacggcaagtggctcgccgttgaccctctggacggtgctttagtcgtcagcatcggcgacatactggagattctaagcaatgggaggtacagaagcattgagcacagagccattgtacacccggacaaagaacgcatctcggcggcgatgttccatcagacatgccccaacacgacggtcggccctctgcaggagctcgtggaaagagacagtggcggggcacggtacagatccatggactacatggatttcatgaagggcttcttcgcggccaagctcgatgggcgaaggagccacatggacgctttgaggatatactagtccaaatgctggatgaatcatgttcctgtcttcataatgaattggacaactagtagtaaaatatctaaggctatccccaatagttcctctc

SEQ ID NO: 15602 - protein, 352 aa, Zea mays subsp. mays
  misc_feature (1)..(352): Ceres Seq. ID no. 12346367
KAGASLPVPNVQALAQTWHGSGEPVPFRYVRTEEIVAGEVVAGCAIPVVDLSRLLDPRSSEEELANLGSACQHWGFFQLINHGVPDEVIQDTKKDMVEFFKLPVEAKKVHAQVPGGIEGYGQAFVFSETQKLDWADMIYLMISPKESRDLRFWPTRPPSFRDSIERYSAETAKVTACLLRFMAKDLGVEPERLLEEFRGLPQSMRTTYYPPCRLAADVLGLSPHTDATGLTLLLHVNDVQGLQIRRDGKWLAVDPLDGALVVSIGDILEILSNGRYRSIEHRAIVHPDKERISAAMFHQTCPNTTVGPLQELVERDSGGARYRSMDYMDFMKGFFAAKLDGRRSHMDALRIY

SEQ ID NO: 15603 - protein, 257 aa, Zea mays subsp. mays
  misc_feature (1)..(257): Ceres Seq. ID no. 12346368
MVEFFKLPVEAKKVHAQVPGGIEGYGQAFVFSETQKLDWADMIYLMISPKESRDLRFWPTRPPSFRDSIERYSAETAKVTACLLRFMAKDLGVEPERLLEEFRGLPQSMRTTYYPPCRLAADVLGLSPHTDATGLTLLLHVNDVQGLQIRRDGKWLAVDPLDGALVVSIGDILEILSNGRYRSIEHRAIVHPDKERISAAMFHQTCPNTTVGPLQELVERDSGGARYRSMDYMDFMKGFFAAKLDGRRSHMDALRIY

SEQ ID NO: 15604 - protein, 216 aa, Zea mays subsp. mays
  misc_feature (1)..(216): Ceres Seq. ID no. 12346369
MIYLMISPKESRDLRFWPTRPPSFRDSIERYSAETAKVTACLLRFMAKDLGVEPERLLEEFRGLPQSMRTTYYPPCRLAADVLGLSPHTDATGLTLLLHVNDVQGLQIRRDGKWLAVDPLDGALVVSIGDILEILSNGRYRSIEHRAIVHPDKERISAAMFHQTCPNTTVGPLQELVERDSGGARYRSMDYMDFMKGFFAAKLDGRRSHMDALRIY

SEQ ID NO: 15605 - DNA, 847 bp, Zea mays subsp. mays
  misc_feature (1)..(847): Ceres Seq. ID no. 12346394
agtctggggataataatccacactccacaagcagccatggcgccacccatcacgtccctgtcgtctctcatggcgtcggcgggcaggagggggctgctggcgctgggcgccgggttcctggcctcggccgcgctgctgtccccggcgggcgacgccggcgccacgcgcatcgagtactacgcgacggtcggggacaagatgtgcgacctgagcctcgtcaagtccggcctcgcgtactgcgacgtcgaggtcggcaccggcgtccagcccctcgcgcggcgagctcatcaatgtgcactacaccgcgagatttcccgacggtacgctgttcgacagcagctacaagcgcgggaggccactgacgatgcgcataggcgcaggcaagatcctccgagggcttgaacaggggatcagtggcggcggccggtgtgccgcccatgcttgttggtggaaagcgcaagctgatgatacctgcgtcactggcgtacgggcctgaaccggcaggctgcttctcaggagactgcaacatccccggaaactccacacttctatatgaccttttcctcgtcgggatctacaagtgagccctcgatgacagggaatgttcagaacctaagtgtgtcacacatggagggtttcaggaggaattcttggcggtgaaagcacctgcagaggcagagccacttgcagaagcttctgtactccagagagctacctggattgaataaaatgatgatatataaaccatccttgttacataataacgccattgtggaactttgtaaagaccaatcatattgttgacttatatagcagtttgatacagccaaagcgagcaagttatcgc

SEQ ID NO: 15606 - protein, 133 aa, Zea mays subsp. mays
  misc_feature (1)..(133): Ceres Seq. ID no. 12346395
SLGIIIHTPQAAMAPPITSLSSLMASAGRRGLLALGAGFLASAALLSPAGDAGATRIEYYATVGDKMCDLSLVKSGLAYCDVEVGTGVQPLARRAHQCALHREISRRYAVRQQLQAREATDDAHRRRQDPPRA

SEQ ID NO: 15607 - protein, 121 aa, Zea mays subsp. mays
  misc_feature (1)..(121): Ceres Seq. ID no. 12346396
MAPPITSLSSLMASAGRRGLLALGAGFLASAALLSPAGDAGATRIEYYATVGDKMCDLSLVKSGLAYCDVEVGTGVQPLARRAHQCALHREISRRYAVRQQLQAREATDDAHRRRQDPPRA

SEQ ID NO: 15608 - protein, 119 aa, Zea mays subsp. mays
  misc_feature (1)..(119): Ceres Seq. ID no. 12346397
SGDNNPHSTSSHGATHHVPVVSHGVGGQEGAAGAGRRVPGLGRAAVPGGRRRRHAHRVLRDGRGQDVRPEPRQVRPRVLRRRGRHRRPAPRAASSSMCTTPRDFPTVRCSTAATSAGGH

SEQ ID NO: 15609 - DNA, 653 bp, Zea mays subsp. mays
  misc_feature (1)..(653): Ceres Seq. ID no. 12346489
acacgatcaaaaacaaaaccaagctccaagcacccatagccacacaccacaccaagtcaagcaaggagctcgatcgacagcaacaacggccatcatgaactccagcttcatcgggctcaagcccgctgcggcagcagcccaggccaccgcggctgcctcgtcgccgatgaagcagcagcaggtgcaggtcgcgccccagagccgccgcgccgcgctgctcggcctggcggccgtcttcgccgtcaccgccaccacggccggatcagccaaggctggggtcttcgacgagtacctcgagaagagcaaggctaacaaggagctgaacgacaagaagaggatggccaccagcgctgccaactttgcgcgcgcctacacagtcgagttcggcagctgccagttcccctacaacttcactgggtgccaggacctcgccaagcagaagaaagtccctttcctcagcgacgacctcgagatcgagtgcgaggggaaggagaagttcaagtgcggctccaacgtcttctggaagtggtgaagcagcgcgcgtctgatatgacggagacctgtgtatctagatgatgcatgtgcccagactgcaggaaaaatgatatcaaatttgactgctattctgtcaaccagggttcagttcttaaccg

SEQ ID NO: 15610 - protein, 176 aa, Zea mays subsp. mays
  misc_feature (1)..(176): Ceres Seq. ID no. 12346490
HDQKQNQAPSTHSHTPHQVKQGARSTATTAIMNSSFIGLKPAAAAAQATAAASSPMKQQQVQVAPQSRRAALLGLAAVFAVTATTAGSAKAGVFDEYLEKSKANKELNDKKRMATSAANFARAYTVEFGSCQFPYNFTGCQDLAKQKKVPFLSDDLEIECEGKEKFKCGSNVFWKW

SEQ ID NO: 15611 - protein, 145 aa, Zea mays subsp. mays
  misc_feature (1)..(145): Ceres Seq. ID no. 12346491
MNSSFIGLKPAAAAAQATAAASSPMKQQQVQVAPQSRRAALLGLAAVFAVTATTAGSAKAGVFDEYLEKSKANKELNDKKRMATSAANFARAYTVEFGSCQFPYNFTGCQDLAKQKKVPFLSDDLEIECEGKEKFKCGSNVFWKW

SEQ ID NO: 15612 - protein, 121 aa, Zea mays subsp. mays
  misc_feature (1)..(121): Ceres Seq. ID no. 12346492
MKQQQVQVAPQSRRAALLGLAAVFAVTATTAGSAKAGVFDEYLEKSKANKELNDKKRMATSAANFARAYTVEFGSCQFPYNFTGCQDLAKQKKVPFLSDDLEIECEGKEKFKCGSNVFWKW

SEQ ID NO: 15613 - DNA, 780 bp, Zea mays subsp. mays
  misc_feature (1)..(780): Ceres Seq. ID no. 12346515
tccactcgcacgctaaccctacacactcccgtttacgggcacacctccaaaccctcatcacgatccggctccaaggtctcgagatgaagtcgagggcgaggtccggcggtggcgactccaggctctcggtgaggaagaccaaggttgagaaggacccaaacaagcccaagaggcctccgaccacgttcttcgtcttcatggaggagttcaggaaggactacaaggagaagcaccccaatgtgaagcaagtctcagtcattggcaaggctggtggtgacatgtggaagtccttgtctgatgccgagaaggctccctacgtatctaaggccgagaagctgaaggttgagtacacaaagaagatggacgcctataacaacaagcagtctggaggaggacccacattgtctggtgattctgacaagtccaagtccgaggtcaacgacggggacgaggagggtgatgagtgatggatgacgggtgaaactctgggctgcccaagtgcttgcagtcagcagggaaatctcatcgtcgttgggcctaaccgggctttgctgctccgtagcgtctggaagctgtctgtcttttgagatgctgtagactagtagtgcctgctctgagttagtaattgaaagtgttgtccctgaagtgatgctgtttagttggtagtgtgttcgcttcttcggcacttatacttacccccaagcatcaacgctgcctgttttaaatctcaataggtgctgttttaaatctcagatctcaatatatgactactgatcgctg

SEQ ID NO: 15614 - protein, 154 aa, Zea mays subsp. mays
  misc_feature (1)..(154): Ceres Seq. ID no. 12346516
HSHANPTHSRLRAHLQTLITIRLQGLEMKSRARSGGGDSRLSVRKTKVEKDPNKPKRPPTTFFVFMEEFRKDYKEKHPNVKQVSVIGKAGGDMWKSLSDAEKAPYVSKAEKLKVEYTKKMDAYNNKQSGGGPTLSGDSDKSKSEVNDGDEEGDE

SEQ ID NO: 15615 - protein, 127 aa, Zea mays subsp. mays
  misc_feature (1)..(127): Ceres Seq. ID no. 12346517
MKSRARSGGGDSRLSVRKTKVEKDPNKPKRPPTTFFVFMEEFRKDYKEKHPNVKQVSVIGKAGGDMWKSLSDAEKAPYVSKAEKLKVEYTKKMDAYNNKQSGGGPTLSGDSDKSKSEVNDGDEEGDE

SEQ ID NO: 15616 - protein, 89 aa, Zea mays subsp. mays
  misc_feature (1)..(89): Ceres Seq. ID no. 12346518
MEEFRKDYKEKHPNVKQVSVIGKAGGDMWKSLSDAEKAPYVSKAEKLKVEYTKKMDAYNNKQSGGGPTLSGDSDKSKSEVNDGDEEGDE

SEQ ID NO: 15617 - DNA, 699 bp, Zea mays subsp. mays
  misc_feature (1)..(699): Ceres Seq. ID no. 12346538
accaatgggcaacagccttaggtgctgcctggcctgcgtcctcccctgcggcgcgctggacctgatcaggatcgtccacctcaacggccgcatcgaggagtacggccggccggtggccgccggcgagatcctggccgccaacccgaaccacgtcctcagcaagccgtgctcccagggcgtcgccgtgcggaggatcctcatcgtgtcgccggactccgagctagagcgcggcgagatatacttcctcatcccggcctcgtcggtgccgccggagaagaagccgcagccgcagcgacagcagaagagcgtcgtcctggccggctcgcacggcaaccaggcggtggtcaacaagaaggcatcgtcgtcgcaccggagacgacgcaccgccggctgcagaaccaccgtatggaagccacacctcgagtgcattgttgagggggacacttaggcagaggtggacgatgatccattcttttgctctcttttttttttttttggtttttgtggatcaagcgggggggctaatggctaatgcaatgtaacaccactagcagcatggtgttttgcccacttaatttgtgtggttagtcagcatttttaatcttttttcttgggtaaatgtatatccatgtaatgttttcccccttcctacatatgatgggaatgcagaggaagggttgttgccagttctttcttctt

SEQ ID NO: 15618 - protein, 148 aa, Zea mays subsp. mays
  misc_feature (1)..(148): Ceres Seq. ID no. 12346539
PMGNSLRCCLACVLPCGALDLIRIVHLNGRIEEYGRPVAAGEILAANPNHVLSKPCSQGVAVRRILIVSPDSELERGEIYFLIPASSVPPEKKPQPQRQQKSVVLAGSHGNQAVVNKKASSSHRRRRTAGCRTTVWKPHLECIVEGDT

SEQ ID NO: 15619 - protein, 147 aa, Zea mays subsp. mays
  misc_feature (1)..(147): Ceres Seq. ID no. 12346540
MGNSLRCCLACVLPCGALDLIRIVHLNGRIEEYGRPVAAGEILAANPNHVLSKPCSQGVAVRRILIVSPDSELERGEIYFLIPASSVPPEKKPQPQRQQKSVVLAGSHGNQAVVNKKASSSHRRRRTAGCRTTVWKPHLECIVEGDT

SEQ ID NO: 15620 - DNA, 711 bp, Zea mays subsp. mays
  misc_feature (1)..(711): Ceres Seq. ID no. 12346855
gaagcgacggacgagacgaggcacggaacggagcgagccagactacccacctaggcccagcggcatgaggggcagcgagatgttgaccgccgcggggggcgccggcacggccccgtccacggtctcctcgggggcggccgcggccgcggacctggttgctggagccgggggcacgggcgctatcggcgcgggcggaggacgcggcaacttccccctcgccgtcgccctcctcgccttcgccttcgcaaacttcgttaacctcgtctccatctggttaaaagagaagaggtgggatgcaaggaaatttcttacttcagctggagtcatgtcatctctttctgcaactgtggggagcttggccgttgctgtgggtcaacaagaaggcgcagatagctctgcatttgcccttgcattgatttttgctgccgttgtaatgtatgatgcatcaggaattagatggcacacaggtcgccaagctgcgttgttgaatcaaatagtctgtgatttcccaccagaacatccaatcatttcaacctttcggccactacgggaacctcttggacacagcccacttcaggtttttgcaggagcacttgttggttgtgcagctgcttatttcatgggaaaatctgtataaggaataggaatgtatagggtttggcttgtacacgaattccattgacttatttttgtaaaaaaatatcattgatc

SEQ ID NO: 15621 - protein, 211 aa, Zea mays subsp. mays
  misc_feature (1)..(211): Ceres Seq. ID no. 12346856
KRRTRRGTERSEPDYPPRPSGMRGSEMLTAAGGAGTAPSTVSSGAAAAADLVAGAGGTGAIGAGGGRGNFPLAVALLAFAFANFVNLVSIWLKEKRWDARKFLTSAGVMSSLSATVGSLAVAVGQQEGADSSAFALALIFAAVVMYDASGIRWHTGRQAALLNQIVCDFPPEHPIISTFRPLREPLGHSPLQVFAGALVGCAAAYFMGKSV

SEQ ID NO: 15622 - protein, 190 aa, Zea mays subsp. mays
  misc_feature (1)..(190): Ceres Seq. ID no. 12346857
MRGSEMLTAAGGAGTAPSTVSSGAAAAADLVAGAGGTGAIGAGGGRGNFPLAVALLAFAFANFVNLVSIWLKEKRWDARKFLTSAGVMSSLSATVGSLAVAVGQQEGADSSAFALALIFAAVVMYDASGIRWHTGRQAALLNQIVCDFPPEHPIISTFRPLREPLGHSPLQVFAGALVGCAAAYFMGKSV

SEQ ID NO: 15623 - protein, 185 aa, Zea mays subsp. mays
  misc_feature (1)..(185): Ceres Seq. ID no. 12346858
MLTAAGGAGTAPSTVSSGAAAAADLVAGAGGTGAIGAGGGRGNFPLAVALLAFAFANFVNLVSIWLKEKRWDARKFLTSAGVMSSLSATVGSLAVAVGQQEGADSSAFALALIFAAVVMYDASGIRWHTGRQAALLNQIVCDFPPEHPIISTFRPLREPLGHSPLQVFAGALVGCAAAYFMGKSV

SEQ ID NO: 15624 - DNA, 766 bp, Zea mays subsp. mays
  misc_feature (1)..(766): Ceres Seq. ID no. 12346859
acccaacaccccagtatcctgatgcggcttagcgcaccgaggtagaccgagcgagacagccagccagcggggcaagctgaaaaacctatcttctatcaccacctcggagcccgagtggaaggggaaggcaggaatcgccccgcacgcgcccccatccgcctgccggcgacggcccacatgccgaccgcctacagcctccgcgcgccgccctccaccgcgcagcagcgcctcaggctgcccccgccaccgctgccgctttgcccggcgggtggaggggccgcccgccggaggagggttgtcggggtagcgtccgcgtccgcgtcgcccttcgacgagctgtacgcgcgggggaggcccgcacatggaccctccaagaaatccatgctctggaacttgatccaggacatagagcctctggaccttagtgtcattcagaaagatgttgctcctgaaacggtagatgcaatgaagaggactatttcgggcatgttgggtctgcttccatctgatcagttccgtgtcattgtagaagctctttggaatcccttcttcaagttattggtatcttcaattatgactgggtatactctgcgaaatgctgaatacaggctttcttttgaaagaaatcttggactgtctgaagaagttgcagaatgcccaaaaagtgatgtcattgaagataatcatcatgacatcaatttgggtacacctgtcactatttttagattagcagaagaagacatgccccaggaccctgcggcacgag

SEQ ID NO: 15625 - protein, 196 aa, Zea mays subsp. mays
  misc_feature (1)..(196): Ceres Seq. ID no. 12346860
MPTAYSLRAPPSTAQQRLRLPPPPLPLCPAGGGAARRRRVVGVASASASPFDELYARGRPAHGPSKKSMLWNLIQDIEPLDLSVIQKDVAPETVDAMKRTISGMLGLLPSDQFRVIVEALWNPFFKLLVSSIMTGYTLRNAEYRLSFERNLGLSEEVAECPKSDVIEDNHHDINLGTPVTIFRLAEEDMPQDPAAR

SEQ ID NO: 15626 - protein, 128 aa, Zea mays subsp. mays
  misc_feature (1)..(128): Ceres Seq. ID no. 12346861
MLWNLIQDIEPLDLSVIQKDVAPETVDAMKRTISGMLGLLPSDQFRVIVEALWNPFFKLLVSSIMTGYTLRNAEYRLSFERNLGLSEEVAECPKSDVIEDNHHDINLGTPVTIFRLAEEDMPQDPAAR

SEQ ID NO: 15627 - protein, 100 aa, Zea mays subsp. mays
  misc_feature (1)..(100): Ceres Seq. ID no. 12346862
MKRTISGMLGLLPSDQFRVIVEALWNPFFKLLVSSIMTGYTLRNAEYRLSFERNLGLSEEVAECPKSDVIEDNHHDINLGTPVTIFRLAEEDMPQDPAAR

SEQ ID NO: 15628 - DNA, 1712 bp, Zea mays subsp. mays
  misc_feature (1)..(1712): Ceres Seq. ID no. 12346894
acaaatcgggtttgccgtgcggcacttgcgtttcgggtcgggtacggacccgcaaaaagagctccgtcagttcctctacctcctctgtaggagcacacttgtttcggaaaggaacgcagattcacgccacgccgccgcctcaattatatggcgccggcgttctcggcacaggtccccgcgctccgacgggcagcactgcgcgtgcggtgggtcacggctgcgctgttctcatcggggattctcgccggcaacaagccgattctggtgcgtgacttcgtgaggtcagcgttgtacgaccccaaccatggctacttctccaagcgggcggggccggtgggcgttcttgacgccagcatccgcttcaaccagctcgaggggaggagtgcatatatacagcaccttgataagctgtataagaagcatgatatcgcttggtttactcccgtggagctctttaagccatggtatgcctacgcaatagcagcatcgattctgcgtacagcaaatctttcagtcccattgaagatatacgagattggtggtggctctggaacatgcgcaaagtgcatacttgattacatgatgctgaatgcgccaccaaaagtctacaatgatatgaaatacatctcagtagagattagctcctctcttgctgagaagcaattggaaactgttggtgaagtgcaaagccatttgtcaaagttcacggtggagcaccgggatgcaattaacagacctggatggggccgcacggatcctcacccatgttgggtgcttatgcttgaggtacttgacaatctaccacatgaccttgtctattcaccagatcaggtctctccatggatggaagtgtggattgaaaaagtaaaaggcagtttacaagcctccgaagtctataagccattacaagacccattgatttctcgctgtgttgatattattggcatgaatgaagacaaagcttctgtcagtgaaaaactagcatttgctgcaaaaggagttctatcaaaagtattcccaaagcctcgtagagcttggttgcccaccggctgcttgaaactaatggatactctacatcaagctttaccgagcatgtcccttattgcttcagacttcagctatcttccagacgttagcatacctggtgacagggctccattggtttcatcaaagaacgatggaaagacatcagatcatcgcaactactttgatgctcagggtgacgcggacatcttcttcccaaccgatttccggctcctggagcagatcgaccataactgcgctggcttctcaaaggagcagaagaatcccggcgcattcaaacccgtgaagaagaggagaacgatcatacttgatactgcagccttcatggaggagtttggcatgccgctgaagacgaggaccaaagacgggtataatccgcttctcgacgatttcaagaacacaaagttctatctcagcgtccctacacacaacgttcctacccatagcaggaggaactagtcttctttccttttgctgatgcgtcacgagtcaggaaaagacgtctgccaggctagaatcggtctgtcattttgagcagtctgaatttgcaagttttcttaccttaaggtgttgaaaattttatagtttctcttttttgtagaacaaagtttttattatcatttttgacattgatgcatgggtaataaaaggtggaagaagactgactg

SEQ ID NO: 15629 - protein, 451 aa, Zea mays subsp. mays
  misc_feature (1)..(451): Ceres Seq. ID no. 12346895
MAPAFSAQVPALRRAALRVRWVTAALFSSGILAGNKPILVRDFVRSALYDPNHGYFSKRAGPVGVLDASIRFNQLEGRSAYIQHLDKLYKKHDIAWFTPVELFKPWYAYAIAASILRTANLSVPLKIYEIGGGSGTCAKCILDYMMLNAPPKVYNDMKYISVEISSSLAEKQLETVGEVQSHLSKFTVEHRDAINRPGWGRTDPHPCWVLMLEVLDNLPHDLVYSPDQVSPWMEVWIEKVKGSLQASEVYKPLQDPLISRCVDIIGMNEDKASVSEKLAFAAKGVLSKVFPKPRRAWLPTGCLKLMDTLHQALPSMSLIASDFSYLPDVSIPGDRAPLVSSKNDGKTSDHRNYFDAQGDADIFFPTDFRLLEQIDHNCAGFSKEQKNPGAFKPVKKRRTIILDTAAFMEEFGMPLKTRTKDGYNPLLDDFKNTKFYLSVPTHNVPTHSRRN

SEQ ID NO: 15630 - protein, 307 aa, Zea mays subsp. mays
  misc_feature (1)..(307): Ceres Seq. ID no. 12346896
MMLNAPPKVYNDMKYISVEISSSLAEKQLETVGEVQSHLSKFTVEHRDAINRPGWGRTDPHPCWVLMLEVLDNLPHDLVYSPDQVSPWMEVWIEKVKGSLQASEVYKPLQDPLISRCVDIIGMNEDKASVSEKLAFAAKGVLSKVFPKPRRAWLPTGCLKLMDTLHQALPSMSLIASDFSYLPDVSIPGDRAPLVSSKNDGKTSDHRNYFDAQGDADIFFPTDFRLLEQIDHNCAGFSKEQKNPGAFKPVKKRRTIILDTAAFMEEFGMPLKTRTKDGYNPLLDDFKNTKFYLSVPTHNVPTHSRRN

SEQ ID NO: 15631 - protein, 306 aa, Zea mays subsp. mays
  misc_feature (1)..(306): Ceres Seq. ID no. 12346897
MLNAPPKVYNDMKYISVEISSSLAEKQLETVGEVQSHLSKFTVEHRDAINRPGWGRTDPHPCWVLMLEVLDNLPHDLVYSPDQVSPWMEVWIEKVKGSLQASEVYKPLQDPLISRCVDIIGMNEDKASVSEKLAFAAKGVLSKVFPKPRRAWLPTGCLKLMDTLHQALPSMSLIASDFSYLPDVSIPGDRAPLVSSKNDGKTSDHRNYFDAQGDADIFFPTDFRLLEQIDHNCAGFSKEQKNPGAFKPVKKRRTIILDTAAFMEEFGMPLKTRTKDGYNPLLDDFKNTKFYLSVPTHNVPTHSRRN

SEQ ID NO: 15632 - DNA, 702 bp, Zea mays subsp. mays
  misc_feature (1)..(702): Ceres Seq. ID no. 12346922
taaagatgacctgtctcaaattggatttgatgtcgaatcaattcagaaaatggttgctggattggagggaaagatcgagttacttgagaacaaacaggacgtggctaatactggtatctggtatctctgccaagtagcaggcggtttaaaagatggaataaacaccaggtttttccaggaaaccagtgagaagctgaagctctcacattcagctcaacctgaaaacaagccagtgaaggggcttgaatttttttcggaaagcaccatggaacagaaagtagctgactccaaaccaattgcggtgacagtcgacgctgagaagcctgagaaaaccgctgctgtaatgggcaccacagtgcacaggtctatcaggttctcatatcggaatgcaggccttgctttgtgatcaaatcctctccgcttgagatgcacgtggccttcctggttgctttttcttttttggcaacaaccttcctggttgctttgtgtgatggtcagaaaacatagaagaataacctgcaactggagtgacagaatttcttttccccgcagtagacaggtgtgcgttatttggttggaattatctccagtccactatcaattttttttccttggattttgattcattttatgtttcgatttgttgccttatatactgtaaagtcattggaaagaataaataaaacacgaatgttttttgtt

SEQ ID NO: 15633 - protein, 134 aa, Zea mays subsp. mays
  misc_feature (1)..(134): Ceres Seq. ID no. 12346923
KDDLSQIGFDVESIQKMVAGLEGKIELLENKQDVANTGIWYLCQVAGGLKDGINTRFFQETSEKLKLSHSAQPENKPVKGLEFFSESTMEQKVADSKPIAVTVDAEKPEKTAAVMGTTVHRSIRFSYRNAGLAL

SEQ ID NO: 15634 - protein, 118 aa, Zea mays subsp. mays
  misc_feature (1)..(118): Ceres Seq. ID no. 12346924
MVAGLEGKIELLENKQDVANTGIWYLCQVAGGLKDGINTRFFQETSEKLKLSHSAQPENKPVKGLEFFSESTMEQKVADSKPIAVTVDAEKPEKTAAVMGTTVHRSIRFSYRNAGLAL

SEQ ID NO: 15635 - DNA, 939 bp, Zea mays subsp. mays
  misc_feature (1)..(939): Ceres Seq. ID no. 12346943
aaaaacaagaagccgtacctgtacggtcttctctatagagggagcaattggagagagagagaaagaacagcgaaaaatggtcgatgccggcgacataacggccggagggccgccgcgcgctcacgaggaggagcaagcgggaactccggcatacggttcggtggtcctcggcggcacttttgaccgcctccacgacggccaccgccgccttctcaaggcctccgcggatttggggagagaccggatcgtggtgggcgtctgcacgggacctatgctcgccaagaaggagtatgcggagcttattgagcccgttgacaagcgcatcaagggtgtggaggattacatcaagtctataaagccagaactgatagtacaagtggagcctattgaggacccttatggcccatccataactgatgagaagttggatgccattattgtcagtaaggagacattaaatggtggactggctgtaaataggaaaagagaagagaaagggttcccactgttgaaggttgaggttgttgatctcctttccggcggtgtggagggggaaaaattgagttcttctgctttaaggaaacttgaggcagaacaagctcaacaaagtgaaacaaaatctggtagccttgaagcttcttagggaggaaattgaatactttgatctggttagctgaatgcacaaatacgggggtgatctgctccaagctcagtgtgaacaaaaaatatgatcagagctgacagtttggttacctttctagaggaataatcttcgaacactggcccatggccctgtaacagtattgctctaaccttctaaaatcaacctggcaacatagactctcccctactaaccaaatttacaaattttgtattggcaatgccatctgaatgttaaaaggaaatcttcttgggtttgtataaatatctacaattgtg

SEQ ID NO: 15636 - protein, 213 aa, Zea mays subsp. mays
  misc_feature (1)..(213): Ceres Seq. ID no. 12346944
KTRSRTCTVFSIEGAIGEREKEQRKMVDAGDITAGGPPRAHEEEQAGTPAYGSVVLGGTFDRLHDGHRRLLKASADLGRDRIVVGVCTGPMLAKKEYAELIEPVDKRIKGVEDYIKSIKPELIVQVEPIEDPYGPSITDEKLDAIIVSKETLNGGLAVNRKREEKGFPLLKVEVVDLLSGGVEGEKLSSSALRKLEAEQAQQSETKSGSLEAS

SEQ ID NO: 15637 - protein, 188 aa, Zea mays subsp. mays; identical to SEQ ID NO: 14977
  misc_feature (1)..(188): Ceres Seq. ID no. 12346945

SEQ ID NO: 15638 - protein, 123 aa, Zea mays subsp. mays; identical to SEQ ID NO: 14978
  misc_feature (1)..(123): Ceres Seq. ID no. 12346946

SEQ ID NO: 15639 - DNA, 952 bp, Zea mays subsp. mays
  misc_feature (1)..(952): Ceres Seq. ID no. 12346969
ttgcttttgaatcctatatttgccaaagaatgttcagtgggttccaagaggagagcttttctatcaaggattctaacatcagtgtttccaatgaggctttcttccaccaattccttgcagtgcgagccatggatcctctggatgtcctgagccagaaccctgattcagtattcggaaagttctgtagaagtaagtaccttttgcttgtgcatcaaaaaatggaaggttctttcttcggcaacatggatcagaggaactacgtcatgagcggtggccatccaaggacacctttctaccaggcattcctaaagctagcaaagtccatatggttgctgcacaggttggcgtactccttcgacccaaaggcaaaggtgtttcaagtgaaaaaggggagtgaattttcggatatccacatggagagcgtcgtgaagaacatcatcctagaagaaggtgcggagaggccaaaagtcggcctgatggtgatgcctggtttcctgatcgggaccagcgtcatacagtcccgtgtgtacctttcagatgccaagtgtgctgactgactgaagattgcacaaggagcttgagggggtgcctttgctccttgggagagctaccagcagcataagtttatggtggactgttgtcttgtatgtaatgcgtgagacctgttgcttcaatgccgtgctacgtgattctgtccagtgggcttgtggtttccccatgttgcatttccatgtgttatacggctatgtaattctgcccagtgttttgcacacattatcagggtgattgattgatcgtgtaggctgcacttttcatctgaaatgtgtttgcccaatcaatcagatgattctgttggtgttccatgtcaagtgttgtagcttagtttctttgaacaaggtgtgtggaggattttgatggacaatgataaaactgatgacaatttagttgcttc

SEQ ID NO: 15640 - protein, 184 aa, Zea mays subsp. mays
  misc_feature (1)..(184): Ceres Seq. ID no. 12346970
AFESYICQRMFSGFQEESFSIKDSNISVSNEAFFHQFLAVRAMDPLDVLSQNPDSVFGKFCRSKYLLLVHQKMEGSFFGNMDQRNYVMSGGHPRTPFYQAFLKLAKSIWLLHRLAYSFDPKAKVFQVKKGSEFSDIHMESVVKNIILEEGAERPKVGLMVMPGFLIGTSVIQSRVYLSDAKCAD

SEQ ID NO: 15641 - protein, 175 aa, Zea mays subsp. mays
  misc_feature (1)..(175): Ceres Seq. ID no. 12346971
MFSGFQEESFSIKDSNISVSNEAFFHQFLAVRAMDPLDVLSQNPDSVFGKFCRSKYLLLVHQKMEGSFFGNMDQRNYVMSGGHPRTPFYQAFLKLAKSIWLLHRLAYSFDPKAKVFQVKKGSEFSDIHMESVVKNIILEEGAERPKVGLMVMPGFLIGTSVIQSRVYLSDAKCAD

SEQ ID NO: 15642 - protein, 142 aa, Zea mays subsp. mays
  misc_feature (1)..(142): Ceres Seq. ID no. 12346972
MDPLDVLSQNPDSVFGKFCRSKYLLLVHQKMEGSFFGNMDQRNYVMSGGHPRTPFYQAFLKLAKSIWLLHRLAYSFDPKAKVFQVKKGSEFSDIHMESVVKNIILEEGAERPKVGLMVMPGFLIGTSVIQSRVYLSDAKCAD

SEQ ID NO: 15643 - DNA, 849 bp, Zea mays subsp. mays
  misc_feature (1)..(849): Ceres Seq. ID no. 12346977
aagcccactttccccagtactctactcacccacccactcacggactcatctactgagcagcgcggtgggcatccgagcgagagggcgagcgcggaaggatcggaattccgaaggttgggcatggaggcgagcggcgagaaggctgcggtggtgcgacggctgatggaggcgaaggaggtgtccgggaagaccttctcgggaatcgccgccgagacgggtctcaccaacgtctacgtggcgcagctgctgcggcgccaggcgcagctcaaggccgacacggtgcccgcgctgagggcggccctgcccacgctcacggacgacctcatcgaactcatgatgcagccgcccttccggtcctaccaccccaacatcgtccacgagcccgccatttacagattgaatgaaggctgttatgcattttggagagagcatcaaggaaatcatcaatgaggagtttggtgatggaatcatgtcagccatagacttctattgttcagttgacaaggttgaaggggccgacggaaaagatcgtgtggtggtcacatttgatgggaagtatctaccttacactgaacagaaatctgaacatatgatgtctaggccaacccgcaagacatcttgatgtggctggtgaggaggagaaacatgatcgtagtggttggtatcgggctcagcaaggatcgagcatgccattttctttgtgtagtccaaatcatcaacacaataaacagacctatattgatgataactgtcaaaaggaacattaaagtcaatgttctacctggcatgattgctggactgtattggatgatgctgagataaaaagagagaaaaagtgaaacaaactgg

SEQ ID NO: 15644 - protein, 149 aa, Zea mays subsp. mays
  misc_feature (1)..(149): Ceres Seq. ID no. 12346978
KPTFPSTLLTHPLTDSSTEQRGGHPSERASAEGSEFRRLGMEASGEKAAVVRRLMEAKEVSGKTFSGIAAETGLTNVYVAQLLRRQAQLKADTVPALRAALPTLTDDLIELMMQPPFRSYHPNIVHEPAIYRLNEGCYAFWREHQGNHQ

SEQ ID NO: 15645 - protein, 109 aa, Zea mays subsp. mays
  misc_feature (1)..(109): Ceres Seq. ID no. 12346979
MEASGEKAAVVRRLMEAKEVSGKTFSGIAAETGLTNVYVAQLLRRQAQLKADTVPALRAALPTLTDDLIELMMQPPFRSYHPNIVHEPAIYRLNEGCYAFWREHQGNHQ

SEQ ID NO: 15646 - protein, 95 aa, Zea mays subsp. mays
  misc_feature (1)..(95): Ceres Seq. ID no. 12346980
MEAKEVSGKTFSGIAAETGLTNVYVAQLLRRQAQLKADTVPALRAALPTLTDDLIELMMQPPFRSYHPNIVHEPAIYRLNEGCYAFWREHQGNHQ

SEQ ID NO: 15647 - DNA, 841 bp, Zea mays subsp. mays
  misc_feature (1)..(841): Ceres Seq. ID no. 12347087
atctctctactcactcttcctgtctcctcgtcttgctggagccagtattaacagatccgggttcgagcgtccagtctcgccggacctccgactggcggtcgctgctatctctctggtaccgcggtctcttgcgcgcttctctccattcgctcccactcaccggcttgggggaatgaaggatgtggtagggagcccggggacctggagtggcatggcgctgcggttgtcgcaatgcgtgtccgctggcgcatccatgggcgctatggccacagcgtacggcttctccaactacactgctttctgctacttgattgcttcaatgggcctacaacttctttggagttttggccttgcttgtcttgatgtctactctttgaagactaaaagagatcttcacaaccctgtgcttgtaagcctttttgttgttggggactgggtcactgcaattctgtcgtttgctgccgcgtcggcgtccgcgggcgtgaccatcctgttcgagagggacgtccacttctgcaggatgtacccgcagttgtcgtgcggccggtacgcgctctcggtggtgctggcgttcatcacctggtccttcatcgcaacttctgctgtctccatgttctggttgctgccgtcgctctgatgtggcacggaaggagcctgccgtgtcgtcctgtttagatccgtttgcttcagcagctggttgatgccctgggtcgctctgggttgtgtgcttaagtaactatcaggatcctgatcttaaccggatgtactctgctggagacgagaaattatctagtgtatttgttaaaacaatgaggtggtttatcttcttatttcttttttt

SEQ ID NO: 15648 - protein, 211 aa, Zea mays subsp. mays
  misc_feature (1)..(211): Ceres Seq. ID no. 12347088
SLYSLFLSPRLAGASINRSGFERPVSPDLRLAVAAISLVPRSLARFSPFAPTHRLGGMKDVVGSPGTWSGMALRLSQCVSAGASMGAMATAYGFSNYTAFCYLIASMGLQLLWSFGLACLDVYSLKTKRDLHNPVLVSLFVVGDWVTAILSFAAASASAGVTILFERDVHFCRMYPQLSCGRYALSVVLAFITWSFIATSAVSMFWLLPSL

SEQ ID NO: 15649 - protein, 154 aa, Zea mays subsp. mays
  misc_feature (1)..(154): Ceres Seq. ID no. 12347089
MKDVVGSPGTWSGMALRLSQCVSAGASMGAMATAYGFSNYTAFCYLIASMGLQLLWSFGLACLDVYSLKTKRDLHNPVLVSLFVVGDWVTAILSFAAASASAGVTILFERDVHFCRMYPQLSCGRYALSVVLAFITWSFIATSAVSMFWLLPSL

SEQ ID NO: 15650 - protein, 141 aa, Zea mays subsp. mays
  misc_feature (1)..(141): Ceres Seq. ID no. 12347090
MALRLSQCVSAGASMGAMATAYGFSNYTAFCYLIASMGLQLLWSFGLACLDVYSLKTKRDLHNPVLVSLFVVGDWVTAILSFAAASASAGVTILFERDVHFCRMYPQLSCGRYALSVVLAFITWSFIATSAVSMFWLLPSL

SEQ ID NO: 15651 - DNA, 1770 bp, Zea mays subsp. mays
  misc_feature (1)..(1770): Ceres Seq. ID no. 12347178
acgaacacatagatccgcatcgtcgatccatccgtcctcctcccgacggtacgccagcctgccagagtccgacgcacgcctagggctcctggacacagcagagcccacgccttgactcgctccgttcgagtggagcgcacaggcaccggccggcgaccagagagggagcggatcgagggggctcggcttgagtggaggagatggaccgcaaggatgtcgggatcctcgccatggacatctacttcccgccctcctgcgtgcagcaggaagcacttgaggcccatgatggggcgagcaaagggaagtacaccattgggcttgggcaagattgcatggccttttgcagcgaggtggaggatgtcatctcaatgagtttgacggttgtcaattctctgctgaaaaaatacaagattgatcccaagctaattggtcgcttggaggtgggaagtgaaacagttatagacaaaagcaaatccatcaaaacttggctgatgcagatttttgaggaaagtgataatactgacattgaaggtgttgactccagcaatgcatgttatggtgggacagcagccctactgaattgtgtgaattgggtcgaaagtaactcctgggatggccgttatggtcttgtcgtttgcacggacagcgcggtttatgcggaaggaccagctcgtccaacaggaggtgctgctgctatagcaatgctcattggtcctaatgctccgatttccttcgagagcaaatatagagcttctcatatggctcatgtttatgatttctacaaacctgatcttgcaagtgaatatccggttgttgatggtaaattatcccaaacatgctacctgatggctcttgactcatgctacagacagttctgcaacaagtatgagaagattgcgggtaaacaattctcaatttcagatgcagaatattttgtgttccattctccatacaacaagctcgtgcagaagagttttgctcgactttactacaatgacttcatgcgcaactgcagctatgttgatgatgatgctaaagagaagctccagtccttttcaaatttgactggtgaagagagctaccagagtcgcgacttggaaaaggcctcacaacaggtcgcaaagcacctgtatggcatcaaagttcagccaacgactctgcttccgaaacagatcggcaacatgtatacggcatccctttatgctgcattggcatctgtgctatataacaagcatgatagtctgaatggacaaagaattgtgatgttctcttacggcagcggcttgacatccactatgttttcgttgaggctaaacaatggccagcatcccttcagtctatcaaacataggttcagttcttggtgtcaccgagaagcttcagtcaagacatgagaccttgcctgagaaattcgttgagacgctgaagctgatggaacaccgatacggcgcaaaagacttcgagacgagcagcgacacgagtctcctgcagccgggcacattctacctcaccaaggtggactccatgtaccggaggttctattcccagaagccggccgaggaaacaggcggcggtaaaaccaagtgctgcaacggcttcgcaaatggccactagtgggagtccgcgtgccgtttgaattgctacgtcgcccttctgtactgttgatcatcattctctgtgttttgatcatgcttgtggttagcgttttcaccctagggtgtttctgaaataatatattactagatatatccccatctgttacatcggggtc

SEQ ID NO: 15652 - protein, 470 aa, Zea mays subsp. mays
  misc_feature (1)..(470): Ceres Seq. ID no. 12347179
MDRKDVGILAMDIYFPPSCVQQEALEAHDGASKGKYTIGLGQDCMAFCSEVEDVISMSLTVVNSLLKKYKIDPKLIGRLEVGSETVIDKSKSIKTWLMQIFEESDNTDIEGVDSSNACYGGTAALLNCVNWVESNSWDGRYGLVVCTDSAVYAEGPARPTGGAAAIAMLIGPNAPISFESKYRASHMAHVYDFYKPDLASEYPVVDGKLSQTCYLMALDSCYRQFCNKYEKIAGKQFSISDAEYFVFHSPYNKLVQKSFARLYYNDFMRNCSYVDDDAKEKLQSFSNLTGEESYQSRDLEKASQQVAKHLYGIKVQPTTLLPKQIGNMYTASLYAALASVLYNKHDSLNGQRIVMFSYGSGLTSTMFSLRLNNGQHPFSLSNIGSVLGVTEKLQSRHETLPEKFVETLKLMEHRYGAKDFETSSDTSLLQPGTFYLTKVDSMYRRFYSQKPAEETGGGKTKCCNGFANGH

SEQ ID NO: 15653 - protein, 460 aa, Zea mays subsp. mays
  misc_feature (1)..(460): Ceres Seq. ID no. 12347180
MDIYFPPSCVQQEALEAHDGASKGKYTIGLGQDCMAFCSEVEDVISMSLTVVNSLLKKYKIDPKLIGRLEVGSETVIDKSKSIKTWLMQIFEESDNTDIEGVDSSNACYGGTAALLNCVNWVESNSWDGRYGLVVCTDSAVYAEGPARPTGGAAAIAMLIGPNAPISFESKYRASHMAHVYDFYKPDLASEYPVVDGKLSQTCYLMALDSCYRQFCNKYEKIAGKQFSISDAEYFVFHSPYNKLVQKSFARLYYNDFMRNCSYVDDDAKEKLQSFSNLTGEESYQSRDLEKASQQVAKHLYGIKVQPTTLLPKQIGNMYTASLYAALASVLYNKHDSLNGQRIVMFSYGSGLTSTMFSLRLNNGQHPFSLSNIGSVLGVTEKLQSRHETLPEKFVETLKLMEHRYGAKDFETSSDTSLLQPGTFYLTKVDSMYRRFYSQKPAEETGGGKTKCCNGFANGH

SEQ ID NO: 15654 - protein, 426 aa, Zea mays subsp. mays
  misc_feature (1)..(426): Ceres Seq. ID no. 12347181
MAFCSEVEDVISMSLTVVNSLLKKYKIDPKLIGRLEVGSETVIDKSKSIKTWLMQIFEESDNTDIEGVDSSNACYGGTAALLNCVNWVESNSWDGRYGLVVCTDSAVYAEGPARPTGGAAAIAMLIGPNAPISFESKYRASHMAHVYDFYKPDLASEYPVVDGKLSQTCYLMALDSCYRQFCNKYEKIAGKQFSISDAEYFVFHSPYNKLVQKSFARLYYNDFMRNCSYVDDDAKEKLQSFSNLTGEESYQSRDLEKASQQVAKHLYGIKVQPTTLLPKQIGNMYTASLYAALASVLYNKHDSLNGQRIVMFSYGSGLTSTMFSLRLNNGQHPFSLSNIGSVLGVTEKLQSRHETLPEKFVETLKLMEHRYGAKDFETSSDTSLLQPGTFYLTKVDSMYRRFYSQKPAEETGGGKTKCCNGFANGH

SEQ ID NO: 15655 - DNA, 1437 bp, Zea mays subsp. mays
  misc_feature (1)..(1437): Ceres Seq. ID no. 12347187
aatctgccatcttcgtctatccctttcgtctcagttttgcagtttctactgctgtctttgctctgaaatccaaccgaaatctcagaggaaagtaggaaacctcgttcgggaacctgctttagtgagactccaatccttgggcgccattgccgcctgttttttgtgctaggaaaggcgctgtctgattcctgtatatttattttggcattgctttcagctgcaacaaaactaaccatggatggcactagctttgatctgacagagcacgaaggttcaaatctgtctccgtttctactcaaactttttaatgagtgggatgatcgcaagacaaggggcttgtttcaccatgacatcagttcctgtgaaacaaaggtgctacctggagtacataattttgtggcaacattaattgaaggacgtgaccaaaagaagcggccaactgagttcacaatgaaccaagttctccagccatttgttagtgagaagttcaatttcacaaaagtcagcccgttggaggtgatctttagattcaatgacactgagaaagaccctgcacaatattttgatggtgttcctgatactgtttcagcttcttctagtgccatcttgattaatgtgagcccaattggctactgccatgtgctattgactcccaagatccaggactgtttgccgcaaaggattgatcaagagagcttcttaatagccatgtatgttgcaagagaagcaaggactcccttcttcagagttggttataacagcctgggcggctttgcaactatcaaccaccttcacttccaggcatactacctgaaagtacagtatccagttgaaaaggcaatcacggagaagctcaagaccctagggaatagcgtgagcatttttcacctggtggattacccagtcaatggctttgtgttcgaaggtggtgcgagcctggaagatttgtcagatgtggtctccaaagtctgcatcttcctgcaagagaacaacagacctttcaatgtcctcatctctgaatctggcaagagaattttccttctaccacagtgctatgcggagaagcagcttctcggaaaggcgagccaagagttcctcgacatgagaatcaatccagcaatctgggagctcagtggtcatctggtactgaagcggaggaaggactacgaggaggcctctgaagcaaacatacgcaggtttttggttgaagcagctctttctgaaacagaatttcaggagctgaaccgatgcgtgctcgacttcctgaccagctctcttggttgaaactcggatgtaggttcctatagacagtaacagttctgaggttccagttaaaacagttgtgctggtactgttaccttatgatggtatatcatgtagtagtatttctgatttgactcgtcagctctgcgatgaaataatgtcttctccggcttc

SEQ ID NO: 15656 - protein, 349 aa, Zea mays subsp. mays
  misc_feature (1)..(349): Ceres Seq. ID no. 12347188
MDGTSFDLTEHEGSNLSPFLLKLFNEWDDRKTRGLFHHDISSCETKVLPGVHNFVATLIEGRDQKKRPTEFTMNQVLQPFVSEKFNFTKVSPLEVIFRFNDTEKDPAQYFDGVPDTVSASSSAILINVSPIGYCHVLLTPKIQDCLPQRIDQESFLIAMYVAREARTPFFRVGYNSLGGFATINHLHFQAYYLKVQYPVEKAITEKLKTLGNSVSIFHLVDYPVNGFVFEGGASLEDLSDVVSKVCIFLQENNRPFNVLISESGKRIFLLPQCYAEKQLLGKASQEFLDMRINPAIWELSGHLVLKRRKDYEEASEANIRRFLVEAALSETEFQELNRCVLDFLTSSLG

SEQ ID NO: 15657 - protein, 277 aa, Zea mays subsp. mays
  misc_feature (1)..(277): Ceres Seq. ID no. 12347189
MNQVLQPFVSEKFNFTKVSPLEVIFRFNDTEKDPAQYFDGVPDTVSASSSAILINVSPIGYCHVLLTPKIQDCLPQRIDQESFLIAMYVAREARTPFFRVGYNSLGGFATINHLHFQAYYLKVQYPVEKAITEKLKTLGNSVSIFHLVDYPVNGFVFEGGASLEDLSDVVSKVCIFLQENNRPFNVLISESGKRIFLLPQCYAEKQLLGKASQEFLDMRINPAIWELSGHLVLKRRKDYEEASEANIRRFLVEAALSETEFQELNRCVLDFLTSSLG

SEQ ID NO: 15658 - protein, 191 aa, Zea mays subsp. mays
  misc_feature (1)..(191): Ceres Seq. ID no. 12347190
MYVAREARTPFFRVGYNSLGGFATINHLHFQAYYLKVQYPVEKAITEKLKTLGNSVSIFHLVDYPVNGFVFEGGASLEDLSDVVSKVCIFLQENNRPFNVLISESGKRIFLLPQCYAEKQLLGKASQEFLDMRINPAIWELSGHLVLKRRKDYEEASEANIRRFLVEAALSETEFQELNRCVLDFLTSSLG

SEQ ID NO: 15659 - DNA, 1594 bp, Zea mays subsp. mays
  misc_feature (1)..(1594): Ceres Seq. ID no. 12347191
attgcccactaaggcatcattccgccaaagacccaaagtggcaaacgcccaaatcgacaaaccctaatgacctaatccccaacccccagccggcagccgccgagcaaaccagctcatccggtcggtcatccactcatcctcatcccctgcccatctgatccgatcggtcatctcatcctcatcccctacccgatcggatcccctgctcatccgccgagcaccaccaggcagcaggctccagtcatcgagcaccagcaggagcacggcgcgctgcccagtaggagcacggccaagaggatgacgcccgcatcctgcctcttctcctctgctactggagcctctactgctaggagcacggctaggaggacaacacccgcatccagcaggagcaccagcaggaggaggacgcccatgctgctgccgttgagcgatgatctgatgcgcccccatcatggctcttctcctccctcacggcctcgcctcgatctgctgctgccggtgatctgctgctgccggatccgagcgccgtgcccacgggtcacggccagcgatatgcagggatcaagaatccaactttgagaaaaattgctcgagatgtaaatggcgccgccggagtaccagcagtacctcgtgcaggtgaccaagtaccaggccgcacagaactgcaaggtcatggtgatttcacgtccgttaggctcgagaggtggactcaaacatgacatccaagttttgcaagttttgatgttggatgttaaatttctatgctcacccctcgtttggttattgatttgataatagttttgcatgaactattggtgttggctatctaaaggacagaaaggcagacatgagcaacagatcccgctccatgggctgaaactgggattcgtgatggcagaaagtgctactgtcgctctcaattgtagcggtgtggtactgggatccttgccaataagggtgagcccgtccaagatgcccatgcgtccccgcgcccctcgccagctgatgtcgtactaggctaggggattgaagaagcacttgaagaggctcaatgcgcccaagcattggatgctcgacaagcttggcggagcttttttcatgctctgcaaggtgaggtctgttcagtttggccagaaaggtatcccctacctgaacacctacgatgatcgcaccatccgctaccccgacccgctcatcaaggccaacgacaccatcaagatcgatctagagaccaacaagatcatggacttcatcaagtttgacgtcggcaacgtggtcatggtgaccggcgggaggaacaccgggcgtgtaggagtgatcaagaacagggagaagcacaagggcagcttcgagaccatccacgtgctgcttggagctttttgctatgtctagttttttcctatttgttgtacaagaaaacataaaatggaattcaactttggtggccgcaaaagtttagagacttgatttcatataaagttaggctgaacattactgcaaacagttgtattttagtttagatttagagtacacttatgtatgtgttgtttgacaatgcttatttatgatatattgaatggtacttatttatatt

SEQ ID NO: 15660 - protein, 107 aa, Zea mays subsp. mays
  misc_feature (1)..(107): Ceres Seq. ID no. 12347192
MLDKLGGAFFMLCKVRSVQFGQKGIPYLNTYDDRTIRYPDPLIKANDTIKIDLETNKIMDFIKFDVGNVVMVTGGRNTGRVGVIKNREKHKGSFETIHVLLGAFCYV

SEQ ID NO: 15661 - protein, 97 aa, Zea mays subsp. mays
  misc_feature (1)..(97): Ceres Seq. ID no. 12347193
MLCKVRSVQFGQKGIPYLNTYDDRTIRYPDPLIKANDTIKIDLETNKIMDFIKFDVGNVVMVTGGRNTGRVGVIKNREKHKGSFETIHVLLGAFCYV

SEQ ID NO: 15662 - protein, 93 aa, Zea mays subsp. mays
  misc_feature (1)..(93): Ceres Seq. ID no. 12347194
MTPASCLFSSATGASTARSTARRTTPASSRSTSRRRTPMLLPLSDDLMRPHHGSSPPSRPRLDLLLPVICCCRIRAPCPRVTASDMQGSRIQL

SEQ ID NO: 15663 - DNA, 1273 bp, Zea mays subsp. mays
  misc_feature (1)..(1273): Ceres Seq. ID no. 12347251
catttaatttccgatagagttatgccccttcgtttacatttttactgatcatccatttcttaattttgtggtactttgaattggagactttaatttcattgcattgctattcaacatttccaccaataggttagtcatcatccaatgctgattgcctgccactgtgaaggcaagggctggaaattctggggcgacagcaatctcaaatccaagttttggggacagtcaattcaagttgaaccagttggcattttgactctagaatttgaggatggtgaaatcttccaatggaataaggttacaacaaccattcacaatctcattcttgggaagttgtactgcagccaccatggaacaatgcatataaaagggaatcgccaatattcatgtaaactgaagttcaaagagccatcacttcttgaccggaatccccatctagtacaaggctttgtagaggacaacaatgggaacaaagcttcgtttttgatagggatgtgggacgaaagcatatattgtagtaactctgatacttccaaggtgaagagcgccgatcaactgaaaggtgcctcgctgctgtgggaaaagaacaaacctgctcctaacccaactcgatacaatttatcttcattcgcgatcacactgaatgagttgaccccagggctgcaggagaaacttccacctactgattcacggctgagaccagaccagcgccacctagagaatggtgaatacgagaaagcgaatgcagagaagctgaggttggaacgacggcaaagaatggtatccgctctcgcttcatagatcacaatccatacatgttgtttcttcatgttctctgtctcattgcagtctactaaacttcaagacaatggctggaaatcccggtggttcgagcaagacaccgaggacgggacgtattgctacaaaggtggatactgggaaacaagagagaggggcttctgggatgggtgcctcgacatttttggggagttcgtggagacataagcgccctgttcctgcagtagcagaggttcaagcagccaacacgccgcccagaaacaatggagcactgccatctccaatggagcatcctcttgcctctagaagagaaggggggaggagccctgtgcgaggagtagagcattcgagatgtgaaggcattgtgccttgaatggtagcataagcatatgattggccacgaataggcattgccaccttgttagtatagtatagttcgatccaatgcaaataagaatgctgacattcattcttt

SEQ ID NO: 15664 - protein, 218 aa, Zea mays subsp. mays
  misc_feature (1)..(218): Ceres Seq. ID no. 12347252
MLIACHCEGKGWKFWGDSNLKSKFWGQSIQVEPVGILTLEFEDGEIFQWNKVTTTIHNLILGKLYCSHHGTMHIKGNRQYSCKLKFKEPSLLDRNPHLVQGFVEDNNGNKASFLIGMWDESIYCSNSDTSKVKSADQLKGASLLWEKNKPAPNPTRYNLSSFAITLNELTPGLQEKLPPTDSRLRPDQRHLENGEYEKANAEKLRLERRQRMVSALAS

SEQ ID NO: 15665 - protein, 147 aa, Zea mays subsp. mays
  misc_feature (1)..(147): Ceres Seq. ID no. 12347253
MHIKGNRQYSCKLKFKEPSLLDRNPHLVQGFVEDNNGNKASFLIGMWDESIYCSNSDTSKVKSADQLKGASLLWEKNKPAPNPTRYNLSSFAITLNELTPGLQEKLPPTDSRLRPDQRHLENGEYEKANAEKLRLERRQRMVSALAS

SEQ ID NO: 15666 - DNA, 1703 bp, Zea mays subsp. mays
  misc_feature (1)..(1703): Ceres Seq. ID no. 12347254
aaaggttgtggggtgataaactcgtggactgatgcaaccaggacatgctattttgaatagtgattctcttttgtctgagtcggactgctgatgagcttactgaatctacctcttgtacttgtctatgtgtgcagcggctgagaaagcaagagtaaagagcaatgggctcaccaaagaggctttggtgccaaaggatgccaatggcaatgccatctcagcgcaaactttcaccttccgtgagcttgctaccgccaccaggaacttcaggcccgagtgcttcctgggagagggaggttttggacgtgtttacaagggccgccttgagagcacaggccaggttgttgctataaagcagcttaacagggatgggcttcaaggaaacagagaatttctagtagaagttctcatgctcagcttactacatcatcaaaacctggttaatttgattggttattgtgctgatggagaccagagacttcttgtttatgaatatatgccttctggatcacttgaagatcatttgcacgatctacctcttgataaagaggccttggactggaacaccaggatgaaaattgcagcaggtgctgccaaaggactggagtaccttcatgacaaagctaatccaccagttatttatagggatttcaagtcatcgaacattctgttggatgaaagtttccacccgaagctgtctgattttggacttgctaagttgggtccagttggcgacaaatcacatgtctcaacacgtgtaatgggtacatatggttattgtgcaccagaatatgctatgacagggcagctgacagtgaagtctgacgtgtatagttttggggttgtcttgctagagttgattactggccgtagggctattgacagcaccagaccacatggagaacaaaatcttgtctcatgggcacgtcctctgtttaacgacagaagaaagctccctaagatggctgacccgaggctggaagggcgataccccatgcgtgggctttaccaagcccttgcagtggcttcgatgtgcattcagtcggaggctgcttcacgcccactgattgcagatgtcgtgactgctctgtcctacttggcatcccagccatatgatcccaacgcagctcttgcttcaaggaagccaggcggcgatcagcgaagcaagcctggcgagaacggcagggcagtttccaggaatgatgaaactggaagctccggccacaaaacacctgccaaggaccgagaggactcacctagggacctcccagcgatcctgaacaaggaccttgaccgggagcgcatggtggccgaggcgaagatgtggggcgaccgggagcgcatggtggccgaggctaagatgtggggcgaccgagagcgcatggtggctgaggcgaagatgtggggtgaaaattggcgtgacaagcggcgtgcagagattgggcaggggagcctggattcggttactgggaacagctagggggcaattaagcgaacagaaacgtgacatccacccatgcatttcgtttgtttatttccaggtccattttcgttctggcggcggtcggcaggccccagggttgtacatttctaggtcagggaagagtgggaaagcggcagcgttgtactggacagtgaatgcatgtggttgtacatgtaaattctcagaaaagttttgtgagaatgaaaggacatatttgagttcc

SEQ ID NO: 15667 - protein, 450 aa, Zea mays subsp. mays
  misc_feature (1)..(450): Ceres Seq. ID no. 12347255
MCAAAEKARVKSNGLTKEALVPKDANGNAISAQTFTFRELATATRNFRPECFLGEGGFGRVYKGRLESTGQVVAIKQLNRDGLQGNREFLVEVLMLSLLHHQNLVNLIGYCADGDQRLLVYEYMPSGSLEDHLHDLPLDKEALDWNTRMKIAAGAAKGLEYLHDKANPPVIYRDFKSSNILLDESFHPKLSDFGLAKLGPVGDKSHVSTRVMGTYGYCAPEYAMTGQLTVKSDVYSFGVVLLELITGRRAIDSTRPHGEQNLVSWARPLFNDRRKLPKMADPRLEGRYPMRGLYQALAVASMCIQSEAASRPLIADVVTALSYLASQPYDPNAALASRKPGGDQRSKPGENGRAVSRNDETGSSGHKTPAKDREDSPRDLPAILNKDLDRERMVAEAKMWGDRERMVAEAKMWGDRERMVAEAKMWGENWRDKRRAEIGQGSLDSVTGNS

SEQ ID NO: 15668 - protein, 356 aa, Zea mays subsp. mays
  misc_feature (1)..(356): Ceres Seq. ID no. 12347256
MLSLLHHQNLVNLIGYCADGDQRLLVYEYMPSGSLEDHLHDLPLDKEALDWNTRMKIAAGAAKGLEYLHDKANPPVIYRDFKSSNILLDESFHPKLSDFGLAKLGPVGDKSHVSTRVMGTYGYCAPEYAMTGQLTVKSDVYSFGVVLLELITGRRAIDSTRPHGEQNLVSWARPLFNDRRKLPKMADPRLEGRYPMRGLYQALAVASMCIQSEAASRPLIADVVTALSYLASQPYDPNAALASRKPGGDQRSKPGENGRAVSRNDETGSSGHKTPAKDREDSPRDLPAILNKDLDRERMVAEAKMWGDRERMVAEAKMWGDRERMVAEAKMWGENWRDKRRAEIGQGSLDSVTGNS

SEQ ID NO: 15669 - protein, 327 aa, Zea mays subsp. mays
  misc_feature (1)..(327): Ceres Seq. ID no. 12347257
MPSGSLEDHLHDLPLDKEALDWNTRMKIAAGAAKGLEYLHDKANPPVIYRDFKSSNILLDESFHPKLSDFGLAKLGPVGDKSHVSTRVMGTYGYCAPEYAMTGQLTVKSDVYSFGVVLLELITGRRAIDSTRPHGEQNLVSWARPLFNDRRKLPKMADPRLEGRYPMRGLYQALAVASMCIQSEAASRPLIADVVTALSYLASQPYDPNAALASRKPGGDQRSKPGENGRAVSRNDETGSSGHKTPAKDREDSPRDLPAILNKDLDRERMVAEAKMWGDRERMVAEAKMWGDRERMVAEAKMWGENWRDKRRAEIGQGSLDSVTGNS

SEQ ID NO: 15670 - DNA, 1298 bp, Zea mays subsp. mays
  misc_feature (1)..(1298): Ceres Seq. ID no. 12347470
aattaaccatattggccagtgtacgtgggaacgatggccctcatgcaggagagtagtagccaggatttgctccaagctcacgacgagctcttgcaccattccctgtgcttcgccaaatcgctcgcgctcgccgtggcgctagacctccgcatccccgacgcgatccaccaccacggggccggcggcgccacccttctccagatcctcgccgagactgcgctccacccaagcaagcttcgcgcccttcgccgcctcatgcgcgtgctcaccgtcacgggcatcttcagcgtcgtcgagcaaccaccagcaggtggtggtgatgattcaaccgtccacacgtcggacgacgaagctgtcgtcgtctacaggttgacggcagcctcccgcttcctcgtcagcgacgacgtgagcacggcgaccttggctccctttgtgagtctggcgctccagcctatcgctgcctgtccgcacgccctgggtatctccgcgtggttccggcaggagcagcacgagccgtccccgtatggcctggcgttccgccagaccccaacgatctgggaacatgctgacgacgtaaacgccttgctgaacaaaggcatggccgcggacagccgcttcctcatgccaattgtgctgagggagtgcggcgagacgtttcgtgggatcgactcgttggttgacgtcggtggtggccatggtggcgccgccgccaccatcgccgccgccttcccccacctcaagtgcagcgtgcttgacctcccgcacgttgtcgccggtgctccgtctgatggcaacgtgcagttcgtcgcaggcaatatgtttgagagtattccacctgcaaccgctgttttcctcaagaaaactctacatgactggggtgacgatgagtctgtcaagatattgaagaattgcaagcaagccatatctccacgggatgcaggtgggaaggtaataatcttggatgtggtagttggatataaacagtcaaacataaagcatcaagagacacaagttatgtttgatttgtatatgatggcggttaacggagttgagcgtgacgagcaagagtggaagaagatcttcactgaagctggattcaaagactacaaaattctacccgtcattggtgatgtatcggtcatcatcgaggtctatccttgaatgctttgtgaacaaaggcctccataataaactgaagaccaagaaggtgttgatagtatattatgaattgttatttgtcctgtacacttgattctttgcgtatttgtaatgacaagttgagtaattgtgtttttgtc

SEQ ID NO: 15671 - protein, 375 aa, Zea mays subsp. mays
  misc_feature (1)..(375): Ceres Seq. ID no. 12347471
MALMQESSSQDLLQAHDELLHHSLCFAKSLALAVALDLRIPDAIHHHGAGGATLLQILAETALHPSKLRALRRLMRVLTVTGIFSVVEQPPAGGGDDSTVHTSDDEAVVVYRLTAASRFLVSDDVSTATLAPFVSLALQPIAACPHALGISAWFRQEQHEPSPYGLAFRQTPTIWEHADDVNALLNKGMAADSRFLMPIVLRECGETFRGIDSLVDVGGGHGGAAATIAAAFPHLKCSVLDLPHVVAGAPSDGNVQFVAGNMFESIPPATAVFLKKTLHDWGDDESVKILKNCKQAISPRDAGGKVIILDVVVGYKQSNIKHQETQVMFDLYMMAVNGVERDEQEWKKIFTEAGFKDYKILPVIGDVSVIIEVYP

SEQ ID NO: 15672 - protein, 372 aa, Zea mays subsp. mays
  misc_feature (1)..(372): Ceres Seq. ID no. 12347472
MQESSSQDLLQAHDELLHHSLCFAKSLALAVALDLRIPDAIHHHGAGGATLLQILAETALHPSKLRALRRLMRVLTVTGIFSVVEQPPAGGGDDSTVHTSDDEAVVVYRLTAASRFLVSDDVSTATLAPFVSLALQPIAACPHALGISAWFRQEQHEPSPYGLAFRQTPTIWEHADDVNALLNKGMAADSRFLMPIVLRECGETFRGIDSLVDVGGGHGGAAATIAAAFPHLKCSVLDLPHVVAGAPSDGNVQFVAGNMFESIPPATAVFLKKTLHDWGDDESVKILKNCKQAISPRDAGGKVIILDVVVGYKQSNIKHQETQVMFDLYMMAVNGVERDEQEWKKIFTEAGFKDYKILPVIGDVSVIIEVYP

SEQ ID NO: 15673 - protein, 301 aa, Zea mays subsp. mays
  misc_feature (1)..(301): Ceres Seq. ID no. 12347473
MRVLTVTGIFSVVEQPPAGGGDDSTVHTSDDEAVVVYRLTAASRFLVSDDVSTATLAPFVSLALQPIAACPHALGISAWFRQEQHEPSPYGLAFRQTPTIWEHADDVNALLNKGMAADSRFLMPIVLRECGETFRGIDSLVDVGGGHGGAAATIAAAFPHLKCSVLDLPHVVAGAPSDGNVQFVAGNMFESIPPATAVFLKKTLHDWGDDESVKILKNCKQAISPRDAGGKVIILDVVVGYKQSNIKHQETQVMFDLYMMAVNGVERDEQEWKKIFTEAGFKDYKILPVIGDVSVIIEVYP

SEQ ID NO: 15674 - DNA, 1643 bp, Zea mays subsp. mays
  misc_feature (1)..(1643): Ceres Seq. ID no. 12347478
gtgcgggcgtgttgtggtccgctgatctcgttcgcgggacgccggggggtggtggtggtggcagcggtggttggtggtgcgcggcgtgaaagaaagaaagaaaaaaaaaaaaggcccgccgctttgcgctgctctgcttccgtaggtgtcacgagatttggccctagcctttcgctttcctttttcatctcgctcacaagggaagggaccgagggacgagggagacgttggggaggggagcgagcgagccgtaacatccgagctgttccaatggcgacccctgccgttgctttcgtcgccagcgctttgttggggcggtggtagcgctaggagcggagcagtactaggttggtaggtggttgtagctttgcgcgtgacccgagcgcgcgctcgctcgctcctgtgcctctctacctcgcttgcgtgcgccgggaaggcagtgggtggctggtcggttctcgcaagaggttgctggtgctgttcctcctcccccggttgatgagcatggggcattgctccgagcagcggacggggttcgaggtgactaaggactggaacggcgccgaccagttcgcgatccggtccccgcggggggcgtccgttcgggtctgcctgcacggcgggcaggtcgtctcgtggaggaaccaccgcggcgaggagctcctcttcagcagcagcaaggcaatcttcaagccgccaagagcgacccgtggtggcattccgatatgcttcccacagtttggaaactgtggaacattggagcagcatggatttgcaaggaacaagatatggacaatagacgatgaggctccacctctaaattatggtgataataacagcaacaaagcttctgttgaccttctgctaaagccatctgaagatgacctgaagtgctggccacactgttttgagttacgtctcagagtctctctttcaatggatggagacctttcactgatatcacgggtcagaaatgttaatgggaagccattcagtttcgcatttgcttaccatacatacctttctgtttctgacatcagtgaagtgaggatagaaggtctggagacccttgattatcttgacaaccttagccagcgggaacgttttaccgaacagggagatgccataacatttgaatcagaggttgatcgagtctatgttggctgcccaggcgtaatagctgttcttgaccatggaaagaaacgcacattcatcgtgcggaaagaagggcttcctgatattgttgtgtggaacccctgggagaagaagtccaagacgatggcagacttcggcgacgacgagtacaagcagatgctgtgcgtggatgcagccgcggtcgagagggccatcacgctgaagcccggggaggagtggacggggaagctggagctctccgccgtggcgtcgaccaactgcagcgaccacctggatcgcccgggcaggctgtagagcgctgggtgggtgggttcgttcgcccctgacgaaaggcatgtactagttttttttcatgtacatgggggcgctaggtccggcccttgcaggctgcagtatcatctacctgtcaggtgtgtcatgtgtgagtttaaacttatgtcagatccaagtattgctgtgatcgacatgttcgatgttcctggactgcg

SEQ ID NO: 15675 - protein, 316 aa, Zea mays subsp. mays
  misc_feature (1)..(316): Ceres Seq. ID no. 12347479
MSMGHCSEQRTGFEVTKDWNGADQFAIRSPRGASVRVCLHGGQVVSWRNHRGEELLFSSSKAIFKPPRATRGGIPICFPQFGNCGTLEQHGFARNKIWTIDDEAPPLNYGDNNSNKASVDLLLKPSEDDLKCWPHCFELRLRVSLSMDGDLSLISRVRNVNGKPFSFAFAYHTYLSVSDISEVRIEGLETLDYLDNLSQRERFTEQGDAITFESEVDRVYVGCPGVIAVLDHGKKRTFIVRKEGLPDIVVWNPWEKKSKTMADFGDDEYKQMLCVDAAAVERAITLKPGEEWTGKLELSAVASTNCSDHLDRPGRL

SEQ ID NO: 15676 - protein, 314 aa, Zea mays subsp. mays
  misc_feature (1)..(314): Ceres Seq. ID no. 12347480
MGHCSEQRTGFEVTKDWNGADQFAIRSPRGASVRVCLHGGQVVSWRNHRGEELLFSSSKAIFKPPRATRGGIPICFPQFGNCGTLEQHGFARNKIWTIDDEAPPLNYGDNNSNKASVDLLLKPSEDDLKCWPHCFELRLRVSLSMDGDLSLISRVRNVNGKPFSFAFAYHTYLSVSDISEVRIEGLETLDYLDNLSQRERFTEQGDAITFESEVDRVYVGCPGVIAVLDHGKKRTFIVRKEGLPDIVVWNPWEKKSKTMADFGDDEYKQMLCVDAAAVERAITLKPGEEWTGKLELSAVASTNCSDHLDRPGRL

SEQ ID NO: 15677 - protein, 170 aa, Zea mays subsp. mays
  misc_feature (1)..(170): Ceres Seq. ID no. 12347481
MDGDLSLISRVRNVNGKPFSFAFAYHTYLSVSDISEVRIEGLETLDYLDNLSQRERFTEQGDAITFESEVDRVYVGCPGVIAVLDHGKKRTFIVRKEGLPDIVVWNPWEKKSKTMADFGDDEYKQMLCVDAAAVERAITLKPGEEWTGKLELSAVASTNCSDHLDRPGRL

SEQ ID NO: 15678 - DNA, 1505 bp, Zea mays subsp. mays
  misc_feature (1)..(1505): Ceres Seq. ID no. 12347490
gatatcttttttccatatgcttcactggacatctgcttattactcaggatgggtggttagcacatccctagctggtgcaacactaggttcctttaccgggggatctttggcagataaatttgggcggacaagaacattcatcctggatgcagccccactggctgtaggtgcattcttgagcgcaacagctcaagatatccgcaccatgattattggtcggttgcttgctggaattggtattgggatctcatctgcacttgtacccctttacatatctgagatatcaccaactgaaattcgtggaacacttggttctgttaatcaactttttatctgcattggaattcttgcagctttgttagctggattgcctttggcaggaaatcctgcctggtggaggacaatgtttggaattgctgtagttccatccattttgctggctgtaggaatggccttttcgcctgaaagccctcgatggctattccagcaaggaaaggttattcaagcagaatcagctgtaaaaagactatatggaaaagaaatggttaccgaaattatgtatgatctgagagctagtggccaaagttcttctgagaccgaagctggctggttggatcttttcagcaagcgttactggaaagttgtgagtgtgggggcagcactgtttttgttccagcagcttgctggtataaacgctgttgtatattactctacatcggtgttccgtaatgcaggcattacatctgatgttgctgctagtgctcttgttggagcagccaatgtttttggcaccatggttgcatcttctctaatggacaagaaaggaaggaaaagccttctgatgacaagcttttctggaatgggtgcttcaatgctactcctagcattgtccttcacctggaaagctctggcaccttattctggtactcttgctgttgttggcactgttctgtatgtgctgtcttttgctctaggagctggtcctgttcctgccctgcttcttcctgaaatatttgcctccagaataagggccaaggctgttgcattatctctaggcatgcactgggtatccaacttttttattggcctgtacttcttgagtgtcgtcaacaagttcgggatcagcaatgtatatttgggatttgcatcagtgtgcgtccttgcagttctctacatagctgggaatgtggtcgagaccaaggggcgatcacttgaagagattgaacgggaactaagtgtagcagaatgatgtgcttttgctagtcatgctgcggcgccgttttggtgattttgagaatgcaaccaagcacacaaccgagcatccttggacctggagactttctagtttcatgtagcagttaccgatcagattcagaaacaatgaactcgtcgatgtttctggagataagttttcgttttttgttctaaaatttcttgtttctcttgtataggagactttgagatagtttcagctctaaagacgtgaatatggagcagctccgctg

SEQ ID NO: 15679 - protein, 415 aa, Zea mays subsp. mays
  misc_feature (1)..(415): Ceres Seq. ID no. 12347491
ISFFHMLHWTSAYYSGWVVSTSLAGATLGSFTGGSLADKFGRTRTFILDAAPLAVGAFLSATAQDIRTMIIGRLLAGIGIGISSALVPLYISEISPTEIRGTLGSVNQLFICIGILAALLAGLPLAGNPAWWRTMFGIAVVPSILLAVGMAFSPESPRWLFQQGKVIQAESAVKRLYGKEMVTEIMYDLRASGQSSSETEAGWLDLFSKRYWKVVSVGAALFLFQQLAGINAVVYYSTSVFRNAGITSDVAASALVGAANVFGTMVASSLMDKKGRKSLLMTSFSGMGASMLLLALSFTWKALAPYSGTLAVVGTVLYVLSFALGAGPVPALLLPEIFASRIRAKAVALSLGMHWVSNFFIGLYFLSVVNKFGISNVYLGFASVCVLAVLYIAGNVVETKGRSLEEIERELSVAE

SEQ ID NO: 15680 - protein, 410 aa, Zea mays subsp. mays
  misc_feature (1)..(410): Ceres Seq. ID no. 12347492
MLHWTSAYYSGWVVSTSLAGATLGSFTGGSLADKFGRTRTFILDAAPLAVGAFLSATAQDIRTMIIGRLLAGIGIGISSALVPLYISEISPTEIRGTLGSVNQLFICIGILAALLAGLPLAGNPAWWRTMFGIAVVPSILLAVGMAFSPESPRWLFQQGKVIQAESAVKRLYGKEMVTEIMYDLRASGQSSSETEAGWLDLFSKRYWKVVSVGAALFLFQQLAGINAVVYYSTSVFRNAGITSDVAASALVGAANVFGTMVASSLMDKKGRKSLLMTSFSGMGASMLLLALSFTWKALAPYSGTLAVVGTVLYVLSFALGAGPVPALLLPEIFASRIRAKAVALSLGMHWVSNFFIGLYFLSVVNKFGISNVYLGFASVCVLAVLYIAGNVVETKGRSLEEIERELSVAE

SEQ ID NO: 15681 - protein, 347 aa, Zea mays subsp. mays
  misc_feature (1)..(347): Ceres Seq. ID no. 12347493
MIIGRLLAGIGIGISSALVPLYISEISPTEIRGTLGSVNQLFICIGILAALLAGLPLAGNPAWWRTMFGIAVVPSILLAVGMAFSPESPRWLFQQGKVIQAESAVKRLYGKEMVTEIMYDLRASGQSSSETEAGWLDLFSKRYWKVVSVGAALFLFQQLAGINAVVYYSTSVFRNAGITSDVAASALVGAANVFGTMVASSLMDKKGRKSLLMTSFSGMGASMLLLALSFTWKALAPYSGTLAVVGTVLYVLSFALGAGPVPALLLPEIFASRIRAKAVALSLGMHWVSNFFIGLYFLSVVNKFGISNVYLGFASVCVLAVLYIAGNVVETKGRSLEEIERELSVAE

SEQ ID NO: 15682 - DNA, 1316 bp, Zea mays subsp. mays
  misc_feature (1)..(1316): Ceres Seq. ID no. 12347498
gagaggctcaggctgctcgtgatggcttggctcgcagacagacaggcagacagagagatatcaaaacatttgagggaaatgttatttgtgtatcactgtgcatgcagtacgcagtgagtaatgaatgaattctggtgtggccagcagatcgtgttcgagatcctggtgaggggtctgatcgggctggaggcaggcccggagatgcagcagctcaagcaccagttccaggaattcattgtcggcctcatgtccctccccatcaagctgccggggactaggctctacaggtccctccaggccaagaagaggatggccacgctgatacaggggatcatacaggagaagaggcggcggcggagggccgcccttgaggatggcggagagggcgagggcgaggccggtcccccgcgcgacgtcatcgacgtgctcataagcggcggcgacgagctcaccgacgagctcatatccgacaacatgatcgacctgatgatccccgccgaggactctgtgcccgtgctcatcacgctcgccgtcaagtatctcagcgagtgcccgcttgctctgcaacaacttgaggaggagaacatgcagctgaagaggcggaaaaccgacgtgggagagaccttgcagtggacggactacatgtcactgtcgttcacacaacatgtgataacggagacactgcggatggggaatatcatcaacgggatcatgcgcaaagcggtgcgggacgtggaggtgaaggggcacctcatccccaagggctggtgcgtgttcgtgtacttccggtcggtccacctcgacgacaagcgctacgacgagccctacaggttcaacccgtggaggtggaaggagaaggacacgagcaccatgggcttcaccccttttggcggtgggcagaggctgtgcccaggcctggatctggccaggctggaagcttccatctttctccatcacctggtgaccagcttcaggtgggtggcggaggaggaccacatcgtcaacttcccaaccgtgcggctcaagcgaggcatgcccgtcaggctcaccagcaaagactagctagctagtcactacgacctgcttgtgcatgccatgcatgcagatttcagtcacgtcatatgcaatatatattggaccctggaggttgcacgtgtacagaagagaggatgcaggagctagcagatgatcggaggtatttaggcagactgaaattgaatcgaccgcgaagagtagcacactactataccacgagtatgatctgtagtagtagtaataagaggaatataatatcattagtgtggtagtatttactg

SEQ ID NO: 15683 - protein, 313 aa, Zea mays subsp. mays
  misc_feature (1)..(313): Ceres Seq. ID no. 12347499
MNEFWCGQQIVFEILVRGLIGLEAGPEMQQLKHQFQEFIVGLMSLPIKLPGTRLYRSLQAKKRMATLIQGIIQEKRRRRRAALEDGGEGEGEAGPPRDVIDVLISGGDELTDELISDNMIDLMIPAEDSVPVLITLAVKYLSECPLALQQLEEENMQLKRRKTDVGETLQWTDYMSLSFTQHVITETLRMGNIINGIMRKAVRDVEVKGHLIPKGWCVFVYFRSVHLDDKRYDEPYRFNPWRWKEKDTSTMGFTPFGGGQRLCPGLDLARLEASIFLHHLVTSFRWVAEEDHIVNFPTVRLKRGMPVRLTSKD

SEQ ID NO: 15684 - protein, 286 aa, Zea mays subsp. mays
  misc_feature (1)..(286): Ceres Seq. ID no. 12347500
MQQLKHQFQEFIVGLMSLPIKLPGTRLYRSLQAKKRMATLIQGIIQEKRRRRRAALEDGGEGEGEAGPPRDVIDVLISGGDELTDELISDNMIDLMIPAEDSVPVLITLAVKYLSECPLALQQLEEENMQLKRRKTDVGETLQWTDYMSLSFTQHVITETLRMGNIINGIMRKAVRDVEVKGHLIPKGWCVFVYFRSVHLDDKRYDEPYRFNPWRWKEKDTSTMGFTPFGGGQRLCPGLDLARLEASIFLHHLVTSFRWVAEEDHIVNFPTVRLKRGMPVRLTSKD

SEQ ID NO: 15685 - protein, 271 aa, Zea mays subsp. mays
  misc_feature (1)..(271): Ceres Seq. ID no. 12347501
MSLPIKLPGTRLYRSLQAKKRMATLIQGIIQEKRRRRRAALEDGGEGEGEAGPPRDVIDVLISGGDELTDELISDNMIDLMIPAEDSVPVLITLAVKYLSECPLALQQLEEENMQLKRRKTDVGETLQWTDYMSLSFTQHVITETLRMGNIINGIMRKAVRDVEVKGHLIPKGWCVFVYFRSVHLDDKRYDEPYRFNPWRWKEKDTSTMGFTPFGGGQRLCPGLDLARLEASIFLHHLVTSFRWVAEEDHIVNFPTVRLKRGMPVRLTSKD

SEQ ID NO: 15686 - DNA, 1655 bp, Zea mays subsp. mays
  misc_feature (1)..(1655): Ceres Seq. ID no. 12347506
gaggccttgcctgcctgccttgtttccccaaccccctcggaccctcacatcttcctcggtctctccgccgcccaccacctccatccccctcctctctttatacgccaccgcggcggggcttcccccatccctctgtccgttcgctgcattgctcccctaaccgttcggccaggagacagcggagagggcagagatggcggccgcgtccttcaccgccgccaagttcctggcgccggtggccgcgagatccggcggagagagggcgcccccgctccccgccggcgcctcgtcctcctccttcgccaggaccctgcgccgcggcgcggtgcaccacccgcgcctgcgcaccgcgctcgccgtctcctccgacctgctcgctgggaacaaggccgcgcaggccgccgccgcgcatccggcggttacacgggaagaggcactggagctgtatgaggacatggttcttggccgtgtattcgaggacatgtgtgcacaaatgtactaccgtggcaagatgtttggtttcgtccacctttacaatggccaggaggctgtctccactggcttcatcaaacttctgaaccaagctgactgtgttgttagcacataccgtgatcatgtccatgcgctgtccaagggcgtcccggcacgttctgtcatggctgagctctttggcaaggccacaggctgctgccgtggacagggtggttccatgcacatgttctctgctccccacaacctcctgggaggctttgccttcatcggagagggcattcctgttgccactggtgcagcctttgctgctaagtaccgtcatgaggtgctcaaggagtctggccctgatgggcttgatgtcacattggcgttctttggcgatggtacctgtaataatggccagttctttgagtgtctgaacatggcacagctttggaagcttcctattgtgtttgttgtggagaataacctgtgggcaattggaatgtcacacattagggctacatcggacccagagatttggaagaaggggccagcatttggaatgcctggggtgcatgttgatggtatggatgtcctgaaggtcagggaggttgctaaggaggcaattgagagggcaaggagaggtgaagggccaaccctagtcgagtgtgaaacatacaggttccggggtcactcccttgcagacccagatgagctcaggaagcctgatgagaaaacacactacgccgcaagggattctatcacggccttgaagaagtacatcatagagcagaacctcgcaaccgaatccgagctgaagagcatcgagaagaagatcgacgatgtcgttgaggaggctgtcgagtttgctgacgcgagcccgcatccgccgcgcagccagctgttggagaacgtgtttgccgaccccaaaggctttggtatcggccccgatgggaagtacaggtgcgaggatcccaagttcacccaaggcactgcccaagtttaaggaggttaatctgcgctctgtaccactgtgcttgagttctctagttttgtcgatcccagtgtcatgttaaggatactgtatgcataaggcggtccatttctttggctcttaggcttgtgtctgatactattgtgtaatttattcgaatgctcaactgatgcccatgttttatggc

SEQ ID NO: 15687 - protein, 428 aa, Zea mays subsp. mays
  misc_feature (1)..(428): Ceres Seq. ID no. 12347507
MAAASFTAAKFLAPVAARSGGERAPPLPAGASSSSFARTLRRGAVHHPRLRTALAVSSDLLAGNKAAQAAAAHPAVTREEALELYEDMVLGRVFEDMCAQMYYRGKMFGFVHLYNGQEAVSTGFIKLLNQADCVVSTYRDHVHALSKGVPARSVMAELFGKATGCCRGQGGSMHMFSAPHNLLGGFAFIGEGIPVATGAAFAAKYRHEVLKESGPDGLDVTLAFFGDGTCNNGQFFECLNMAQLWKLPIVFVVENNLWAIGMSHIRATSDPEIWKKGPAFGMPGVHVDGMDVLKVREVAKEAIERARRGEGPTLVECETYRFRGHSLADPDELRKPDEKTHYAARDSITALKKYIIEQNLATESELKSIEKKIDDVVEEAVEFADASPHPPRSQLLENVFADPKGFGIGPDGKYRCEDPKFTQGTAQV

SEQ ID NO: 15688 - protein, 341 aa, Zea mays subsp. mays
  misc_feature (1)..(341): Ceres Seq. ID no. 12347508
MVLGRVFEDMCAQMYYRGKMFGFVHLYNGQEAVSTGFIKLLNQADCVVSTYRDHVHALSKGVPARSVMAELFGKATGCCRGQGGSMHMFSAPHNLLGGFAFIGEGIPVATGAAFAAKYRHEVLKESGPDGLDVTLAFFGDGTCNNGQFFECLNMAQLWKLPIVFVVENNLWAIGMSHIRATSDPEIWKKGPAFGMPGVHVDGMDVLKVREVAKEAIERARRGEGPTLVECETYRFRGHSLADPDELRKPDEKTHYAARDSITALKKYIIEQNLATESELKSIEKKIDDVVEEAVEFADASPHPPRSQLLENVFADPKGFGIGPDGKYRCEDPKFTQGTAQV

SEQ ID NO: 15689 - protein, 332 aa, Zea mays subsp. mays
  misc_feature (1)..(332): Ceres Seq. ID no. 12347509
MCAQMYYRGKMFGFVHLYNGQEAVSTGFIKLLNQADCVVSTYRDHVHALSKGVPARSVMAELFGKATGCCRGQGGSMHMFSAPHNLLGGFAFIGEGIPVATGAAFAAKYRHEVLKESGPDGLDVTLAFFGDGTCNNGQFFECLNMAQLWKLPIVFVVENNLWAIGMSHIRATSDPEIWKKGPAFGMPGVHVDGMDVLKVREVAKEAIERARRGEGPTLVECETYRFRGHSLADPDELRKPDEKTHYAARDSITALKKYIIEQNLATESELKSIEKKIDDVVEEAVEFADASPHPPRSQLLENVFADPKGFGIGPDGKYRCEDPKFTQGTAQV

SEQ ID NO: 15690 - DNA, 818 bp, Zea mays subsp. mays
  misc_feature (1)..(818): Ceres Seq. ID no. 12347624
taagcgacatcacaggggagacaagaggtggttcagggattgcctttggaagtgagatgtcaggtggcatatcggaagtacgggctgtgggcctccgcnttgtcaactcccttcacgggatcagaatcaagacggccccggggcgcggagggtacgtggagaatgtgtacatagcagatgtgagcatggacaatgtttcgatggccatcaggatcactggaaactacggtgaacatcctgatgacaaatatgacagcactgctctccctgtgataagcaatattacaatcaaggatgttgttggcgttaacattggggttgctggtatattggaaggcattcagggggacaatttcagcaacatttgtctgtccaatgtttccctcagtgtgcaatctgcacatccatggaattgttcacttattgaagggtattcgaactcggtgatcccagaatcatgcgaacagctcagaagcaattgtagacagacatccatttgctacgatggaagcagttcttcagtaatgcgtgtgcagcaaccaagacatacatcgcccaccagccggttgctagatcttttttctggagttggcttcattttagtgtaggtagagctgtgcttgttcttgctgcaaagggggcttgcttcatgtagtgagagccctattagtcatgtatatctgattcttgcaattatttgtgattagagtgccacttgcttcatgtatatagctgttgagatgactgtcggtgtatctttgcctgttttgttccaatttttggtatgtgaatgcaatctgcataactttatggttttg

SEQ ID NO: 15691 - protein, 201 aa, Zea mays subsp. mays
  misc_feature (1)..(201): Ceres Seq. ID no. 12347625
  misc_feature (33)..(33): Xaa is any aa, unknown or other
SDITGETRGGSGIAFGSEMSGGISEVRAVGLRXVNSLHGIRIKTAPGRGGYVENVYIADVSMDNVSMAIRITGNYGEHPDDKYDSTALPVISNITIKDVVGVNIGVAGILEGIQGDNFSNICLSNVSLSVQSAHPWNCSLIEGYSNSVIPESCEQLRSNCRQTSICYDGSSSSVMRVQQPRHTSPTSRLLDLFSGVGFILV

SEQ ID NO: 15692 - protein, 183 aa, Zea mays subsp. mays
  misc_feature (1)..(183): Ceres Seq. ID no. 12347626
  misc_feature (15)..(15): Xaa is any aa, unknown or other
MSGGISEVRAVGLRXVNSLHGIRIKTAPGRGGYVENVYIADVSMDNVSMAIRITGNYGEHPDDKYDSTALPVISNITIKDVVGVNIGVAGILEGIQGDNFSNICLSNVSLSVQSAHPWNCSLIEGYSNSVIPESCEQLRSNCRQTSICYDGSSSSVMRVQQPRHTSPTSRLLDLFSGVGFILV

SEQ ID NO: 15693 - protein, 140 aa, Zea mays subsp. mays
  misc_feature (1)..(140): Ceres Seq. ID no. 12347627
MDNVSMAIRITGNYGEHPDDKYDSTALPVISNITIKDVVGVNIGVAGILEGIQGDNFSNICLSNVSLSVQSAHPWNCSLIEGYSNSVIPESCEQLRSNCRQTSICYDGSSSSVMRVQQPRHTSPTSRLLDLFSGVGFILV

SEQ ID NO: 15694 - DNA, 1423 bp, Zea mays subsp. mays
  misc_feature (1)..(1423): Ceres Seq. ID no. 12347695
gttatctctgtcctctcctcgtgtttgttcttcctaccagcggagcgccagctacgcgctgtgcctcgtgcctagacgaacggcataggcaccggacggtggcgtcatgtgcgtggaggagccggaggacgccgaacggtttggttttggagacccaggggtcgaggagcccgctaagtttcccttggctcagatggagagagtttgtgaaaatacaacttctgctgatttaaggcagaagttaagcaattttgtcccagtaatccgatcgggggattggtctgatattggaggtcgccaatacatggaagacacccacgtgtgcattccggaccttgctaagaactttggtttcccatcattagataatgaagttgtttcattctatggggtctttgatggtcacggtggaaaagatgctgcccatttcgtttgtgataatttaccaaggatgattgtggaagattcagatttccctcttcagcttgaaaaagttgtgagaaggtcctttatgcagattgattgccagtttgctgagacatgctctctccatagagcatcgtcctccggtacaactgcacttacagcaatggtttttggatgtctcttctggtcgctaatgccggtgactgtagggcggttctttcccggtgtggcaccgcagtcgaaatgtccatggaccacaggccttgcagtctcagcgaaaaactgcgcgtagaatcgcttggtggctacgtggacgatggctatctgaacggtctgctaggagtcaccagagcgcttggtgactggcatctcgagggcatgaaaggagctggtgagacaggtggtcccctgagtgctgacccagagctcaagatgaccacgctgacgaaggacgacgagttcttgataattggcagcgacgggatctgggacgtcttctcgaaccagaactcggtggacttcgcccggaagcgcctccaggagcacaacgatgtgaagttgtgctgcagggaaatcgtcgaggaggcgatcaggcggggggctactgataacttgactgcagtgctggtctcgttccacctggaggccccgcctcggatcagagtggaccgtcctggtagggtggagaggagcatatctgctgaagggctcaatagcctcaggatactcctgggaaggcagtagctgcgttcttgtcgcgattttaggtgctgtgccgcattgccgagttgtaattgtatgtagtcatctcggctcctcattattgttagctgttaccctttgctgcgactgcgacacgtgttacgattcttgttggtgattgaaccaacaaacctgatattattcttgttggtgattgaaccaacaaacctgatactattcttgttcgtgactgaaccaacagatttgagctccgtcctgtgagagattttaagcc

SEQ ID NO: 15695 - protein, 203 aa, Zea mays subsp. mays
  misc_feature (1)..(203): Ceres Seq. ID no. 12347696
MCVEEPEDAERFGFGDPGVEEPAKFPLAQMERVCENTTSADLRQKLSNFVPVIRSGDWSDIGGRQYMEDTHVCIPDLAKNFGFPSLDNEVVSFYGVFDGHGGKDAAHFVCDNLPRMIVEDSDFPLQLEKVVRRSFMQIDCQFAETCSLHRASSSGTTALTAMVFGCLFWSLMPVTVGRFFPGVAPQSKCPWTTGLAVSAKNCA

SEQ ID NO: 15696 - protein, 189 aa, Zea mays subsp. mays
  misc_feature (1)..(189): Ceres Seq. ID no. 12347697
MSLLVANAGDCRAVLSRCGTAVEMSMDHRPCSLSEKLRVESLGGYVDDGYLNGLLGVTRALGDWHLEGMKGAGETGGPLSADPELKMTTLTKDDEFLIIGSDGIWDVFSNQNSVDFARKRLQEHNDVKLCCREIVEEAIRRGATDNLTAVLVSFHLEAPPRIRVDRPGRVERSISAEGLNSLRILLGRQ

SEQ ID NO: 15697 - protein, 174 aa, Zea mays subsp. mays
  misc_feature (1)..(174): Ceres Seq. ID no. 12347698
MERVCENTTSADLRQKLSNFVPVIRSGDWSDIGGRQYMEDTHVCIPDLAKNFGFPSLDNEVVSFYGVFDGHGGKDAAHFVCDNLPRMIVEDSDFPLQLEKVVRRSFMQIDCQFAETCSLHRASSSGTTALTAMVFGCLFWSLMPVTVGRFFPGVAPQSKCPWTTGLAVSAKNCA

SEQ ID NO: 15698 - DNA, 1304 bp, Zea mays subsp. mays
  misc_feature (1)..(1304): Ceres Seq. ID no. 12347730
cctaatcaaaaaaaaatccgcgccatggtcccccatcccgtccctcccctagtcccctccgacctcttctaaaaatcctggtggctggctctcgttgtcctcaagcagtcaagctcctcctcctcctccccccagtccctcccaggctcccaccccgccttgctcgcagcctccccaaaaccctagccctagccctagccctagccctagctctcccacacccgcactgggagatggacggcggcggcacgcaccgcacgccggaagacgtgttccgggatttccgcgcgcggcgggctggtatgatcaaagcgctcaccaccgacgtggagaagttctaccagcagtgtgacccagagaaagagaatctgtgtttgtatggtcttcccaatgaaacatgggaagtgaacctgcctgcagaggaggttcctcctgaacttccagagccagctctgggaattaattttgctcgtgacgggatggatgaaaaagattggctgtcactagtcgcggtgcacagtgatgcttggttgctggctgtggccttttacttcggtgcaagatttggttttgacaaagaatccaggaagcgcctttttgtcatgattaataacctccctacaatatatgaagttgtcacgggaactgccaagaagcaaaccaaggagaaaactcccaaaagcagcagcaagagcaataaagctggcccaaaaccgccacgccagccagaacccaactcaaggggttcgaagatgccacctccgaaggatgaggatgacagcggaggcgaggaagaggaggaagaggaagatcacgaaaacacgctgtgtggttcttgtggtgacaactacggacaggatgagttctggatatgctgtgatgcgtgcgagacttggttccatggcaagtgtgtcaagatcactcctgccaaggccgaacacatcaagcactacaagtgtccgaactgcagcggtagtggcaagagagcccgagcatgatgatgctggctggatatatccatctctcatgcctgacttgatgtaaaacgcccacatggggaccgaatgcccgatggctgttgctttcagtgtaggaccagctgtgtaggttcttgatgtgctgtttgctgtagtatgtcaaagacgttctagatctattgttagtaactagcaactaattgtagtagcctgtatttcttcaatcttctcccagggcgcctgtgctgaactcaaaactgttttagatctaagttgtgcattatgtatcactcatgttagtttgttaaaaagtgtgttagcattcgc

SEQ ID NO: 15699 - protein, 254 aa, Zea mays subsp. mays
  misc_feature (1)..(254): Ceres Seq. ID no. 12347731
MDGGGTHRTPEDVFRDFRARRAGMIKALTTDVEKFYQQCDPEKENLCLYGLPNETWEVNLPAEEVPPELPEPALGINFARDGMDEKDWLSLVAVHSDAWLLAVAFYFGARFGFDKESRKRLFVMINNLPTIYEVVTGTAKKQTKEKTPKSSSKSNKAGPKPPRQPEPNSRGSKMPPPKDEDDSGGEEEEEEEDHENTLCGSCGDNYGQDEFWICCDACETWFHGKCVKITPAKAEHIKHYKCPNCSGSGKRARA

SEQ ID NO: 15700 - protein, 231 aa, Zea mays subsp. mays
  misc_feature (1)..(231): Ceres Seq. ID no. 12347732
MIKALTTDVEKFYQQCDPEKENLCLYGLPNETWEVNLPAEEVPPELPEPALGINFARDGMDEKDWLSLVAVHSDAWLLAVAFYFGARFGFDKESRKRLFVMINNLPTIYEVVTGTAKKQTKEKTPKSSSKSNKAGPKPPRQPEPNSRGSKMPPPKDEDDSGGEEEEEEEDHENTLCGSCGDNYGQDEFWICCDACETWFHGKCVKITPAKAEHIKHYKCPNCSGSGKRARA

SEQ ID NO: 15701 - protein, 172 aa, Zea mays subsp. mays
  misc_feature (1)..(172): Ceres Seq. ID no. 12347733
MDEKDWLSLVAVHSDAWLLAVAFYFGARFGFDKESRKRLFVMINNLPTIYEVVTGTAKKQTKEKTPKSSSKSNKAGPKPPRQPEPNSRGSKMPPPKDEDDSGGEEEEEEEDHENTLCGSCGDNYGQDEFWICCDACETWFHGKCVKITPAKAEHIKHYKCPNCSGSGKRARA

SEQ ID NO: 15702 - DNA, 1426 bp, Zea mays subsp. mays
  misc_feature (1)..(1426): Ceres Seq. ID no. 12347763
aatccgttcagcggtcagcggaacatgatacggtctgcgcccttccaagcaatcacatcttcttccccgttataaatcgctcactcgctatcgtcggctacctgtatcctggcgacacccaacagcctgcttgccgcgcttgcattgaggggagttcggggagcggccggtgcggaaggaatcgacacagagttcagttcacatggctgctgaatcagagaacggcaactgcaaagcttgggcagcgagagatccttctggagttctctcaccacacagttttaaccgcagagcagtgcaaagcggcgatgtttcgctgaagatcatatactgtggagtctgttatgcagacgttgcttggacgcggaataagctcaatgattcaaaatatcctttggttcctgggcatgagatagctggagttgtaactcaggttggtgcagatgtcaaaggctttaaagtgggtgaccatgtaggtgttggaacatatgtgaactcttgccgtgattgtgagaactgcaatatctctctagacaaccattgcccaaaagcagtttatactttcaatggcattgatacagatggaactgtcacaaaggggggttactccactcacattgtagtccatgaaaggtattgcttcaaaatacccgatggctaccctttggcgaaggcagcacctcttctgtgtgctggaataaccgtgtatactccaatgatgcgacacaacatgaaccaacctggaaagtcacttggggtcattggtcttggtggtctgggtcacatggctgtgaaatttggtaaagcatttggtcttaaggtcacagttttcagtacaagtgaatcaaagagagatgaagccatcaacctccttggagcagataattttgttatatcatcagacacacagcaaatggagtccctgaagaactccctgcacttcataattgacactgcttccggtgaccatccatttgatccgtatttctctctccttaaggttggtggtgtgatgacattggtaggttttccaagtgagatcaaaatgcatcctgcaagccttatacttggtgcgcggaccttgtctggcagtgttgttggaggtataaaagacatccaagaaatggttaacttctgtgcagccaacaatatctatccggagattgagatcattaagatagattatatcaacgaggctctcgcgaggcttgttaatcgagatgtgaaataccgctttgtaatcgacatcgagaactccttcaagtagcgtgctagtgcacatgctctcgtctttctgttagtgttcaacagttcaagagctattacaaatgtgagtcatgccaaataaacttgatgtaaacaaccataattgaacagcaaggggaaacaggtatattgtgataatgaagtcgctctatgaatatcc

SEQ ID NO: 15703 - protein, 354 aa, Zea mays subsp. mays
  misc_feature (1)..(354): Ceres Seq. ID no. 12347764
MAAESENGNCKAWAARDPSGVLSPHSFNRRAVQSGDVSLKIIYCGVCYADVAWTRNKLNDSKYPLVPGHEIAGVVTQVGADVKGFKVGDHVGVGTYVNSCRDCENCNISLDNHCPKAVYTFNGIDTDGTVTKGGYSTHIVVHERYCFKIPDGYPLAKAAPLLCAGITVYTPMMRHNMNQPGKSLGVIGLGGLGHMAVKFGKAFGLKVTVFSTSESKRDEAINLLGADNFVISSDTQQMESLKNSLHFIIDTASGDHPFDPYFSLLKVGGVMTLVGFPSEIKMHPASLILGARTLSGSVVGGIKDIQEMVNFCAANNIYPEIEIIKIDYINEALARLVNRDVKYRFVIDIENSFK

SEQ ID NO: 15704 - protein, 183 aa, Zea mays subsp. mays
  misc_feature (1)..(183): Ceres Seq. ID no. 12347765
MMRHNMNQPGKSLGVIGLGGLGHMAVKFGKAFGLKVTVFSTSESKRDEAINLLGADNFVISSDTQQMESLKNSLHFIIDTASGDHPFDPYFSLLKVGGVMTLVGFPSEIKMHPASLILGARTLSGSVVGGIKDIQEMVNFCAANNIYPEIEIIKIDYINEALARLVNRDVKYRFVIDIENSFK

SEQ ID NO: 15705 - protein, 182 aa, Zea mays subsp. mays
  misc_feature (1)..(182): Ceres Seq. ID no. 12347766
MRHNMNQPGKSLGVIGLGGLGHMAVKFGKAFGLKVTVFSTSESKRDEAINLLGADNFVISSDTQQMESLKNSLHFIIDTASGDHPFDPYFSLLKVGGVMTLVGFPSEIKMHPASLILGARTLSGSVVGGIKDIQEMVNFCAANNIYPEIEIIKIDYINEALARLVNRDVKYRFVIDIENSFK

SEQ ID NO: 15706 - DNA, 1227 bp, Zea mays subsp. mays
  misc_feature (1)..(1227): Ceres Seq. ID no. 12347785
gcaagccacaaacccgcaccacggcaccagcgggcagcggccaccctagtcagccagtcggaacgaagccgcgcctcgcgccctcccctcgcgaccaccactgcttccagttctggtgcagtgtggaagagcgcccagtgggagagattcagagagaggcggcgatggcgcggcatttcgtgctgaacaccggcgccaaggtcccctatgttgggctcggcacatggcagtctgaccccggcgtcgtcggcaacgccgtctacgccgccgtcaaggcgggttaccgacacatcgattgtgccagagtttacggaaatgagaaggagattggtttggcgctgaagaagctatttgaagagggtgtagtgaagcgagaagatatgtttatcacctctaagttgtggaatgatcatcatgctcctgaagatgtgcctgaggcactaaatcacagcctgaatgatttgcagcttgagtacctggatctttatcttatccattggccatttagagtcaagaagggagcaaataccagtcctgaaaatttcgttacacctgacatccctgctacttggggggcaatggaaaagttatatgatgctggcaaagctcgtgccattggtgtgagtaacttttcctcaaagaaattgggtgacttgcttgctgtagctcgtgtacctccagccgttgatcaggtggaatgtcatcctggttggcagcaaactaagctccatagcttttgtcagtcaactggtgttcaactgcttactcaccactaggttcacctggtacaacttggatgaatggtaatgtccttaaagaaccaataatcatctcaatagctgagaaactcggaaaaactcctgcacaagtggctctgcgctggaacattcagatgggtcacagtgttcttccaaaaagcacgaatgaagaaaggataaagcaaaaccttgatgtttatgattggtcgattccagatgacttgctcgcaaagttctctgagattaagcaggataggctacttagaggcaacttcattgttaatcctgagagcgcttacaagacccatgaggagctctgggacggtgaactctaggaaggacaccgttgttttatcgtgagcagggagcagcgttccattagggtctgccatatcattttatctcctaatttgcgctttatctgaaatgaaggttcagtgctcggaagctctgatgccatcctttatcg

SEQ ID NO: 15707 - protein, 257 aa, Zea mays subsp. mays
  misc_feature (1)..(257): Ceres Seq. ID no. 12347786
KPQTRTTAPAGSGHPSQPVGTKPRLAPSPRDHHCFQFWCSVEERPVGEIQREAAMARHFVLNTGAKVPYVGLGTWQSDPGVVGNAVYAAVKAGYRHIDCARVYGNEKEIGLALKKLFEEGVVKREDMFITSKLWNDHHAPEDVPEALNHSLNDLQLEYLDLYLIHWPFRVKKGANTSPENFVTPDIPATWGAMEKLYDAGKARAIGVSNFSSKKLGDLLAVARVPPAVDQVECHPGWQQTKLHSFCQSTGVQLLTHH

SEQ ID NO: 15708 - protein, 203 aa, Zea mays subsp. mays
  misc_feature (1)..(203): Ceres Seq. ID no. 12347787
MARHFVLNTGAKVPYVGLGTWQSDPGVVGNAVYAAVKAGYRHIDCARVYGNEKEIGLALKKLFEEGVVKREDMFITSKLWNDHHAPEDVPEALNHSLNDLQLEYLDLYLIHWPFRVKKGANTSPENFVTPDIPATWGAMEKLYDAGKARAIGVSNFSSKKLGDLLAVARVPPAVDQVECHPGWQQTKLHSFCQSTGVQLLTHH

SEQ ID NO: 15709 - protein, 131 aa, Zea mays subsp. mays
  misc_feature (1)..(131): Ceres Seq. ID no. 12347788
MFITSKLWNDHHAPEDVPEALNHSLNDLQLEYLDLYLIHWPFRVKKGANTSPENFVTPDIPATWGAMEKLYDAGKARAIGVSNFSSKKLGDLLAVARVPPAVDQVECHPGWQQTKLHSFCQSTGVQLLTHH

SEQ ID NO: 15710 - DNA, 948 bp, Zea mays subsp. mays
  misc_feature (1)..(948): Ceres Seq. ID no. 12347805
atctcctttcagtaacagtatgcagccttaggagaagctaagctgtcttctaactctctctctcgagttcatagtttttgctcttcctctctcatggtcacaatgcttgcagctagttctctagtgaacagcaacctcgcttgctcatcaaggatatcatcctgttcagacttcacatatagccactcctggcgtcccatacatgctatgaaactccatcagatgcgtgctgtgagctcaatacgtataagttgtgctgccactaaacctgcaaagactcctgctgaagaagaatggaaagttaagcggcaactgctatcagaaaagcgggtacgaagtgtcgatgtgaaggaagcactgcgccttcaaaaggaaaacaactttgtcattcttgatgtcaggccagaagcagagtttaaagaggctcatccacctggcgccatcaatgtacaaatatacagattaatcaaggaatggacagcgtgggatattgcgaggcgtgcagcgtttgcgttcttcggcatatttgctggaacagaagagaatcctgagttcatacagagtgttgatacgaaggttgggaaagatgcgaagataattgtggcatgctctacaggagggacactgaagccaacgcaaaatttccctgatgggaagcaatctcggtccctgatagctgcgtacttgttggtcctgaatggctacagcaacgtgtaccatctggaaggaggactttacacatggttcaaagaaggactaccagctgttgcaggagaagagtaagagagacattacgaacatagtgttcgcatgctggagagagtggagagtggagactagagttgcgaggacttgtagtgatgtgcttgcttcacagtcacagggttgtcgattgttgtgtacggattgagatgtcgaagatttctcctgccaatgtgatgctgtcct

SEQ ID NO: 15711 - protein, 229 aa, Zea mays subsp. mays
  misc_feature (1)..(229): Ceres Seq. ID no. 12347806
MVTMLAASSLVNSNLACSSRISSCSDFTYSHSWRPIHAMKLHQMRAVSSIRISCAATKPAKTPAEEEWKVKRQLLSEKRVRSVDVKEALRLQKENNFVILDVRPEAEFKEAHPPGAINVQIYRLIKEWTAWDIARRAAFAFFGIFAGTEENPEFIQSVDTKVGKDAKIIVACSTGGTLKPTQNFPDGKQSRSLIAAYLLVLNGYSNVYHLEGGLYTWFKEGLPAVAGEE

SEQ ID NO: 15712 - protein, 226 aa, Zea mays subsp. mays
  misc_feature (1)..(226): Ceres Seq. ID no. 12347807
MLAASSLVNSNLACSSRISSCSDFTYSHSWRPIHAMKLHQMRAVSSIRISCAATKPAKTPAEEEWKVKRQLLSEKRVRSVDVKEALRLQKENNFVILDVRPEAEFKEAHPPGAINVQIYRLIKEWTAWDIARRAAFAFFGIFAGTEENPEFIQSVDTKVGKDAKIIVACSTGGTLKPTQNFPDGKQSRSLIAAYLLVLNGYSNVYHLEGGLYTWFKEGLPAVAGEE

SEQ ID NO: 15713 - protein, 191 aa, Zea mays subsp. mays
  misc_feature (1)..(191): Ceres Seq. ID no. 12347808
MKLHQMRAVSSIRISCAATKPAKTPAEEEWKVKRQLLSEKRVRSVDVKEALRLQKENNFVILDVRPEAEFKEAHPPGAINVQIYRLIKEWTAWDIARRAAFAFFGIFAGTEENPEFIQSVDTKVGKDAKIIVACSTGGTLKPTQNFPDGKQSRSLIAAYLLVLNGYSNVYHLEGGLYTWFKEGLPAVAGEE

SEQ ID NO: 15714 - DNA, 1763 bp, Zea mays subsp. mays
  misc_feature (1)..(1763): Ceres Seq. ID no. 12347809
actattgaagcagactccacccggcgcgtcctcgtctcgtctcgtctcgcacgcacccctcactttccttgtcaatcgactcgcgatcgaatccgccccgagtcgattccgccgcggaccgaccggttcacttcccttttctcccgagatctcgactctcgagcaagtatgggtgaggcgaaggacaacgaggtgtacgaggaggacctagtcgactatgaggaggaggtggagaatgtcattgatggcgcccccaccaacggctcctcagatgtcgtcaagaaggggtacgtagggatccacagctcggggttcagagacttcctgctcaagccagagcttcttcgcgccattcaggattgcgggtttgagcatccttctgaagtgcaacatgagtgcatccctcaagctattcttggaatggatgtcatctgtcaagcaaaatctggaatgggtaagactgcagtttttgtcctgtcaactcttcagcagattgatcctgttgctggccaagtagctgcacttgtgttgtgccacacaagagaattagcttaccagatttgccatgaatttgagaggtttagcaaatacctgcctgaattaagagtagctgttttctatggtggtgttcacataaaaaaccacaaggatctgctgaagaatgaatgcccccatattgtggttggcacgcctggaaggatactagctctagctagagataaggaccttcccttgaagaatgtgcggcatttcattcttgatgaatgtgacaagatgctcgaatcacttgacatgcgcagagatgtccaggagatcttcaaaatgactccgcatgataagcaagtgatgatgttttcagcaacactcagcaaggagattcgacctgtttgcaagaggttcatgcaagatcctatggaaatttatgttgatgatgaggctaaactgacccttcatggtctagttcagcactatatcaaattaagtgaggcagagaagaaccgaaagttgaacgatcttttagatgcactcgacttcaaccaagttgtgatatttgttaaaagtgttagtagagctgcagaactcaacaaattgctctgcgagtgcaatttcccctcaatctgtatacattctggaatgacacaggaagagaggttgacacggtacaagaacttcaaggaaggacacaagaggattcttgtggctactgatttggttggtaggggaatcgacattgaacgtgtcaacattgtcgtaaactatgatatgcctgattccgctgatacatacctgcatagggttggtcgggctggacgttttggtaccaagggacttgcaataacatttgtttcttcttcatctgattctgatgttctcaatcaagtgcaggagaggtttgaggttgacataaaggagctgcctgagcagattgacacgtcgacatacatgccatcttgatgatcgaggtgaaccagtgtttagtttgagctggaaaggagagcttgtttgaaatatacaccttagatcgctgttggacaaccttagcaccttgtttgaaagatgttccatttgtacttaaccagcagtctagtggattaagcagtaggcgtcgcaacagctgttacatgctacctaggattttatttgcaactctgtaatgttttctatgctccgactgctaattgttctgtttgagactgccctctgggtgcatgttttactagtaaattactcgcaccatgcccgagtcttcggagcatgtgttt

SEQ ID NO: 15715 - protein, 484 aa, Zea mays subsp. mays
  misc_feature (1)..(484): Ceres Seq. ID no. 12347810
TIEADSTRRVLVSSRLARTPHFPCQSTRDRIRPESIPPRTDRFTSLFSRDLDSRASMGEAKDNEVYEEDLVDYEEEVENVIDGAPTNGSSDVVKKGYVGIHSSGFRDFLLKPELLRAIQDCGFEHPSEVQHECIPQAILGMDVICQAKSGMGKTAVFVLSTLQQIDPVAGQVAALVLCHTRELAYQICHEFERFSKYLPELRVAVFYGGVHIKNHKDLLKNECPHIVVGTPGRILALARDKDLPLKNVRHFILDECDKMLESLDMRRDVQEIFKMTPHDKQVMMFSATLSKEIRPVCKRFMQDPMEIYVDDEAKLTLHGLVQHYIKLSEAEKNRKLNDLLDALDFNQVVIFVKSVSRAAELNKLLCECNFPSICIHSGMTQEERLTRYKNFKEGHKRILVATDLVGRGIDIERVNIVVNYDMPDSADTYLHRVGRAGRFGTKGLAITFVSSSSDSDVLNQVQERFEVDIKELPEQIDTSTYMPS

SEQ ID NO: 15716 - protein, 428 aa, Zea mays subsp. mays
  misc_feature (1)..(428): Ceres Seq. ID no. 12347811
MGEAKDNEVYEEDLVDYEEEVENVIDGAPTNGSSDVVKKGYVGIHSSGFRDFLLKPELLRAIQDCGFEHPSEVQHECIPQAILGMDVICQAKSGMGKTAVFVLSTLQQIDPVAGQVAALVLCHTRELAYQICHEFERFSKYLPELRVAVFYGGVHIKNHKDLLKNECPHIVVGTPGRILALARDKDLPLKNVRHFILDECDKMLESLDMRRDVQEIFKMTPHDKQVMMFSATLSKEIRPVCKRFMQDPMEIYVDDEAKLTLHGLVQHYIKLSEAEKNRKLNDLLDALDFNQVVIFVKSVSRAAELNKLLCECNFPSICIHSGMTQEERLTRYKNFKEGHKRILVATDLVGRGIDIERVNIVVNYDMPDSADTYLHRVGRAGRFGTKGLAITFVSSSSDSDVLNQVQERFEVDIKELPEQIDTSTYMPS

SEQ ID NO: 15717 - protein, 344 aa, Zea mays subsp. mays
  misc_feature (1)..(344): Ceres Seq. ID no. 12347812
MDVICQAKSGMGKTAVFVLSTLQQIDPVAGQVAALVLCHTRELAYQICHEFERFSKYLPELRVAVFYGGVHIKNHKDLLKNECPHIVVGTPGRILALARDKDLPLKNVRHFILDECDKMLESLDMRRDVQEIFKMTPHDKQVMMFSATLSKEIRPVCKRFMQDPMEIYVDDEAKLTLHGLVQHYIKLSEAEKNRKLNDLLDALDFNQVVIFVKSVSRAAELNKLLCECNFPSICIHSGMTQEERLTRYKNFKEGHKRILVATDLVGRGIDIERVNIVVNYDMPDSADTYLHRVGRAGRFGTKGLAITFVSSSSDSDVLNQVQERFEVDIKELPEQIDTSTYMPS

SEQ ID NO: 15718 - DNA, 1398 bp, Zea mays subsp. mays
  misc_feature (1)..(1398): Ceres Seq. ID no. 12347860
gttttttctctgacttttctgatttggtcctggcttctcctccttccccctcggatcggcggcagttcccgtgccctcacagtcacaggggacgcggctcgcctttccttccccgccaatccatccgctcttctcagcggcgagaagaagagatggggagcaacgccgccggcaagcctcctcctcctgctgctgctgctgtgtcgtgggagttccacgcgacggggcctcgcaacttgaccagccccggctggagggacctcatccgctccagctggagagatccaagctacagaaggatcgcagtgtcgtgcttcgtgcaggccgcgtatctgctggagctggacaggcaggagggcagagccggtgaagccgcgctcgctcccaactggtggaagcccttcaagtacaagctggtgcgcccgctcatcgactccagagacgggtccatctacggggcgcttctagaatgggaccagctcgccgccctcgctgacctgatagtggccaagcctcagggcgctcccaaggtggtcctcgcgctcaggggcaccgtgctgaggcagctgaccgtggtgagggacctggaagacgaccttcggttgtttgccctggagagcctgagggggtccgtcaggttcacaggcgcgctggaggtgctcaagtcggcgatccacaggcacggcagcgccaacgtgtgcgttgccggccactccctgggcgccggctttgcgctgcaggtcggcagggccttggccaaggatggaaccttcgtggagtgccatctgttcaacccgccgtcggtgtcacttggcacgggcctcaggaaaatccaggaaaaggccagcagtgtcctcaagcggtatatcagtagaagccgcggcggcggcggcagcggcagcagctcctcgtcgaatgtttccccaggaccaggagaggagctacaagccgccgctcgagatggagttggagaagaagagatgagcagggaggtcaaaagatgggtgccaaacctgtacgtgaacagctgcgactacatctgctgcttctacgctgaccgtagcggcgtcgctaccgtcaccgaggagaagcgttccggagtgcattccaagctgtacgtgatcgccaaaggaccgagcaagttcctggaggctcacgggctgcagcagtggtggtccgatgattctgagctccacttggccgtgcacgacagcaaactcatgtataggcaccttaagtccctctatgttgaacagtagtagagaaggcattggtacttgtttctcagaatgcctagtttttcttctctagtccagacaagaaaacatgtaaaccgtcagctgattaagagctccaactcttgcaactcctctaagcatatttcttctcttctcgcgc

SEQ ID NO: 15719 - protein, 418 aa, Zea mays subsp. mays
  misc_feature (1)..(418): Ceres Seq. ID no. 12347861
FFSDFSDLVLASPPSPSDRRQFPCPHSHRGRGSPFLPRQSIRSSQRREEEMGSNAAGKPPPPAAAAVSWEFHATGPRNLTSPGWRDLIRSSWRDPSYRRIAVSCFVQAAYLLELDRQEGRAGEAALAPNWWKPFKYKLVRPLIDSRDGSIYGALLEWDQLAALADLIVAKPQGAPKVVLALRGTVLRQLTVVRDLEDDLRLFALESLRGSVRFTGALEVLKSAIHRHGSANVCVAGHSLGAGFALQVGRALAKDGTFVECHLFNPPSVSLGTGLRKIQEKASSVLKRYISRSRGGGGSGSSSSSNVSPGPGEELQAAARDGVGEEEMSREVKRWVPNLYVNSCDYICCFYADRSGVATVTEEKRSGVHSKLYVIAKGPSKFLEAHGLQQWWSDDSELHLAVHDSKLMYRHLKSLYVEQ

SEQ ID NO: 15720 - protein, 368 aa, Zea mays subsp. mays
  misc_feature (1)..(368): Ceres Seq. ID no. 12347862
MGSNAAGKPPPPAAAAVSWEFHATGPRNLTSPGWRDLIRSSWRDPSYRRIAVSCFVQAAYLLELDRQEGRAGEAALAPNWWKPFKYKLVRPLIDSRDGSIYGALLEWDQLAALADLIVAKPQGAPKVVLALRGTVLRQLTVVRDLEDDLRLFALESLRGSVRFTGALEVLKSAIHRHGSANVCVAGHSLGAGFALQVGRALAKDGTFVECHLFNPPSVSLGTGLRKIQEKASSVLKRYISRSRGGGGSGSSSSSNVSPGPGEELQAAARDGVGEEEMSREVKRWVPNLYVNSCDYICCFYADRSGVATVTEEKRSGVHSKLYVIAKGPSKFLEAHGLQQWWSDDSELHLAVHDSKLMYRHLKSLYVEQ

SEQ ID NO: 15721 - DNA, 1255 bp, Zea mays subsp. mays
  misc_feature (1)..(1255): Ceres Seq. ID no. 12347891
cttcccttcctccttccttcccaggagccaggaactccattgcattatttccaccccaagaacacagcacagagtcggatccgaatccacaggagaggcataagcacaactcactccccactccccactcatcagtccctccacccatcagctagccatgggcaaggactgcggcaaacacggcgacgacgacctccggcgctcgtgcaggcgcctgctagccatcctcgtggtcctcgcgctgaccgttggcgtcgtcgcgctgatcgtctacctggtgctccgccccacgcacccgcgcttctacctgcaggacgcgtcgctccggcagctggacctctccaacgccaccaccagcaccagcaccagcaccctgctctccaccgcgatccaggtgacgctggcgtcgcgcaacccgaacgagcgcgtcggggtctactacgaccgcctcgacgtgtacgcgtcgtacaagtaccagcagctcacggtggcggcgtcgctgccgcccgcgtaccagggccacggggacgtcggcgtctggtcgccggtgctggccggtcccaacgtgcccctcgcgccctacctcgccgacgcgctccgccaggactgccaggcggggtacctcgtcctccaggtcaagctcgacggccgcgtccgctggaaggtcggcagctgcgtctccagccactaccacctcttcgtcacctgcccggccttcctcgtcaccgccggcggcaacggcgcgcccggggccgccgggttcaggttccagaccaccacctactgccacgtcgaggtctaggtctaggtctagccggccccttgcctgtctgtgctgctgtgttgtccgtactccgtatacaaacagaggccgccgcctgcgaaggaaacagagatacaaaggcctgccttgcgccatatatcatgggatggctgcctgtctccctcactctctctctctctctctcagctgcactgcctgcattgctggtgtgttactgctgcagttatgcggacgtaaaggatggtaaaaatttcctactttttttcttcttcttttaagtaagattctcctttaacgtacgatcaattacagttggaggggtagcagtaacagtaatttctatgtccagccatttcggtgagactactttcaacacagagaaaaccgattgtacctttgcgcgtctctcttaattaagtcttatgactgatttggtaatcagagaattgaatagaaatgaaatttctctcc

SEQ ID NO: 15722 - protein, 353 aa, Zea mays subsp. mays
  misc_feature (1)..(353): Ceres Seq. ID no. 12347892
LPFLLPSQEPGTPLHYFHPKNTAQSRIRIHRRGISTTHSPLPTHQSLHPSASHGQGLRQTRRRRPPALVQAPASHPRGPRADRWRRRADRLPGAPPHAPALLPAGRVAPAAGPLQRHHQHQHQHPALHRDPGDAGVAQPERARRGLLRPPRRVRVVQVPAAHGGGVAAARVPGPRGRRRLVAGAGRSQRAPRALPRRRAPPGLPGGVPRPPGQARRPRPLEGRQLRLQPLPPLRHLPGLPRHRRRQRRARGRRVQVPDHHLLPRRGLGLGLAGPLPVCAAVLSVLRIQTEAAACEGNRDTKACLAPYIMGWLPVSLTLSLSLSAALPALLVCYCCSYADVKDGKNFLLFFFFF

SEQ ID NO: 15723 - protein, 214 aa, Zea mays subsp. mays
  misc_feature (1)..(214): Ceres Seq. ID no. 12347893
MGKDCGKHGDDDLRRSCRRLLAILVVLALTVGVVALIVYLVLRPTHPRFYLQDASLRQLDLSNATTSTSTSTLLSTAIQVTLASRNPNERVGVYYDRLDVYASYKYQQLTVAASLPPAYQGHGDVGVWSPVLAGPNVPLAPYLADALRQDCQAGYLVLQVKLDGRVRWKVGSCVSSHYHLFVTCPAFLVTAGGNGAPGAAGFRFQTTTYCHVEV

SEQ ID NO: 15724 - DNA, 1715 bp, Zea mays subsp. mays
  misc_feature (1)..(1715): Ceres Seq. ID no. 12347925
acacgcctctcttgctcaccattctcttctaaccagccaagccaaggcgcatctagcgagctgagcagcaatggcggctgctacttcttctaggcgccctgcagctgctctgctggtcctggcagcagccgtcgtggccctggcggccgagggggccaggtacccgccgctggcgccgggcctgtcgttcgacttctacaagaagagctgccccaaggcggagtccatcgtgcgggagttcctggcgtcggcggtccggcagaacgtggggctcgccgcggcgctgatccggctccacttccacgactgcttcgtgcagggctgcgacgcctccatcctgctggacgccacgcccacccagcccagcgagcagcagtcgccgcccaacctcacgctccgccccgccgcgttcaaggccgtcaacgacatccgcgcccgcctcgaccaggcctgcggccgcgtcgtctcctgcgccgacatcgtcgcgctcgccgcacgtgaatccgtcgccctgggtggcggcccggcgtacaagttgccactgggcaggcgcgacgggctggcgccggcatcgaacgccgccgtcctagcggcgctcccaccgccgacgtccaaggtgccgacgctgctgtccttcctggcgaagatcaacctggacgtgacggacctggtggcgctgtcgggcgggcacacggtgggcatcgcgcactgcggctccttcgacaaccggctgttcccgacgcaggacccgacgctgaacaagttcttcgcggggcagctgtaccggacctgcccgaccaacgcgacggtgaacacgacggccaacgacgtccgcacgcccaacgccttcgacaacaagtactacgtggacctgctcaaccgggagggcctcttcacgtcggaccaggacctgctgaccaacgccaccacgcgccccatcgtcacgcgcttcgccgtcgaccaggacgccttcttcgaccagttcgtctactcctacgtcaagatggggcaggtcaacgtgctcacgggctcccagggacaggtccgcgccaactgctccgcgcgcaacggcgccgctgctggtgacagtgacctgccgtggtcgtccgtcgtcatcgagacagtcgccgacgccgccggtagcctcgtgctctagataataagcaaataagtagtttgaagctttcttcgcatgcatgttgcaacaaataagcagctagtagcgttggaaataaagcagctagtagcgatcgttattacagaaacgacgacgacgtcgatggcaatggcagcatgctctgcagggagagcgctggcgcgggcaccagtagatgatccctgtccgcgcgggcccgggctcagccgaccaatcgatgtcaaccgcggcagcagtagcatagctaaggcatccgccgccgcacgccgactcggccacgtgatcgctgtcggactggaacacgatccagcctcgctcgctccatcgtctaataagagggtggcggtggcgaatattggaattggaccttccgggagaaaatatatcttggatgcccgtcaagacatctttcaatggtttccacagaaataatttaaaggaggctgactaatgtcagccacgtgtctcccgggtctgaacctagctaggttggaaccccttgacgcaaggaatcctctaaattgtatactctaaaaaaagaatatttatagttcttttt

SEQ ID NO: 15725 - protein, 361 aa, Zea mays subsp. mays
  misc_feature (1)..(361): Ceres Seq. ID no. 12347926
MAAATSSRRPAAALLVLAAAVVALAAEGARYPPLAPGLSFDFYKKSCPKAESIVREFLASAVRQNVGLAAALIRLHFHDCFVQGCDASILLDATPTQPSEQQSPPNLTLRPAAFKAVNDIRARLDQACGRVVSCADIVALAARESVALGGGPAYKLPLGRRDGLAPASNAAVLAALPPPTSKVPTLLSFLAKINLDVTDLVALSGGHTVGIAHCGSFDNRLFPTQDPTLNKFFAGQLYRTCPTNATVNTTANDVRTPNAFDNKYYVDLLNREGLFTSDQDLLTNATTRPIVTRFAVDQDAFFDQFVYSYVKMGQVNVLTGSQGQVRANCSARNGAAAGDSDLPWSSVVIETVADAAGSLVL

SEQ ID NO: 15726 - DNA, 1344 bp, Zea mays subsp. mays
  misc_feature (1)..(1344): Ceres Seq. ID no. 12347927
actcgaaaagaaaactagccgggcacgttacgctcaccaccataccgtcccacgcggcctccccaactaaccctatcccccggcgaccgggaactgcaaccgatggaccgcctcgtcgtcttctcccgccgccgccgccgctggatcctcctcgctgcggccggtgcggcggcggccgtcggcgcgtacaagatctaccaccaccctgccgtcgcggaacgtcgccgccgcctcgtgcgcctagccgccgccatcgcggccttcgctgatgccgccgcatcatccgccgacgccgtggccctggtgacatccgatctcgccgactttgtccgttccgacgcggacgaggtcccccgcagcgtcaagcagctggccaagctcgcctcctcccctgaggtatccgccaccgtctccaccctatccgaggcagtaacctccgggatcctccgcgggtcgggatcctctagctccgggcccgcatccggcggtaccgtggccctctccgatcgtctcgtagacaggctcttctctgactcaggcgagcgcctcgcgtccgcggttgccggcagcttcgcccgccatctcgtcctcgccttttactccgctccttcaccacaaggggaggcgtcctcctccccgacgatgtgggtcaacgtggttgcgactggaaagtgccggaaggcgataagcaactgggttgaggtcttcgtggggactgctgtgagggagttcattgacaagaccatccacatcaacacctacgagcagctcttcgaagggctcaccaatccgagacatgacgctaaggtcaaggaattgcttgtttcagtgtgcaatgctgcggttgagactttggtgaagaccactcaccatgccctgtacagtactaatggcaacttgggtgcaaatggtagtgtcagtggcaatgccaatgaagctggggaagggtgggtggagacggtgtcgagctcgttggcagttcctagcaacaggaagtttgtgcttgatgttacagggagggtcacatttgagacagtgcggtcatttctggagtttgttctttggaagctgcaggatggggcaaggaagggcggtggctccgtggttgacagtggcctccgtgtcgtgaggtatatgagcgataagtcgatggttatcgccacaatctgtattacgttgtgcttgcatgtgttgaatgggactaggctcttggtaacagcctaatagtgtacttgtttggttttcctattttttgcacattgtttgtgtaaaactgtaggaatcatactgaaactgtaaatccaaaaggaatggaaataatagaaataacatgaattgtgctgt

SEQ ID NO: 15727 - protein, 373 aa, Zea mays subsp. mays
  misc_feature (1)..(373): Ceres Seq. ID no. 12347928
MDRLVVFSRRRRRWILLAAAGAAAAVGAYKIYHHPAVAERRRRLVRLAAAIAAFADAAASSADAVALVTSDLADFVRSDADEVPRSVKQLAKLASSPEVSATVSTLSEAVTSGILRGSGSSSSGPASGGTVALSDRLVDRLFSDSGERLASAVAGSFARHLVLAFYSAPSPQGEASSSPTMWVNVVATGKCRKAISNWVEVFVGTAVREFIDKTIHINTYEQLFEGLTNPRHDAKVKELLVSVCNAAVETLVKTTHHALYSTNGNLGANGSVSGNANEAGEGWVETVSSSLAVPSNRKFVLDVTGRVTFETVRSFLEFVLWKLQDGARKGGGSVVDSGLRVVRYMSDKSMVIATICITLCLHVLNGTRLLVTA

SEQ ID NO: 15728 - protein, 193 aa, Zea mays subsp. mays
  misc_feature (1)..(193): Ceres Seq. ID no. 12347929
MWVNVVATGKCRKAISNWVEVFVGTAVREFIDKTIHINTYEQLFEGLTNPRHDAKVKELLVSVCNAAVETLVKTTHHALYSTNGNLGANGSVSGNANEAGEGWVETVSSSLAVPSNRKFVLDVTGRVTFETVRSFLEFVLWKLQDGARKGGGSVVDSGLRVVRYMSDKSMVIATICITLCLHVLNGTRLLVTA

SEQ ID NO: 15729 - DNA, 1400 bp, Zea mays subsp. mays
  misc_feature (1)..(1400): Ceres Seq. ID no. 12347987
gaacatcctaatcaaaaccgctcgatcgcgcccccatcaatcaatcaatcaattctcgacctcactactcgatctctcgtctcatcagtgtgactgtgtgagtgtccgagcacggtagcacgcgcaatggacgctctgctcgtgactaccttcctcgtccccgtggtggcgctcctcctcggttccgggtccgggtccgcggcaccgctgccgcgcgccttcttcgtgttcggtgactccctcgtggacaacggcaacaacaactacctgatgacgacggcgcgcgccgacgcgccgccctacgggatcgacttccccacgcacatggccacggggaggttctccaacgggctgaacatccccgacatcatcagcgagcacctgggctcccagcccgcgctgccgtacctgagccccgacctccgcggcgcccagctcctggtgggcgccaacttcgcgtccgccggcgtcggcatcctcaacgacaccggcatacagttcgtgaacatcatcaggatcggacagcagctgcgcaacttccaggagtaccagcagaggctggcggcgttcgtcggcgaggacgcggcgcggcaggccgtcagcgacgcgctcgtgctcatcacgctcggcggcaacgacttcgtcaacaactactacctggtgcccttctccgtccgctctcgccagtttgccatccaagactacgtcccctacctcatctccgagtacaggaagatcctcacgcggctgtacgagctcggggcccggcgcgtggtggtgacgggcaccgggatgatcgggtgcgtgccggcggagctcgccatgcacagcgtcgacggcgagtgcgcgcgcgacctcacggaggcggccgacctcttcaacccgcagctggtgcagatgctctccgagctcaacgccgacatcggcgccgacgtcttcatcgccgccaacaccaaccgggtcagcttcgacttcatgttcaacccgcaggactacgggttcgtgacgtccaaggtggcgtgctgcgggcagggcccctacaacgggatcgggctgtgcacgccggcgtccaacgtgtgccccaaccgggacgtgtacgcgtactgggacgcgttccaccccacggagcgcgccaaccggatcatcgtcggccagttcatgcacggatccaccgaccacatcagccccatgaacatcagcaccatcctcgccatggacaacaggaactaggccctgcgcgtggcgtgcctcgacctcgatccatccatctctagccggctgggattgagatgccaatctgcactgccatggatccgtcccgacactggcagctataatactacgagacgacacacatagctactgcatgcatgcgtaatactactagtataagttcgtgc

SEQ ID NO: 15730 - protein, 367 aa, Zea mays subsp. mays
  misc_feature (1)..(367): Ceres Seq. ID no. 12347988
MDALLVTTFLVPVVALLLGSGSGSAAPLPRAFFVFGDSLVDNGNNNYLMTTARADAPPYGIDFPTHMATGRFSNGLNIPDIISEHLGSQPALPYLSPDLRGAQLLVGANFASAGVGILNDTGIQFVNIIRIGQQLRNFQEYQQRLAAFVGEDAARQAVSDALVLITLGGNDFVNNYYLVPFSVRSRQFAIQDYVPYLISEYRKILTRLYELGARRVVVTGTGMIGCVPAELAMHSVDGECARDLTEAADLFNPQLVQMLSELNADIGADVFIAANTNRVSFDFMFNPQDYGFVTSKVACCGQGPYNGIGLCTPASNVCPNRDVYAYWDAFHPTERANRIIVGQFMHGSTDHISPMNISTILAMDNRN

SEQ ID NO: 15731 - protein, 319 aa, Zea mays subsp. mays
  misc_feature (1)..(319): Ceres Seq. ID no. 12347989
MTTARADAPPYGIDFPTHMATGRFSNGLNIPDIISEHLGSQPALPYLSPDLRGAQLLVGANFASAGVGILNDTGIQFVNIIRIGQQLRNFQEYQQRLAAFVGEDAARQAVSDALVLITLGGNDFVNNYYLVPFSVRSRQFAIQDYVPYLISEYRKILTRLYELGARRVVVTGTGMIGCVPAELAMHSVDGECARDLTEAADLFNPQLVQMLSELNADIGADVFIAANTNRVSFDFMFNPQDYGFVTSKVACCGQGPYNGIGLCTPASNVCPNRDVYAYWDAFHPTERANRIIVGQFMHGSTDHISPMNISTILAMDNRN

SEQ ID NO: 15732 - protein, 301 aa, Zea mays subsp. mays
  misc_feature (1)..(301): Ceres Seq. ID no. 12347990
MATGRFSNGLNIPDIISEHLGSQPALPYLSPDLRGAQLLVGANFASAGVGILNDTGIQFVNIIRIGQQLRNFQEYQQRLAAFVGEDAARQAVSDALVLITLGGNDFVNNYYLVPFSVRSRQFAIQDYVPYLISEYRKILTRLYELGARRVVVTGTGMIGCVPAELAMHSVDGECARDLTEAADLFNPQLVQMLSELNADIGADVFIAANTNRVSFDFMFNPQDYGFVTSKVACCGQGPYNGIGLCTPASNVCPNRDVYAYWDAFHPTERANRIIVGQFMHGSTDHISPMNISTILAMDNRN

SEQ ID NO: 15733 - DNA, 1653 bp, Zea mays subsp. mays
  misc_feature (1)..(1653): Ceres Seq. ID no. 12347991
aaaaactcctcaagcaatttccatttccaccacgaccactctcttcctcgcagcgcgtaccaacccgccgccgtctactgccactccgcctgctcatggcctcccctacgcaaggtgatgcccccctcgcggctccggctccggcggctgacgctacggacgcggccttcgccgccgcggccgcggtgccggatccaggcgcagagttcgggttccagcgtccggagctcgggaaggagaagctggtcgggacgggtggggttccacgagcgccatgtgttcctctgttacaagggcccggatttgtggccgtcccacctcgaggcctctgagtctgaccgcctcccccgcctcctcgccgccgccatcaaggcccgaaagcccaatctgaagaagaccatcaaattgaccatctgtgaaggagaagatggcactgaatcatcaaatggagatgtgttgatctttccagatatgatcagatataaagggctgacccattttgatgtggacaactttgttgaagaagtgcttgtgaaggatattgactggcttcctagatctcctgagcctatgagtggttcctatatttttgtttgctcccatggaagcagggacaaaaggtgtggtgtttgtggacctgctttgattaaaaggttcaaggaagagataaatgaactgggacttgatgatcaggtggctgtcagtgcatgctcacacgtgggaggtcataagtatgcaggaaatgtcatcattttcagttctgatgccaagggagaagtgactggtcattggtatggttatgttgttcctgatgatgtgcctgttttgctgcataaacatattggacaaggagaagttgtggaccatctatggaggggacagatgggtttatctgtggagcagcagaagcgagctctcgagcttcggaacatggtaaatggtggcgaagaatcccttgaagaaaccagaacagatggtgcttctttcaaccctgcagcagctggtggatgctgccaaggcaatggtggcttcacctgctgccaaactgacctgccaaaggaaaaacaagacaagagcatcatagctgagcagaaccccaagagctctgacaaggagggtggtgctggcagcaagaagggggatacaaagacttgcccagtgcccatctggtttgagacctgggagagagctgacacatatgccgctcttgctgttgttgcagctgccacagcggtgcttgtctccttcagaatctacaagaacctcaactgaagaacatgggagatcctggaagaggtgcccgaaacaagtatatgtgaaacagcttactgtgataagtctgggatgagaataaatttacctgtgcataatgctaggcttaggctatgggctatggctagcaaatcgttgtgcaaaatactgttgtatattgtttacaaagtgatgtttgaaatagaagataacggtgatgaacaagccgttggagatagccttagaacctcaaagtagcttatctggagatggagacggcgatgaaaagatgttgctgccagtgttctcgtatgtgaactccttgtgaacctccactgcaattgaagtttcgatgccttagctgctgtttatcataagcaaggcgatgggatcggcatcacc

SEQ ID NO: 15734 - protein, 423 aa, Zea mays subsp. mays
  misc_feature (1)..(423): Ceres Seq. ID no. 12347992
KNSSSNFHFHHDHSLPRSAYQPAAVYCHSACSWPPLRKVMPPSRLRLRRLTLRTRPSPPRPRCRIQAQSSGSSVRSSGRRSWSGRVGFHERHVFLCYKGPDLWPSHLEASESDRLPRLLAAAIKARKPNLKKTIKLTICEGEDGTESSNGDVLIFPDMIRYKGLTHFDVDNFVEEVLVKDIDWLPRSPEPMSGSYIFVCSHGSRDKRCGVCGPALIKRFKEEINELGLDDQVAVSACSHVGGHKYAGNVIIFSSDAKGEVTGHWYGYVVPDDVPVLLHKHIGQGEVVDHLWRGQMGLSVEQQKRALELRNMVNGGEESLEETRTDGASFNPAAAGGCCQGNGGFTCCQTDLPKEKQDKSIIAEQNPKSSDKEGGAGSKKGDTKTCPVPIWFETWERADTYAALAVVAAATAVLVSFRIYKNLN

SEQ ID NO: 15735 - protein, 384 aa, Zea mays subsp. mays
  misc_feature (1)..(384): Ceres Seq. ID no. 12347993
MPPSRLRLRRLTLRTRPSPPRPRCRIQAQSSGSSVRSSGRRSWSGRVGFHERHVFLCYKGPDLWPSHLEASESDRLPRLLAAAIKARKPNLKKTIKLTICEGEDGTESSNGDVLIFPDMIRYKGLTHFDVDNFVEEVLVKDIDWLPRSPEPMSGSYIFVCSHGSRDKRCGVCGPALIKRFKEEINELGLDDQVAVSACSHVGGHKYAGNVIIFSSDAKGEVTGHWYGYVVPDDVPVLLHKHIGQGEVVDHLWRGQMGLSVEQQKRALELRNMVNGGEESLEETRTDGASFNPAAAGGCCQGNGGFTCCQTDLPKEKQDKSIIAEQNPKSSDKEGGAGSKKGDTKTCPVPIWFETWERADTYAALAVVAAATAVLVSFRIYKNLN

SEQ ID NO: 15736 - protein, 266 aa, Zea mays subsp. mays
  misc_feature (1)..(266): Ceres Seq. ID no. 12347994
MIRYKGLTHFDVDNFVEEVLVKDIDWLPRSPEPMSGSYIFVCSHGSRDKRCGVCGPALIKRFKEEINELGLDDQVAVSACSHVGGHKYAGNVIIFSSDAKGEVTGHWYGYVVPDDVPVLLHKHIGQGEVVDHLWRGQMGLSVEQQKRALELRNMVNGGEESLEETRTDGASFNPAAAGGCCQGNGGFTCCQTDLPKEKQDKSIIAEQNPKSSDKEGGAGSKKGDTKTCPVPIWFETWERADTYAALAVVAAATAVLVSFRIYKNLN

SEQ ID NO: 15737 - DNA, 1345 bp, Zea mays subsp. mays
  misc_feature (1)..(1345): Ceres Seq. ID no. 12348011
actccggcattcgcccccaaaaaatcgagccgaaaaagatcaaaagaaaaaaaaaagaagaaaaaaaaccctaaccactccgatcgaatcatccgagggccgcagcagcccgacgaggctatgtctcaggcaaccgccgcctcccgggatcgcttcccctggtgatacaactcgggccgttcatttcatctttccgtggggatatgagggccgctccgaccgatccgcccacggcgccggcgaagtcgatgctgaggcggctgttcgatcgccagctcctgcggatctcgccagcggagcgtctaccgtcggcgggggcgggagagaaggatgaggcggagccgagctccgtgtgcctggacggcatggtgcgcagcttcatggaggacgacgtcggcagcgagaaggctgcccacgggggccggtactgtaactgcttccacggaggcgataattcagatgacgaggaggacgacgaagcggcggcggcggcctccgacgtcgccgagacgatcaagggcctcgtccactgcgccacgcttcgggagcgcaacctcctcgccgacgtgtgcgcgcacctggagcggcatcgcgaggcgggggcccggcggcgcgacctcctccgcctggtagcctcgtcgctgcgcggcgcggggcacgacgcctccgtctgcgtctcccgctgggacaagtccccgtcccacccggtcggcgagcacgcttacatcgacgtgctcctcccggcggcctcggaccgcggcgcgcgcgagcgcgtcctggtggacgtggacttccggtcggcgttcgaggtcgcgcgacccaccaaggcgtaccgcgccctgctgcagcggctgccggcggtgttcgtgggcaaggacgacaggctccgcctcctcgttgccgccgccgccgacgccgcgcgcgccagcctcaagaagcgcggcctccacctcccgccctggcgtaagcccgagtacatgcgcgccaagtggctctccccctaccaccgcgaggcgccggtggccgaagaggcggcctccgcctccgcggacgaggacgacgggttcggacccggaaccggaaccgccgcgtgacaactggacacttgcaatttttgtcttggaagaggttgtagctgcaaaagcttgagattctcttgaaattactctttgttcgggggttgtacctagagtaactatggactacggtgtgtgtgagagagagagagaggtatgcatcactcatcactgtgctgagtaccgcgcgagaaatgaaggcgaggggtatatcatgggtagtgctagttttaggaagagaaataaagcaaaatatcggattaatatcc

SEQ ID NO: 15738 - protein, 296 aa, Zea mays subsp. mays
  misc_feature (1)..(296): Ceres Seq. ID no. 12348012
MRAAPTDPPTAPAKSMLRRLFDRQLLRISPAERLPSAGAGEKDEAEPSSVCLDGMVRSFMEDDVGSEKAAHGGRYCNCFHGGDNSDDEEDDEAAAAASDVAETIKGLVHCATLRERNLLADVCAHLERHREAGARRRDLLRLVASSLRGAGHDASVCVSRWDKSPSHPVGEHAYIDVLLPAASDRGARERVLVDVDFRSAFEVARPTKAYRALLQRLPAVFVGKDDRLRLLVAAAADAARASLKKRGLHLPPWRKPEYMRAKWLSPYHREAPVAEEAASASADEDDGFGPGTGTAA

SEQ ID NO: 15739 - protein, 281 aa, Zea mays subsp. mays
  misc_feature (1)..(281): Ceres Seq. ID no. 12348013
MLRRLFDRQLLRISPAERLPSAGAGEKDEAEPSSVCLDGMVRSFMEDDVGSEKAAHGGRYCNCFHGGDNSDDEEDDEAAAAASDVAETIKGLVHCATLRERNLLADVCAHLERHREAGARRRDLLRLVASSLRGAGHDASVCVSRWDKSPSHPVGEHAYIDVLLPAASDRGARERVLVDVDFRSAFEVARPTKAYRALLQRLPAVFVGKDDRLRLLVAAAADAARASLKKRGLHLPPWRKPEYMRAKWLSPYHREAPVAEEAASASADEDDGFGPGTGTAA

SEQ ID NO: 15740 - protein, 242 aa, Zea mays subsp. mays
  misc_feature (1)..(242): Ceres Seq. ID no. 12348014
MVRSFMEDDVGSEKAAHGGRYCNCFHGGDNSDDEEDDEAAAAASDVAETIKGLVHCATLRERNLLADVCAHLERHREAGARRRDLLRLVASSLRGAGHDASVCVSRWDKSPSHPVGEHAYIDVLLPAASDRGARERVLVDVDFRSAFEVARPTKAYRALLQRLPAVFVGKDDRLRLLVAAAADAARASLKKRGLHLPPWRKPEYMRAKWLSPYHREAPVAEEAASASADEDDGFGPGTGTAA

SEQ ID NO: 15741 - DNA, 1704 bp, Zea mays subsp. mays
  misc_feature (1)..(1704): Ceres Seq. ID no. 12348030
actcatctccagtctccctctccactctgcggcccggtcgatccccattccgatccatcgcacgggcagcgcccagtccggttcactcatggagtctctagtggctgcgctccccgcgggcggcgctgcggcggcggcggccttcggtgggctggtggccgctgccgcgctcgccggaaaggtcggccttgtcgggtccaagaaacacctcaacgcgcccccagctgtctctggtttacccctgattgggaatcttcatcagttgaaagagaagaaacctcaccagacctttacaaagtgggcagaaatttatgggccaatttacactataaggaccggttcttctactgtagttgtgctcaattcagcccaagtagccaaggaggcaatgattgcaaaattctcatcaatatctactcgaaagctatcgaaggcattgtcagcgctcacccgtgacaaaactatggttgctacaagtgactatggtgacttccacaaaatgattaagcgttatatcatgacattcatgttgggtacttctggccagaaacaatttagggacacaagaaacatgatggttgacaacatgttgaacactttccatacattgttgatggatgatccaaattctcctctgaacttccgggaagttttcaagaatgaattatttcgcttatccctggttcaggctttaggcgaggatgtgagttcaatctatgtggaagagtatggaaaggttatatcaaaggaggaaatctacaaggccactgtggttgacatgatgatgtgtgcaattgaggtcgactggagggatttcttcccgtacctcagctggattccaaataggaccttcgaaacaagagtactgactaccgaagcgaggagaactaccgtgatgcaagccttgatcaagcagcaaaaggaaagaattgcacgtggggagactaggatatcctacctggacttcctgctggcagagaatacactgactgatgaacaattactaatgctggtgtgggaagcagtcatagaagctgctgatactactttggtcacgaccgagtgggctatgtatgagattgcgaagcacccagaaaaacaggaatacctttatcaagaaatccaaaaagtctgcggcaataagacagttaccgaggatcacctgccagagttaccgtacttgaacgcggtgttccatgagaccatgaggcggcattctccagttccattagtgcctccaagattggtccatgagaataccaacttggctggctatgaggttccagccggcacagagataatcatcaatctgtacgggtgcaacatgaacaaaaacgactgggccgagcctgaggaatggaagccagagaggtttctggacgggaggtttgaagcagtggatatgcacaagaccatggcctttggcgcaggaaggagggcctgtgctggcagcatgcaggcgatgaacatctcgtgcaccgccatcggcaggtttgtgcaagagtttgcctggaggctcgaggaaggcgacgaggacaaggttgacaccatccagcttacaaccaacaggctttacccactgcatgtgtacctcgcacctagaggaaggaaatgagcctctactgtaaacgggtttcactgtactaatttaaaaaaataatttgctgttgcctgtgtatgacttttggatgatctctatgctgc

SEQ ID NO: 15742 - protein, 537 aa, Zea mays subsp. mays
  misc_feature (1)..(537): Ceres Seq. ID no. 12348031
LISSLPLHSAARSIPIPIHRTGSAQSGSLMESLVAALPAGGAAAAAAFGGLVAAAALAGKVGLVGSKKHLNAPPAVSGLPLIGNLHQLKEKKPHQTFTKWAEIYGPIYTIRTGSSTVVVLNSAQVAKEAMIAKFSSISTRKLSKALSALTRDKTMVATSDYGDFHKMIKRYIMTFMLGTSGQKQFRDTRNMMVDNMLNTFHTLLMDDPNSPLNFREVFKNELFRLSLVQALGEDVSSIYVEEYGKVISKEEIYKATVVDMMMCAIEVDWRDFFPYLSWIPNRTFETRVLTTEARRTTVMQALIKQQKERIARGETRISYLDFLLAENTLTDEQLLMLVWEAVIEAADTTLVTTEWAMYEIAKHPEKQEYLYQEIQKVCGNKTVTEDHLPELPYLNAVFHETMRRHSPVPLVPPRLVHENTNLAGYEVPAGTEIIINLYGCNMNKNDWAEPEEWKPERFLDGRFEAVDMHKTMAFGAGRRACAGSMQAMNISCTAIGRFVQEFAWRLEEGDEDKVDTIQLTTNRLYPLHVYLAPRGRK

SEQ ID NO: 15743 - protein, 508 aa, Zea mays subsp. mays
  misc_feature (1)..(508): Ceres Seq. ID no. 12348032
MESLVAALPAGGAAAAAAFGGLVAAAALAGKVGLVGSKKHLNAPPAVSGLPLIGNLHQLKEKKPHQTFTKWAEIYGPIYTIRTGSSTVVVLNSAQVAKEAMIAKFSSISTRKLSKALSALTRDKTMVATSDYGDFHKMIKRYIMTFMLGTSGQKQFRDTRNMMVDNMLNTFHTLLMDDPNSPLNFREVFKNELFRLSLVQALGEDVSSIYVEEYGKVISKEEIYKATVVDMMMCAIEVDWRDFFPYLSWIPNRTFETRVLTTEARRTTVMQALIKQQKERIARGETRISYLDFLLAENTLTDEQLLMLVWEAVIEAADTTLVTTEWAMYEIAKHPEKQEYLYQEIQKVCGNKTVTEDHLPELPYLNAVFHETMRRHSPVPLVPPRLVHENTNLAGYEVPAGTEIIINLYGCNMNKNDWAEPEEWKPERFLDGRFEAVDMHKTMAFGAGRRACAGSMQAMNISCTAIGRFVQEFAWRLEEGDEDKVDTIQLTTNRLYPLHVYLAPRGRK

SEQ ID NO: 15744 - protein, 408 aa, Zea mays subsp. mays
  misc_feature (1)..(408): Ceres Seq. ID no. 12348033
MIAKFSSISTRKLSKALSALTRDKTMVATSDYGDFHKMIKRYIMTFMLGTSGQKQFRDTRNMMVDNMLNTFHTLLMDDPNSPLNFREVFKNELFRLSLVQALGEDVSSIYVEEYGKVISKEEIYKATVVDMMMCAIEVDWRDFFPYLSWIPNRTFETRVLTTEARRTTVMQALIKQQKERIARGETRISYLDFLLAENTLTDEQLLMLVWEAVIEAADTTLVTTEWAMYEIAKHPEKQEYLYQEIQKVCGNKTVTEDHLPELPYLNAVFHETMRRHSPVPLVPPRLVHENTNLAGYEVPAGTEIIINLYGCNMNKNDWAEPEEWKPERFLDGRFEAVDMHKTMAFGAGRRACAGSMQAMNISCTAIGRFVQEFAWRLEEGDEDKVDTIQLTTNRLYPLHVYLAPRGRK

SEQ ID NO: 15745 - DNA, 804 bp, Zea mays subsp. mays
  misc_feature (1)..(804): Ceres Seq. ID no. 12348060
gaaaattgaaaaccctataatcctccccaaaggcccaaacctatcgcccgtacgagactgcgccgccgttgccgtctcctcctccgtcccatcactctgctgctcgcgcactctcacctgcccgcgccgtcttcgaccgccaccaagatgaacaaggagaggctcatgaagatggccggcgccgtccgcaccggcggcaagggcaccatgcgcaggaagaagaaggctgtacacaagacggtcaccacggacgacaagaggctgcagggcactctcaagagagtaggggtcaacaccatccctgcaatcgaggaggtgaacatattcaaggacgatctcgtcatccagttcttgaaccccaaagtgcaagcttccatcgcagcaaacacatgggtggtcagtggatctccacagacgaaaaagctacaggatgttctccctgggatcattaaccagcttggccctgacaacatggagcacctgaagaggattgccgaggagatgcagaagcaggtggctgctgccggtgcggcagcacaggtcaaggaagacaacgatgacgatgttccagagcttgttcctggagagacttttgaagaagtagctcaggagacaaaagcctgatcataggctctaaatagtgaaatgttactgcaccaatgctgtgaggtcatggttttcgtgtgatggcactcttcttcctcccctcctaggccagccccagccactctttgtgttcgctgttggaaacttttagtttctccatctcaagcttttacctaaggttgtgcatgttgagatgcc

SEQ ID NO: 15746 - protein, 158 aa, Zea mays subsp. mays
  misc_feature (1)..(158): Ceres Seq. ID no. 12348061
MNKERLMKMAGAVRTGGKGTMRRKKKAVHKTVTTDDKRLQGTLKRVGVNTIPAIEEVNIFKDDLVIQFLNPKVQASIAANTWVVSGSPQTKKLQDVLPGIINQLGPDNMEHLKRIAEEMQKQVAAAGAAAQVKEDNDDDVPELVPGETFEEVAQETKA

SEQ ID NO: 15747 - protein, 152 aa, Zea mays subsp. mays
  misc_feature (1)..(152): Ceres Seq. ID no. 12348062
MKMAGAVRTGGKGTMRRKKKAVHKTVTTDDKRLQGTLKRVGVNTIPAIEEVNIFKDDLVIQFLNPKVQASIAANTWVVSGSPQTKKLQDVLPGIINQLGPDNMEHLKRIAEEMQKQVAAAGAAAQVKEDNDDDVPELVPGETFEEVAQETKA

SEQ ID NO: 15748 - protein, 150 aa, Zea mays subsp. mays
  misc_feature (1)..(150): Ceres Seq. ID no. 12348063
MAGAVRTGGKGTMRRKKKAVHKTVTTDDKRLQGTLKRVGVNTIPAIEEVNIFKDDLVIQFLNPKVQASIAANTWVVSGSPQTKKLQDVLPGIINQLGPDNMEHLKRIAEEMQKQVAAAGAAAQVKEDNDDDVPELVPGETFEEVAQETKA

SEQ ID NO: 15749 - DNA, 800 bp, Zea mays subsp. mays
  misc_feature (1)..(800): Ceres Seq. ID no. 12348080
acgttctgtcgttctcgcttgaggcggcccgcggccttctcgaagccctccctcgctccgtgctcgtggctcccgcacgatccccacattccttggccggctccgcgctcgtgctctcgttgggatcgttgtcagttcagtggaaatgcattcttcggcaatgccacacccagtgatcagaggcacattgagaagccttttaaagtgaaggaggcagaacctgtgaatgtgacaaaaccttcaccacacaagctgctggttctaggaggaagtggtttcgttggatcacacgtttgcaaagaggctttggacaaaggtttagttgtctctagtcttaatagatcgggaaagccatccttaaatgaaccttgggctgacaaagttatatggaaccaaggcaacctccttgaaccagcttcattgaaggatgctatggataatgtttctgcagtggtatcttgtgtcggaggttttggatcaaattcattcatgtataagattaatgggactgcaaacatcaatggccatcagggctgcagctgagaaaggtgtaaagagatttgtatatgtgtcagctgcagactttggattagtgaattatttattgcaaggctattacgagggcatagggcttctgaagctgaattgttgtcaaagtttacatatggaggttgataaatggattaatggaaaaggtcgctgacatcgcaccaaggctgatctgcaccatatctaaaagaattatcaacaaaagaacagtgcaagaggctatggtcaataggagatggattggtgatatt

SEQ ID NO: 15750 - protein, 180 aa, Zea mays subsp. mays
  misc_feature (1)..(180): Ceres Seq. ID no. 12348081
TFCRSRLRRPAAFSKPSLAPCSWLPHDPHIPWPAPRSCSRWDRCQFSGNAFFGNATPSDQRHIEKPFKVKEAEPVNVTKPSPHKLLVLGGSGFVGSHVCKEALDKGLVVSSLNRSGKPSLNEPWADKVIWNQGNLLEPASLKDAMDNVSAVVSCVGGFGSNSFMYKINGTANINGHQGCS

SEQ ID NO: 15751 - protein, 91 aa, Zea mays subsp. mays
  misc_feature (1)..(91): Ceres Seq. ID no. 12348082
MLWIMFLQWYLVSEVLDQIHSCIRLMGLQTSMAIRAAAEKGVKRFVYVSAADFGLVNYLLQGYYEGIGLLKLNCCQSLHMEVDKWINGKGR

SEQ ID NO: 15752 - DNA, 1005 bp, Zea mays subsp. mays
  misc_feature (1)..(1005): Ceres Seq. ID no. 12348092
atcatcatgtatcctaaatccaaagccagcgaagaagagattccgccggtgccgtagccgctgagctaaccaccagccggttcttgtcgcgttgtctgcaactttgcaagtaagcaactcgtcaccggtcagccaccaacaaggcaccttggttatcgtcttgcacgtccaagaaatcgagaactcaggcaggcgtcgcccacttgccctcctcctcctcctcccgtcgtgaattccacgctggttcagggatgtcgatcgagctcctgacgaaattcctcacattgctgttcgggtatgccatgccagcgctggagtgcttcaaggcgatcgagcagcggcccggccgggcagatcagctccgcttctggtgcgagtattggatcatcctagtcctcctcgtcatgttcgacgaaattgctggggttctcatttctaagatcccaatgtactacgagctgaagctagccttcctcgtctacttgtggtacccaaagacaaggggaacggacatcgtgtacgagaccttcctccagccgctggtgatgcagtaccagcccaacatcgaggccaggctccagtacctgcgcgccaatgccggtgacatcctcgtcttctacctcaagaacttcaccgagagaggctacgagctcttcctccgagtgcttgactacgtccggtcgcaggcgtccagagggtcaagaacacggagtttcttctcgttccgaggtgaacgttcggagaggccaagcttcaccgatgactatgtcactggcggcgaccggagggacgggggaaggcaccgtcgaccacgcagtggctactagtagaccaagtagtcactggatgtataggatgtgcacagaaacatatacgattactggtatagtgttaggtaggagtaggatcaaatcaagcaaaccttacggacagaacttgtaggatccactggaaaaacagatagcttcttataaattttctattcatattgtcactttgtcagcc

SEQ ID NO: 15753 - protein, 191 aa, Zea mays subsp. mays
  misc_feature (1)..(191): Ceres Seq. ID no. 12348093
MSIELLTKFLTLLFGYAMPALECFKAIEQRPGRADQLRFWCEYWIILVLLVMFDEIAGVLISKIPMYYELKLAFLVYLWYPKTRGTDIVYETFLQPLVMQYQPNIEARLQYLRANAGDILVFYLKNFTERGYELFLRVLDYVRSQASRGSRTRSFFSFRGERSERPSFTDDYVTGGDRRDGGRHRRPRSGY

SEQ ID NO: 15754 - protein, 174 aa, Zea mays subsp. mays
  misc_feature (1)..(174): Ceres Seq. ID no. 12348094
MPALECFKAIEQRPGRADQLRFWCEYWIILVLLVMFDEIAGVLISKIPMYYELKLAFLVYLWYPKTRGTDIVYETFLQPLVMQYQPNIEARLQYLRANAGDILVFYLKNFTERGYELFLRVLDYVRSQASRGSRTRSFFSFRGERSERPSFTDDYVTGGDRRDGGRHRRPRSGY

SEQ ID NO: 15755 - protein, 140 aa, Zea mays subsp. mays
  misc_feature (1)..(140): Ceres Seq. ID no. 12348095
MFDEIAGVLISKIPMYYELKLAFLVYLWYPKTRGTDIVYETFLQPLVMQYQPNIEARLQYLRANAGDILVFYLKNFTERGYELFLRVLDYVRSQASRGSRTRSFFSFRGERSERPSFTDDYVTGGDRRDGGRHRRPRSGY

SEQ ID NO: 15756 - DNA, 948 bp, Zea mays subsp. mays
  misc_feature (1)..(948): Ceres Seq. ID no. 12348096
aaacggaaacgggggcagttggtgagttgggacttgggagccgacgctgtcggggtgatccagtcgccgccgacgccgccgaacgcgcccgcgcccgagcctccctctacgcggacgcgggaggacccttccactcccagagccgggcgtgtccgatcgtgagcccatggcggaatccatcgtctccggcgccgccgccccgccgccgggcgcgccctcgttctcctacctggccgtgttctccaactgcccgctcgtcgccgcggtgctcgccttcgccatcgcgcagtccatcaaggtcctcaccacctggtataaggagaaccggtgggacgcgaagcagctggtgggctccggcgggatgccgtcctcgcactcggccaccgtcaccgcgctcgccgtcgccgtcgggctgcaggaggggttcgccagctcgctgttcgccaccaccgccgtcttcgcctccgtggtgatgtatgatgcctttggtgttaggctacatgcagggaagcaagcagaggtcttgaaccagattgtgtacgagcttccatcagaacatccactagctgaaacaagaccgctgcgagagctgctagggcacacacctccacaggtatttgctggcggagtgcttggatttgcagtagccacatttacagcgatgatcgctgggcttggtagttgactccgcatttgaagaaatggtcaacattcgcattgaagttctggaattcaaattggacacatgtttcctagccagcttatgatagataatgcgttgtgtataggtgtatttaatatgcaaattgctgtcaatttgttgaagagaaacttgcgccattcttttgtagttaatcgacgagtgaactatatgctgtattcgttcctgtccaaagtatttggagtgattgaaagtacctcgtgataaagcattcatgagatttccgc

SEQ ID NO: 15757 - protein, 172 aa, Zea mays subsp. mays
  misc_feature (1)..(172): Ceres Seq. ID no. 12348097
MAESIVSGAAAPPPGAPSFSYLAVFSNCPLVAAVLAFAIAQSIKVLTTWYKENRWDAKQLVGSGGMPSSHSATVTALAVAVGLQEGFASSLFATTAVFASVVMYDAFGVRLHAGKQAEVLNQIVYELPSEHPLAETRPLRELLGHTPPQVFAGGVLGFAVATFTAMIAGLGS

SEQ ID NO: 15758 - protein, 156 aa, Zea mays subsp. mays
  misc_feature (1)..(156): Ceres Seq. ID no. 12348098
TETGAVGELGLGSRRCRGDPVAADAAERARARASLYADAGGPFHSQSRACPIVSPWRNPSSPAPPPRRRARPRSPTWPCSPTARSSPRCSPSPSRSPSRSSPPGIRRTGGTRSSWWAPAGCRPRTRPPSPRSPSPSGCRRGSPARCSPPPPSSPPW

SEQ ID NO: 15759 - protein, 107 aa, Zea mays subsp. mays
  misc_feature (1)..(107): Ceres Seq. ID no. 12348099
MPSSHSATVTALAVAVGLQEGFASSLFATTAVFASVVMYDAFGVRLHAGKQAEVLNQIVYELPSEHPLAETRPLRELLGHTPPQVFAGGVLGFAVATFTAMIAGLGS

SEQ ID NO: 15760 - DNA, 779 bp, Zea mays subsp. mays
  misc_feature (1)..(779): Ceres Seq. ID no. 12348111
cagagccatctcctttgcttgctgtccacttggttgacattctgtacagttactgcttcacacttcggctctacaacggtgattggcactcagatcctttgggtgcttgcactgtcgccctgtcgatgtcgaaagtcatgggccaggatgctaaacctgagactgtacctgaagcactcgcagcctgcatcgaggagacatgctcaccagcttacaggcatactggtggtttcaggtttgctattggactcgtggacgatatcatcgccattctctccttgggacagaacgcacttatttgtgccttatgcgacttccatcgactcattgaagttggtaagagcatgctcaaggtggagaaagtgggcaagacggagagggcacagaactctccgaagcttcgtagtgcagctaggaagctattcttcatgacttgttgggtccatgagcagccagatgaggcgtggccatctttagctcacatcgtccaggtgcagaaagcatctatggaggagttggagaccgggaattggaaggcggatagaaagagcaaaccacaatccgcggttcttatcgaggagctgtaggcatatggatgtaccactggaaattggatcgcgaggctatgtacccttgtgtatcgctcaggatgaatccaacgagagaccgtccttgtaatgcagttagttgcttctgtgtacacttttttttgaaaaaaattgtatttgtatacgagtttgaaatcctagttgaagcgatcctgctttactttgcttgtc

SEQ ID NO: 15761 - protein, 194 aa, Zea mays subsp. mays
  misc_feature (1)..(194): Ceres Seq. ID no. 12348112
EPSPLLAVHLVDILYSYCFTLRLYNGDWHSDPLGACTVALSMSKVMGQDAKPETVPEALAACIEETCSPAYRHTGGFRFAIGLVDDIIAILSLGQNALICALCDFHRLIEVGKSMLKVEKVGKTERAQNSPKLRSAARKLFFMTCWVHEQPDEAWPSLAHIVQVQKASMEELETGNWKADRKSKPQSAVLIEEL

SEQ ID NO: 15762 - protein, 153 aa, Zea mays subsp. mays
  misc_feature (1)..(153): Ceres Seq. ID no. 12348113
MSKVMGQDAKPETVPEALAACIEETCSPAYRHTGGFRFAIGLVDDIIAILSLGQNALICALCDFHRLIEVGKSMLKVEKVGKTERAQNSPKLRSAARKLFFMTCWVHEQPDEAWPSLAHIVQVQKASMEELETGNWKADRKSKPQSAVLIEEL

SEQ ID NO: 15763 - protein, 149 aa, Zea mays subsp. mays
  misc_feature (1)..(149): Ceres Seq. ID no. 12348114
MGQDAKPETVPEALAACIEETCSPAYRHTGGFRFAIGLVDDIIAILSLGQNALICALCDFHRLIEVGKSMLKVEKVGKTERAQNSPKLRSAARKLFFMTCWVHEQPDEAWPSLAHIVQVQKASMEELETGNWKADRKSKPQSAVLIEEL

SEQ ID NO: 15764 - DNA, 950 bp, Zea mays subsp. mays
  misc_feature (1)..(950): Ceres Seq. ID no. 12348141
gaagtcgagtagacggccgggcctctcccgttctccacggacggctagcgctactggaggcgacgcctggacggcgaccccgcacactcacagccacaccctccacctgtgtgactattcaagggcttaggccgagccgcccggccaatcgccgtccgccggaccgctgaggaatttttctttctcgtcaaaagttactgcattcattttacagtaatggctatggggttgattaatgctaatcctataatccatgagaaaaaagagaggcgtgccagacaggcaccagagaccacagatgaaaatgcagcagagcccatagatcagctggaaatatttgatcacattagagatataaaggatccagagcacccgtactcactggaacagctgaatgtggtgactgaagattcaattgaactcaatgatgaaagtaattatgtcagggttacattcaccccaacagtggagcactgcagtatggcaactattattggcctttgcatacgcgtgaaacttgtacggagtctccctcctcgttacaaggtggacataagggttgcccctggatcacatgcaactgaagctgctgtgaataagcaactgaacgacaaagaacgtgttgcggctgcattggagaacccaaacctactggacatggtcgaagagtgcttatcaccaacatttgattgaggcctgaatatcaatatatcggtgtgacatggtgttgatgttcaggagccacacatgctcattgccaatggagttcactcctgtctttcgagaaccaaaatgccttgggtgttaagtgacgtgttgcatgatttttttcctccgccccgttcagttattatatatgctactatggcgctaccctttttggacgtttttggtgcttgtgacctcactgatcaatgcgagatgtaatcagctcttgtgctgtagctttc

SEQ ID NO: 15765 - protein, 158 aa, Zea mays subsp. mays
  misc_feature (1)..(158): Ceres Seq. ID no. 12348142
MAMGLINANPIIHEKKERRARQAPETTDENAAEPIDQLEIFDHIRDIKDPEHPYSLEQLNVVTEDSIELNDESNYVRVTFTPTVEHCSMATIIGLCIRVKLVRSLPPRYKVDIRVAPGSHATEAAVNKQLNDKERVAAALENPNLLDMVEECLSPTFD

SEQ ID NO: 15766 - protein, 156 aa, Zea mays subsp. mays
  misc_feature (1)..(156): Ceres Seq. ID no. 12348143
MGLINANPIIHEKKERRARQAPETTDENAAEPIDQLEIFDHIRDIKDPEHPYSLEQLNVVTEDSIELNDESNYVRVTFTPTVEHCSMATIIGLCIRVKLVRSLPPRYKVDIRVAPGSHATEAAVNKQLNDKERVAAALENPNLLDMVEECLSPTFD

SEQ ID NO: 15767 - DNA, 943 bp, Zea mays subsp. mays
  misc_feature (1)..(943): Ceres Seq. ID no. 12348152
agctcgcctctcctctcattctctcgtgctctccacccgtttcccgcaaaaccctagctctgcgacatgcaccgcggcggcgatcgctccggcggcccctcgagcggcggagaccgctctggagcccggttccagcggggtccctcccgctggtctggcagcagcggcggcggattagggggtagcccgcccaatcgctactcctcccgcggcgcggcagatggaggtggtggagggggcggtggcgggaggttccacccttaccgtggttcttccgactattctagcggcggtggagggtacagaggcggtagtggcgttggtaacgacttcggcgaccagaggcaacgttacggcggcggcactagaggcggaggccgtggggatttccaagatcatgatagtagaagtaactatgtcaaactttttgtcggatctgttccgaggacagcgactgaagaagacgttcgtcctttatttgaggaacatggagatgttcttgaagttgctctaattaaggataggaagaccggtgaacaacaaggtatgctatgtctttgtttttcttgtattatcacaattgagtatctcttttgttttcaggtttctgagaggttataggagcaacaaggttgcatcttctctcagttagattggcggttgttgattttcatttcctgcgcttccattctgtccgtctcctgtggattcagtagaagactagaatggacgcgactaactgcccgccgattactggaacctaactagccacaacttcactgctacacaaggcagcaaatttggtaccaacagctgtgtttagatgatattgaccttctggatgtcctgtagttctagagcaatgagcttgtagtttcacctttgcatctgtgtgccttgattttgttgcaagaacttatataatcttataatgaattaatac

SEQ ID NO: 15768 - protein, 184 aa, Zea mays subsp. mays
  misc_feature (1)..(184): Ceres Seq. ID no. 12348153
MHRGGDRSGGPSSGGDRSGARFQRGPSRWSGSSGGGLGGSPPNRYSSRGAADGGGGGGGGGRFHPYRGSSDYSSGGGGYRGGSGVGNDFGDQRQRYGGGTRGGGRGDFQDHDSRSNYVKLFVGSVPRTATEEDVRPLFEEHGDVLEVALIKDRKTGEQQGMLCLCFSCIITIEYLFCFQVSERL

SEQ ID NO: 15769 - protein, 97 aa, Zea mays subsp. mays
  misc_feature (1)..(97): Ceres Seq. ID no. 12348154
MEVVEGAVAGGSTLTVVLPTILAAVEGTEAVVALVTTSATRGNVTAAALEAEAVGISKIMIVEVTMSNFLSDLFRGQRLKKTFVLYLRNMEMFLKLL

SEQ ID NO: 15770 - DNA, 1872 bp, Zea mays subsp. mays
  misc_feature (1)..(1872): Ceres Seq. ID no. 12348206
acaaaagacagttccgatatgcgaactggaggagaaggcattagtttcactggccaaggaagggaatttcaatccttcgaaagatgaagagaagcatgcctttctgctgcaattgcttttttggtttaagcaatcattcagatgggttaatgcagcaccttgtgacagctgtggccgtgagacatccaatgttggaatgggcaccccacttacctcagaaatcaaatttggcgcttcacgtgttgagatgtataggtgtaaccattgttctagtatcacccgtttcccaaggtacaacgatcctcgtaagcttatacaaactaggagaggtcgctgtggagaatgggcgaattgcttcacattctattgtcgagcttttggatatgatgctcgtttgattctggatttcactgatcacgtgtggacagaatgtttttcaaacttgtatggaagatggatgcacctagatccatgcgaaggagtctatgataatcccttaccgtacgagaaagggtggaacaagaagttaaattatgttattgcgatttctaaagatggagtacgggacgtaacaaaacgctacaccagaaagtggcatgaggttctctctaggcgaataattacctccgaagaaactgttgtgtctgttctatcatctataacagggaagtatcgcacaggtttgtcacctgatgctctatcagtcatagaaaaccgtgaaaaggaggagtctgaggaacttagaaaatctgcttatcttcaagttgaaacggctttatccttacctggaaggcttagtggttctgtggaatggaggaaagcaaggtcagagttgggccaagcagattcactaagttgctcatcctgccctattcggaagtgtgtggatggtcatgtttcaaatatatatgatgctctttctgcttttctttcacatttttgacaaaaaaatccctaaagaaagaattattgaagcttttgaggcattgaagactttgatgctaactcttaaaagttccaactttaagagcagaagtgctacattagaccagaaagcacaccatctatttgaggagatatttccttccattgaaagattgttatctgctatttcactgaaagcagaattgggaactgctggataccaatctgtgaccgtgtctggaaatccagtacactcatccttagcgttaccagtagcactggatgcagttaatgagatattgagtaattataagaataatacctttttcacagaaggcaatcatttcccaagagggaacagagtatgctcaggttcagtccttgcaagcagggaacaacttccaataggaattgcaacagcagcttttgacggcattcactcctccaaatgggaagagcctgatggagccaaaggatgttggctgatttatacaatgcaagatggcaaaagttgcgagttggagtcatatgatttgatgtcagctaatgatgctccagagagggatccaatggactgggttcttgaagggagcgcagacggaggctccacctggaatatacttgatgctcggaattcagaaatgttcgagagccgtttcttgaggaaaacatttacagtggataagagatataaggcaaatgctttcaggtttaggtttctacgcgtaagagattctcattctaatccaaggtttcagataggatcaattgatctatatgggaaaaccatatgaactccccccggagctgtgtttcacttttcggctttctgaactgctcggtctcacgagcctgtgtagtatcataaattcataatattgtaatgcgagcatttactgtggacgcaacgctctcttcagtatgaatagatactgaataattaagagc

SEQ ID NO: 15771 - protein, 313 aa, Zea mays subsp. mays
  misc_feature (1)..(313): Ceres Seq. ID no. 12348207
QKTVPICELEEKALVSLAKEGNFNPSKDEEKHAFLLQLLFWFKQSFRWVNAAPCDSCGRETSNVGMGTPLTSEIKFGASRVEMYRCNHCSSITRFPRYNDPRKLIQTRRGRCGEWANCFTFYCRAFGYDARLILDFTDHVWTECFSNLYGRWMHLDPCEGVYDNPLPYEKGWNKKLNYVIAISKDGVRDVTKRYTRKWHEVLSRRIITSEETVVSVLSSITGKYRTGLSPDALSVIENREKEESEELRKSAYLQVETALSLPGRLSGSVEWRKARSELGQADSLSCSSCPIRKCVDGHVSNIYDALSAFLSHF

SEQ ID NO: 15772 - protein, 276 aa, Zea mays subsp. mays
  misc_feature (1)..(276): Ceres Seq. ID no. 12348208
MVMFQIYMMLFLLFFHIFDKKIPKERIIEAFEALKTLMLTLKSSNFKSRSATLDQKAHHLFEEIFPSIERLLSAISLKAELGTAGYQSVTVSGNPVHSSLALPVALDAVNEILSNYKNNTFFTEGNHFPRGNRVCSGSVLASREQLPIGIATAAFDGIHSSKWEEPDGAKGCWLIYTMQDGKSCELESYDLMSANDAPERDPMDWVLEGSADGGSTWNILDARNSEMFESRFLRKTFTVDKRYKANAFRFRFLRVRDSHSNPRFQIGSIDLYGKTI

SEQ ID NO: 15773 - protein, 274 aa, Zea mays subsp. mays
  misc_feature (1)..(274): Ceres Seq. ID no. 12348209
MFQIYMMLFLLFFHIFDKKIPKERIIEAFEALKTLMLTLKSSNFKSRSATLDQKAHHLFEEIFPSIERLLSAISLKAELGTAGYQSVTVSGNPVHSSLALPVALDAVNEILSNYKNNTFFTEGNHFPRGNRVCSGSVLASREQLPIGIATAAFDGIHSSKWEEPDGAKGCWLIYTMQDGKSCELESYDLMSANDAPERDPMDWVLEGSADGGSTWNILDARNSEMFESRFLRKTFTVDKRYKANAFRFRFLRVRDSHSNPRFQIGSIDLYGKTI

SEQ ID NO: 15774 - DNA, 980 bp, Zea mays subsp. mays
  misc_feature (1)..(980): Ceres Seq. ID no. 12348303
aaccccccaactccgttcattgcggcaggccggcagccaaatcgagatctcgcccgtgctgaatcccaccactctcgccgacccggccgcagcaagcgcagcgcatcgacaggagccgaagaaccgaagaggagatggcgtcggcgctgtcctccctgcgctacggcgacagcctctcggtggtgggcatctccgccgcgacggccgtgctctgcgaggccatgtcctggctcctcatctaccgcaccgccacctacaactccctccgcgcctccatcgagcgccactcccgcaagctagacgccatgaagtccggctccacctccgcctcctccggcaccgccgcctcctccgcgcagcccgcatcgtcgcgggctaagaagatggaccgcgtcgagaccagcctcaaggacgctgcgcgggagctctcgctcgccaagctcaagtcgggcgccgtcgtcgctgtcatgctcttcgtcgtcttcggcctgctcaactccctcttcgagggccgcaccgtcgccaagctgcccttcgcgcccatcccgctcgtccagcggatgagccaccgcggactgcccgggaacgatcccaccgactgctccatggttttcctctacttcctctgctccatgagcatccgaaccaacctgcagaaactgcttggcttnncgccgccacgcgcggctgctgcagccggcggtggcctcttccccatgcccgatccgaaagttaattgaggctgatttccaagacgagtgaatccgaaccaaagatagcaatagtcgcccgggaaagactctgtgcgactgcaccgatatccgtacccaattcattttccacagctcaccggtttgttgttgcgcaccggtgattgcaaacctgaaggttggcttatttattgcattgactgaaacaacgaacatgaattacctgctgggaggcagagaaatgtgcagcctaatttttttcggcctctg

SEQ ID NO: 15775 - protein, 201 aa, Zea mays subsp. mays
  misc_feature (1)..(201): Ceres Seq. ID no. 12348304
  misc_feature (179)..(179): Xaa is any aa, unknown or other
  misc_feature (180)..(180): Xaa is any aa, unknown or other
MASALSSLRYGDSLSVVGISAATAVLCEAMSWLLIYRTATYNSLRASIERHSRKLDAMKSGSTSASSGTAASSAQPASSRAKKMDRVETSLKDAARELSLAKLKSGAVVAVMLFVVFGLLNSLFEGRTVAKLPFAPIPLVQRMSHRGLPGNDPTDCSMVFLYFLCSMSIRTNLQKLLGXXPPRAAAAAGGGLFPMPDPKVN

SEQ ID NO: 15776 - protein, 172 aa, Zea mays subsp. mays
  misc_feature (1)..(172): Ceres Seq. ID no. 12348305
  misc_feature (150)..(150): Xaa is any aa, unknown or other
  misc_feature (151)..(151): Xaa is any aa, unknown or other
MSWLLIYRTATYNSLRASIERHSRKLDAMKSGSTSASSGTAASSAQPASSRAKKMDRVETSLKDAARELSLAKLKSGAVVAVMLFVVFGLLNSLFEGRTVAKLPFAPIPLVQRMSHRGLPGNDPTDCSMVFLYFLCSMSIRTNLQKLLGXXPPRAAAAAGGGLFPMPDPKVN

SEQ ID NO: 15777 - protein, 144 aa, Zea mays subsp. mays
  misc_feature (1)..(144): Ceres Seq. ID no. 12348306
  misc_feature (122)..(122): Xaa is any aa, unknown or other
  misc_feature (123)..(123): Xaa is any aa, unknown or other
MKSGSTSASSGTAASSAQPASSRAKKMDRVETSLKDAARELSLAKLKSGAVVAVMLFVVFGLLNSLFEGRTVAKLPFAPIPLVQRMSHRGLPGNDPTDCSMVFLYFLCSMSIRTNLQKLLGXXPPRAAAAAGGGLFPMPDPKVN

SEQ ID NO: 15778 - DNA, 846 bp, Zea mays subsp. mays
  misc_feature (1)..(846): Ceres Seq. ID no. 12348321
atccgtagcgttccattccattccatcccatctccctcctcgcctacggcttcttccaccgcggcatcgtgcccggcctctgcttcggcgcgggcctggggattacgctgttcggcatggcctacatgttcgtccacgacggcctggtccaccgccgctttccggtcggccccatcgccgacgtgccctacttccgccgagtggctgcctcgcacaagatacaccacatggacaagttcggcggcgtcccgtatgggctcttcctgggaccaaaggagctggaggaggttggtggcctggacgagcttgttagcagtccggtgagtgaagctactgatactgaagacgcaggagaagaaaagacgcgtccagttgtatgcgttgtccgaacaagcgtgttcatgggccagagtgtgccaaatgagttctagctttaggcgagtgggccaaatgagtgtgggctgcgtcccagggtagtataagtactatgagtctgtaataatcaggacaagaagaatttagcatccagtagctaacagagctggaaaaggagctcgcgcgaaccagaagggccatctgatggattcgtacatggagctggaggaggttgtgagtccggcgcggcgagctcctccgcgcgctccgtggtttttgttttttgttttggtcgcttttttgttgatttcattgtcttgtttggtactggagggttggcgaatcgattttggatgcactggcgtagatgttggctgtccacttgccctgcatttcgaatggtctgggaaggcacggttcgtacatggaaaatgtccggtgccgtggaattactattgttttgtttgctgc

SEQ ID NO: 15779 - protein, 107 aa, Zea mays subsp. mays
  misc_feature (1)..(107): Ceres Seq. ID no. 12348322
IRSVPFHSIPSPSSPTASSTAASCPASASARAWGLRCSAWPTCSSTTAWSTAAFRSAPSPTCPTSAEWLPRTRYTTWTSSAASRMGSSWDQRSWRRLVAWTSLLAVR

SEQ ID NO: 15780 - protein, 104 aa, Zea mays subsp. mays; identical to SEQ ID NO: 14534
  misc_feature (1)..(104): Ceres Seq. ID no. 12348323

SEQ ID NO: 15781 - protein, 103 aa, Zea mays subsp. mays
  misc_feature (1)..(103): Ceres Seq. ID no. 12348324
SVAFHSIPSHLPPRLRLLPPRHRARPLLRRGPGDYAVRHGLHVRPRRPGPPPLSGRPHRRRALLPPSGCLAQDTPHGQVRRRPVWALPGTKGAGGGWWPGRAC

SEQ ID NO: 15782 - DNA, 1283 bp, Zea mays subsp. mays
  misc_feature (1)..(1283): Ceres Seq. ID no. 12348789
atcgtacgtcgtgtcctgcagtggctcacattcgacgacacacagtagagggtagctagcagtggtgctcctggcctgtgacgatggtttcctcgtcgtcgtctccttccgccaccgccgccgccgccgccgccgtggtcctggcggtggccctgatgacgacgacgtgcttccatggcgcgacggcgcagctgtgcgaggactactatgacagcacctgcccggacgcctacgacatcgtgaaccaggtgctcgtcgacgcagtgcagtcggacacccgcatcttcgccagcctcatccgcctgcacttccacgactgcttcgtccagggctgcgacgcctcgcttctgctggacagcgtcccagggatgccgtcggagaagacgtcggcgcccaacaacggctcagcgcgcgggttcggggtggtggacgccgccaaggctgcgctggagagcgcctgccctggtgttgtctcctgcgctgacatcctcgccatcgccgcagagatctcagtcgagctgtcgggaggccccagctggggtgtgcttctgggcaggctggacagcaagacctccgacttcaacggatccctggacctcccagagcccaccgacaacctcaccatacttcagcagaagttcagcaacctcagcctcaacgatgtcgacctggtcgccctttcaggggggcacacgttcggccgggtccaatgcaagttcatcacggaccggctctacaacttcagcgggacgaacatgcccgacccgacgctggacgcctcctaccgggccttcctgacgcagaggtgccccaggaacggcgaccccacagccctgaacgacctggacccgacgaccccggacaccttcgacaacaactactacaccaacatcgaggtgaaccgaggcatcctcaactccgaccaggagctcaagtcgtcgcccctagcgcagggcaccacggcgcccatcgtcgaccagttcgcggccagccaagacgacttcttcgcgagcttcgcgcagtccatgatcaacatggggaacatcaagccgctcacggacccgtccagaggagaagtccgcaccaactgcagaagggtcaactgatccaattaagtcgatcggtcgtaattaatgtgtgcagagaaaacgacatgttcatcattggctggtcgatgtcatttggctagctgctcatcagggtgtgaagtttctgtatacacatgcagcatgcatgtatgtttcatgttttccaatccaactcaataaaatttgccaaagatt

SEQ ID NO: 15783 - protein, 340 aa, Zea mays subsp. mays
  misc_feature (1)..(340): Ceres Seq. ID no. 12348790
MVSSSSSPSATAAAAAAVVLAVALMTTTCFHGATAQLCEDYYDSTCPDAYDIVNQVLVDAVQSDTRIFASLIRLHFHDCFVQGCDASLLLDSVPGMPSEKTSAPNNGSARGFGVVDAAKAALESACPGVVSCADILAIAAEISVELSGGPSWGVLLGRLDSKTSDFNGSLDLPEPTDNLTILQQKFSNLSLNDVDLVALSGGHTFGRVQCKFITDRLYNFSGTNMPDPTLDASYRAFLTQRCPRNGDPTALNDLDPTTPDTFDNNYYTNIEVNRGILNSDQELKSSPLAQGTTAPIVDQFAASQDDFFASFAQSMINMGNIKPLTDPSRGEVRTNCRRVN

SEQ ID NO: 15784 - protein, 316 aa, Zea mays subsp. mays
  misc_feature (1)..(316): Ceres Seq. ID no. 12348791
MTTTCFHGATAQLCEDYYDSTCPDAYDIVNQVLVDAVQSDTRIFASLIRLHFHDCFVQGCDASLLLDSVPGMPSEKTSAPNNGSARGFGVVDAAKAALESACPGVVSCADILAIAAEISVELSGGPSWGVLLGRLDSKTSDFNGSLDLPEPTDNLTILQQKFSNLSLNDVDLVALSGGHTFGRVQCKFITDRLYNFSGTNMPDPTLDASYRAFLTQRCPRNGDPTALNDLDPTTPDTFDNNYYTNIEVNRGILNSDQELKSSPLAQGTTAPIVDQFAASQDDFFASFAQSMINMGNIKPLTDPSRGEVRTNCRRVN

SEQ ID NO: 15785 - protein, 245 aa, Zea mays subsp. mays
  misc_feature (1)..(245): Ceres Seq. ID no. 12348792
MPSEKTSAPNNGSARGFGVVDAAKAALESACPGVVSCADILAIAAEISVELSGGPSWGVLLGRLDSKTSDFNGSLDLPEPTDNLTILQQKFSNLSLNDVDLVALSGGHTFGRVQCKFITDRLYNFSGTNMPDPTLDASYRAFLTQRCPRNGDPTALNDLDPTTPDTFDNNYYTNIEVNRGILNSDQELKSSPLAQGTTAPIVDQFAASQDDFFASFAQSMINMGNIKPLTDPSRGEVRTNCRRVN

SEQ ID NO: 15786 - DNA, 1744 bp, Zea mays subsp. mays
  misc_feature (1)..(1744): Ceres Seq. ID no. 12348828
ctccggcctttgccgcttccacagggagtccggggccatgcagagctccgtaaagctcgcggtgcttgctctactgctagcggcagcagctcaccacggtctgctgccgctgccgacggcgcgatgctactggctcaacccggagatctacgacgccggcgggctgagccgccgcgcgttcccggacggcttcgtcttcgggacggccgcgtcggcgtaccaggtcgaggggatggccaagcacggcgggcggggccccagcatctgggacgccttcatagaggttcctgggaccatccctaacaatgccaccgctgacgtgacggtcgacgagtatcatcggtacaaggaagatgtgaacataatgaagaacatgggctttgatgcgtaccggttttcgatctcttggtcgaggattttcccagatggaactggcaaggtgaaccaggaaggagtggattactacaacaggctcatagattacatgctccagcaaggtatcgcgccgtatgcaaatctctaccattatgacctcccattggcactccatgaacagtacctgggctggcttagcccaaagattgtggaggcgtttgcagactacgccgagttctgcttccacgcgttcggagacagggtgaagaactggtttaccttcaacgagccgaggtgcgtcgctgctctgggctacgacaatggcttgcacgcaccgggaaggtgttccgggtgccccgccggaggcaactccaccacggagccgtaccttgtcgcacaccatctcatcctttctcatgcagctgcggtcaggcgataccgcgacaagtatcagcttcaccagaaggggaagattggaattctcctggatttcgtgtggtacgaacctttcagcgacagcaatgcggaccaggctgcagcacagcgagccagggacttccacctaggctggttccttgaccccattgtacatggacggtacccgtactcgatgcaagagattgccaaagacaggctaccgttgttcagcgatgaagaagccaggatggtgaaaggctctatagactatgttggcatcaaccactacacttctttctacatgaaggaccctgggacatggaacctgacgccagtcagctaccaggatgattggcatgttggttttgtctacgaacgaaatggagttcctattggcgctcacgcaaactcctactggctgtacattgtgccgtggggcatcaacaaggctgtcagctatgtcaaggaaacttacaaaaatcttacaatgatccttgctgaaaacggaatggaccaacctggtgatgtcagtattactcagggtgtgcatgacacagtaagaatccgttattacagagactacataactgagctcaagaaagcaatagatgatggtgccagagtcattgggtactttgcgtggtcgctgcttgacaacttcgagtggaggcttgggtacacttcgcggtttggcttggtgtacgtggactacaagactctgaagaggtaccccaaggactcagctttctggttcaagcatatgctgtccaagaaaaggagctagagaattgcagacaagaggaccactggcttcaggtgtcatacaaaagttcactctgcaaatcctcttagtatgtcagatttagcttaagaaaccgtgcagacaattgagtctcaaggctcgacatctctagcttcgttaattgttgcaaggcaataaattggtatcttc

SEQ ID NO: 15787 - protein, 524 aa, Zea mays subsp. mays
  misc_feature (1)..(524): Ceres Seq. ID no. 12348829
SGLCRFHRESGAMQSSVKLAVLALLLAAAAHHGLLPLPTARCYWLNPEIYDAGGLSRRAFPDGFVFGTAASAYQVEGMAKHGGRGPSIWDAFIEVPGTIPNNATADVTVDEYHRYKEDVNIMKNMGFDAYRFSISWSRIFPDGTGKVNQEGVDYYNRLIDYMLQQGIAPYANLYHYDLPLALHEQYLGWLSPKIVEAFADYAEFCFHAFGDRVKNWFTFNEPRCVAALGYDNGLHAPGRCSGCPAGGNSTTEPYLVAHHLILSHAAAVRRYRDKYQLHQKGKIGILLDFVWYEPFSDSNADQAAAQRARDFHLGWFLDPIVHGRYPYSMQEIAKDRLPLFSDEEARMVKGSIDYVGINHYTSFYMKDPGTWNLTPVSYQDDWHVGFVYERNGVPIGAHANSYWLYIVPWGINKAVSYVKETYKNLTMILAENGMDQPGDVSITQGVHDTVRIRYYRDYITELKKAIDDGARVIGYFAWSLLDNFEWRLGYTSRFGLVYVDYKTLKRYPKDSAFWFKHMLSKKRS

SEQ ID NO: 15788 - protein, 512 aa, Zea mays subsp. mays
  misc_feature (1)..(512): Ceres Seq. ID no. 12348830
MQSSVKLAVLALLLAAAAHHGLLPLPTARCYWLNPEIYDAGGLSRRAFPDGFVFGTAASAYQVEGMAKHGGRGPSIWDAFIEVPGTIPNNATADVTVDEYHRYKEDVNIMKNMGFDAYRFSISWSRIFPDGTGKVNQEGVDYYNRLIDYMLQQGIAPYANLYHYDLPLALHEQYLGWLSPKIVEAFADYAEFCFHAFGDRVKNWFTFNEPRCVAALGYDNGLHAPGRCSGCPAGGNSTTEPYLVAHHLILSHAAAVRRYRDKYQLHQKGKIGILLDFVWYEPFSDSNADQAAAQRARDFHLGWFLDPIVHGRYPYSMQEIAKDRLPLFSDEEARMVKGSIDYVGINHYTSFYMKDPGTWNLTPVSYQDDWHVGFVYERNGVPIGAHANSYWLYIVPWGINKAVSYVKETYKNLTMILAENGMDQPGDVSITQGVHDTVRIRYYRDYITELKKAIDDGARVIGYFAWSLLDNFEWRLGYTSRFGLVYVDYKTLKRYPKDSAFWFKHMLSKKRS

SEQ ID NO: 15789 - protein, 447 aa, Zea mays subsp. mays
  misc_feature (1)..(447): Ceres Seq. ID no. 12348831
MAKHGGRGPSIWDAFIEVPGTIPNNATADVTVDEYHRYKEDVNIMKNMGFDAYRFSISWSRIFPDGTGKVNQEGVDYYNRLIDYMLQQGIAPYANLYHYDLPLALHEQYLGWLSPKIVEAFADYAEFCFHAFGDRVKNWFTFNEPRCVAALGYDNGLHAPGRCSGCPAGGNSTTEPYLVAHHLILSHAAAVRRYRDKYQLHQKGKIGILLDFVWYEPFSDSNADQAAAQRARDFHLGWFLDPIVHGRYPYSMQEIAKDRLPLFSDEEARMVKGSIDYVGINHYTSFYMKDPGTWNLTPVSYQDDWHVGFVYERNGVPIGAHANSYWLYIVPWGINKAVSYVKETYKNLTMILAENGMDQPGDVSITQGVHDTVRIRYYRDYITELKKAIDDGARVIGYFAWSLLDNFEWRLGYTSRFGLVYVDYKTLKRYPKDSAFWFKHMLSKKRS

SEQ ID NO: 15790 - DNA, 1756 bp, Zea mays subsp. mays
  misc_feature (1)..(1756): Ceres Seq. ID no. 12348840
agtttttgttcctgctcctcgcaccgcgcgccgccgacgccgcagccatgaacggtgacggcagcaaggaggacgccaacaggcgcctcgagtgggccaccttgaacctggagcgcggcgtcgtcgtgagcgagacgacgaagggcgacggcaatggcaatgcaggccggaaggcgccgataagcatcgtccggctcttcttggcctgcatggtctccggcggcatccagtacggctgggcgctgcagctctccctcctctcgccctactctcagactcttgggatctcgcacagctacgtgtctctgacatggatctgcgggcctatcgccggatttgtggtgcaacccatcgtgggctactacagcgaccggtgcacctcgaagatgggccggaggaggcccttcatcctcgcgggatgcatcatcatctgcctctctgtgttggtgatcgggttctcggcggacatcgggcggcgcctcggcgacaccaaggagcactgcagcacgttcaccggctcccgctggtccgccgccgccgtctacattgtcggattttggttccttgacttcgccaacaacacggtacagggaccggctcgcgcgatgatggccgacctggcagctggacagcacggccccaacgttggccaggcgatcttctccctgtggatggccctcggcagcgtgctcggatacttgtccggcgccaacgcgaaatggcacgactggctcccttggctcaaaaccgcggcgtgctgcgatgcgtgcgccaacctcaagggcgccttcttgactgcggtggtcctcattataatcagcatgtctgtcaccttgtggctcgccggcgaggagcggctcgacaaggaaagcgtcgacacctccggcggcgcgtgctccgcgttcatggatctcttcaagaccctcaagaagcttccgcctgccatgttcagcgtgctcgccgtcacggccgtcacatggctctcgtggttccccttcttccagtacaacaccgactggatgggccgggagatcttccacggcgagccgcagggcgcgggcggaaaggcggacctgtacgaagccggcgtccgcgagggcgccatcggcctcctattctgctccgtcgcgctcggtgtcacctccttcttcatccccaggctgtgccggaagctcacgtcccgggtcgtctggtccgtcagcagcctgatggtgttcgtcctcatgacggccatggtcgtcctcggcatggtctccatgaagggctacaggccctcgctcgccgcctccctctctggccccgaccactcgttcaagggcggcgccctcgccatcttcgcgctcatcggcatccctcaggccgtgctctacagcgtgccttgggccgtggcgtctgaggttgccaccgaggacggcggtggtcaaggtctcaccattggcgtcctcaacattgcaatcgtccttccacagctggtgatcgcgctgggcgcaggccccatcgacggcgccttcaacaaaggaaacaccccggccttcggcatcggcgccgccttcgcccttatctgcgcggtcctggcgctcatcctcctcccaaagacgagaggcgtctccaacgccaccgtcatggccggcgggcactgatctattatctatctccaggcaggcttgtcgcagcggctgaccggctgagagtagatcagaaattcagaatctgcttcttggtttcagccccacccgattaaggaggtgtttgattc

SEQ ID NO: 15791 - protein, 545 aa, Zea mays subsp. mays
  misc_feature (1)..(545): Ceres Seq. ID no. 12348841
FLFLLLAPRAADAAAMNGDGSKEDANRRLEWATLNLERGVVVSETTKGDGNGNAGRKAPISIVRLFLACMVSGGIQYGWALQLSLLSPYSQTLGISHSYVSLTWICGPIAGFVVQPIVGYYSDRCTSKMGRRRPFILAGCIIICLSVLVIGFSADIGRRLGDTKEHCSTFTGSRWSAAAVYIVGFWFLDFANNTVQGPARAMMADLAAGQHGPNVGQAIFSLWMALGSVLGYLSGANAKWHDWLPWLKTAACCDACANLKGAFLTAVVLIIISMSVTLWLAGEERLDKESVDTSGGACSAFMDLFKTLKKLPPAMFSVLAVTAVTWLSWFPFFQYNTDWMGREIFHGEPQGAGGKADLYEAGVREGAIGLLFCSVALGVTSFFIPRLCRKLTSRVVWSVSSLMVFVLMTAMVVLGMVSMKGYRPSLAASLSGPDHSFKGGALAIFALIGIPQAVLYSVPWAVASEVATEDGGGQGLTIGVLNIAIVLPQLVIALGAGPIDGAFNKGNTPAFGIGAAFALICAVLALILLPKTRGVSNATVMAGGH

SEQ ID NO: 15792 - protein, 530 aa, Zea mays subsp. mays
  misc_feature (1)..(530): Ceres Seq. ID no. 12348842
MNGDGSKEDANRRLEWATLNLERGVVVSETTKGDGNGNAGRKAPISIVRLFLACMVSGGIQYGWALQLSLLSPYSQTLGISHSYVSLTWICGPIAGFVVQPIVGYYSDRCTSKMGRRRPFILAGCIIICLSVLVIGFSADIGRRLGDTKEHCSTFTGSRWSAAAVYIVGFWFLDFANNTVQGPARAMMADLAAGQHGPNVGQAIFSLWMALGSVLGYLSGANAKWHDWLPWLKTAACCDACANLKGAFLTAVVLIIISMSVTLWLAGEERLDKESVDTSGGACSAFMDLFKTLKKLPPAMFSVLAVTAVTWLSWFPFFQYNTDWMGREIFHGEPQGAGGKADLYEAGVREGAIGLLFCSVALGVTSFFIPRLCRKLTSRVVWSVSSLMVFVLMTAMVVLGMVSMKGYRPSLAASLSGPDHSFKGGALAIFALIGIPQAVLYSVPWAVASEVATEDGGGQGLTIGVLNIAIVLPQLVIALGAGPIDGAFNKGNTPAFGIGAAFALICAVLALILLPKTRGVSNATVMAGGH

SEQ ID NO: 15793 - protein, 476 aa, Zea mays subsp. mays
  misc_feature (1)..(476): Ceres Seq. ID no. 12348843
MVSGGIQYGWALQLSLLSPYSQTLGISHSYVSLTWICGPIAGFVVQPIVGYYSDRCTSKMGRRRPFILAGCIIICLSVLVIGFSADIGRRLGDTKEHCSTFTGSRWSAAAVYIVGFWFLDFANNTVQGPARAMMADLAAGQHGPNVGQAIFSLWMALGSVLGYLSGANAKWHDWLPWLKTAACCDACANLKGAFLTAVVLIIISMSVTLWLAGEERLDKESVDTSGGACSAFMDLFKTLKKLPPAMFSVLAVTAVTWLSWFPFFQYNTDWMGREIFHGEPQGAGGKADLYEAGVREGAIGLLFCSVALGVTSFFIPRLCRKLTSRVVWSVSSLMVFVLMTAMVVLGMVSMKGYRPSLAASLSGPDHSFKGGALAIFALIGIPQAVLYSVPWAVASEVATEDGGGQGLTIGVLNIAIVLPQLVIALGAGPIDGAFNKGNTPAFGIGAAFALICAVLALILLPKTRGVSNATVMAGGH

SEQ ID NO: 15794 - DNA, 1887 bp, Zea mays subsp. mays
  misc_feature (1)..(1887): Ceres Seq. ID no. 12348859
aaaccgtcggaaccctagatctctctcgcccgcgctccgaaaccccagatccgccatgcaccagcctagagctcgctacccacccggctatggctccggcggtggaggcggagccggacgtggcggtggaggcggaaatggaggaggtggcggaaaccacaactactacggccgaaacccgcagcaacaccactaccaccagcagcagcagtcgcagcactctcataggaactcttcgtaccagcaacagtggctgcggcgagaccaggcccccgccgttgcgggggcagcgtccggaaacgctgtggccaagacggcgtctcagcttgacgccgtaggctcgagctcccaagactggaaggctcaactaaatataccagctccagatacacgctacaggacagaggatgtcactgcaacaaaaggcaatgagtttgaagattatttcttgaaacgtgaactgcttatgggaatctacgaaaagggatttgaaagaccatctcctattcaagaagaaagcattcctattgcgctgactggaagtgatattcttgcaagggcaaaaaatggcactggaaagactgctgccttttgcattccggcacttgaaaaaattgatcctgaaaaaaatgctattcaagttgttatactagtaccaacaagggaactggctctgcaaacttcgcaagtctgtaaagagctcgggaagtaccttaacattcaagttatggttagcactggaggaactagcttgaaggatgacatcatgcgtttataccaacctgttcatttacttgttgggactcctggccgaatacttgatcttaccaggaagggcatttgtgtgttgaaagactgttcaatgcttgtcatggatgaggcagacaagctattagctccagagttccagccttctgtggaggcacttattcatttccttccacctagtcggcagctgttgatgttttcagcaacctttcctgtaactgtcaaggaattcaaagataaatatctgcctagaccttatgtgattaatctaatggatgaactgaccctgaaaggaatcacacaatattatgcttttgtcgaagaaaggcaaaaagttcattgcctgaatacacttttctcaaagcttcaaattaatcaatccattatattctgcaactctgttaatagagttgagctactggctaagaaaataactgaactcggttattcatgcttctacattcatgctaagatgttgcaagaccacagaaaccgagtgtttcatgattttcgtaatggtgcttgcagaaaccttgtgtgcacagatctgtttaccagaggaattgatatccaggctgttaatgtggtcattaattttgacttccctaagacatctgagacatacttacacagggttggccgttctgggagatatggacaccttggtttggcagtgaacttgatcacttatgaagaccgtttcaacttatataggattgagcaagaacttggaacggaaattaagacaatacccccacagattgacctgtccatatactgccaatgatatgtgacagtttcaatgagcatcggacacattttatttattttgagaacatctgtacatagcaacccatcaagtgagttctccaactaaggcgcaactatttcagaagctacctaaatggctacattcctttgtcgtcacacatcaatttctcccccattctcgtcgggttttgttttaatgccttgatgtcgtttgtaagcttacttggattagtagaggaagtgtttcctgtaggctctgatctggtactaacctgtttagctgaggacatgcacattgggtgggctgcttggggcccaaaactatgatgagatgagacattatcttac

SEQ ID NO: 15795 - protein, 517 aa, Zea mays subsp. mays
  misc_feature (1)..(517): Ceres Seq. ID no. 12348860
NRRNPRSLSPALRNPRSAMHQPRARYPPGYGSGGGGGAGRGGGGGNGGGGGNHNYYGRNPQQHHYHQQQQSQHSHRNSSYQQQWLRRDQAPAVAGAASGNAVAKTASQLDAVGSSSQDWKAQLNIPAPDTRYRTEDVTATKGNEFEDYFLKRELLMGIYEKGFERPSPIQEESIPIALTGSDILARAKNGTGKTAAFCIPALEKIDPEKNAIQVVILVPTRELALQTSQVCKELGKYLNIQVMVSTGGTSLKDDIMRLYQPVHLLVGTPGRILDLTRKGICVLKDCSMLVMDEADKLLAPEFQPSVEALIHFLPPSRQLLMFSATFPVTVKEFKDKYLPRPYVINLMDELTLKGITQYYAFVEERQKVHCLNTLFSKLQINQSIIFCNSVNRVELLAKKITELGYSCFYIHAKMLQDHRNRVFHDFRNGACRNLVCTDLFTRGIDIQAVNVVINFDFPKTSETYLHRVGRSGRYGHLGLAVNLITYEDRFNLYRIEQELGTEIKTIPPQIDLSIYCQ

SEQ ID NO: 15796 - protein, 499 aa, Zea mays subsp. mays
  misc_feature (1)..(499): Ceres Seq. ID no. 12348861
MHQPRARYPPGYGSGGGGGAGRGGGGGNGGGGGNHNYYGRNPQQHHYHQQQQSQHSHRNSSYQQQWLRRDQAPAVAGAASGNAVAKTASQLDAVGSSSQDWKAQLNIPAPDTRYRTEDVTATKGNEFEDYFLKRELLMGIYEKGFERPSPIQEESIPIALTGSDILARAKNGTGKTAAFCIPALEKIDPEKNAIQVVILVPTRELALQTSQVCKELGKYLNIQVMVSTGGTSLKDDIMRLYQPVHLLVGTPGRILDLTRKGICVLKDCSMLVMDEADKLLAPEFQPSVEALIHFLPPSRQLLMFSATFPVTVKEFKDKYLPRPYVINLMDELTLKGITQYYAFVEERQKVHCLNTLFSKLQINQSIIFCNSVNRVELLAKKITELGYSCFYIHAKMLQDHRNRVFHDFRNGACRNLVCTDLFTRGIDIQAVNVVINFDFPKTSETYLHRVGRSGRYGHLGLAVNLITYEDRFNLYRIEQELGTEIKTIPPQIDLSIYCQ

SEQ ID NO: 15797 - protein, 362 aa, Zea mays subsp. mays
  misc_feature (1)..(362): Ceres Seq. ID no. 12348862
MGIYEKGFERPSPIQEESIPIALTGSDILARAKNGTGKTAAFCIPALEKIDPEKNAIQVVILVPTRELALQTSQVCKELGKYLNIQVMVSTGGTSLKDDIMRLYQPVHLLVGTPGRILDLTRKGICVLKDCSMLVMDEADKLLAPEFQPSVEALIHFLPPSRQLLMFSATFPVTVKEFKDKYLPRPYVINLMDELTLKGITQYYAFVEERQKVHCLNTLFSKLQINQSIIFCNSVNRVELLAKKITELGYSCFYIHAKMLQDHRNRVFHDFRNGACRNLVCTDLFTRGIDIQAVNVVINFDFPKTSETYLHRVGRSGRYGHLGLAVNLITYEDRFNLYRIEQELGTEIKTIPPQIDLSIYCQ

SEQ ID NO: 15798 - DNA, 1243 bp, Zea mays subsp. mays
  misc_feature (1)..(1243): Ceres Seq. ID no. 12348925
aaaccacccgaccccacatggccacatccgcgatgcccacgccgtgagcccgtgaggcgcgccgctggagccgccgcagccgttactatgacctcgccggcccccacctcctggttctccggcctctcgcgctcctcctccaccatggccggcggcgtcgcctcggcctcggcctccgcctccgcctccggccccgcctccgcgttcctccccgacgcgcccaagtccgtaatcggcgccggctccggaggaggcaagcggaatcatctctgcggggcgctgttcaagtacggccccaaatctgcgcaggtagcattcaggactggggattttaaccatcaggtgatcttcattggtggcctcacagatgggcttttagctactgattacttggaaccattgtcacttgcattggaggttgagaaatggtccttggtacagccattgctttcttcatcatacactggatatggaatttccagcttacagcaagatgcgttagaactagagcaactcatcagttacctaataaataaggaaaattctgaaggagtaatattgcttggtcatagtactggatgccaggatattgtgcattatatgcgcacaaactttgcctgttcgaaagcggtttctggggtcatcttgcaggccccagtaagtgacagggagtatagagcaactcttccggaaacagctgaaatgatagacctggcagccaaattgattagcgagggccgtggaatggatttgatgcctagaaaagcaaactcagatgctcctattactgcctacaggtaccactccctttgttcatatatgggtgatgatgacatgttcagttcagatctaagtgaagatcagctgaggcagagacttggtcatgtcaaccacacagtgccaggttattttttcaatgggggatgaatatgtgcctgaatatgttgataagagggctctagtagacaggctatgtagggcactgggaggtgcagagaaagtcgagatagaatggggaaaccatgctctgtccaacagagtgcaagaagcagttgtggccattgtagattttgtcaagagggaggggcccaaaggctgggatgacccatggagctagatacagcagttataatctcatttgtaactagtttgtgcttttcctcttctctcttttctccaattgtaacttctttcttttgcattattattggtccatttttcaatagtgatatgctatttttcc

SEQ ID NO: 15799 - protein, 308 aa, Zea mays subsp. mays
  misc_feature (1)..(308): Ceres Seq. ID no. 12348926
KPPDPTWPHPRCPRREPVRRAAGAAAAVTMTSPAPTSWFSGLSRSSSTMAGGVASASASASASGPASAFLPDAPKSVIGAGSGGGKRNHLCGALFKYGPKSAQVAFRTGDFNHQVIFIGGLTDGLLATDYLEPLSLALEVEKWSLVQPLLSSSYTGYGISSLQQDALELEQLISYLINKENSEGVILLGHSTGCQDIVHYMRTNFACSKAVSGVILQAPVSDREYRATLPETAEMIDLAAKLISEGRGMDLMPRKANSDAPITAYRYHSLCSYMGDDDMFSSDLSEDQLRQRLGHVNHTVPGYFFNGG

SEQ ID NO: 15800 - protein, 279 aa, Zea mays subsp. mays
  misc_feature (1)..(279): Ceres Seq. ID no. 12348927
MTSPAPTSWFSGLSRSSSTMAGGVASASASASASGPASAFLPDAPKSVIGAGSGGGKRNHLCGALFKYGPKSAQVAFRTGDFNHQVIFIGGLTDGLLATDYLEPLSLALEVEKWSLVQPLLSSSYTGYGISSLQQDALELEQLISYLINKENSEGVILLGHSTGCQDIVHYMRTNFACSKAVSGVILQAPVSDREYRATLPETAEMIDLAAKLISEGRGMDLMPRKANSDAPITAYRYHSLCSYMGDDDMFSSDLSEDQLRQRLGHVNHTVPGYFFNGG

SEQ ID NO: 15801 - protein, 260 aa, Zea mays subsp. mays
  misc_feature (1)..(260): Ceres Seq. ID no. 12348928
MAGGVASASASASASGPASAFLPDAPKSVIGAGSGGGKRNHLCGALFKYGPKSAQVAFRTGDFNHQVIFIGGLTDGLLATDYLEPLSLALEVEKWSLVQPLLSSSYTGYGISSLQQDALELEQLISYLINKENSEGVILLGHSTGCQDIVHYMRTNFACSKAVSGVILQAPVSDREYRATLPETAEMIDLAAKLISEGRGMDLMPRKANSDAPITAYRYHSLCSYMGDDDMFSSDLSEDQLRQRLGHVNHTVPGYFFNGG

SEQ ID NO: 15802 - DNA, 1743 bp, Zea mays subsp. mays
  misc_feature (1)..(1743): Ceres Seq. ID no. 12348976
acgacgctactcgtcctcatccagtcacgaaaaatcggaatctctgaaaaatcctccgtaccatgaagctccggttgcgatctatgcaggcgcgcggcggctccgccgccgtggagacccaccgcgtggacctgccgcccacggccactctggccgacgtgaagaccctcctcgcgtcgaagctctctgcggcgcaacccgtccccgccgagtccgtccgcctctccctcaaccgtagcgaggagctcgtctcgccggaccctgccgctacgctcccgtccctcggcctcgcgtccggtgatctcgtatttttcaccctatcccccctcacggccctagcgccgccggctcaggccctgccacggaaccctagcccgagctctggcgctgcagcgtcgatcgctgaggctgccgaccgcgggaagggttcgaagcaatctggtactggagatttctcttcctcgtcactggcgcaggctgtggttgtgagccctagctttccggtcgcttccggtacgcgggatgtggtgatggaggaggaggccgtcgatgccacaaagggctggtcgagttttgtgcttagggatctcaagagggagatggacaacgtcggggccgcggagggaaccgccgcaggtcgcctggttgcggccttgcatgcagctctgcttgatgccggttttctcaccgctaaactgacgggctctcacctttcgctgcctcagggctggccgtcaggtgctttgaagccattgaccatcaagtatactataccagagctttcatcaatggtatctgtgactgaggaaggaaaggtggtggtgctgaactactccttgatggccaatttcgtgatggtttatgggtatgttcctggggcacagtctgaggtttgccggttgtgcttggagttgccggggctggagcctctactttatctggatggcgatcagctgaatggagtgcatgagaagggagttcatgatctgtggagagtgctgaaggatgagatttgcctgccactgatgatatcattgtgccaactgaacggtctgccttgccgccttgcttgatggctttgcctgctgatctcaagactaaggtattggggtttttacctggggttgatcttgcaaaggttgagtgcacatgcaaggaaatgatgaatcttgcatcagatgatagtatctggaagaagcttgtatccaagtttgaaaattatggcgagggctctaggctggcaggcaagaatgcaaaggccatatttgtagaagcttggcaggccaataagagacggcagaagaggcccaatccaaccttttggaactatggctggggaaacagtccttatagccgcccacttaggctgccattgattggtggggactcggacagacttccttttattgggaatcatggttctgttgggcgccactttggaaatcaacgaaggaatatctcaccgaactgcattcttgatggtcaccgtcataacttcctttgaagccatgtcaatgagttttacttgtatgttaagagtgttttataaggacttcaatggtgcatatacggttagaccgccttgttcatatcgtcaagtcgcacacttatgcttgtgcacagcactcttatgatcttatcctaatatatccccttagtatcttagatcgtatctttactatctttttttggtaccaaatgtaatccagtgtcctagtaataaagtacccttgttctattctc

SEQ ID NO: 15803 - protein, 336 aa, Zea mays subsp. mays
  misc_feature (1)..(336): Ceres Seq. ID no. 12348977
MKLRLRSMQARGGSAAVETHRVDLPPTATLADVKTLLASKLSAAQPVPAESVRLSLNRSEELVSPDPAATLPSLGLASGDLVFFTLSPLTALAPPAQALPRNPSPSSGAAASIAEAADRGKGSKQSGTGDFSSSSLAQAVVVSPSFPVASGTRDVVMEEEAVDATKGWSSFVLRDLKREMDNVGAAEGTAAGRLVAALHAALLDAGFLTAKLTGSHLSLPQGWPSGALKPLTIKYTIPELSSMVSVTEEGKVVVLNYSLMANFVMVYGYVPGAQSEVCRLCLELPGLEPLLYLDGDQLNGVHEKGVHDLWRVLKDEICLPLMISLCQLNGLPCRLA

SEQ ID NO: 15804 - protein, 329 aa, Zea mays subsp. mays
  misc_feature (1)..(329): Ceres Seq. ID no. 12348978
MQARGGSAAVETHRVDLPPTATLADVKTLLASKLSAAQPVPAESVRLSLNRSEELVSPDPAATLPSLGLASGDLVFFTLSPLTALAPPAQALPRNPSPSSGAAASIAEAADRGKGSKQSGTGDFSSSSLAQAVVVSPSFPVASGTRDVVMEEEAVDATKGWSSFVLRDLKREMDNVGAAEGTAAGRLVAALHAALLDAGFLTAKLTGSHLSLPQGWPSGALKPLTIKYTIPELSSMVSVTEEGKVVVLNYSLMANFVMVYGYVPGAQSEVCRLCLELPGLEPLLYLDGDQLNGVHEKGVHDLWRVLKDEICLPLMISLCQLNGLPCRLA

SEQ ID NO: 15805 - protein, 180 aa, Zea mays subsp. mays
  misc_feature (1)..(180): Ceres Seq. ID no. 12348979
MEEEAVDATKGWSSFVLRDLKREMDNVGAAEGTAAGRLVAALHAALLDAGFLTAKLTGSHLSLPQGWPSGALKPLTIKYTIPELSSMVSVTEEGKVVVLNYSLMANFVMVYGYVPGAQSEVCRLCLELPGLEPLLYLDGDQLNGVHEKGVHDLWRVLKDEICLPLMISLCQLNGLPCRLA

SEQ ID NO: 15806 - DNA, 1391 bp, Zea mays subsp. mays
  misc_feature (1)..(1391): Ceres Seq. ID no. 12348999
atcctgaacccgaaagctgaactaccacacacaacaaataactgacgcaggcgatccatcactccacacaccggtcggaaccgaggccaaccaacgacgccgccgccaatgtcgtcccctgcagcgccggtgcagccgccgccgccgcgcgcggtgcgcttcggcgtcctgggatgcgctgacattgcgcgtaagatctcgcgcgcaatgctgatgctccctccgggcgccgccaccatcgccgccgtaggcagtcgctccgatgacaaggcccgccgcttcatctccgaaatcggcttccccgcggcgcgcgtccacgggtcctacgagtctctcctagaggacccggacgtggaggccgtgtacctcccgctccccaccagtctccacgtgccctgggccacagccgtcgctgcgcgtggcaagcacctgctcctcgagaagcccaccgcgctctgcactgccgaactcgacgccatcctcggcgcctgcgacgcctccggggtccagttcatggacaccaccatgtggatccacaacccgcgcaccgccaagatgcgggagatcgtcagcgacaaggacgcctttggcgacgtcagagtgataaacagtatgtgcagctttcgggcatccgaggaattcctcaagaatgacatcagggtaaagccagaccttgacgccttgggtgtcctcggtgatgttggatggtactgcatccgctcaatcctgtgggctgttgactatgagctgcctgagaccgtgatcgctcaccgccatcctgtcaagaaccaggctggcgtgctccttgcttgcggtgcgaccttgtactgggcagatggcaagactgcaaacttcaactgctcgtttcttgctaacctcgcctttgacgtgaccgtctatggcacaaacggcactctccatgtcactgacctggtcattccgtacgaagagagctctgcggagttcagtgtggcctcgaagtcaagcttcgtcaaacccaccatcggatgggatccattgccagagaagcatgttgttactactgatctgccacaggaggcactcatgatccaggaattcacaaggcttgtgcagaacgtccgcgccggtggcaggcctgagggtaagtggccggctatcacccggaagacgcaggtggtactggatgccgtgaaagcttctattgacaagggatctgaaccagttgaggttgccagctaaatacaacaaatgccagctccttgtgctaggtttgtacttaatggcttctactcgtatttgctgtcgcgcaaatgaaggtagtaattgtaatactgtcacgtaaattgaaactggtaattgtaataatcttaaggaatctggtcaaattgaggagaacatttttacagttt

SEQ ID NO: 15807 - protein, 370 aa, Zea mays subsp. mays
  misc_feature (1)..(370): Ceres Seq. ID no. 12349000
MSSPAAPVQPPPPRAVRFGVLGCADIARKISRAMLMLPPGAATIAAVGSRSDDKARRFISEIGFPAARVHGSYESLLEDPDVEAVYLPLPTSLHVPWATAVAARGKHLLLEKPTALCTAELDAILGACDASGVQFMDTTMWIHNPRTAKMREIVSDKDAFGDVRVINSMCSFRASEEFLKNDIRVKPDLDALGVLGDVGWYCIRSILWAVDYELPETVIAHRHPVKNQAGVLLACGATLYWADGKTANFNCSFLANLAFDVTVYGTNGTLHVTDLVIPYEESSAEFSVASKSSFVKPTIGWDPLPEKHVVTTDLPQEALMIQEFTRLVQNVRAGGRPEGKWPAITRKTQVVLDAVKASIDKGSEPVEVAS

SEQ ID NO: 15808 - protein, 337 aa, Zea mays subsp. mays
  misc_feature (1)..(337): Ceres Seq. ID no. 12349001
MLMLPPGAATIAAVGSRSDDKARRFISEIGFPAARVHGSYESLLEDPDVEAVYLPLPTSLHVPWATAVAARGKHLLLEKPTALCTAELDAILGACDASGVQFMDTTMWIHNPRTAKMREIVSDKDAFGDVRVINSMCSFRASEEFLKNDIRVKPDLDALGVLGDVGWYCIRSILWAVDYELPETVIAHRHPVKNQAGVLLACGATLYWADGKTANFNCSFLANLAFDVTVYGTNGTLHVTDLVIPYEESSAEFSVASKSSFVKPTIGWDPLPEKHVVTTDLPQEALMIQEFTRLVQNVRAGGRPEGKWPAITRKTQVVLDAVKASIDKGSEPVEVAS

SEQ ID NO: 15809 - protein, 335 aa, Zea mays subsp. mays
  misc_feature (1)..(335): Ceres Seq. ID no. 12349002
MLPPGAATIAAVGSRSDDKARRFISEIGFPAARVHGSYESLLEDPDVEAVYLPLPTSLHVPWATAVAARGKHLLLEKPTALCTAELDAILGACDASGVQFMDTTMWIHNPRTAKMREIVSDKDAFGDVRVINSMCSFRASEEFLKNDIRVKPDLDALGVLGDVGWYCIRSILWAVDYELPETVIAHRHPVKNQAGVLLACGATLYWADGKTANFNCSFLANLAFDVTVYGTNGTLHVTDLVIPYEESSAEFSVASKSSFVKPTIGWDPLPEKHVVTTDLPQEALMIQEFTRLVQNVRAGGRPEGKWPAITRKTQVVLDAVKASIDKGSEPVEVAS

SEQ ID NO: 15810 - DNA, 1212 bp, Zea mays subsp. mays
  misc_feature (1)..(1212): Ceres Seq. ID no. 12349007
aacggtcgcgagagtgaaggcaaggaaaaacacccaaacggccaaaccccaggaagccccgtcggaccctacagaccctaaccctagcgctcccgacgcgccgcggagcgatggcgatggacgcggagcggcggcaggcggagctgatcgcgcagttctccgctcaggcggcggcgctttcgtccgcgccccagctcgccgcgctggtgcttgaggccacctcccacccggccctcttcgccttctccgagctcctcaccctcccggccctctccaagctcactggcacgcagtacgcgtcgtcactggacttgctccggctcttcgcctacggtaccctgaatgactacaagagtaattctggattccttccagcactgttgcctgaccaggtccgaaagctaaagcagctcagcgtgctaactctggcagagtcaactaagatactaccgtatgatcagctcatgcaagagttagacgtttcaaatgtaagagaactcgaagatttcctaatcaatgagtgcatgtattcgggtatcgttagaggcaaactggatcagctgagaaggtgctttgaggtacaatttgcagctggaagagatcttacacctgatcagctaaagaacatgatagagactttgtctgattggttgggaacatcagatagactgttgcatcaaattcaggagaaaatcaagtgggctgacacaatgagtgaggtgaacaagaagcaccagaaagaatttgaagacagagtggaagaggccaaaaaatcaatcaagcaggcagacattgacttacgggggcatgacgagtttctctctgaatctggaggaataatggattttgaagaggaccgcgtccgaccaaaaaggaggaggcaaccaccggcgtagtttcaattagcccttaccaatctctcccagaatgggacctgctgataccttgattgagacattttgacgccggagttgagtaaactttgtacatctgtcgtgtgatgcctccactgtagcgagtctgtttattttgccttctggtcttggtggggacgtacaaggccaaacctaggcgttatgttgcatttatttggtagtaaatggcccatggaagaaataacgttgttatgattatggcactgggttattctcaagtgtactgaacgataacagaagcacctctgttaaatgatgattgactcgaggcttgctg

SEQ ID NO: 15811 - protein, 261 aa, Zea mays subsp. mays
  misc_feature (1)..(261): Ceres Seq. ID no. 12349008
MAMDAERRQAELIAQFSAQAAALSSAPQLAALVLEATSHPALFAFSELLTLPALSKLTGTQYASSLDLLRLFAYGTLNDYKSNSGFLPALLPDQVRKLKQLSVLTLAESTKILPYDQLMQELDVSNVRELEDFLINECMYSGIVRGKLDQLRRCFEVQFAAGRDLTPDQLKNMIETLSDWLGTSDRLLHQIQEKIKWADTMSEVNKKHQKEFEDRVEEAKKSIKQADIDLRGHDEFLSESGGIMDFEEDRVRPKRRRQPPA

SEQ ID NO: 15812 - protein, 259 aa, Zea mays subsp. mays
  misc_feature (1)..(259): Ceres Seq. ID no. 12349009
MDAERRQAELIAQFSAQAAALSSAPQLAALVLEATSHPALFAFSELLTLPALSKLTGTQYASSLDLLRLFAYGTLNDYKSNSGFLPALLPDQVRKLKQLSVLTLAESTKILPYDQLMQELDVSNVRELEDFLINECMYSGIVRGKLDQLRRCFEVQFAAGRDLTPDQLKNMIETLSDWLGTSDRLLHQIQEKIKWADTMSEVNKKHQKEFEDRVEEAKKSIKQADIDLRGHDEFLSESGGIMDFEEDRVRPKRRRQPPA

SEQ ID NO: 15813 - protein, 143 aa, Zea mays subsp. mays
  misc_feature (1)..(143): Ceres Seq. ID no. 12349010
MQELDVSNVRELEDFLINECMYSGIVRGKLDQLRRCFEVQFAAGRDLTPDQLKNMIETLSDWLGTSDRLLHQIQEKIKWADTMSEVNKKHQKEFEDRVEEAKKSIKQADIDLRGHDEFLSESGGIMDFEEDRVRPKRRRQPPA

SEQ ID NO: 15814 - DNA, 1672 bp, Zea mays subsp. mays
  misc_feature (1)..(1672): Ceres Seq. ID no. 12349023
ccgtccactcctttggtctcaaatcctcaatcatgcccggaattttgtaccagctcgtcgtcgccgccgccatctgcgccctctccagcggcagcatcgcggtcgcctcaggtttgaatgcgaccgactcgttcctcgtctgcctcatcggcgccggcgtcccgccgcgcctccttcagaccccggcgtccccgtcgtactccgcgacgctgctctcatccttacgcaacctccgctacgtcacgtcggacattcagcggccggtcgccatcgtggccgccaccgagccagcccacgcgcaggcggccgtacgctgcggccgccgccacggcgtccgcgtccgcgcccgaagcggcgggcacgactacgagggcctatcctacgcctccctcgacccccgcgagcgcttcgccgtgctcgacctcgccgctttccgtgacgtccgcgtcgactccgcgcgcgccgaggcgtgggctggatcgggggccacgctcggcgaggtctactatgccgtcgccgccgccagccgcgtgctcgcgttccccgcggggatctgccccactgtcggcgtaggaggacacctcagcggcggcggcttcggcacgctgatgcgcaggtacggcctcgccgcggacaacgtcattgacgccgtcctcgttgacgccgacgggaggctgctgaaccggaccaccatgggggaggatctgttctgggccatccgcggtggcggcggggagagcttcggtgtcatactgtcttggaagctccgcctcgtgcgcgtgccggagacagtcaccgtgttcaccgtgcgccggtcaataaaccagtccgcctcccaactcatcaccaaatggcaggcaatcgcgccggcgctgcccagtgacctcatcctccgagtcgccgtccggagccagcccgcgcggtttgaggcactgttcctcggccgctgcagccgcctccttgagcacatgagagctcacttcccggaccttggcgtcacccaatcggactgcgaggagataagctggatccagtccaccgtgtacttcgccttctactcgagctccaagccactggagctgctcctggacaggagcggcgagacgcccagatacgtcaaggccaagtccgactacgtgcaagaacccatcccacggcacgtgtgggagagaacatggtcatggctggagaagcccgaggccgggctgctcatcctggacccctacggcggccggatgggcagcatctctccgtcagcgacgccgttcccgcaccggaaggggaacctgtacaacctccagtactactcgtattggttcgagaatggcactgcggcattggagaagcggatgagctgggtcagggggctgtacgaggagatggagccgtatgtgtccaagaacccaagaactggatatgtcaactacagggacctggatcttgggacgaacgagttggaggacaatgtgactagctacgccagggcgaggatctggggggagaagtatttcaaaggcaattttgagaggctggcagctgtgaaggccatggcggatcctgatgacttcttcaggaatgagcagagcatccctcctcttcccgctgcaaaaggatggggcttcatttgagtggtcgtttgtttcgtagctttgtggtggtggatttcttggct

SEQ ID NO: 15815 - protein, 541 aa, Zea mays subsp. mays
  misc_feature (1)..(541): Ceres Seq. ID no. 12349024
VHSFGLKSSIMPGILYQLVVAAAICALSSGSIAVASGLNATDSFLVCLIGAGVPPRLLQTPASPSYSATLLSSLRNLRYVTSDIQRPVAIVAATEPAHAQAAVRCGRRHGVRVRARSGGHDYEGLSYASLDPRERFAVLDLAAFRDVRVDSARAEAWAGSGATLGEVYYAVAAASRVLAFPAGICPTVGVGGHLSGGGFGTLMRRYGLAADNVIDAVLVDADGRLLNRTTMGEDLFWAIRGGGGESFGVILSWKLRLVRVPETVTVFTVRRSINQSASQLITKWQAIAPALPSDLILRVAVRSQPARFEALFLGRCSRLLEHMRAHFPDLGVTQSDCEEISWIQSTVYFAFYSSSKPLELLLDRSGETPRYVKAKSDYVQEPIPRHVWERTWSWLEKPEAGLLILDPYGGRMGSISPSATPFPHRKGNLYNLQYYSYWFENGTAALEKRMSWVRGLYEEMEPYVSKNPRTGYVNYRDLDLGTNELEDNVTSYARARIWGEKYFKGNFERLAAVKAMADPDDFFRNEQSIPPLPAAKGWGFI

SEQ ID NO: 15816 - protein, 531 aa, Zea mays subsp. mays
  misc_feature (1)..(531): Ceres Seq. ID no. 12349025
MPGILYQLVVAAAICALSSGSIAVASGLNATDSFLVCLIGAGVPPRLLQTPASPSYSATLLSSLRNLRYVTSDIQRPVAIVAATEPAHAQAAVRCGRRHGVRVRARSGGHDYEGLSYASLDPRERFAVLDLAAFRDVRVDSARAEAWAGSGATLGEVYYAVAAASRVLAFPAGICPTVGVGGHLSGGGFGTLMRRYGLAADNVIDAVLVDADGRLLNRTTMGEDLFWAIRGGGGESFGVILSWKLRLVRVPETVTVFTVRRSINQSASQLITKWQAIAPALPSDLILRVAVRSQPARFEALFLGRCSRLLEHMRAHFPDLGVTQSDCEEISWIQSTVYFAFYSSSKPLELLLDRSGETPRYVKAKSDYVQEPIPRHVWERTWSWLEKPEAGLLILDPYGGRMGSISPSATPFPHRKGNLYNLQYYSYWFENGTAALEKRMSWVRGLYEEMEPYVSKNPRTGYVNYRDLDLGTNELEDNVTSYARARIWGEKYFKGNFERLAAVKAMADPDDFFRNEQSIPPLPAAKGWGFI

SEQ ID NO: 15817 - protein, 339 aa, Zea mays subsp. mays
  misc_feature (1)..(339): Ceres Seq. ID no. 12349026
MRRYGLAADNVIDAVLVDADGRLLNRTTMGEDLFWAIRGGGGESFGVILSWKLRLVRVPETVTVFTVRRSINQSASQLITKWQAIAPALPSDLILRVAVRSQPARFEALFLGRCSRLLEHMRAHFPDLGVTQSDCEEISWIQSTVYFAFYSSSKPLELLLDRSGETPRYVKAKSDYVQEPIPRHVWERTWSWLEKPEAGLLILDPYGGRMGSISPSATPFPHRKGNLYNLQYYSYWFENGTAALEKRMSWVRGLYEEMEPYVSKNPRTGYVNYRDLDLGTNELEDNVTSYARARIWGEKYFKGNFERLAAVKAMADPDDFFRNEQSIPPLPAAKGWGFI

SEQ ID NO: 15818 - DNA, 1797 bp, Zea mays subsp. mays
  misc_feature (1)..(1797): Ceres Seq. ID no. 12349027
actagagggtcatggcatggggcatggatggactggtgcgtgtgatcctgatcttgccgagtgcaatcgagatccgtgccagcccgtccatactgcggtggcgtggcggtgacgtgccggcgcggcgcggcgcggcgccgataagaggtagagagaggaaaaaaaagaacaatcaattctccagaccctccccggcaaccgcgtccggccgtccgcttccgtttccttggataaccacgacgcccgccggcaagcgaaagcgaagcgagccaacccagccatggagaaggcgatcgatcggcagcgggtcctcctggcgcacctcctcccctccccctccgccgcctcctcgcagcctcaccttgcggcgtcggcgtgcgcggccggggacagcgccgcctaccagaggtcctcctccttcggggacgatgtcgtcgtcgtcgctgcctacaggacgccgatatgcaaggccaagcgaggaggcttcaaggacacctacccagaggacctcctcactgttgttctcaaggctgttctggacaacactagaatcaatccagctgacatcggtgacatcgtcgttgggacggtgctcggccctggttcccagcgtgcaaacgagtgcaggatggctgcgttgtttgctggcttccctgaaaccgtccctgttagaactgtcaaccgccagtgttcatctgggctacaggcagtagccgatgtcgcagctgctataaaggctggttactatgacatagggattggtgctggtttggaatccatgtccataaattccattgcttgggaaggacaagttaacccaaaaataagcgcattccagaaagcacaggattgtcttctgcccatgggaattacgtctgaaaatgttgcccatcgatatggtgtaaccaggcaagagcaagatcaggccgccgctgagtctcataggagagctgctgcagccacggcctctggaaaattcaaggatgagatcgtcccggtgccaacaaagatcgttgatcctaaaactggagaggagaaggaagttgtgatatcagttgatgatgggattaggccagggaccacagcatctggattggcgaaactgaaaccagtttttaaaaaggatggaactacaactgcaggcaattccagtcaagtgagtgatggtgctggagctgttcttctcatgaaaagatctgtggctctgaagaaagggctgcccattcttggtgttttcaggagctttgcggctgttggagtggatccagctgttatgggtgttggtcctgctgtggccattcctgctgctgtgaagtctgcaggccttgagattggcgacattgatctgtttgaactgaatgaggccttcgcctctcagtttgtctattgctgcaacaagttggggctggaccgttctaaagtaaatgtaaatggaggcgcgattgcccttggacaccctctgggtgcaacaggtgcccggtgtgtggctactcttctaaatgaaatgaagcgccggggcagagactgcagatttggtgttgtcaccatgtgtatcggatctggaatgggggcagcagctgtgttcgagcggggagacgcggtggatggactctccaacgtgagggacatgcaggcacataattttctgtctaaggatgcgaagtagaggcgcagaaaaaccatccatcctagagcagcataagcctgctgcatttgtaatatattcgaaatccgtatcttttttcttcacaagcactactctatatacgatgaataaaagggcgacaatacagtgtc

SEQ ID NO: 15819 - protein, 461 aa, Zea mays subsp. mays
  misc_feature (1)..(461): Ceres Seq. ID no. 12349028
MEKAIDRQRVLLAHLLPSPSAASSQPHLAASACAAGDSAAYQRSSSFGDDVVVVAAYRTPICKAKRGGFKDTYPEDLLTVVLKAVLDNTRINPADIGDIVVGTVLGPGSQRANECRMAALFAGFPETVPVRTVNRQCSSGLQAVADVAAAIKAGYYDIGIGAGLESMSINSIAWEGQVNPKISAFQKAQDCLLPMGITSENVAHRYGVTRQEQDQAAAESHRRAAAATASGKFKDEIVPVPTKIVDPKTGEEKEVVISVDDGIRPGTTASGLAKLKPVFKKDGTTTAGNSSQVSDGAGAVLLMKRSVALKKGLPILGVFRSFAAVGVDPAVMGVGPAVAIPAAVKSAGLEIGDIDLFELNEAFASQFVYCCNKLGLDRSKVNVNGGAIALGHPLGATGARCVATLLNEMKRRGRDCRFGVVTMCIGSGMGAAAVFERGDAVDGLSNVRDMQAHNFLSKDAK

SEQ ID NO: 15820 - protein, 345 aa, Zea mays subsp. mays
  misc_feature (1)..(345): Ceres Seq. ID no. 12349029
MAALFAGFPETVPVRTVNRQCSSGLQAVADVAAAIKAGYYDIGIGAGLESMSINSIAWEGQVNPKISAFQKAQDCLLPMGITSENVAHRYGVTRQEQDQAAAESHRRAAAATASGKFKDEIVPVPTKIVDPKTGEEKEVVISVDDGIRPGTTASGLAKLKPVFKKDGTTTAGNSSQVSDGAGAVLLMKRSVALKKGLPILGVFRSFAAVGVDPAVMGVGPAVAIPAAVKSAGLEIGDIDLFELNEAFASQFVYCCNKLGLDRSKVNVNGGAIALGHPLGATGARCVATLLNEMKRRGRDCRFGVVTMCIGSGMGAAAVFERGDAVDGLSNVRDMQAHNFLSKDAK

SEQ ID NO: 15821 - protein, 295 aa, Zea mays subsp. mays
  misc_feature (1)..(295): Ceres Seq. ID no. 12349030
MSINSIAWEGQVNPKISAFQKAQDCLLPMGITSENVAHRYGVTRQEQDQAAAESHRRAAAATASGKFKDEIVPVPTKIVDPKTGEEKEVVISVDDGIRPGTTASGLAKLKPVFKKDGTTTAGNSSQVSDGAGAVLLMKRSVALKKGLPILGVFRSFAAVGVDPAVMGVGPAVAIPAAVKSAGLEIGDIDLFELNEAFASQFVYCCNKLGLDRSKVNVNGGAIALGHPLGATGARCVATLLNEMKRRGRDCRFGVVTMCIGSGMGAAAVFERGDAVDGLSNVRDMQAHNFLSKDAK

SEQ ID NO: 15822 - DNA, 1317 bp, Zea mays subsp. mays
  misc_feature (1)..(1317): Ceres Seq. ID no. 12349036
aatttttcctcacgtattatcctcttgcttgttcgtccggttcttcgccctcgccgcgcgggactaccaatccaaactggcgacgaccctgctgccaccccacagcagatttgaggagcggacgcccgtttaaatggctattggagtcccatccatggagctccaccgctcctcaccgttgctctcgggtggccgaggaggaaatacatgcctacagaagaagcccttctttgtccaagcaaagagactagtggggatggagaaagcaagtacgaggccaggaacacaagagtctggacagacaaagaaaagagcacccctggttcgtggaactgttagcccacctcttccagtaccaggaaacatacctcggcctccttatgtcggcacagaatatgtaccagagatagcaaaagagatacaaatgcatgacaaagagggcattgtccacatgagagctgcttgcgagctcgcggctcgtgttcttgactatgcaggaacgttagtgaaaccctctgtaacaacagacgaaattgataaagcagtgcacaagatgatcatcgatgctggagcctatccatcaccacttggatatggtgggtttccaaaaagtgtatgcacctcagtgaatgagtgcatgtgccatggaattcctgattcacgcgagctacaggatggagacataattaacattgatgtcactgtctacttgaatggttatcatggggatacctcaaaaacatttctttgtggagaagtcgatgaagccagtaaacgacttgtgaaggttactgaagagtgcttgctcaggggcatatcaacatgcaaacatggtaccagctttaagaagattggcagaagaataagtgagcatgctgagaggaacggttttggtgttgtggagtgttttgttgggcatggagtcggcagggtatttcactcagaaccaattatctatcaccagaggaacaacagaccgggccagatgattgaagggcagactttcacaatagagccgatcatatcgatggggagcatcgagtgcgacatgtgggacgacggctggactgccgtgacgacggacggcagcttggcggcgcagttcgagcacaccatactgatcaccaggaccggagccgagatcctcaccaagtgctaggaggaaaggaaatcgcatgtgcccgatagccgacggtaggtaatctgtattcgtgaggtggtgaggatgcttgaggtgacctattttgtctcgcaaaatgggcgtgctacagaatagtgaagaaaagggttgagagattgcaaatggcaggtttggcc

SEQ ID NO: 15823 - protein, 341 aa, Zea mays subsp. mays
  misc_feature (1)..(341): Ceres Seq. ID no. 12349037
MAIGVPSMELHRSSPLLSGGRGGNTCLQKKPFFVQAKRLVGMEKASTRPGTQESGQTKKRAPLVRGTVSPPLPVPGNIPRPPYVGTEYVPEIAKEIQMHDKEGIVHMRAACELAARVLDYAGTLVKPSVTTDEIDKAVHKMIIDAGAYPSPLGYGGFPKSVCTSVNECMCHGIPDSRELQDGDIINIDVTVYLNGYHGDTSKTFLCGEVDEASKRLVKVTEECLLRGISTCKHGTSFKKIGRRISEHAERNGFGVVECFVGHGVGRVFHSEPIIYHQRNNRPGQMIEGQTFTIEPIISMGSIECDMWDDGWTAVTTDGSLAAQFEHTILITRTGAEILTKC

SEQ ID NO: 15824 - protein, 334 aa, Zea mays subsp. mays
  misc_feature (1)..(334): Ceres Seq. ID no. 12349038
MELHRSSPLLSGGRGGNTCLQKKPFFVQAKRLVGMEKASTRPGTQESGQTKKRAPLVRGTVSPPLPVPGNIPRPPYVGTEYVPEIAKEIQMHDKEGIVHMRAACELAARVLDYAGTLVKPSVTTDEIDKAVHKMIIDAGAYPSPLGYGGFPKSVCTSVNECMCHGIPDSRELQDGDIINIDVTVYLNGYHGDTSKTFLCGEVDEASKRLVKVTEECLLRGISTCKHGTSFKKIGRRISEHAERNGFGVVECFVGHGVGRVFHSEPIIYHQRNNRPGQMIEGQTFTIEPIISMGSIECDMWDDGWTAVTTDGSLAAQFEHTILITRTGAEILTKC

SEQ ID NO: 15825 - protein, 300 aa, Zea mays subsp. mays
  misc_feature (1)..(300): Ceres Seq. ID no. 12349039
MEKASTRPGTQESGQTKKRAPLVRGTVSPPLPVPGNIPRPPYVGTEYVPEIAKEIQMHDKEGIVHMRAACELAARVLDYAGTLVKPSVTTDEIDKAVHKMIIDAGAYPSPLGYGGFPKSVCTSVNECMCHGIPDSRELQDGDIINIDVTVYLNGYHGDTSKTFLCGEVDEASKRLVKVTEECLLRGISTCKHGTSFKKIGRRISEHAERNGFGVVECFVGHGVGRVFHSEPIIYHQRNNRPGQMIEGQTFTIEPIISMGSIECDMWDDGWTAVTTDGSLAAQFEHTILITRTGAEILTKC

SEQ ID NO: 15826 - DNA, 1471 bp, Zea mays subsp. mays
  misc_feature (1)..(1471): Ceres Seq. ID no. 12349040
acgcctcctcccctaccattcgcagttttggacacttggttgtcgtttcgtcccgcagatccgcaagcaccggggccagtagagagagagagagagaggagggagggtcgcggcctcgcggggggtggaggagatgtctgtggcgaaggaggcggggccgagcagcagggcggtgcttgtgacgggcggggcgggatacatcggcagccacgccgtgctgcagctgctcaccgcgggcttccgggtcgtcgtcgtcgacagcctcgccaactcctccgagctcgtgatccgccgcctgcgctcgctcgcggtggaacacgccaaaaacctcgcgttccacaaggttgatatccgtgacaaagatggattggaaaaggtttttgcttcaacaagatttgatgctgttattcattttgctggactgaaagctgttggagaaagtgtacaaaagcctttgctttattatgaccataatgttgttggcacaataaatcttctggaagtaatggcagctcatggatgtaagaagttagtgttctcatcatcagctgcagtttatgggtcacctaagaactcaccctgcactgaagattttcctctcactccacataacccatatggcagaaccaaacttatggcagaggagatatgccgtgatatctaccattcagatcctgaatggaatatcattttgcttaggtactttaatccagttggggctcaccccagtggataccttggtgaagacccatgtggaactcctaacaaccttatgcccttcgttcagcaaattgcagttggcaggaggccatcgctaacaatatttggaaataactacgcaacaaaggatgggacaggggttcgtgattatattcatgtggttgaccttgctgaaggacatcttttcgcattaaagaagctttttgaaagctcatctaacataggatgtgaagcatacaaccttggaaccggaaaaggaacatcagtgttggagatagtcaatgcatttgagaaggcttctggaaagaaaatccctttgatcatgggccaacggcgtcctggtgatgctgagattctcttttcatcgccggcaaaagcagagagagagctccactggaaagcgaaatatggcatcacagaaatgtgcggagacctgtggaactgggctagcaagagcccttatggatacgcggcatctgagtctccgaagctgaatggtagttcacgctgagcaacgccgattggcccgtgtggactcacttgtacatgagactgtagtgccagccaaccaggataaatgtagatctagtcggtcggtcatacagagagaagttctataggcctaggaaagaaatgttatcctgttcctcagcataagctcccatagtggttcttccatatgcgtatagtctatgaaatttgttctaggaccattgctatagtcaaccagctaattcaattctatttcttg

SEQ ID NO: 15827 - protein, 365 aa, Zea mays subsp. mays
  misc_feature (1)..(365): Ceres Seq. ID no. 12349041
MSVAKEAGPSSRAVLVTGGAGYIGSHAVLQLLTAGFRVVVVDSLANSSELVIRRLRSLAVEHAKNLAFHKVDIRDKDGLEKVFASTRFDAVIHFAGLKAVGESVQKPLLYYDHNVVGTINLLEVMAAHGCKKLVFSSSAAVYGSPKNSPCTEDFPLTPHNPYGRTKLMAEEICRDIYHSDPEWNIILLRYFNPVGAHPSGYLGEDPCGTPNNLMPFVQQIAVGRRPSLTIFGNNYATKDGTGVRDYIHVVDLAEGHLFALKKLFESSSNIGCEAYNLGTGKGTSVLEIVNAFEKASGKKIPLIMGQRRPGDAEILFSSPAKAERELHWKAKYGITEMCGDLWNWASKSPYGYAASESPKLNGSSR

SEQ ID NO: 15828 - protein, 241 aa, Zea mays subsp. mays
  misc_feature (1)..(241): Ceres Seq. ID no. 12349042
MAAHGCKKLVFSSSAAVYGSPKNSPCTEDFPLTPHNPYGRTKLMAEEICRDIYHSDPEWNIILLRYFNPVGAHPSGYLGEDPCGTPNNLMPFVQQIAVGRRPSLTIFGNNYATKDGTGVRDYIHVVDLAEGHLFALKKLFESSSNIGCEAYNLGTGKGTSVLEIVNAFEKASGKKIPLIMGQRRPGDAEILFSSPAKAERELHWKAKYGITEMCGDLWNWASKSPYGYAASESPKLNGSSR

SEQ ID NO: 15829 - protein, 198 aa, Zea mays subsp. mays
  misc_feature (1)..(198): Ceres Seq. ID no. 12349043
MAEEICRDIYHSDPEWNIILLRYFNPVGAHPSGYLGEDPCGTPNNLMPFVQQIAVGRRPSLTIFGNNYATKDGTGVRDYIHVVDLAEGHLFALKKLFESSSNIGCEAYNLGTGKGTSVLEIVNAFEKASGKKIPLIMGQRRPGDAEILFSSPAKAERELHWKAKYGITEMCGDLWNWASKSPYGYAASESPKLNGSSR

SEQ ID NO: 15830 - DNA, 1238 bp, Zea mays subsp. mays
  misc_feature (1)..(1238): Ceres Seq. ID no. 12349046
ctatctaatgcatgccgagtatcattttctccagaaggtcccatatctgaagaggcgcttgagagagtccgtgcactgttagatatgataagacctctagatgtcggcctagataatgaagcccaaattgcacgcaattggagtagttctacgcgtccatcaaatgggagacgaggacgcaatggggctaaccagttcgcggctccaatcaaatatttgcacattcatgaatgtgaaagcttctctatgggtatattttgtatgccaccttcttcagttatcccacttcataatcatcctggaatgactgtacttagcaagcttctttatggacgtctgcatgctgaatcttatgactgggttgacatacctgatcatccaattgatcaattacaaacaaggccagccaagcttgttaaagattgtgaaatgactgctccagagacaactattctttaccctaatgcaggtggtaacatccacactttcagagccattacaccttgtgctctctttgacgttctttctccaccatactccgctgaggatgggcgacactgttcatacttccgaaaatctcagatgaatcagccacctgttgttttgcctgctgagatagatagctctcaggtagtttggttggaggagttggaggaccatcagcccccagaaggctttgttgttgcaagaggtctgtataaaggccctgtaattaggagataatttgctttggagcgcagaatcaaccaagctgcaaatcagctgaaagacgatgcaggcttgtagtgcctagtgcaagcatcgtcaggtcatgtgcagcctacggtttatttgtacatctcaaagtgatctttgataatttaacagcagttttacagaacaggaacggatgttttttgtttggctgccattttaactgtgtcccactgctggagtatctctgacctagttatggagctcttatcagatcaagaccatggagaacatacttttgatgtaccagcatagctattgtcatgatgtaccagggaagatcaagacaagtgtttccatttggtgatttcagaaagaatttggtgtggggctaccattttgtctgtgtaatagcagcattactattttggagcaagactgtaaattacgggagaggaactataataatatcattaggtttatcatgaaatatattttcatggtgtatctatttaggccttgtttggaaggagatctttttctgc

SEQ ID NO: 15831 - protein, 240 aa, Zea mays subsp. mays
  misc_feature (1)..(240): Ceres Seq. ID no. 12349047
LSNACRVSFSPEGPISEEALERVRALLDMIRPLDVGLDNEAQIARNWSSSTRPSNGRRGRNGANQFAAPIKYLHIHECESFSMGIFCMPPSSVIPLHNHPGMTVLSKLLYGRLHAESYDWVDIPDHPIDQLQTRPAKLVKDCEMTAPETTILYPNAGGNIHTFRAITPCALFDVLSPPYSAEDGRHCSYFRKSQMNQPPVVLPAEIDSSQVVWLEELEDHQPPEGFVVARGLYKGPVIRR

SEQ ID NO: 15832 - protein, 212 aa, Zea mays subsp. mays
  misc_feature (1)..(212): Ceres Seq. ID no. 12349048
MIRPLDVGLDNEAQIARNWSSSTRPSNGRRGRNGANQFAAPIKYLHIHECESFSMGIFCMPPSSVIPLHNHPGMTVLSKLLYGRLHAESYDWVDIPDHPIDQLQTRPAKLVKDCEMTAPETTILYPNAGGNIHTFRAITPCALFDVLSPPYSAEDGRHCSYFRKSQMNQPPVVLPAEIDSSQVVWLEELEDHQPPEGFVVARGLYKGPVIRR

SEQ ID NO: 15833 - protein, 158 aa, Zea mays subsp. mays
  misc_feature (1)..(158): Ceres Seq. ID no. 12349049
MGIFCMPPSSVIPLHNHPGMTVLSKLLYGRLHAESYDWVDIPDHPIDQLQTRPAKLVKDCEMTAPETTILYPNAGGNIHTFRAITPCALFDVLSPPYSAEDGRHCSYFRKSQMNQPPVVLPAEIDSSQVVWLEELEDHQPPEGFVVARGLYKGPVIRR

SEQ ID NO: 15834 - DNA, 1578 bp, Zea mays subsp. mays
  misc_feature (1)..(1578): Ceres Seq. ID no. 12349057
accccaacccaacccctgccgcgcccgcacccagcgccccgagccctgctcccccatcgtcttcttccttgtccgtctccactaccgaccaacggctgcctgctcacacttcgccactactgctgctgcgcgttggcgagcgcgcgtggttcacgagcgagctccaccacaagcccagtcgcgcacggcagccgttttgcttgttttgtttgcttaccgcctcttccgtccttcctcttttgcgcggcctggctggctgggctagctagctgttctgttcattccgagttcccggcatagcacacgaggttggagttggaggcgtaccgagggagcagacagcagaggacactataagagtagctagccctacccaacatcttcagccgtgcttgccaacttggagagagagagagagaaaagagaagagaagggagtgatcgcaggaaggaggatcggagtgatgggagacgcagcagagaccaacaagactcttcacaactggatgggcgagccgaggccgaggtcgagcgaccagcgcgacgaggaggagacgcttcagctcagcctcggcctccccggaggaggagcaagtgcgggtggtgtggtagcacccgccgcctggagaatgctgccggccagagacgaggagatgcgctctgctgctgctgtcgtcgacacctccctgctctctctcggctactccgccccagctttctcgccccgctcaccaggcaaggcaaaggggtccccagcagcagctacagagaatgcccttgcatccaccaacaacgcctcccagagaagatctccaaataccccggttattgggtggcctccagttcgtgccttcagaagaaatctggccacctctagcagagcatctcttgaaaatcagaatgggaagaaggcagccaaacctgaacagaccacaaaaagagctccatttgtaaagatcaacatggacggcatccctattggtagaaaaatcgacctgagtgccctcggtagttacgatgagctgtctctgtctgtcgacaagctattccgggggcttcttgcagcacaacaagaccctctggctgccggcgcaaaggagtgttcacaggaagaggtggcgatatcgggtttactagatggaactggggagtacactctggtttatgaggattatgaaggcgatagggtgctggttggcgatgtcccctgggggatgtttgtttcttcggtgaagaggctgcgcgttctgaagacatctgacctctcttcatctctaacagcacctcctggccagaagaggacggtaaccgagtgtccagtgtttacctcttagacacttccttgcagtgatgttggtgtgctgtgaagaagaaaacgtcttctgagcttgtatcatctttcttcctggtttcttcctcttcttttccctactttctcttggaaggaatcatcaaagaaccgaaccgaccttttgggttttcctgctcttgtttattttgtttctctttccgggaagcgatgtgaccttttgggttgtatgtaaatgttcagacgaaccagctctatgtttatgcagcc

SEQ ID NO: 15835 - protein, 289 aa, Zea mays subsp. mays
  misc_feature (1)..(289): Ceres Seq. ID no. 12349058
MGDAAETNKTLHNWMGEPRPRSSDQRDEEETLQLSLGLPGGGASAGGVVAPAAWRMLPARDEEMRSAAAVVDTSLLSLGYSAPAFSPRSPGKAKGSPAAATENALASTNNASQRRSPNTPVIGWPPVRAFRRNLATSSRASLENQNGKKAAKPEQTTKRAPFVKINMDGIPIGRKIDLSALGSYDELSLSVDKLFRGLLAAQQDPLAAGAKECSQEEVAISGLLDGTGEYTLVYEDYEGDRVLVGDVPWGMFVSSVKRLRVLKTSDLSSSLTAPPGQKRTVTECPVFTS

SEQ ID NO: 15836 - protein, 275 aa, Zea mays subsp. mays
  misc_feature (1)..(275): Ceres Seq. ID no. 12349059
MGEPRPRSSDQRDEEETLQLSLGLPGGGASAGGVVAPAAWRMLPARDEEMRSAAAVVDTSLLSLGYSAPAFSPRSPGKAKGSPAAATENALASTNNASQRRSPNTPVIGWPPVRAFRRNLATSSRASLENQNGKKAAKPEQTTKRAPFVKINMDGIPIGRKIDLSALGSYDELSLSVDKLFRGLLAAQQDPLAAGAKECSQEEVAISGLLDGTGEYTLVYEDYEGDRVLVGDVPWGMFVSSVKRLRVLKTSDLSSSLTAPPGQKRTVTECPVFTS

SEQ ID NO: 15837 - protein, 234 aa, Zea mays subsp. mays
  misc_feature (1)..(234): Ceres Seq. ID no. 12349060
MLPARDEEMRSAAAVVDTSLLSLGYSAPAFSPRSPGKAKGSPAAATENALASTNNASQRRSPNTPVIGWPPVRAFRRNLATSSRASLENQNGKKAAKPEQTTKRAPFVKINMDGIPIGRKIDLSALGSYDELSLSVDKLFRGLLAAQQDPLAAGAKECSQEEVAISGLLDGTGEYTLVYEDYEGDRVLVGDVPWGMFVSSVKRLRVLKTSDLSSSLTAPPGQKRTVTECPVFTS

SEQ ID NO: 15838 - DNA, 1034 bp, Zea mays subsp. mays
  misc_feature (1)..(1034): Ceres Seq. ID no. 12349099
tccttcccccttccccgcttcgacaagtctcgtcccccgcccccttattccattacgagcaactccgccgccgccgccgtaaagccatctcccccatccgccgccgccgccaccgctgctggtgggacgggccgtgcgcccgttccagcgaagaggatcagcgggtcggaggagccgccggcgaggtcgggccgcgggggatcgagatggtgctgtgggagctcacggccatcaccgcctacttcctcgggctgaggcgcacctaccgcctcgcgctccgcatccagcgccgcctcatcccgcccaaccaccccaggatccgggacttcgtctacaggcgcacacgggatgtcttcaacgtcgcagtgtcggtccacaagaacattcagcagagagacatagaggtcggccggaacctcggaaacgcgatccttcgctggcttgatcgcatgaagccatcagcggagatccgcccccgtcttccaggcccaccaaacggcagcacggccgagcagttcagacatgtatcgagcgcgagcaggggcgcgggggcacagaagacctcctcctcctccaaagcttcgccccacgactccagcgggaagatgctgttctcgcgcctcaacattgggcccaagcacttcccggttctgcccacgctagcacagcccaacaggatcagcgcgagcagccagtgcaggcgcttctcctactcctacgccccgttcccgtcggtcactgccaggaggaagggtgtcttccgcgaggacattgcacagctgatggtgtaaggatctaaaatacttgccagcgatctcgtgtactgtttttttgtttttggaacactggacttagtgatttgcccagatcagatgtctgatgtgtcttggtttaataataaagaagcgagcgagcgcaggggaaattgtcactgctgctgcggtttaggccattagatttgtaaccaaatgctcagatgaacagcatttcgtgtttggtaatgaacaccagaacatgtgcactcgtttatgtgc

SEQ ID NO: 15839 - protein, 262 aa, Zea mays subsp. mays
  misc_feature (1)..(262): Ceres Seq. ID no. 12349100
LPPSPLRQVSSPAPLFHYEQLRRRRRKAISPIRRRRHRCWWDGPCARSSEEDQRVGGAAGEVGPRGIEMVLWELTAITAYFLGLRRTYRLALRIQRRLIPPNHPRIRDFVYRRTRDVFNVAVSVHKNIQQRDIEVGRNLGNAILRWLDRMKPSAEIRPRLPGPPNGSTAEQFRHVSSASRGAGAQKTSSSSKASPHDSSGKMLFSRLNIGPKHFPVLPTLAQPNRISASSQCRRFSYSYAPFPSVTARRKGVFREDIAQLMV

SEQ ID NO: 15840 - protein, 194 aa, Zea mays subsp. mays
  misc_feature (1)..(194): Ceres Seq. ID no. 12349101
MVLWELTAITAYFLGLRRTYRLALRIQRRLIPPNHPRIRDFVYRRTRDVFNVAVSVHKNIQQRDIEVGRNLGNAILRWLDRMKPSAEIRPRLPGPPNGSTAEQFRHVSSASRGAGAQKTSSSSKASPHDSSGKMLFSRLNIGPKHFPVLPTLAQPNRISASSQCRRFSYSYAPFPSVTARRKGVFREDIAQLMV

SEQ ID NO: 15841 - DNA, 1017 bp, Zea mays subsp. mays
  misc_feature (1)..(1017): Ceres Seq. ID no. 12349105
gtccagggtagagagagagagggatggtgtgagggagggaagggagcaaaggcaaagcagccaacgaccagagagacacggaggctgagagagagagagagagagagatttgggaatcgagaaagcagcgaggaagaagaagatggagcaggaggaagcgtgcacctcgtcgctgcggcagtgcaggatttgccacgacgaggaggacgagcggcgctccgccatggagtcgccctgcgcctgttccggctccctcaagtacgctcacaggggatgcgtgcagaggtggtgcgacgagaagggaagcgccgtctgcgagatttgcctccagaactttgagccgggctacaccgttcctcccaagaaaacccaacctgctgatgtcgcggtgaccatcagagacagcgtgggggtgcccaggccgcagcacgagcctgaagaggaggagcaggagcaggtggacgcggcgttgatcggaggcagcgacccggagtacgccgagtgcgcgcgcgccgccggcaggagcgcgtcctggtgccggtcggtggccgtcacgttcacggtcgtcctgctgctgaggcacctggtcaccgtggtcacggtcggagcggccaaccagttcgccttcggtctcctcacggtatacttgctgcgggcgagcgggatcctgcttccgttctacctcgtcatgaggctcatctccgtgatccagcaggggcagaggcagtaccgcctccggctgctccaggagcagaggaggcacgcgttgaggtcggcccggctgcacggccaggaacaggaacagcatgtcatcctggttcgctgaggaacgagccattcattcaccttggtgtccatacattccattcatccgtcgtacgcgtacaaggttgtaagatgtaccactccatttttttgttcaggcctttacaagcctaaaaaaagcttatatgtaccaccacttcatttgtaaaccctcaaaatttgttgctgagaagatcgacatatcatgtatag

SEQ ID NO: 15842 - protein, 227 aa, Zea mays subsp. mays
  misc_feature (1)..(227): Ceres Seq. ID no. 12349106
MEQEEACTSSLRQCRICHDEEDERRSAMESPCACSGSLKYAHRGCVQRWCDEKGSAVCEICLQNFEPGYTVPPKKTQPADVAVTIRDSVGVPRPQHEPEEEEQEQVDAALIGGSDPEYAECARAAGRSASWCRSVAVTFTVVLLLRHLVTVVTVGAANQFAFGLLTVYLLRASGILLPFYLVMRLISVIQQGQRQYRLRLLQEQRRHALRSARLHGQEQEQHVILVR

SEQ ID NO: 15843 - protein, 200 aa, Zea mays subsp. mays
  misc_feature (1)..(200): Ceres Seq. ID no. 12349107
MESPCACSGSLKYAHRGCVQRWCDEKGSAVCEICLQNFEPGYTVPPKKTQPADVAVTIRDSVGVPRPQHEPEEEEQEQVDAALIGGSDPEYAECARAAGRSASWCRSVAVTFTVVLLLRHLVTVVTVGAANQFAFGLLTVYLLRASGILLPFYLVMRLISVIQQGQRQYRLRLLQEQRRHALRSARLHGQEQEQHVILVR

SEQ ID NO: 15844 - DNA, 1318 bp, Zea mays subsp. mays
  misc_feature (1)..(1318): Ceres Seq. ID no. 12349119
gagacgcacacgggcagtgacacgcgcgcataccgacggacttggtagctgctcaccagctatccagatcattggctcattgctgcttccattccattccccccctcggcatcggccgcgcccgcccgtgtcgggcggaggcggacgcgcgcgggaatgggacgccacgcggcctccggcggcggcgtgcagcagaagctgcgcaagggcctctggtcgcccgaggaagacgagaagctctacaaccacatcatccgctacggggtcgggtgctggagctccgtgcccaagctcgcagggctgcagaggtgcggcaagagctgccggcttcggtggatcaactacctacgccccgacctgaagcggggcagcttctcgcagcaggaggaggacgcgatcgtcggcctccaccagatcctggggaacaggtggtcgcagatcgcgtcgcacttgccgggccggacggataacgagatcaagaacttctggaacagctgcctcaagaagaagctgcgtcagcgcggcatcgaccccagcacccacaagcccgcggtctccgccaacgtgccggcggcatcggagcagccggcgtcgaaggaccgcaagccgtttgccacagccgccgctgatggcggctccgacatgaagcaccagcaggtgttcgacccgttcccgctgaccgacagcttcggcggcggcttcggcgccgcactgtacggccacacgggcggcaagcaggacgcggccgcgttcgtggactacagcagcgtgctggacgtgtcggagaacctgggctacggcggcgagagctccagcaacagcagcaactggaactgcgcgccggaggtgcacaacaatgcggtcgacggcgacgcgccgctgcactgggcctccgagagcaaggccacgcccttcgccggctacggcggcgaggagcaatcactcctcgggcacaggttctcgctgccctgccacggccagcaggagcagagccctccgcgttttgacttcgacatcggccggggcgccgtggtcggcgagttcagcctcgagttcttctgaaggtccagcttgggaatttcagcaatctagataccgcgtagcgcgtatatatatactgtgtattaaaggcatttcacacggaacaacaattgagagatcgtgcttcgttaatttcctctagtcgaccttactccttaacaatgtcttgcgtttcttttgttttttttatgttttatgtatgtctaaaataaaggcatagacatatatatgtaaacacggtgtagtgtaatagctatacattaaagtttttgtatgc

SEQ ID NO: 15845 - protein, 301 aa, Zea mays subsp. mays
  misc_feature (1)..(301): Ceres Seq. ID no. 12349120
MGRHAASGGGVQQKLRKGLWSPEEDEKLYNHIIRYGVGCWSSVPKLAGLQRCGKSCRLRWINYLRPDLKRGSFSQQEEDAIVGLHQILGNRWSQIASHLPGRTDNEIKNFWNSCLKKKLRQRGIDPSTHKPAVSANVPAASEQPASKDRKPFATAAADGGSDMKHQQVFDPFPLTDSFGGGFGAALYGHTGGKQDAAAFVDYSSVLDVSENLGYGGESSSNSSNWNCAPEVHNNAVDGDAPLHWASESKATPFAGYGGEEQSLLGHRFSLPCHGQQEQSPPRFDFDIGRGAVVGEFSLEFF

SEQ ID NO: 15846 - DNA, 1681 bp, Zea mays subsp. mays
  misc_feature (1)..(1681): Ceres Seq. ID no. 12349121
ctgcacttttctaccaccgaaggcgagggcgagggggccaaagacgagcgctttttcgtgcccgcctgcctgcctgctggtcattgccgctgctcacgagcctcccgccccgtgccgccctgccctctacggctctgccccaacgagccccaggggagccaggaaaaggagccgtcaaaagccgccgccgaggagagcgcgcaggtcaggcatggcatcaaccgttaccttcaacccagtgagcgcccaagctgcgctgatccaaaagccaaggaaccttggagccataagctatgctggcttaaagatgccggcatctgttagctctggctcagagtcgtcattcctgggctggaatgcatcccttcgggcagctgttactccaaggattgtgcccaaggcaaagtctggatctcagatatctccacaggcatcttacaaggtggcagtgctgggtgctgccggtggcatcggtcaacccttgggcctgttggttaagatgtctcctcttgtccgagctgcatctgtatgatattgctaatgtcaagggagttgctgcagatctcagccactgcaacacgcctgctcaggttcttgacttcactggaccctcagagttagccaactgcttgaaaggtgtggatgtcgttgtcatccctgccggggtcccaaggaagcctgggatgactcgcgatgacctttttaacatcaacgcaagcatcgtcaagacacttgttgaggctgttgcagacagttgcccagaggcgttcatccatatcatcagcaacccggtgaattccacggtgccaattgcagctgaggttctgaagcagaagggtgtctacaatcccaagaagctttttggggttaccaccttggatgttgtcagggccaacacatttgtggcgcagaagaagaaccttaagctcatcgatgttgatgtcccagttgttggtggccatgctggaatcacaattctgccactgttatcgaagacgaggccatctgtcaccttcacagatgaggaaactgaggagctgacaaagaggatacagaatgccgggacagaggtggtggatgccaaggctggtgctgggtctgctaccctgtccatggcctatgccgctgctagattcgttgagtcgtctctccgtgcgctggctggcgatccggatgtttatgagtgcacatttgttcagtctgagataactgacctgccattcttcgcatcaagagtcaagttgggcaagaacggtgttgagtctgtcatttctgccgacctccagggagtgactgagtatgaggccaaggcacttgaggcgctgaaggccgagttgaaggcaagcattgagaagggtattgctttcgtgaacaaacagcgggaagctgctgcatctgtttgaggcgaagcaagtgaaacggaaggaacaatcgtcttgaatggcttttaagttttgcagcctagagtttttttgttgtcggcatgtaggaagatgttccagatggttgctgtttgtttctaattgctacatgggggctgaacatccatcccccaagttatcgccggtttctgaaccaggccttatttacacataaattttgccccttctgtatcgtggtccagtttgtagcttgttggagtctacaaactacaaagaggctaataaaccacttttatttg

SEQ ID NO: 15847 - protein, 348 aa, Zea mays subsp. mays
  misc_feature (1)..(348): Ceres Seq. ID no. 12349122
MHPFGQLLLQGLCPRQSLDLRYLHRHLTRWQCWVLPVASVNPWACWLRCLLLSELHLYDIANVKGVAADLSHCNTPAQVLDFTGPSELANCLKGVDVVVIPAGVPRKPGMTRDDLFNINASIVKTLVEAVADSCPEAFIHIISNPVNSTVPIAAEVLKQKGVYNPKKLFGVTTLDVVRANTFVAQKKNLKLIDVDVPVVGGHAGITILPLLSKTRPSVTFTDEETEELTKRIQNAGTEVVDAKAGAGSATLSMAYAAARFVESSLRALAGDPDVYECTFVQSEITDLPFFASRVKLGKNGVESVISADLQGVTEYEAKALEALKAELKASIEKGIAFVNKQREAAASV

SEQ ID NO: 15848 - protein, 239 aa, Zea mays subsp. mays
  misc_feature (1)..(239): Ceres Seq. ID no. 12349123
MTRDDLFNINASIVKTLVEAVADSCPEAFIHIISNPVNSTVPIAAEVLKQKGVYNPKKLFGVTTLDVVRANTFVAQKKNLKLIDVDVPVVGGHAGITILPLLSKTRPSVTFTDEETEELTKRIQNAGTEVVDAKAGAGSATLSMAYAAARFVESSLRALAGDPDVYECTFVQSEITDLPFFASRVKLGKNGVESVISADLQGVTEYEAKALEALKAELKASIEKGIAFVNKQREAAASV

SEQ ID NO: 15849 - protein, 176 aa, Zea mays subsp. mays
  misc_feature (1)..(176): Ceres Seq. ID no. 12349124
CTFLPPKARARGPKTSAFSCPPACLLVIAAAHEPPAPCRPALYGSAPTSPRGARKRSRQKPPPRRARRSGMASTVTFNPVSAQAALIQKPRNLGAISYAGLKMPASVSSGSESSFLGWNASLRAAVTPRIVPKAKSGSQISPQASYKVAVLGAAGGIGQPLGLLVKMSPLVRAASV

SEQ ID NO: 15850 - DNA, 1237 bp, Zea mays subsp. mays
  misc_feature (1)..(1237): Ceres Seq. ID no. 12349150
atccctgtctctcgctttccctaacccacaccagaataccagatcgagcaccgatctagggttgcacctcttctgctagccggctggcgaggagccgttcggcatctggacgcggccaagggagatgaagctcgcggggctcaagtctgtggacggcgcccacgaggagtccatctgggcggcggcgtgggcgcccgccgctgaccaccgccccacggcggtgctcctcactggcgcgctcgacgagaccgtccgcgcttggctccccgacgacctcgctgccttggggtcccccacacggggccacgcgctcggagtcgtctccctcgccgcccaccccgccggctcgctcgccgccgccgtgtcgctcgacagcttcatccgcgtctttgacgtcgacacgggggcatccgtcgccacgctggaggcgccgccgtccgagatttggggcgtccagttccatcccaagggtaatgctctggccgcagccggtggtggcagtggatcagtgaagctgtgggacacggagaagtggaaggcgatcaccagcctcgccgtcccacgcccggagggagctcgccccgacaagacaggcagcggcaagttcgtcctgtcagtcgcctggagccccgacggaaggctcctagcatgcgggtccatggacggcacgatcgccgtctacgacgcggtccgcatgaagttcctgcaccacctggagggccaccacatgcccggtgcggtccatggtgttctccccggtggacccgcacgtgcttttcacggcctgcgacgactgccacgtccacatctacgacgccagggagaagggcctcgtcggggccatgtcgggccacgcgagctgggtgctgagcatcgacgcgagccccgacggcctggcggtggccacggggtcgagcgaccgcaccgtccggctctgggacctcaacatgaggacctcggtgcagaccatgagcaaccactccgatcaggtgtgggccgtggccttcaggccaccaggcggtgccggagtccgagcagggcgtctggctagcgcgtcggatgacaagagcgtctccctgtacgattactcgtaggtttttgtttccttataaaccgttgcaaatgcctctgttgtaccgaccagagatttgaattcgggcatggtggttggaagaattgttgtacgcagcacagtagtcgaggtgttaaattgcaaggaaagagtttatttcgtgtt

SEQ ID NO: 15851 - protein, 308 aa, Zea mays subsp. mays
  misc_feature (1)..(308): Ceres Seq. ID no. 12349151
MKLAGLKSVDGAHEESIWAAAWAPAADHRPTAVLLTGALDETVRAWLPDDLAALGSPTRGHALGVVSLAAHPAGSLAAAVSLDSFIRVFDVDTGASVATLEAPPSEIWGVQFHPKGNALAAAGGGSGSVKLWDTEKWKAITSLAVPRPEGARPDKTGSGKFVLSVAWSPDGRLLACGSMDGTIAVYDAVRMKFLHHLEGHHMPGAVHGVLPGGPARAFHGLRRLPRPHLRRQGEGPRRGHVGPRELGAEHRREPRRPGGGHGVERPHRPALGPQHEDLGADHEQPLRSGVGRGLQATRRCRSPSRASG

SEQ ID NO: 15852 - DNA, 962 bp, Zea mays subsp. mays
  misc_feature (1)..(962): Ceres Seq. ID no. 12349152
agtcagtgggatgtgtggatgctaaccagtgcagtggaggattagcgatcttctagaatcgtgtgcgagctggacagcaggaagagccgtagagttcgacgcgaggagcgagcgagtgattagctcgtgcgtgctgtgcaaggaaagtaaccaagcagatcgatcggtcgaggcgggtaggacaggatccagaggtagctagccatggcggaggaagcgtctgcgcctgcggcggggacggaagcgccgccggggaagatgacgatggtggtaggggtcgacgagagcgagcacagcttctacgcgctgcagtgggcactgcagcacttcttcccgccgggccagccgcagcagtaccgcctcgtcgtcgtcaccgccaagcccaccgccgcctccgccgtcggcctcgccggcccaggcgccgcggatgtgctgccgtacgtggaggcggatctcaagcgctccgccctgcgcgtcgtcgaaaaagccaaaggcctctgcacacaggcgagcgacgctgtgtttgaggcgctggagggggacgctaggaacgtcctctgcgaggctgtcgagaggcacggggccgagatgctcgtcgtcggcagccatggttacggagccattaaaagggctgttcttggaagtgtgagcgactactgtgcccatcacgcgcactgcaccgtgatgatagtaaagaagcccaagcagcacaagcactgatcaatgccgactgatcactacgtgtactgcaaataatttgtactactgcaaagttatgtgtgcgtccgtccgtttgtgaataattgggtcatcaaccatcacatcttcggttgcttctacaagtatccgatccaatccttctacgagtggattgggatttacaaataattgattgctctctgaacctgaaaacaatgtatttgtattaatgtgttggaacacgtatatgtagttgcaacttc

SEQ ID NO: 15853 - protein, 171 aa, Zea mays subsp. mays
  misc_feature (1)..(171): Ceres Seq. ID no. 12349153
MAEEASAPAAGTEAPPGKMTMVVGVDESEHSFYALQWALQHFFPPGQPQQYRLVVVTAKPTAASAVGLAGPGAADVLPYVEADLKRSALRVVEKAKGLCTQASDAVFEALEGDARNVLCEAVERHGAEMLVVGSHGYGAIKRAVLGSVSDYCAHHAHCTVMIVKKPKQHKH

SEQ ID NO: 15854 - protein, 153 aa, Zea mays subsp. mays
  misc_feature (1)..(153): Ceres Seq. ID no. 12349154
MTMVVGVDESEHSFYALQWALQHFFPPGQPQQYRLVVVTAKPTAASAVGLAGPGAADVLPYVEADLKRSALRVVEKAKGLCTQASDAVFEALEGDARNVLCEAVERHGAEMLVVGSHGYGAIKRAVLGSVSDYCAHHAHCTVMIVKKPKQHKH

SEQ ID NO: 15855 - protein, 151 aa, Zea mays subsp. mays
  misc_feature (1)..(151): Ceres Seq. ID no. 12349155
MVVGVDESEHSFYALQWALQHFFPPGQPQQYRLVVVTAKPTAASAVGLAGPGAADVLPYVEADLKRSALRVVEKAKGLCTQASDAVFEALEGDARNVLCEAVERHGAEMLVVGSHGYGAIKRAVLGSVSDYCAHHAHCTVMIVKKPKQHKH

SEQ ID NO: 15856 - DNA, 1399 bp, Zea mays subsp. mays
  misc_feature (1)..(1399): Ceres Seq. ID no. 12349156
acccgattcaaacggtttcaaaagcgcgaccccaccgcagcccgcagggtccacggctctcgtttccgcccgcgccacccgccatgtcgtccccgccgcgggggcagcccgccaccgccgccgtgccggcggtcgcggccgccacgtccccgcagttgcctgcggcgtcccacacgctcccccgcgcgttcctcgccacatcctctccccgtgccatagtggcagcaccggcgcccccgctattcaccggtcggccgctgaaccctaacccaccggcccacggctcctccgtgccccacggcatcctctaccccgtcctgaaatccgcctccacgtccaactccgcggccgcggccgtgacagcgcagctccgccgcgttcctcccatggccgtggggtaccctcggacccacgccgtcgccatccctattgcacagcagcagcagcccctggtgcacgcgcaaccccggtccttcgcggccgtgcctcgggcccttgtgactggcgtgtcgacggggtccgaacagcctccccgaggagttcctataggctcgcagcccaaggttaatccagtaccacctgttggcccatccaatgagcagagtaacccaaaagacagggaaaagagcagagaagaacctacagttgtggtgattaatgaccgcaaagttaacctgctggatagtgagtcgggatccttttatgctctctgtcgatcttgggttcgtaatggtgttccacatgaaagtcagccaagctttggaaatggtgaaccacttcttccaagacctttgcctgcttcagttgtagattctagaatatcagacaaggacgataatgatgttgcaggtgaagattcagatgaagagccacagaagaatgccaacggtgaatacaatacaagtgatttattgaagcagcatgtaaagcgtgcgaaaaggatacgtgctgggttgcaaaaggatcggcttcgtcggattgaaagatacaagcaacgccttgcacttcttttgtagaatcggcctgtgactgtataaagctgaaaccataggtgtttgtcttgcaggttttaacttccgtattggaatttgttaagatgttttattgactagcattgtatgttaggaccatctggatgttttattgccaacgttatctaataaaatgtgaaaaagcctttagctaagttggttggatgatctgagtagcactattaaagttttgagtatggtgccactgtgcatgggtgagacaaaggttcgaagttcgaaggttttctcgagctgcatgagaagatcttaaatgtaatgtaggtcttcttaaaggtaatgccgttgaggtggtcttaccatatatgtggattttttttatctagtgaaatgaaactgaaatcatagtc

SEQ ID NO: 15857 - protein, 337 aa, Zea mays subsp. mays
  misc_feature (1)..(337): Ceres Seq. ID no. 12349157
PIQTVSKARPHRSPQGPRLSFPPAPPAMSSPPRGQPATAAVPAVAAATSPQLPAASHTLPRAFLATSSPRAIVAAPAPPLFTGRPLNPNPPAHGSSVPHGILYPVLKSASTSNSAAAAVTAQLRRVPPMAVGYPRTHAVAIPIAQQQQPLVHAQPRSFAAVPRALVTGVSTGSEQPPRGVPIGSQPKVNPVPPVGPSNEQSNPKDREKSREEPTVVVINDRKVNLLDSESGSFYALCRSWVRNGVPHESQPSFGNGEPLLPRPLPASVVDSRISDKDDNDVAGEDSDEEPQKNANGEYNTSDLLKQHVKRAKRIRAGLQKDRLRRIERYKQRLALLL

SEQ ID NO: 15858 - protein, 310 aa, Zea mays subsp. mays
  misc_feature (1)..(310): Ceres Seq. ID no. 12349158
MSSPPRGQPATAAVPAVAAATSPQLPAASHTLPRAFLATSSPRAIVAAPAPPLFTGRPLNPNPPAHGSSVPHGILYPVLKSASTSNSAAAAVTAQLRRVPPMAVGYPRTHAVAIPIAQQQQPLVHAQPRSFAAVPRALVTGVSTGSEQPPRGVPIGSQPKVNPVPPVGPSNEQSNPKDREKSREEPTVVVINDRKVNLLDSESGSFYALCRSWVRNGVPHESQPSFGNGEPLLPRPLPASVVDSRISDKDDNDVAGEDSDEEPQKNANGEYNTSDLLKQHVKRAKRIRAGLQKDRLRRIERYKQRLALLL

SEQ ID NO: 15859 - protein, 209 aa, Zea mays subsp. mays
  misc_feature (1)..(209): Ceres Seq. ID no. 12349159
MAVGYPRTHAVAIPIAQQQQPLVHAQPRSFAAVPRALVTGVSTGSEQPPRGVPIGSQPKVNPVPPVGPSNEQSNPKDREKSREEPTVVVINDRKVNLLDSESGSFYALCRSWVRNGVPHESQPSFGNGEPLLPRPLPASVVDSRISDKDDNDVAGEDSDEEPQKNANGEYNTSDLLKQHVKRAKRIRAGLQKDRLRRIERYKQRLALLL

SEQ ID NO: 15860 - DNA, 1510 bp, Zea mays subsp. mays
  misc_feature (1)..(1510): Ceres Seq. ID no. 12349160
aacacaacacatctgagagacatacagcaagctctctccccattggccatatctagctcgtagtctacactgcctctaaaccttgacatttcctttgtattcccctttccaatttgcagtagtttgtaggtagaccgcaaggtggttttttcttgcagcaatggcggccaaggtttgacaaggcatgacgtcctgattaagccccctcgcggcagccacaagatttgttgcagcgtgagacaggagctgcggctgcggaggaagtgagcaaaagcatggatctttccggcacgcagggcgagctgccgatggcaacaatgcacgccggcgggtcgccgtacctggggctgcaccacgggcacccacagcagcacaaccatggcgcgaacggccggcacatgtcgccgccggatgtggtggcggaggaggccaagaaccggcagctggcggtggtgcccgtgggcacaggaggcggaggcggggcaggggtgaggtaccgcgagtgcctgaagaaccacgcggctgccatcggcgggagcgcgacggacgggtgcggcgagttcatgcccgcgggcgaggaggggtcgctggacgcgctccggtgctcggcgtgcgggtgccaccgcaacttccaccgcaaggagccgccgggcggcgacgggcggcagctgtacgggcaccaccaccaccacccgctgagcccgctggccgcggtgcacccccaccatcaccgggggctgctggtggcggcgcttcccccggcgccgacgcgcatggtgatgccgctgagcgccgccatgcaccatcaccagcagccgccgcagcagcaccacagctcggcgtcagcggactccgacgacgcacacgtgccaggggtgcgcgggggggaggtgcagcagcagcagcaggcaccggcacggaagcggttccggaccaagttcaccgcggagcagaaggcccggatgctggggttcgccggaggacgccgggtggcggctgcagaagctggacgaggcggcggtgcagcgcttctgccaggaggtcggcgtgaagcggcgcgtgctcaaggtgtggatgcacaacaacaagcacaccctggcgcggcgcggccacgccgggctccccggcgacccggagctgctggggccgcacgacggccagctcggcatgccgctcccggagccggcggcggagcccgcagttgctgctgcggctgcggctggacttggagtgaccgaccaagccatgtctttcgggactggacgacattgatcaagagagtctaatgctgactgaatcagccttgcggcatagggaagctgttttctttgttaatctgctgctgatctcatcaatctagccgtagctttagctgcatttgcattccactgttccatccatcctagctatccatcaaccacaaactgatgatgcggagtctccatggatttctattccttgttgatttctgtagctgctctccccgctcttgactttaattttttagtgc

SEQ ID NO: 15861 - protein, 336 aa, Zea mays subsp. mays
  misc_feature (1)..(336): Ceres Seq. ID no. 12349161
MDLSGTQGELPMATMHAGGSPYLGLHHGHPQQHNHGANGRHMSPPDVVAEEAKNRQLAVVPVGTGGGGGAGVRYRECLKNHAAAIGGSATDGCGEFMPAGEEGSLDALRCSACGCHRNFHRKEPPGGDGRQLYGHHHHHPLSPLAAVHPHHHRGLLVAALPPAPTRMVMPLSAAMHHHQQPPQQHHSSASADSDDAHVPGVRGGEVQQQQQAPARKRFRTKFTAEQKARMLGFAGGRRVAAAEAGRGGGAALLPGGRREAARAQGVDAQQQAHPGAARPRRAPRRPGAAGAARRPARHAAPGAGGGARSCCCGCGWTWSDRPSHVFRDWTTLIKRV

SEQ ID NO: 15862 - protein, 325 aa, Zea mays subsp. mays
  misc_feature (1)..(325): Ceres Seq. ID no. 12349162
MATMHAGGSPYLGLHHGHPQQHNHGANGRHMSPPDVVAEEAKNRQLAVVPVGTGGGGGAGVRYRECLKNHAAAIGGSATDGCGEFMPAGEEGSLDALRCSACGCHRNFHRKEPPGGDGRQLYGHHHHHPLSPLAAVHPHHHRGLLVAALPPAPTRMVMPLSAAMHHHQQPPQQHHSSASADSDDAHVPGVRGGEVQQQQQAPARKRFRTKFTAEQKARMLGFAGGRRVAAAEAGRGGGAALLPGGRREAARAQGVDAQQQAHPGAARPRRAPRRPGAAGAARRPARHAAPGAGGGARSCCCGCGWTWSDRPSHVFRDWTTLIKRV

SEQ ID NO: 15863 - protein, 322 aa, Zea mays subsp. mays
  misc_feature (1)..(322): Ceres Seq. ID no. 12349163
MHAGGSPYLGLHHGHPQQHNHGANGRHMSPPDVVAEEAKNRQLAVVPVGTGGGGGAGVRYRECLKNHAAAIGGSATDGCGEFMPAGEEGSLDALRCSACGCHRNFHRKEPPGGDGRQLYGHHHHHPLSPLAAVHPHHHRGLLVAALPPAPTRMVMPLSAAMHHHQQPPQQHHSSASADSDDAHVPGVRGGEVQQQQQAPARKRFRTKFTAEQKARMLGFAGGRRVAAAEAGRGGGAALLPGGRREAARAQGVDAQQQAHPGAARPRRAPRRPGAAGAARRPARHAAPGAGGGARSCCCGCGWTWSDRPSHVFRDWTTLIKRV

SEQ ID NO: 15864 - DNA, 1338 bp, Zea mays subsp. mays
  misc_feature (1)..(1338): Ceres Seq. ID no. 12349185
gacagggtgactccgtgaccgtgagtgcctacccgccgaccgcacgaaccccactcggtcggtcactcccagtctccatctcccactacggcactaccccatccccggtgcggcgccaccttcccggcttccccttccggccttccccctctcgtcacttatggtgcccagccgctcgctgcgcaactactagcgcaccgtcccctcctcagccatggccgcggcgtcgttcgcccgcgccttatgtctccacatgctcctcctcttcctcgtggttggctcggcgcgctgcaagacggtgaagagagacgtgaaagcattgaatgagatcaaatcttcactaggctggagagttgtatactcatgggtcggtgatgatccttgtgggcatggtgatctacccccctggtctggtgtgacatgttctcagcaaggggattacagagttgtgacggaactggaagtctatgctgtatcaatagttggccctttcccaacagcagtaactaacctgttggatctaagaagattggatctccacaataacaagttgacaggaccaattcccccacagattggacggttgaaacatctcaggatattgaacctgaggtggaataagcttcaagatgtgcttccacctgaaattggtgaactgaagaaactgacacacttgtatttgagcttcaacaacttcaaaggcgagattccagtggagcttgcaaacctgccagaactccgttacctttatcttcacgagaaccgcttcaccgggcgaatcccccctgaacttggaacgctaaagaacctacgtcacctcgacgtgggcaacaaccacctgacaggcactctcagggattttatcggcaacgggaacggcttcccgtccctgagaaatctataccttaacaacaatgagctgactggtgtgctgccagaccagattgcaaacctgacaaaccttgagattctgcacttgtccaataacaagatgatcgggtcgatatcgcctaagctagttcacattccaaggctgatctacttgtacttggacaataacaacttcattgggaggataccggaagggttgtacaggcatccatttctgaaggagctgtacatcgaaggaaaccacttcagaccaggaaccagatcgaagggaacgcacaaggtgctggaactgcctgacgccgacattctagtctagcaagctcgtttaggggacctgaggtcttggcgtcctgcagtagtagactgctgccggtaccaggatcacttctgtctgtcgctgtactattccgtggcaaaactacagttgagaaaaaaaaattctctttg

SEQ ID NO: 15865 - protein, 330 aa, Zea mays subsp. mays
  misc_feature (1)..(330): Ceres Seq. ID no. 12349186
MAAASFARALCLHMLLLFLVVGSARCKTVKRDVKALNEIKSSLGWRVVYSWVGDDPCGHGDLPPWSGVTCSQQGDYRVVTELEVYAVSIVGPFPTAVTNLLDLRRLDLHNNKLTGPIPPQIGRLKHLRILNLRWNKLQDVLPPEIGELKKLTHLYLSFNNFKGEIPVELANLPELRYLYLHENRFTGRIPPELGTLKNLRHLDVGNNHLTGTLRDFIGNGNGFPSLRNLYLNNNELTGVLPDQIANLTNLEILHLSNNKMIGSISPKLVHIPRLIYLYLDNNNFIGRIPEGLYRHPFLKELYIEGNHFRPGTRSKGTHKVLELPDADILV

SEQ ID NO: 15866 - protein, 317 aa, Zea mays subsp. mays
  misc_feature (1)..(317): Ceres Seq. ID no. 12349187
MLLLFLVVGSARCKTVKRDVKALNEIKSSLGWRVVYSWVGDDPCGHGDLPPWSGVTCSQQGDYRVVTELEVYAVSIVGPFPTAVTNLLDLRRLDLHNNKLTGPIPPQIGRLKHLRILNLRWNKLQDVLPPEIGELKKLTHLYLSFNNFKGEIPVELANLPELRYLYLHENRFTGRIPPELGTLKNLRHLDVGNNHLTGTLRDFIGNGNGFPSLRNLYLNNNELTGVLPDQIANLTNLEILHLSNNKMIGSISPKLVHIPRLIYLYLDNNNFIGRIPEGLYRHPFLKELYIEGNHFRPGTRSKGTHKVLELPDADILV

SEQ ID NO: 15867 - DNA, 1774 bp, Zea mays subsp. mays
  misc_feature (1)..(1774): Ceres Seq. ID no. 12349251
aatcgaaaatttggtcgaaataaacaagcagagcagaaaaccccccacacgctttagttggccgtccgtccgtccgtctctgaggagcacacagcagtcgattttaaactgcagctacagaggtcaggtcaggggacacagcctgagcggctggctggcgggggctagcgagcggcgccacagcgcagcacgcagagagccagggcggcggccatggcgagcgcggcgagtggcggcggcgggtcgctgaagcggatgggcccgctccgggtacagtactacatcgtgatgggcgcggtggcagcggcggtggtgctggccacgctgcgctacatgccggggccagccgtcccggcgaccaccgcccgtaccagcggaggcggcgtcgtgcgctcggccccagcagccgcggccgtccctgtgcccgtgcccgccgtggaggtagaaacgggggaggatgagcaggcgcagaggaggaggaggaggaggaagaagaagggtgacggggtcgtgctcttcaacttcggcgactccaacagcgacacgggcggcgtggcggcggtcatggggatccgcatcgcgccgccggagggcagggcctacttccaccaccccacggggcggctctccgacggacgcgtcatcctcgacttcatctgtgagagcctgggcatgccgcacctgagtccgttcatgaagccgctgggctccaacttctccaacggcgtcaacttcgccattgcagggtccacggccatgccgggagtaaccaccttctcgctggacgtgcaggtggatcagttcgtcttcttcaaggagagatgcctcgactccatcgagagaggtgagagtgccccgattgttgagaaggcgttcccagatgctatatacaccatggacatcgggcacaacgatataaacggtgttctccacttgccctatcatacaatgctcgaaaatctccccccagtaattgctgaaatcaagaaagccatcgagaggttgcacgagaatggagccaggaagttctggatacatggaacgggagcattagggtgcatgcctcagaagctttctatgccgagggatgacgacagcgacctcgatgagcatggatgcatcgcaagcattaataatgtctgcaagaagttcaattccttgctgagtgaagccttggacgagctgcgtttgacactgaaaagttcgactatcgtctttgtggatatgttcgctatcaagtatgatcttgttgccaaccacacgaaatatgggattgagaagccattgatgacatgttgtggtcatggaggccccccttacaactatgaccccaaggagagctgcatgacttcggacaaatacctgtgcaagcttggcgaaaagttcataagctgggacggggttcacttcactgatgctgcaaatggcattgtggcttccaaagtactcagtggtgagtacaacattcccagggtcaagctggccagcctcgtccccgttccaaaatctgacgattaatggtgatgcagcaccttaattggcctttagtttggcctatcaaggatgatgaagatgaaactactaacaaaactgacaccaccgaagtttaattattttgaggttcttacgttacatccattgtagaagaagactttccttttgtttacttctctttttgtacaatcggcgcatatgtatatcctagggttaatatatggcgatgcaggtgtctgtaccatgtataattttctttttgaattttgggtctgttggc

SEQ ID NO: 15868 - protein, 434 aa, Zea mays subsp. mays
  misc_feature (1)..(434): Ceres Seq. ID no. 12349252
MASAASGGGGSLKRMGPLRVQYYIVMGAVAAAVVLATLRYMPGPAVPATTARTSGGGVVRSAPAAAAVPVPVPAVEVETGEDEQAQRRRRRRKKKGDGVVLFNFGDSNSDTGGVAAVMGIRIAPPEGRAYFHHPTGRLSDGRVILDFICESLGMPHLSPFMKPLGSNFSNGVNFAIAGSTAMPGVTTFSLDVQVDQFVFFKERCLDSIERGESAPIVEKAFPDAIYTMDIGHNDINGVLHLPYHTMLENLPPVIAEIKKAIERLHENGARKFWIHGTGALGCMPQKLSMPRDDDSDLDEHGCIASINNVCKKFNSLLSEALDELRLTLKSSTIVFVDMFAIKYDLVANHTKYGIEKPLMTCCGHGGPPYNYDPKESCMTSDKYLCKLGEKFISWDGVHFTDAANGIVASKVLSGEYNIPRVKLASLVPVPKSDD

SEQ ID NO: 15869 - protein, 420 aa, Zea mays subsp. mays
  misc_feature (1)..(420): Ceres Seq. ID no. 12349253
MGPLRVQYYIVMGAVAAAVVLATLRYMPGPAVPATTARTSGGGVVRSAPAAAAVPVPVPAVEVETGEDEQAQRRRRRRKKKGDGVVLFNFGDSNSDTGGVAAVMGIRIAPPEGRAYFHHPTGRLSDGRVILDFICESLGMPHLSPFMKPLGSNFSNGVNFAIAGSTAMPGVTTFSLDVQVDQFVFFKERCLDSIERGESAPIVEKAFPDAIYTMDIGHNDINGVLHLPYHTMLENLPPVIAEIKKAIERLHENGARKFWIHGTGALGCMPQKLSMPRDDDSDLDEHGCIASINNVCKKFNSLLSEALDELRLTLKSSTIVFVDMFAIKYDLVANHTKYGIEKPLMTCCGHGGPPYNYDPKESCMTSDKYLCKLGEKFISWDGVHFTDAANGIVASKVLSGEYNIPRVKLASLVPVPKSDD

SEQ ID NO: 15870 - protein, 409 aa, Zea mays subsp. mays
  misc_feature (1)..(409): Ceres Seq. ID no. 12349254
MGAVAAAVVLATLRYMPGPAVPATTARTSGGGVVRSAPAAAAVPVPVPAVEVETGEDEQAQRRRRRRKKKGDGVVLFNFGDSNSDTGGVAAVMGIRIAPPEGRAYFHHPTGRLSDGRVILDFICESLGMPHLSPFMKPLGSNFSNGVNFAIAGSTAMPGVTTFSLDVQVDQFVFFKERCLDSIERGESAPIVEKAFPDAIYTMDIGHNDINGVLHLPYHTMLENLPPVIAEIKKAIERLHENGARKFWIHGTGALGCMPQKLSMPRDDDSDLDEHGCIASINNVCKKFNSLLSEALDELRLTLKSSTIVFVDMFAIKYDLVANHTKYGIEKPLMTCCGHGGPPYNYDPKESCMTSDKYLCKLGEKFISWDGVHFTDAANGIVASKVLSGEYNIPRVKLASLVPVPKSDD

SEQ ID NO: 15871 - DNA, 988 bp, Zea mays subsp. mays
  misc_feature (1)..(988): Ceres Seq. ID no. 12349284
gacaagctcccccaaaatctccactctcggagtgagctccccaccaccacctccgtccccaaatgtcccgtcaccatcaccacgccgccgccatcgctgctgccgtgctcttcctcctcacagcgcctccttgcgccgccgaccctaacgacgagcgttgcctgactcacctccaccagtccctctccgattcctccggaaggctcaactggaccaaggcggcgatctcggcgccgtgcgacggcttcttctcgcacctccaaggcgtgacctgcaacaacgggcgcgtgtacaagctagccctcccggatctctcgcttgggggcaccgtcccgccggagctctccaactgcaccaacctccagtcgctggacctgtccgcgaacgcgctgtccggcgccataccgacggagctctccgcgctgctgaacctcgccgtgctcaacctctccgcgaacgcgctctctggcgccatcccgcgggagctcgctagctgcgcctacctcaacgtcatagatctccatggcaaccagctgtccggccccatccccgaggaactcggcctcctcgtccggctctcgaccttcgacgtctcctacaaccgcctctctggccccatccccgtgctcctcgccaaccgctccggcgccggcacggcagccgtcgggacggcgaggttcaacgccagctccttcgtagggaacaagggcttgtacgggtacccgctgccgccgatgcggacgcgggggctctccgtgctcgccatcgttggcatcggccttggcagcgggctgctcagccttgtgctcagcttctccgccgtgtgtctgtggctccgcgccacggaccggcggactcccaccaccactggcgaggagggcaagatctcccagctcatgccgaactactgaatccatcaaaggttgcatctttggacatataattcctcgtaattgaactaaacacgagatttttcagctgggcttgg

SEQ ID NO: 15872 - protein, 282 aa, Zea mays subsp. mays
  misc_feature (1)..(282): Ceres Seq. ID no. 12349285
MSRHHHHAAAIAAAVLFLLTAPPCAADPNDERCLTHLHQSLSDSSGRLNWTKAAISAPCDGFFSHLQGVTCNNGRVYKLALPDLSLGGTVPPELSNCTNLQSLDLSANALSGAIPTELSALLNLAVLNLSANALSGAIPRELASCAYLNVIDLHGNQLSGPIPEELGLLVRLSTFDVSYNRLSGPIPVLLANRSGAGTAAVGTARFNASSFVGNKGLYGYPLPPMRTRGLSVLAIVGIGLGSGLLSLVLSFSAVCLWLRATDRRTPTTTGEEGKISQLMPNY

SEQ ID NO: 15873 - DNA, 1761 bp, Zea mays subsp. mays
  misc_feature (1)..(1761): Ceres Seq. ID no. 12349307
atctcttcttcctcccccagagcccctgccctcttccgccgacagcgagaaagcacgcggcgcacagcaacacgtccctgccgttccttttgactccggggatccctctcctccttgcctgccgaggaacccactagcttcctactacttcccctccgtcctctcgatccctctccccgttcccttgaccacccgagcatcaagtggcggggagggaacgcggcggcgcgggcgaggaccgatggagaaggggagcgcgccggcgatggccctggcgctcgccatgcttctcgcctgctccagcatcgctgccgtcacggcgcaggagaccgagcggatcgaaggaagcgctggtgatgtgttagaagataaccctgttgggaggctcaaggtctttgtctatgatctccccagcaaatacaacaagaagctgctgaagaaggatcctaggtgcctgaaccacatgtttgccgccgagatcttcatgcacaggttcctgttgtcgagtgctgtccgaacttttaatcctgaggaagcagattggttctacacgcccgtatacacgacatgcgatctcacccccaagggtcttcccttgcctttcaagtctcctcgaatgatgcgcagcgcgatccagctgattgctacgaattggccttactggaatagatcagagggcgctgatcatttctttgtcacgccccatgactttggtgcttgctttcattatcaggaagaaaaagcaatcggacggggaatccttcccttgcttcagcgtgctacgctggttcagaccttcggacagaagaaccatgtctgcctgaaggatgggtccatcaccatcccaccatacgcgcctcctcagaagatgcagactcaccttatccctgcagacacccctcgatccatcttcgtgtacttccgaggtctgttctatgacaccggcaatgaccccgagggtggttattatgcgagaggtgctcgcgcgtcggtctgggagaacttcaagaacaacccgctgtttgacatctcgaccgaccacccaccgacatactacgaagacatgcagcgctccgtgttctgcctctgcccgttgggctgggcaccgtggagtcccaggctggtggaggccgtggtcttcggctgcatcccggtgatcatcgcagacgacatcgtccttcccttcgcggacgccatcccgtgggaggagatcggcgtctttgtcgccgaggaggatgtcccgcggctggacagcatcctgacgtccattcccacggacgtcgtgctgaggaagcaacggctcctcgcgaacccgtctatgaagcaggccatgctgttcccacagcctgctcaagcaggagacgcgttccaccagattctgaacggtctcgcgcgcaagctcccgcacggtagcaatgtgttcctgaagcccggtgagagggccctgaactggacagccggaccaccaggcgacctcaagccttggtagcgtcttgtggatggatatgacctcttctctggaaaggaagtatggacaacatgattaatatacctgtgcctttgaactgccatgggtgcacatagtgctgaccacaagccaaatgtacattttttttgtatgtttttttcttctatctacaactgttacatatatatcttcatttctttttttctctttcccatttgcttgatgatataagagttccaaaccctgtcgaccatgtgtggatatatcataaatggaatttacaagattgtact

SEQ ID NO: 15874 - protein, 495 aa, Zea mays subsp. mays
  misc_feature (1)..(495): Ceres Seq. ID no. 12349308
SLLPPPEPLPSSADSEKARGAQQHVPAVPFDSGDPSPPCLPRNPLASYYFPSVLSIPLPVPLTTRASSGGEGTRRRGRGPMEKGSAPAMALALAMLLACSSIAAVTAQETERIEGSAGDVLEDNPVGRLKVFVYDLPSKYNKKLLKKDPRCLNHMFAAEIFMHRFLLSSAVRTFNPEEADWFYTPVYTTCDLTPKGLPLPFKSPRMMRSAIQLIATNWPYWNRSEGADHFFVTPHDFGACFHYQEEKAIGRGILPLLQRATLVQTFGQKNHVCLKDGSITIPPYAPPQKMQTHLIPADTPRSIFVYFRGLFYDTGNDPEGGYYARGARASVWENFKNNPLFDISTDHPPTYYEDMQRSVFCLCPLGWAPWSPRLVEAVVFGCIPVIIADDIVLPFADAIPWEEIGVFVAEEDVPRLDSILTSIPTDVVLRKQRLLANPSMKQAMLFPQPAQAGDAFHQILNGLARKLPHGSNVFLKPGERALNWTAGPPGDLKPW

SEQ ID NO: 15875 - protein, 415 aa, Zea mays subsp. mays
  misc_feature (1)..(415): Ceres Seq. ID no. 12349309
MEKGSAPAMALALAMLLACSSIAAVTAQETERIEGSAGDVLEDNPVGRLKVFVYDLPSKYNKKLLKKDPRCLNHMFAAEIFMHRFLLSSAVRTFNPEEADWFYTPVYTTCDLTPKGLPLPFKSPRMMRSAIQLIATNWPYWNRSEGADHFFVTPHDFGACFHYQEEKAIGRGILPLLQRATLVQTFGQKNHVCLKDGSITIPPYAPPQKMQTHLIPADTPRSIFVYFRGLFYDTGNDPEGGYYARGARASVWENFKNNPLFDISTDHPPTYYEDMQRSVFCLCPLGWAPWSPRLVEAVVFGCIPVIIADDIVLPFADAIPWEEIGVFVAEEDVPRLDSILTSIPTDVVLRKQRLLANPSMKQAMLFPQPAQAGDAFHQILNGLARKLPHGSNVFLKPGERALNWTAGPPGDLKPW

SEQ ID NO: 15876 - protein, 407 aa, Zea mays subsp. mays
  misc_feature (1)..(407): Ceres Seq. ID no. 12349310
MALALAMLLACSSIAAVTAQETERIEGSAGDVLEDNPVGRLKVFVYDLPSKYNKKLLKKDPRCLNHMFAAEIFMHRFLLSSAVRTFNPEEADWFYTPVYTTCDLTPKGLPLPFKSPRMMRSAIQLIATNWPYWNRSEGADHFFVTPHDFGACFHYQEEKAIGRGILPLLQRATLVQTFGQKNHVCLKDGSITIPPYAPPQKMQTHLIPADTPRSIFVYFRGLFYDTGNDPEGGYYARGARASVWENFKNNPLFDISTDHPPTYYEDMQRSVFCLCPLGWAPWSPRLVEAVVFGCIPVIIADDIVLPFADAIPWEEIGVFVAEEDVPRLDSILTSIPTDVVLRKQRLLANPSMKQAMLFPQPAQAGDAFHQILNGLARKLPHGSNVFLKPGERALNWTAGPPGDLKPW

SEQ ID NO: 15877 - DNA, 1680 bp, Zea mays subsp. mays
  misc_feature (1)..(1680): Ceres Seq. ID no. 12349311
atagccaacccttttgataaagaaacgggcctacactacacgggacacctgcctcctcttctcccatctctccctcttcccctctccctctcgtggccacgactgccgctgccgccctacgccaggtgtccaggtcatctccggcccattcgccggcgacgagcaccccactagatcgaccgagatatggacggcctgtggcatctgggggacgagctccgcgggcagcccaaggtggtggaggaccgccagtggtcgctcatgacgtccaagctggcagagatcaccaggtccaggggcgagaggacgaacgacctcgactacgccaggatgaacgccgcccccgacgccaagcggtggggcaaggcggcgtcctaccagcaccatgacgagggcaggatggaccaccacgtcggcctcagcctcaagatgaacgatctcaagatgaacgaggccgccgctgccgccgtcatgaagctccccttccgcggcgtgccctacaacgtcaacccgatgtaccccaaggggagcaacgccaacgccaatgtcaacgcgttcaagatgaatgtcggggtgaacaagtactccagcagcgcgaacgggaaagacgccggcgggaaaagcagtggcggcggcagcaacaacaacagcggcggcggaggcaacggcaatgggaccgccaacggcagttccgcggtcgacaagcgcttcaagacgttgccgacgagcgagatgctgccgaagaacgaagtccttggtgggtacatctttgtctgcaacaacgataccatgcaggaggacctcaagaggcagctttttggattgccagcaagatatcgtgattcagtccgggcaattactcctggcctgccgcttttcctctataactacaccactcaccagcttcatggggtatttgaggctgccagtttcggtgggtctaatatcgatcccactgcatgggaggataagaagtgtaaaggtgaatctagattcccagcgcaggtgaggatccgcgttaggaagctctgcaagccgttggaagaggattccttcaggccagttttgcaccactatgatggtccaaagtttcgcctcgagctctccatcgcggagaccctgtccctgctagacctatgcgagaaggaaggcatctgagctgttggctgcctcgtgaggttctagtaaatatcaatcatccttgtatgttctgtagatggtggttggcaatgttgtttatttttcaagcgcaagctgctgccggtctcgttttccctgtcctggatggaagcaaagggacctggtactttgaaggccccccctcaaacataagctgtgagcctgtcagtgcacgtgtccgccgttgtcgtcaagaaccaaaccaaatcatgaaatcttgcgccgacggagagttggagcgtgtatgttttgctatctctatctacatgtctcagtagagtggatataccctggggtccccaaaagatgggggcctcaggcctgtatgtaacactacgtgtaatggttaaggtgaatgtgccgtgaggccccccaaaagttggagtgtgtatttttgttgtcaccttgaaccgactttgcgtatgctttttttagtgctgctaccttttgcgctgtgtttggcttctggttcatgtttttgtaatataaggtggcttgcgc

SEQ ID NO: 15878 - protein, 323 aa, Zea mays subsp. mays
  misc_feature (1)..(323): Ceres Seq. ID no. 12349312
MDGLWHLGDELRGQPKVVEDRQWSLMTSKLAEITRSRGERTNDLDYARMNAAPDAKRWGKAASYQHHDEGRMDHHVGLSLKMNDLKMNEAAAAAVMKLPFRGVPYNVNPMYPKGSNANANVNAFKMNVGVNKYSSSANGKDAGGKSSGGGSNNNSGGGGNGNGTANGSSAVDKRFKTLPTSEMLPKNEVLGGYIFVCNNDTMQEDLKRQLFGLPARYRDSVRAITPGLPLFLYNYTTHQLHGVFEAASFGGSNIDPTAWEDKKCKGESRFPAQVRIRVRKLCKPLEEDSFRPVLHHYDGPKFRLELSIAETLSLLDLCEKEGI

SEQ ID NO: 15879 - protein, 298 aa, Zea mays subsp. mays
  misc_feature (1)..(298): Ceres Seq. ID no. 12349313
MTSKLAEITRSRGERTNDLDYARMNAAPDAKRWGKAASYQHHDEGRMDHHVGLSLKMNDLKMNEAAAAAVMKLPFRGVPYNVNPMYPKGSNANANVNAFKMNVGVNKYSSSANGKDAGGKSSGGGSNNNSGGGGNGNGTANGSSAVDKRFKTLPTSEMLPKNEVLGGYIFVCNNDTMQEDLKRQLFGLPARYRDSVRAITPGLPLFLYNYTTHQLHGVFEAASFGGSNIDPTAWEDKKCKGESRFPAQVRIRVRKLCKPLEEDSFRPVLHHYDGPKFRLELSIAETLSLLDLCEKEGI

SEQ ID NO: 15880 - protein, 275 aa, Zea mays subsp. mays
  misc_feature (1)..(275): Ceres Seq. ID no. 12349314
MNAAPDAKRWGKAASYQHHDEGRMDHHVGLSLKMNDLKMNEAAAAAVMKLPFRGVPYNVNPMYPKGSNANANVNAFKMNVGVNKYSSSANGKDAGGKSSGGGSNNNSGGGGNGNGTANGSSAVDKRFKTLPTSEMLPKNEVLGGYIFVCNNDTMQEDLKRQLFGLPARYRDSVRAITPGLPLFLYNYTTHQLHGVFEAASFGGSNIDPTAWEDKKCKGESRFPAQVRIRVRKLCKPLEEDSFRPVLHHYDGPKFRLELSIAETLSLLDLCEKEGI

SEQ ID NO: 15881 - DNA, 1641 bp, Zea mays subsp. mays
  misc_feature (1)..(1641): Ceres Seq. ID no. 12349347
aaaaacccttgagccgtcaccaatggcggacctcgaaaccctagccacgcccgcccctgcctctgcctccaccaagaagaagaagaaacactccaagaagcacaaggccgccagtgacgcccccaccaatgtcaccgtcgacgcatcccttatgggcggttcctcctacgtcgcggccgcccccgtggtcggctacttcccctccgggtacgacccactcactaccgctgccggggcggagtctgcccccggcacccagctcttccggcacgagaagcatcccacctgggtggacctcgtggtccggagccccggcggcggacacgacttcgttggccggagctatgccggtgaggccgccgtgccgcaggtctgcgactacgcgcttggcgtccttgacaaggcctccggcactctcaggatcgtgcccatcgctggcaaaaagattctgaggctagagccacatcttgaagtgcagcatccagcgcattcgcagcactctgaggtggcatcagaagcggcttcagctgcaggaaatgatgaattgaaggttcaggatctgacaatgatgtatggagccaagacggacagggacaaggacaataagtggagatcgttaaaggaacaaaggaatgatccttccgcttatgaggacattgatcttggaatatcagagaccaatgtcaacgccaatgataggcaggaacctgtacttgttcggaacattccaccttatgatcctaccgcagatacatcagaaaatgcatatcttttggacgagattattccaaagagtatgcgggagcattttttggaaattgtccgtcattttgaatcaggagaaatctcctcaaaaggctatgggagttttgtctcaaaacgtgtgcacaagttaaaggagcttcagggtgaagataaaaagaggtttgcttggatactttcctacatccaacatctcctatctctattggcgcgtaatggctccatgtccaatcgcaaatggaaaggcagaaatgaaaaccagataagccatggaccagcaaccccgcaggctgtatatcgcaggctgctgttcatgtttacagaaccggggtccagtgtcatgccaacagagaaaaaagagcttctgaccaactacatattggtcctaacactttttgccgatgacttcagatccaaccccagcgacatatgtgaggaccttaaaatgacccgccaaaatcttaaaccatactatgaccagttgggatgcaaatctgtgacagaaggtgcttttaagtctactttcatgacgctcccagcccctctcaagttcccaaaggaagttacgagaaagcggcgacggcagtagggcttttatccaaaggagacaaggagagaaaccaatggctatttatctcagaaatggcttgcattacttgaatggatggctggattggaaatactccctatcgaaggcaagaagtaaaggcatcgatgctaggggcccgattttaatagtgtactggaaatgaaaagttgtcctgtgtttcatctcgttttgtttttagttgctcatcgacattttcttgttaaggaaacatgtcatctatgtattgataaatgtttgtctatctgtatgagtgaatgtattgaaatgtt

SEQ ID NO: 15882 - protein, 449 aa, Zea mays subsp. mays
  misc_feature (1)..(449): Ceres Seq. ID no. 12349348
KTLEPSPMADLETLATPAPASASTKKKKKHSKKHKAASDAPTNVTVDASLMGGSSYVAAAPVVGYFPSGYDPLTTAAGAESAPGTQLFRHEKHPTWVDLVVRSPGGGHDFVGRSYAGEAAVPQVCDYALGVLDKASGTLRIVPIAGKKILRLEPHLEVQHPAHSQHSEVASEAASAAGNDELKVQDLTMMYGAKTDRDKDNKWRSLKEQRNDPSAYEDIDLGISETNVNANDRQEPVLVRNIPPYDPTADTSENAYLLDEIIPKSMREHFLEIVRHFESGEISSKGYGSFVSKRVHKLKELQGEDKKRFAWILSYIQHLLSLLARNGSMSNRKWKGRNENQISHGPATPQAVYRRLLFMFTEPGSSVMPTEKKELLTNYILVLTLFADDFRSNPSDICEDLKMTRQNLKPYYDQLGCKSVTEGAFKSTFMTLPAPLKFPKEVTRKRRRQ

SEQ ID NO: 15883 - protein, 442 aa, Zea mays subsp. mays
  misc_feature (1)..(442): Ceres Seq. ID no. 12349349
MADLETLATPAPASASTKKKKKHSKKHKAASDAPTNVTVDASLMGGSSYVAAAPVVGYFPSGYDPLTTAAGAESAPGTQLFRHEKHPTWVDLVVRSPGGGHDFVGRSYAGEAAVPQVCDYALGVLDKASGTLRIVPIAGKKILRLEPHLEVQHPAHSQHSEVASEAASAAGNDELKVQDLTMMYGAKTDRDKDNKWRSLKEQRNDPSAYEDIDLGISETNVNANDRQEPVLVRNIPPYDPTADTSENAYLLDEIIPKSMREHFLEIVRHFESGEISSKGYGSFVSKRVHKLKELQGEDKKRFAWILSYIQHLLSLLARNGSMSNRKWKGRNENQISHGPATPQAVYRRLLFMFTEPGSSVMPTEKKELLTNYILVLTLFADDFRSNPSDICEDLKMTRQNLKPYYDQLGCKSVTEGAFKSTFMTLPAPLKFPKEVTRKRRRQ

SEQ ID NO: 15884 - protein, 399 aa, Zea mays subsp. mays
  misc_feature (1)..(399): Ceres Seq. ID no. 12349350
MGGSSYVAAAPVVGYFPSGYDPLTTAAGAESAPGTQLFRHEKHPTWVDLVVRSPGGGHDFVGRSYAGEAAVPQVCDYALGVLDKASGTLRIVPIAGKKILRLEPHLEVQHPAHSQHSEVASEAASAAGNDELKVQDLTMMYGAKTDRDKDNKWRSLKEQRNDPSAYEDIDLGISETNVNANDRQEPVLVRNIPPYDPTADTSENAYLLDEIIPKSMREHFLEIVRHFESGEISSKGYGSFVSKRVHKLKELQGEDKKRFAWILSYIQHLLSLLARNGSMSNRKWKGRNENQISHGPATPQAVYRRLLFMFTEPGSSVMPTEKKELLTNYILVLTLFADDFRSNPSDICEDLKMTRQNLKPYYDQLGCKSVTEGAFKSTFMTLPAPLKFPKEVTRKRRRQ

SEQ ID NO: 15885 - DNA, 1569 bp, Zea mays subsp. mays
  misc_feature (1)..(1569): Ceres Seq. ID no. 12349393
aagaagagaccaagattagtaccacttgtactgtacactcctcgttccgcgtgcgaagcgaaccctgttccatgttcttgaatctctctgagcccagtccttgtagctagcagatcagatcgctcaggcggaaagatcgagagaaggtcgccccaggatcgagatctagagcgagaaaggtttaagagggaaaggcgcggcaaggagtcgagagaatagaatgttcccttcctccaagaagcaggccagcaccggtgccgcgaacccaaatgatcggcctatgtgcgggcaaggcggcgactccggcggtctcgtcctcaccaccgaccccaagccccgcctccggtggacacccgagctccatgaccgcttcgtcgatgccgtcgcccagctcggaggcccggacaaggcaacgcccaagaccatcatgagggttatgggagtcaagggcctcaccctctaccacctcaagagtcaccttcagaaattcaggctagggaagcagcacaaggagttgggtgaccatacagcaatggagatgcaacgtagcgtggcctcttcttcaggcatgatagcaagaagcatgaacgaccgcagcgtgaatgtgaacgaggccttaaggatccaaatggaagtccaaagaaggctccatggagaactagaggtgcagaagcacctccagatgagggttgaagcccaggggaagtacatgcagtccatcgtggagaaagcataccaagccctcgggtccagcgactgcgccacgtggcccgctgggtacagaactctaggcagccaaggggtccttgacatcggcaccagctccacgagcttctcgtccgtccaggacctgcagtgcttctatggaggaagcagccacatggaccagctcctgcatcagatggagaggccaatggatggcttcctgacgctgggcgagagctgcttcattgggtccgcggacaacaagaaggaccctaataaccattgcagctccagtggcaagagctcgatgatgtgggccagcgaagagcagcaggcaaagagcggcaacgatcagcttcagatggggtcgtcgacaaggatggagggtgcaggcattgatgtcatggatccagtagtcaccgggctgtacgagggcgccgtgtcgggagactccatggacagcaagggttttgagggttcgaactccaggctcgagatgaagccgcctgcacaacaagcacctgtaggaagtcagaggatacgcatatagtcgtccaatatataatggtttggaactcacgtaaagaactgtatactacaatatatggataagcaaggtcaagctaaggtatttaaatgcaagtgtcagttttgttgtgaaccatcaaagttcagacgattagcgtgtgatcggagttgtagtacatgcagtcattagttttgttggatacaagatattatggagatcaattctccatatatatgtttgtttattttgtccctaagattcgccatatatatgctgtattatattggatttgtgtgacacccttgtaacattgatcagagatcttttgtgggtgc

SEQ ID NO: 15886 - protein, 344 aa, Zea mays subsp. mays
  misc_feature (1)..(344): Ceres Seq. ID no. 12349394
MFPSSKKQASTGAANPNDRPMCGQGGDSGGLVLTTDPKPRLRWTPELHDRFVDAVAQLGGPDKATPKTIMRVMGVKGLTLYHLKSHLQKFRLGKQHKELGDHTAMEMQRSVASSSGMIARSMNDRSVNVNEALRIQMEVQRRLHGELEVQKHLQMRVEAQGKYMQSIVEKAYQALGSSDCATWPAGYRTLGSQGVLDIGTSSTSFSSVQDLQCFYGGSSHMDQLLHQMERPMDGFLTLGESCFIGSADNKKDPNNHCSSSGKSSMMWASEEQQAKSGNDQLQMGSSTRMEGAGIDVMDPVVTGLYEGAVSGDSMDSKGFEGSNSRLEMKPPAQQAPVGSQRIRI

SEQ ID NO: 15887 - protein, 324 aa, Zea mays subsp. mays
  misc_feature (1)..(324): Ceres Seq. ID no. 12349395
MCGQGGDSGGLVLTTDPKPRLRWTPELHDRFVDAVAQLGGPDKATPKTIMRVMGVKGLTLYHLKSHLQKFRLGKQHKELGDHTAMEMQRSVASSSGMIARSMNDRSVNVNEALRIQMEVQRRLHGELEVQKHLQMRVEAQGKYMQSIVEKAYQALGSSDCATWPAGYRTLGSQGVLDIGTSSTSFSSVQDLQCFYGGSSHMDQLLHQMERPMDGFLTLGESCFIGSADNKKDPNNHCSSSGKSSMMWASEEQQAKSGNDQLQMGSSTRMEGAGIDVMDPVVTGLYEGAVSGDSMDSKGFEGSNSRLEMKPPAQQAPVGSQRIRI

SEQ ID NO: 15888 - protein, 275 aa, Zea mays subsp. mays
  misc_feature (1)..(275): Ceres Seq. ID no. 12349396
MRVMGVKGLTLYHLKSHLQKFRLGKQHKELGDHTAMEMQRSVASSSGMIARSMNDRSVNVNEALRIQMEVQRRLHGELEVQKHLQMRVEAQGKYMQSIVEKAYQALGSSDCATWPAGYRTLGSQGVLDIGTSSTSFSSVQDLQCFYGGSSHMDQLLHQMERPMDGFLTLGESCFIGSADNKKDPNNHCSSSGKSSMMWASEEQQAKSGNDQLQMGSSTRMEGAGIDVMDPVVTGLYEGAVSGDSMDSKGFEGSNSRLEMKPPAQQAPVGSQRIRI

SEQ ID NO: 15889 - DNA, 901 bp, Zea mays subsp. mays
  misc_feature (1)..(901): Ceres Seq. ID no. 12349401
aataaataaggaaaattctgaaggagtaatattgcttggtcatagtactggatgccaggatattgtgcattatatgcgcacaaactttgcctgttcgaaagcggtttctggggtcatcttgcaggccccagtaagtgacagggagtatagagcaactcttccggaaacagctgaaatgatagacctggcagccaaactgattagcgagggtcgtggaatggatttgatgcctagaaaagcaaactcagatgctcctattactgcctacaggtaccactccctttgttcatatatgggtgatgatgacatgttcagttcagatctaagtgaagatcagctgaggcagagacttggtcatatgtcaatcacacagtgccaggttattttttcaatgggggatgaatatgtacctgaatatgttgataagagggctctactagacaggctatgtagggcgctgggaggtgcagagaaagtcgagatagaatggggaaaccatgctctgtccaacagagtgcaagaagcagttgtggccattgtagattttgtcaagagggaggggcccaaaggctgggacgacccatggagctagatacagcagttataatctcatttgtaactagtttgtgcttttcctcttctctcttttctccaattgtaacatctttcttttgcattattattggtccatttttcaatagtgatatgctatttttcttataaccccctcccccaaacatgcatcgcgttctcattctagtatggtgtatcacatatgtaaattgcgttaggaatcttgattatcaggctgtctttggtggatcatgtaaaattggagttgtgggaacaaggagctgttggagacggcatcagatcaacttcgtgcaaacttcagttttgg

SEQ ID NO: 15890 - protein, 196 aa, Zea mays subsp. mays
  misc_feature (1)..(196): Ceres Seq. ID no. 12349402
INKENSEGVILLGHSTGCQDIVHYMRTNFACSKAVSGVILQAPVSDREYRATLPETAEMIDLAAKLISEGRGMDLMPRKANSDAPITAYRYHSLCSYMGDDDMFSSDLSEDQLRQRLGHMSITQCQVIFSMGDEYVPEYVDKRALLDRLCRALGGAEKVEIEWGNHALSNRVQEAVVAIVDFVKREGPKGWDDPWS

SEQ ID NO: 15891 - protein, 172 aa, Zea mays subsp. mays
  misc_feature (1)..(172): Ceres Seq. ID no. 12349403
MRTNFACSKAVSGVILQAPVSDREYRATLPETAEMIDLAAKLISEGRGMDLMPRKANSDAPITAYRYHSLCSYMGDDDMFSSDLSEDQLRQRLGHMSITQCQVIFSMGDEYVPEYVDKRALLDRLCRALGGAEKVEIEWGNHALSNRVQEAVVAIVDFVKREGPKGWDDPWS

SEQ ID NO: 15892 - protein, 138 aa, Zea mays subsp. mays
  misc_feature (1)..(138): Ceres Seq. ID no. 12349404
MIDLAAKLISEGRGMDLMPRKANSDAPITAYRYHSLCSYMGDDDMFSSDLSEDQLRQRLGHMSITQCQVIFSMGDEYVPEYVDKRALLDRLCRALGGAEKVEIEWGNHALSNRVQEAVVAIVDFVKREGPKGWDDPWS

SEQ ID NO: 15893 - DNA, 1476 bp, Zea mays subsp. mays
  misc_feature (1)..(1476): Ceres Seq. ID no. 12349426
gacaaatcctctcttggacaagccgaaccttcgctcgggtgcctcgggttcagccaacctcgcacatggcgcgctgctccgtcgcgaaaccgctctgcgccaccaccgcgactccccgccttacccgtcgctgccggcagctctccgcgaacgccaccaccccggccatggccaccagtaaagcacggttgccggccctaaacaaaccggccaaaccgccgccgcctctcctctcgcgtccgaagctccccgtgcccaccaacaccgccactgacaccactagcggcaaggattgcaccaagaaaccaccgccggaagctacggactcacatccgccctcgtccggcgccggcgacgtgctccgcctgatggacgcgctgggcatccctcccgacgaggacatctacatatccctcctcagggagtgcgccgacgcagcagaggtggcctccgtgcacgcgcacataaccgctcgtcgcgcctccgatggactcccgtcgccggtcgccaaccggctcctgctttcttacccgcgtgtggggacatcgaagctgcccgccgggtgttcgacggaatgcccaccaccaacggcatggcttgggcgaccatggtgtccgcctactcggatggctgcctccaccatgaagcgatgcgtctgttcgcccacatgtgccatagaacgccggtcctggacggcgattgctactcccatgccatcgtggccgtgctgcggtcatgtacccgtgcaggcgagctacgtctcggtgagcaggtacacgctctcgtcgtcaagaaaggcaggatccacggtgacattggcagctcgctagtgcagctgtactgcgatggaggcggttttcacagaagcgcgcggcgagttctcgcgacgacgatgcagcaccactgtcaggaaccagtccctgaggcggcctggacgagcctgatcacatcctgccaccgtgaaagcctactgagcgaggctgtggatgtcttcagggacatggcgtcctcgggcgttccaaggagcagcttctccctgtcgagcatcctcgcggtgttcgcagagtcacaggacccagggtgctgctgcgggcagcaggtgcacgccgacgccatcaagcgcggcgtggacacgaaccagttcgttggctccgggctcatacacatgtacgcgaagcaagggcggctggcggacgccgccagggcgttcgagacgatcggtggcaagcctgacgccgcgtgcttgagtgccctggccatggcctatgctcgcggcggacggtacagagaggccaccagaatcatgtaccagatgaaagctgccgggatgaatccttctaaggagatggccgatgcggttaggttggcttgtttcagatgatcctgaactagtagtcgagtaggagtgccaaagagtgagttactttgattgtacaattgtgttaagcagacgccagtgcactggtgtctgattcc

SEQ ID NO: 15894 - protein, 275 aa, Zea mays subsp. mays
  misc_feature (1)..(275): Ceres Seq. ID no. 12349427
QILSWTSRTFARVPRVQPTSHMARCSVAKPLCATTATPRLTRRCRQLSANATTPAMATSKARLPALNKPAKPPPPLLSRPKLPVPTNTATDTTSGKDCTKKPPPEATDSHPPSSGAGDVLRLMDALGIPPDEDIYISLLRECADAAEVASVHAHITARRASDGLPSPVANRLLLSYPRVGTSKLPAGCSTECPPPTAWLGRPWCPPTRMAASTMKRCVCSPTCAIERRSWTAIATPMPSWPCCGHVPVQASYVSVSRYTLSSSRKAGSTVTLAAR

SEQ ID NO: 15895 - protein, 268 aa, Zea mays subsp. mays
  misc_feature (1)..(268): Ceres Seq. ID no. 12349428
MPTTNGMAWATMVSAYSDGCLHHEAMRLFAHMCHRTPVLDGDCYSHAIVAVLRSCTRAGELRLGEQVHALVVKKGRIHGDIGSSLVQLYCDGGGFHRSARRVLATTMQHHCQEPVPEAAWTSLITSCHRESLLSEAVDVFRDMASSGVPRSSFSLSSILAVFAESQDPGCCCGQQVHADAIKRGVDTNQFVGSGLIHMYAKQGRLADAARAFETIGGKPDAACLSALAMAYARGGRYREATRIMYQMKAAGMNPSKEMADAVRLACFR

SEQ ID NO: 15896 - protein, 262 aa, Zea mays subsp. mays
  misc_feature (1)..(262): Ceres Seq. ID no. 12349429
MAWATMVSAYSDGCLHHEAMRLFAHMCHRTPVLDGDCYSHAIVAVLRSCTRAGELRLGEQVHALVVKKGRIHGDIGSSLVQLYCDGGGFHRSARRVLATTMQHHCQEPVPEAAWTSLITSCHRESLLSEAVDVFRDMASSGVPRSSFSLSSILAVFAESQDPGCCCGQQVHADAIKRGVDTNQFVGSGLIHMYAKQGRLADAARAFETIGGKPDAACLSALAMAYARGGRYREATRIMYQMKAAGMNPSKEMADAVRLACFR

SEQ ID NO: 15897 - DNA, 1506 bp, Zea mays subsp. mays
  misc_feature (1)..(1506): Ceres Seq. ID no. 12349452
atgggcgctgctggggacacggatgccgcgctccacgctcttcttcccgctctacctcatgtccatcgggcaaggcgggtaccagccttcgctgcaagcgttcggcgccgaccagctgagcatcggggacgatgacgacgacgacggtgacaccgagcccggcgcgtcgtcgacgccggaggagaagtccaaggtgaagagcatgttcttccggtggtggtacttcggcatgtgcagcggcagcctgctggggaactccaccatgtcgtacgtccaagacaacctcggctggggcctcggtttcgccatcccctgcgccgtcatggccttgtccgtcgcggccttcttctgctgcacccctctgtacaagcgcaaggtgcaggtacagcagccgaagggcgccggtattaggccgtctccgagtagcgtcttcaagtcggtgctcggcgctagccgaaagatcagtctgccgccgtcgaggtcatcagacgacaatggcgacgccatttctgagcttgagttgcaagagaagccactgaaaactgatgaagcatcagagtcctcctctgacgaggctgccgctgctcccggcgtggccaaggtcatactcggcctcctgccgatctgggcgatcctgctcgtcttcgcggtgatcttccagcagccgatgaccttcttcaccaagcaaggcatgctgatgaaccacacgatcggcgtcggcgtcggctccggctccctggtgatcccgccggcgatgctgcagagctccatcaccgtctccatcatcctgctcgtgcccatgtacgaccggatgatcgtcccgctgaccaacgccgtcacggggggcagcgacggcatcacggtgctccagcggatcggcgtcggcatggtcctctccgtggtggccatggtcgccgcggcgctcgtcgagtcgcggcggctccgcgcggagcccgccctgctgagcatcttctggctcctgccgcagtacgtcctgctgggggtctccgacgtgttcaccgtggtggggatgcaggagttcttctactcgcaggtgccggcctccatgaggaccaccggcatcgggctctacctcagcgtcttcggcgtcggcggattcctcggcgcgtccctcatcaccctgctcgagatggccacggcgaggcccggcaacgcccgcggatggttctctgacgacccgcgggaggcgcggatagataacttctactggttcttggctctcctctgcttcgtcagctttgtcgtcttcacgcacttgtgcaagtactacaacgacagatctgcgtcagggaggtaggatcgacccgagtaattaagctgggggtggacgagaggatcttcgatcttgattttgcttgacagcttgagtgagaatttattacttgtattttcagggcgattctattctagctagagatagttcggctgtgtaatgttttcagaaagacatgtaattcaggactccagacgtaatggttctgttcc

SEQ ID NO: 15898 - protein, 438 aa, Zea mays subsp. mays
  misc_feature (1)..(438): Ceres Seq. ID no. 12349453
WALLGTRMPRSTLFFPLYLMSIGQGGYQPSLQAFGADQLSIGDDDDDDGDTEPGASSTPEEKSKVKSMFFRWWYFGMCSGSLLGNSTMSYVQDNLGWGLGFAIPCAVMALSVAAFFCCTPLYKRKVQVQQPKGAGIRPSPSSVFKSVLGASRKISLPPSRSSDDNGDAISELELQEKPLKTDEASESSSDEAAAAPGVAKVILGLLPIWAILLVFAVIFQQPMTFFTKQGMLMNHTIGVGVGSGSLVIPPAMLQSSITVSIILLVPMYDRMIVPLTNAVTGGSDGITVLQRIGVGMVLSVVAMVAAALVESRRLRAEPALLSIFWLLPQYVLLGVSDVFTVVGMQEFFYSQVPASMRTTGIGLYLSVFGVGGFLGASLITLLEMATARPGNARGWFSDDPREARIDNFYWFLALLCFVSFVVFTHLCKYYNDRSASGR

SEQ ID NO: 15899 - protein, 431 aa, Zea mays subsp. mays
  misc_feature (1)..(431): Ceres Seq. ID no. 12349454
MPRSTLFFPLYLMSIGQGGYQPSLQAFGADQLSIGDDDDDDGDTEPGASSTPEEKSKVKSMFFRWWYFGMCSGSLLGNSTMSYVQDNLGWGLGFAIPCAVMALSVAAFFCCTPLYKRKVQVQQPKGAGIRPSPSSVFKSVLGASRKISLPPSRSSDDNGDAISELELQEKPLKTDEASESSSDEAAAAPGVAKVILGLLPIWAILLVFAVIFQQPMTFFTKQGMLMNHTIGVGVGSGSLVIPPAMLQSSITVSIILLVPMYDRMIVPLTNAVTGGSDGITVLQRIGVGMVLSVVAMVAAALVESRRLRAEPALLSIFWLLPQYVLLGVSDVFTVVGMQEFFYSQVPASMRTTGIGLYLSVFGVGGFLGASLITLLEMATARPGNARGWFSDDPREARIDNFYWFLALLCFVSFVVFTHLCKYYNDRSASGR

SEQ ID NO: 15900 - protein, 419 aa, Zea mays subsp. mays
  misc_feature (1)..(419): Ceres Seq. ID no. 12349455
MSIGQGGYQPSLQAFGADQLSIGDDDDDDGDTEPGASSTPEEKSKVKSMFFRWWYFGMCSGSLLGNSTMSYVQDNLGWGLGFAIPCAVMALSVAAFFCCTPLYKRKVQVQQPKGAGIRPSPSSVFKSVLGASRKISLPPSRSSDDNGDAISELELQEKPLKTDEASESSSDEAAAAPGVAKVILGLLPIWAILLVFAVIFQQPMTFFTKQGMLMNHTIGVGVGSGSLVIPPAMLQSSITVSIILLVPMYDRMIVPLTNAVTGGSDGITVLQRIGVGMVLSVVAMVAAALVESRRLRAEPALLSIFWLLPQYVLLGVSDVFTVVGMQEFFYSQVPASMRTTGIGLYLSVFGVGGFLGASLITLLEMATARPGNARGWFSDDPREARIDNFYWFLALLCFVSFVVFTHLCKYYNDRSASGR

SEQ ID NO: 15901 - DNA, 1458 bp, Zea mays subsp. mays
  misc_feature (1)..(1458): Ceres Seq. ID no. 12349515
agggcaaagaggcgcgtgagaggtcggagcctgcaccgccgccgccatgctccgcctccaaaaacacctctcccttcgcctgcaagaacatctccttcccctgcaccgctccgcctccctcatacagctctccctccagcgctctctcctctccaccggctccgccacatattcctctccgggtcacttcgccgccgatgactacctcgtctccacatgtggcctcacccgggagcaagccgcgaatgccgccaagtgcatctcccactggaagtcgtcctccaacgccgacgccgtgctgtccttcctaaccggcccggcgctcggcctctccaatgctgagatcgcgctgctcgtggccaaagacccgcgcgtcctcagctgcagcgtcgacaacaccctgcgggcccgcttggcccgcttccgcagtcatggcttctccgccgcgcagatcagcgaattcgtccgcgtggccccctgcttctttcgcaaattcaacatcgacgtcaagctcggcttctggatgcccttcctcggctcgcccgacaggttcctccgcctcgtcaagcgtaacttctacctcctcagctccgacctcgacaaggtggtgaagcccaacatccagctgctccaggagtgcggtctatctatccaggagattgggagcctgtgcgtggctaacccgaggctgctcaccagcaagccggacagaatcagggccgtcctcgtgcgtgccggtgagatgggcgtgccccgcaagacgcttttgttcaggcacgctgtgaccgcggtggcgggcctctgtccggagacctttgcatctaagctcaagatgatggccaatattctcgggtgctcagaggctgaggttgccagaatggtgcaaaagaacccgttggtgctgaggcgctccatggagacgattcagcgcgcctgtgagttcctgatcaatgtggtcggtgtcggtaccaacttcattctggacaagcccacaatcctgatgtacagtctggaacgccggctggtgccccggcattacgtgatgaaggtgctccaggacaaaggattgatgcgaaaagatcatagcttctacactttggccgctattagtgctagcgtgttctgctccaggtatgtacatcctcataagaatgttcttcctaatcttgccgctgcatacgcatctggttgcaatgggaaaatagccatctgaggcgcgcgattccagcaaactggctatatgggcagcagctgcagttgtatcttgcatgtcattcttaacacattcagataccctgatgtgtactctgcgaggctgcagctccgtacttggctcatagcttcagaattgcagaaattcagcataacaagtttaagaactcatgaatgaccaaagcacgatgttgtcaatttcatataccttgtttaggattctggcgatgaattttatcgtgtttc

SEQ ID NO: 15902 - protein, 388 aa, Zea mays subsp. mays
  misc_feature (1)..(388): Ceres Seq. ID no. 12349516
MLRLQKHLSLRLQEHLLPLHRSASLIQLSLQRSLLSTGSATYSSPGHFAADDYLVSTCGLTREQAANAAKCISHWKSSSNADAVLSFLTGPALGLSNAEIALLVAKDPRVLSCSVDNTLRARLARFRSHGFSAAQISEFVRVAPCFFRKFNIDVKLGFWMPFLGSPDRFLRLVKRNFYLLSSDLDKVVKPNIQLLQECGLSIQEIGSLCVANPRLLTSKPDRIRAVLVRAGEMGVPRKTLLFRHAVTAVAGLCPETFASKLKMMANILGCSEAEVARMVQKNPLVLRRSMETIQRACEFLINVVGVGTNFILDKPTILMYSLERRLVPRHYVMKVLQDKGLMRKDHSFYTLAAISASVFCSRYVHPHKNVLPNLAAAYASGCNGKIAI

SEQ ID NO: 15903 - protein, 229 aa, Zea mays subsp. mays
  misc_feature (1)..(229): Ceres Seq. ID no. 12349517
MPFLGSPDRFLRLVKRNFYLLSSDLDKVVKPNIQLLQECGLSIQEIGSLCVANPRLLTSKPDRIRAVLVRAGEMGVPRKTLLFRHAVTAVAGLCPETFASKLKMMANILGCSEAEVARMVQKNPLVLRRSMETIQRACEFLINVVGVGTNFILDKPTILMYSLERRLVPRHYVMKVLQDKGLMRKDHSFYTLAAISASVFCSRYVHPHKNVLPNLAAAYASGCNGKIAI

SEQ ID NO: 15904 - DNA, 1449 bp, Zea mays subsp. mays
  misc_feature (1)..(1449): Ceres Seq. ID no. 12349549
actcggaaaccgtaagccgtgcaaacaacaggcgacgcaccggcgccgcgcgcgcacgcctatttctagctcgatcgtgtcctctcgccgcgctccggagtcgtcaatccacacgcttgggcgagcgagccttgttgcggaagcgcgcggacgacatgctgatgctgcacccgaggctggtgtcgtcgagcgccgtggacgacgaggaccactgcgagagctgcgcctgctactgcgccatggtgtcctgcgtctcgctgctgctcttcatcgtgctggctgccgcggtcagcatcccgagggcctgcgccatcgccggcgtcatgctgctcctgctggggctcgtcggctggctcgtgcccacggggaatggagccggtccggcggcgcagcagcagcagggccaggctgctgccgatcctggggcgcggcggctggtggtgcaccaccggtgcgcgtgcgggctaacggacgccgctatcgccgcgctgccggcggcgttcacgtactacgaggcgcccgcggtgaagaatggagtcgggagcgaggacgagaagcagccgcgcggcagctccttgctgtgcgcggtttgtctggacgacgtgcggggcggcgagatggtgcggcagctgccggcgtgccgccacctgttccacgtcgactgcgtcgacgcctggttgcgcgctcaccggacgtgcccgctctgccgctgccagctctccccgaggaacgacgtcagcacaaagcgggccgccacggtcgtcggggagtcatccgtcgacgcgttgccgccggtgtgagtgtcactcactcatcaatcctccgaagctggccggcgcattggtaaactgtattggaccagattcttcatttcttaacaccacataatagaacatatttctgcccgaataaagaaaacttcggcacgatttcgagggcgcgcagcagacttgtgtctctactctctaggcatgagcacgagcctcaacatcgatcgagtggttccaaccacatcgcccgacccgacgcttccagcagcagtcgcgaaagaagggaaaaaaatttggtgcatgcagctcctcacaaaaaagaggatagaccccacccgcagcaacaaaaatgttatctggtggatctgcaggtggggtccatccacctttttgtgagaggctgcaaaccactctggtttgcagcagtgctgcaccaaatttttttccgaaagaaggagcatctcgccgatggggacgggtaccagaccgtacggaccagggagtctacaacttgacacgcttcagttctgccgctaccagacaggcaatcgagtctatcatgtcagtgccagcttttgtactgtatgctccgttgcaccgttacatttttgtgagttgtaaaaccagaacaaatacccgtgtttcttaggaaactgaaggcttttgggctcttggatcc

SEQ ID NO: 15905 - protein, 281 aa, Zea mays subsp. mays
  misc_feature (1)..(281): Ceres Seq. ID no. 12349550
LGNRKPCKQQATHRRRARTPISSSIVSSRRAPESSIHTLGRASLVAEARGRHADAAPEAGVVERRGRRGPLRELRLLLRHGVLRLAAALHRAGCRGQHPEGLRHRRRHAAPAGARRLARAHGEWSRSGGAAAAGPGCCRSWGAAAGGAPPVRVRANGRRYRRAAGGVHVLRGARGEEWSRERGREAAARQLLAVRGLSGRRAGRRDGAAAAGVPPPVPRRLRRRLVARSPDVPALPLPALPEERRQHKAGRHGRRGVIRRRVAAGVSVTHSSILRSWPAHW

SEQ ID NO: 15906 - protein, 265 aa, Zea mays subsp. mays
  misc_feature (1)..(265): Ceres Seq. ID no. 12349551
SETVSRANNRRRTGAARARLFLARSCPLAALRSRQSTRLGERALLRKRADDMLMLHPRLVSSSAVDDEDHCESCACYCAMVSCVSLLLFIVLAAAVSIPRACAIAGVMLLLLGLVGWLVPTGNGAGPAAQQQQGQAAADPGARRLVVHHRCACGLTDAAIAALPAAFTYYEAPAVKNGVGSEDEKQPRGSSLLCAVCLDDVRGGEMVRQLPACRHLFHVDCVDAWLRAHRTCPLCRCQLSPRNDVSTKRAATVVGESSVDALPPV

SEQ ID NO: 15907 - protein, 214 aa, Zea mays subsp. mays
  misc_feature (1)..(214): Ceres Seq. ID no. 12349552
MLMLHPRLVSSSAVDDEDHCESCACYCAMVSCVSLLLFIVLAAAVSIPRACAIAGVMLLLLGLVGWLVPTGNGAGPAAQQQQGQAAADPGARRLVVHHRCACGLTDAAIAALPAAFTYYEAPAVKNGVGSEDEKQPRGSSLLCAVCLDDVRGGEMVRQLPACRHLFHVDCVDAWLRAHRTCPLCRCQLSPRNDVSTKRAATVVGESSVDALPPV

SEQ ID NO: 15908 - DNA, 1316 bp, Zea mays subsp. mays
  misc_feature (1)..(1316): Ceres Seq. ID no. 12349557
gtctagatcgctcgtccggtgtggtctctggacttgcttgccgttcacttctcttcagcggcagcgtggcaaggcaacgagagcaacgaagagtattcaaaccgaaaacaatggatccggtgcggaagagcgtgtgcgtgaccggcgctggcggcttcgtcgcgtcggagctggtgaagctcctcctctcccggggccaatacgcggtccgcggcaccgtgcgcgaccctggtgctagcaagaatgcccatctcaaggtgctggaaggagctgaggaaaggttgcagcttctcaaggctgatctgatggactacgacagcattgcatcagcagttgccggctgtgagggtgtcttccatgtagctagccctgtcctttcccatcgaccctccaaccctgaggtggaggtcatagctcccgctgtaataggtacaaccaatgtgttaaaggcttgctatgaggcaaaagttaggcgagttgtggtggtgtcttcatgtggagctgtgtatgctaatcctatttatccgaagggtaaggtgtttgatgaagactgctggtcagatgaggattactgcaggaagaaggaggattggtatttagtttccaaaacactgtcggaacgagaggctcttgcttttgcagcaaaaacagggctggacgttgtaactgtttgtccgtcattagtatttggacccttgatgcagcctacagtaaatttgagcagcgaaatgatccttaaatatttcaaagatctcgagactgttgaaaatgtactcagtaatatggtggatattcgtgatgttgctgatgctcttcttctgacttacgaaaagccagaagcgtctggacgatacatctgcagttcacatgcaataaaaatttctgatatgataaacatactgaagaccatgtatccgtcttacccttatcccaaaaattttgtggaagatgatgtcaactctgtatacagctctgagaaactgcagaagctggggtggagcttcaagcctatagaggaatccctccgtgacactgttgaatcctacaaggcatttggcatcctgaattgaacatcgaactaggattgtttccatctgctgttgcctccgaactcctcctgaataatgtaggcgcagtgacaacagcactgccgttctctttatttttcaacactattatgtagtggttcaggccaaataagtaggcccggtgctgactgttgtatggtttgtggcctattgtcgttgctaaaaactagaaatatgcgtactaatgttgcattgctgcacttgatttgcttgtcgtcattctgatgc

SEQ ID NO: 15909 - protein, 355 aa, Zea mays subsp. mays
  misc_feature (1)..(355): Ceres Seq. ID no. 12349558
LDRSSGVVSGLACRSLLFSGSVARQREQRRVFKPKTMDPVRKSVCVTGAGGFVASELVKLLLSRGQYAVRGTVRDPGASKNAHLKVLEGAEERLQLLKADLMDYDSIASAVAGCEGVFHVASPVLSHRPSNPEVEVIAPAVIGTTNVLKACYEAKVRRVVVVSSCGAVYANPIYPKGKVFDEDCWSDEDYCRKKEDWYLVSKTLSEREALAFAAKTGLDVVTVCPSLVFGPLMQPTVNLSSEMILKYFKDLETVENVLSNMVDIRDVADALLLTYEKPEASGRYICSSHAIKISDMINILKTMYPSYPYPKNFVEDDVNSVYSSEKLQKLGWSFKPIEESLRDTVESYKAFGILN

SEQ ID NO: 15910 - protein, 319 aa, Zea mays subsp. mays
  misc_feature (1)..(319): Ceres Seq. ID no. 12349559
MDPVRKSVCVTGAGGFVASELVKLLLSRGQYAVRGTVRDPGASKNAHLKVLEGAEERLQLLKADLMDYDSIASAVAGCEGVFHVASPVLSHRPSNPEVEVIAPAVIGTTNVLKACYEAKVRRVVVVSSCGAVYANPIYPKGKVFDEDCWSDEDYCRKKEDWYLVSKTLSEREALAFAAKTGLDVVTVCPSLVFGPLMQPTVNLSSEMILKYFKDLETVENVLSNMVDIRDVADALLLTYEKPEASGRYICSSHAIKISDMINILKTMYPSYPYPKNFVEDDVNSVYSSEKLQKLGWSFKPIEESLRDTVESYKAFGILN

SEQ ID NO: 15911 - protein, 254 aa, Zea mays subsp. mays
  misc_feature (1)..(254): Ceres Seq. ID no. 12349560
MDYDSIASAVAGCEGVFHVASPVLSHRPSNPEVEVIAPAVIGTTNVLKACYEAKVRRVVVVSSCGAVYANPIYPKGKVFDEDCWSDEDYCRKKEDWYLVSKTLSEREALAFAAKTGLDVVTVCPSLVFGPLMQPTVNLSSEMILKYFKDLETVENVLSNMVDIRDVADALLLTYEKPEASGRYICSSHAIKISDMINILKTMYPSYPYPKNFVEDDVNSVYSSEKLQKLGWSFKPIEESLRDTVESYKAFGILN

SEQ ID NO: 15912 - DNA, 662 bp, Zea mays subsp. mays
  misc_feature (1)..(662): Ceres Seq. ID no. 12349561
actagttgctagtgctaccaagaacaggaaggaaacaccgccgccgccgcgccttccattccagtactcgcggaggaaaggaacaccagccagcgccatggtcacgtcgacgaccgccgccgccgtgctgtccccgccgtccgtggccgggcttcgcctggcgccgtctccccgggcgcgcgtggcgttccgcgcggcgcgggcgcggcggtccgtggcggcgcgcgcggagctgagcccgtcgctggtgatcagcctgagcacgggcgtgtcgctcttcctgggccgcttcgtcttcttcaacttccagcgggagaacgtggcgaagcaggtgcccgagcagaacggcaagacgcacttcgacgccggcgacgagcgcgccaaggagttctcgggcctgctcaagtccaacgaccccgtgggcttcaacctcgtcgacgtcctcgcctggggctcgctcggccacatcgtcgcctactacatcctcgccacctcaagcaacggatacgaccccaacttcttctgagcggccggctgcgggcatgttcttgagcctgcctgtattctactccgtgtgtgttgagccatatatctgatgctcaaggattggttaatttgaacaagtggtgcaactgcgcgtgtacatggatttgctcttcccc

SEQ ID NO: 15913 - protein, 174 aa, Zea mays subsp. mays
  misc_feature (1)..(174): Ceres Seq. ID no. 12349562
LVASATKNRKETPPPPRLPFQYSRRKGTPASAMVTSTTAAAVLSPPSVAGLRLAPSPRARVAFRAARARRSVAARAELSPSLVISLSTGVSLFLGRFVFFNFQRENVAKQVPEQNGKTHFDAGDERAKEFSGLLKSNDPVGFNLVDVLAWGSLGHIVAYYILATSSNGYDPNFF

SEQ ID NO: 15914 - protein, 142 aa, Zea mays subsp. mays
  misc_feature (1)..(142): Ceres Seq. ID no. 12349563
MVTSTTAAAVLSPPSVAGLRLAPSPRARVAFRAARARRSVAARAELSPSLVISLSTGVSLFLGRFVFFNFQRENVAKQVPEQNGKTHFDAGDERAKEFSGLLKSNDPVGFNLVDVLAWGSLGHIVAYYILATSSNGYDPNFF

SEQ ID NO: 15915 - DNA, 1575 bp, Zea mays subsp. mays
  misc_feature (1)..(1575): Ceres Seq. ID no. 12349572
gcctggctctggtattgggttccccgttctgctgctcagctcagcccagccccagagcccctgacctgccgtcctccctccttccctccccgtgagtcgccgtacggcggtacgggatcgccaccgcggcgtccagggatggcggacgggagcctctacgcctggtggtgctgtgccttgggctgggcgctggcgcttgtcgcagcggacggcttcctcgtggacatcacctatgtggaaagcgccgtggccaaaggagcagtgtgtttggatggtagtgcgccggcgtaccatctcgcccgcggctccggctccggtgagaacagctggctggtccatttcgaggggggaggatggtgcaacaatgtcaccacctgcctgcaacggaagcgcactcggttgggttcgtccaaggagatggcgacgcagattgccttctccggaatcctgagtgacacgccggatgacaacccagatttttacaattggaacaaggtcaaggttcggtactgtgatggttcatctttcactggagatgttgaagaagttgaccctgcaacaaagctacattatagaggtgccaggatatggcaagctgtcatggacgacctgcttgccaaagggatggacaaagctgaaaatgctctaatttcaggctgttctgctggtggtttaacctccatactacactgtgacagatttcatgaccttctgccgccggctgcgagggttaagtgcctttctgatgctgggttcttcattaatgagaaagacgttgcaggagttgggtacattgctgcctttttcaacgacgtcgttacaacacatgggtcagcaaagaatttgccgccttcatgcacttcgacgttacctccaggaacgtgctttttcccccagaacgaggtgaaacagatacagacacctctgttcatcctcaacgcagcatatgattcatggcaggtaaggaacattttggtgccaggagtagctgaccctcatggaaaatggcatagctgtaagcatgatatagaccagtgctctgcatcgcagctacgggtattgcagggattcaggggtgattttctgaaggaagtggcagaactagggaactccgactcgagagggttgttcataaactcatgcttcgtgcactgccagtctgagatacaggagctatggttctcatctgactcccccgtgctcggaaacacaacagtagcaaacgctgttggcgactggttcttcgaccgcagctccttccagaagatagactgcccatacccttgtgactcgacctgtcacaatcggatctacgatgactcatcacaagcatagcaattacagtggcctcacttcgtactgccattcaccatgttattacatttgacgcttccagcattgctaacagtagggcaatgcgttgatagccattgattttttttttctttttacgaataagatcaggtgccggcggctttaactcggttgctaccggaaagtgagcgtgcatcttccgacggtacatggcatggtttatctggatggatgaatcgataatcataaattcttaaaaac

SEQ ID NO: 15916 - protein, 444 aa, Zea mays subsp. mays
  misc_feature (1)..(444): Ceres Seq. ID no. 12349573
AWLWYWVPRSAAQLSPAPEPLTCRPPSFPPRESPYGGTGSPPRRPGMADGSLYAWWCCALGWALALVAADGFLVDITYVESAVAKGAVCLDGSAPAYHLARGSGSGENSWLVHFEGGGWCNNVTTCLQRKRTRLGSSKEMATQIAFSGILSDTPDDNPDFYNWNKVKVRYCDGSSFTGDVEEVDPATKLHYRGARIWQAVMDDLLAKGMDKAENALISGCSAGGLTSILHCDRFHDLLPPAARVKCLSDAGFFINEKDVAGVGYIAAFFNDVVTTHGSAKNLPPSCTSTLPPGTCFFPQNEVKQIQTPLFILNAAYDSWQVRNILVPGVADPHGKWHSCKHDIDQCSASQLRVLQGFRGDFLKEVAELGNSDSRGLFINSCFVHCQSEIQELWFSSDSPVLGNTTVANAVGDWFFDRSSFQKIDCPYPCDSTCHNRIYDDSSQA

SEQ ID NO: 15917 - protein, 398 aa, Zea mays subsp. mays
  misc_feature (1)..(398): Ceres Seq. ID no. 12349574
MADGSLYAWWCCALGWALALVAADGFLVDITYVESAVAKGAVCLDGSAPAYHLARGSGSGENSWLVHFEGGGWCNNVTTCLQRKRTRLGSSKEMATQIAFSGILSDTPDDNPDFYNWNKVKVRYCDGSSFTGDVEEVDPATKLHYRGARIWQAVMDDLLAKGMDKAENALISGCSAGGLTSILHCDRFHDLLPPAARVKCLSDAGFFINEKDVAGVGYIAAFFNDVVTTHGSAKNLPPSCTSTLPPGTCFFPQNEVKQIQTPLFILNAAYDSWQVRNILVPGVADPHGKWHSCKHDIDQCSASQLRVLQGFRGDFLKEVAELGNSDSRGLFINSCFVHCQSEIQELWFSSDSPVLGNTTVANAVGDWFFDRSSFQKIDCPYPCDSTCHNRIYDDSSQA

SEQ ID NO: 15918 - protein, 305 aa, Zea mays subsp. mays
  misc_feature (1)..(305): Ceres Seq. ID no. 12349575
MATQIAFSGILSDTPDDNPDFYNWNKVKVRYCDGSSFTGDVEEVDPATKLHYRGARIWQAVMDDLLAKGMDKAENALISGCSAGGLTSILHCDRFHDLLPPAARVKCLSDAGFFINEKDVAGVGYIAAFFNDVVTTHGSAKNLPPSCTSTLPPGTCFFPQNEVKQIQTPLFILNAAYDSWQVRNILVPGVADPHGKWHSCKHDIDQCSASQLRVLQGFRGDFLKEVAELGNSDSRGLFINSCFVHCQSEIQELWFSSDSPVLGNTTVANAVGDWFFDRSSFQKIDCPYPCDSTCHNRIYDDSSQA

SEQ ID NO: 15919 - DNA, 1622 bp, Zea mays subsp. mays
  misc_feature (1)..(1622): Ceres Seq. ID no. 12349591
gagaaggaagaagctcaggcgaagcgaggcagagggatgtcgtgacgacgaaaccgaagccgagaacggaagcgagccttacatatacccggccccgtcccagtgccctcggcttccgccccagataccaaaccctaaccttagtcggccgttccgcaggcccgccggcggcgacgccttgtgtgccgcgtccgtgattctcttgcacagggaagcgtttggaaggggactccctgcctagtgcactggccgcagcgacgcgcggccgaggcgcggatcggggaggggaggacggctgtggcgagatggcgggtgacgtcgcgacctcgccagccccggcgccgctgtccgtgtcctcatcgtcgcagaaccaccaccaccacggccccacgaccgcccgcggtctcctctgccacgccggcgccggtgcctccgctggtgtggtggcggcgacgttcgtgtgcccactcgatgtcatcaagaccaggttccaggtccacggctggcccaagcttgccacaggtagtgtaattattgggagcttgcagcagattgctcaacaagaaggtttccggggaatgtatcgcggcctatccccaactattctggcactcttgcctaactgggcggtttactttactgtgtatgagcagcttaaaagttttctttcttccaacgatggaagccatcaactttctttaggggcaaatgttgttgctgcatcatgtgctggagctgcaacaactattgtaacaaatccactttgggttgtgaagacaagatttcagacccaaggaattagagccgggccaatcccgtataaaggtacacttgctgccttgagaagaatagcacatgaagaaggcatccgagggctatacagtggcctggtccctgccttggctggtatcagtcacgttgctattcagttccctgtgtacgagaagataaaagcttatctggctgagcgagataatactactgtagaagcattgagttttggtgatgtcgctgttgcttcgtctctggctaaagtagctgcgtcaacattgacatatcctcatgaggttgttcgatcaaggctgcaagaccagcgagcaaactctgatgccagatacaaaggtgtaatagactgtgtcagaaaggtttatcataaagagggtgtggctggcttctaccgtggatgtgccacaaatctgttgcggacgacccctgctgcagtgataactttcactagcttcgagatgatccataggtcccttcttgatctattccctgctgaacctgaacctcacatccaacctctaaagcattgaccatacaacatttgtaccctatccatgcggcagattaggaccccagtaaccatccagcaacagcaatgttgtttactgtgccagatggctcttgtaaaagagagaattgtttttttccccagataatagctgccattcaaaagttgaaacaatagtgtaggcagagcattagcatctgtgtacgtaatagatttgttagcatgcatttggggtggaggtatatgagcgatgttgggtattttttatgatgatgacgaaaagaaaaatgttacgacatatgaaggaatgattactatattcttttcc

SEQ ID NO: 15920 - protein, 336 aa, Zea mays subsp. mays
  misc_feature (1)..(336): Ceres Seq. ID no. 12349592
MAGDVATSPAPAPLSVSSSSQNHHHHGPTTARGLLCHAGAGASAGVVAATFVCPLDVIKTRFQVHGWPKLATGSVIIGSLQQIAQQEGFRGMYRGLSPTILALLPNWAVYFTVYEQLKSFLSSNDGSHQLSLGANVVAASCAGAATTIVTNPLWVVKTRFQTQGIRAGPIPYKGTLAALRRIAHEEGIRGLYSGLVPALAGISHVAIQFPVYEKIKAYLAERDNTTVEALSFGDVAVASSLAKVAASTLTYPHEVVRSRLQDQRANSDARYKGVIDCVRKVYHKEGVAGFYRGCATNLLRTTPAAVITFTSFEMIHRSLLDLFPAEPEPHIQPLKH

SEQ ID NO: 15921 - protein, 245 aa, Zea mays subsp. mays
  misc_feature (1)..(245): Ceres Seq. ID no. 12349593
MYRGLSPTILALLPNWAVYFTVYEQLKSFLSSNDGSHQLSLGANVVAASCAGAATTIVTNPLWVVKTRFQTQGIRAGPIPYKGTLAALRRIAHEEGIRGLYSGLVPALAGISHVAIQFPVYEKIKAYLAERDNTTVEALSFGDVAVASSLAKVAASTLTYPHEVVRSRLQDQRANSDARYKGVIDCVRKVYHKEGVAGFYRGCATNLLRTTPAAVITFTSFEMIHRSLLDLFPAEPEPHIQPLKH

SEQ ID NO: 15922 - DNA, 1381 bp, Zea mays subsp. mays
  misc_feature (1)..(1381): Ceres Seq. ID no. 12349594
gacctgtcgtcttcgtctccggcagagcaaagcggcggcgaggcgggagatatagaggagagacgagagcgggatggggtacctgtggagggtgcggctgtcttcatttgctgccggcgcggcgacggcttcggcggcggggttcttcctcctctacaaggaccacctgctcgcccgcgctgccgacgccgagtccaactccgcctcctactccccgccgctcgccacagccgacaccgctttctccgcgccgccgcgcgccgtggcgcccgccgacctccagctctccgggtcctacgcctccgacatctacacctacctccgctccctggaggtggatccgcagcggcggtccagatccgattacatcgaggcggtgcaggcggacgtcacggcccacatgcggagcatcctcgtcgactggctcgtcgaggtcgccgaggagtacaagctcgtcgcggacacgctctacctcaccatctcttatgtcgaccgcttcctctccgtcaacgcgctcggccgtgacaagctgcagctccttggcgttgcctccatgctcattgccgcgaagttcgaggagatcagcccgccgcacccggaggacttctgctacatcacagacaacacctacaccaaagaggagctcctcaagatggagagcgacatactcaagcttctcaagttcgagttgggcaatcctacaatcaagaccttcctgagacgtttcataagatctgcccatgaagacaagaagggctccatcttgttaatggaattcttggggagctacctcgctgagctgagtctactagattatggctgcctccggttcttgccatcagtagttgctgcttcagtcatgtttgttgctaggctgaccattgatccaaataccaatccgtggaacacaaagctgcagaagatgactggctacaaagtttctgaactcaaggattgcatcgtagccatacatgacttgcagctcaacaggaaatgtccatcattaacggcaattcgagacaagtacaagcagcacaagttcaaatgcgtgtcattgatcctcgtgcctgtcgtgatccctacttcatactttgaagacttagctgagtagctgctctcggactgtaccgctgtaaggctaacaatctgagctctccttgagctcttagggacaagcagaaaataaccgtttgatgagctttcctctcatttaagtagcgtggtgaaagctatttgtttgaggttctttaggattcgcgccgctgtgtcactcttagtgagaccaggcattctcttgctgtgaatcttgtatcatatcttagtcacaccttgccttggtccgttggcaacgaatgtaatgtttgatacgttagacccttcg

SEQ ID NO: 15923 - protein, 345 aa, Zea mays subsp. mays
  misc_feature (1)..(345): Ceres Seq. ID no. 12349595
MGYLWRVRLSSFAAGAATASAAGFFLLYKDHLLARAADAESNSASYSPPLATADTAFSAPPRAVAPADLQLSGSYASDIYTYLRSLEVDPQRRSRSDYIEAVQADVTAHMRSILVDWLVEVAEEYKLVADTLYLTISYVDRFLSVNALGRDKLQLLGVASMLIAAKFEEISPPHPEDFCYITDNTYTKEELLKMESDILKLLKFELGNPTIKTFLRRFIRSAHEDKKGSILLMEFLGSYLAELSLLDYGCLRFLPSVVAASVMFVARLTIDPNTNPWNTKLQKMTGYKVSELKDCIVAIHDLQLNRKCPSLTAIRDKYKQHKFKCVSLILVPVVIPTSYFEDLAE

SEQ ID NO: 15924 - protein, 238 aa, Zea mays subsp. mays
  misc_feature (1)..(238): Ceres Seq. ID no. 12349596
PVVFVSGRAKRRRGGRYRGETRAGWGTCGGCGCLHLLPARRRLRRRGSSSSTRTTCSPALPTPSPTPPPTPRRSPQPTPLSPRRRAPWRPPTSSSPGPTPPTSTPTSAPWRWIRSGGPDPITSRRCRRTSRPTCGASSSTGSSRSPRSTSSSRTRSTSPSLMSTASSPSTRSAVTSCSSLALPPCSLPRSSRRSARRTRRTSATSQTTPTPKRSSSRWRATYSSFSSSSWAILQSRPS

SEQ ID NO: 15925 - protein, 236 aa, Zea mays subsp. mays
  misc_feature (1)..(236): Ceres Seq. ID no. 12349597
MRSILVDWLVEVAEEYKLVADTLYLTISYVDRFLSVNALGRDKLQLLGVASMLIAAKFEEISPPHPEDFCYITDNTYTKEELLKMESDILKLLKFELGNPTIKTFLRRFIRSAHEDKKGSILLMEFLGSYLAELSLLDYGCLRFLPSVVAASVMFVARLTIDPNTNPWNTKLQKMTGYKVSELKDCIVAIHDLQLNRKCPSLTAIRDKYKQHKFKCVSLILVPVVIPTSYFEDLAE

SEQ ID NO: 15926 - DNA, 1046 bp, Zea mays subsp. mays
  misc_feature (1)..(1046): Ceres Seq. ID no. 12349639
cattcaccgcaacaacacacaacggcagagaccaagaagccgtgaccgtgggagagctccgagcgccagccgcgtgcggcgtgtccatactccatacacggaggaagaggaacagaggaagagcaggaggagatgtacttccgtccgccgcccaagggcccggagtggtacgccagcgatgcggagacggggcaggcggcgcggccgctgtacccaatgatgctggaggacccgcgtctgcggtgggcctttatccggaaggtctacagcatcctctccatccagatgctgctcaccgtcgccgtagctgccgtcgtcgtgttcgttcgccccgtcgctctcttcttcgtctccacgcccggcggcttcgggctctacatcttcctcctcatcctcccgttcatagtgctttgccctctgtactactactaccagcaccacccggtgaacctgctgctgctcggcctcttcaccgtggccatcagcttcgccgtcggcctcacctgcgccttcaccaaaggggaggtgatcctcgagtcggcggtcctcacggcggcggtggtgctgagcctcacggcgtacacgttctgggcggcgaagcgcggccacgacttcagcttcctgggcccgttcctgttcgccgccgtcatgatcctcatgctgttcgcgctcatccagctcttcttcccgctcggccgcatctcgctcatgatatacgggggactggcggcgctcgtcttctgcggctacatcatctacgacaccgacaacctcatcaagcgctactcctacgacgagtacgtctgggccgccgtcgcgctctacctcgacgtcatcaacctcttcctctccctcctcacgctcttccgggcggcggattcgtgagcacggctacctgccagctcgcgtaggcgcggcgacaggatcttggaatgtgccttgccttgccccgcctccggtgctgtctgccgaaattcctctgtaaaaagactaaagagaaataattgttttggttttgtgctttgcttcgcttgcgaagattgttc

SEQ ID NO: 15927 - protein, 302 aa, Zea mays subsp. mays
  misc_feature (1)..(302): Ceres Seq. ID no. 12349640
FTATTHNGRDQEAVTVGELRAPAACGVSILHTRRKRNRGRAGGDVLPSAAQGPGVVRQRCGDGAGGAAAVPNDAGGPASAVGLYPEGLQHPLHPDAAHRRRSCRRRVRSPRRSLLRLHARRLRALHLPPHPPVHSALPSVLLLPAPPGEPAAARPLHRGHQLRRRPHLRLHQRGGDPRVGGPHGGGGAEPHGVHVLGGEARPRLQLPGPVPVRRRHDPHAVRAHPALLPARPHLAHDIRGTGGARLLRLHHLRHRQPHQALLLRRVRLGRRRALPRRHQPLPLPPHALPGGGFVSTATCQLA

SEQ ID NO: 15928 - protein, 250 aa, Zea mays subsp. mays
  misc_feature (1)..(250): Ceres Seq. ID no. 12349641
MYFRPPPKGPEWYASDAETGQAARPLYPMMLEDPRLRWAFIRKVYSILSIQMLLTVAVAAVVVFVRPVALFFVSTPGGFGLYIFLLILPFIVLCPLYYYYQHHPVNLLLLGLFTVAISFAVGLTCAFTKGEVILESAVLTAAVVLSLTAYTFWAAKRGHDFSFLGPFLFAAVMILMLFALIQLFFPLGRISLMIYGGLAALVFCGYIIYDTDNLIKRYSYDEYVWAAVALYLDVINLFLSLLTLFRAADS

SEQ ID NO: 15929 - protein, 222 aa, Zea mays subsp. mays
  misc_feature (1)..(222): Ceres Seq. ID no. 12349642
MMLEDPRLRWAFIRKVYSILSIQMLLTVAVAAVVVFVRPVALFFVSTPGGFGLYIFLLILPFIVLCPLYYYYQHHPVNLLLLGLFTVAISFAVGLTCAFTKGEVILESAVLTAAVVLSLTAYTFWAAKRGHDFSFLGPFLFAAVMILMLFALIQLFFPLGRISLMIYGGLAALVFCGYIIYDTDNLIKRYSYDEYVWAAVALYLDVINLFLSLLTLFRAADS

SEQ ID NO: 15930 - DNA, 793 bp, Zea mays subsp. mays
  misc_feature (1)..(793): Ceres Seq. ID no. 12349701
aagatttgccttggcttgccgtgccctgcgggagccaagccaaggacggctagcgctcgccacgcgcgatgtccgggcttcctccggccgcgcgaccgctgctaccgtctccctgcgcctcttcctccgttgttcgggcgaaggcagcgtcggcatgctgctccagcctaaagcagtcgcgcccaggccgaagtgctgccgccccttccaccgtcgccgcgcgtcaggccgcgccgctcttggctgcggcgctcgtccttgtagcggcaccccctggcctgcctgctgctatctcaccagcatttgcacagcccagtttcagaaggcgcagcgctgttccggaaggcttgtattggttgccatgacatgggaggaaacattctacagccaggagccactcttttcctgaaggacctcgagagaaacggagttgccacggaggaggaactgtataacatcacatactatgggaaaggaagaatgcccggttttggagagaaatgcaccccaagaggacagtgcaccttcggcccccggctatcggaagacgacatcaagatcctagctttgtttgtcaagtcgcaagcccagaacgggtggccgaagattgagggggatggagattgatcaaactgaaaaaacgatgagaagacggtgcttgttagtcagatgaaaatggtgacgggaagatagtgtttgtatagtttaggaatctggtctttctgaacttgtaaccttttagtctctgtttctgaactgaacttgtaaccttctggtccgtgtttcagttttc

SEQ ID NO: 15931 - protein, 135 aa, Zea mays subsp. mays
  misc_feature (1)..(135): Ceres Seq. ID no. 12349702
RFALACRALREPSQGRLALATRDVRASSGRATAATVSLRLFLRCSGEGSVGMLLQPKAVAPRPKCCRPFHRRRASGRAALGCGARPCSGTPWPACCYLTSICTAQFQKAQRCSGRLVLVAMTWEETFYSQEPLFS

SEQ ID NO: 15932 - protein, 98 aa, Zea mays subsp. mays
  misc_feature (1)..(98): Ceres Seq. ID no. 12349703
MSGLPPAARPLLPSPCASSSVVRAKAASACCSSLKQSRPGRSAAAPSTVAARQAAPLLAAALVLVAAPPGLPAAISPAFAQPSFRRRSAVPEGLYWLP

SEQ ID NO: 15933 - protein, 86 aa, Zea mays subsp. mays
  misc_feature (1)..(86): Ceres Seq. ID no. 12349704
MGGNILQPGATLFLKDLERNGVATEEELYNITYYGKGRMPGFGEKCTPRGQCTFGPRLSEDDIKILALFVKSQAQNGWPKIEGDGD

SEQ ID NO: 15934 - protein, 84 aa, Zea mays subsp. mays
  misc_feature (1)..(84): Ceres Seq. ID no. 12349705
MLLQPKAVAPRPKCCRPFHRRRASGRAALGCGARPCSGTPWPACCYLTSICTAQFQKAQRCSGRLVLVAMTWEETFYSQEPLFS

SEQ ID NO: 15935 - DNA, 1600 bp, Zea mays subsp. mays
  misc_feature (1)..(1600): Ceres Seq. ID no. 12349840
aacacatcactcccagactgctccctcatacgtccattatttccgcaaagtgcaaccgagaatgacatgcagtcgtagtatcgtagataaccaccttatgtcgtacttcaccatcctactgctttcttcttttgctgcaacggtagcatatcctgctcgcagtgaattactgccttaccagatgaaaaaccaccattctgtatcgtcacacaacccacaaccgaaggatttcccaactgagcaactctaccgcgcctaccttgtaatccagcgcttcaagagcaccgtcaccagcgaccccaagaacgtcaccgccacctggattggtcatgatctctgcggagaaacgacctacgtggggttctactgcggatcgccggcaggaggagataagttgacagtcataggggtcattttgaatggctatagactacatgcaccaacgttggaaggtttcgttaatcagctccctgatctatctcttttccatgctgcttccaacaattttggtggcgatataccccaattaaccggcctagggtacatgtaccagctcagtgtcgccgataaagatctgcaattacaggctcaacaaaaaagggatgtccctaatgattctatagtggggggcggcggcaacattcacgcgactggtggtggctgtctatttgcagattttaacttctcgtttaatgttggaattaataagggtcacaaatttcctggttttacgcaatccaaagctctccttctcaaccacaacaatttgtccggtccacttccgtcaaacctcggtttctcaaagctgagctaccttgccctcgccaacaacaaactcaccgggccaatcccgccgtcaatcagtaacctggaagactctctcttcgaggtactccttctcaacaaccagctctccggctgcctcccccacgagctcggcatgctcaccaaggcggccgtgattgacgccggcatgaaccagctcaccggcccaatcccgtcatctttctcctgcctaagcagcgtcgagcagctcaacctggccggaaaccgcctctacggccaggtacccgacgcgctctgcaagcttgctgggcccgctggccgcctcgccaacctcacgctgtccggcaactacttcacatccgccgggccggcatgcgcggcgctgatcaaagacggagtgctggacgtgaagaacaactgcatcccggggctcaccaaccagaggcgccccgcggagtgcgcagcgttccagagccaaccaaagacatgcccggcagcgagcactcaggtgacatgccccgccgccgcagcttccaggaacgcggcggcgccaggggagaggaaggtcaaggattactccagctacgtgacgtacgctactctgcatgactgagccacactggcatgcagtaagagacagagtgccttgctggctatgtgtctcttgtattcagcatgagtgtaccctagcgtgtgttggtgtgattgtgattgctgtctatttgcattattgtacgtttgttgctgtcacatctagatcatcccattatttgtacgtccaaatccattttatggaaagtactgttggtgtttc

SEQ ID NO: 15936 - protein, 465 aa, Zea mays subsp. mays
  misc_feature (1)..(465): Ceres Seq. ID no. 12349841
THHSQTAPSYVHYFRKVQPRMTCSRSIVDNHLMSYFTILLLSSFAATVAYPARSELLPYQMKNHHSVSSHNPQPKDFPTEQLYRAYLVIQRFKSTVTSDPKNVTATWIGHDLCGETTYVGFYCGSPAGGDKLTVIGVILNGYRLHAPTLEGFVNQLPDLSLFHAASNNFGGDIPQLTGLGYMYQLSVADKDLQLQAQQKRDVPNDSIVGGGGNIHATGGGCLFADFNFSFNVGINKGHKFPGFTQSKALLLNHNNLSGPLPSNLGFSKLSYLALANNKLTGPIPPSISNLEDSLFEVLLLNNQLSGCLPHELGMLTKAAVIDAGMNQLTGPIPSSFSCLSSVEQLNLAGNRLYGQVPDALCKLAGPAGRLANLTLSGNYFTSAGPACAALIKDGVLDVKNNCIPGLTNQRRPAECAAFQSQPKTCPAASTQVTCPAAAASRNAAAPGERKVKDYSSYVTYATLHD

SEQ ID NO: 15937 - protein, 445 aa, Zea mays subsp. mays
  misc_feature (1)..(445): Ceres Seq. ID no. 12349842
MTCSRSIVDNHLMSYFTILLLSSFAATVAYPARSELLPYQMKNHHSVSSHNPQPKDFPTEQLYRAYLVIQRFKSTVTSDPKNVTATWIGHDLCGETTYVGFYCGSPAGGDKLTVIGVILNGYRLHAPTLEGFVNQLPDLSLFHAASNNFGGDIPQLTGLGYMYQLSVADKDLQLQAQQKRDVPNDSIVGGGGNIHATGGGCLFADFNFSFNVGINKGHKFPGFTQSKALLLNHNNLSGPLPSNLGFSKLSYLALANNKLTGPIPPSISNLEDSLFEVLLLNNQLSGCLPHELGMLTKAAVIDAGMNQLTGPIPSSFSCLSSVEQLNLAGNRLYGQVPDALCKLAGPAGRLANLTLSGNYFTSAGPACAALIKDGVLDVKNNCIPGLTNQRRPAECAAFQSQPKTCPAASTQVTCPAAAASRNAAAPGERKVKDYSSYVTYATLHD

SEQ ID NO: 15938 - protein, 433 aa, Zea mays subsp. mays
  misc_feature (1)..(433): Ceres Seq. ID no. 12349843
MSYFTILLLSSFAATVAYPARSELLPYQMKNHHSVSSHNPQPKDFPTEQLYRAYLVIQRFKSTVTSDPKNVTATWIGHDLCGETTYVGFYCGSPAGGDKLTVIGVILNGYRLHAPTLEGFVNQLPDLSLFHAASNNFGGDIPQLTGLGYMYQLSVADKDLQLQAQQKRDVPNDSIVGGGGNIHATGGGCLFADFNFSFNVGINKGHKFPGFTQSKALLLNHNNLSGPLPSNLGFSKLSYLALANNKLTGPIPPSISNLEDSLFEVLLLNNQLSGCLPHELGMLTKAAVIDAGMNQLTGPIPSSFSCLSSVEQLNLAGNRLYGQVPDALCKLAGPAGRLANLTLSGNYFTSAGPACAALIKDGVLDVKNNCIPGLTNQRRPAECAAFQSQPKTCPAASTQVTCPAAAASRNAAAPGERKVKDYSSYVTYATLHD

SEQ ID NO: 15939 - DNA, 1054 bp, Zea mays subsp. mays
  misc_feature (1)..(1054): Ceres Seq. ID no. 12349863
agttcagattccgcaaaacaggcagtcaggctcaggcaccaacaccaaccatggcctccgctgcgacacctgcgcctttgctccccgtgaccagcacggctgccggcggcggctccgcgccgtcctccgccacgggcctctccgacgcggcgctcgccacgccggccttccgcctcttcgtgagccggctggccgagacggcgcggcgctcgctcgcggaccggcgcccatggacggagctgctggaccgatcggctttctcccgccccgactccctctccgaggccacctcgcgcctgcgccgcaacctcggctacttccgcgtcaactacgccgccgtcgtcgccttctccctcgcggcctcgctcctggcgcaccctttctccctcctcgtcctcctcagcatcctcggcgcctggtgcttcctctacgtcttccgcgcccccgaccagctcgtcgtgctcttcggccgcaccttcaccgaccgcgagacgctgcttggccttaccgtcgcttctgtgctcgccttcttcctcacctccgtggcttcgctcatcatctccgggctgcttgtcgggggcgccattgtcgcagcgcacggcgcctgccgcattccagaggacctcttccttgatgatccgagcgctgcgtccagtggaaacaccaccagcaggctgatctccttccttgcgtcgcccggatctggggtttgatgcatcaaggaccggtaggaaattcttgtgctcggcgaattcagttgaagtcaaatagagatctgatccagaagctgtataaaccagctccttgctcatgtggtacctcacctgcgagtagcattgtataagtggatccgatttttctgttctactttgtgtggaattacgcaaggatctgcaattgctgtacttctcttgcacttcaccagatctggtgacaatgaccattaagcattgtcaaatgccaacatgtatcggtgtgatctttacattcatcattcatgtgtacaactctacatcatgacaaatttttatggatctctggttatttttgcctc

SEQ ID NO: 15940 - protein, 236 aa, Zea mays subsp. mays
  misc_feature (1)..(236): Ceres Seq. ID no. 12349864
FRFRKTGSQAQAPTPTMASAATPAPLLPVTSTAAGGGSAPSSATGLSDAALATPAFRLFVSRLAETARRSLADRRPWTELLDRSAFSRPDSLSEATSRLRRNLGYFRVNYAAVVAFSLAASLLAHPFSLLVLLSILGAWCFLYVFRAPDQLVVLFGRTFTDRETLLGLTVASVLAFFLTSVASLIISGLLVGGAIVAAHGACRIPEDLFLDDPSAASSGNTTSRLISFLASPGSGV

SEQ ID NO: 15941 - protein, 220 aa, Zea mays subsp. mays
  misc_feature (1)..(220): Ceres Seq. ID no. 12349865
MASAATPAPLLPVTSTAAGGGSAPSSATGLSDAALATPAFRLFVSRLAETARRSLADRRPWTELLDRSAFSRPDSLSEATSRLRRNLGYFRVNYAAVVAFSLAASLLAHPFSLLVLLSILGAWCFLYVFRAPDQLVVLFGRTFTDRETLLGLTVASVLAFFLTSVASLIISGLLVGGAIVAAHGACRIPEDLFLDDPSAASSGNTTSRLISFLASPGSGV

SEQ ID NO: 15942 - protein, 210 aa, Zea mays subsp. mays
  misc_feature (1)..(210): Ceres Seq. ID no. 12349866
VQIPQNRQSGSGTNTNHGLRCDTCAFAPRDQHGCRRRLRAVLRHGPLRRGARHAGLPPLREPAGRDGAALARGPAPMDGAAGPIGFLPPRLPLRGHLAPAPQPRLLPRQLRRRRRLLPRGLAPGAPFLPPRPPQHPRRLVLPLRLPRPRPARRALRPHLHRPRDAAWPYRRFCARLLPHLRGFAHHLRAACRGRHCRSARRLPHSRGPLP

SEQ ID NO: 15943 - DNA, 1452 bp, Zea mays subsp. mays
  misc_feature (1)..(1452): Ceres Seq. ID no. 12349889
atgagtggagactggagaaagagccctactaccctagctaagcgcgcacagcggcggccggcgagacacgtgcgagcggcggcgtgaggaaaggcgggcggggtgagagatacctaaccactaagaggctgcggcagcgccgcagcataaccggcaccaggtcaaaaacgacgactgggcaggcaccgtatgcatatcctgaatttcagcaccgcatacactttctacagggcccttgccacaccagacaagcacagacaaacacgcaagcggcaggccatgtcatcaccggcagcaaggagcatcacctgctactccaaaattccagagttcttgttgggcactaatgggcagccaatgcccgcagtggggctcggcacagcatcacacccatttgtggcggaggatgtcaggacatccgtgctcactgcgctggagcttggctaccgccacatcgacactgcgggactctacgcctctgagtgggttgtcggcgaggccatggctgaggcagtgtcgcgtggccttgtggcgtccagggacgagctgtttgtgacatccaaggtgtggtgcacacaatgtcatcctgagcttgtgcttccgtccctcaaggagagcttgaagaaccttcaaatggaatatgttgatttgtacctgattcattggcccatggctgtaaagcctagcaagcctcacttcccaatgaaaagggaggacattgtgccgatggaccttagtggtgtatggcaggcaatggaggaatgccatcgacttggccttgctaaaatgattggtgttagcaatttcacaacaaagaaattgcaggagctgcttgccattgcaaaaattcccccagttgtaaatcaggttgaattgaatcccacttggcagcagaaaaaactaattgagttctgcaatgacaagggtattcatgtgacggcttattctcccctaggaggccaaagaatctctaaactgaatccagtacgacaatctgatatattggaagagattggaaaggctagagggaagtcagtggcccagatttcactgaggtggatatacgagcaaggagcaagcatggtggcaaagagcttgaaaagggagaggcttaaggagaacattgaaatcttcgattgggaattgagtgacgaagatcggtttaagattgatcatatagcacagcgcaagttggtcacagtacagaatctcctgtgtcctgaaggtatctccagtgtggatatcttggatgttgatgttattgaaatatagctgtggtctccatctatttgcaatgggcaaaagaattggtgtacaacatgttggatacatcagaagcagtctttcgcgtttctatgtaatgttcatcttgctaaattcacatgtgcacctttctattgtcaccaatacttttgtaccatttttctggattaatctactattaaaaatgct

SEQ ID NO: 15944 - protein, 360 aa, Zea mays subsp. mays
  misc_feature (1)..(360): Ceres Seq. ID no. 12349890
MHILNFSTAYTFYRALATPDKHRQTRKRQAMSSPAARSITCYSKIPEFLLGTNGQPMPAVGLGTASHPFVAEDVRTSVLTALELGYRHIDTAGLYASEWVVGEAMAEAVSRGLVASRDELFVTSKVWCTQCHPELVLPSLKESLKNLQMEYVDLYLIHWPMAVKPSKPHFPMKREDIVPMDLSGVWQAMEECHRLGLAKMIGVSNFTTKKLQELLAIAKIPPVVNQVELNPTWQQKKLIEFCNDKGIHVTAYSPLGGQRISKLNPVRQSDILEEIGKARGKSVAQISLRWIYEQGASMVAKSLKRERLKENIEIFDWELSDEDRFKIDHIAQRKLVTVQNLLCPEGISSVDILDVDVIEI

SEQ ID NO: 15945 - protein, 330 aa, Zea mays subsp. mays
  misc_feature (1)..(330): Ceres Seq. ID no. 12349891
MSSPAARSITCYSKIPEFLLGTNGQPMPAVGLGTASHPFVAEDVRTSVLTALELGYRHIDTAGLYASEWVVGEAMAEAVSRGLVASRDELFVTSKVWCTQCHPELVLPSLKESLKNLQMEYVDLYLIHWPMAVKPSKPHFPMKREDIVPMDLSGVWQAMEECHRLGLAKMIGVSNFTTKKLQELLAIAKIPPVVNQVELNPTWQQKKLIEFCNDKGIHVTAYSPLGGQRISKLNPVRQSDILEEIGKARGKSVAQISLRWIYEQGASMVAKSLKRERLKENIEIFDWELSDEDRFKIDHIAQRKLVTVQNLLCPEGISSVDILDVDVIEI

SEQ ID NO: 15946 - protein, 304 aa, Zea mays subsp. mays
  misc_feature (1)..(304): Ceres Seq. ID no. 12349892
MPAVGLGTASHPFVAEDVRTSVLTALELGYRHIDTAGLYASEWVVGEAMAEAVSRGLVASRDELFVTSKVWCTQCHPELVLPSLKESLKNLQMEYVDLYLIHWPMAVKPSKPHFPMKREDIVPMDLSGVWQAMEECHRLGLAKMIGVSNFTTKKLQELLAIAKIPPVVNQVELNPTWQQKKLIEFCNDKGIHVTAYSPLGGQRISKLNPVRQSDILEEIGKARGKSVAQISLRWIYEQGASMVAKSLKRERLKENIEIFDWELSDEDRFKIDHIAQRKLVTVQNLLCPEGISSVDILDVDVIEI

SEQ ID NO: 15947 - DNA, 1141 bp, Zea mays subsp. mays
  misc_feature (1)..(1141): Ceres Seq. ID no. 12349900
ctgatcctctccgccatttctgtgcgcatctggagctgttgttctaaacccccaaaccctccgtcctaacctctgcgccaccggcgtcaccaccgccggagccgcagccatgaacgccttcaggttcctcggggacatgacccacctcttctcggtcctcgtcctcctcctcaagatctacgccaccaagtcctgctcaggggtgtcgaggaagacgcaggagctgtacatgttggtgttcgtggcgaggtacctggacctcttcacggattatgtctcgctctacaactcggtgatgaaggtggtgttcatcaccagctcggcggccatcgtgtggtgcatgcgccgccacccgcaggtacgaaggacgtacgacaaggagcaggacaccttccgccacacggtgctcgtcgccgccgcattcctgctcgcgctgatattccacgagcggttcaccttccgtgagatatgctgggcattttcaatctatttggaggcagtggctattctcccacaattagtgttgctccagagaagcagaaatgtggataacttaactggacaatatgttttcttccttggggcctaccgtgcgttttacattctaaactggatttatcgttatttcacggagggtcatcgcagcagatggatcccttggcttgctggtttggtgcaaacagctctgtatgcagatttcttttactattatttcttaagttggaagaacaatgtgaagctcgagttgcctgcttgagcatgcttcgttttgccagaaagcgtgcaagctacgtgactcaagttttatagaatttagttgattatatgggcatggagagacttggtaatgacgtgagcagttgcagttgatgccaaacccttgatcttgtctgcgaaaattggcatttgtgtttcccatggccaagacgatacgattccaaagctaacagatgctgctgcacagaagtaggctagttcctttttgtacctcaatacttttgatatggaaaatcatatacagttcagttggtctgtttaacattcgatttcacttgctccaaacgaaaaatgcgatccaatgttcgtgcgatttctgtgtaaaactgttacacttttgactgtcctcaacaatccatttttt

SEQ ID NO: 15948 - protein, 215 aa, Zea mays subsp. mays
  misc_feature (1)..(215): Ceres Seq. ID no. 12349901
MNAFRFLGDMTHLFSVLVLLLKIYATKSCSGVSRKTQELYMLVFVARYLDLFTDYVSLYNSVMKVVFITSSAAIVWCMRRHPQVRRTYDKEQDTFRHTVLVAAAFLLALIFHERFTFREICWAFSIYLEAVAILPQLVLLQRSRNVDNLTGQYVFFLGAYRAFYILNWIYRYFTEGHRSRWIPWLAGLVQTALYADFFYYYFLSWKNNVKLELPA

SEQ ID NO: 15949 - protein, 206 aa, Zea mays subsp. mays
  misc_feature (1)..(206): Ceres Seq. ID no. 12349902
MTHLFSVLVLLLKIYATKSCSGVSRKTQELYMLVFVARYLDLFTDYVSLYNSVMKVVFITSSAAIVWCMRRHPQVRRTYDKEQDTFRHTVLVAAAFLLALIFHERFTFREICWAFSIYLEAVAILPQLVLLQRSRNVDNLTGQYVFFLGAYRAFYILNWIYRYFTEGHRSRWIPWLAGLVQTALYADFFYYYFLSWKNNVKLELPA

SEQ ID NO: 15950 - protein, 175 aa, Zea mays subsp. mays
  misc_feature (1)..(175): Ceres Seq. ID no. 12349903
MLVFVARYLDLFTDYVSLYNSVMKVVFITSSAAIVWCMRRHPQVRRTYDKEQDTFRHTVLVAAAFLLALIFHERFTFREICWAFSIYLEAVAILPQLVLLQRSRNVDNLTGQYVFFLGAYRAFYILNWIYRYFTEGHRSRWIPWLAGLVQTALYADFFYYYFLSWKNNVKLELPA

SEQ ID NO: 15951 - DNA, 1312 bp, Zea mays subsp. mays
  misc_feature (1)..(1312): Ceres Seq. ID no. 12349927
agtcactaggctacgaaacagtgccgcggtgcgcgcacacacagccgccacagcccagacccctcgcctcggcctcttttaaatatcgcgcattccggcgccgcaaatggctcacgcggcgctgctccattgctcccagtcctccaggagcctcgcagcctgccgccgcggcagccactaccccgccccttcgcacgtcccgcgccactcccgccgtcgccgacgcgccgtcgtcagcctgcgtccgatggcctcgtcgacggctcaggcccccgcgacggcgccgccgggtctgaaggagggcatcgcggggctgtacgacgagtcgtcagggctgtgggagaacatctggggcgaccacatgcaccacggcttctacgactcgagcgaggccgcctccatggccgatcaccgccgcgcccagatccgcatgatcgaggaggcgctcgccttcgccggcgtcccagcctcagatgatccagagaatacaccaaaaacaatagtcgatgtcggatgtggcattggtggtagttcaaggtacttggcgaagaaatacggagcgcagtgcacggggatcacgttgagccctgttcaagccgagagaggaaatgctctcgctggagcgcaggggttgtcggatcaggttactctgcaagttgctgatgctctggagcaaccgtttcctgacgggcagttcgatctggtgtggtccatggagagtggcgagcacatgccggacaagagaaagtttgttagtgagctagcacgcgtggcggctcctggagggacaataatcatcgtgacatggtgccataggaacctggatccatccgaaacctcgctaaagcccgatgaactgagcctcctgaagagaatatgcgacgcgtactacctcccggactggtgctcaccttcagactatgtgaacattgccaagtcactgtctctcgaggatatcaagacagctgactggtcggagaacgtggccccgttttggcccgccgtgataaaatcagcgctaacatggaagggcttcacctctctgctgacgaccggatggaagacgatcagaggcgcgatggtgatgccgctaatgatccagggctacaagaagggcctcatcaaattcaccatcatcacctgtcgcaagcctggagccgcgtaggaggaggccaaggagcaggagttacaggcacaggcacaggagtgccaagtgcaataatgtagatccgtggccccatcgccgtctactcatctgtactgcaccaaaatcaacattctcctaggacatgttaaataattttctgccacc

SEQ ID NO: 15952 - protein, 352 aa, Zea mays subsp. mays
  misc_feature (1)..(352): Ceres Seq. ID no. 12349928
MAHAALLHCSQSSRSLAACRRGSHYPAPSHVPRHSRRRRRAVVSLRPMASSTAQAPATAPPGLKEGIAGLYDESSGLWENIWGDHMHHGFYDSSEAASMADHRRAQIRMIEEALAFAGVPASDDPENTPKTIVDVGCGIGGSSRYLAKKYGAQCTGITLSPVQAERGNALAGAQGLSDQVTLQVADALEQPFPDGQFDLVWSMESGEHMPDKRKFVSELARVAAPGGTIIIVTWCHRNLDPSETSLKPDELSLLKRICDAYYLPDWCSPSDYVNIAKSLSLEDIKTADWSENVAPFWPAVIKSALTWKGFTSLLTTGWKTIRGAMVMPLMIQGYKKGLIKFTIITCRKPGAA

SEQ ID NO: 15953 - protein, 305 aa, Zea mays subsp. mays
  misc_feature (1)..(305): Ceres Seq. ID no. 12349929
MASSTAQAPATAPPGLKEGIAGLYDESSGLWENIWGDHMHHGFYDSSEAASMADHRRAQIRMIEEALAFAGVPASDDPENTPKTIVDVGCGIGGSSRYLAKKYGAQCTGITLSPVQAERGNALAGAQGLSDQVTLQVADALEQPFPDGQFDLVWSMESGEHMPDKRKFVSELARVAAPGGTIIIVTWCHRNLDPSETSLKPDELSLLKRICDAYYLPDWCSPSDYVNIAKSLSLEDIKTADWSENVAPFWPAVIKSALTWKGFTSLLTTGWKTIRGAMVMPLMIQGYKKGLIKFTIITCRKPGAA

SEQ ID NO: 15954 - protein, 267 aa, Zea mays subsp. mays
  misc_feature (1)..(267): Ceres Seq. ID no. 12349930
MHHGFYDSSEAASMADHRRAQIRMIEEALAFAGVPASDDPENTPKTIVDVGCGIGGSSRYLAKKYGAQCTGITLSPVQAERGNALAGAQGLSDQVTLQVADALEQPFPDGQFDLVWSMESGEHMPDKRKFVSELARVAAPGGTIIIVTWCHRNLDPSETSLKPDELSLLKRICDAYYLPDWCSPSDYVNIAKSLSLEDIKTADWSENVAPFWPAVIKSALTWKGFTSLLTTGWKTIRGAMVMPLMIQGYKKGLIKFTIITCRKPGAA

SEQ ID NO: 15955 - DNA, 1103 bp, Zea mays subsp. mays
  misc_feature (1)..(1103): Ceres Seq. ID no. 12349943
aaagccctcctctcctctcccctctccctcgcggcctcgccttatccccttcgtcactcacctcgaccaccgccatggccatggccttggcctccgcgaccgccgccgcactcttccgctccgccctgtccgcgccacacggcgccggcgcgcgcgtccggccgcagcgccggcagccgttcttggctccgctccacgcggcgaagggccccggctcggcgccggtggtgctggagggcaaggccaagggaaagaagaagaaggggcccagctccgggaaccttcccgcagccctcgacgtcgagatcagggaggcgcaggagtacctcgacagcgaccagcaggaacctgttccagaaaactttccatttgaattaatcgacgaagagggtatgagcgtggttattttgagaagggactacaaggacgagaaggtcgaggttactgtcagcatgcctaatttagaaggaggccccgagtttggtgatgaggatggcgagggcgatggtgagagcgctgccaaggacgacggagaagcagaagaagatgacgagagtgccggggagagcagcatctctcttaaggtggtagtttccaaagactctggcccagagctcgagttcacatgcacagccttccgcgaggagatcaccatcgatgatatgctgatagtggagaaaacagacgacgacgacggagaagagaagttcccctacgagggccccgagttcaccgagctccctgtgaatgttcagaaaggcctgttcaagtacctggagcaaagaggggtaacgctgtcggctaccaactatatgcacgattacatggtgactaagcaggctcaggagtacatccggtggatgactaagctgaaggatttcgtggcgcagtgaggaacagcgtcgtgattcggcagcattgtttggttagcctagccttagcatgtgttacagccttacaggaacactacgactacaccgaattggccacactccccaaaaaacaaaaaagggggagcattgtatctgcttcaatgtatctgtatcagctggcaaaacagtagcaagtagatttccagtaatgtttagtggtgggcattaggt

SEQ ID NO: 15956 - protein, 296 aa, Zea mays subsp. mays
  misc_feature (1)..(296): Ceres Seq. ID no. 12349944
SPPLLSPLPRGLALSPSSLTSTTAMAMALASATAAALFRSALSAPHGAGARVRPQRRQPFLAPLHAAKGPGSAPVVLEGKAKGKKKKGPSSGNLPAALDVEIREAQEYLDSDQQEPVPENFPFELIDEEGMSVVILRRDYKDEKVEVTVSMPNLEGGPEFGDEDGEGDGESAAKDDGEAEEDDESAGESSISLKVVVSKDSGPELEFTCTAFREEITIDDMLIVEKTDDDDGEEKFPYEGPEFTELPVNVQKGLFKYLEQRGVTLSATNYMHDYMVTKQAQEYIRWMTKLKDFVAQ

SEQ ID NO: 15957 - protein, 272 aa, Zea mays subsp. mays
  misc_feature (1)..(272): Ceres Seq. ID no. 12349945
MAMALASATAAALFRSALSAPHGAGARVRPQRRQPFLAPLHAAKGPGSAPVVLEGKAKGKKKKGPSSGNLPAALDVEIREAQEYLDSDQQEPVPENFPFELIDEEGMSVVILRRDYKDEKVEVTVSMPNLEGGPEFGDEDGEGDGESAAKDDGEAEEDDESAGESSISLKVVVSKDSGPELEFTCTAFREEITIDDMLIVEKTDDDDGEEKFPYEGPEFTELPVNVQKGLFKYLEQRGVTLSATNYMHDYMVTKQAQEYIRWMTKLKDFVAQ

SEQ ID NO: 15958 - protein, 270 aa, Zea mays subsp. mays
  misc_feature (1)..(270): Ceres Seq. ID no. 12349946
MALASATAAALFRSALSAPHGAGARVRPQRRQPFLAPLHAAKGPGSAPVVLEGKAKGKKKKGPSSGNLPAALDVEIREAQEYLDSDQQEPVPENFPFELIDEEGMSVVILRRDYKDEKVEVTVSMPNLEGGPEFGDEDGEGDGESAAKDDGEAEEDDESAGESSISLKVVVSKDSGPELEFTCTAFREEITIDDMLIVEKTDDDDGEEKFPYEGPEFTELPVNVQKGLFKYLEQRGVTLSATNYMHDYMVTKQAQEYIRWMTKLKDFVAQ

SEQ ID NO: 15959 - DNA, 1385 bp, Zea mays subsp. mays
  misc_feature (1)..(1385): Ceres Seq. ID no. 12349947
attaaaaactcgggccagcaagaaagaaaaaaaaccacaacaagagagagagagagagagagagagagagacagagacagagagagactgccaacgaggcgaagcagccggccaatctagcatccgcgcgcggggtctgagagcagagcggcagggcgccatggcggcatcggtggcgctgagcagcgggcaccggatgccggcggtggggctgggcgtgtggcggatggagaaggcggacatccgcggcctcatccacacagcgctccgcgtcggctaccgccacctggactgcgccgctgactaccagaacgaagctgaagttggtgacgcgctcgcagaggcattccagaccggactcgtcaagcgggaggacctgttcatcacaaccaagctgtggaactcagaccatgggcatgtgcttgaagcctgcaaggacagcctgaagaagctgcagctagactatctcgacctctacctcatccatttcccagtagccactcggcacaccggagtcggcacgacttctagcgctctgggtgacgatggcgtgctggacatcgacaccactatctccctggaaacgacatggcacgcgatggaagagcttgtttccatggggctggtgcgcagcattggaatcagcaactacgacatcttcctcaccagagactgcctggcctacgccaagataaagccggcggtgaaccagatcgagacgcacccttacttccagcgcgactctcttgtcaagttctgccagaagcacgggatctgcgtgaccgcgcacaccccgctgggtggctccaccgccaacgccgagtggttcgggacggtgtcgtgcctggacgaccctgtcatcaagagcttggctgacaagtacggcaagacgccggcgcagctcgtcctccgctggggtctgcagcgggacacggtggtgatccccaagacctccaaggtggagaggctgcaggagaactttgacgtcttcggtttcgacatctccggcgaggacatggagaggatgaaggccgtggaccggaagtaccggactaaccagcctgccaagttctggggcatcgacctctatgcttagcttttagttcggttgcgttgcgtcgcccccccccccagacaagacagcatcaataatgaggattccctcagacggcatcagtcaaagtcacgaggatctcagacagcatcttccatcacatgtgacggtgtgaggctgatggtagggtttggtgtctccacgtgtccctctctctttcagctcagcttcatcaccatgtagactacgcagtgtttgcctccgattatttactgtttttcttccttacaaatccgtacatatctttactggtaggttgaacaatttgctg

SEQ ID NO: 15960 - protein, 364 aa, Zea mays subsp. mays
  misc_feature (1)..(364): Ceres Seq. ID no. 12349948
LKTRASKKEKKPQQERERERERETETERDCQRGEAAGQSSIRARGLRAERQGAMAASVALSSGHRMPAVGLGVWRMEKADIRGLIHTALRVGYRHLDCAADYQNEAEVGDALAEAFQTGLVKREDLFITTKLWNSDHGHVLEACKDSLKKLQLDYLDLYLIHFPVATRHTGVGTTSSALGDDGVLDIDTTISLETTWHAMEELVSMGLVRSIGISNYDIFLTRDCLAYAKIKPAVNQIETHPYFQRDSLVKFCQKHGICVTAHTPLGGSTANAEWFGTVSCLDDPVIKSLADKYGKTPAQLVLRWGLQRDTVVIPKTSKVERLQENFDVFGFDISGEDMERMKAVDRKYRTNQPAKFWGIDLYA

SEQ ID NO: 15961 - protein, 311 aa, Zea mays subsp. mays
  misc_feature (1)..(311): Ceres Seq. ID no. 12349949
MAASVALSSGHRMPAVGLGVWRMEKADIRGLIHTALRVGYRHLDCAADYQNEAEVGDALAEAFQTGLVKREDLFITTKLWNSDHGHVLEACKDSLKKLQLDYLDLYLIHFPVATRHTGVGTTSSALGDDGVLDIDTTISLETTWHAMEELVSMGLVRSIGISNYDIFLTRDCLAYAKIKPAVNQIETHPYFQRDSLVKFCQKHGICVTAHTPLGGSTANAEWFGTVSCLDDPVIKSLADKYGKTPAQLVLRWGLQRDTVVIPKTSKVERLQENFDVFGFDISGEDMERMKAVDRKYRTNQPAKFWGIDLYA

SEQ ID NO: 15962 - protein, 299 aa, Zea mays subsp. mays
  misc_feature (1)..(299): Ceres Seq. ID no. 12349950
MPAVGLGVWRMEKADIRGLIHTALRVGYRHLDCAADYQNEAEVGDALAEAFQTGLVKREDLFITTKLWNSDHGHVLEACKDSLKKLQLDYLDLYLIHFPVATRHTGVGTTSSALGDDGVLDIDTTISLETTWHAMEELVSMGLVRSIGISNYDIFLTRDCLAYAKIKPAVNQIETHPYFQRDSLVKFCQKHGICVTAHTPLGGSTANAEWFGTVSCLDDPVIKSLADKYGKTPAQLVLRWGLQRDTVVIPKTSKVERLQENFDVFGFDISGEDMERMKAVDRKYRTNQPAKFWGIDLYA

SEQ ID NO: 15963 - DNA, 1198 bp, Zea mays subsp. mays
  misc_feature (1)..(1198): Ceres Seq. ID no. 12349951
actctaggctaaacttcactgacgctacggaaggggtctcgaagagctgccaagacccacctgccacctccgatggacttcgccggccgggtatccttcctgctcttcttcctggtcgctggcactgtagcaaacgaccagatcttcaccacttcaggtttgccatttgggcgaagttcgcgtgagccaaggtaccgcgtcgagttccatcctgttgattcgccattccatccagataatggtcaggaatcggtaccaatggctagtcatgaggggaagcgttataagtgctttctaccagttgaagaaactaaaaccatgaagtcaatgctcccacaaaatgcgactaatattataatagaaagtgaaaggcgaattaagccaaaggagccggatgagttacttgaggttctcaaggatcagtgtttctacaggcacgaaggttggtggtcgtatgaattctgttattatgggaaaatcagacaggtccatgtagaggacagtaaggttatccaagaatttgttctaggcgaattcgatgatgacgcaactgctgcataccatgaaaatagcacctctgagttaactgacgatgaccatcacgtgaaagatatatctaagaggtatcatgttcacttgtatacaaatgggactgtatgtgatctcacagatattccccgggagacagaggttagatttgtctgctcggagcctactgtgctgattagttcagtcaaggagatctcttcctgcaaatatgttgtaacaattcaaagcccgatgctttgcaaaaacccgttgttccagcaagaaaaacgaacccttcccatccattgcaatgaattacctgctaaagcagaatccggtgctgaggatggtttgcttccaaaagaagcgcagatttccatcatccccgatcaggatgagctgcatggttttccagcttatgctacttgatataatgatatgccttcaatatttatttctggtgtagaaaaagcacagttttggaggcccagtggcaactgagcaacgcgatgtattactctctccgttcttttttatttgccgtggtttagtttaaaaattacgacaaatattggagaacggacccatagatcctacagcagcggctccttgtaaagcaggttgagacgatcattctgcagtgctaattatttaggaggattacgaaggt

SEQ ID NO: 15964 - protein, 294 aa, Zea mays subsp. mays
  misc_feature (1)..(294): Ceres Seq. ID no. 12349952
MDFAGRVSFLLFFLVAGTVANDQIFTTSGLPFGRSSREPRYRVEFHPVDSPFHPDNGQESVPMASHEGKRYKCFLPVEETKTMKSMLPQNATNIIIESERRIKPKEPDELLEVLKDQCFYRHEGWWSYEFCYYGKIRQVHVEDSKVIQEFVLGEFDDDATAAYHENSTSELTDDDHHVKDISKRYHVHLYTNGTVCDLTDIPRETEVRFVCSEPTVLISSVKEISSCKYVVTIQSPMLCKNPLFQQEKRTLPIHCNELPAKAESGAEDGLLPKEAQISIIPDQDELHGFPAYAT

SEQ ID NO: 15965 - protein, 232 aa, Zea mays subsp. mays
  misc_feature (1)..(232): Ceres Seq. ID no. 12349953
MASHEGKRYKCFLPVEETKTMKSMLPQNATNIIIESERRIKPKEPDELLEVLKDQCFYRHEGWWSYEFCYYGKIRQVHVEDSKVIQEFVLGEFDDDATAAYHENSTSELTDDDHHVKDISKRYHVHLYTNGTVCDLTDIPRETEVRFVCSEPTVLISSVKEISSCKYVVTIQSPMLCKNPLFQQEKRTLPIHCNELPAKAESGAEDGLLPKEAQISIIPDQDELHGFPAYAT

SEQ ID NO: 15966 - protein, 212 aa, Zea mays subsp. mays
  misc_feature (1)..(212): Ceres Seq. ID no. 12349954
MKSMLPQNATNIIIESERRIKPKEPDELLEVLKDQCFYRHEGWWSYEFCYYGKIRQVHVEDSKVIQEFVLGEFDDDATAAYHENSTSELTDDDHHVKDISKRYHVHLYTNGTVCDLTDIPRETEVRFVCSEPTVLISSVKEISSCKYVVTIQSPMLCKNPLFQQEKRTLPIHCNELPAKAESGAEDGLLPKEAQISIIPDQDELHGFPAYAT

SEQ ID NO: 15967 - DNA, 1764 bp, Zea mays subsp. mays
  misc_feature (1)..(1764): Ceres Seq. ID no. 12349967
accgcccagctgcaccctgcagcgctcactcgctcactgactcactcccctcccctggcctcctcctctctctctctctctccactctctcccacagccgaaccaacatgcaggggcgcagcagggacgccgccaccgtcgctgcagcggtggtgtgcgcagctgcgctgctcctcggcgacgcctggaccgtctcggcgcaggcggcggcggaggaggacaagataagcgccctgccggggcagccgccggtgggcttcgcacagtactccggttacatcccggtggacgccgcggggaagcgctccctcttctactacttcgccgaggcggaggcggatccggcggccaagccgctcgtgctctggctcaatggagggcctgggtgctcatccgtgggagtgggggcgttctcagagaatgggccgttcaggcctagcggcaatgcgctgacgaggaacgagtacagctggaacaaagaggccaatatgctgtatctggagagccctgcaggggttggcttttcatactccactgatcctgccttctacgagggtgttggtgacagcatgacagccagagacaacttgaagttcttgcaaggctggttcgccaggttccctcagtacaagggcagggacctgtatatcacaggagagagctacgctggccactacgttccacagttagcccagcgcatggttgagttcaacaagaaggagaagctattcaacctgaaaggcattgctcttggcaaccctgtgctggagttctcgaccgacttcaactcgcgggcggagttcttctggtcgcacggcctgatatcggactccacctacaacatcttcacgacggtgtgcaactactcgcggtacgtgagcgagtactaccgcggctccctgagcacggcctgcgacagggtgatgagccaggtggcgagggagacgagccggttcgtcgacaagtacgacgtcaccctggacgtctgcatctcgtcggtgctcatgcagtcccaggtcctcgtccctcagcaagggagcagggagctggacgtgtgcgtggaggacgagacgatgcggtacctgaaccggaaggacgtgcagcaggccatgcacgcgcgcctcgacggcgtgcagaggtggacggtctgcagcagcgttctggagtacaagcagctggacctccagatcccgaccgtgaacaccgtgggcgcgctcgtgaaggcgggcatccccgcgctggtgtacagcggcgaccaggactcggtgatcccgctgacgggcagcaggacgctggtggggcggctggcggccaggctccggctcaactccacggcgccgtaccgtgcctggttccaggggaagcaggtgggcgggtggacgcaggtgttcggcggcggcgcgctgtccttcgccacggtgcgcggcgcgtcccacgaggcgcccttctcgcagcccgagcgctcgctcggcctcttcagggcgttcctcgccggacagcagctgccggaatcgttccagtgacgacggaacgtgcctcttccacgtctagtgtatgttcattgtaagcgtatgtacgtgcagctgaccgtctgtcgtcatcatccggccgctcgacactggcaaaacaacccaaatgggttcttctccaagtgtaatcaggacgaaaataatatcattggaacttggaagggatgagactgtgtgtcgtcggctttccatgttgtaggcttgtagtacaagtgtaatatgcatatgctggttc

SEQ ID NO: 15968 - protein, 506 aa, Zea mays subsp. mays
  misc_feature (1)..(506): Ceres Seq. ID no. 12349968
RPAAPCSAHSLTDSLPSPGLLLSLSLSTLSHSRTNMQGRSRDAATVAAAVVCAAALLLGDAWTVSAQAAAEEDKISALPGQPPVGFAQYSGYIPVDAAGKRSLFYYFAEAEADPAAKPLVLWLNGGPGCSSVGVGAFSENGPFRPSGNALTRNEYSWNKEANMLYLESPAGVGFSYSTDPAFYEGVGDSMTARDNLKFLQGWFARFPQYKGRDLYITGESYAGHYVPQLAQRMVEFNKKEKLFNLKGIALGNPVLEFSTDFNSRAEFFWSHGLISDSTYNIFTTVCNYSRYVSEYYRGSLSTACDRVMSQVARETSRFVDKYDVTLDVCISSVLMQSQVLVPQQGSRELDVCVEDETMRYLNRKDVQQAMHARLDGVQRWTVCSSVLEYKQLDLQIPTVNTVGALVKAGIPALVYSGDQDSVIPLTGSRTLVGRLAARLRLNSTAPYRAWFQGKQVGGWTQVFGGGALSFATVRGASHEAPFSQPERSLGLFRAFLAGQQLPESFQ

SEQ ID NO: 15969 - protein, 471 aa, Zea mays subsp. mays
  misc_feature (1)..(471): Ceres Seq. ID no. 12349969
MQGRSRDAATVAAAVVCAAALLLGDAWTVSAQAAAEEDKISALPGQPPVGFAQYSGYIPVDAAGKRSLFYYFAEAEADPAAKPLVLWLNGGPGCSSVGVGAFSENGPFRPSGNALTRNEYSWNKEANMLYLESPAGVGFSYSTDPAFYEGVGDSMTARDNLKFLQGWFARFPQYKGRDLYITGESYAGHYVPQLAQRMVEFNKKEKLFNLKGIALGNPVLEFSTDFNSRAEFFWSHGLISDSTYNIFTTVCNYSRYVSEYYRGSLSTACDRVMSQVARETSRFVDKYDVTLDVCISSVLMQSQVLVPQQGSRELDVCVEDETMRYLNRKDVQQAMHARLDGVQRWTVCSSVLEYKQLDLQIPTVNTVGALVKAGIPALVYSGDQDSVIPLTGSRTLVGRLAARLRLNSTAPYRAWFQGKQVGGWTQVFGGGALSFATVRGASHEAPFSQPERSLGLFRAFLAGQQLPESFQ

SEQ ID NO: 15970 - protein, 344 aa, Zea mays subsp. mays
  misc_feature (1)..(344): Ceres Seq. ID no. 12349970
MLYLESPAGVGFSYSTDPAFYEGVGDSMTARDNLKFLQGWFARFPQYKGRDLYITGESYAGHYVPQLAQRMVEFNKKEKLFNLKGIALGNPVLEFSTDFNSRAEFFWSHGLISDSTYNIFTTVCNYSRYVSEYYRGSLSTACDRVMSQVARETSRFVDKYDVTLDVCISSVLMQSQVLVPQQGSRELDVCVEDETMRYLNRKDVQQAMHARLDGVQRWTVCSSVLEYKQLDLQIPTVNTVGALVKAGIPALVYSGDQDSVIPLTGSRTLVGRLAARLRLNSTAPYRAWFQGKQVGGWTQVFGGGALSFATVRGASHEAPFSQPERSLGLFRAFLAGQQLPESFQ

SEQ ID NO: 15971 - DNA, 1047 bp, Zea mays subsp. mays
  misc_feature (1)..(1047): Ceres Seq. ID no. 12349973
cacgccacgctctccaacgccacagcttgcgcccgcaatggcactcgtctccgcctcctcgtcctccaccaccgccgtcacggcgctccccaggaatgggcagcgggcgtcgtcctccttcctcggcggcaagacgctgctgagacaggccgaggcggcccggccgtcgttcgccgtgcgcgccgcggcggaccccaacaggccgatctggttccccggcagcacccctccgccgtggctcgacggcagccttcccggcgacttcggctttgatccctggggcctcggatctgacccggagagcctgcggtggaacgtgcaggcggagctggtgcactgccggtgggcgatgctcggcgcggcgggcatcttcatcccggagttcctgaccaagatcggcgtcctcaacacgcccttctggtacaccgccggcgagcagcagtacttcaccgacaccaccaccctcttcatcatcgagctcatcctcatcggctgggccgagggccgccgctgggctgacatcatcaagcccggaagcgtcaacaccgaccccatcttccccagcaacaagctcaccggcaccgacgtcgggtaccctggtggcctctggtttgacccgctcggctggggcagcggctcgccggagaagatcaaggagctgcgcaccaaggagatcaagaacggacgcctcgccatgctcgccgtcatgggcgcctggttccaggccgagtacaccggcaccggccccatcgacaacctcttcgcccacctcgccgaccctggccacgccaccatcttccaggccttcacccccaaatgaggagttgaacttattattagcattttgaggagtgctaccacacatgcatcgtcaggttgatggccgatatatatgaaacttcacattttttttggtggggaaggactgctgagtagactgtcaatgatggaatgctcgtggtgcgagtgcgatgcatggtgtacttgtactatgttgtaaccagtgtaaaaaggggatactcgttagatgttatgccatgttcactg

SEQ ID NO: 15972 - protein, 272 aa, Zea mays subsp. mays
  misc_feature (1)..(272): Ceres Seq. ID no. 12349974
TPRSPTPQLAPAMALVSASSSSTTAVTALPRNGQRASSSFLGGKTLLRQAEAARPSFAVRAAADPNRPIWFPGSTPPPWLDGSLPGDFGFDPWGLGSDPESLRWNVQAELVHCRWAMLGAAGIFIPEFLTKIGVLNTPFWYTAGEQQYFTDTTTLFIIELILIGWAEGRRWADIIKPGSVNTDPIFPSNKLTGTDVGYPGGLWFDPLGWGSGSPEKIKELRTKEIKNGRLAMLAVMGAWFQAEYTGTGPIDNLFAHLADPGHATIFQAFTPK

SEQ ID NO: 15973 - protein, 260 aa, Zea mays subsp. mays
  misc_feature (1)..(260): Ceres Seq. ID no. 12349975
MALVSASSSSTTAVTALPRNGQRASSSFLGGKTLLRQAEAARPSFAVRAAADPNRPIWFPGSTPPPWLDGSLPGDFGFDPWGLGSDPESLRWNVQAELVHCRWAMLGAAGIFIPEFLTKIGVLNTPFWYTAGEQQYFTDTTTLFIIELILIGWAEGRRWADIIKPGSVNTDPIFPSNKLTGTDVGYPGGLWFDPLGWGSGSPEKIKELRTKEIKNGRLAMLAVMGAWFQAEYTGTGPIDNLFAHLADPGHATIFQAFTPK

SEQ ID NO: 15974 - protein, 156 aa, Zea mays subsp. mays
  misc_feature (1)..(156): Ceres Seq. ID no. 12349976
MLGAAGIFIPEFLTKIGVLNTPFWYTAGEQQYFTDTTTLFIIELILIGWAEGRRWADIIKPGSVNTDPIFPSNKLTGTDVGYPGGLWFDPLGWGSGSPEKIKELRTKEIKNGRLAMLAVMGAWFQAEYTGTGPIDNLFAHLADPGHATIFQAFTPK

SEQ ID NO: 15975 - DNA, 1850 bp, Zea mays subsp. mays
  misc_feature (1)..(1850): Ceres Seq. ID no. 12349999
actttatttctcgcactgcacctgcacgcaacagagacgtactcattcaggcgatcgaatccatggagctcgtgctcactacacctgatctcccaaccccgctgctgctctccaccttaacgatagtgtccgtggtcgtatgctatgtcctcttctggaagcagcaggcggcggcgaggcgagcgccgctgccgcccgggccgaggggctggcccgtgctgggcaacctaccgcagctgggcgggaagactcaccagacgctgcacgagatgaccaaggtgtacggcccgctgctgcggctgcggttcggcagctccaccgtggtggtggccgggtcggcggccgtggcgcagcagttcctccgcgcccacgacgccaacttcagcagccgcccgcccaactccggcggcgagctcatggcgtacaactaccaggacgtggtgttcgcgccctacgggccccggtggcgcgcgatgcgcaaggtgtgcgccgtgaacctcttctccgcgcgcgcgctcgacgacgtccgcggcgtccgggagcgcgaggcggcgctcatggtgaggtcgctcgcggagcaggcccacggcggcctcgacgcgccgccggcggcggtgccggttggcaaggccatcaacgtgtgcacgacgaacgcgctctcgcgggcggccgttgggcggcgggtgttcgctgccgccggcggcgacgggggcgcgagggagttcaaggagatcgtgctcgaggtgatgcaggtgggcggggtgctcaacgtcggcgacttcgtgccggcgctccggtggctcgacccgcagggcgtggcggccaagatgaagaagctgcaccgccggttcgacgacatgatggacgagatcattgcaggttatagggaggccaggagggttgcggcagacggagaggagagcaaggatttgcttggcttgctgctgtcgatggttgacgagcggccgttcgacagcggggaagaagtcaggatcaccgaaaccgatgtcaaggcactcattttgaacctgttcgtggcagggaccgacacgacgtcgaccatagtggagtggtctctcgcagagctgatccgccacccggaaatcctgaggcaagcgcaggaggagatggacgcggtggccgggcgcgggaggctggtcacggagtcggacctccgaagcctcaccttcttcaacgcggtcatcaaggagacgttccgcctgcacccgtcgacgccgctctccctaccgcgcatggccgccgaggagtgcgaggtcgcgggctaccgcgtccccaggggctcggagctgctggtcaacgtgtggggcatcgcccgcgacccggcgctgtggcctgacccgctggagttccggccggccaggttcctgccgggcgggtcgcatgcggacgtggacgtcaaaggcgccgacttcgggctcatcccgttcggcgccggccggaggatctgcgccggcctcagctgggggctgcggatggtcacgctcaccagcgccaccctggtgcacgcgttcgactgggagttgccggcagggcagacgccggacaagctgaacatggaggaggccttcaccctcctgctgcagcgggctgttccgttagtggctcgtccagtacccaggctgctgccgtcggcgtatgagatcgcataggaaggctcgctcaagggcctcagcttggctgtatcaagcacgtacaatggcgtgaaagacgacgtgtgtatgtattgttgttcactttgttgacttttgtaaacactagtaaatgttcttgctatggctaatatctgtaacgaatttttatattttgacatgattacgcttctggcttgt

SEQ ID NO: 15976 - protein, 555 aa, Zea mays subsp. mays
  misc_feature (1)..(555): Ceres Seq. ID no. 12350000
FISRTAPARNRDVLIQAIESMELVLTTPDLPTPLLLSTLTIVSVVVCYVLFWKQQAAARRAPLPPGPRGWPVLGNLPQLGGKTHQTLHEMTKVYGPLLRLRFGSSTVVVAGSAAVAQQFLRAHDANFSSRPPNSGGELMAYNYQDVVFAPYGPRWRAMRKVCAVNLFSARALDDVRGVREREAALMVRSLAEQAHGGLDAPPAAVPVGKAINVCTTNALSRAAVGRRVFAAAGGDGGAREFKEIVLEVMQVGGVLNVGDFVPALRWLDPQGVAAKMKKLHRRFDDMMDEIIAGYREARRVAADGEESKDLLGLLLSMVDERPFDSGEEVRITETDVKALILNLFVAGTDTTSTIVEWSLAELIRHPEILRQAQEEMDAVAGRGRLVTESDLRSLTFFNAVIKETFRLHPSTPLSLPRMAAEECEVAGYRVPRGSELLVNVWGIARDPALWPDPLEFRPARFLPGGSHADVDVKGADFGLIPFGAGRRICAGLSWGLRMVTLTSATLVHAFDWELPAGQTPDKLNMEEAFTLLLQRAVPLVARPVPRLLPSAYEIA

SEQ ID NO: 15977 - protein, 535 aa, Zea mays subsp. mays
  misc_feature (1)..(535): Ceres Seq. ID no. 12350001
MELVLTTPDLPTPLLLSTLTIVSVVVCYVLFWKQQAAARRAPLPPGPRGWPVLGNLPQLGGKTHQTLHEMTKVYGPLLRLRFGSSTVVVAGSAAVAQQFLRAHDANFSSRPPNSGGELMAYNYQDVVFAPYGPRWRAMRKVCAVNLFSARALDDVRGVREREAALMVRSLAEQAHGGLDAPPAAVPVGKAINVCTTNALSRAAVGRRVFAAAGGDGGAREFKEIVLEVMQVGGVLNVGDFVPALRWLDPQGVAAKMKKLHRRFDDMMDEIIAGYREARRVAADGEESKDLLGLLLSMVDERPFDSGEEVRITETDVKALILNLFVAGTDTTSTIVEWSLAELIRHPEILRQAQEEMDAVAGRGRLVTESDLRSLTFFNAVIKETFRLHPSTPLSLPRMAAEECEVAGYRVPRGSELLVNVWGIARDPALWPDPLEFRPARFLPGGSHADVDVKGADFGLIPFGAGRRICAGLSWGLRMVTLTSATLVHAFDWELPAGQTPDKLNMEEAFTLLLQRAVPLVARPVPRLLPSAYEIA

SEQ ID NO: 15978 - protein, 466 aa, Zea mays subsp. mays
  misc_feature (1)..(466): Ceres Seq. ID no. 12350002
MTKVYGPLLRLRFGSSTVVVAGSAAVAQQFLRAHDANFSSRPPNSGGELMAYNYQDVVFAPYGPRWRAMRKVCAVNLFSARALDDVRGVREREAALMVRSLAEQAHGGLDAPPAAVPVGKAINVCTTNALSRAAVGRRVFAAAGGDGGAREFKEIVLEVMQVGGVLNVGDFVPALRWLDPQGVAAKMKKLHRRFDDMMDEIIAGYREARRVAADGEESKDLLGLLLSMVDERPFDSGEEVRITETDVKALILNLFVAGTDTTSTIVEWSLAELIRHPEILRQAQEEMDAVAGRGRLVTESDLRSLTFFNAVIKETFRLHPSTPLSLPRMAAEECEVAGYRVPRGSELLVNVWGIARDPALWPDPLEFRPARFLPGGSHADVDVKGADFGLIPFGAGRRICAGLSWGLRMVTLTSATLVHAFDWELPAGQTPDKLNMEEAFTLLLQRAVPLVARPVPRLLPSAYEIA

SEQ ID NO: 15979 - DNA, 1619 bp, Zea mays subsp. mays
  misc_feature (1)..(1619): Ceres Seq. ID no. 12350003
agggacaaagaaaggaaagggacgcccgtctcgtcacgtcctccacccccgccgccatggctgccctgggcctgctcctcctcgccgtcgtcggtgccaccaacgccgcggcgccgggcggtagaatgtccatcatctcctacaacgaggagcacgccgcgcgcgggctggagcggacggagccggaggcccggacgctgtacgagctctggctcgccgagcacggccgcgcctacaacgcgctcggcgagcgcgaccgccgcttccgcgtgttctgggacaacctacgcttcgtcgacgcgcacaacgagcgcgccgcggagcacggcttccgcctcggcatgaaccagttcgccgacctcaccaacgacgagttccgcgccgcgtacctcggcgccaggatccccgccgcccggagaaggggaaccgccgtgggggagaggtaccgccacggcggtggcgccgaggagctgccggagagcgtcgactggagggagaagggcgccgttgcgcccgtcaagaaccaggggcagtgcggaagttgctgggctttctctgcagtaagctcagtagaaagcgttaaccaaattgttactggtgagatggtgaccttgtccgagcaggagcttgtagagtgctcgactgatggagggaacagcggctgcaatggtgggcttatggatgccgcatttgattttatcataaagaacgggggcattgatactgaaggagactacccttacaaagctgtggatgggaagtgtgacatcaacagggaaaatgccaaggttgtgagcatcgatggctttgaagatgtgcctgaaaacgacgagaaatcattgcagaaggcagttgctcaccagcccgtcagcgttgccattgaggctggtggccgggagttccagctgtacaaagcgggtgtctttagtggaacttgcaccacaaatcttgaccacggtgtcgtcgctgtcggctacggcaccgaaaatgggaaggactactggattgtccgcaactcttggggtgcaaagtggggcgaggatggttacatccgtatggagaggaacgtcaatgccaccactgggaagtgcgggattgctatgatggcatcctaccctaccaagaagggcgcaaaccctcccaagccgtctccaacccctccaacgccgccgcctcccccggttgcccctgacaatgtctgcgatgagaacttctcttgcgcagcgggcagcacctgctgctgtgcgtttggtttcaggaacgtctgcttggtctggggttgctgtccgatggaaggtgccacctgctgcaaggaccacgccagctgctgcccgccgggttaccctgtgtgcaacgtcagagccggaacttgctcagtgagcaagaacagcccgctgagcgtgaaggccttgaagcgcaccctcgccaagctgaacagcgcatgagctcgtccagacatcatggatctggagaggaatgggaccgccccggagcttttcagactctgcgtcctgatacaagctttcatagataacattatattgtatatctaagtattacttggcgtcccataaatccgttgtaaatatcaagctataatttctactatcttcgttctc

SEQ ID NO: 15980 - protein, 480 aa, Zea mays subsp. mays
  misc_feature (1)..(480): Ceres Seq. ID no. 12350004
GQRKERDARLVTSSTPAAMAALGLLLLAVVGATNAAAPGGRMSIISYNEEHAARGLERTEPEARTLYELWLAEHGRAYNALGERDRRFRVFWDNLRFVDAHNERAAEHGFRLGMNQFADLTNDEFRAAYLGARIPAARRRGTAVGERYRHGGGAEELPESVDWREKGAVAPVKNQGQCGSCWAFSAVSSVESVNQIVTGEMVTLSEQELVECSTDGGNSGCNGGLMDAAFDFIIKNGGIDTEGDYPYKAVDGKCDINRENAKVVSIDGFEDVPENDEKSLQKAVAHQPVSVAIEAGGREFQLYKAGVFSGTCTTNLDHGVVAVGYGTENGKDYWIVRNSWGAKWGEDGYIRMERNVNATTGKCGIAMMASYPTKKGANPPKPSPTPPTPPPPPVAPDNVCDENFSCAAGSTCCCAFGFRNVCLVWGCCPMEGATCCKDHASCCPPGYPVCNVRAGTCSVSKNSPLSVKALKRTLAKLNSA

SEQ ID NO: 15981 - protein, 462 aa, Zea mays subsp. mays
  misc_feature (1)..(462): Ceres Seq. ID no. 12350005
MAALGLLLLAVVGATNAAAPGGRMSIISYNEEHAARGLERTEPEARTLYELWLAEHGRAYNALGERDRRFRVFWDNLRFVDAHNERAAEHGFRLGMNQFADLTNDEFRAAYLGARIPAARRRGTAVGERYRHGGGAEELPESVDWREKGAVAPVKNQGQCGSCWAFSAVSSVESVNQIVTGEMVTLSEQELVECSTDGGNSGCNGGLMDAAFDFIIKNGGIDTEGDYPYKAVDGKCDINRENAKVVSIDGFEDVPENDEKSLQKAVAHQPVSVAIEAGGREFQLYKAGVFSGTCTTNLDHGVVAVGYGTENGKDYWIVRNSWGAKWGEDGYIRMERNVNATTGKCGIAMMASYPTKKGANPPKPSPTPPTPPPPPVAPDNVCDENFSCAAGSTCCCAFGFRNVCLVWGCCPMEGATCCKDHASCCPPGYPVCNVRAGTCSVSKNSPLSVKALKRTLAKLNSA

SEQ ID NO: 15982 - protein, 439 aa, Zea mays subsp. mays
  misc_feature (1)..(439): Ceres Seq. ID no. 12350006
MSIISYNEEHAARGLERTEPEARTLYELWLAEHGRAYNALGERDRRFRVFWDNLRFVDAHNERAAEHGFRLGMNQFADLTNDEFRAAYLGARIPAARRRGTAVGERYRHGGGAEELPESVDWREKGAVAPVKNQGQCGSCWAFSAVSSVESVNQIVTGEMVTLSEQELVECSTDGGNSGCNGGLMDAAFDFIIKNGGIDTEGDYPYKAVDGKCDINRENAKVVSIDGFEDVPENDEKSLQKAVAHQPVSVAIEAGGREFQLYKAGVFSGTCTTNLDHGVVAVGYGTENGKDYWIVRNSWGAKWGEDGYIRMERNVNATTGKCGIAMMASYPTKKGANPPKPSPTPPTPPPPPVAPDNVCDENFSCAAGSTCCCAFGFRNVCLVWGCCPMEGATCCKDHASCCPPGYPVCNVRAGTCSVSKNSPLSVKALKRTLAKLNSA

SEQ ID NO: 15983 - DNA, 1216 bp, Zea mays subsp. mays
  misc_feature (1)..(1216): Ceres Seq. ID no. 12350011
cccctggcattgcttgccacccctgcaactgcaactgcaacacagagaaagatagcgctatccagaggatcagctccggtcatccagtgaagctcaggctactctacctcgctctcggccatggcgtcaggggaagcagcagagccactgcagtacacggtgagcgagagcttcttctgcacgcacgcgctacatttccctgtcatatcgcctggcgtcttactctctgcagaccaccgcgctgcgggtgtccatccactgcgagggctgcaagaagaaggtcaagaaggtgctccacagcatcgaaggcgtgtacaaggtgacggtggacgcggcgcagcacaaggtgacggtcaccggcagcgtggaagccgacgcgctcgtccggcgcctgcacaaggccggcaagcaggcggcgctctggcccagctcgccggcacccgtcgaggccaagatgaagcccgaggaggtcgcgcctgccgcgttgcctgcggcagccgccaacaaggacgctagggcccaggagaagaagccggccaaggacaagaaggccgactacgccgaggccgcggcgaaaccgagcaaggacaagacggtcgacataggcgaggccgcggcgaagcccagcaaggacgagaaggccgacaaaggcgaggccgcggcgaaacccagccaggacgagaaggctggcaaaggcgagccggccccggagacgaagaagggctcccctgcgccggggaagcaggacgccgcggaggaggctggcgcggacaagcccggcggcggcggcggcggcaagaagggcaagaagaacaagaatcccaacaaaccgctggactgcggcggcgaggccccggccgagaagcaggcgtcgccggggcccgagagcccgcacgtgcacggcggcgccttcccgtactacgcggcgcacccggtgctgagctgctacaacgtggcgcacccgagctcgagcgtgtcgtactacgcgcccgccgccgtggtgccgtacggcgggttcccgcccatggtgccggcggagttcatgtacggcccgccgggcatgcaggagtctagcatgctcacgaggacaacgccaactcgtgcagcctcatgtgatgtctgtcacgcacgcgccgccgctatacctacctacattgtcaaattaggcggtcaaagctcttgcttgttgaccagagattagttctttgaattgctc

SEQ ID NO: 15984 - protein, 248 aa, Zea mays subsp. mays
  misc_feature (1)..(248): Ceres Seq. ID no. 12350012
MKPEEVAPAALPAAAANKDARAQEKKPAKDKKADYAEAAAKPSKDKTVDIGEAAAKPSKDEKADKGEAAAKPSQDEKAGKGEPAPETKKGSPAPGKQDAAEEAGADKPGGGGGGKKGKKNKNPNKPLDCGGEAPAEKQASPGPESPHVHGGAFPYYAAHPVLSCYNVAHPSSSVSYYAPAAVVPYGGFPPMVPAEFMYGPPGMQESSMLTRTTPTRAASCDVCHARAAAIPTYIVKLGGQSSCLLTRD

SEQ ID NO: 15985 - protein, 131 aa, Zea mays subsp. mays
  misc_feature (1)..(131): Ceres Seq. ID no. 12350013
MASGEAAEPLQYTVSESFFCTHALHFPVISPGVLLSADHRAAGVHPLRGLQEEGQEGAPQHRRRVQGDGGRGAAQGDGHRQRGSRRARPAPAQGRQAGGALAQLAGTRRGQDEARGGRACRVACGSRQQGR

SEQ ID NO: 15986 - DNA, 1783 bp, Zea mays subsp. mays
  misc_feature (1)..(1783): Ceres Seq. ID no. 12350029
atgcctcaaggcctccactgtccactcctctcgtacaaccataccagtgctgttcgttgctctgtacgtagctcttctccaactacgtaacgtaactagctagtacgtgtacgtccagcacttggattggatggctcccctgcgactgcgagcgggagcggcggcgccaatggcggcggccgccgccacggtcgtgctggccgccatacttgcgctgttcggctgctgtgccgctgccgcgtccgccgccgccaccgacgtgacggccgcggcagagctggaccgcatcgacaggctgccgggccagcccccggtcaacttctccatgtactccggctacgtcaccgtcgacgccgccgcggggcgggcgctcttctactggctcatggaggcctccggcgtgccggcgggctccgctccgctcgtgctctggctcaacggcgggcccgggtgctcctctcttggctacggcgctatggaggagctcggcgccttccgcgtcaaccccgacggcgccacgctctccttgaatccctacgcctggaacaatgtggcgaatgtgctgttcttggactcgccggccggcgttggctactcctacaccaacaccaccgacgacctgtacgctgctggtgacaacaagacagctcatgactcatatgctttcttgataaattggttggaacggttcccacagtacaagcatcgtgatttctacatcactggagagagctatggaggccactatgtccctcaattgtcttggttagtgtaccaaaacaacaaaggaattaagaatccaaccttaaacttcaaaggcttcatggttggaaatgcggtaattgacgattaccatgactacatgggcacatttgagtattggtggacacatgggcttatctccgatgaaacttatgcaaagttgtgggaggattgtaaaaatgatgtgtctgagaacccctccgaggaatgccaaaagatttatgaggttgctgaggctgagcaagggaatattgatttgtatagcatctacacacctacttgtaagaagacttcattgcaaaagcgcagactaataaggggaagaatgccctggctgccgagaggatacgatccttgcaccgagctgtacatcacgaagtactgcaacttgcccgaggtgcaggacgccttccatgccaatgttactggaataccatacgcctgggtgggctgcagtgacccaatatatgagtactggaaggattcgccgaggtccatgcttccgatctaccgtgaactcatctcggcaggcctaaggatatgggtcttcagcggcgacaccgactccgtcgtgcccctcacggcgacgaggtactccatcgacgcgctgtctctgccaacgatcaccaagtggtacccttggtactacgacgaagaggttggtggatggtgccaggtgtacgagggcctgacgctggtgacggtccgaggcgcggggcacgaggtccccctccaccgtccgccgcagggcctcaagctgttcgagcacttcctgcggggcgagcccatgcccaagcctgtcgagagcgtccagtcgttctagatgagcttgctgccgcgcttggctagttggctttgatgaatagtaaggccggacatgtggcaagccatctccactccacatttcttcaccacgttttcaataactggcgctggccgaaataataagagcagaacgaataaaatgccgctcgctagaatgatctggctgtgcgtgtttgctttcgagttatttttatat

SEQ ID NO: 15987 - protein, 484 aa, Zea mays subsp. mays
  misc_feature (1)..(484): Ceres Seq. ID no. 12350030
MAPLRLRAGAAAPMAAAAATVVLAAILALFGCCAAAASAAATDVTAAAELDRIDRLPGQPPVNFSMYSGYVTVDAAAGRALFYWLMEASGVPAGSAPLVLWLNGGPGCSSLGYGAMEELGAFRVNPDGATLSLNPYAWNNVANVLFLDSPAGVGYSYTNTTDDLYAAGDNKTAHDSYAFLINWLERFPQYKHRDFYITGESYGGHYVPQLSWLVYQNNKGIKNPTLNFKGFMVGNAVIDDYHDYMGTFEYWWTHGLISDETYAKLWEDCKNDVSENPSEECQKIYEVAEAEQGNIDLYSIYTPTCKKTSLQKRRLIRGRMPWLPRGYDPCTELYITKYCNLPEVQDAFHANVTGIPYAWVGCSDPIYEYWKDSPRSMLPIYRELISAGLRIWVFSGDTDSVVPLTATRYSIDALSLPTITKWYPWYYDEEVGGWCQVYEGLTLVTVRGAGHEVPLHRPPQGLKLFEHFLRGEPMPKPVESVQSF

SEQ ID NO: 15988 - protein, 471 aa, Zea mays subsp. mays
  misc_feature (1)..(471): Ceres Seq. ID no. 12350031
MAAAAATVVLAAILALFGCCAAAASAAATDVTAAAELDRIDRLPGQPPVNFSMYSGYVTVDAAAGRALFYWLMEASGVPAGSAPLVLWLNGGPGCSSLGYGAMEELGAFRVNPDGATLSLNPYAWNNVANVLFLDSPAGVGYSYTNTTDDLYAAGDNKTAHDSYAFLINWLERFPQYKHRDFYITGESYGGHYVPQLSWLVYQNNKGIKNPTLNFKGFMVGNAVIDDYHDYMGTFEYWWTHGLISDETYAKLWEDCKNDVSENPSEECQKIYEVAEAEQGNIDLYSIYTPTCKKTSLQKRRLIRGRMPWLPRGYDPCTELYITKYCNLPEVQDAFHANVTGIPYAWVGCSDPIYEYWKDSPRSMLPIYRELISAGLRIWVFSGDTDSVVPLTATRYSIDALSLPTITKWYPWYYDEEVGGWCQVYEGLTLVTVRGAGHEVPLHRPPQGLKLFEHFLRGEPMPKPVESVQSF

SEQ ID NO: 15989 - protein, 419 aa, Zea mays subsp. mays
  misc_feature (1)..(419): Ceres Seq. ID no. 12350032
MYSGYVTVDAAAGRALFYWLMEASGVPAGSAPLVLWLNGGPGCSSLGYGAMEELGAFRVNPDGATLSLNPYAWNNVANVLFLDSPAGVGYSYTNTTDDLYAAGDNKTAHDSYAFLINWLERFPQYKHRDFYITGESYGGHYVPQLSWLVYQNNKGIKNPTLNFKGFMVGNAVIDDYHDYMGTFEYWWTHGLISDETYAKLWEDCKNDVSENPSEECQKIYEVAEAEQGNIDLYSIYTPTCKKTSLQKRRLIRGRMPWLPRGYDPCTELYITKYCNLPEVQDAFHANVTGIPYAWVGCSDPIYEYWKDSPRSMLPIYRELISAGLRIWVFSGDTDSVVPLTATRYSIDALSLPTITKWYPWYYDEEVGGWCQVYEGLTLVTVRGAGHEVPLHRPPQGLKLFEHFLRGEPMPKPVESVQSF

SEQ ID NO: 15990 - DNA, 1527 bp, Zea mays subsp. mays
  misc_feature (1)..(1527): Ceres Seq. ID no. 12350033
taacataaacgagcgaacttttacacaagaaatctaatgaaatgttcttattgcattcttcaattaatattttctctcagtagcatagcttttaggtactaactgtacaatggcaggaacagcagcaacactaagcatccaacgtcatgttctaggcacctgttccatgtagcatgcatattagtaattgccacagcttaggagtgaatccggtagaataatatgctctagagttgaatgaagtaaatttcaattactcctgaggattaaatgaactgtataaggccgtaatttgttcctggtttagtttcagggtagaaatggacattgctgtaatcagctacacattacatgcgaccggacctgaattattatataagaaacctgaagtgtagtcgatatacatgttttcgtcggtgaaacccacttactttttgtaggccattgaggtgcaataatttgatacgcatgtatgttaatctgctaacccacatggaatgcaatttcataggttaaatttgccgcttgtcatattttgtaggcttcaatgttaaacattgtcacaggttctcatatatgggtggaagataaagatttgtcctgggttgatggtgaggtatttcgaattgatggccaaaacgcccatgttcgcacaaccaaggggaaggcggtatgtgttgctctgcttttgaagtctgtcacaaaccctttttagtttgttttttagttcttcataatttcatagttctgtttctgacccagagtttctcgcacaaccaatgttgttaactgaatagttaaactgaataaaaggtatgatgtttcacatttttaattttaaaaattatttcttttattataggcaagaggttacctctattgaaggagatgacaggtgtctattattatagcagtaaatcatctttgttgctcctactacacccgttttgagctagaaatttcgtacttaatcaccattacaatatgacagaagtgtaggatatgcacaaaagcacttattgagttgagtggtaatatatactgccaactccaagggaatttgattttattactcaacgtttatgcctttcatttactaccttcattttttttccagaagtgtttagtgcatcaacattgttttcagtaaatgtctttgactgttgccttttattgctatatgtcgggccgttttgttgcgttgttgtgcacgcggttgtagggatggcgtattgtggcggctacgagggaccgatgttcctgtgtggcagtgacaacgataccgtggagccaaggcaatgtcagcaagctgatttttcagattggaatctatggttctttttaaagatcgaatatgttctagcatcttaaaaagatttgtcagaatgtaaacatttgttctgaggtcatttaggcctcaaacagaatttcttggacttatttcgttggagggaatgggacatcttgagatctaaatgtgtatagaagatccaaatgtgtatagaacatatatttttatgggtatct

SEQ ID NO: 15991 - protein, 55 aa, Zea mays subsp. mays
  misc_feature (1)..(55): Ceres Seq. ID no. 12350034
MLNIVTGSHIWVEDKDLSWVDGEVFRIDGQNAHVRTTKGKAVCVALLLKSVTNPF

SEQ ID NO: 15992 - protein, 48 aa, Zea mays subsp. mays
  misc_feature (1)..(48): Ceres Seq. ID no. 12350035
MAYCGGYEGPMFLCGSDNDTVEPRQCQQADFSDWNLWFFLKIEYVLAS

SEQ ID NO: 15993 - protein, 38 aa, Zea mays subsp. mays
  misc_feature (1)..(38): Ceres Seq. ID no. 12350036
MFLCGSDNDTVEPRQCQQADFSDWNLWFFLKIEYVLAS

SEQ ID NO: 15994 - DNA, 443 bp, Zea mays subsp. mays
  misc_feature (1)..(443): Ceres Seq. ID no. 12350041
caaaaaaaaatccaagctcaaagcaagcagatctaagctccaggcagcgtcgcgacagagtgagctagtgagtagcacgacaacaacaatggcttccctgaaggccgcgaagcccagcggagttgcggcgcagggcaaggagccggcgcccaagctcagcgagacggcgacgaagccgtcagccgcgaagagcggcggcgttaagaaggctgagcagaagccccgggaaaccaaaaggaaggtgaagagcagcaaacaggcggcggcggccaaaaagtgacgtacagtacgtgtggagtgtaatggagcttccatgcatgagtgaatccatgccatgttatgaatctagtccttcctttcttgtatcttccatgtgacgcggcgtgtgcgtcccctcatgtgtgatgatgccagatgaatactacaaataagacgttgttgtg

SEQ ID NO: 15995 - protein, 92 aa, Zea mays subsp. mays
  misc_feature (1)..(92): Ceres Seq. ID no. 12350042
KKKSKLKASRSKLQAASRQSELVSSTTTTMASLKAAKPSGVAAQGKEPAPKLSETATKPSAAKSGGVKKAEQKPRETKRKVKSSKQAAAAKK

SEQ ID NO: 15996 - protein, 63 aa, Zea mays subsp. mays
  misc_feature (1)..(63): Ceres Seq. ID no. 12350043
MASLKAAKPSGVAAQGKEPAPKLSETATKPSAAKSGGVKKAEQKPRETKRKVKSSKQAAAAKK

SEQ ID NO: 15997 - DNA, 1322 bp, Zea mays subsp. mays
  misc_feature (1)..(1322): Ceres Seq. ID no. 12350141
aaaaaatttgcgacaattcacctgcatacaggggcagcatatctagcagctactccgcccccaaatgctcgccggcatatcccgtttcctcactcgccgccgccgcccgccctttccgcttgccgctaccgccgctgcagcagccatgtcgtcgtcgtcgtccacggcagcgaacatctccgagcgtccgatctctccggacaccacccgcgtggcctgggtggggacgggcgtcatgggccagtcaatggccggccacctcctcgccgccggctacgctctcaccgtattcaaccggacggcatccaagacccagggcctcgtctcccgcggcgccagcctcgcggacagcccgcgcgcggccgccgcggctgccgatgtcatcttcctcatggtcggcttcccctccgacgtccgctccaccgccctcgatccatccacaggcgccctctctggcctcaccccaggcggtatcctagtcgacatgaccacctccgaccccaccctcgccgccgagatagccgcggccgcggccgccgccggctgctcggccgtcgacgcccccgtctccggcggtgaccgaggggcccgcaacgccaccctctccatcttcgctggcggcgacgccgccgtcgttgctcgcctggcgccgctcttcaagctcatgggaaacgcgctgtacatgggcgggcccggcgcggggcagcgcgcgaagctgggcaaccagatcgccatcgcatccaccatggtagggctcgtggagggcatggtgtacgcgcacaaggccgggctggacgtggccaagtggctggaggccatctccaccggcgcagccgggtccaagtcgctggaactgtatgggaagcggatcctggagagggatatggcggctggcttctatgtccggcacttcgtcaaggacctcggtatctgcctgttggaatgccaggccatggggctgtcgctgccggggctcgccctcgcgcaacagctgtacgtgtcgctgatcgcgcacggcgagggcgggctcggtacacaggcgcttatactggccgtcgagcggctgaacaacaccagcctcgagaagaaggacgaatgaaaggccccaggctctagctttgatgaacttgtgggaagctttgcttggtgccttggtgcaagtatgcaagatcgaggtgactgttaagttgtctttcagagttctacagttgttcacttttgtagtagtatatatgttatgcacttgtgcaaaaaattgtgctggcttggatgattgcttagctctacctgtttacatccgccaccggttcaaataagatttt

SEQ ID NO: 15998 - protein, 344 aa, Zea mays subsp. mays
  misc_feature (1)..(344): Ceres Seq. ID no. 12350142
MLAGISRFLTRRRRPPFPLAATAAAAAMSSSSSTAANISERPISPDTTRVAWVGTGVMGQSMAGHLLAAGYALTVFNRTASKTQGLVSRGASLADSPRAAAAAADVIFLMVGFPSDVRSTALDPSTGALSGLTPGGILVDMTTSDPTLAAEIAAAAAAAGCSAVDAPVSGGDRGARNATLSIFAGGDAAVVARLAPLFKLMGNALYMGGPGAGQRAKLGNQIAIASTMVGLVEGMVYAHKAGLDVAKWLEAISTGAAGSKSLELYGKRILERDMAAGFYVRHFVKDLGICLLECQAMGLSLPGLALAQQLYVSLIAHGEGGLGTQALILAVERLNNTSLEKKDE

SEQ ID NO: 15999 - protein, 317 aa, Zea mays subsp. mays
  misc_feature (1)..(317): Ceres Seq. ID no. 12350143
MSSSSSTAANISERPISPDTTRVAWVGTGVMGQSMAGHLLAAGYALTVFNRTASKTQGLVSRGASLADSPRAAAAAADVIFLMVGFPSDVRSTALDPSTGALSGLTPGGILVDMTTSDPTLAAEIAAAAAAAGCSAVDAPVSGGDRGARNATLSIFAGGDAAVVARLAPLFKLMGNALYMGGPGAGQRAKLGNQIAIASTMVGLVEGMVYAHKAGLDVAKWLEAISTGAAGSKSLELYGKRILERDMAAGFYVRHFVKDLGICLLECQAMGLSLPGLALAQQLYVSLIAHGEGGLGTQALILAVERLNNTSLEKKDE

SEQ ID NO: 16000 - protein, 287 aa, Zea mays subsp. mays
  misc_feature (1)..(287): Ceres Seq. ID no. 12350144
MGQSMAGHLLAAGYALTVFNRTASKTQGLVSRGASLADSPRAAAAAADVIFLMVGFPSDVRSTALDPSTGALSGLTPGGILVDMTTSDPTLAAEIAAAAAAAGCSAVDAPVSGGDRGARNATLSIFAGGDAAVVARLAPLFKLMGNALYMGGPGAGQRAKLGNQIAIASTMVGLVEGMVYAHKAGLDVAKWLEAISTGAAGSKSLELYGKRILERDMAAGFYVRHFVKDLGICLLECQAMGLSLPGLALAQQLYVSLIAHGEGGLGTQALILAVERLNNTSLEKKDE

SEQ ID NO: 16001 - DNA, 818 bp, Zea mays subsp. mays
  misc_feature (1)..(818): Ceres Seq. ID no. 12350165
aatttttgaaattggtcgtgagccgctgccgcacacggcgagaggaatagggttgctccccccgttgccgactcgccgccgcatcgccgcgagcgtcatgaagaccttcccgctgtccaggggaagcaccatctccctagccctcttctccgacgtctccaacagccgggagctcctggacttgatgcagtcagggaagctggagccggcggtcgctctcctcaacgcgtcactggtgccggatgtgttccctatcctcgcggcagcgcttaaggcgctgttgtccaagactagggagtcactgaccacaaggactctgcactctgagctcgtctacaactactcggggtccaaacatataacagagtccctgaagcgctgtgggatctctgataatacaacttacatccttgctgcttgttttgatgcttccgacgaggagatgaaggcagtggagaagctcatcagtggcaccgagattgatctcacagaactggaaagaagagcaaaccagccacagatcttgaagcattacaagatacctccccaagaactatcgatatctacgttgccggacgcaattgtatgcaggattgctgctcgagatgctctctgaagtctcaataatcaccgtaagctatgtggtttcaggatgtaggtctctctctaccacatgtatggtgtgacattgacagcacaagtgcacaactagaattaggtatccgaaataccattgatgttcgcattccttgcaagcaacccagaagcacattgcgtggttaatttttcttgctaaactgtgctgcaaagcaacagtt

SEQ ID NO: 16002 - protein, 204 aa, Zea mays subsp. mays
  misc_feature (1)..(204): Ceres Seq. ID no. 12350166
IFEIGREPLPHTARGIGLLPPLPTRRRIAASVMKTFPLSRGSTISLALFSDVSNSRELLDLMQSGKLEPAVALLNASLVPDVFPILAAALKALLSKTRESLTTRTLHSELVYNYSGSKHITESLKRCGISDNTTYILAACFDASDEEMKAVEKLISGTEIDLTELERRANQPQILKHYKIPPQELSISTLPDAIVCRIAARDAL

SEQ ID NO: 16003 - protein, 172 aa, Zea mays subsp. mays
  misc_feature (1)..(172): Ceres Seq. ID no. 12350167
MKTFPLSRGSTISLALFSDVSNSRELLDLMQSGKLEPAVALLNASLVPDVFPILAAALKALLSKTRESLTTRTLHSELVYNYSGSKHITESLKRCGISDNTTYILAACFDASDEEMKAVEKLISGTEIDLTELERRANQPQILKHYKIPPQELSISTLPDAIVCRIAARDAL

SEQ ID NO: 16004 - protein, 143 aa, Zea mays subsp. mays
  misc_feature (1)..(143): Ceres Seq. ID no. 12350168
MQSGKLEPAVALLNASLVPDVFPILAAALKALLSKTRESLTTRTLHSELVYNYSGSKHITESLKRCGISDNTTYILAACFDASDEEMKAVEKLISGTEIDLTELERRANQPQILKHYKIPPQELSISTLPDAIVCRIAARDAL

SEQ ID NO: 16005 - DNA, 1517 bp, Zea mays subsp. mays
  misc_feature (1)..(1517): Ceres Seq. ID no. 12350177
attcgttcactctctcgtacgcatcctcattctatattgtggatgggcgtcgtcgaaccgtgccgcatcgcacgatcgccctcccgtcaagctacaccatgccccatcccgccacattgtcccatcggcctcctgtcccgctgcccacgacactagtctcttgtctcgtcgtgctgcctcctcaacgctttgttaacattagagattgaaaggtagcatcgtagcaaaatgaaggcaccatcactactggttcagtgtttccctggcttgcttcccagcaaggccactagttgcgtgccaattgtatctgagaaggatctgcagctaccatcaccagctgttgaaataatcccctcaaagagtgttcatccatacaaatatgctggagagaaggttgatgtgcaaggtcttaatattttcaagggtaaagtcagtgtagcagatatgatagttatctcaccttctgaagtagcatcatcaaaatatgatggaactccgaaatactgggagagttccattacccttgtcgacattcttaaaaatgagatccgtgatggccagttgagcttcaggggcaagcgggttctagagcttggatgtggatatggcctctctgggatttttgcctgcttgaagggtgcatccacagttcactttcaggacataaatgcagaaacgatacggtgcagaacaatacccaatgttcttgcaaatcttgagcaggctcaggaccgacagaacagaccatcagagagccctgttacaccatctaggcagctcttggctcctaatgtacatttctatgctggagagtgggatgaactcccaacaattctctcagttgtgcagccacctgcagcaccaacaaacctcagcttctctgaggatgattttatggatggctgcagtagccatgatggaagcagtgtagttggtcatgactactgccccaggagatctaggaagctttctggtagccgtgcatgggagagagctagtgagaccgaccaggcagatagtggctatgatgtgatcttgatttctgatgtcccctacgcagctaactctctgaagaagctctatgcgcttatttcaaagtgcctacgtcctccttatggagtcctgtacgtcgcttccaagaagaacttggttggttccaatggtggcgccaggcagcttcgagctctcatggaagaggaaggtgtccttggtggccacttcttgactgaggtgtgtgacagggagatatggaagttctttttcaagtgagcaaatataggaagtgggaagagaaggaaatgagttctgacgttgaaacccagtttttatggtttctatatgcagcgatgtacataccgcgaggcatagttccattaattctttggtagtaggttgaaacttcaagaaatatctgcagttgagcttgcacaagtgttggaatcctttaccgctttgtagatctgctatgtgctaatgtcgctctattaagtacagaaagcaaattgtggtaacgtttt

SEQ ID NO: 16006 - protein, 346 aa, Zea mays subsp. mays
  misc_feature (1)..(346): Ceres Seq. ID no. 12350178
MKAPSLLVQCFPGLLPSKATSCVPIVSEKDLQLPSPAVEIIPSKSVHPYKYAGEKVDVQGLNIFKGKVSVADMIVISPSEVASSKYDGTPKYWESSITLVDILKNEIRDGQLSFRGKRVLELGCGYGLSGIFACLKGASTVHFQDINAETIRCRTIPNVLANLEQAQDRQNRPSESPVTPSRQLLAPNVHFYAGEWDELPTILSVVQPPAAPTNLSFSEDDFMDGCSSHDGSSVVGHDYCPRRSRKLSGSRAWERASETDQADSGYDVILISDVPYAANSLKKLYALISKCLRPPYGVLYVASKKNLVGSNGGARQLRALMEEEGVLGGHFLTEVCDREIWKFFFK

SEQ ID NO: 16007 - protein, 274 aa, Zea mays subsp. mays
  misc_feature (1)..(274): Ceres Seq. ID no. 12350179
MIVISPSEVASSKYDGTPKYWESSITLVDILKNEIRDGQLSFRGKRVLELGCGYGLSGIFACLKGASTVHFQDINAETIRCRTIPNVLANLEQAQDRQNRPSESPVTPSRQLLAPNVHFYAGEWDELPTILSVVQPPAAPTNLSFSEDDFMDGCSSHDGSSVVGHDYCPRRSRKLSGSRAWERASETDQADSGYDVILISDVPYAANSLKKLYALISKCLRPPYGVLYVASKKNLVGSNGGARQLRALMEEEGVLGGHFLTEVCDREIWKFFFK

SEQ ID NO: 16008 - DNA, 1576 bp, Zea mays subsp. mays
  misc_feature (1)..(1576): Ceres Seq. ID no. 12350195
aaaactcccccaactgacggccacctcgaacggaaggggatcccccttaattatgagacaattattgctgaaattatttttttcggaatccaatcaggtagtagtatttgtgtgattgtgtccaggccctatacataagccgccatttgcagtccggacgcagccccgttcagtcgcagcccaggccgacgacggcagagagcgagccgacgccgccgcaccctcgtgccaggttacacggtgtgaaaatgtcaggaagggctttgaaagatctcaatgtttctcagtcagcagacctggagaacggaaaagacaattctgtgaaatcctgcatcaccaagcctgtgttgaatggcaacaaatgtgccaacaaggaagaaaaggctccgtctgcttgccacgacgctgtgactaatggaaatgcggctgccattgcagatgtggagtacattgattctgaaaatctagtagatctcccagatgtcgatgcagctctaagtaccttagctaaaagattggattcaaaggactgggttatgacatgtgaagctctcaacaatgttcgtcagttggcaatgtatcacaaggaacgattgcaggagcttctggagcctgtagttcctcttatcgtgaaatctgtgaagaacccaagaagtgctgtatgcaaaactgcactaatgacttgtgctgacatctttaaggcctatggtgacttaatggttcactcaatcgatccactgctagtacaactgtttctgaaggcttcacaagataagcgttttgtctgtgaagctgcagaggcagctcttatatcgatgacaagttggatctcccctttactactcttgccaagaatgctgccttacctcaagaacaagaatccacggatccgagcaaaagcatcagtgtgtttcagcaagagtgtaccacgccttgatgtggtgggaatcaaagaatatggtatggataagctcatccagattgcggcaacccaacttagcgaccagcttcctgaatcaagggaggctgctcgcaacctggcactggaactgcaagcattctatgagaagtctcaggcctcaacttctgacgaacacgaggtcgaggcctctgcctcgccagatgctgaatcatgggaggctttctgccagtccaagctctccgcattaagtgcccaagccattcttcgtgtgacctctactactacaaaagagtgcgtcacctctgccccaaaagaagggttggctgtgggttgctagcacaagccacaggggagatattgcgatttttcaccctgttcgctgttttgctgtacatgcttttggtttgtcctgcggtgcacccagtcgtgaaaaggttaatcattggttcaggagttcaggtgtgaccacggtgttaatattggtgtgggatatatatccattatagttggttgtacaatcatttggttccactacttggtattggagtgtagatttttttccccatggttcagcgttatacacaacagtccttattttttgtttttgatgctggttctgttattttgaaggaaatgacatattttgtgtttcgg

SEQ ID NO: 16009 - protein, 336 aa, Zea mays subsp. mays
  misc_feature (1)..(336): Ceres Seq. ID no. 12350196
MSGRALKDLNVSQSADLENGKDNSVKSCITKPVLNGNKCANKEEKAPSACHDAVTNGNAAAIADVEYIDSENLVDLPDVDAALSTLAKRLDSKDWVMTCEALNNVRQLAMYHKERLQELLEPVVPLIVKSVKNPRSAVCKTALMTCADIFKAYGDLMVHSIDPLLVQLFLKASQDKRFVCEAAEAALISMTSWISPLLLLPRMLPYLKNKNPRIRAKASVCFSKSVPRLDVVGIKEYGMDKLIQIAATQLSDQLPESREAARNLALELQAFYEKSQASTSDEHEVEASASPDAESWEAFCQSKLSALSAQAILRVTSTTTKECVTSAPKEGLAVGC

SEQ ID NO: 16010 - protein, 240 aa, Zea mays subsp. mays
  misc_feature (1)..(240): Ceres Seq. ID no. 12350197
MTCEALNNVRQLAMYHKERLQELLEPVVPLIVKSVKNPRSAVCKTALMTCADIFKAYGDLMVHSIDPLLVQLFLKASQDKRFVCEAAEAALISMTSWISPLLLLPRMLPYLKNKNPRIRAKASVCFSKSVPRLDVVGIKEYGMDKLIQIAATQLSDQLPESREAARNLALELQAFYEKSQASTSDEHEVEASASPDAESWEAFCQSKLSALSAQAILRVTSTTTKECVTSAPKEGLAVGC

SEQ ID NO: 16011 - protein, 227 aa, Zea mays subsp. mays
  misc_feature (1)..(227): Ceres Seq. ID no. 12350198
MYHKERLQELLEPVVPLIVKSVKNPRSAVCKTALMTCADIFKAYGDLMVHSIDPLLVQLFLKASQDKRFVCEAAEAALISMTSWISPLLLLPRMLPYLKNKNPRIRAKASVCFSKSVPRLDVVGIKEYGMDKLIQIAATQLSDQLPESREAARNLALELQAFYEKSQASTSDEHEVEASASPDAESWEAFCQSKLSALSAQAILRVTSTTTKECVTSAPKEGLAVGC

SEQ ID NO: 16012 - DNA, 1414 bp, Zea mays subsp. mays
  misc_feature (1)..(1414): Ceres Seq. ID no. 12350215
atcgcttccagttcatatctatccgttctctctccataacaaacacccgaaacgccaggttataaggcggggagttaaaaaaccaaagcctattcaaacgaggagcaaaaggctactctcggagccggggttgaaccggagcggcgggcggccggccggcctcgcatcttcgccggaggaaaacaaaattaaagttcctcgcgtaggcacagatggccgacccgtcagcatcatcggtgccgccggttgtcaccatgggatccgtggtcactgtggcctcgccgcccacgggtggtggatcgacggtctctgcaggtatcacaggcggcggcaaagacgggcccgtgcgcagggtgcaaatacctgcggcgcaagtgccagccggactgcatatttgcgccctatttcccgcccgacaacctagacaagttcgcgtacgtgcaccgcgtcttcggcaccagcaacgtgatcaagattctcaacaacctccagccctaccagcgccagtacgccgtcaattcgctcgtttacgaggcggaaatgcgtatccgcgaccccatctacggctgcgtcggcgtcgtctccatgcttcagcaccgcctcatacggctcaagaaggcgctcgagagcgccagcttagagctgtccaactaccaggcggctgaagccgcggcggcctctgtggccgtgggaccccatggtgtggcagcagctgggatggcagacttcgtaggcaacgcagtgcccaattgcacacaaaacattatcaatgccgggtactccacgatggcgtcgatcaccggagctgggccgttcatgcagcaagacaactttgcctccgtgcagatgctggccatgagcttcgagggtgagaatggagctgcggcgagggtgggcatgaacggaggtggaggctatggcttcgcctactcgccggccatgggcgtcgggcacggtgtagtgtctggtcatgtgcagcagcagcagatcaacggtggacagttcttgaaaaacagcacgacgggcggggattaccggcccactatgtgatctttatcagttgcaggcgggatgaccggccgtgtcctttcggccggaggagggatggtggtggaggcgactatatgcacatgaggtgacgcgaagaaacagcagctacactagaggttgaaggctacgatccagctatttcagcagttaaatgcagcaggggcagctctacgcctctaagctagtcaattactcgaggatgtcagaaggtattttgcagagcgagggtgactggacacaaaacaacgataactcccaatgcaagaatgccgtcgtacgtacgtacgtgtagtgtaccagctgacattcaatgctcccgccaaatggagctactactagtctactactctcgctgcattcattc

SEQ ID NO: 16013 - protein, 169 aa, Zea mays subsp. mays
  misc_feature (1)..(169): Ceres Seq. ID no. 12350216
MRIRDPIYGCVGVVSMLQHRLIRLKKALESASLELSNYQAAEAAAASVAVGPHGVAAAGMADFVGNAVPNCTQNIINAGYSTMASITGAGPFMQQDNFASVQMLAMSFEGENGAAARVGMNGGGGYGFAYSPAMGVGHGVVSGHVQQQQINGGQFLKNSTTGGDYRPTM

SEQ ID NO: 16014 - protein, 154 aa, Zea mays subsp. mays
  misc_feature (1)..(154): Ceres Seq. ID no. 12350217
MLQHRLIRLKKALESASLELSNYQAAEAAAASVAVGPHGVAAAGMADFVGNAVPNCTQNIINAGYSTMASITGAGPFMQQDNFASVQMLAMSFEGENGAAARVGMNGGGGYGFAYSPAMGVGHGVVSGHVQQQQINGGQFLKNSTTGGDYRPTM

SEQ ID NO: 16015 - protein, 150 aa, Zea mays subsp. mays
  misc_feature (1)..(150): Ceres Seq. ID no. 12350218
MADPSASSVPPVVTMGSVVTVASPPTGGGSTVSAGITGGGKDGPVRRVQIPAAQVPAGLHICALFPARQPRQVRVRAPRLRHQQRDQDSQQPPALPAPVRRQFARLRGGNAYPRPHLRLRRRRLHASAPPHTAQEGARERQLRAVQLPGG

SEQ ID NO: 16016 - DNA, 1533 bp, Zea mays subsp. mays
  misc_feature (1)..(1533): Ceres Seq. ID no. 12350231
aaaaaccaccaccgcccccagcttccctaccgccctcgttccggagcctagggtttgggaagtcgaaggcctcggcgcttcgtttgccagcgcaatgccggatacgggagcgagaggccgcggcgatgagccggagcctgtgacgccgcagcagcaggcggaggagacccaggcggtggacgatcggcggttgctgcgctcgcagtacctcgccgtgaagggccttatcagcgacgagaaggatgaaatggcgagcgcggactctgataagttctgctccattatcaacagagtggagagcctgcaccagcttgttcagaggcccagggagcaaatagctgacgcagaaaccctgctggaccttactgctagtttggtagcatcagtaaggtcccaatcagttctgggaatcacaccttctgattttattgctggactgctgaagaaattttaaagaaaggaggttccaatgataatgtttcattggactgggctcgtcttgggcttgctacctcacgtgttttcttgtctgcatctggatgtgccaccatgattggtcccatgacgacagaagtgaagccacgaagagtttgtattaggaagaagaggactgcgaggccacatggaaacgcttgccctgaacagcttgctgatccatctgagaaaacaaagtctgatactgacaagaacatgtctgctatatttgatctcctgaggaggaggaaaagtgcaaggctggaacacattattttgaacaggacatcatttgctcaaacagtggagaacatatttgccttgtcattccttgtgaaagatggaagagttgaaatcaaagtgaatgaccagggacatcattttgtctatccaaggaatgcaccagtggcaagtgctgttgcctcaggagatgtggtctataaccactttgtcttccgatttgattttaaagactggaagctcatgaaaggggttgttccagagggagaagagcttatgccgcacaggtcctctcagaccatagccaacacaggaggaaacaatcctacccagtctgaggcacctttggccacaccaagcacaacgatcaggaagctttgcaggaaccgtggcctcatcttgcaagatgagttgatcgcgacaggtgcatatggagtcatggaacaggagatgttagccatgggcacgaacgacgccatggaagatgagatggtagctgccatgggtgtgacggaagctatgggagagaagaggaagtacaagcgcaagcgtctgttccaggacgtctgatgcgttgatccagctgaccgttgctgatggtgtacatgtctaggtagtaggtagagatgccaacccggctcacttcagcttagcttaccttagatgcatttgggtcaaagcaccccatttggtatgggttatggtggctcttggaatggctgagcgtcacgttattttggatgtgttcttaatgttagtttctggcgtacttaagactgaagtaaccatagtgaaggtgttggatgcttgggttgaatt

SEQ ID NO: 16017 - protein, 244 aa, Zea mays subsp. mays
  misc_feature (1)..(244): Ceres Seq. ID no. 12350232
MIGPMTTEVKPRRVCIRKKRTARPHGNACPEQLADPSEKTKSDTDKNMSAIFDLLRRRKSARLEHIILNRTSFAQTVENIFALSFLVKDGRVEIKVNDQGHHFVYPRNAPVASAVASGDVVYNHFVFRFDFKDWKLMKGVVPEGEELMPHRSSQTIANTGGNNPTQSEAPLATPSTTIRKLCRNRGLILQDELIATGAYGVMEQEMLAMGTNDAMEDEMVAAMGVTEAMGEKRKYKRKRLFQDV

SEQ ID NO: 16018 - protein, 240 aa, Zea mays subsp. mays
  misc_feature (1)..(240): Ceres Seq. ID no. 12350233
MTTEVKPRRVCIRKKRTARPHGNACPEQLADPSEKTKSDTDKNMSAIFDLLRRRKSARLEHIILNRTSFAQTVENIFALSFLVKDGRVEIKVNDQGHHFVYPRNAPVASAVASGDVVYNHFVFRFDFKDWKLMKGVVPEGEELMPHRSSQTIANTGGNNPTQSEAPLATPSTTIRKLCRNRGLILQDELIATGAYGVMEQEMLAMGTNDAMEDEMVAAMGVTEAMGEKRKYKRKRLFQDV

SEQ ID NO: 16019 - protein, 197 aa, Zea mays subsp. mays
  misc_feature (1)..(197): Ceres Seq. ID no. 12350234
MSAIFDLLRRRKSARLEHIILNRTSFAQTVENIFALSFLVKDGRVEIKVNDQGHHFVYPRNAPVASAVASGDVVYNHFVFRFDFKDWKLMKGVVPEGEELMPHRSSQTIANTGGNNPTQSEAPLATPSTTIRKLCRNRGLILQDELIATGAYGVMEQEMLAMGTNDAMEDEMVAAMGVTEAMGEKRKYKRKRLFQDV

SEQ ID NO: 16020 - DNA, 1114 bp, Zea mays subsp. mays
  misc_feature (1)..(1114): Ceres Seq. ID no. 12350235
aacgctcaggcacactgtgcaggtgacggcgaaccaggtaaccagctgccgagggaggaaccctagcggaacactgtgcaggtgacggcggcgcgctaccggtgacgggggatacggcggcatcgtccccctcggcccctcctccatccccggcgtggcggcgcaggcagccagcctgcagggttttctgactcagattacttgttcactgtggggtgcaagcttaatcggccaccatggatgttgataagcaagaaacaatggaggagaccatccttgttggtgatgatctcatgcgtgggccgccatcccctgtcataccgaaagagatcgcatcacatgtccttgaagatgttgagctttgtgatggtatactcaagaaccttttcttatgcctacagatcaatgatattgagccattctgccaagatgaaattgtgctatatcgacagtgtgctgagaaaagggacaaggaaataagagagcggatgcaaaatagtgaatataaattgggtttttcgatgcccctgaaacaagcgaaggagagagctactcaactccaatcagaagtaacactgctagaaaggcgcatgattcttgctagtggacttgagggtatggaaggatttcgccagagatggagcttgcacggacagcttgaagacacaaggaaaaggctagaagcactgaaccatggcatggaaaaacgagagaaccaaagttctacggcggagaggacaaaatctccagctgggaagaagtggttcttttggtagtacgtgttgtgtgcaatatgcaaactccaacgatggtccagctgtgtggtccaaatgggatgacttgttaggcaagttgcattctaagcggctaagcctgaagcaatgtgatagcagctaacaaagctacaatttgtttgcaacatgtacctctagggtctactccccctaaagtttgtgccatactcatgtgtttccatttgcatctggtcctctttggatgcaaagtagcattggataaagctagggttttgtaaaatatgtttgttttttaaaaagcgacgaactctgtttggatatgacaaatcttggtagtttataaaagccatggttttatt

SEQ ID NO: 16021 - protein, 179 aa, Zea mays subsp. mays
  misc_feature (1)..(179): Ceres Seq. ID no. 12350236
MDVDKQETMEETILVGDDLMRGPPSPVIPKEIASHVLEDVELCDGILKNLFLCLQINDIEPFCQDEIVLYRQCAEKRDKEIRERMQNSEYKLGFSMPLKQAKERATQLQSEVTLLERRMILASGLEGMEGFRQRWSLHGQLEDTRKRLEALNHGMEKRENQSSTAERTKSPAGKKWFFW

SEQ ID NO: 16022 - protein, 171 aa, Zea mays subsp. mays
  misc_feature (1)..(171): Ceres Seq. ID no. 12350237
MEETILVGDDLMRGPPSPVIPKEIASHVLEDVELCDGILKNLFLCLQINDIEPFCQDEIVLYRQCAEKRDKEIRERMQNSEYKLGFSMPLKQAKERATQLQSEVTLLERRMILASGLEGMEGFRQRWSLHGQLEDTRKRLEALNHGMEKRENQSSTAERTKSPAGKKWFFW

SEQ ID NO: 16023 - protein, 160 aa, Zea mays subsp. mays
  misc_feature (1)..(160): Ceres Seq. ID no. 12350238
MRGPPSPVIPKEIASHVLEDVELCDGILKNLFLCLQINDIEPFCQDEIVLYRQCAEKRDKEIRERMQNSEYKLGFSMPLKQAKERATQLQSEVTLLERRMILASGLEGMEGFRQRWSLHGQLEDTRKRLEALNHGMEKRENQSSTAERTKSPAGKKWFFW

SEQ ID NO: 16024 - DNA, 1433 bp, Zea mays subsp. mays
  misc_feature (1)..(1433): Ceres Seq. ID no. 12350246
gacacacgaaattctcaggtcccggtcccgggtccaggcacccttctcgctcggttgctcgggagctttccccttcctgttcctgaagcttccgacatccgaccgcctcctcctcctcgttctactcgccgccccttctaggatcatccagaggcgtgccggtgaaacgcgagagcggtgaggcatggcgatgcagacgggggtcgcgacctccaaggtcctcatcctcgtcggtgcagggatgacgggctcgatcctgctgcggaatggccgcttatctgatgtgttgggagaactccaggagattatgaagggtgtaaatcaaggaactgcttcgggtccctatgacattgcacttattcaagctcagattcggaatttagcccaagaagtcagagatttgacattgtcaaagcccattaccatactgaatggcaaatctgactcgggaggcagtttatcatcctacatactgccagcagcagcagttggagcaatgggttattgctacatgtgggaaggggttgtctctctcagatgtcatgtttgtcacaaaacacaacatggcaaatgctgttcagagcatgtcaaagcagttggagcaagtttcatcagcactagctgcaacaaaaagacatctaactcaacggcttgagaatttggatggcaaaatggatgaacaagtagaggtctccaaagctattagaaatgaggtcaatgatgttaaagatgacctgtctcaaattggatttgatgtcgaatcaattcagaaaatggttgctggattggagggaaagatcgagttacttgagaacaaacaggacgtggctaatactggtatctggtacctctgccaagtagcaggcggtttaaaagatggaataaacaccaggtttttccaggaaaccagtgagaagctgaagctctcacattcagctcaacctgaaaacaagccagtgaaggggcttgaatttttttcggaaagcgccatggaacagaaagtagctgactccaaaccaattgcggtgacagtcgacgctgagaagcctgagaaaaccgctgctgtaatgggcaccacagtgcacaggtctatcaggttctcatatcggaaggcaggccttgctttgtgatcaaatcctctccgcttgagatgcacgtggccttcctggttgcttttcttttttggcaacaaccttcctggttgctttgtctgatggtcagaaaacatggaagaataacctgcaactggagtgacagaatttcttttccccgcagtagcacaggtgtgcgttatttggtctgatttgaaactatcttcagtccgctatcaatttttttccttggattttgattcattttatgtttcgacttgttgccttgtatactgtaaaggcattggaaagaatacataaaacacgaatgttttttttgtc

SEQ ID NO: 16025 - protein, 232 aa, Zea mays subsp. mays
  misc_feature (1)..(232): Ceres Seq. ID no. 12350247
MANLTREAVYHPTYCQQQQLEQWVIATCGKGLSLSDVMFVTKHNMANAVQSMSKQLEQVSSALAATKRHLTQRLENLDGKMDEQVEVSKAIRNEVNDVKDDLSQIGFDVESIQKMVAGLEGKIELLENKQDVANTGIWYLCQVAGGLKDGINTRFFQETSEKLKLSHSAQPENKPVKGLEFFSESAMEQKVADSKPIAVTVDAEKPEKTAAVMGTTVHRSIRFSYRKAGLAL

SEQ ID NO: 16026 - protein, 195 aa, Zea mays subsp. mays
  misc_feature (1)..(195): Ceres Seq. ID no. 12350248
MFVTKHNMANAVQSMSKQLEQVSSALAATKRHLTQRLENLDGKMDEQVEVSKAIRNEVNDVKDDLSQIGFDVESIQKMVAGLEGKIELLENKQDVANTGIWYLCQVAGGLKDGINTRFFQETSEKLKLSHSAQPENKPVKGLEFFSESAMEQKVADSKPIAVTVDAEKPEKTAAVMGTTVHRSIRFSYRKAGLAL

SEQ ID NO: 16027 - protein, 188 aa, Zea mays subsp. mays
  misc_feature (1)..(188): Ceres Seq. ID no. 12350249
MANAVQSMSKQLEQVSSALAATKRHLTQRLENLDGKMDEQVEVSKAIRNEVNDVKDDLSQIGFDVESIQKMVAGLEGKIELLENKQDVANTGIWYLCQVAGGLKDGINTRFFQETSEKLKLSHSAQPENKPVKGLEFFSESAMEQKVADSKPIAVTVDAEKPEKTAAVMGTTVHRSIRFSYRKAGLAL

SEQ ID NO: 16028 - DNA, 1499 bp, Zea mays subsp. mays
  misc_feature (1)..(1499): Ceres Seq. ID no. 12350250
atggaacaggttctctgtcctcataactccaaccaaacaacggcagctagcgagctcccgcggtcccgccgccgccccctggtcctccaaaaaacggctgaaccctaaaccctccctagctcccgccgcctcgcttaaccgcgcccatggccgccgccgctcgcgccgccctcccgcggccccacctctctcttttttcgtcctcccaccgcagcccccatctgtccctcacgccctcctccgcccctcgcctgcgcagcggcgctgccacctcccctgcgctgcagcagcaccaccaggtcaccacgcgcctgggcgacgtgatcgaggcgcagcagttcgaccgggacgcgctgaacgagatcttcgaggtggcgcgggagatggaggccgtggagaggggttcccacggcgcccccagccgcgtcctcgaggggtacctcatggccacgcttttctacgagccctccacgcgcacgcgcctctccttcgaggctgctatgcggaggctcggcggggaggtcctcaccaccgagaatgcgcgcgagttctcttccgccgccaagggggagacactcgaagataccataagaaccgttgagggttattccgatattattgtactgagacattttgaaagtggagctgcaagaaaagcagcagatactgcaaatattcctgttattaatgcaggtgatggaccagggcaacatccaacccaggctttgttggatgtgtacacaataaagagagaaattggcacactagatggaattaaacttggtttggttggtgaccttgctaatgggaggacagttcgttctctggcttacttgattgctaagtaccagaacattaagatatactttgtatctcctgatgttgttaaaatgaaggatgatatcaagaactacttaaattccaaaggtgttgaatgggaagaaagttcagatttgttggaggtggcatccaagtgtgatgttatttatcaaacacgtattcaaaaagaaagatttggtgagaggattgacctttatgaagctgctcgtggcaagtacatcatggataaaaaggtcttagatgtgctgccaaaacatgctgtcatcatgcatccccttccaaggcttgatgagatcacagtagaagttgatagtgatccaagagctgcatattttaggcaggctaagaatggcctctacataaggatggcattgctcaaacttctgcttgttggtcactgacatttcggctagtgctttagcttgtgctgcgtcaagggattagaaggtattattcttaatataatgatcgaggctgtcttactcacgcaggtcgagtttttagaaacatgtactaataatcagcagcttgtgtcaaaattcaatgttcgctgttgcaggtaataaaagtctgcatccatgcgaatgtgcagcgatgtttggcagagtttggtgttctcatgtgctgtgagaacatggaacataattaattttgcctgc

SEQ ID NO: 16029 - protein, 364 aa, Zea mays subsp. mays
  misc_feature (1)..(364): Ceres Seq. ID no. 12350251
MAAAARAALPRPHLSLFSSSHRSPHLSLTPSSAPRLRSGAATSPALQQHHQVTTRLGDVIEAQQFDRDALNEIFEVAREMEAVERGSHGAPSRVLEGYLMATLFYEPSTRTRLSFEAAMRRLGGEVLTTENAREFSSAAKGETLEDTIRTVEGYSDIIVLRHFESGAARKAADTANIPVINAGDGPGQHPTQALLDVYTIKREIGTLDGIKLGLVGDLANGRTVRSLAYLIAKYQNIKIYFVSPDVVKMKDDIKNYLNSKGVEWEESSDLLEVASKCDVIYQTRIQKERFGERIDLYEAARGKYIMDKKVLDVLPKHAVIMHPLPRLDEITVEVDSDPRAAYFRQAKNGLYIRMALLKLLLVGH

SEQ ID NO: 16030 - protein, 285 aa, Zea mays subsp. mays
  misc_feature (1)..(285): Ceres Seq. ID no. 12350252
MEAVERGSHGAPSRVLEGYLMATLFYEPSTRTRLSFEAAMRRLGGEVLTTENAREFSSAAKGETLEDTIRTVEGYSDIIVLRHFESGAARKAADTANIPVINAGDGPGQHPTQALLDVYTIKREIGTLDGIKLGLVGDLANGRTVRSLAYLIAKYQNIKIYFVSPDVVKMKDDIKNYLNSKGVEWEESSDLLEVASKCDVIYQTRIQKERFGERIDLYEAARGKYIMDKKVLDVLPKHAVIMHPLPRLDEITVEVDSDPRAAYFRQAKNGLYIRMALLKLLLVGH

SEQ ID NO: 16031 - protein, 265 aa, Zea mays subsp. mays
  misc_feature (1)..(265): Ceres Seq. ID no. 12350253
MATLFYEPSTRTRLSFEAAMRRLGGEVLTTENAREFSSAAKGETLEDTIRTVEGYSDIIVLRHFESGAARKAADTANIPVINAGDGPGQHPTQALLDVYTIKREIGTLDGIKLGLVGDLANGRTVRSLAYLIAKYQNIKIYFVSPDVVKMKDDIKNYLNSKGVEWEESSDLLEVASKCDVIYQTRIQKERFGERIDLYEAARGKYIMDKKVLDVLPKHAVIMHPLPRLDEITVEVDSDPRAAYFRQAKNGLYIRMALLKLLLVGH

SEQ ID NO: 16032 - DNA, 1764 bp, Zea mays subsp. mays
  misc_feature (1)..(1764): Ceres Seq. ID no. 12350277
agtctctttaaaaggccctcgagaaaaatctccgcgtcaccaccaagcacgtccccgttccattacaacaaaagatcgtgctagtaagcaatacgctcaatttgagtttgaggtcgatttctggagcattcgagttcttttccagtaaacttttcaggtttaagcgcggattgatggcagagctgctgtagatttggagcattttggggttggttttttgcgatttgaggatcgaatcgggctggtacaaccgcgctcacgtgcatatataaggcgaattggcggtttgttggctacaattgttcggttcttatcttgaagggtggtgcgaattggaggattcttcccgaatcgagaaggtgtaggccaaattcgcaaggaagctgcagctatccgcgtgagaaggctgcctctcacaaattctcggtcggtgccatcccggcggtggactgcttttgggcttcttcgaaggttcgtatcttttggctcaggagaaagtggttctgaaggcctcgggcttctcatccccaattcgatccgttcccgagacggtgattgggtcatagatggggacggggtcgagcatcctgggcgcggatggagagtggggggagacgtccctcggcgacatgccggagagctgcgtggcggcggtactcctctacctcgacccgccggagatctgccaggtggcccgtctcaacagcgccttccgcggcgccgcctcggcggactgcgtctgggccgccaagcttcccgccaactaccgttaccttgcggccctagccgcggccgccgatgacgagggctgtggcgatggagatgccagcggcaagcgcttgaccaagaaggagatttacgctcgtctgtgccgatccactttctttgatgccggcagaaagtaattctggattctgaagaacaagggagccctttgcatgagtatatcatcaaaggcaatgactattaccgggatagatgatcggaggtactggagccacctcgctacagaggaatcaagattccatactgttgcctatctccagcagatttggtggctcgaggtagatggggagcttgagttctgctttcctgctggtgcctacagcctttttttcatcttcacctgggtcgaccctataggcgcatgggtcgttggctttgtggaactgagcatgttcatggttgggatgtcacgcccacacggttccagctcacgacctctgatgagcagcaggcgacatccgaatattatctgcatctacatgaacaagggggctggaagctttaccatgttggtgattttgtcatatcaaattccgatgagcccatgaaactcaagttctcaatgatgcagatcgattgcacacatatgaaaggcggcttgtgcgttgactccgtgtttatatatcctaaagggtacaagcctgagaaggcgaacatagtctgcacctagttcggcaaagttggccttgtacctctcctgcatgatgaaacaagaggcaattcaaatgtggatggctagcctttttcctggcgatccttacctgaaagcccattgtacattctttttgttttttcccttcattctggtagttttgcatgaatgtaaggtctttcttgtttttttttgggtagtgttagttaaacaggtggagaatagggaatttagaaacaggtcaagtgaagtaagtcttgagtcattgaggcggtagattgccatacagcaataataatgttcggcgagctggattgatttttttg

SEQ ID NO: 16033 - protein, 131 aa, Zea mays subsp. mays
  misc_feature (1)..(131): Ceres Seq. ID no. 12350278
MSISSKAMTITGIDDRRYWSHLATEESRFHTVAYLQQIWWLEVDGELEFCFPAGAYSLFFIFTWVDPIGAWVVGFVELSMFMVGMSRPHGSSSRPLMSSRRHPNIICIYMNKGAGSFTMLVILSYQIPMSP

SEQ ID NO: 16034 - protein, 124 aa, Zea mays subsp. mays
  misc_feature (1)..(124): Ceres Seq. ID no. 12350279
MTITGIDDRRYWSHLATEESRFHTVAYLQQIWWLEVDGELEFCFPAGAYSLFFIFTWVDPIGAWVVGFVELSMFMVGMSRPHGSSSRPLMSSRRHPNIICIYMNKGAGSFTMLVILSYQIPMSP

SEQ ID NO: 16035 - protein, 112 aa, Zea mays subsp. mays
  misc_feature (1)..(112): Ceres Seq. ID no. 12350280
MGTGSSILGADGEWGETSLGDMPESCVAAVLLYLDPPEICQVARLNSAFRGAASADCVWAAKLPANYRYLAALAAAADDEGCGDGDASGKRLTKKEIYARLCRSTFFDAGRK

SEQ ID NO: 16036 - DNA, 1606 bp, Zea mays subsp. mays
  misc_feature (1)..(1606): Ceres Seq. ID no. 12350293
gattcattccccctctcccctctccaagacccaaaaccctaacccctacgacccccgtgaccgccgccgccgtcgatgcctgcgctctccgacgtcgcgcttcaggctgccatcgccggcaacctccgcctcctgaagctggtggcgagcaagatgaatctgcgcgaagcgaaggacgccgctgggcggaacgcgctccacctggccgcggagatgggccgtcttgaggtttgcaggttcctggtggaggaatcgggcttcgaggtgaacttcgcctgcgccgaaggcgggtcgccggtccactgcgccgcggccgggggcagcgagagcgtcttgggctaccttctcgaccacggtggcgaccctgtgatgccggactccatgggctccactccactgcatgatgcggcagaggaagggcattgtgcggctgtgaggatgctgctgtccaagggtgtcgatgtggatccacacggctgtcgtgggacgccgctgcacttggcctgctccaatgaccgggatcaggttgttaggatcctgctggaacatggcgcagatcccaacaaagtttcggtcatgtcctcccaccactcatgatggcatactgtggcggttctttgagatgcatgaagctactgattgaggctggtgcggatgtgaacttgattgctccttctggagtaattttggctcaggcagtttgtgatgggtcaactgagattgtcaagtttttgctagaggttggagctgatcctaacattcctgatgaggatgggaaaatcccgatcatgtacccagcatttaatgggcatcgggatcttgttgaaattctatttcctaagacaagaccagtttcatctttgccagactggagcgttgatgggattattagaagtatgaaagatctgtttttcaagcctcaggatgcagctgtggtggaaaaaaagatagctgatgcgaagtcacaagggaaggaagctttcgcaaggggagagtaccctgcagcagtatacttctataccatggtactagagaacgaccttgatgctactgcgtttgccaaccggagcctgtgctggttgcggctgagggagggggccaaggctctgttagatgctcaacagtgcaaaatgatacggcctcgttggtcgaaggcatggtatcgcgagggcgcggctctcagcttgctgaaggactaccaaggggcagtcaacgcgttcacggaagcattgaaactggatcctgcaagtttagagatcaagaaagccttaagggaggccaccgattccctggcgaacgttggccgctccggagaacagaacccatgagctgctgctgcatccatgtgctttatctcacgttaagaatcctctaacactatgtggctcagcctcatattatatgttgatatatgtcgccttaacgcactgctggagatactagtttcgatctcagcctatatgttttgctccttcgggatgcagcctaagatacatgtggcaaccaagtgaggttgggcagggtagcatatctatggactggttgaactattatatgtatctggatatctaagtgcacctgttgctcctagtaaagttgcagttct

SEQ ID NO: 16037 - protein, 244 aa, Zea mays subsp. mays
  misc_feature (1)..(244): Ceres Seq. ID no. 12350294
MMAYCGGSLRCMKLLIEAGADVNLIAPSGVILAQAVCDGSTEIVKFLLEVGADPNIPDEDGKIPIMYPAFNGHRDLVEILFPKTRPVSSLPDWSVDGIIRSMKDLFFKPQDAAVVEKKIADAKSQGKEAFARGEYPAAVYFYTMVLENDLDATAFANRSLCWLRLREGAKALLDAQQCKMIRPRWSKAWYREGAALSLLKDYQGAVNAFTEALKLDPASLEIKKALREATDSLANVGRSGEQNP

SEQ ID NO: 16038 - protein, 243 aa, Zea mays subsp. mays
  misc_feature (1)..(243): Ceres Seq. ID no. 12350295
MAYCGGSLRCMKLLIEAGADVNLIAPSGVILAQAVCDGSTEIVKFLLEVGADPNIPDEDGKIPIMYPAFNGHRDLVEILFPKTRPVSSLPDWSVDGIIRSMKDLFFKPQDAAVVEKKIADAKSQGKEAFARGEYPAAVYFYTMVLENDLDATAFANRSLCWLRLREGAKALLDAQQCKMIRPRWSKAWYREGAALSLLKDYQGAVNAFTEALKLDPASLEIKKALREATDSLANVGRSGEQNP

SEQ ID NO: 16039 - protein, 233 aa, Zea mays subsp. mays
  misc_feature (1)..(233): Ceres Seq. ID no. 12350296
MKLLIEAGADVNLIAPSGVILAQAVCDGSTEIVKFLLEVGADPNIPDEDGKIPIMYPAFNGHRDLVEILFPKTRPVSSLPDWSVDGIIRSMKDLFFKPQDAAVVEKKIADAKSQGKEAFARGEYPAAVYFYTMVLENDLDATAFANRSLCWLRLREGAKALLDAQQCKMIRPRWSKAWYREGAALSLLKDYQGAVNAFTEALKLDPASLEIKKALREATDSLANVGRSGEQNP

SEQ ID NO: 16040 - DNA, 795 bp, Zea mays subsp. mays
  misc_feature (1)..(795): Ceres Seq. ID no. 12350319
aacgtccagattgggaattccatcacgcctcgtcctctccgtcccgaccagaatcatcgcttcttcctgctccggcgatatccgccgccgcctgcggtccggcagagatgggaagcacttcctctatgctcacccaatacgatatcgaggaggtccaggaccattgtaaccacgcattctcgcagcaggagatcgtatcgctgtaccaccgcttctgccagctcgaccgtaacggtggtggcttcgtctccgctgacgagttcatgtcggtccctgagttcgccgtaaatcccctctcccagaggctcctgaggatgctggatgggctcaacttcaaggagtttgtagcatttttgtcagcttttagcccccgcacaagcctgcagcaaaagattgaatttattttcagggtttatgatactgactgcaacgggaaggttgcttttgatgacatcttgagcatcttgcgagatctgacaggttcatttatgacagagcaacagagacagaaagtcttgattcatgtgttagaagaagctggatacacaaaagattcacattttacactcccagactttatgaagattattggcaattctgagctcaagatggaggttgaagttcctattgactaaaaacctaacaagcatcatctagttgcttcaggcctgtatcttcatttgtgttaaattaagtagatggtatatttatatccttgcaactcaaatcatgatcagagatgtaattaaggaaacatatgtacctgctatttggaggtttagttggctcgcactc

SEQ ID NO: 16041 - protein, 210 aa, Zea mays subsp. mays
  misc_feature (1)..(210): Ceres Seq. ID no. 12350320
RPDWEFHHASSSPSRPESSLLPAPAISAAACGPAEMGSTSSMLTQYDIEEVQDHCNHAFSQQEIVSLYHRFCQLDRNGGGFVSADEFMSVPEFAVNPLSQRLLRMLDGLNFKEFVAFLSAFSPRTSLQQKIEFIFRVYDTDCNGKVAFDDILSILRDLTGSFMTEQQRQKVLIHVLEEAGYTKDSHFTLPDFMKIIGNSELKMEVEVPID

SEQ ID NO: 16042 - protein, 175 aa, Zea mays subsp. mays
  misc_feature (1)..(175): Ceres Seq. ID no. 12350321
MGSTSSMLTQYDIEEVQDHCNHAFSQQEIVSLYHRFCQLDRNGGGFVSADEFMSVPEFAVNPLSQRLLRMLDGLNFKEFVAFLSAFSPRTSLQQKIEFIFRVYDTDCNGKVAFDDILSILRDLTGSFMTEQQRQKVLIHVLEEAGYTKDSHFTLPDFMKIIGNSELKMEVEVPID

SEQ ID NO: 16043 - protein, 169 aa, Zea mays subsp. mays
  misc_feature (1)..(169): Ceres Seq. ID no. 12350322
MLTQYDIEEVQDHCNHAFSQQEIVSLYHRFCQLDRNGGGFVSADEFMSVPEFAVNPLSQRLLRMLDGLNFKEFVAFLSAFSPRTSLQQKIEFIFRVYDTDCNGKVAFDDILSILRDLTGSFMTEQQRQKVLIHVLEEAGYTKDSHFTLPDFMKIIGNSELKMEVEVPID

SEQ ID NO: 16044 - DNA, 1760 bp, Zea mays subsp. mays
  misc_feature (1)..(1760): Ceres Seq. ID no. 12350346
cccaaatcccaccacccttttccccttccaaccatcgggatctctccggcccgccatggaggtgttctactacctcgtgttcggcgcgctcgccgccatcgtggcggcgctggagctcgccaagtccggcaaggaccgcgtcgccacctccccggccttcaactcatttaagaacaactacatcctcgtttactccctcatgatgtctggggactggctgcaggggccctacgtgtactacctctacagccagtacggcttcgacaagggcgacattggccgcctcttcatcgccggcttcggttcctccatgctcttcggcaccatcgtcggatccctcgcggataagcaggggcggaagagggcgtgtgtcacgtactgcatcacctacatcctcagctgcatcaccaagcactctccccagtacaaagttcttatgattgggcgcgtccttggtggcattgccacttcgctgctcttctcagcgtttgagtcgtggctcgtggcagagcacaacaagaaaggatttgatccacaatggttgtcgataacattctccaaggctatatttcttggcaatggtctagtggccattgttgctggcctatttgcaaattttcttgctgataacatgggttttggtcctgtggctccatttgatgccgctgcttgcttcctagcaataggaatggcaattatcttatcatcatggggtgagaactacggagattcgtctgacagcaaggacttgataacccagttcaagggtgcagctaaagccattgcttcagacgagaagattgcattgcttggagccatacagtcattgtttgagggatcaatgtatactttcgttttcctgtggactcctgctctgagcccaaaggatgaggaaattcctcacggcttcatatttgctaccttcatgctttcctcgatgctgggtagctcaattgcttctcgtttgttagctaggaagctgaaggttgaaggttatatgcaaatcgtgttttcagtatcagcctttactcttttcctccctgttgtcaccaatttcctagtacctccctccggggagaaaggcggcagcatttcgttaggaggctgcttacagcttcttggtttctgtacctttgagtcatgtgttggtatattttggccatcaatcatgaagatgagatctcaatatattcccgaggaggcaagaagcacaatcatgaatttcttccgtataccgctcaacctgtttgtttgcgtggtactatacaatgtgaatgcattcccaataactgtcatgttcggcatgtgctccattttccttctcatggcagcagtcttgcagaggcgcttaatggctgtctctgatcttcacagatcgacaaaggctgtaatgatgactgcggaagatgagcctctaaacccttagagaacatcataaaagtgaatcggaagtttaaatggccccaatcctcgacttattcccatggggttgctgaataagattgatatctaaaagttgtaacgactgtaacagaacacggtttttactgtgttataggattggtgctagtgcagtttccggttgtcatggtagagaacatgatgtggctcctgactattgtgccacacacggcagagtagatctcggcatagcctccccacgatttccccatgtttttcttctcgtgttttctgataggattgatatttgtattcaagtgaagtatcatatggaaacccgcatcgtccattttggatgc

SEQ ID NO: 16045 - protein, 474 aa, Zea mays subsp. mays
  misc_feature (1)..(474): Ceres Seq. ID no. 12350347
PNPTTLFPFQPSGSLRPAMEVFYYLVFGALAAIVAALELAKSGKDRVATSPAFNSFKNNYILVYSLMMSGDWLQGPYVYYLYSQYGFDKGDIGRLFIAGFGSSMLFGTIVGSLADKQGRKRACVTYCITYILSCITKHSPQYKVLMIGRVLGGIATSLLFSAFESWLVAEHNKKGFDPQWLSITFSKAIFLGNGLVAIVAGLFANFLADNMGFGPVAPFDAAACFLAIGMAIILSSWGENYGDSSDSKDLITQFKGAAKAIASDEKIALLGAIQSLFEGSMYTFVFLWTPALSPKDEEIPHGFIFATFMLSSMLGSSIASRLLARKLKVEGYMQIVFSVSAFTLFLPVVTNFLVPPSGEKGGSISLGGCLQLLGFCTFESCVGIFWPSIMKMRSQYIPEEARSTIMNFFRIPLNLFVCVVLYNVNAFPITVMFGMCSIFLLMAAVLQRRLMAVSDLHRSTKAVMMTAEDEPLNP

SEQ ID NO: 16046 - protein, 456 aa, Zea mays subsp. mays
  misc_feature (1)..(456): Ceres Seq. ID no. 12350348
MEVFYYLVFGALAAIVAALELAKSGKDRVATSPAFNSFKNNYILVYSLMMSGDWLQGPYVYYLYSQYGFDKGDIGRLFIAGFGSSMLFGTIVGSLADKQGRKRACVTYCITYILSCITKHSPQYKVLMIGRVLGGIATSLLFSAFESWLVAEHNKKGFDPQWLSITFSKAIFLGNGLVAIVAGLFANFLADNMGFGPVAPFDAAACFLAIGMAIILSSWGENYGDSSDSKDLITQFKGAAKAIASDEKIALLGAIQSLFEGSMYTFVFLWTPALSPKDEEIPHGFIFATFMLSSMLGSSIASRLLARKLKVEGYMQIVFSVSAFTLFLPVVTNFLVPPSGEKGGSISLGGCLQLLGFCTFESCVGIFWPSIMKMRSQYIPEEARSTIMNFFRIPLNLFVCVVLYNVNAFPITVMFGMCSIFLLMAAVLQRRLMAVSDLHRSTKAVMMTAEDEPLNP

SEQ ID NO: 16047 - protein, 408 aa, Zea mays subsp. mays
  misc_feature (1)..(408): Ceres Seq. ID no. 12350349
MMSGDWLQGPYVYYLYSQYGFDKGDIGRLFIAGFGSSMLFGTIVGSLADKQGRKRACVTYCITYILSCITKHSPQYKVLMIGRVLGGIATSLLFSAFESWLVAEHNKKGFDPQWLSITFSKAIFLGNGLVAIVAGLFANFLADNMGFGPVAPFDAAACFLAIGMAIILSSWGENYGDSSDSKDLITQFKGAAKAIASDEKIALLGAIQSLFEGSMYTFVFLWTPALSPKDEEIPHGFIFATFMLSSMLGSSIASRLLARKLKVEGYMQIVFSVSAFTLFLPVVTNFLVPPSGEKGGSISLGGCLQLLGFCTFESCVGIFWPSIMKMRSQYIPEEARSTIMNFFRIPLNLFVCVVLYNVNAFPITVMFGMCSIFLLMAAVLQRRLMAVSDLHRSTKAVMMTAEDEPLNP

SEQ ID NO: 16048 - DNA, 1252 bp, Zea mays subsp. mays
  misc_feature (1)..(1252): Ceres Seq. ID no. 12350354
gatatctcattggagtgcaggactcggaggcagcccatttctaggcagcgcgtctcttcgcgcaccccccaattcgaacgacggagcacgacgcacgcagagccgcagagatccgtcacactgcaagttttgaaaactgaactgtaagatggcatcagcagagctttcccgtgaggaaaatgtgtacatggcgaagctcgccgagcaggcagagaggtacgaggaaatggttgagttcatggagaaggtagcgaaaactgttgactcggaggagctcactgtggaggagcgcaacctcctgtctgttgcatacaagaacgtcattggagcccgccgtgcctcatggcgcatcatctcctccatcgagcagaaggaggagggtcgaggcaatgaggaccgtgtaacactcatcaaggactaccgtggcaagattgaaactgagctcaccaagatctgtgatggcatcctcaagcttctcgaatctcaccttgtgccgtcttccaccgctcccgagtccaaggtcttctatctcaagatgaagggtgactactacagataccttgctgagttcaagactggagctgagagaaaggacgctgctgagaacaccatggtggcatacaaggctgcccaggacattgctttggctgagcttgctccaactcaccctattaggcttggactggcactcaacttctcagtgttctactatgagattctcaactcacccgatcgcgcctgcagtcttgcaaagcaggcttttgacgaggccatctcggaactggacaccctgagcgaggagtcctacaaggacagcactttgatcatgcagctccttcatgataacttgaccctatggacttctgacatctcggaggaccctgcggaagagatcagggaggcgcccaagcacgacttgagcgaggggcagtaaagccggctttacatgcctagaagctagtacctagtgtttgctgctgtctaatgacattatgcaatgtgatctggaccctggtttcttgggtgcgacgcttgtagcagccgtcttatgattatttgtcgggaaaatttgggggctccccatatgagatgctgccgggcaagacctcgccatcccccacctcgtttcaggcgggggacgctggagcctggtccggttgggttgggaagccccttaaactgttgtcgcttgcattttaaccttttcatcgccgttcagtggtcctaaatctatggctcgtctcagtggtct

SEQ ID NO: 16049 - protein, 261 aa, Zea mays subsp. mays
  misc_feature (1)..(261): Ceres Seq. ID no. 12350355
MASAELSREENVYMAKLAEQAERYEEMVEFMEKVAKTVDSEELTVEERNLLSVAYKNVIGARRASWRIISSIEQKEEGRGNEDRVTLIKDYRGKIETELTKICDGILKLLESHLVPSSTAPESKVFYLKMKGDYYRYLAEFKTGAERKDAAENTMVAYKAAQDIALAELAPTHPIRLGLALNFSVFYYEILNSPDRACSLAKQAFDEAISELDTLSEESYKDSTLIMQLLHDNLTLWTSDISEDPAEEIREAPKHDLSEGQ

SEQ ID NO: 16050 - protein, 248 aa, Zea mays subsp. mays
  misc_feature (1)..(248): Ceres Seq. ID no. 12350356
MAKLAEQAERYEEMVEFMEKVAKTVDSEELTVEERNLLSVAYKNVIGARRASWRIISSIEQKEEGRGNEDRVTLIKDYRGKIETELTKICDGILKLLESHLVPSSTAPESKVFYLKMKGDYYRYLAEFKTGAERKDAAENTMVAYKAAQDIALAELAPTHPIRLGLALNFSVFYYEILNSPDRACSLAKQAFDEAISELDTLSEESYKDSTLIMQLLHDNLTLWTSDISEDPAEEIREAPKHDLSEGQ

SEQ ID NO: 16051 - protein, 235 aa, Zea mays subsp. mays
  misc_feature (1)..(235): Ceres Seq. ID no. 12350357
MVEFMEKVAKTVDSEELTVEERNLLSVAYKNVIGARRASWRIISSIEQKEEGRGNEDRVTLIKDYRGKIETELTKICDGILKLLESHLVPSSTAPESKVFYLKMKGDYYRYLAEFKTGAERKDAAENTMVAYKAAQDIALAELAPTHPIRLGLALNFSVFYYEILNSPDRACSLAKQAFDEAISELDTLSEESYKDSTLIMQLLHDNLTLWTSDISEDPAEEIREAPKHDLSEGQ

SEQ ID NO: 16052 - DNA, 1320 bp, Zea mays subsp. mays
  misc_feature (1)..(1320): Ceres Seq. ID no. 12350438
aagatctccgtgctcgatagctcacatcgattcccgccagcgggttccctcaaaattttcggtctctcttcttcccacgggaccagcagtgttcgattcgagcagagatggcggcggcatgggcggtgctggctttgttcctcgtcgcggcgcaggtggcggcggcggcgccggtcacggcgccagcgttcctgtgggcgcccaaaaactacggattcagctctgatgatgctaaggaggtagtccattaccaaacaatctcaccaaagagcttagctaaatctgttctcgaggaaggtggctgtcaaacttcatgtgctcaagggaggatactcagaataatgttgatgttgccattgtttttattggctcaaagctgcaatcgtcagacatatctaaagataagcaagttgatccagctttagcagacacactgaagctctccttcacacgctcagagttttccatggcattcccctacgtttccaccacagtcgacgagagactagaggactcgttgctatccagctttgccgagaactgcaacaatggtttcggaagaaaccgcgtcacctacacagacacgtgtaccggtcaagatctgaagaaataccacaacatggatgccatcaatgacctggtagtgtcaggggtagcgtcaaggagagtcaaccacccaagtggacagaccgatgtaatcgtcttctgtagcggcgggttcgagaatccaggcactgcgaaatcagaaggagagctgctttcccagcttgtggacttgctggacttgtcgggagccaaatatacggtcctctatgcgtcccaaccgtctggtttgctggagagcccttcgggcctgccgctgggtaggcatctcgcggagaagaagactaacggcacgaaagctgtccagggcgaaaaatgcgatggcgagtgcctcgtcaaatctagtctcctcgaaggaactttcgttgggatagtgcttctcatcatcctgatatcaggactcatgtgcatgatggggatcgatactccctcgaggtttgaagctccccaggagtcttgatctctcccttggactgcagaatccgcggggcggttgtgacgagggcacgcggcggcgttgaggggggccggtgttctgttggtctgcactgtggatatatatcgtttagcttcccatttggaagggagtacgccttgtgtatttttttttaccgagccaactgtcactcacaatgtgctagaattttttggtgtaatatttggctatttgcgtttcgcgtctacggacaactaataagctgaggcctgaggcattgc

SEQ ID NO: 16053 - protein, 249 aa, Zea mays subsp. mays
  misc_feature (1)..(249): Ceres Seq. ID no. 12350439
MCSREDTQNNVDVAIVFIGSKLQSSDISKDKQVDPALADTLKLSFTRSEFSMAFPYVSTTVDERLEDSLLSSFAENCNNGFGRNRVTYTDTCTGQDLKKYHNMDAINDLVVSGVASRRVNHPSGQTDVIVFCSGGFENPGTAKSEGELLSQLVDLLDLSGAKYTVLYASQPSGLLESPSGLPLGRHLAEKKTNGTKAVQGEKCDGECLVKSSLLEGTFVGIVLLIILISGLMCMMGIDTPSRFEAPQES

SEQ ID NO: 16054 - protein, 198 aa, Zea mays subsp. mays
  misc_feature (1)..(198): Ceres Seq. ID no. 12350440
MAFPYVSTTVDERLEDSLLSSFAENCNNGFGRNRVTYTDTCTGQDLKKYHNMDAINDLVVSGVASRRVNHPSGQTDVIVFCSGGFENPGTAKSEGELLSQLVDLLDLSGAKYTVLYASQPSGLLESPSGLPLGRHLAEKKTNGTKAVQGEKCDGECLVKSSLLEGTFVGIVLLIILISGLMCMMGIDTPSRFEAPQES

SEQ ID NO: 16055 - protein, 147 aa, Zea mays subsp. mays
  misc_feature (1)..(147): Ceres Seq. ID no. 12350441
MDAINDLVVSGVASRRVNHPSGQTDVIVFCSGGFENPGTAKSEGELLSQLVDLLDLSGAKYTVLYASQPSGLLESPSGLPLGRHLAEKKTNGTKAVQGEKCDGECLVKSSLLEGTFVGIVLLIILISGLMCMMGIDTPSRFEAPQES

SEQ ID NO: 16056 - DNA, 1317 bp, Zea mays subsp. mays
  misc_feature (1)..(1317): Ceres Seq. ID no. 12350464
atctgcttactgtgatcaccaaagttgtgctgatacgatgtgcgattattgctctttcttctctagaatgttcctgccgatgctttataagagaaggttggtcagcatcgatctctgccagtgtctagctgagaacatggtgacctcaagcaagggcaaggtatgcgtaaccggggcctcaggctttgttgcctcttggcttatcaaacggctcctcgagtctggatatcatgtggtagggactgtcagggacccaggaaatcaccaaaagacagcccacctttggaaattacctggcgctaaagagaggctgcaaatcgtgcgagctgatctgttggaagaagggagcttcgacagcgccgtgatggcctgtgagggtgtattccacactgcatcccccgtcctcgctaaacccgactctactagcaaggaggacacgctcgtccctgcggtgaacggtactctgaacgtgctgagatcgtgcaagaagaacccgttcctgaaaagggtcgtccttacgtcttcgtcgtctgcggtgaggatcagggacgacggtggccagtccagtaacatctcgctggacgaaacgacatggagctccgtgccactctgcgagaagatgcatctatggtatgccctagccaaggtatttgcagagaaagcggcgtgggagttcgccaaggagaacggcatcgaccttgtgactgtcctcccgtcgttcgtgatcgggcccagtttgtcccacgaactatgcgttaccgcttcagacgtcctaggcctattccaaggcgacacggcaaggttcagctcgtacggaagaatggggtacgtccacatcgacgacgttgcgagcagccacatcctggtgtacgaggccccccaggccgccgggaggtacctgtgcagctcagtggtgctggacaacgacgagctggtctcctcgctcgcgaaacgctacccgatattccccataccccggaggctgaacagcccctacggcaagcagtcgtaccagctgaacacgtcgaagctgcaggggctgggcttcaagttcagaggggtgcaggagatgttcgacgactgcgtacagtcgctcaaagaccagggacacctgctggagtgccccctgtgaactgcgatggggtgcctccgcctgtgaacgcgccggttgggttgcgtcccgaacccgctgttaattcgtttttttttcttcaataattccacgtcatgtcacggtgtcctcgcgcagactgctactgtcagggcgtcatagctcacgggctctccggctacatgaataaaaatgtcacgctcgcc

SEQ ID NO: 16057 - protein, 376 aa, Zea mays subsp. mays
  misc_feature (1)..(376): Ceres Seq. ID no. 12350465
SAYCDHQSCADTMCDYCSFFSRMFLPMLYKRRLVSIDLCQCLAENMVTSSKGKVCVTGASGFVASWLIKRLLESGYHVVGTVRDPGNHQKTAHLWKLPGAKERLQIVRADLLEEGSFDSAVMACEGVFHTASPVLAKPDSTSKEDTLVPAVNGTLNVLRSCKKNPFLKRVVLTSSSSAVRIRDDGGQSSNISLDETTWSSVPLCEKMHLWYALAKVFAEKAAWEFAKENGIDLVTVLPSFVIGPSLSHELCVTASDVLGLFQGDTARFSSYGRMGYVHIDDVASSHILVYEAPQAAGRYLCSSVVLDNDELVSSLAKRYPIFPIPRRLNSPYGKQSYQLNTSKLQGLGFKFRGVQEMFDDCVQSLKDQGHLLECPL

SEQ ID NO: 16058 - protein, 364 aa, Zea mays subsp. mays
  misc_feature (1)..(364): Ceres Seq. ID no. 12350466
MCDYCSFFSRMFLPMLYKRRLVSIDLCQCLAENMVTSSKGKVCVTGASGFVASWLIKRLLESGYHVVGTVRDPGNHQKTAHLWKLPGAKERLQIVRADLLEEGSFDSAVMACEGVFHTASPVLAKPDSTSKEDTLVPAVNGTLNVLRSCKKNPFLKRVVLTSSSSAVRIRDDGGQSSNISLDETTWSSVPLCEKMHLWYALAKVFAEKAAWEFAKENGIDLVTVLPSFVIGPSLSHELCVTASDVLGLFQGDTARFSSYGRMGYVHIDDVASSHILVYEAPQAAGRYLCSSVVLDNDELVSSLAKRYPIFPIPRRLNSPYGKQSYQLNTSKLQGLGFKFRGVQEMFDDCVQSLKDQGHLLECPL

SEQ ID NO: 16059 - protein, 354 aa, Zea mays subsp. mays
  misc_feature (1)..(354): Ceres Seq. ID no. 12350467
MFLPMLYKRRLVSIDLCQCLAENMVTSSKGKVCVTGASGFVASWLIKRLLESGYHVVGTVRDPGNHQKTAHLWKLPGAKERLQIVRADLLEEGSFDSAVMACEGVFHTASPVLAKPDSTSKEDTLVPAVNGTLNVLRSCKKNPFLKRVVLTSSSSAVRIRDDGGQSSNISLDETTWSSVPLCEKMHLWYALAKVFAEKAAWEFAKENGIDLVTVLPSFVIGPSLSHELCVTASDVLGLFQGDTARFSSYGRMGYVHIDDVASSHILVYEAPQAAGRYLCSSVVLDNDELVSSLAKRYPIFPIPRRLNSPYGKQSYQLNTSKLQGLGFKFRGVQEMFDDCVQSLKDQGHLLECPL

SEQ ID NO: 16060 - DNA, 1553 bp, Zea mays subsp. mays
  misc_feature (1)..(1553): Ceres Seq. ID no. 12350501
aaaaaaacttcccctgtcacgagagtacgagaccacgccttccgtgggatcaatcggctagggtttcggagatgttcggccgccgccgaagaagagcgacaacacccggtactacgagatcctgggggtttccaaggacgcgtcacaggatgacctcaagaaggcctaccgcaaggccgccatcaagaaccaccccgacaagggcggcgaccccgagaagttcaaggagctagctcaggcttatgaggtcctcagcgaccctgaaaagagagagatctatgaccagtatggcgaggatgccctcaaggagggaatgggaggcggtggtgggatgcatgatccctttgacatattccagtcattctttggtggtggaagcccttttggaggtggcagcagtaggggcagaaggcaacgacggggagatgatgtggttcatcctctgaaggtttctctggaggatttgtacaatggcacatcaaagaagctctctctgtcccgcaatgtcctctgctccaagtgcaatggtaagggttccaagtctggagcttcgtcgaggtgtgctggttgtcaaggttctggcttcaaggtccaaatccggcagttgggacctggaatgattcagcaaatgcagcatccttgcaatgagtgcaagggttctggagagaccatcagcgataaggatagatgcccacaatgcaaaggtgataaagttgtgccggagaagaaagttcttgaagtggtagttgagaaaggtatgcagaacgggcagaagatcacattccctggcgaagctgatgaagcgcctgatactgccactggagatatcatctttgttctccagcagaaggagcatcccaagttcaagagaaagggcgatgacctcttctacgagcacacactgaccttgactgaatctctgtgtggcttccagtttgttctgactcacttggataacaggcagctgctgatcaaatcgaaccctggcgaagttgtgaagcctgattctttcaaggcaatcaacgatgaaggcatgcccatgtatcagaggcccttcatgaagggcaagctgtacatccacttctcggtggagttcccggactcgttgagcccggagcagtgcaaggccttggaggctgttctcccgcccaagccagtatcacagtacactgacatggagctggacgagtgcgaggagacaatgtcgtacgacgtgaacatcgaagaggagatgcggaggcggcaacagcagcaccaggaggcctacgacgaggatgatgatgtgccaggcggtgggcagagggtgcagtgcgcccagcagtaggcagcttgcggtaagtctacccgcttgtattggcctgatgatacttcggttacacgagtgcagttatcggtctgttagttcaagttctgcgtttggggtgttagatccaccagaattagatttgttcggcaagctacgctcgaatacatctcaatggtgacaccttaatggtgctctgaaaacgtttgctagcttctcatgaagttgacaactcacggcttgtttgtgt

SEQ ID NO: 16061 - protein, 336 aa, Zea mays subsp. mays
  misc_feature (1)..(336): Ceres Seq. ID no. 12350502
MGGGGGMHDPFDIFQSFFGGGSPFGGGSSRGRRQRRGDDVVHPLKVSLEDLYNGTSKKLSLSRNVLCSKCNGKGSKSGASSRCAGCQGSGFKVQIRQLGPGMIQQMQHPCNECKGSGETISDKDRCPQCKGDKVVPEKKVLEVVVEKGMQNGQKITFPGEADEAPDTATGDIIFVLQQKEHPKFKRKGDDLFYEHTLTLTESLCGFQFVLTHLDNRQLLIKSNPGEVVKPDSFKAINDEGMPMYQRPFMKGKLYIHFSVEFPDSLSPEQCKALEAVLPPKPVSQYTDMELDECEETMSYDVNIEEEMRRRQQQHQEAYDEDDDVPGGGQRVQCAQQ

SEQ ID NO: 16062 - protein, 330 aa, Zea mays subsp. mays
  misc_feature (1)..(330): Ceres Seq. ID no. 12350503
MHDPFDIFQSFFGGGSPFGGGSSRGRRQRRGDDVVHPLKVSLEDLYNGTSKKLSLSRNVLCSKCNGKGSKSGASSRCAGCQGSGFKVQIRQLGPGMIQQMQHPCNECKGSGETISDKDRCPQCKGDKVVPEKKVLEVVVEKGMQNGQKITFPGEADEAPDTATGDIIFVLQQKEHPKFKRKGDDLFYEHTLTLTESLCGFQFVLTHLDNRQLLIKSNPGEVVKPDSFKAINDEGMPMYQRPFMKGKLYIHFSVEFPDSLSPEQCKALEAVLPPKPVSQYTDMELDECEETMSYDVNIEEEMRRRQQQHQEAYDEDDDVPGGGQRVQCAQQ

SEQ ID NO: 16063 - protein, 235 aa, Zea mays subsp. mays
  misc_feature (1)..(235): Ceres Seq. ID no. 12350504
MIQQMQHPCNECKGSGETISDKDRCPQCKGDKVVPEKKVLEVVVEKGMQNGQKITFPGEADEAPDTATGDIIFVLQQKEHPKFKRKGDDLFYEHTLTLTESLCGFQFVLTHLDNRQLLIKSNPGEVVKPDSFKAINDEGMPMYQRPFMKGKLYIHFSVEFPDSLSPEQCKALEAVLPPKPVSQYTDMELDECEETMSYDVNIEEEMRRRQQQHQEAYDEDDDVPGGGQRVQCAQQ

SEQ ID NO: 16064 - DNA, 1060 bp, Zea mays subsp. mays
  misc_feature (1)..(1060): Ceres Seq. ID no. 12350534
gcaaaccgcgtctcgcgcgaagaatccgcatttccccttccccgcaccgcaccgcaccgcacccaacccccgtcggagagagagatggcatcggtggcggagatgcagcccctcgcgccggcggggtaccgccgcgcgccggagatgaaggagaaggtggaggcgtcggtggtggacctggaggccgggaccggggagacgctgtacccggggatctcgcgcggggagagcgccctccgatggggcttcgtccgcaaggtctacggcatcctcgctgcgcagctgctcctcaccaccgccgtctccgccctcaccgttctccaccccaccctcaacgccacgctctccgactccccgggcctcgcgctcgtgctcgccgtcctgcccttcatcctgatgatcccattgtaccattatcagcacaagcacccacacaatttcgttttcctgggtctgttcacgttgtgcttgagcttcagcatcggcgtggcttgtgctaacacccaaggaaaaatcgttctggaggctttagtgctgacggctggcgtggtggtttctctgactgcgtatgctttctgggcgtcaaagaagggcaaggaatttgggtacctggggcctatcctgtcttccgcgcttactatcctcgtcctaactagctttcttcaggttttcttcccactgggacccgtgtcggtgggcttgttcggtggtctaggggctctggtcttctcaggcttcatcctgtacgacaccgagaacctgatcaagcgccacacctacgacgagtacatctgggcgtcggttgggctgtacctcgacatcctgaacctgttcctctccatcctgaacatgctcaggagcatgcaatccgacaactagcctcttgatcgaacacggtatacccccatggtaaatgcggtcctgtgctctggttgttagaggacgggatcgacgtgcgacatatgtattgtgtgagcccactcgtgtcaacactgcaaacaattgtggtcatgtcaccttgtatgttcttggtcacttttcaaacaattgtaagtacctc

SEQ ID NO: 16065 - protein, 292 aa, Zea mays subsp. mays
  misc_feature (1)..(292): Ceres Seq. ID no. 12350535
ANRVSREESAFPLPRTAPHRTQPPSEREMASVAEMQPLAPAGYRRAPEMKEKVEASVVDLEAGTGETLYPGISRGESALRWGFVRKVYGILAAQLLLTTAVSALTVLHPTLNATLSDSPGLALVLAVLPFILMIPLYHYQHKHPHNFVFLGLFTLCLSFSIGVACANTQGKIVLEALVLTAGVVVSLTAYAFWASKKGKEFGYLGPILSSALTILVLTSFLQVFFPLGPVSVGLFGGLGALVFSGFILYDTENLIKRHTYDEYIWASVGLYLDILNLFLSILNMLRSMQSDN

SEQ ID NO: 16066 - protein, 264 aa, Zea mays subsp. mays
  misc_feature (1)..(264): Ceres Seq. ID no. 12350536
MASVAEMQPLAPAGYRRAPEMKEKVEASVVDLEAGTGETLYPGISRGESALRWGFVRKVYGILAAQLLLTTAVSALTVLHPTLNATLSDSPGLALVLAVLPFILMIPLYHYQHKHPHNFVFLGLFTLCLSFSIGVACANTQGKIVLEALVLTAGVVVSLTAYAFWASKKGKEFGYLGPILSSALTILVLTSFLQVFFPLGPVSVGLFGGLGALVFSGFILYDTENLIKRHTYDEYIWASVGLYLDILNLFLSILNMLRSMQSDN

SEQ ID NO: 16067 - protein, 258 aa, Zea mays subsp. mays
  misc_feature (1)..(258): Ceres Seq. ID no. 12350537
MQPLAPAGYRRAPEMKEKVEASVVDLEAGTGETLYPGISRGESALRWGFVRKVYGILAAQLLLTTAVSALTVLHPTLNATLSDSPGLALVLAVLPFILMIPLYHYQHKHPHNFVFLGLFTLCLSFSIGVACANTQGKIVLEALVLTAGVVVSLTAYAFWASKKGKEFGYLGPILSSALTILVLTSFLQVFFPLGPVSVGLFGGLGALVFSGFILYDTENLIKRHTYDEYIWASVGLYLDILNLFLSILNMLRSMQSDN

SEQ ID NO: 16068 - DNA, 1403 bp, Zea mays subsp. mays
  misc_feature (1)..(1403): Ceres Seq. ID no. 12350590
aacttcttgccttctcgcgctcgcctccgtttcgtgtcggctcgctctaaacgtgagatcggggaggtggtggacttggggtcgttgtggtatcggcggcgagccgcgggggcctagggtttcctgccttcctggtttggatccgcgccctggcccatgggatccggaggcttcgcggccgcggtggccgcgtgcccctccgccgccgaggccttccttaagtactatggtattgtatcaggaggtacaagtgcggagtcaagacaagcattggttgagctttcactagctatagacggaattgaaggaatgagggatgtgatatttgctgatattccaaagctcattccatttattgatctggaggatatgagcctattcagttgcttctacgattttgttttcttcatctgccgtgaaaagggtcaaaagagtgtcactattcagagagctgtagcagcatggaggattgttctaagtggaaggttccgtttgcttgatcgatggtgtaacttcgttgagaagtaccaacgccataacatatccgaggatacttggcagcagctgctagctttcagcaggtgtgtaaatgaagatctggaaggttatgacccacgaggtgcttggcctgttctgattgatgattttgttgagcaaatgcacagaatttatcactccactgactgcagcagtgcgatggaatcacagtgtaacatttccagtacccttaaaggactggatcctcaacctggatcaaagaggaaatgcccacacctcaaatccaatgaagaggatgtagagctttcggatagctttacgcgctctgtccatcttacaccaataaagcgactcaaggaaagccatgacgccagatatggagcgggggaatccgccaaaactacccatttctctaatagttcctctggtggttaccacgaggatatgaatttacacaactcaagaggttaccttcagaactccccctgtaatgttgaggatgccctgtccaaagggtttgagggttgtatttcgatgaaatgtccattttgatgtaacaaatttcgtgtcagcccagaagctatacattcccttttagcggcaaaatcatcctgtgtgtgtatctagtcattttgtgcaaaaaaaatgcagtaattgaatgcattttttttaaaatgctttaaagtgtattgatcagcatcggacctgtttttagaggcatcggtatgaagggagggctgttggttgtgtttgcttgacagcaaatccctcccattcaataccccgcactttctgaaaattgcgacttccatattcccttcccttgagctttgttaagacagtattgtattacaagatctgaatcgctgcaagcgtgcagaataatgaatgccatctttctatgc

SEQ ID NO: 16069 - protein, 297 aa, Zea mays subsp. mays
  misc_feature (1)..(297): Ceres Seq. ID no. 12350591
MGSGGFAAAVAACPSAAEAFLKYYGIVSGGTSAESRQALVELSLAIDGIEGMRDVIFADIPKLIPFIDLEDMSLFSCFYDFVFFICREKGQKSVTIQRAVAAWRIVLSGRFRLLDRWCNFVEKYQRHNISEDTWQQLLAFSRCVNEDLEGYDPRGAWPVLIDDFVEQMHRIYHSTDCSSAMESQCNISSTLKGLDPQPGSKRKCPHLKSNEEDVELSDSFTRSVHLTPIKRLKESHDARYGAGESAKTTHFSNSSSGGYHEDMNLHNSRGYLQNSPCNVEDALSKGFEGCISMKCPF

SEQ ID NO: 16070 - protein, 246 aa, Zea mays subsp. mays
  misc_feature (1)..(246): Ceres Seq. ID no. 12350592
MRDVIFADIPKLIPFIDLEDMSLFSCFYDFVFFICREKGQKSVTIQRAVAAWRIVLSGRFRLLDRWCNFVEKYQRHNISEDTWQQLLAFSRCVNEDLEGYDPRGAWPVLIDDFVEQMHRIYHSTDCSSAMESQCNISSTLKGLDPQPGSKRKCPHLKSNEEDVELSDSFTRSVHLTPIKRLKESHDARYGAGESAKTTHFSNSSSGGYHEDMNLHNSRGYLQNSPCNVEDALSKGFEGCISMKCPF

SEQ ID NO: 16071 - protein, 226 aa, Zea mays subsp. mays
  misc_feature (1)..(226): Ceres Seq. ID no. 12350593
MSLFSCFYDFVFFICREKGQKSVTIQRAVAAWRIVLSGRFRLLDRWCNFVEKYQRHNISEDTWQQLLAFSRCVNEDLEGYDPRGAWPVLIDDFVEQMHRIYHSTDCSSAMESQCNISSTLKGLDPQPGSKRKCPHLKSNEEDVELSDSFTRSVHLTPIKRLKESHDARYGAGESAKTTHFSNSSSGGYHEDMNLHNSRGYLQNSPCNVEDALSKGFEGCISMKCPF

SEQ ID NO: 16072 - DNA, 955 bp, Zea mays subsp. mays
  misc_feature (1)..(955): Ceres Seq. ID no. 12350622
agagtgttcctccggttagtagctgaccggccggcgacgtacgcactgcgctagcaatggcgcctccacggcggccgagcatggggcggcagaaaatcgagatccggcgcatagagagcgacgaggcacggcaggtgtgcttctccaagcggcgcgcggggctgttcaagaaggccagcgagctctccatcctatgcggcgccgacgtggccgccgtcgtcttctcccccgccggcaaggccttctcgttcggccacccctcggtggagtccgtcgtcgaccgcttcctcgcctcgtccaccccctcgcctgccggtgccggtgccggtgccggccactcctccgccggcggcggcgaggaccgcgcggtctccgagctgaaccgccagcacggcgacctgcgcgcgcagctggacgcggagaaggcgaggcaggagcgcgcggacgaggccatccggaaggagcgcgaggccgggagccccgccatggcgtggatcgacgcggacctgggcgccatgggccacgacgacctggtcgcgttctgggccgcgctggccggcgtgcaggccgctgtggccgccagcgccgatcagctgctgcgtgacgcgctgctcgtcgggcgcaggggccgacagcagcagcagccagcggcccagcttggcggtggtggtgtggccttcgacgtcggcgcgtttggcatcggcgtgcaggtgccgccgcctccaggattcgctggcgtcgacctgcaggggttcgggggacaggctgctgccatcctcggcgccggcggcccctcgtgaggtggtggaatggaatgcatgtgcgcgcagttcgcttgagttgttgcattcgcatggaggacgcgtcgtgcctatgttaggtttggttgataacatcgcaaatttgcaaaacagtgttttaaattaaaatttgatgtgtgcttcctgcttctctc

SEQ ID NO: 16073 - protein, 247 aa, Zea mays subsp. mays
  misc_feature (1)..(247): Ceres Seq. ID no. 12350623
MAPPRRPSMGRQKIEIRRIESDEARQVCFSKRRAGLFKKASELSILCGADVAAVVFSPAGKAFSFGHPSVESVVDRFLASSTPSPAGAGAGAGHSSAGGGEDRAVSELNRQHGDLRAQLDAEKARQERADEAIRKEREAGSPAMAWIDADLGAMGHDDLVAFWAALAGVQAAVAASADQLLRDALLVGRRGRQQQQPAAQLGGGGVAFDVGAFGIGVQVPPPPGFAGVDLQGFGGQAAAILGAGGPS

SEQ ID NO: 16074 - protein, 239 aa, Zea mays subsp. mays
  misc_feature (1)..(239): Ceres Seq. ID no. 12350624
MGRQKIEIRRIESDEARQVCFSKRRAGLFKKASELSILCGADVAAVVFSPAGKAFSFGHPSVESVVDRFLASSTPSPAGAGAGAGHSSAGGGEDRAVSELNRQHGDLRAQLDAEKARQERADEAIRKEREAGSPAMAWIDADLGAMGHDDLVAFWAALAGVQAAVAASADQLLRDALLVGRRGRQQQQPAAQLGGGGVAFDVGAFGIGVQVPPPPGFAGVDLQGFGGQAAAILGAGGPS

SEQ ID NO: 16075 - protein, 136 aa, Zea mays subsp. mays
  misc_feature (1)..(136): Ceres Seq. ID no. 12350625
MRRRRGRRRLLPRRQGLLVRPPLGGVRRRPLPRLVHPLACRCRCRCRPLLRRRRRGPRGLRAEPPARRPARAAGRGEGEAGARGRGHPEGARGREPRHGVDRRGPGRHGPRRPGRVLGRAGRRAGRCGRQRRSAAA

SEQ ID NO: 16076 - DNA, 1273 bp, Zea mays subsp. mays
  misc_feature (1)..(1273): Ceres Seq. ID no. 12350633
agattcatcggagatcatcgggaggagagcactaactgggcgacgcacaggcacagcatggggcagcggttcaatctgaccatgtcgctcctcgccgtcgtcgtcctagcgcttctcgccgcgcccgtgtgcctccgccgcgcaggtcaagacgaccgacacgcgctggagcttccagctccctttacccagcggggtcagcggcgccgagagcctcgcgttcgacggcaagggcgaggggccctacgccggcgtctcagacggccgtgtcctcaagtggggcggcagcgccgtcggctggaccacgttcgcgcacagcgccaactacaggaagatccccctgtgcacggccggcgtagtgccgtcggcggagaccgagagcatgtgcggccgccccctgggcctccagttccacgccaagaccggcgacctctacatcgccgacgcctacctggggctcacgcgggtcggcccgggaggcggcgaggccgaggtgctggcgaccggtgcggacgacggcgtcccgttcaacttcgtcaacggcctcgacgtcgacgaggccaccggcgacgtctacttcaccgactcgagcgcgacgtacccgaggaggttcaacacagagatcatgatgaacgcggacgcgacggggcggctgctcaggtacgacgcgcgcacgaggagcgtctccgtgctcaaggccggactgccgtacccgaacggcgtggcggtcagccccgacggcgagcaggtcgtggtcgcgcacaccgtgccctgccaggcgttcaggtacttcctccggggcgcccggaaggggcagtacgagctgctggcggacctgccgggctacccggacaacgtgaggcgggatggcaggggtggctactgggtggcgctgaaccaggagaagcagcggctggacgcgactccggcgacgggccccgtgaagcacctcgtcggggtccgcctggacgcccacggcgtggaggtggaggagcttacggcggccaagggtgtcacgctgagcgacgtggcggagacgaaggggaagctgtggctgggctccatcgagctcgagtacgtcggactcgttgcttgagcggctgcgtaccacactagcaacgttagctatggtcatgttatgttaggaattaggattaggaattaggattaggaattggattagcaagtacgagcgagtagcctttagtttcatgtcttcgcgtgacaaacatcgttattttaccgattatcaataaatttcatttattgcttg

SEQ ID NO: 16077 - protein, 371 aa, Zea mays subsp. mays
  misc_feature (1)..(371): Ceres Seq. ID no. 12350634
RFIGDHREESTNWATHRHSMGQRFNLTMSLLAVVVLALLAAPVCLRRAGQDDRHALELPAPFTQRGQRRREPRVRRQGRGALRRRLRRPCPQVGRQRRRLDHVRAQRQLQEDPPVHGRRSAVGGDREHVRPPPGPPVPRQDRRPLHRRRLPGAHAGRPGRRRGRGAGDRCGRRRPVQLRQRPRRRRGHRRRLLHRLERDVPEEVQHRDHDERGRDGAAAQVRRAHEERLRAQGRTAVPERRGGQPRRRAGRGRAHRALPGVQVLPPGRPEGAVRAAGGPAGLPGQREAGWQGWLLGGAEPGEAAAGRDSGDGPREAPRRGPPGRPRRGGGGAYGGQGCHAERRGGDEGEAVAGLHRARVRRTRCLSGCVPH

SEQ ID NO: 16078 - protein, 352 aa, Zea mays subsp. mays
  misc_feature (1)..(352): Ceres Seq. ID no. 12350635
MGQRFNLTMSLLAVVVLALLAAPVCLRRAGQDDRHALELPAPFTQRGQRRREPRVRRQGRGALRRRLRRPCPQVGRQRRRLDHVRAQRQLQEDPPVHGRRSAVGGDREHVRPPPGPPVPRQDRRPLHRRRLPGAHAGRPGRRRGRGAGDRCGRRRPVQLRQRPRRRRGHRRRLLHRLERDVPEEVQHRDHDERGRDGAAAQVRRAHEERLRAQGRTAVPERRGGQPRRRAGRGRAHRALPGVQVLPPGRPEGAVRAAGGPAGLPGQREAGWQGWLLGGAEPGEAAAGRDSGDGPREAPRRGPPGRPRRGGGGAYGGQGCHAERRGGDEGEAVAGLHRARVRRTRCLSGCVPH

SEQ ID NO: 16079 - protein, 344 aa, Zea mays subsp. mays
  misc_feature (1)..(344): Ceres Seq. ID no. 12350636
MSLLAVVVLALLAAPVCLRRAGQDDRHALELPAPFTQRGQRRREPRVRRQGRGALRRRLRRPCPQVGRQRRRLDHVRAQRQLQEDPPVHGRRSAVGGDREHVRPPPGPPVPRQDRRPLHRRRLPGAHAGRPGRRRGRGAGDRCGRRRPVQLRQRPRRRRGHRRRLLHRLERDVPEEVQHRDHDERGRDGAAAQVRRAHEERLRAQGRTAVPERRGGQPRRRAGRGRAHRALPGVQVLPPGRPEGAVRAAGGPAGLPGQREAGWQGWLLGGAEPGEAAAGRDSGDGPREAPRRGPPGRPRRGGGGAYGGQGCHAERRGGDEGEAVAGLHRARVRRTRCLSGCVPH

SEQ ID NO: 16080 - DNA, 983 bp, Zea mays subsp. mays
  misc_feature (1)..(983): Ceres Seq. ID no. 12350640
accagagagccacagcaccagcggcaggcacccaaagcccaggaccgccaatggccgaccgcgtgtaccccgccgccaagccgaacccgcctccaggcgcggcgggcaacagcaacggcgcgcaggcgtcgtcgttccctgcgcccaagtcgcagatgtaccagcggcccatctaccgtccgcaggcccccgcgaagcggcagcgcgggcggtcgtgccggtgcagcttgtgctgctgcttctgctgggcgctggtggtggtgatcctgctggcgttcgtggccgcggtgtgcggcggcgtcttctacctgctgtaccggccgcagcggccgtcgttcagcgtgtcgtcagtgcggctggcgtcgctgaacctgacgtcgtcggcgacggcgcccgtgctgagcgacgccatcacgctgaccgtgacggcgcggaacccgaacaagaagatggtgtacctgtacgacgacctgaccctgctggtggccacggccgccaacgccgtgccgctggggagcgccaccgtgcccgggttcgcgcacgcggccggcaacaccaccgtgctgaccgccaccgtctccgccagcgcggtgggcgtggaccccagcggcgccagctccgacatcaagcggtccggcggcgggtcgttctccgtggtggtggacgcggacaccagcgccggcgtccgggtgggcgggcttaagacgaagaagatcggcatccaggtgcactgcgagggcatcaagctgacggcaccgcctccgccaccgccggcgcccaagagggccaaggggaagaacagcaccgccgcgctcgcgcctgctccggcgccgtccgccgccgacgcgacgccggcgaagacggccacggtgagcacggcggcgcactcgtgcaaggttagggtccgcgtcaagatctggaagtggactttctaggtacgggcagcgggaggataggacacacctttaggggctgcagcgcgc

SEQ ID NO: 16081 - protein, 310 aa, Zea mays subsp. mays
  misc_feature (1)..(310): Ceres Seq. ID no. 12350641
QRATAPAAGTQSPGPPMADRVYPAAKPNPPPGAAGNSNGAQASSFPAPKSQMYQRPIYRPQAPAKRQRGRSCRCSLCCCFCWALVVVILLAFVAAVCGGVFYLLYRPQRPSFSVSSVRLASLNLTSSATAPVLSDAITLTVTARNPNKKMVYLYDDLTLLVATAANAVPLGSATVPGFAHAAGNTTVLTATVSASAVGVDPSGASSDIKRSGGGSFSVVVDADTSAGVRVGGLKTKKIGIQVHCEGIKLTAPPPPPPAPKRAKGKNSTAALAPAPAPSAADATPAKTATVSTAAHSCKVRVRVKIWKWTF

SEQ ID NO: 16082 - protein, 294 aa, Zea mays subsp. mays
  misc_feature (1)..(294): Ceres Seq. ID no. 12350642
MADRVYPAAKPNPPPGAAGNSNGAQASSFPAPKSQMYQRPIYRPQAPAKRQRGRSCRCSLCCCFCWALVVVILLAFVAAVCGGVFYLLYRPQRPSFSVSSVRLASLNLTSSATAPVLSDAITLTVTARNPNKKMVYLYDDLTLLVATAANAVPLGSATVPGFAHAAGNTTVLTATVSASAVGVDPSGASSDIKRSGGGSFSVVVDADTSAGVRVGGLKTKKIGIQVHCEGIKLTAPPPPPPAPKRAKGKNSTAALAPAPAPSAADATPAKTATVSTAAHSCKVRVRVKIWKWTF

SEQ ID NO: 16083 - protein, 259 aa, Zea mays subsp. mays
  misc_feature (1)..(259): Ceres Seq. ID no. 12350643
MYQRPIYRPQAPAKRQRGRSCRCSLCCCFCWALVVVILLAFVAAVCGGVFYLLYRPQRPSFSVSSVRLASLNLTSSATAPVLSDAITLTVTARNPNKKMVYLYDDLTLLVATAANAVPLGSATVPGFAHAAGNTTVLTATVSASAVGVDPSGASSDIKRSGGGSFSVVVDADTSAGVRVGGLKTKKIGIQVHCEGIKLTAPPPPPPAPKRAKGKNSTAALAPAPAPSAADATPAKTATVSTAAHSCKVRVRVKIWKWTF

SEQ ID NO: 16084 - DNA, 1685 bp, Zea mays subsp. mays
  misc_feature (1)..(1685): Ceres Seq. ID no. 12350656
atagtcattttagcttgtgcacgctttgctgctctaaggtttaccgggcaaacactggacgacaggtgaacggggatgcacagttaggagattgagggagcgagaagggagggaggcaaaggagacagcatatgggatgtatttacagatgacaaagaacatgtcttagacagaagcaatggagaaattgcagttgatcactaccatcgatacaaggaagacattgagctcatggcaagtctaggttttagcgcatacagattttctatatcttgggcgcgtatatttcctgatggcttggggggaaaggtcaatgatcaaggagtcgccttctataatgacctcatcaactttatgatttcgaaaggtattgagccttacgcaactctatatcattgggatcttccaaacaatcttcagaagactctggggggctggatttctgacaagattgtggagtactttgcattgtatgcagaagcttgctttgcaaattttggagacagagtaaagcattggataacaatcaatgaacctctccaaactgcaatcaatggttatgggattggaatttttgcacctggaggatgccaaggtgaaactgctagatgttacttggctgcccatcaccaaatcttggctcatgctgctgctgttgatgtttatagaagaaaattcaaggctgcacaaggtggtgaagtagggttggttgttgattgtgaatgggcagagccattttctgaaaatgtggaagaccaaattgctgcacagcggaggcttgactttcaacttggatggtacttagatccaatatattttggtgattacccagaaagcatgcgtcaacgactgggcagtgatcttccaaccttctcagagaaagataaagagttcatgaggaacaaaattgattttgttggagtaaatcattatacttcaagactcattgctcatctccaaaatccaaacgatgtttatttctaccaagtgcaacaaatggagcgaatagaaaaatggaatagtggtgaaaaaattggtgaaagggctgcatctgaatggcttttcatagttccttggggccttcataagtcacttaattatatagcgaagaagtacaataatccagcaatttatgttactgagaatggcatggatgaagaggacgatcaatccgcaacgcttgaccaggtcctaaacgacacgacgagggtcggttacttcaaagggtacctcaattcagttgcgcaagcgatcaaggacggagctgatgtccgcgggtactttgcgtggtcgttcctggacaacttcgagtgggcaatgggctacaccaagaggttcggcatagtctacgtggactacaagaaggggctgtccaggcacccgaaagcatcggcgctgtggttctcgcgcttgctcaagggcgaggctggcactggcacaagctgagcgaactgcacgcagcatgcaagcacagaacgtcgtcgttattacaatataaatattccacacaactagacgttttctcctgttgttgtatcgtactactgtacagtaagcgccaataagctagcctcagatgtgtgctgcctgcctatacctctagtggctgccattgatccagcactagctgaaatgtacccggcctccaagaatcagcaccagaatatatgctttgaattgaactc

SEQ ID NO: 16085 - protein, 404 aa, Zea mays subsp. mays
  misc_feature (1)..(404): Ceres Seq. ID no. 12350657
MASLGFSAYRFSISWARIFPDGLGGKVNDQGVAFYNDLINFMISKGIEPYATLYHWDLPNNLQKTLGGWISDKIVEYFALYAEACFANFGDRVKHWITINEPLQTAINGYGIGIFAPGGCQGETARCYLAAHHQILAHAAAVDVYRRKFKAAQGGEVGLVVDCEWAEPFSENVEDQIAAQRRLDFQLGWYLDPIYFGDYPESMRQRLGSDLPTFSEKDKEFMRNKIDFVGVNHYTSRLIAHLQNPNDVYFYQVQQMERIEKWNSGEKIGERAASEWLFIVPWGLHKSLNYIAKKYNNPAIYVTENGMDEEDDQSATLDQVLNDTTRVGYFKGYLNSVAQAIKDGADVRGYFAWSFLDNFEWAMGYTKRFGIVYVDYKKGLSRHPKASALWFSRLLKGEAGTGTS

SEQ ID NO: 16086 - protein, 363 aa, Zea mays subsp. mays
  misc_feature (1)..(363): Ceres Seq. ID no. 12350658
MISKGIEPYATLYHWDLPNNLQKTLGGWISDKIVEYFALYAEACFANFGDRVKHWITINEPLQTAINGYGIGIFAPGGCQGETARCYLAAHHQILAHAAAVDVYRRKFKAAQGGEVGLVVDCEWAEPFSENVEDQIAAQRRLDFQLGWYLDPIYFGDYPESMRQRLGSDLPTFSEKDKEFMRNKIDFVGVNHYTSRLIAHLQNPNDVYFYQVQQMERIEKWNSGEKIGERAASEWLFIVPWGLHKSLNYIAKKYNNPAIYVTENGMDEEDDQSATLDQVLNDTTRVGYFKGYLNSVAQAIKDGADVRGYFAWSFLDNFEWAMGYTKRFGIVYVDYKKGLSRHPKASALWFSRLLKGEAGTGTS

SEQ ID NO: 16087 - protein, 202 aa, Zea mays subsp. mays
  misc_feature (1)..(202): Ceres Seq. ID no. 12350659
MRQRLGSDLPTFSEKDKEFMRNKIDFVGVNHYTSRLIAHLQNPNDVYFYQVQQMERIEKWNSGEKIGERAASEWLFIVPWGLHKSLNYIAKKYNNPAIYVTENGMDEEDDQSATLDQVLNDTTRVGYFKGYLNSVAQAIKDGADVRGYFAWSFLDNFEWAMGYTKRFGIVYVDYKKGLSRHPKASALWFSRLLKGEAGTGTS

SEQ ID NO: 16088 - DNA, 1460 bp, Zea mays subsp. mays
  misc_feature (1)..(1460): Ceres Seq. ID no. 12350660
gactagctattagggttttgtttgcaaaccccaattcgattcccaaccacatcagccgccgccgtcccgtcaccaccaccaaccttggtagcagccgccgtccggtcatcaccaccaccttggtagccgccgccgaagcgcgccgcgggcgcgggcgctcgcgatggctaaccgcacggaccccctcgcgaagagcatccatgggacgaacccacaaaacctggtggagaagatcgtgcgctccaagatctatcagagcacctactggaaggagcaatgcttcggcctcaccgcagagacgctagtcgacaaggccatggagctcgaccacaccggcggaacctacggcggcaaccgcaagcccacccctttcctctgcctcgcgctcaagatgctgcagatccaaccagacaaggacatcgtagtcgagttcatcaagaacgaggattacaagtatgttcgtgttctcggggccttctacctgcgtctcactggcacaattgctgacgtctaccagtatcttgagccgctctacaacgactaccgcaagatcaggcacaagctcagcgatggacagttcacacttacccatgttgatgagttcattgatgagttgctgaccaaggattactcctgtgatacagccatgcctcgcatccagaaaagatgggttcttgaagcgtctggaactctggaaccgagaagaagtgcacttgaggacgattttgaggaagaagaggaagacaaggaggaacagcctatggaaattgatgaaccgaatggtcgtgaaaatgataatcatcgtggaaggagccttgccagggaacgggatagggactgggaccatgacaggaaacatgaaaggcataacagggacaaagattatgatagagatcgggattatgatagggactatgggagagggcgggaaagacaccgagatagagatcgtgaaagagacagaaaccgggatagggatagagaccgtcaccgcctgcgagatgatgattacaatcgcaacagggatagggacagggagagggatggtagggaaagggagcgccgagacagagaccgtggcaggcacaggagccgctcaaggagcagagatcgacgggacagagaccgtgaagatggagagtaccgcaggaggcgtggtcgtggcagtgtaagtcctcgaggacgtggtgaagacggtggcccaagagaggaacctaagaggaagaaggaaaagaaagagaagggtgaaggaaatgctccggacccgaatgaccctgagatcatagaaatgaacaagctacgggcctcactggggttgaaaccactaaagtagtttacacgagtaatgttcaacttgacctgcatccaaccttttttgtgctggactttttcagcttgatgtaactaaacttttgtattgatgtggttatatattcatcagggcttccatttctgtctgc

SEQ ID NO: 16089 - protein, 389 aa, Zea mays subsp. mays
  misc_feature (1)..(389): Ceres Seq. ID no. 12350661
MANRTDPLAKSIHGTNPQNLVEKIVRSKIYQSTYWKEQCFGLTAETLVDKAMELDHTGGTYGGNRKPTPFLCLALKMLQIQPDKDIVVEFIKNEDYKYVRVLGAFYLRLTGTIADVYQYLEPLYNDYRKIRHKLSDGQFTLTHVDEFIDELLTKDYSCDTAMPRIQKRWVLEASGTLEPRRSALEDDFEEEEEDKEEQPMEIDEPNGRENDNHRGRSLARERDRDWDHDRKHERHNRDKDYDRDRDYDRDYGRGRERHRDRDRERDRNRDRDRDRHRLRDDDYNRNRDRDRERDGRERERRDRDRGRHRSRSRSRDRRDRDREDGEYRRRRGRGSVSPRGRGEDGGPREEPKRKKEKKEKGEGNAPDPNDPEIIEMNKLRASLGLKPLK

SEQ ID NO: 16090 - protein, 338 aa, Zea mays subsp. mays
  misc_feature (1)..(338): Ceres Seq. ID no. 12350662
MELDHTGGTYGGNRKPTPFLCLALKMLQIQPDKDIVVEFIKNEDYKYVRVLGAFYLRLTGTIADVYQYLEPLYNDYRKIRHKLSDGQFTLTHVDEFIDELLTKDYSCDTAMPRIQKRWVLEASGTLEPRRSALEDDFEEEEEDKEEQPMEIDEPNGRENDNHRGRSLARERDRDWDHDRKHERHNRDKDYDRDRDYDRDYGRGRERHRDRDRERDRNRDRDRDRHRLRDDDYNRNRDRDRERDGRERERRDRDRGRHRSRSRSRDRRDRDREDGEYRRRRGRGSVSPRGRGEDGGPREEPKRKKEKKEKGEGNAPDPNDPEIIEMNKLRASLGLKPLK

SEQ ID NO: 16091 - protein, 313 aa, Zea mays subsp. mays
  misc_feature (1)..(313): Ceres Seq. ID no. 12350663
MLQIQPDKDIVVEFIKNEDYKYVRVLGAFYLRLTGTIADVYQYLEPLYNDYRKIRHKLSDGQFTLTHVDEFIDELLTKDYSCDTAMPRIQKRWVLEASGTLEPRRSALEDDFEEEEEDKEEQPMEIDEPNGRENDNHRGRSLARERDRDWDHDRKHERHNRDKDYDRDRDYDRDYGRGRERHRDRDRERDRNRDRDRDRHRLRDDDYNRNRDRDRERDGRERERRDRDRGRHRSRSRSRDRRDRDREDGEYRRRRGRGSVSPRGRGEDGGPREEPKRKKEKKEKGEGNAPDPNDPEIIEMNKLRASLGLKPLK

SEQ ID NO: 16092 - DNA, 1064 bp, Zea mays subsp. mays
  misc_feature (1)..(1064): Ceres Seq. ID no. 12350680
gctgcattttttttccatccagccgtgcggccgcaatgattcctccccgtctccccctcgccctccgaaagcgaagtgagcttctgcagataaggaaggaggccgacattatcgcaacacgccacctcatctaatcgaggcgagagacaggggaggaggaggaaaacggaagaaatcttcatcaagcaacaggaagcgagagcgtgcgatttcttttttcttcctttccggtgacgccaggtgaatcaccagccggccggtgcgccaaaggctagggttccgcggggcgcgggtgcgggctcgactttcgtagcctcgccgccggcgcgcgggaaccggatgctgctaagctgcgggtcgctctcctcctgggtgcgccgcttcgtcgcctgcgttggtggttgttttggttgtgcccagcctactccgataatagctgttgatgagcccacaaaaggtttaagaattcaagggcgctcagtaaaaagacacaatttatctgacgacttttggagttcaagcccgcacgaaatggagaacagtgccttgcaatcccgacacagtatgtcctcaatcagcactgctgcacaacctaatgatcagcatgcttctggaagtagcagctccccaaatgaatttgtaaatcaaggtcttctactatggcaccagactagacagcagtggattggaaaacgaagacataattctcagggtcaacaaagtcaaggaccaaaaataagttgtaatgctacatacgagagcctgctcgggagctcgaaaccatttccacaaccgatccctcttggtgaaatggtgggtttcctcgtgatcagctgggagcaggaaggcctatacgattagagttggttattggaagtgtgctgtttcaagtcatgaatcgctgaaatgtacgcaacttctaggctgcgaaagcttgtgacctcatggatgtggactgtctcggagacaggatgacatccctcttatgcaaatgtaaaatattctttgttattttattactagtaattgtgtttacagcgttcagtgtaggagttcattgtttt

SEQ ID NO: 16093 - protein, 173 aa, Zea mays subsp. mays
  misc_feature (1)..(173): Ceres Seq. ID no. 12350681
MLLSCGSLSSWVRRFVACVGGCFGCAQPTPIIAVDEPTKGLRIQGRSVKRHNLSDDFWSSSPHEMENSALQSRHSMSSISTAAQPNDQHASGSSSSPNEFVNQGLLLWHQTRQQWIGKRRHNSQGQQSQGPKISCNATYESLLGSSKPFPQPIPLGEMVGFLVISWEQEGLYD

SEQ ID NO: 16094 - protein, 109 aa, Zea mays subsp. mays
  misc_feature (1)..(109): Ceres Seq. ID no. 12350682
MENSALQSRHSMSSISTAAQPNDQHASGSSSSPNEFVNQGLLLWHQTRQQWIGKRRHNSQGQQSQGPKISCNATYESLLGSSKPFPQPIPLGEMVGFLVISWEQEGLYD

SEQ ID NO: 16095 - protein, 98 aa, Zea mays subsp. mays
  misc_feature (1)..(98): Ceres Seq. ID no. 12350683
MSSISTAAQPNDQHASGSSSSPNEFVNQGLLLWHQTRQQWIGKRRHNSQGQQSQGPKISCNATYESLLGSSKPFPQPIPLGEMVGFLVISWEQEGLYD

SEQ ID NO: 16096 - DNA, 1143 bp, Zea mays subsp. mays
  misc_feature (1)..(1143): Ceres Seq. ID no. 12350692
actcccaccttcttggagacaccgccaggcgccatcttccggccgctgcccgcctgccccccccgggaggtcgaactgccttctagagccctctcctgttttcaggcgaatgtgcaggtagcttgacgtctgatgaacgctcagccatgctgctgatgctacacgaaactcttcctttcgtgaggccgacgagttcttgccgggacccaaaactctccgagaagagtgcctctgctctccacggtaaattgggatgcagtgcggtctgcagttcagcggaaggccatcgtgtacagaagccacacattgttcacagctacaaagttagcttcactaggaccagccatcatctgtgtaaaagcttaaacgagagaactacaaggcactgcctgcatcggttccatgttaatgcttcgcccgatgacgacgacttccgctcgtcgcgtaacatagcgatcagtttgttcaagcggtacaagaatgtcattgaccgaggaggtggagaaaacctaaatgagtttgtcagtgctggagtgaccgcttacgcactagggtgtacagatgaggggcttagaaaggaacttatggatattgaagattctggtctggagattgaaggcttagggtccttggggggcaccagcctcaagttcaaagtccactcctttgagatccgtgagtgcatcctgtggctcagtatagtgttcgtcacaatactgtgcacaccacaactaacagttatcaggtggtctccgaacccaccggtgtcagccgacgtcttgcatcagtggaaaggattctgtgctctaatcgcgaacgcttactatgtcaaaggaatggcatggttgccagtgaaaaccttgcagctggaacagatggctgtcacaggaagttcagagaaaccatcagtagttgctagccgcatgcagttagttttcagcacattagaggtagtcagcccacagtggccaagagtgtgattagatgaaagcaataccatcaaacaaaggtctgcagttttattctgaccaaaagatatgcatgtccaagttagcaagttcaaacctctgtcatggtgcaaacagatgatactatatccatttgaactctaatgtcaaataaaaatgctaatgtacttgttgg

SEQ ID NO: 16097 - protein, 277 aa, Zea mays subsp. mays
  misc_feature (1)..(277): Ceres Seq. ID no. 12350693
MLLMLHETLPFVRPTSSCRDPKLSEKSASALHGKLGCSAVCSSAEGHRVQKPHIVHSYKVSFTRTSHHLCKSLNERTTRHCLHRFHVNASPDDDDFRSSRNIAISLFKRYKNVIDRGGGENLNEFVSAGVTAYALGCTDEGLRKELMDIEDSGLEIEGLGSLGGTSLKFKVHSFEIRECILWLSIVFVTILCTPQLTVIRWSPNPPVSADVLHQWKGFCALIANAYYVKGMAWLPVKTLQLEQMAVTGSSEKPSVVASRMQLVFSTLEVVSPQWPRV

SEQ ID NO: 16098 - protein, 274 aa, Zea mays subsp. mays
  misc_feature (1)..(274): Ceres Seq. ID no. 12350694
MLHETLPFVRPTSSCRDPKLSEKSASALHGKLGCSAVCSSAEGHRVQKPHIVHSYKVSFTRTSHHLCKSLNERTTRHCLHRFHVNASPDDDDFRSSRNIAISLFKRYKNVIDRGGGENLNEFVSAGVTAYALGCTDEGLRKELMDIEDSGLEIEGLGSLGGTSLKFKVHSFEIRECILWLSIVFVTILCTPQLTVIRWSPNPPVSADVLHQWKGFCALIANAYYVKGMAWLPVKTLQLEQMAVTGSSEKPSVVASRMQLVFSTLEVVSPQWPRV

SEQ ID NO: 16099 - DNA, 1095 bp, Zea mays subsp. mays
  misc_feature (1)..(1095): Ceres Seq. ID no. 12350695
agatgcgctctgcatcttctcccctctggaacacactcccacacagaactagagctccaaggccatggagaaatggagaagacgcaggcacttgctgcttgctgttgcagccgtggccctggtggcagcaataacgctgccgtccgcggaggcgaagctgtccccggactactaccggtcgacgtgcccggacgtggaggcaatcgtgcaggcagtggtggccaagaaggtgaatgagaccttcgtcacagtcccggccacgctcaggctcttcttccacgactgcttcgtcgagggctgtgatgcgtcggtcatcatcgcgtcccgcgacaacgacgccgagaaggacgcgcccgacaacgtgtccctcgctggcgacggcttcgacaccgtggtgcgcgccaaggccgaggtcgagaagaagtgccccggcgtggtctcctgcgccgatatcctcgccatcgccgccagggacgtcgtcaccatgtcgtccggcccccactggaccgtccagcttggccggcttgacgggctcgtctccaaggccggcaacgtcgcgggcaagttgccgggacccaacatgcgcgtcaaggacctcgccgccctgttcgccaagcacaacctcaccacgctcgacatggtcgcgctctcgggagcgcacaccgtcgggttcgcgcactgcacccgcttcgcggaccgcctctaccaccacggcgtcggcgacagcgatggcgcgtcggtggacccgtcgtacaaccctgcgtacgcgcggcagctaatggacgcctgcccgcctggcgtcggcgcagacatcgccgtcaatatggacccaatcacaccgaccgccttcgataacgcctactacgccaacctcgccggcggcctgggattgttcatctcggaccaggcgctgtacagcgacggcgcgtcgcaaccggcggtgagggacttcgctaagaaccagacccgcttcttcgaggcgttcaaggacgccatggtcaagctgggcagtgttggggtgaagaccggccggcacggggagatcaggagtgactgcaccgcattcaactagtagatcgaccacccattcttttg

SEQ ID NO: 16100 - protein, 335 aa, Zea mays subsp. mays
  misc_feature (1)..(335): Ceres Seq. ID no. 12350696
MEKWRRRRHLLLAVAAVALVAAITLPSAEAKLSPDYYRSTCPDVEAIVQAVVAKKVNETFVTVPATLRLFFHDCFVEGCDASVIIASRDNDAEKDAPDNVSLAGDGFDTVVRAKAEVEKKCPGVVSCADILAIAARDVVTMSSGPHWTVQLGRLDGLVSKAGNVAGKLPGPNMRVKDLAALFAKHNLTTLDMVALSGAHTVGFAHCTRFADRLYHHGVGDSDGASVDPSYNPAYARQLMDACPPGVGADIAVNMDPITPTAFDNAYYANLAGGLGLFISDQALYSDGASQPAVRDFAKNQTRFFEAFKDAMVKLGSVGVKTGRHGEIRSDCTAFN

SEQ ID NO: 16101 - protein, 195 aa, Zea mays subsp. mays
  misc_feature (1)..(195): Ceres Seq. ID no. 12350697
MSSGPHWTVQLGRLDGLVSKAGNVAGKLPGPNMRVKDLAALFAKHNLTTLDMVALSGAHTVGFAHCTRFADRLYHHGVGDSDGASVDPSYNPAYARQLMDACPPGVGADIAVNMDPITPTAFDNAYYANLAGGLGLFISDQALYSDGASQPAVRDFAKNQTRFFEAFKDAMVKLGSVGVKTGRHGEIRSDCTAFN

SEQ ID NO: 16102 - protein, 181 aa, Zea mays subsp. mays
  misc_feature (1)..(181): Ceres Seq. ID no. 12350698
MRPSSQSRPRSGSSSTTASSRAVMRRSSSRPATTTPRRTRPTTCPSLATASTPWCAPRPRSRRSAPAWSPAPISSPSPPGTSSPCRPAPTGPSSLAGLTGSSPRPATSRASCRDPTCASRTSPPCSPSTTSPRSTWSRSRERTPSGSRTAPASRTASTTTASATAMARRWTRRTTLRTRGS

SEQ ID NO: 16103 - DNA, 1117 bp, Zea mays subsp. mays
  misc_feature (1)..(1117): Ceres Seq. ID no. 12350716
atgagctgcttccagcccggaaccgaggctaactccgccagccgactcggaccggtggtggtgtcgtggaagctgcgcagccacgggcgggcctgttcgctgttcgcagccgtgcctcgatcgccgcccgtgccagaggtctctctccaatggcggtgacgagcgccgcagcccgccgcttcctcgcgctcgcgcccgcccggggaccccgcgccttctggtcggcctcgtgtccacccgaccccgacgcaccttccgcctcgtcgacgtctaccgacaacaacagcaggaggaagaagaaggagccgtccgggtccgcccaccaccgcctcgccgccgtcatggacgccgtcaacgagcgcaagctcccacccgagctcagtgggcgcggcaacgcagtaaggtctgaaactgacattgtaaatgtcgttgaacaaagaatatggcattcaatggaggaagggcactttgaaaatctaccagggaagggcaaacccttaaacctcacttcaaatcctcatgccgatcctgccgaagacaccctttacaggatactttcaaagaatggttgtgcacctgaatgggttgaactgaataaggaaattcgtggcatgatcttgagctggaggtcggcattaaggaaagcatgggcaaaccgctctgaagatgatgattctaactggagtgatgacagcagggctctccaggagcgaattcgccagataaatgataaggttttccggtacaacctgatagtaccctttgggcgtcagttgtttggtctgaactgggacaaggagctggacaagttgaaggaagaataaaggacaaagaggtggacacattggtgaacatagcatggaggacttttgttgtatcaaaatgacctgtaactaggaatacctgataggacatacacatacttaagaaaaaccatgaaagctgagtataggtatttacacgtaggcttttattagtttatatatttttggagaaccaagttttccggtgtttccggtgctgtagccgattttgtgataaaactctgtcacatgggtaaaacctgagataatttcttagcggtaaaactcgatctatgccacatgggctaagctcc

SEQ ID NO: 16104 - protein, 224 aa, Zea mays subsp. mays
  misc_feature (1)..(224): Ceres Seq. ID no. 12350717
MAVTSAAARRFLALAPARGPRAFWSASCPPDPDAPSASSTSTDNNSRRKKKEPSGSAHHRLAAVMDAVNERKLPPELSGRGNAVRSETDIVNVVEQRIWHSMEEGHFENLPGKGKPLNLTSNPHADPAEDTLYRILSKNGCAPEWVELNKEIRGMILSWRSALRKAWANRSEDDDSNWSDDSRALQERIRQINDKVFRYNLIVPFGRQLFGLNWDKELDKLKEE

SEQ ID NO: 16105 - protein, 160 aa, Zea mays subsp. mays
  misc_feature (1)..(160): Ceres Seq. ID no. 12350718
MDAVNERKLPPELSGRGNAVRSETDIVNVVEQRIWHSMEEGHFENLPGKGKPLNLTSNPHADPAEDTLYRILSKNGCAPEWVELNKEIRGMILSWRSALRKAWANRSEDDDSNWSDDSRALQERIRQINDKVFRYNLIVPFGRQLFGLNWDKELDKLKEE

SEQ ID NO: 16106 - protein, 123 aa, Zea mays subsp. mays
  misc_feature (1)..(123): Ceres Seq. ID no. 12350719
MEEGHFENLPGKGKPLNLTSNPHADPAEDTLYRILSKNGCAPEWVELNKEIRGMILSWRSALRKAWANRSEDDDSNWSDDSRALQERIRQINDKVFRYNLIVPFGRQLFGLNWDKELDKLKEE

SEQ ID NO: 16107 - DNA, 1036 bp, Zea mays subsp. mays
  misc_feature (1)..(1036): Ceres Seq. ID no. 12350771
ctaaacccaatcccccttccaccccaccgacaaggagatcttccgcggcagtagtccccgccgcgtgctcgtcggcatgaagaagacgctcgtcttctacacgggccgcgcgccgcgcggaggcaagacgccgtgggtcatgcacgagtaccgcctcgagggcagcctgccgcccaacctccaccgcggggccaaggacgaatgggctgtgtgtaaggtgatcaacaaagacttggcgggcaaggctgggcagcaacaaatggcgccgccgcacgccgtgtccgtgggcatggagcgcagcgactcgctggccttcctcgacgacctggtgctcgacaacgccgacgacctgcccccgctcatcgactcgacaacgtacgccgcggcggggacgaccacgacgacgaacgacgacagcggcgggtaccaacaagccaccaaggcggagccgcagccgcatctgcccgcgccgagcaacagcccgtaccagcagcaggccatacggaggcactgcaaggcggaggcgccggcgccggcgatggttctgagcccgtcgcgcgagacgccgggcgcggacatgttccagctccagcatgtggacgagctgctccagctggacggcggcttcatggaggactactacaacatgaacatgtggaaggtctagttaggccgctcggatcgtcggttgcctggcggatgatggattgattagttggttgattggattaacctgttattagacgaagaggagtggaaaggccggccgcgccgattggcatggacgaggtctgtctgacgaagatgtgtcgagacctcgccggcggtgtggtttgtgataattggttagttagctaatcttcattagctagctagctagctagctactgattagaacagctagcagtagtgtgtaaccgcgcgcgtgtcgttgcctctgctggtcgagaggattgaagcacgcatgtgtacataataataggtaggagtcgtcgtcgttgagtgatgagaaaaatgaatgaaacatactatntgt

SEQ ID NO: 16108 - protein, 196 aa, Zea mays subsp. mays
  misc_feature (1)..(196): Ceres Seq. ID no. 12350772
MKKTLVFYTGRAPRGGKTPWVMHEYRLEGSLPPNLHRGAKDEWAVCKVINKDLAGKAGQQQMAPPHAVSVGMERSDSLAFLDDLVLDNADDLPPLIDSTTYAAAGTTTTTNDDSGGYQQATKAEPQPHLPAPSNSPYQQQAIRRHCKAEAPAPAMVLSPSRETPGADMFQLQHVDELLQLDGGFMEDYYNMNMWKV

SEQ ID NO: 16109 - protein, 175 aa, Zea mays subsp. mays
  misc_feature (1)..(175): Ceres Seq. ID no. 12350773
MHEYRLEGSLPPNLHRGAKDEWAVCKVINKDLAGKAGQQQMAPPHAVSVGMERSDSLAFLDDLVLDNADDLPPLIDSTTYAAAGTTTTTNDDSGGYQQATKAEPQPHLPAPSNSPYQQQAIRRHCKAEAPAPAMVLSPSRETPGADMFQLQHVDELLQLDGGFMEDYYNMNMWKV

SEQ ID NO: 16110 - protein, 135 aa, Zea mays subsp. mays
  misc_feature (1)..(135): Ceres Seq. ID no. 12350774
MAPPHAVSVGMERSDSLAFLDDLVLDNADDLPPLIDSTTYAAAGTTTTTNDDSGGYQQATKAEPQPHLPAPSNSPYQQQAIRRHCKAEAPAPAMVLSPSRETPGADMFQLQHVDELLQLDGGFMEDYYNMNMWKV

SEQ ID NO: 16111 - DNA, 1086 bp, Zea mays subsp. mays
  misc_feature (1)..(1086): Ceres Seq. ID no. 12350847
atcacctcagtcctcacactgacatttcactctcggctgctggagtgtcggccgctgccatctgcctgccgctcactcccacgcgccgcaatgtgccactccccactcggcgccgccaccaccaccgcgggggcgctagcgctcctcttcctcctgccgctagcctcggccgccgccgccggcggcggcaccgcggcgaaggcgacgcccaacatcacggcgctcatgtccaagggcgggtgcaaggcgttcgcgtcgctgctggacaagtcccccgacgctctgtcggcgttcgagtcggcggtgagcggcggcgtgacggcgttctgcccgacggacgaggccgtgcgcgggttcatgcccagctaccggaacctgagcgcggacggcaaggcgtcgctgctgctgtttccacgcggtgcccgtgtactacacgctgcggggcctgaaatccagcaacgggcccatgaacacgctggccaccgacggcgccgccagcaactacaacctgacggtgcagaacgcgggcgaccaggtgacgctgcggacgccggcggccgacgcgccggcccgcgtgcgctccaccgtctacgacagggaccccgtcgccatctacgccgtggacgcggtgctggagcccgtggagctgttcgaccccgtggcggacgcgccgacccctgcgcccgcgccggcgccggcgctggcgcctaggtccgccaagcggacgcggcaccagcggcggcgcggagcggacgcgcctggcccggccgccgccgacgcctcgccggccgaccagaggaaggactacaagaagaacgcggcggccccgtgccgcacgcggtggctcgcgaccgccgccgccgctatcgccgtggccgccgccttggctgcttagggcggggtggtttaaagattgctcggccacccagctgttgtctttggatggagacgccatgcctttttggttnttggtcannnncggttgcttattacttcatcgattactgccgttgttagtatgaagtatgaacaaggtcgatatgtgacctggtggtgtacatcaaaactcaaatcttgttgattcgt

SEQ ID NO: 16112 - protein, 236 aa, Zea mays subsp. mays
  misc_feature (1)..(236): Ceres Seq. ID no. 12350848
ITSVLTLTFHSRLLECRPLPSACRSLPRAAMCHSPLGAATTTAGALALLFLLPLASAAAAGGGTAAKATPNITALMSKGGCKAFASLLDKSPDALSAFESAVSGGVTAFCPTDEAVRGFMPSYRNLSADGKASLLLFPRGARVLHAAGPEIQQRAHEHAGHRRRRQQLQPDGAERGRPGDAADAGGRRAGPRALHRLRQGPRRHLRRGRGAGARGAVRPRGGRADPCARAGAGAGA

SEQ ID NO: 16113 - protein, 206 aa, Zea mays subsp. mays
  misc_feature (1)..(206): Ceres Seq. ID no. 12350849
MCHSPLGAATTTAGALALLFLLPLASAAAAGGGTAAKATPNITALMSKGGCKAFASLLDKSPDALSAFESAVSGGVTAFCPTDEAVRGFMPSYRNLSADGKASLLLFPRGARVLHAAGPEIQQRAHEHAGHRRRRQQLQPDGAERGRPGDAADAGGRRAGPRALHRLRQGPRRHLRRGRGAGARGAVRPRGGRADPCARAGAGAGA

SEQ ID NO: 16114 - protein, 161 aa, Zea mays subsp. mays
  misc_feature (1)..(161): Ceres Seq. ID no. 12350850
MSKGGCKAFASLLDKSPDALSAFESAVSGGVTAFCPTDEAVRGFMPSYRNLSADGKASLLLFPRGARVLHAAGPEIQQRAHEHAGHRRRRQQLQPDGAERGRPGDAADAGGRRAGPRALHRLRQGPRRHLRRGRGAGARGAVRPRGGRADPCARAGAGAGA

SEQ ID NO: 16115 - DNA, 1745 bp, Zea mays subsp. mays
  misc_feature (1)..(1745): Ceres Seq. ID no. 12350851
ctctctctccgtgcggtgactgactgggcaaccgccaccgccctccccctccgtcgggtcttcgccggcgccaccagcgacgactgggcggtctgtgtccctcttcgccggagacgatcacccaccaggtggatgtcgattttttggttgacaagttgaaggttacgaactactttgatcctgaggtgaagaagtaatgatccgcccaggctcaagggactcgcaaaattatgataacaataatcaaagagttcatccgcaaccagttgatgagaacatgaatcagaacggggactcagtggacactatgatcgggaggatattcaacaacatatcctctttaaaatctgcatacattcagctgcaggaagcccacaccccatatgaccctgacaagatccaggaagctgataaacttgtcatagaggagcttacaaatctttcagagctcaagcatgcttacagagaaaaacatcctaagccaatagctgcatcccctcaagattcacgcttgctctctgaaatacaagagcagcagaatttgttgaagacctacgaggtcatggtaaagaagttccagtcccagatccagactagagacactgagataacccatttacagcagcaaattgatgaagctaaacttcggaaatcaaagctagagaagaaactgaaacagaggggcctacttaacagggagtcagaggaatctgacgaagaagagaactacttttccattgaattgacgccaagtttgtttacatctgctgtcgataatgcataccagtccatacatgaattttcaaagcctttgatcaacatgatgaaggctgcaggttgggatcttgatggggctgccaatgcgatcgaacctggtgtggtttacacaagaagggctcacaagaagtttgcttttgaatcctatatttgccaaagaatgttcagtgggttccaagaggagagcttttctatcaaggattctaacatcagtgtttccaatgaggctttcttccaccaattccttgcagtgcgagccatggatcctctggatgtcctgagccagaaccctgattcagtattcggaaagttctgtagaagtaagtaccttttgcttgtgcatcaaaaaatggaaggttctttcttcggcaacatggatcagaggaactacgtcatgagcggtggccatccaaggacacctttctaccaggcattcctaaagctagcaaagtccatatggttgctgcacaggttggcgtactccttcgacccaaaggcaaaggtgtttcaagtgaaaaaggggagtgaattttcggatatccacatggagagcgtcgtgaagaacatcatcctagaagaaggtgcggagaggccaaaagtcggcctgatggtgatgcctggtttcctgatcgggaccagcgtcatacagtcccgtgtgtacctttcagatgccaagtgtgctgactgactgaagattgcacaaggagcttgagggggtgcctttgctccttgggagagctaccagcagcataagtttatggtggactgttgtcttgtatgtaatgcgtgagacctgttgcttcaatgccgtgctacgtgattctgtccagtgggcttgtggtttccccatgttgcatttccatgtgttatacggctatgtaattctgctcagtgttttgcacacattatcagggtgattgattgatcgtgtaggctgcacttttcatctgaaatgtgtttgcccaatc

SEQ ID NO: 16116 - protein, 422 aa, Zea mays subsp. mays
  misc_feature (1)..(422): Ceres Seq. ID no. 12350852
MIRPGSRDSQNYDNNNQRVHPQPVDENMNQNGDSVDTMIGRIFNNISSLKSAYIQLQEAHTPYDPDKIQEADKLVIEELTNLSELKHAYREKHPKPIAASPQDSRLLSEIQEQQNLLKTYEVMVKKFQSQIQTRDTEITHLQQQIDEAKLRKSKLEKKLKQRGLLNRESEESDEEENYFSIELTPSLFTSAVDNAYQSIHEFSKPLINMMKAAGWDLDGAANAIEPGVVYTRRAHKKFAFESYICQRMFSGFQEESFSIKDSNISVSNEAFFHQFLAVRAMDPLDVLSQNPDSVFGKFCRSKYLLLVHQKMEGSFFGNMDQRNYVMSGGHPRTPFYQAFLKLAKSIWLLHRLAYSFDPKAKVFQVKKGSEFSDIHMESVVKNIILEEGAERPKVGLMVMPGFLIGTSVIQSRVYLSDAKCAD

SEQ ID NO: 16117 - protein, 395 aa, Zea mays subsp. mays
  misc_feature (1)..(395): Ceres Seq. ID no. 12350853
MNQNGDSVDTMIGRIFNNISSLKSAYIQLQEAHTPYDPDKIQEADKLVIEELTNLSELKHAYREKHPKPIAASPQDSRLLSEIQEQQNLLKTYEVMVKKFQSQIQTRDTEITHLQQQIDEAKLRKSKLEKKLKQRGLLNRESEESDEEENYFSIELTPSLFTSAVDNAYQSIHEFSKPLINMMKAAGWDLDGAANAIEPGVVYTRRAHKKFAFESYICQRMFSGFQEESFSIKDSNISVSNEAFFHQFLAVRAMDPLDVLSQNPDSVFGKFCRSKYLLLVHQKMEGSFFGNMDQRNYVMSGGHPRTPFYQAFLKLAKSIWLLHRLAYSFDPKAKVFQVKKGSEFSDIHMESVVKNIILEEGAERPKVGLMVMPGFLIGTSVIQSRVYLSDAKCAD

SEQ ID NO: 16118 - protein, 385 aa, Zea mays subsp. mays
  misc_feature (1)..(385): Ceres Seq. ID no. 12350854
MIGRIFNNISSLKSAYIQLQEAHTPYDPDKIQEADKLVIEELTNLSELKHAYREKHPKPIAASPQDSRLLSEIQEQQNLLKTYEVMVKKFQSQIQTRDTEITHLQQQIDEAKLRKSKLEKKLKQRGLLNRESEESDEEENYFSIELTPSLFTSAVDNAYQSIHEFSKPLINMMKAAGWDLDGAANAIEPGVVYTRRAHKKFAFESYICQRMFSGFQEESFSIKDSNISVSNEAFFHQFLAVRAMDPLDVLSQNPDSVFGKFCRSKYLLLVHQKMEGSFFGNMDQRNYVMSGGHPRTPFYQAFLKLAKSIWLLHRLAYSFDPKAKVFQVKKGSEFSDIHMESVVKNIILEEGAERPKVGLMVMPGFLIGTSVIQSRVYLSDAKCAD

SEQ ID NO: 16119 - DNA, 1134 bp, Zea mays subsp. mays
  misc_feature (1)..(1134): Ceres Seq. ID no. 12350920
atcaagcacaagcacgccacgcgatccacacacggcaagcaacgcccagggctcgtgctcgccccgcgacccgcgaaagatctgtgctggttcgctcgctcgctcgcgccgcgccgccgcgtgggggtgccgatgagctgcgcggggcaggccggcgggtggctgctcgactacgcgctggtggagtaggagatccagggctccgagttcatctacatggtcgacgacccggccgtctccagcgtgatactggggtttgatgctcccaggaaagaggacggcgtccaggacaaccccggcgccaagaagagatcccggccggagtccagcgcgccacccggcaccaaggcttgccgtgagaagctccggcgagacaggctcaacgaaaggttcaacgagctctgtgccatcttggaacccggcaagccacccaaggccgacaaagtcgctatcctaagcgacgctgcccgtctcctgaaccagctgcagggcgaggcccagaagcttaagcaatcgaacgaatcgctccaggagtccatcaagagtcttaaggctgagaagtccgagctgcgagacgagaagacgaggctcaaggctgagaaggagaggttggagcagatgctcaagggcgtcgtcagccacgccgcggtggctgctccggggcccttcgtcccgcaccctgctgcggtcgctccatctttccaccaccacccggcggcgtttgctcaggctggaaagttcgtcccgtaccccagctacccgccgccggctgcgttctggcagtggataccgccgacgtccctcgacacgaccaaggaccccgcacactggccgccggtcgcctagccgacctaccacctcaccgtggcatcattcatcggtgatgcgttgccgtgtgtactgaatttgatcgaagcatgcctgaaaaaagaaaccttggctgctgctcgtgtcaaggacgtgatgtgctgaagttcaggcgatctaggtcggctggagaagtctatgtaacagccataatgctaaagcaatgaaagtgatatattaattgaatcgggctagtgtttcctgaaactacggttatttagacattgcctggaaggctagaacaatgcaaacttgggtaacattgtg

SEQ ID NO: 16120 - protein, 209 aa, Zea mays subsp. mays
  misc_feature (1)..(209): Ceres Seq. ID no. 12350921
MVDDPAVSSVILGFDAPRKEDGVQDNPGAKKRSRPESSAPPGTKACREKLRRDRLNERFNELCAILEPGKPPKADKVAILSDAARLLNQLQGEAQKLKQSNESLQESIKSLKAEKSELRDEKTRLKAEKERLEQMLKGVVSHAAVAAPGPFVPHPAAVAPSFHHHPAAFAQAGKFVPYPSYPPPAAFWQWIPPTSLDTTKDPAHWPPVA

SEQ ID NO: 16121 - DNA, 1240 bp, Zea mays subsp. mays
  misc_feature (1)..(1240): Ceres Seq. ID no. 12350926
aactagtgcattttaaatcccaagacgtctctcactcttcagccgctttacaactccccaccccatcccatccacacacacttcacccagcgcggcggccgccggccgccggcaatggaggccgtggcgcacagcggcgactacctttggcggttcgtggcggagacagagtggtacaacgaggttgtcctcagcgccgtggcgccaggcgactggtggcgcggcctgccgcacccggtgcagtcatggatgcgcaactgcgtcggcggttacctcctctatttcatctctggtttcctctggtgcttcgtcatctactactggaagcgccacgcctacatccccaaagatgccatccccacaaatgacgctatgaagaagcaaatagttgtagcatcgaaggctatgcctttttactgcgctcttccaactttatctgaatatatgattgagagcggatggactcagtgctacttcaatatcagcgaaattggtttttctatgtacctctgttatatggctatgtatctcatctttgtggagtttggaatttactggatgcacagggagttgcatgacataaaaccattatacaaatatctgcatgcaacccaccatatttacaacaaggagaataccttgtctccatttgctggacttgcatttcatccactggatggtattctgcaagcaataccacatgtgttcgcgctcttcctctttccaacgcacttcaggacacatattgcactcttgttcctagaggctgtgtggacaacaaacatccacgactgcattcatggcaagatatggccagtcatgggtgctggatatcacaccattcaccatacgacttaccgtcacaactatggccactacaccatctggatggactggatgtttggtacgctcaatgagccagaagatatcctcaagaaggcttgagtttctcggagctgtggtattcctatggtgctgctgctggaactgctcgatctgttcccagtgtttctaatccgttgagcctgttcagcactgtctgtttatgtaggcatcagtgtgttaattactttgctaggttcatatggctttgtgcttattctgtaatttagcgatgtttgtctcatgacgcaacggagttcaggacgaataaaactttgctagacacattctggattccagttgcttgtacaatgttggaactcaactgtcaatataggatgtaaaacggattccttcg

SEQ ID NO: 16122 - protein, 276 aa, Zea mays subsp. mays
  misc_feature (1)..(276): Ceres Seq. ID no. 12350927
MEAVAHSGDYLWRFVAETEWYNEVVLSAVAPGDWWRGLPHPVQSWMRNCVGGYLLYFISGFLWCFVIYYWKRHAYIPKDAIPTNDAMKKQIVVASKAMPFYCALPTLSEYMIESGWTQCYFNISEIGFSMYLCYMAMYLIFVEFGIYWMHRELHDIKPLYKYLHATHHIYNKENTLSPFAGLAFHPLDGILQAIPHVFALFLFPTHFRTHIALLFLEAVWTTNIHDCIHGKIWPVMGAGYHTIHHTTYRHNYGHYTIWMDWMFGTLNEPEDILKKA

SEQ ID NO: 16123 - protein, 231 aa, Zea mays subsp. mays
  misc_feature (1)..(231): Ceres Seq. ID no. 12350928
MRNCVGGYLLYFISGFLWCFVIYYWKRHAYIPKDAIPTNDAMKKQIVVASKAMPFYCALPTLSEYMIESGWTQCYFNISEIGFSMYLCYMAMYLIFVEFGIYWMHRELHDIKPLYKYLHATHHIYNKENTLSPFAGLAFHPLDGILQAIPHVFALFLFPTHFRTHIALLFLEAVWTTNIHDCIHGKIWPVMGAGYHTIHHTTYRHNYGHYTIWMDWMFGTLNEPEDILKKA

SEQ ID NO: 16124 - protein, 190 aa, Zea mays subsp. mays
  misc_feature (1)..(190): Ceres Seq. ID no. 12350929
MKKQIVVASKAMPFYCALPTLSEYMIESGWTQCYFNISEIGFSMYLCYMAMYLIFVEFGIYWMHRELHDIKPLYKYLHATHHIYNKENTLSPFAGLAFHPLDGILQAIPHVFALFLFPTHFRTHIALLFLEAVWTTNIHDCIHGKIWPVMGAGYHTIHHTTYRHNYGHYTIWMDWMFGTLNEPEDILKKA

SEQ ID NO: 16125 - DNA, 1022 bp, Zea mays subsp. mays
  misc_feature (1)..(1022): Ceres Seq. ID no. 12350942
aaaccaaaccctctaatccatttcggcatttccaacgccttcgccctaccagccacgtcgtttcgaggccgatcgaccgagcagcagcagctggtggcaatggcggcggcggcggaggtcgtgctgctggacttctgggtgagccccttcgggcagcgctgccggatcgcgctggcggagaagggcgtggcctacgagtaccgcgagcaggacctcctgaacaagggcgagctgctcctccgctccaaccccatccacaagaagatccccgtcctgctccacgccggcaggcccgtctgcgagtcgctcgtcatcctccagtacatcgacgaggcctggccggacgtcgcgccgctcctccccaaggacgacccctacgcccgcgcgcaggcgcgtttctgggccgattacatcgacaagaagatctatgacagccagactcggctgtggaagttcgagggcgaggcgcgggagcaggcgaagaaggacctggtggaggtcctggagaccctggagggggagctcgccgacaagcctttcttcggcggcggcgccctcggcttcgtggacgtggctctggtgcccttcacgtcctggttcctcgcctacgagaagctgggcgggttcagcatccaggagcactgccccaggatcgtggcctgggcggcgcgctgcagggagcgggagagcgtggccaaggcgctgtccgaccctgccaaggtgctcgggttcgtccagttcctccagagcaagttcggggccaagtgatcggaaacgctgtgtgtgctgctatgcaggccaggctggtgctttgatctctgctcgatcagctccatgcccatgctagcgttgcatagcgcagttgatgtgtgatgtgtctggttggttgtagctgctctttgcctggttgcgttgcgtcagtgtgttttcagcgtctggggtagctctgcgttgcccttgcccctgccccctgttgcatactcctagctctcgccgagtttgacaatttcgtcagttaatcc

SEQ ID NO: 16126 - protein, 255 aa, Zea mays subsp. mays
  misc_feature (1)..(255): Ceres Seq. ID no. 12350943
KPNPLIHFGISNAFALPATSFRGRSTEQQQLVAMAAAAEVVLLDFWVSPFGQRCRIALAEKGVAYEYREQDLLNKGELLLRSNPIHKKIPVLLHAGRPVCESLVILQYIDEAWPDVAPLLPKDDPYARAQARFWADYIDKKIYDSQTRLWKFEGEAREQAKKDLVEVLETLEGELADKPFFGGGALGFVDVALVPFTSWFLAYEKLGGFSIQEHCPRIVAWAARCRERESVAKALSDPAKVLGFVQFLQSKFGAK

SEQ ID NO: 16127 - protein, 222 aa, Zea mays subsp. mays
  misc_feature (1)..(222): Ceres Seq. ID no. 12350944
MAAAAEVVLLDFWVSPFGQRCRIALAEKGVAYEYREQDLLNKGELLLRSNPIHKKIPVLLHAGRPVCESLVILQYIDEAWPDVAPLLPKDDPYARAQARFWADYIDKKIYDSQTRLWKFEGEAREQAKKDLVEVLETLEGELADKPFFGGGALGFVDVALVPFTSWFLAYEKLGGFSIQEHCPRIVAWAARCRERESVAKALSDPAKVLGFVQFLQSKFGAK

SEQ ID NO: 16128 - protein, 142 aa, Zea mays subsp. mays
  misc_feature (1)..(142): Ceres Seq. ID no. 12350945
TKPSNPFRHFQRLRPTSHVVSRPIDRAAAAGGNGGGGGGRAAGLLGEPLRAALPDRAGGEGRGLRVPRAGPPEQGRAAPPLQPHPQEDPRPAPRRQARLRVARHPPVHRRGLAGRRAAPPQGRPLRPRAGAFLGRLHRQEDL

SEQ ID NO: 16129 - DNA, 1084 bp, Zea mays subsp. mays
  misc_feature (1)..(1084): Ceres Seq. ID no. 12350953
gaaaagaaagcattagtatatttgcatttgcttcgttctccaccgccagcgaggtgctcgtgcggtgtgtatatatatatgcacggggttgcattgcacccagctgcagatgatatataccttaagccagcagaaaattaggtataggcgtagagactagagagcgagcgagctcagtccgtgttcagtcgagagagctcgtttagcttggccatcgacgagctagcagagcagtagctaggatagatccatggcgaacgcgggcatgaagccggtggccggactcctgctggtgctcaacttgtgcatgtacgtcatcgtggcggcggtgggcggctgggccatcaaccacgccatcaactacggcttcttcatcggcaccggcctgcacctcccggctcacttctccccgatcaacttccccatcgggaacgcggcgaccgggttcttcgtcatcttcgccgtgatcgccggggtggtcggcgcgggctcggcgctggcggggctcaaccacgtccgcgcctggagcaccgagagcctgccggcggcggcctccgccgggttcattgcgtggacgctcaccctgctcgccatggggttggcggtgaaggagattgaactgcacggcaggaatgccagactgatatgcatggagtccttcaccatcatcctgtcggcgacgcagctcttctacctgctcgccattcacggaggcttgagataaaatcgatcaccgtgttggccggaggcactgaggcagtgactgatgaatggagacttgtcgtcggttccgtacgtgtgtgtctgtcggattgagtgggcgtgcatcggattcacggggcagcgcgtgtactatatatgtgacttcattcggttcgctgtgtcgttgtgggctgggctgtcttccaagatgcatggagaggcagtacgtatgtacacgtacgtgtatctatctgttcgtgtgtgtgcgcccgctgctgcttgatttatcttgtgcgtccgattggttacgtcattccgtgtcattcattgattgtttcggagatggagagtcaatatgtctacacgtcatgatgacgtggtg

SEQ ID NO: 16130 - protein, 157 aa, Zea mays subsp. mays
  misc_feature (1)..(157): Ceres Seq. ID no. 12350954
MANAGMKPVAGLLLVLNLCMYVIVAAVGGWAINHAINYGFFIGTGLHLPAHFSPINFPIGNAATGFFVIFAVIAGVVGAGSALAGLNHVRAWSTESLPAAASAGFIAWTLTLLAMGLAVKEIELHGRNARLICMESFTIILSATQLFYLLAIHGGLR

SEQ ID NO: 16131 - protein, 152 aa, Zea mays subsp. mays
  misc_feature (1)..(152): Ceres Seq. ID no. 12350955
MKPVAGLLLVLNLCMYVIVAAVGGWAINHAINYGFFIGTGLHLPAHFSPINFPIGNAATGFFVIFAVIAGVVGAGSALAGLNHVRAWSTESLPAAASAGFIAWTLTLLAMGLAVKEIELHGRNARLICMESFTIILSATQLFYLLAIHGGLR

SEQ ID NO: 16132 - protein, 138 aa, Zea mays subsp. mays
  misc_feature (1)..(138): Ceres Seq. ID no. 12350956
MYVIVAAVGGWAINHAINYGFFIGTGLHLPAHFSPINFPIGNAATGFFVIFAVIAGVVGAGSALAGLNHVRAWSTESLPAAASAGFIAWTLTLLAMGLAVKEIELHGRNARLICMESFTIILSATQLFYLLAIHGGLR

SEQ ID NO: 16133 - DNA, 1318 bp, Zea mays subsp. mays
  misc_feature (1)..(1318): Ceres Seq. ID no. 12350973
attccatcacagattcacagccaactaaagagaaggagagcgtgtgttcgtttcgagaacgcacgcacagacgccatggaggtgacaccaaaccacaccctgaccgtgaccgggtgggcggccatgaacgagtccgccggcaaggtggagcccttcgtcttcaagagaagggagaacggcccggacgacgtgacgatcaaagtgcagtactgcggcatgtgccacacggacctgcacttcatcaacaacgactggggcatcaccacgtacccgctggtcccggggcacgagatcacgggcgtggtcaccaaggccgggcgcaacgtcacgggcttccgtgtcggcgaccgcgtcggcgtgggctgcatcgccgcctcctgcctggactgcgaccactgccgccgctccgaggagaactactgcgaccgtgtggcgctcacctacaacggcgtcttctgggacggcagcgtcacgtacggcggctactcgcgcgcgctggtggcggacaagcgcttcgtggtgcgcgtccccgacgcgctgccgctggacgccgccgcgccgctgctgtgcgcgggcgtcacggtgtacagccccatgaagcaccacggcatgctggggcaccccggcgccagcctcggcgtcgtcgggctcggcggcctcggccacgtcgccgtcaagctcgccaaggcgttcggtctccgcgtcaccgtcgtcagcacgtcgccggccaaggaggccgaggccagggcccggctcggcgccgaccgcttcgtcgtcagcaccgacgacgcgcagatgcgggacgcggccaggtccctcgactacgtcatcgacaccgtctccgccaagcactcgctcggacccatcctggacctgctcaaggtcagcggcaagctcgtgctcgtcgccgcgccggaccagcccgtcgagctcccctccttcccgctcatctttgggaagaggaccgtcagcgggagcatgacgggagggatcagggagacgcaggagatgctcgacctctgcgcccgccacaacatcacctgcgacatcgagctcgtctccacggacgggatcaacgccgcgctcgcgcgcctcgcacgcaacgacgtccgataccgcttcgtcatcgacatcgccggcgactccacctcaaaactatagttcattcaattcgttgcattattatcatctatcaatatcgtcaccagtggcaggcatggcctctggttgcttgcattttgctctctatccatatcaagtgtgtgtcagcatgggccagcgtgcatattgcgccattgcttgcagcaaataaacattc

SEQ ID NO: 16134 - protein, 438 aa, Zea mays subsp. mays
  misc_feature (1)..(438): Ceres Seq. ID no. 12350974
SITDSQPTKEKESVCSFRERTHRRHGGDTKPHPDRDRVGGHERVRRQGGALRLQEKGERPGRRDDQSAVLRHVPHGPALHQQRLGHHHVPAGPGARDHGRGHQGRAQRHGLPCRRPRRRGLHRRLLPGLRPLPPLRGELLRPCGAHLQRRLLGRQRHVRRLLARAGGGQALRGARPRRAAAGRRRAAAVRGRHGVQPHEAPRHAGAPRRQPRRRRARRPRPRRRQARQGVRSPRHRRQHVAGQGGRGQGPARRRPLRRQHRRRADAGRGQVPRLRHRHRLRQALARTHPGPAQGQRQARARRRAGPARRAPLLPAHLWEEDRQREHDGRDQGDAGDARPLRPPQHHLRHRARLHGRDQRRARAPRTQRRPIPLRHRHRRRLHLKTIVHSIRCIIIIYQYRHQWQAWPLVACILLSIHIKCVSAWASVHIAPLLAANKH

SEQ ID NO: 16135 - protein, 386 aa, Zea mays subsp. mays
  misc_feature (1)..(386): Ceres Seq. ID no. 12350975
IPSQIHSQLKRRRACVRFENARTDAMEVTPNHTLTVTGWAAMNESAGKVEPFVFKRRENGPDDVTIKVQYCGMCHTDLHFINNDWGITTYPLVPGHEITGVVTKAGRNVTGFRVGDRVGVGCIAASCLDCDHCRRSEENYCDRVALTYNGVFWDGSVTYGGYSRALVADKRFVVRVPDALPLDAAAPLLCAGVTVYSPMKHHGMLGHPGASLGVVGLGGLGHVAVKLAKAFGLRVTVVSTSPAKEAEARARLGADRFVVSTDDAQMRDAARSLDYVIDTVSAKHSLGPILDLLKVSGKLVLVAAPDQPVELPSFPLIFGKRTVSGSMTGGIRETQEMLDLCARHNITCDIELVSTDGINAALARLARNDVRYRFVIDIAGDSTSKL

SEQ ID NO: 16136 - protein, 361 aa, Zea mays subsp. mays
  misc_feature (1)..(361): Ceres Seq. ID no. 12350976
MEVTPNHTLTVTGWAAMNESAGKVEPFVFKRRENGPDDVTIKVQYCGMCHTDLHFINNDWGITTYPLVPGHEITGVVTKAGRNVTGFRVGDRVGVGCIAASCLDCDHCRRSEENYCDRVALTYNGVFWDGSVTYGGYSRALVADKRFVVRVPDALPLDAAAPLLCAGVTVYSPMKHHGMLGHPGASLGVVGLGGLGHVAVKLAKAFGLRVTVVSTSPAKEAEARARLGADRFVVSTDDAQMRDAARSLDYVIDTVSAKHSLGPILDLLKVSGKLVLVAAPDQPVELPSFPLIFGKRTVSGSMTGGIRETQEMLDLCARHNITCDIELVSTDGINAALARLARNDVRYRFVIDIAGDSTSKL

SEQ ID NO: 16137 - DNA, 750 bp, Zea mays subsp. mays
  misc_feature (1)..(750): Ceres Seq. ID no. 12351001
agggattaccttacattcttttgcttggggaacagggaggtgaagatggatggtgagtatgaaccttcaggtcgtccgcttgatgggacagactacgctcgggcgcagaatgcacgtcgcttcatgatctacgttcactctaagatgatgatagtcgacgacgaatacatcatcgttggatctgccaacatcaaccagcgctcaatggatgggggcagggactcggagatcgccatgggcgcgtaccagccgtgccacctgaacaccaaaggccaggtcgcccggggtcaggtccacggcttccggatgtcgctgtggtacgagcacctcggcatgctacacgacgatttcctcaacccgggaagcctggagtgtgttcggagggtaaaccagatggcagacaggtattgggacctctacgctggcgacagcctcgacgccgacctccctgggcacctgctcaggtacccagtcaccgtcacgaaggagggcacggtgacagagctcccgggggccaagttcttccccgacacacaggcgcttgtgcttggggcgctatcgaaactgcctcctattctcactacatagagaaaccttctgtactgttgccatgtgacgtttgcgggctgaattggttgaggtttttgctactccgtattatgctacaactggtagtgttattgtatggtttcttcctaataatagtatttatagttttggacttatctaaaatagtatttatatgtgtcc

SEQ ID NO: 16138 - protein, 195 aa, Zea mays subsp. mays
  misc_feature (1)..(195): Ceres Seq. ID no. 12351002
RDYLTFFCLGNREVKMDGEYEPSGRPLDGTDYARAQNARRFMIYVHSKMMIVDDEYIIVGSANINQRSMDGGRDSEIAMGAYQPCHLNTKGQVARGQVHGFRMSLWYEHLGMLHDDFLNPGSLECVRRVNQMADRYWDLYAGDSLDADLPGHLLRYPVTVTKEGTVTELPGAKFFPDTQALVLGALSKLPPILTT

SEQ ID NO: 16139 - protein, 180 aa, Zea mays subsp. mays
  misc_feature (1)..(180): Ceres Seq. ID no. 12351003
MDGEYEPSGRPLDGTDYARAQNARRFMIYVHSKMMIVDDEYIIVGSANINQRSMDGGRDSEIAMGAYQPCHLNTKGQVARGQVHGFRMSLWYEHLGMLHDDFLNPGSLECVRRVNQMADRYWDLYAGDSLDADLPGHLLRYPVTVTKEGTVTELPGAKFFPDTQALVLGALSKLPPILTT

SEQ ID NO: 16140 - protein, 154 aa, Zea mays subsp. mays
  misc_feature (1)..(154): Ceres Seq. ID no. 12351004
MIYVHSKMMIVDDEYIIVGSANINQRSMDGGRDSEIAMGAYQPCHLNTKGQVARGQVHGFRMSLWYEHLGMLHDDFLNPGSLECVRRVNQMADRYWDLYAGDSLDADLPGHLLRYPVTVTKEGTVTELPGAKFFPDTQALVLGALSKLPPILTT

SEQ ID NO: 16141 - DNA, 899 bp, Zea mays subsp. mays
  misc_feature (1)..(899): Ceres Seq. ID no. 12351016
aaaaaaatcaaaaacaaaagaagcaaacctcgtcgtcacgccatccctctccacctctcgtcttccagacgcctccaatctgggctcccagcggccagcgtctcggaaaagaggagcagcacggcacggcggcgatggcgaggaacgctccaataatatgctaacccgttctacccagtccaattagcagcctcccaaggagaaggagatccaatcctgcgggcgggcgtcccccgtatcccatccatcgatccgaatctcggaatctgcaggaccctgcggcgcggcttcttcgtggagaagaggttgctgccgaagccaccgccaggtagccatgtcgtcctccgtgctgagggctgcggccgacagggccattcgcaggcaggccctcacgctgacgaacgccgcggcgtccaggatccggcagctactcagcctaaggcaacggccatacctgcggctgggtgtcaaagcgcgaggttgcaacggcctctcctacaccctcaactatgccgatgaaaaggggaagttcgatgagcttgtcgaggagaaaggagttaaagtactgatcgaccccaaggctttgatgcatgttataggcaccaagatggactatgttgatgatccattaaagtccgagtttgtgttcataaacccaaattccaaagggcagtgtggctgcggtgagtctttcatgactacaggcagcaaagggtcgacgtcatgaggcgtttttcagtgtaaatgcttagccaagtgtctgcaggctccagggtacagattttcttgtgtctgttgcgtcgcagttcattcatatataataacacagcagtgggtttgtactggatatgcaactaactcgcatttacttgtaatgtaagttcacctcaaatgttgtt

SEQ ID NO: 16142 - protein, 130 aa, Zea mays subsp. mays
  misc_feature (1)..(130): Ceres Seq. ID no. 12351017
MSSSVLRAAADRAIRRQALTLTNAAASRIRQLLSLRQRPYLRLGVKARGCNGLSYTLNYADEKGKFDELVEEKGVKVLIDPKALMHVIGTKMDYVDDPLKSEFVFINPNSKGQCGCGESFMTTGSKGSTS

SEQ ID NO: 16143 - DNA, 735 bp, Zea mays subsp. mays
  misc_feature (1)..(735): Ceres Seq. ID no. 12351018
cccaaaatactccaccaccgcacccactagggtttccgcaccgcattgcagaacctcgccgcctccaccctcaccacaccaccggcgatgtccacagcggcggcgcagggcggcagcgacaagccggcgctccggaggcccgtcttcaccaaggtcgaccagctcaggccgggcaccaacgggcacaccctcaccgtcaaggtcgtcagcgccacccccgtgcctgggcgcgcgcgcccaggcgcacccgccgccgccccatcccgcgcgccgcgcatcgccgagtgcctcgtcggggacgagaccggcgccatcgtcttcaccgcccgcaacgaccaagttgacttgctgaagcccaatgcgacagtgatcttgcgcaatgccaaaatagacatgttcaaaggatcaatgaggcttgcagtggacaagtgggggcggattgaggctgtagagccagccagtttcacggtgaaggaagacaacaacctgtctctaatagagtatgaattggttaatgtggctgagtaactgtccaatccaagcgtttctgccccctttatttcgtgccataagaaggaagtaccatgaatgaacattataaagcctcttgaagcgaagcgagtttatttgctacggtggggtagataaaggtcaaggctgtatggcctgtgttagaactttggataaattaagatgaattgcccttgcatctatgagattgttatccatctttgt

SEQ ID NO: 16144 - protein, 146 aa, Zea mays subsp. mays
  misc_feature (1)..(146): Ceres Seq. ID no. 12351019
MSTAAAQGGSDKPALRRPVFTKVDQLRPGTNGHTLTVKVVSATPVPGRARPGAPAAAPSRAPRIAECLVGDETGAIVFTARNDQVDLLKPNATVILRNAKIDMFKGSMRLAVDKWGRIEAVEPASFTVKEDNNLSLIEYELVNVAE

SEQ ID NO: 16145 - protein, 116 aa, Zea mays subsp. mays
  misc_feature (1)..(116): Ceres Seq. ID no. 12351020
PKYSTTAPTRVSAPHCRTSPPPPSPHHRRCPQRRRRAAATSRRSGGPSSPRSTSSGRAPTGTPSPSRSSAPPPCLGARAQAHPPPPHPARRASPSASSGTRPAPSSSPPATTKLTC

SEQ ID NO: 16146 - protein, 113 aa, Zea mays subsp. mays
  misc_feature (1)..(113): Ceres Seq. ID no. 12351021
QNTPPPHPLGFPHRIAEPRRLHPHHTTGDVHSGGAGRQRQAGAPEARLHQGRPAQAGHQRAHPHRQGRQRHPRAWARAPRRTRRRPIPRAAHRRVPRRGRDRRHRLHRPQRPS

SEQ ID NO: 16147 - DNA, 1020 bp, Zea mays subsp. mays
  misc_feature (1)..(1020): Ceres Seq. ID no. 12351061
gacacagccatcacacgcatactgcatacacaacacagagcatcagaaggagctacgatctgatcgacatggctgccgccaccatggctatcacctcccgcgcgctcgtcggcaagccggcggctggcacgagggacgtcttcggcgagggccgcatcaccatgcgcaagancgccgccaagcccaagccggcggcgtccggcagcccatggtacggtgccgaccgcgtcctgtacctgggcccgctgtccggctcgcccccgagctacctgaccggcgagttccccggcgactacgggtgggacaccgcggggctgtcggcggacccggagaccttcgccaagaaccgcgagctggaggtgatccactgccgctgggccatgctcggcgcgctcgggtgcgtgttcccggagctgctcgcccgcaacggcgtcaagttcggcgaggcggtgtggttcaaggcgggctcccagatcttcagcgagggcgggctggactacctcggcaacccgagcctggtccacgcgcagagcatcctggccatctgggcgtgccaggtggtgctcatgggcgccgtcgaggggtaccgcgtcgccggcggcccgctcggagaggtggtcgacccgctgtaccctggcggcagcttcgacccgctcgggctcgccgacgacccggaggcgttcgccgagctcaaggtgaaggagatcaagaacggccgcctcgccatgttctccatgttcggcttcttcgtgcaggctatcgtcaccggcaagggccccctcgagaacctcgccgaccacatcgccgaccccgtcaacaacaacgcctgggcttacgccaccaacttcgtccccggcaagtgagcgagggcatgatgcttgcatgcgtgtaccgtagacgtacgtattcctacgtactgcaggttgcaccagtatttgtgaagggagctttgggagccagagattgtaccgctagtgtatttgtatgcatgctgtggagctgaacaataaaatatgctgt

SEQ ID NO: 16148 - protein, 333 aa, Zea mays subsp. mays
  misc_feature (1)..(333): Ceres Seq. ID no. 12351062
  misc_feature (57)..(57): Xaa is any aa, unknown or other
TQPSHAYCIHNTEHQKELRSDRHGCRHHGYHLPRARRQAGGWHEGRLRRGPHHHAQXRRQAQAGGVRQPMVRCRPRPVPGPAVRLAPELPDRRVPRRLRVGHRGAVGGPGDLRQEPRAGGDPLPLGHARRARVRVPGAARPQRRQVRRGGVVQGGLPDLQRGRAGLPRQPEPGPRAEHPGHLGVPGGAHGRRRGVPRRRRPARRGGRPAVPWRQLRPARARRRPGGVRRAQGEGDQERPPRHVLHVRLLRAGYRHRQGPPREPRRPHRRPRQQQRLGLRHQLRPRQVSEGMMLACVYRRRTYSYVLQVAPVFVKGALGARDCTASVFVCMLWS

SEQ ID NO: 16149 - protein, 286 aa, Zea mays subsp. mays
  misc_feature (1)..(286): Ceres Seq. ID no. 12351063
  misc_feature (57)..(57): Xaa is any aa, unknown or other
HSHHTHTAYTTQSIRRSYDLIDMAAATMAITSRALVGKPAAGTRDVFGEGRITMRKXAAKPKPAASGSPWYGADRVLYLGPLSGSPPSYLTGEFPGDYGWDTAGLSADPETFAKNRELEVIHCRWAMLGALGCVFPELLARNGVKFGEAVWFKAGSQIFSEGGLDYLGNPSLVHAQSILAIWACQVVLMGAVEGYRVAGGPLGEVVDPLYPGGSFDPLGLADDPEAFAELKVKEIKNGRLAMFSMFGFFVQAIVTGKGPLENLADHIADPVNNNAWAYATNFVPGK

SEQ ID NO: 16150 - protein, 264 aa, Zea mays subsp. mays
  misc_feature (1)..(264): Ceres Seq. ID no. 12351064
MVRCRPRPVPGPAVRLAPELPDRRVPRRLRVGHRGAVGGPGDLRQEPRAGGDPLPLGHARRARVRVPGAARPQRRQVRRGGVVQGGLPDLQRGRAGLPRQPEPGPRAEHPGHLGVPGGAHGRRRGVPRRRRPARRGGRPAVPWRQLRPARARRRPGGVRRAQGEGDQERPPRHVLHVRLLRAGYRHRQGPPREPRRPHRRPRQQQRLGLRHQLRPRQVSEGMMLACVYRRRTYSYVLQVAPVFVKGALGARDCTASVFVCMLWS

SEQ ID NO: 16151 - protein, 264 aa, Zea mays subsp. mays
  misc_feature (1)..(264): Ceres Seq. ID no. 12351065
  misc_feature (35)..(35): Xaa is any aa, unknown or other
MAAATMAITSRALVGKPAAGTRDVFGEGRITMRKXAAKPKPAASGSPWYGADRVLYLGPLSGSPPSYLTGEFPGDYGWDTAGLSADPETFAKNRELEVIHCRWAMLGALGCVFPELLARNGVKFGEAVWFKAGSQIFSEGGLDYLGNPSLVHAQSILAIWACQVVLMGAVEGYRVAGGPLGEVVDPLYPGGSFDPLGLADDPEAFAELKVKEIKNGRLAMFSMFGFFVQAIVTGKGPLENLADHIADPVNNNAWAYATNFVPGK

SEQ ID NO: 16152 - DNA, 991 bp, Zea mays subsp. mays
  misc_feature (1)..(991): Ceres Seq. ID no. 12351117
agctagcaaatgaaccagccacaataatcctgatcctcgatcttgcgttgtcgtcgtcaaagagacgactcgatcatcatctcatctcagagcacgcaagcaacaatggttactagcatccgcgtcatagttggaatcataggatctgtagtctgtgtgctcctctacgcggttccagtgctgacgtttaagagagtggtgaaggaggccagcgttggggagttctcgtgcgtgccatacatcctcgcccttttcagcgccttcacctggggctggtacggcttccccatcgtcagtgacgggtgggagaacctgtcgctcttcggcacgtgcgccgtcggagtgctcttcgaagcttcgttcgtcgtcatatacgtatggtttgcgccgagagacaaaaagaaatctgtcgtcctaatggtgtctctggttgtggcaacgctctgcgtcatcgtatccttgtcaagcttcgtgttccacacgcaccatacgcgcaagctatttgttggtagcattggtatagtcacctccatatccatgtacagcgctccgcttgtagccgtgaagcaagtcatcctgaccaagagcgtggagttcatgcctttctacctgtcgttgttctccttgctgaccagttttacatggatgctgtacggcatcctaggaagggatccctatcttacggcaccaaacggcgccgggtgtttaactggacttcttcagatcgctgtgtactgcatttacagcagaagcaatcggccgccgaaagcagtcaatggtgcgacaacaactagccgtgaagatgcaaatgattgcaaggtttgacttcgagagccttaagaaactgcctctctccgacgctagtaggaggttgatactaaagtggcgctattcgcgtgtgcagttattattattatctaattgtaaactgctccagtgttctttctttttgttatctaatcaatgggcatagcacctgcaaccagtaatt

SEQ ID NO: 16153 - protein, 239 aa, Zea mays subsp. mays
  misc_feature (1)..(239): Ceres Seq. ID no. 12351118
MVTSIRVIVGIIGSVVCVLLYAVPVLTFKRVVKEASVGEFSCVPYILALFSAFTWGWYGFPIVSDGWENLSLFGTCAVGVLFEASFVVIYVWFAPRDKKKSVVLMVSLVVATLCVIVSLSSFVFHTHHTRKLFVGSIGIVTSISMYSAPLVAVKQVILTKSVEFMPFYLSLFSLLTSFTWMLYGILGRDPYLTAPNGAGCLTGLLQIAVYCIYSRSNRPPKAVNGATTTSREDANDCKV

SEQ ID NO: 16154 - protein, 135 aa, Zea mays subsp. mays
  misc_feature (1)..(135): Ceres Seq. ID no. 12351119
MVSLVVATLCVIVSLSSFVFHTHHTRKLFVGSIGIVTSISMYSAPLVAVKQVILTKSVEFMPFYLSLFSLLTSFTWMLYGILGRDPYLTAPNGAGCLTGLLQIAVYCIYSRSNRPPKAVNGATTTSREDANDCKV

SEQ ID NO: 16155 - DNA, 1190 bp, Zea mays subsp. mays
  misc_feature (1)..(1190): Ceres Seq. ID no. 12351164
agaaccacagaccaagaagtgccctccactttgtaagctcgtttccgaaaagagctctagagccgccacacacacacacaccatggcaccgcgttctctgctggcagtgctcgccgtcgccgccctcgcgctcttgcacgccgcctcggccaagtcgtcgtggcttgacaggaggttcaccacggacggcaccgtccgcacgggatacgacgattcgggccagcaggtggtgatgctccgcctcgaccagcactccggcgctgccggcttcaactccaaggagcagtacctttacggcgagttcagcgtcgagatgaagctcatccgggggaactccgccggcaccgtctcgtgcttctacctctcttccggcgacggcgacgggtcgcgacgagatcgacatggagttcatgggcaactcgagcggggcagccggtggtgctgaacaccaacgtgtgggccagcggcgacggcaagaaggagcaccagttcgacctctggttcgacccctccgccgactaccacacctacaccatcatctggaacccgaccaacatcctgttcaaggtcgacgacctcttcatccgctccttcaagcgctacgccgacctgccgtacccgagctccaggcccatgacgctgcacgccacgctgtgggacggcagctactgggccaccgagaagggcagggtcggcatcgactggtccgacgcgcccttcgtcgtctcctaccgcagctactacgccagcgcctgcgtcagcggcggcgcgtgccgggccgccggcagcggcgggtggatgaacaggcagcttgacagcgccgagtggggcaccgtcaggtgggcggagcgcaacttcatgcgctacaactactgccaggatgggtggaggttcccgcaaggactccccgccgagtgcgcccgccactgatatgcgtccgccggttaattcttcgtcgacgatccagcttggcgtcgtttgttctttgttttgttgggtattcttttttttctacgggtatatgattcttgctcttctttgtggatttgtgattaaaaagcagccctgcagcttgcaacgtgtgggcggttgttgtacaccttgcttttcctaaaccgaagcatgtattttatttttaatcgtgcctttggacgatacaggcatgcagcatatatagtatttacgtacgc

SEQ ID NO: 16156 - protein, 147 aa, Zea mays subsp. mays
  misc_feature (1)..(147): Ceres Seq. ID no. 12351165
EPQTKKCPPLCKLVSEKSSRAATHTHTMAPRSLLAVLAVAALALLHAASAKSSWLDRRFTTDGTVRTGYDDSGQQVVMLRLDQHSGAAGFNSKEQYLYGEFSVEMKLIRGNSAGTVSCFYLSSGDGDGSRRDRHGVHGQLERGSRWC

SEQ ID NO: 16157 - protein, 137 aa, Zea mays subsp. mays
  misc_feature (1)..(137): Ceres Seq. ID no. 12351166
MEFMGNSSGAAGGAEHQRVGQRRRQEGAPVRPLVRPLRRLPHLHHHLEPDQHPVQGRRPLHPLLQALRRPAVPELQAHDAARHAVGRQLLGHREGQGRHRLVRRALRRLLPQLLRQRLRQRRRVPGRRQRRVDEQAA

SEQ ID NO: 16158 - protein, 134 aa, Zea mays subsp. mays
  misc_feature (1)..(134): Ceres Seq. ID no. 12351167
MGNSSGAAGGAEHQRVGQRRRQEGAPVRPLVRPLRRLPHLHHHLEPDQHPVQGRRPLHPLLQALRRPAVPELQAHDAARHAVGRQLLGHREGQGRHRLVRRALRRLLPQLLRQRLRQRRRVPGRRQRRVDEQAA

SEQ ID NO: 16159 - protein, 120 aa, Zea mays subsp. mays
  misc_feature (1)..(120): Ceres Seq. ID no. 12351168
MAPRSLLAVLAVAALALLHAASAKSSWLDRRFTTDGTVRTGYDDSGQQVVMLRLDQHSGAAGFNSKEQYLYGEFSVEMKLIRGNSAGTVSCFYLSSGDGDGSRRDRHGVHGQLERGSRWC

SEQ ID NO: 16160 - DNA, 855 bp, Zea mays subsp. mays
  misc_feature (1)..(855): Ceres Seq. ID no. 12351202
agctaattgcttttccagctgttcgtctcgccctgcatatgcgtctctctgctgccaggctcaagggctccacgctcgtcaccaatggcgtgataacggccgggtctgacgagtgggcgatctacggcggaaccggggtgtttgccatggcgaggggcgtcataaggagaaggtatctcgccgacagggccggcgggaacactgatgagctcaacatggatgtcttctgccggccgtttggctcacagtcagagctgcaagataagatgcaggtgcaggggcagggctctagcgtcaccaagattggactatggggtggaccgggagggtcggcacaggacatcacggcggagcggccgccgcagcgtctgcacagcgtcaccgttcgtgctggcgtcgccctcgactccatcgagttcacctatactgacagcgcttggcagaggcgcgccgctgggcgatggggtggactcgggggcaatgttcgaacgatcgaccttggcgacgccgaggatgtcagggaagtctcgggaacatacggcgcatttgaaggtgccactacgctgacctcgctcaggctcgtcaccagcagcagaacctggggcccctggggtgtcgagaacgggacgcgtttctccgtcacggcgcccatcggcagcagcatcgtgggattctatgcgcgggcgggaaccaggctcgtcgatgctatcggtgtttacttgcgtcagatttaattcgaataatagcaggggagctactgctagctacgtacctgctccatcctccattatcctttatttcaattcgctcatcatcgtcgtgtgtaaattaaataaataaagctcttgtgcccat

SEQ ID NO: 16161 - protein, 243 aa, Zea mays subsp. mays
  misc_feature (1)..(243): Ceres Seq. ID no. 12351203
LIAFPAVRLALHMRLSAARLKGSTLVTNGVITAGSDEWAIYGGTGVFAMARGVIRRRYLADRAGGNTDELNMDVFCRPFGSQSELQDKMQVQGQGSSVTKIGLWGGPGGSAQDITAERPPQRLHSVTVRAGVALDSIEFTYTDSAWQRRAAGRWGGLGGNVRTIDLGDAEDVREVSGTYGAFEGATTLTSLRLVTSSRTWGPWGVENGTRFSVTAPIGSSIVGFYARAGTRLVDAIGVYLRQI

SEQ ID NO: 16162 - protein, 231 aa, Zea mays subsp. mays
  misc_feature (1)..(231): Ceres Seq. ID no. 12351204
MRLSAARLKGSTLVTNGVITAGSDEWAIYGGTGVFAMARGVIRRRYLADRAGGNTDELNMDVFCRPFGSQSELQDKMQVQGQGSSVTKIGLWGGPGGSAQDITAERPPQRLHSVTVRAGVALDSIEFTYTDSAWQRRAAGRWGGLGGNVRTIDLGDAEDVREVSGTYGAFEGATTLTSLRLVTSSRTWGPWGVENGTRFSVTAPIGSSIVGFYARAGTRLVDAIGVYLRQI

SEQ ID NO: 16163 - protein, 195 aa, Zea mays subsp. mays
  misc_feature (1)..(195): Ceres Seq. ID no. 12351205
MARGVIRRRYLADRAGGNTDELNMDVFCRPFGSQSELQDKMQVQGQGSSVTKIGLWGGPGGSAQDITAERPPQRLHSVTVRAGVALDSIEFTYTDSAWQRRAAGRWGGLGGNVRTIDLGDAEDVREVSGTYGAFEGATTLTSLRLVTSSRTWGPWGVENGTRFSVTAPIGSSIVGFYARAGTRLVDAIGVYLRQI

SEQ ID NO: 16164 - DNA, 832 bp, Zea mays subsp. mays
  misc_feature (1)..(832): Ceres Seq. ID no. 12351256
aacggttcacacttcacagcccacatcaacaaatggccaggaaagaagtgacgctcctgctcttcctcgtgctgcttgtcgcagccgtcgaggcacagctgcacgacgagcctacggcggccgctgtcgggcggcggcgtggcgcgaaggccgccacggcgccgacgcacctccacttcttcttccacgacacggtgagcggcaagtcgccgacggcggtacgcgtggtgagcccgccggcgtcgtcgccgtcgcccgtgttcgggatggtgaacgtgatggacgacccgctgacggaagggccggagcaagggtcggcccccgtcggccgcgcccagggcctgtacatggggtccgaccaggccaagatcggcttcctgcaggccatgaacctcgtgttcaccgcgggggactacaacggcagcacgctcgcgctgctcggccgcaactgcccgctcgacgccgtccgcgagctccccgtcgtcggcggcacgggcgcgttccgcttcgcccgcggctacgcgctgctgcgcacccactggctcgacttcgccaccggcgacgccaccgtcgagtacgacgtctacgtcacggactagctaattaataacgtaccgccttgctagccctcaccctcactgatgagtgccataagcattactacaaagacaggaccacgcaacaacaatggtgccaataaaggctttgaagcatgcttcgccacagagcgcctgctttttcttttaaaaccagcattttcgtttcagcttatatatatatttatagaacgcatgatctgtatccaatacaagcttcagaacccctttatgtt

SEQ ID NO: 16165 - protein, 201 aa, Zea mays subsp. mays
  misc_feature (1)..(201): Ceres Seq. ID no. 12351257
TVHTSQPTSTNGQERSDAPALPRAACRSRRGTAARRAYGGRCRAAAWREGRHGADAPPLLLPRHGERQVADGGTRGEPAGVVAVARVRDGERDGRPADGRAGARVGPRRPRPGPVHGVRPGQDRLPAGHEPRVHRGGLQRQHARAARPQLPARRRPRAPRRRRHGRVPLRPRLRAAAHPLARLRHRRRHRRVRRLRHGLAN

SEQ ID NO: 16166 - protein, 198 aa, Zea mays subsp. mays
  misc_feature (1)..(198): Ceres Seq. ID no. 12351258
RFTLHSPHQQMARKEVTLLLFLVLLVAAVEAQLHDEPTAAAVGRRRGAKAATAPTHLHFFFHDTVSGKSPTAVRVVSPPASSPSPVFGMVNVMDDPLTEGPEQGSAPVGRAQGLYMGSDQAKIGFLQAMNLVFTAGDYNGSTLALLGRNCPLDAVRELPVVGGTGAFRFARGYALLRTHWLDFATGDATVEYDVYVTD

SEQ ID NO: 16167 - protein, 188 aa, Zea mays subsp. mays
  misc_feature (1)..(188): Ceres Seq. ID no. 12351259
MARKEVTLLLFLVLLVAAVEAQLHDEPTAAAVGRRRGAKAATAPTHLHFFFHDTVSGKSPTAVRVVSPPASSPSPVFGMVNVMDDPLTEGPEQGSAPVGRAQGLYMGSDQAKIGFLQAMNLVFTAGDYNGSTLALLGRNCPLDAVRELPVVGGTGAFRFARGYALLRTHWLDFATGDATVEYDVYVTD

SEQ ID NO: 16168 - DNA, 782 bp, Zea mays subsp. mays
  misc_feature (1)..(782): Ceres Seq. ID no. 12351274
atgtgtgtgtccaacagctgagtggcatggacatggaccaaaggcttcagtgcatgtttaagagagtccgggagacctacgacgctgcgacagaaggcatcaagacaaactactatggcataaagcatgtgatcgaagccttgctgcctctgcttcaagcttcctccgatgggaggatcgttaacgtctcctctgagttcggcctgctaaggctgatcaacaacgaggagctaaggcaggagctaaacgacgtggagaagctcaccgaggagaggctggacgaggtgctggccgcgtacctgagagacttcgacgccggcgaggtgggggcgcgcgggtggccggtggacttctcggcctacaaggtggccaaggtggccatgaacgcgtacacgaggatcctagcgaggaggcacccggggctgcgcgtcaactgcgcgcaccccggctacgtgagcaccgacatgaccgtccacaccgggcctctcacgcccgagcaaggcgcggccaacgtcgtgaaggtggcgctgatgccggagggcggcccgaccggcgcgtacttcgcgttgggagaggaggcgtcctttgtgtgacgaaagcaccgtcgtcgttaagttcgtcgttgttcgccaactccctgtcagtcgatttctaaatcgacgtacaatgaaatacatcatcgctgcaaactcacaaatgaaaacagttaagggaaccttttgtagcaaaaaaaaaagtggacagaataatgaataatcatgtcaaatatcgcttgagtatct

SEQ ID NO: 16169 - protein, 196 aa, Zea mays subsp. mays
  misc_feature (1)..(196): Ceres Seq. ID no. 12351275
VCVQQLSGMDMDQRLQCMFKRVRETYDAATEGIKTNYYGIKHVIEALLPLLQASSDGRIVNVSSEFGLLRLINNEELRQELNDVEKLTEERLDEVLAAYLRDFDAGEVGARGWPVDFSAYKVAKVAMNAYTRILARRHPGLRVNCAHPGYVSTDMTVHTGPLTPEQGAANVVKVALMPEGGPTGAYFALGEEASFV

SEQ ID NO: 16170 - protein, 188 aa, Zea mays subsp. mays
  misc_feature (1)..(188): Ceres Seq. ID no. 12351276
MDMDQRLQCMFKRVRETYDAATEGIKTNYYGIKHVIEALLPLLQASSDGRIVNVSSEFGLLRLINNEELRQELNDVEKLTEERLDEVLAAYLRDFDAGEVGARGWPVDFSAYKVAKVAMNAYTRILARRHPGLRVNCAHPGYVSTDMTVHTGPLTPEQGAANVVKVALMPEGGPTGAYFALGEEASFV

SEQ ID NO: 16171 - protein, 186 aa, Zea mays subsp. mays
  misc_feature (1)..(186): Ceres Seq. ID no. 12351277
MDQRLQCMFKRVRETYDAATEGIKTNYYGIKHVIEALLPLLQASSDGRIVNVSSEFGLLRLINNEELRQELNDVEKLTEERLDEVLAAYLRDFDAGEVGARGWPVDFSAYKVAKVAMNAYTRILARRHPGLRVNCAHPGYVSTDMTVHTGPLTPEQGAANVVKVALMPEGGPTGAYFALGEEASFV

SEQ ID NO: 16172 - DNA, 1849 bp, Zea mays subsp. mays
  misc_feature (1)..(1849): Ceres Seq. ID no. 12351282
cccccctcccccacccacccagcgtgcgaggcgatcaaaccgtgtgcgggcatggtggccgcgctgctcctgacctcggcgaccgcgctcctggcgctggcggcggcgtggctctgggactacgtcgtggtgcgcctcctttggcggccccgcgccgtggccggcatgttcagggcgcagggggtccgcgggccgccctacagcttcctcagcggctgcaaccgcgagatgaggaggatgaaggcggaggccgacgacgggctccggctggacgtccgcgaccacaactacctccccagggtgatgccccatttcctcgcctggaagcagctgtacggggagccattcctgtactggatgggtccgcggccccgggtctgcctcttcgactacgagtcggtaaggcaagttcttttcaacaagcccggtcatttcttcaaggacgacgcccacccgactatcctggcaatgatgggcaaagggctggtcctggtggaaggcaccgactgggtgcgccatcggagggtggtcaacccagccttcgccatggacaagctcaagatgatgacggagacgatggtcagctgtgctgagccactgatcaagcggtgggaacagctcgcagcagccagcagatccagcgaggacggtgggaggggagaagtgcaagtggagttcagcaagcagttccaggacctgacggcggacgttatcgcccacaccggtttcggaagcagctacaaggagggcaaagaggtgttccatacgcagaagcagctcctggcgctcgccatggcgactctcctcaacgtgcagctgccaggattcaagtatctccctaccaagaacaacaggctcaagtgggcgctagaaaagaagatgaagacgacgctcacggcgatcatacagtcgcgggtggcatccaatgggaggagtagtggatacggagacgacctgctcggcctgatgctcgaggcctggctcacagcggaacgaggaggaggggaacgggacgagtcgagcctgaccatggacgagatcatagacgagtgcaagacattcttcttcgcaggccacgagaccacgtcccatttgctcacctggacaatgttcttgctcagcgtgtacccggaatggcagcaacggctaagggacgaggtcctgagagagtgcggacaggcaaaccctactgcagacacgcttaacaaattcaatgagatgacgatggtgctcctcgagacactgagactctacggccctgtcatgctcatgctaaggaagcctacctccgacataaggctgggcagcctcagcataccgaaaggcaacgggatcgccatacccgtcccgttcctccaccgagacagagaggtctggggcgacaacgccaatgacttcgatccgttgaggtttcagaacggggtcacgaacgcggccaagaccccgcaggctcttctgtcgttctcgatcgggccgagggcatgcatcggccagaacttcgcgatgctggaagcgaagtcggtgatggccatgatcatgaagaagttctccttcacgctttcctcgagctacgtgcacgcgcctgtggattatatcacgctccagcctaagttcggccttcccatagttttgaggccactcccggatgtatgatgtgaaatggatctgtagcctgatagctgattttttttggggggtctaagtatgcataagaggtcagtattcaggacttggtttcatccgccaaacagtaaggctaaagaaccaaaacttgttgaaaactggtaactttctgggattttatgcccgtattatgtatataaatatataatgctacatagaactttgt

SEQ ID NO: 16173 - protein, 550 aa, Zea mays subsp. mays
  misc_feature (1)..(550): Ceres Seq. ID no. 12351283
PPSPTHPACEAIKPCAGMVAALLLTSATALLALAAAWLWDYVVVRLLWRPRAVAGMFRAQGVRGPPYSFLSGCNREMRRMKAEADDGLRLDVRDHNYLPRVMPHFLAWKQLYGEPFLYWMGPRPRVCLFDYESVRQVLFNKPGHFFKDDAHPTILAMMGKGLVLVEGTDWVRHRRVVNPAFAMDKLKMMTETMVSCAEPLIKRWEQLAAASRSSEDGGRGEVQVEFSKQFQDLTADVIAHTGFGSSYKEGKEVFHTQKQLLALAMATLLNVQLPGFKYLPTKNNRLKWALEKKMKTTLTAIIQSRVASNGRSSGYGDDLLGLMLEAWLTAERGGGERDESSLTMDEIIDECKTFFFAGHETTSHLLTWTMFLLSVYPEWQQRLRDEVLRECGQANPTADTLNKFNEMTMVLLETLRLYGPVMLMLRKPTSDIRLGSLSIPKGNGIAIPVPFLHRDREVWGDNANDFDPLRFQNGVTNAAKTPQALLSFSIGPRACIGQNFAMLEAKSVMAMIMKKFSFTLSSSYVHAPVDYITLQPKFGLPIVLRPLPDV

SEQ ID NO: 16174 - protein, 533 aa, Zea mays subsp. mays
  misc_feature (1)..(533): Ceres Seq. ID no. 12351284
MVAALLLTSATALLALAAAWLWDYVVVRLLWRPRAVAGMFRAQGVRGPPYSFLSGCNREMRRMKAEADDGLRLDVRDHNYLPRVMPHFLAWKQLYGEPFLYWMGPRPRVCLFDYESVRQVLFNKPGHFFKDDAHPTILAMMGKGLVLVEGTDWVRHRRVVNPAFAMDKLKMMTETMVSCAEPLIKRWEQLAAASRSSEDGGRGEVQVEFSKQFQDLTADVIAHTGFGSSYKEGKEVFHTQKQLLALAMATLLNVQLPGFKYLPTKNNRLKWALEKKMKTTLTAIIQSRVASNGRSSGYGDDLLGLMLEAWLTAERGGGERDESSLTMDEIIDECKTFFFAGHETTSHLLTWTMFLLSVYPEWQQRLRDEVLRECGQANPTADTLNKFNEMTMVLLETLRLYGPVMLMLRKPTSDIRLGSLSIPKGNGIAIPVPFLHRDREVWGDNANDFDPLRFQNGVTNAAKTPQALLSFSIGPRACIGQNFAMLEAKSVMAMIMKKFSFTLSSSYVHAPVDYITLQPKFGLPIVLRPLPDV

SEQ ID NO: 16175 - protein, 495 aa, Zea mays subsp. mays
  misc_feature (1)..(495): Ceres Seq. ID no. 12351285
MFRAQGVRGPPYSFLSGCNREMRRMKAEADDGLRLDVRDHNYLPRVMPHFLAWKQLYGEPFLYWMGPRPRVCLFDYESVRQVLFNKPGHFFKDDAHPTILAMMGKGLVLVEGTDWVRHRRVVNPAFAMDKLKMMTETMVSCAEPLIKRWEQLAAASRSSEDGGRGEVQVEFSKQFQDLTADVIAHTGFGSSYKEGKEVFHTQKQLLALAMATLLNVQLPGFKYLPTKNNRLKWALEKKMKTTLTAIIQSRVASNGRSSGYGDDLLGLMLEAWLTAERGGGERDESSLTMDEIIDECKTFFFAGHETTSHLLTWTMFLLSVYPEWQQRLRDEVLRECGQANPTADTLNKFNEMTMVLLETLRLYGPVMLMLRKPTSDIRLGSLSIPKGNGIAIPVPFLHRDREVWGDNANDFDPLRFQNGVTNAAKTPQALLSFSIGPRACIGQNFAMLEAKSVMAMIMKKFSFTLSSSYVHAPVDYITLQPKFGLPIVLRPLPDV

SEQ ID NO: 16176 - DNA, 895 bp, Zea mays subsp. mays
  misc_feature (1)..(895): Ceres Seq. ID no. 12351296
aagtcaagctgagcacaagtgatcgaacaactacagtacatacactctatcgatctctgtgaattaatttagttattaactcgatcatggcgcgcccccaaaacaaccagaaccccagggtgttcctggtcctcaacatcggcggcgtgacggttggccgcgtcgtcatcgagctgttcgccgacaaggtgcccaagacggcggagaacttccggctgctgtgcaccggagagcgcagcgtggggaagtggtccggcaagcgcctgcactacaagggcgcggcgttccaccgcgtggtgcccgggttcatgtgccagggcggcgacatcacggcgggcaacggcacgggcggcgagtctgcgatcggtgacgcccggtacttcgccgacgaggcgttcggagccgtccggcacgatggcgccggcgtggtgtccatggccaacgccgggcccaacaccaacggatctcagttcttcatcaccttcgccgacgcgccgtggctggacggccgccacgtcgcgttcggccgcgtcgtggatggcatggacgctctgcgtgccatcgaaaaggccgggtccatcagtggcaggactatgaggcatgtcgtcatcgccgactgcggcgagctcaagcactaagccgccatgtcctaattattcaggatcatacttactctctaccaaatctgacactatctagtaggtatacgtatacttatatattattatgattgttgtttgttgctgctgctgttacaagatgcgtttgagactaggtagatgatgagcatatatgcgtgattattttcgggtcttgatataaattctcaagtgtgagacaggttaattctgtgtaattgtaataccatggttaatgaagttgctcgctgttattg

SEQ ID NO: 16177 - protein, 183 aa, Zea mays subsp. mays
  misc_feature (1)..(183): Ceres Seq. ID no. 12351297
MARPQNNQNPRVFLVLNIGGVTVGRVVIELFADKVPKTAENFRLLCTGERSVGKWSGKRLHYKGAAFHRVVPGFMCQGGDITAGNGTGGESAIGDARYFADEAFGAVRHDGAGVVSMANAGPNTNGSQFFITFADAPWLDGRHVAFGRVVDGMDALRAIEKAGSISGRTMRHVVIADCGELKH

SEQ ID NO: 16178 - protein, 109 aa, Zea mays subsp. mays
  misc_feature (1)..(109): Ceres Seq. ID no. 12351298
MCQGGDITAGNGTGGESAIGDARYFADEAFGAVRHDGAGVVSMANAGPNTNGSQFFITFADAPWLDGRHVAFGRVVDGMDALRAIEKAGSISGRTMRHVVIADCGELKH

SEQ ID NO: 16179 - DNA, 934 bp, Zea mays subsp. mays
  misc_feature (1)..(934): Ceres Seq. ID no. 12351299
gttttggcgcaataaggcgacctgagtcctgaaccgcctcgagccgctctcggcttcgaatcccgacaacctccctccccaagctgcttagccgccgtctgggcctcagacctgcgtcaagcttccggcggcagcccatcgagcaccacaatggcgtccggcggagcggccatctcggcggggcctacaccgccgtcggcgacggcgtcgtcggttgagtggcaccagcggccgccgaacccgaagaaccccgtggtgttcttcgacgtgaccatcgggtccatcgccgccggccgcatcaagatggagctcttcgccgacatcgcccccaagaccgcggagaacttccggcagttctgcactggggagcatagaaaaaatgctttgccacaaggttataagggctgccaattccatagagtgatcaaagatttcatgattcagggtggtgacttcttgaagaatgatggtactggatgcacatcaatctacggtaccaaatttgatgatgaaaattttatagcaaagcatacagggcctggactgctctcgatggcaaacagtggaattaactctaatggatctcagttctttataacatgtgcaaagtgtgactggcttgacaacaaacatgtggtatttgggagagtgcttggagacggtttgctcgtcgtgaggaagattgaaaatgttgcaactggagcgaataacaaaccaaagcttgcctgcgttataagtgagtgtggtgaaatgtagtttgatccctttgtgtggctaatcgtggattcttgacgctgctgatgtagaccctgtttggttgatggaagtacttaaacagtggaaacattgatggaaatgtattgtgtctaggcaacctgcagaataatagaccaaaaaaactaatattcttgtttggcttgggagttcggccttc

SEQ ID NO: 16180 - protein, 201 aa, Zea mays subsp. mays
  misc_feature (1)..(201): Ceres Seq. ID no. 12351300
MASGGAAISAGPTPPSATASSVEWHQRPPNPKNPVVFFDVTIGSIAAGRIKMELFADIAPKTAENFRQFCTGEHRKNALPQGYKGCQFHRVIKDFMIQGGDFLKNDGTGCTSIYGTKFDDENFIAKHTGPGLLSMANSGINSNGSQFFITCAKCDWLDNKHVVFGRVLGDGLLVVRKIENVATGANNKPKLACVISECGEM

SEQ ID NO: 16181 - protein, 150 aa, Zea mays subsp. mays
  misc_feature (1)..(150): Ceres Seq. ID no. 12351301
MELFADIAPKTAENFRQFCTGEHRKNALPQGYKGCQFHRVIKDFMIQGGDFLKNDGTGCTSIYGTKFDDENFIAKHTGPGLLSMANSGINSNGSQFFITCAKCDWLDNKHVVFGRVLGDGLLVVRKIENVATGANNKPKLACVISECGEM

SEQ ID NO: 16182 - protein, 106 aa, Zea mays subsp. mays
  misc_feature (1)..(106): Ceres Seq. ID no. 12351302
MIQGGDFLKNDGTGCTSIYGTKFDDENFIAKHTGPGLLSMANSGINSNGSQFFITCAKCDWLDNKHVVFGRVLGDGLLVVRKIENVATGANNKPKLACVISECGEM

SEQ ID NO: 16183 - DNA, 728 bp, Zea mays subsp. mays
  misc_feature (1)..(728): Ceres Seq. ID no. 12351303
aaataattggccgctcagcgcttcgggtgaacgggttcccttgcaagcgtgaggcgaacgtgacggcggacgacttcttcttcggcgggctcgccgcggccgccgacgtgtactcgggcaacccgatggggtcggcggcgacggcggcggacgtgtcggtgctcccgggtctcaacaccctgggcgtgtccatggcgcgcacggacttcgcgccgtcgggcggcgtcagcccgccgcacgtgcacccgcgcgccacggagatcctcttcgtcgtggagggcaccctcgaggtgggcttcgtcacctcggcaaaccgcctcttcagccgcgccgtcggcaagggagaggtgttcgtgttcccccgcggcctcgtgcacttccagcgcatcgtcggggcggcgcccgccgtggcgatctcggctttcaacgcccagctgcctggcacgcagacggtcgccggggcactgttcggcgctgcgccggcggtgccgacggacgtgctggcgcgggcgttacagatcgacggtggagcgatcgagtacatcaagtccaagtttgcgcccaactagggcatgtctcgaattgcaaatgctcaggtgatcgaaaagagggtacgaacgaacataactactaaactaggtgtgtgcccgtgcgttgcaacgggaacgtataataccacggtaatttatgtacaaatgtgtgttatattgttatgaaaaaagttttgt

SEQ ID NO: 16184 - protein, 188 aa, Zea mays subsp. mays
  misc_feature (1)..(188): Ceres Seq. ID no. 12351304
IIGRSALRVNGFPCKREANVTADDFFFGGLAAAADVYSGNPMGSAATAADVSVLPGLNTLGVSMARTDFAPSGGVSPPHVHPRATEILFVVEGTLEVGFVTSANRLFSRAVGKGEVFVFPRGLVHFQRIVGAAPAVAISAFNAQLPGTQTVAGALFGAAPAVPTDVLARALQIDGGAIEYIKSKFAPN

SEQ ID NO: 16185 - protein, 147 aa, Zea mays subsp. mays
  misc_feature (1)..(147): Ceres Seq. ID no. 12351305
MGSAATAADVSVLPGLNTLGVSMARTDFAPSGGVSPPHVHPRATEILFVVEGTLEVGFVTSANRLFSRAVGKGEVFVFPRGLVHFQRIVGAAPAVAISAFNAQLPGTQTVAGALFGAAPAVPTDVLARALQIDGGAIEYIKSKFAPN

SEQ ID NO: 16186 - protein, 125 aa, Zea mays subsp. mays
  misc_feature (1)..(125): Ceres Seq. ID no. 12351306
MARTDFAPSGGVSPPHVHPRATEILFVVEGTLEVGFVTSANRLFSRAVGKGEVFVFPRGLVHFQRIVGAAPAVAISAFNAQLPGTQTVAGALFGAAPAVPTDVLARALQIDGGAIEYIKSKFAPN

SEQ ID NO: 16187 - DNA, 672 bp, Zea mays subsp. mays
  misc_feature (1)..(672): Ceres Seq. ID no. 12351311
ctcgctataaaacatgcccgctcctgcactaccactactacaaccagcggtagtggccggcatcatccgtctcgtctcgtctcgtctcgcctctcctctccttttcccccctccctgcacagcgccgctcaccgtcaccgtaccacagcagcgatcgatggctgaggtacacaacgagcggcccgtgatggtgggcgacgtccgggacgcgccggtgggccgcgagaacgacctcgaggccatcgagctcgcgcgcttcgcggtcgccgagcacaacagcaagaccaacgcgatgctggaattcgagaggctggtgaaggtgaggcaccaggtcgtggccgggaccctgcaccacttcaccgtcgaggtgaaggaggccggcggcggcgaaaagaagctgtacgaggccaaggtgtgggagaaggcgtgggagaacttcaagcagctgcagagcttcgagctcgtcggagacgccgcggtcgcctgaggcgcacaggcttttcgctggaggctggagcacaacaatgaaagaatttaactgtcatcccactggaaaagtatgatataatgaataaaccagcgtcttacccacatgtattgtaccctaatgagatatttgaccactgtaatagaatgagatgtgctaaggaatctgaaagccttcttgctttt

SEQ ID NO: 16188 - protein, 157 aa, Zea mays subsp. mays
  misc_feature (1)..(157): Ceres Seq. ID no. 12351312
MPAPALPLLQPAVVAGIIRLVSSRLASPLLFPPPCTAPLTVTVPQQRSMAEVHNERPVMVGDVRDAPVGRENDLEAIELARFAVAEHNSKTNAMLEFERLVKVRHQVVAGTLHHFTVEVKEAGGGEKKLYEAKVWEKAWENFKQLQSFELVGDAAVA

SEQ ID NO: 16189 - protein, 109 aa, Zea mays subsp. mays
  misc_feature (1)..(109): Ceres Seq. ID no. 12351313
MAEVHNERPVMVGDVRDAPVGRENDLEAIELARFAVAEHNSKTNAMLEFERLVKVRHQVVAGTLHHFTVEVKEAGGGEKKLYEAKVWEKAWENFKQLQSFELVGDAAVA

SEQ ID NO: 16190 - protein, 99 aa, Zea mays subsp. mays
  misc_feature (1)..(99): Ceres Seq. ID no. 12351314
MVGDVRDAPVGRENDLEAIELARFAVAEHNSKTNAMLEFERLVKVRHQVVAGTLHHFTVEVKEAGGGEKKLYEAKVWEKAWENFKQLQSFELVGDAAVA

SEQ ID NO: 16191 - DNA, 1091 bp, Zea mays subsp. mays
  misc_feature (1)..(1091): Ceres Seq. ID no. 12351358
accaataaaaaggtagagaatacaagaaaccgtcacgaccgcctccgcagtgctctaccatccgttccatggcgccgccgctcgccctgtttcttctcgccgccatcgtgctctcgcgggccgtctcccacggccacggcggcggcggcggcttctacgacccggcgagcgtcactcagctctcctcgcgccccagggcgttcctgtacagcggcttcctctcggacaccgagtgcgaccacatcgtcagcctggcgaaaggcagcatggagaagtcgatggtggcggataacgactccgggaagagtgtggcgagccaggcgcgcaccagctccggcaccttcttggccaagcgcgaggatgagatcgtgtctgcgattgagaaacgcgtagctgcttggacatttctcccggaagaaaacgccgaatcactccaggtcctgcgctacgaaaccggccagaagtatgacgcccacttcgactatttccacgacagaaacaacctgaagctcggcggccagcgagttgcgaccgtccttatgtacctcacagatgtcaagaaaggtggagagactgtatttccaaacgctgagggaagccatttacagtacaaggacgaaacttggtcggagtgttcaagatctggcctggcagtgaagccaaagaaaggagacgcgctactgttcttcaacctccacgtcaacgccacagccgatacaggcagtctccacgggagctgcccggtgatcgagggcgagaaatggtcggcgacgaaatggatccacgtcaggtcgttcgacaaccccccagacgtgaggacggacgcgccgtgctccgacgacaaggagctctgccctagatgggctgctatcggggagtgccacaggaacccgacgtacatggttgggaccaaagacactctcgggttttgccgcaagagctgcgggatctgtgatgcttgaacgtgttttgggggtagattttgatcccatcatgttttcaataacagatgaatcagtaacctagtgtaatgcgaatttcggtacagtcgcctccattggactgtttcgtccaccagatgttctaatact

SEQ ID NO: 16192 - protein, 297 aa, Zea mays subsp. mays
  misc_feature (1)..(297): Ceres Seq. ID no. 12351359
MAPPLALFLLAAIVLSRAVSHGHGGGGGFYDPASVTQLSSRPRAFLYSGFLSDTECDHIVSLAKGSMEKSMVADNDSGKSVASQARTSSGTFLAKREDEIVSAIEKRVAAWTFLPEENAESLQVLRYETGQKYDAHFDYFHDRNNLKLGGQRVATVLMYLTDVKKGGETVFPNAEGSHLQYKDETWSECSRSGLAVKPKKGDALLFFNLHVNATADTGSLHGSCPVIEGEKWSATKWIHVRSFDNPPDVRTDAPCSDDKELCPRWAAIGECHRNPTYMVGTKDTLGFCRKSCGICDA

SEQ ID NO: 16193 - protein, 231 aa, Zea mays subsp. mays
  misc_feature (1)..(231): Ceres Seq. ID no. 12351360
MEKSMVADNDSGKSVASQARTSSGTFLAKREDEIVSAIEKRVAAWTFLPEENAESLQVLRYETGQKYDAHFDYFHDRNNLKLGGQRVATVLMYLTDVKKGGETVFPNAEGSHLQYKDETWSECSRSGLAVKPKKGDALLFFNLHVNATADTGSLHGSCPVIEGEKWSATKWIHVRSFDNPPDVRTDAPCSDDKELCPRWAAIGECHRNPTYMVGTKDTLGFCRKSCGICDA

SEQ ID NO: 16194 - protein, 227 aa, Zea mays subsp. mays
  misc_feature (1)..(227): Ceres Seq. ID no. 12351361
MVADNDSGKSVASQARTSSGTFLAKREDEIVSAIEKRVAAWTFLPEENAESLQVLRYETGQKYDAHFDYFHDRNNLKLGGQRVATVLMYLTDVKKGGETVFPNAEGSHLQYKDETWSECSRSGLAVKPKKGDALLFFNLHVNATADTGSLHGSCPVIEGEKWSATKWIHVRSFDNPPDVRTDAPCSDDKELCPRWAAIGECHRNPTYMVGTKDTLGFCRKSCGICDA

SEQ ID NO: 16195 - DNA, 1422 bp, Zea mays subsp. mays
  misc_feature (1)..(1422): Ceres Seq. ID no. 12351428
acgttctctgcacgttcatgttcgtcgtcacctccggattccccgaaatagacaaattcgcccacaccacaccctccgccgctgcacgcctccacgcctcgcccacccataggccatagccggtagatactttcatcaaagatagcacacaggattcgccccgccggttcgcgtgaaaaggagccgacgaatccacctacccgcattcgggctccagcgccaccccgtgccatcgggctgcgtccgctaacgaccgcccgttcgcgcagggcccagggtgtgggagggagcaatggtcgctgggatggaggcggaggaaggggtgatggcgacggacttcttctggtcgtacacggacgagccgcacgcgtcgcgccgccgggagatcctggccaagtacccgcagatcaaggagctcttcggcccggatccgtgggccttcctcaagattggtttggtcgtgtcgcttcagctatggactgctacattcctccgtgacgccagctggctgaagctactgacggtgtcctacttcttcgggtcgtttctaaaccacaacctgttcctggccatccacgagctgagccacaaccttgccttcgcgaccccatccctgaaccgctggctgggcatcttcgctgaacctccccatcggtgtgcccatgtccatcacgttccagaagtaccacctggagcaccaccggttccagggcgtggacggcgtggacatggacatcccgagccaggcggaggcgcgcgccgtgaggagcgccgccggcaagtccgcgtgggtcgtgctccagctcttcttctacgctctgcggccgctgttcctgaagccgaagcctccgggcctgtgggagctgaccaacctggcggcccaggtcggcctcgacgccgggctcgtgtacctgtgcggctggaggtcgctggcctaccttgtcctctccacgttcgtcggcggcggccatgcaccccatggcgggccacttcatctcggagcactacgtgttcagccccgagcaggagacctactcgtactacgggcccctgaacctggtggcgtggcacgtggggtaccacaacgagcaccacgacttccccaggatcccgggcacccggctgcacagggtgaaggagatggcgccggagtactacgacggcctcgagtcgtacaggtcctggagccaggtcatttacatgtacatcatggaccggacggtcggcccgttcagccggatgaagaggaaggcgcagaagaaagactcgtagtcgccgtgtgctcaatttgttttttttttggtcgcgtgtgatgtgaactcatgtttggtgtaagcatttcgattcgtcggaacagcttgtttgtgatatcaatggctcgttttttcgtgctggatccaccgtgcccagcacgagctgtcg

SEQ ID NO: 16196 - protein, 253 aa, Zea mays subsp. mays
  misc_feature (1)..(253): Ceres Seq. ID no. 12351429
MVAGMEAEEGVMATDFFWSYTDEPHASRRREILAKYPQIKELFGPDPWAFLKIGLVVSLQLWTATFLRDASWLKLLTVSYFFGSFLNHNLFLAIHELSHNLAFATPSLNRWLGIFAEPPHRCAHVHHVPEVPPGAPPVPGRGRRGHGHPEPGGGARREERRRQVRVGRAPALLLRSAAAVPEAEASGPVGADQPGGPGRPRRRARVPVRLEVAGLPCPLHVRRRRPCTPWRATSSRSTTCSAPSRRPTRTTGP

SEQ ID NO: 16197 - protein, 249 aa, Zea mays subsp. mays
  misc_feature (1)..(249): Ceres Seq. ID no. 12351430
MEAEEGVMATDFFWSYTDEPHASRRREILAKYPQIKELFGPDPWAFLKIGLVVSLQLWTATFLRDASWLKLLTVSYFFGSFLNHNLFLAIHELSHNLAFATPSLNRWLGIFAEPPHRCAHVHHVPEVPPGAPPVPGRGRRGHGHPEPGGGARREERRRQVRVGRAPALLLRSAAAVPEAEASGPVGADQPGGPGRPRRRARVPVRLEVAGLPCPLHVRRRRPCTPWRATSSRSTTCSAPSRRPTRTTGP

SEQ ID NO: 16198 - protein, 242 aa, Zea mays subsp. mays
  misc_feature (1)..(242): Ceres Seq. ID no. 12351431
MATDFFWSYTDEPHASRRREILAKYPQIKELFGPDPWAFLKIGLVVSLQLWTATFLRDASWLKLLTVSYFFGSFLNHNLFLAIHELSHNLAFATPSLNRWLGIFAEPPHRCAHVHHVPEVPPGAPPVPGRGRRGHGHPEPGGGARREERRRQVRVGRAPALLLRSAAAVPEAEASGPVGADQPGGPGRPRRRARVPVRLEVAGLPCPLHVRRRRPCTPWRATSSRSTTCSAPSRRPTRTTGP

SEQ ID NO: 16199 - DNA, 925 bp, Zea mays subsp. mays
  misc_feature (1)..(925): Ceres Seq. ID no. 12351451
gccagttcacctccgcctccgctcctcccctccccctcccgtcctgccatggccaccgcagcacgcgccctcgtcgccgcacgcccggcacggccgctgctgccgtctcggcgcctcccgtcctcctcttccatccgtcccgcgcggcaacgtgctggcgtcgggtgcgtccgctgcatggctcggcggccggattccacctattccccgctgcgttcgggccagggcggtgaccgtgcaccgactgaaatggcgcctctgttccctggctgcgactacgagcactggctcatcgtcatggacaagcccgggggcgagggcgccaccaagcagcaaatgatagattgttacatccagacccttgcccaggtggtagggagtgaagaggaggcgaagaagaggatatataatgtgtcctgcgagcgctattttggattcggatgcgaaattgacgaggagacctcccaacaaactcgaaggccttccaggggttctttttgtgcttcctgactcttacgttgatgctgagaacaaggattatggtgctgagttatttgtgaacggtgaaatcgttcagcgatctccagaaaggcagagaagggtggagccagtgcctcagagagctcaggatcgaccacggtacagtgaccggacccgctatgtgaagcggagggagaaccaatcttaccagagatgatgtttccgtctctgaagatgtaaaatgtcacggtttccacaagtgtccaaatgcggtactgaagatgcagcagcaactccccactactcatatgagaatggcatccgttctgtttgccgcgcattttaagctgtatatgcttattatgcatttgggcttgtacctcagtcgatatgaacgatgtatcctttgaactaacgcattataatttttgaaaccgttttagcc

SEQ ID NO: 16200 - protein, 169 aa, Zea mays subsp. mays
  misc_feature (1)..(169): Ceres Seq. ID no. 12351452
ASSPPPPLLPSPSRPAMATAARALVAARPARPLLPSRRLPSSSSIRPARQRAGVGCVRCMARRPDSTYSPLRSGQGGDRAPTEMAPLFPGCDYEHWLIVMDKPGGEGATKQQMIDCYIQTLAQVVGSEEEAKKRIYNVSCERYFGFGCEIDEETSQQTRRPSRGSFCAS

SEQ ID NO: 16201 - protein, 153 aa, Zea mays subsp. mays
  misc_feature (1)..(153): Ceres Seq. ID no. 12351453
MATAARALVAARPARPLLPSRRLPSSSSIRPARQRAGVGCVRCMARRPDSTYSPLRSGQGGDRAPTEMAPLFPGCDYEHWLIVMDKPGGEGATKQQMIDCYIQTLAQVVGSEEEAKKRIYNVSCERYFGFGCEIDEETSQQTRRPSRGSFCAS

SEQ ID NO: 16202 - protein, 112 aa, Zea mays subsp. mays
  misc_feature (1)..(112): Ceres Seq. ID no. 12351454
PVHLRLRSSPPPPVLPWPPQHAPSSPHARHGRCCRLGASRPPLPSVPRGNVLASGASAAWLGGRIPPIPRCVRARAVTVHRLKWRLCSLAATTSTGSSSWTSPGARAPPSSK

SEQ ID NO: 16203 - DNA, 812 bp, Zea mays subsp. mays
  misc_feature (1)..(812): Ceres Seq. ID no. 12351463
ctcaccaagaaagaaaaacagacacacgtcactgttcgccttgtccggtcgtttctgctccattcctcctcctgcaagccgcaaaggaatcaggcggagtggcgcgatgggagagcaggtcgtgacggagcagatccagcggaagctggaggaggtcaacgctaccgtccaacagcacctcgcgggtgtccaggaccacatcaacttcaccatgcagcaagcatacttcaagtgcgcatatggttgctttgatcggcgccatactcaggaagcgatcagcaactgtgtggagaattgtagtgtgcctgtccttgctgccaacaatatttttgagagtgagatggccaagtttcagggaatgttgaaccggtcattgagggtctgtcaagataagtttgaagctgccaatctccagaagttgaaatcagatgcaactcgggaactggaatcctgtgtcaacagatctattgatgacagcctcagggtccttccgcatgtggtggatcagatcaagtccaccctcaaaatcaattagaggcactattacttttagcaaatgaaccagatatagttgagaatgtttcatattcacattcgctgcataactccacattttcagagctcttaccgatattgatagaacatgatcaccctatcgtagttttttggattctgctcttaccacctagtcctggcatgtcaacagcgtcgacattttgaactctactgagaacacagcttaggcattgaaaggctggatgaacttgttgtgctacatgtacaagaatactcttacgtcttgtgattttttg

SEQ ID NO: 16204 - protein, 177 aa, Zea mays subsp. mays
  misc_feature (1)..(177): Ceres Seq. ID no. 12351464
SPRKKNRHTSLFALSGRFCSIPPPASRKGIRRSGAMGEQVVTEQIQRKLEEVNATVQQHLAGVQDHINFTMQQAYFKCAYGCFDRRHTQEAISNCVENCSVPVLAANNIFESEMAKFQGMLNRSLRVCQDKFEAANLQKLKSDATRELESCVNRSIDDSLRVLPHVVDQIKSTLKIN

SEQ ID NO: 16205 - protein, 142 aa, Zea mays subsp. mays
  misc_feature (1)..(142): Ceres Seq. ID no. 12351465
MGEQVVTEQIQRKLEEVNATVQQHLAGVQDHINFTMQQAYFKCAYGCFDRRHTQEAISNCVENCSVPVLAANNIFESEMAKFQGMLNRSLRVCQDKFEAANLQKLKSDATRELESCVNRSIDDSLRVLPHVVDQIKSTLKIN

SEQ ID NO: 16206 - protein, 107 aa, Zea mays subsp. mays
  misc_feature (1)..(107): Ceres Seq. ID no. 12351466
MQQAYFKCAYGCFDRRHTQEAISNCVENCSVPVLAANNIFESEMAKFQGMLNRSLRVCQDKFEAANLQKLKSDATRELESCVNRSIDDSLRVLPHVVDQIKSTLKIN

SEQ ID NO: 16207 - DNA, 901 bp, Zea mays subsp. mays
  misc_feature (1)..(901): Ceres Seq. ID no. 12351498
ttccacttcacagcctctccgcctccgctcctcgcgccgccgccgcgtctcctcctgtacaggtaaggagaggaagagggcgaaatggtgaagcacaacaacgtcatccccaacgggcacttcaagaagcactggcagaactatgtcaagacatggttcaaccagcccgcccgcaagcagaggcgccgcatcgctcgtcaaaagaaggctgtgaagatattcccccgcccgactgctggtcctctacgccccattgttcaatgccagactttaaagtacaacatgaagtcaagggctgggagaggctttacccttgaggagctgaaggctgctggcatcccaaagaagcttgctccaaccattggtatttctgttgatcaccgccgcaagaacaaatcccttgagggactgcaggccaatgtccagaggcttaagacatacaaggccaagctggttatcttcccaaggcgtgcacacaaggttaaggctggtgactctactccagaggagcttgccaccgctacccaggtccagggtgactacatgccatttactcgtggtgagaaacgttcagttgaggttgtgaaggtcacagatgagatgaagtcatttgctgcctatggcaagctccgccttgagcggatgaacaagaaacatcttggtgcccgccagaagaaggcagctgaggcagagaaggaagataagaagtgaagcggttgaagatagtaccctgttttgttctattcagtcattagtgaatgctactacttaaagtgcttgttctatgttttttttgcggtaatggaaatagagcccagacaaacattttggtgtcctactgtttgatgccttgtacttgtttgcgaactcagctatctaatgggttattggattcttgctc

SEQ ID NO: 16208 - protein, 208 aa, Zea mays subsp. mays; identical to SEQ ID NO: 15525
  misc_feature (1)..(208): Ceres Seq. ID no. 12351499

SEQ ID NO: 16209 - protein, 142 aa, Zea mays subsp. mays; identical to SEQ ID NO: 15526
  misc_feature (1)..(142): Ceres Seq. ID no. 12351500

SEQ ID NO: 16210 - protein, 104 aa, Zea mays subsp. mays
  misc_feature (1)..(104): Ceres Seq. ID no. 12351501
PLHSLSASAPRAAAASPPVQVRRGRGRNGEAQQRHPQRALQEALAELCQDMVQPARPQAEAPHRSSKEGCEDIPPPDCWSSTPHCSMPDFKVQHEVKGWERLYP

SEQ ID NO: 16211 - DNA, 866 bp, Zea mays subsp. mays
  misc_feature (1)..(866): Ceres Seq. ID no. 12351502
aaaaaaatccagtcgcatctccctctccgaaatcaaggtagcgtacaccgctgcagtttctagagccctctctgccactcgtgatcccactagtcacaatgcctgccctcgccaagcccgcctcccgcaccgccaagcccgccgcggctccgaagccgaagcctgccgccgccaagccgaaggcggccaccgctggtgcctcccacccgccttacttcgagatgatcaaggaggctatcacggcgctcaaggagaggaccggctccagctcgcaagcgatcgccaagtatgtgggggacaagcacggcgcgtctctgccggccaacttcaagaagatgctttccatccagctccgtgggtccgcagccaagggcaagctcgtgaaggtcaaggcttcgtacaagctctcggacgccgccaagaaggcatcccccaagaccaaggctaagccggcaaaggccgccgctgccaagaccaccgcccccaagccggccaaggccgccgccgccaagtcaaagaaggcagcggctgccaagccaaagaaggccgctgctgctgggaccaagcgcaaagtgcccgagaagaaggtcgtggcgaagccgaagaagtcccccgccgccaaggccaaggccaagccgaagaccgtgaagtcccctgcctccaagaaggcacggaaggcctccgcatgagatgggttgctttaggtctaagctctgattgtggttggtgtcagttaggtactgtacaaactaagtgtgtgcccaaagtgtctcaggcggtgtgttatgtgcttagcaagttctatctatcagagtgttttagtttaacaatggttttacctctggcttttgtagtcaggtttctgg

SEQ ID NO: 16212 - protein, 196 aa, Zea mays subsp. mays
  misc_feature (1)..(196): Ceres Seq. ID no. 12351503
MPALAKPASRTAKPAAAPKPKPAAAKPKAATAGASHPPYFEMIKEAITALKERTGSSSQAIAKYVGDKHGASLPANFKKMLSIQLRGSAAKGKLVKVKASYKLSDAAKKASPKTKAKPAKAAAAKTTAPKPAKAAAAKSKKAAAAKPKKAAAAGTKRKVPEKKVVAKPKKSPAAKAKAKPKTVKSPASKKARKASA

SEQ ID NO: 16213 - protein, 155 aa, Zea mays subsp. mays
  misc_feature (1)..(155): Ceres Seq. ID no. 12351504
MIKEAITALKERTGSSSQAIAKYVGDKHGASLPANFKKMLSIQLRGSAAKGKLVKVKASYKLSDAAKKASPKTKAKPAKAAAAKTTAPKPAKAAAAKSKKAAAAKPKKAAAAGTKRKVPEKKVVAKPKKSPAAKAKAKPKTVKSPASKKARKASA

SEQ ID NO: 16214 - protein, 148 aa, Zea mays subsp. mays
  misc_feature (1)..(148): Ceres Seq. ID no. 12351505
KKSSRISLSEIKVAYTAAVSRALSATRDPTSHNACPRQARLPHRQARRGSEAEACRRQAEGGHRWCLPPALLRDDQGGYHGAQGEDRLQLASDRQVCGGQARRVSAGQLQEDAFHPAPWVRSQGQAREGQGFVQALGRRQEGIPQDQG

SEQ ID NO: 16215 - DNA, 1622 bp, Zea mays subsp. mays
  misc_feature (1)..(1622): Ceres Seq. ID no. 12351540
aattccttcctctcctctcgccccacgcccctctccatctgctcccgctccgcctcgcctagggttttgcccccaaacctagcctcccccgaatctcccacgccatggacgtcgagggcgaggtccccgccgccgccgcggcggcggtggcgaacggcctgggcggcgcgggcgcggaggaggcctctccggcgccggtctcggctgagcagctcgacgtggaggcgtacgcggcgcagtactcggggcggacccgcctcgtgcgcctcctctttgtcgccgaccggtgcggggtggaggcgatgcagctcgaggcgctgcggatggcttacgacgagatcaagcgcggggaggacgtgcagctccaccgcgacgtcgtcaccaagatcggcggccgcctcggtccgcgctacggcctcgaccaggcgtgggtcttcagcgtctcccgccgcgccgaccagcgcaaggagaagctcgagagcgagctcaatggatacaggactaacttaatcaaagagagcatcagaatgggctacaatgacattggtgatttcttctatgcccatggccaactttcagatgctttcaaaagctacatcaggactcgggactattgcaccacttccaaacatatagttcagatgtgcatgaatgtgattctggttagcattgagctggggcaatatgcacatgtttcaaactatgtcagcaaagcagagcaaacccccgactctctggatcctaccattgttgcaaagctgaaggcagctgcaggattagccaacttggaaacaaagaaatacaaatttgctgctcgtaagtttgttgagacaggaattgaactaggaaacaacttctctgaagtcatagctcctcaagacgtggcagtctatggtgccctttgtgcacttgcttcttttgaccgttcagacctgaagagcaaagtcattgacaatatcaacttccgtaactttctggacctggtgcctgaagtaagggagctggttaatgatttttatgcaagtcgctatggatcttgcttgggtcatcttgagaagctaaagcctaacctgctcctggatatccatttgcatcagcatgtagagactctgtatatggagattcgccacaaagcgatcatacagtacacacttccttttatatctgttgacctcaacacgatggcagccgcctttaagacttcggtctccatgctgcagaaggagctggccgcactgattactgaggacaaaatacaggcccggatagactcccacaacaagatcctttacgcaaggcatgctgaccagagaaatgcaactttccagcgtgtccttcaaaccggcaatgactttgagagagatgtcaagtccatgcttctgcgtgccaacctcctcaagcatgattacattcagaagacaagcggaccaaggaagatgtaaagattgcgggcgtcgctgctaggcaaggcttcctgctgcatgcctctccacttttttttttgaagaattgttctgtgacataaaagggaccgaagtctgtctaaatgccctccccctctttctttttattggttgatgaaagttattgtcgaagtaatgtatggttgagcatctggatgt

SEQ ID NO: 16216 - protein, 445 aa, Zea mays subsp. mays
  misc_feature (1)..(445): Ceres Seq. ID no. 12351541
MDVEGEVPAAAAAAVANGLGGAGAEEASPAPVSAEQLDVEAYAAQYSGRTRLVRLLFVADRCGVEAMQLEALRMAYDEIKRGEDVQLHRDVVTKIGGRLGPRYGLDQAWVFSVSRRADQRKEKLESELNGYRTNLIKESIRMGYNDIGDFFYAHGQLSDAFKSYIRTRDYCTTSKHIVQMCMNVILVSIELGQYAHVSNYVSKAEQTPDSLDPTIVAKLKAAAGLANLETKKYKFAARKFVETGIELGNNFSEVIAPQDVAVYGALCALASFDRSDLKSKVIDNINFRNFLDLVPEVRELVNDFYASRYGSCLGHLEKLKPNLLLDIHLHQHVETLYMEIRHKAIIQYTLPFISVDLNTMAAAFKTSVSMLQKELAALITEDKIQARIDSHNKILYARHADQRNATFQRVLQTGNDFERDVKSMLLRANLLKHDYIQKTSGPRKM

SEQ ID NO: 16217 - protein, 379 aa, Zea mays subsp. mays
  misc_feature (1)..(379): Ceres Seq. ID no. 12351542
MQLEALRMAYDEIKRGEDVQLHRDVVTKIGGRLGPRYGLDQAWVFSVSRRADQRKEKLESELNGYRTNLIKESIRMGYNDIGDFFYAHGQLSDAFKSYIRTRDYCTTSKHIVQMCMNVILVSIELGQYAHVSNYVSKAEQTPDSLDPTIVAKLKAAAGLANLETKKYKFAARKFVETGIELGNNFSEVIAPQDVAVYGALCALASFDRSDLKSKVIDNINFRNFLDLVPEVRELVNDFYASRYGSCLGHLEKLKPNLLLDIHLHQHVETLYMEIRHKAIIQYTLPFISVDLNTMAAAFKTSVSMLQKELAALITEDKIQARIDSHNKILYARHADQRNATFQRVLQTGNDFERDVKSMLLRANLLKHDYIQKTSGPRKM

SEQ ID NO: 16218 - protein, 372 aa, Zea mays subsp. mays
  misc_feature (1)..(372): Ceres Seq. ID no. 12351543
MAYDEIKRGEDVQLHRDVVTKIGGRLGPRYGLDQAWVFSVSRRADQRKEKLESELNGYRTNLIKESIRMGYNDIGDFFYAHGQLSDAFKSYIRTRDYCTTSKHIVQMCMNVILVSIELGQYAHVSNYVSKAEQTPDSLDPTIVAKLKAAAGLANLETKKYKFAARKFVETGIELGNNFSEVIAPQDVAVYGALCALASFDRSDLKSKVIDNINFRNFLDLVPEVRELVNDFYASRYGSCLGHLEKLKPNLLLDIHLHQHVETLYMEIRHKAIIQYTLPFISVDLNTMAAAFKTSVSMLQKELAALITEDKIQARIDSHNKILYARHADQRNATFQRVLQTGNDFERDVKSMLLRANLLKHDYIQKTSGPRKM

SEQ ID NO: 16219 - DNA, 1208 bp, Zea mays subsp. mays
  misc_feature (1)..(1208): Ceres Seq. ID no. 12351544
gcagcagcccaggaagcaacacccagccgcctaatcccgcaacaactcgccctcttctacccccatcggctcctctgcatccgcataccggtggcctacaggtttgctggagtgcagtgcacgggcggtggagcagcaaatctgcaactgattcaggatggatcaggaggcgaaggactctaggccctcaaggtctcccagcgagccaaacctcttcccaatggggtagccgtaagaggctgcgatgtgtcaagacgcgtgatgacggctcaccatcgccgtcgccgtctcaaggtcttaggcgtgccataccccgttctactcggcccctccttggagcagacattgcagcatttcgttcaccgcggcgccctagcacccttaaccgcaggaaatccgatttgctggtgaatgagtacaagcacacgatggcgctatcgccagagaaggacaagtattacacaacgaggggttcaccatttccctttgaaggaaatgggtttgactttggtaccataacagaggataagggaaccacatcgttgccgagattcttcattgcattgtcaaacaaggagaaggaggaggacttcatggcgatgaagggctccaagctgccacagaggccaaagaagaggcccaagctgatgcagaagtgcttgcttatggtgagcccaggagcttggttatcagatctatctcatgagagatatgaagttagagagaagaagagttctaaaaagagggctagaggcttgaaggctttgagcatggcgagtgattcagaatagagtttgaggcgaatggatttttggacttgactttagctggtggcaagaatctgtagttaggtggcactgccttctgcctgtcagacaaacctctgcatctaatttggtgctatgagtgctctgatcaaggtctattgatgtcaacagcaaagatgatattagattcctgatctagtgaggtgcagctccatctttctgggtagtgggcgcctttgtgggagagaaaatggagggtgggatacaatagatggtttctcaaaaccacaggaggaagtaatgttcaactgttgggaaacattgaaagctggatgttgggctgagaaccaatgaatcatgatgtttaatcgtcataaacttgtagctgtaagacttatggtgaccattctgtccattcaatcaagactgaccaaaattttc

SEQ ID NO: 16220 - protein, 262 aa, Zea mays subsp. mays
  misc_feature (1)..(262): Ceres Seq. ID no. 12351545
SSPGSNTQPPNPATTRPLLPPSAPLHPHTGGLQVCWSAVHGRWSSKSATDSGWIRRRRTLGPQGLPASQTSSQWGSRKRLRCVKTRDDGSPSPSPSQGLRRAIPRSTRPLLGADIAAFRSPRRPSTLNRRKSDLLVNEYKHTMALSPEKDKYYTTRGSPFPFEGNGFDFGTITEDKGTTSLPRFFIALSNKEKEEDFMAMKGSKLPQRPKKRPKLMQKCLLMVSPGAWLSDLSHERYEVREKKSSKKRARGLKALSMASDSE

SEQ ID NO: 16221 - DNA, 1535 bp, Zea mays subsp. mays
  misc_feature (1)..(1535): Ceres Seq. ID no. 12351554
gatagaacacgacctggggggttcagatcggatcggaagcttccataagtttccatcgggcttcgccggtatggcgatccgcaaggggtcttcgtacgccgtcgcggcacttctcgcgctcgcctctgtcgccgccgttgcaggggaggtcttcttccaggagaagttcgaagatggctgggaaagtcggtgggtcaagtccgagtggaagaaggatgagaacatggctggtgaatggaaccacacctcgggaaaatggaatggagatgccgaggacaaaggtattcaaacctccgaggattacaggttctatgccatttcagccgaataccctgagttcagcaacaaggataagaccctggtgctgcagttctctgtgaagcacgagcagaagcttgactgcggtggtggctacgtcaagttgctgggtggtggtgatgtagaccagaagaaatttggtggagacacatcttacagcattatgtttggaccagatatctgtgggtacagcaccaagaaggttcacactatcctgaccaaggatggcaagaaccacttgatcaagaaggatgtgccttgtgagactgatcagttgactcatgtttacactttgatcatccgtcctgatgcaacatacagcattctcattgataatgaagataagcaaactggcagcatctacgagcactgggatattcttccccctaagaaaatcaaggacccagaggctaagaagcctgaggactgggatgacaaggagtacattcctgaccctgaggacaagaagccagagggctatgatgatattcccaaggaaattcctgaccctgatgctaagaagcctgaggactgggacgatgaggaagatggtgaatggactgcccctaccattcccaacccagaatacaagggaccatggaaacaaaagaaaatcaagaacccgaactaccagggtaaatggaaggcacctatgattgacaacccagattttaaggatgatccatacatttacgccttcgacagcttgaagtacattggcattgagctgtggcaggttaaaatcgggcactctgtttgacaacatcatcatcactgatgaccctgccttggccaagacttttgcagaggagacctggggcaagcacaaggaggcagaaaaggctgcttttgatgaggccgagaaaaaaaaggaagaagaggatgccgccaagggtggggatgatgaggatgatgacctagaggatgaggaagacgatgagaaggcagacgaggacaaggccgactctgatgccgaggatggcaaggattctgatgatgagaagcacgacgagctctagatggcgaggatgatgttgcggccgctggcctagatttatcagctctgccactatgaagttctttttttttcccgtgaccaccaagaatgtagaacactgctaataagcagatggacagtttgggtcgccgtagcgctttgtagtcatttttcccattaaagccgataacactgaacaaggaggaaggatcttttgccc

SEQ ID NO: 16222 - protein, 358 aa, Zea mays subsp. mays
  misc_feature (1)..(358): Ceres Seq. ID no. 12351555
IEHDLGGSDRIGSFHKFPSGFAGMAIRKGSSYAVAALLALASVAAVAGEVFFQEKFEDGWESRWVKSEWKKDENMAGEWNHTSGKWNGDAEDKGIQTSEDYRFYAISAEYPEFSNKDKTLVLQFSVKHEQKLDCGGGYVKLLGGGDVDQKKFGGDTSYSIMFGPDICGYSTKKVHTILTKDGKNHLIKKDVPCETDQLTHVYTLIIRPDATYSILIDNEDKQTGSIYEHWDILPPKKIKDPEAKKPEDWDDKEYIPDPEDKKPEGYDDIPKEIPDPDAKKPEDWDDEEDGEWTAPTIPNPEYKGPWKQKKIKNPNYQGKWKAPMIDNPDFKDDPYIYAFDSLKYIGIELWQVKIGHSV

SEQ ID NO: 16223 - protein, 335 aa, Zea mays subsp. mays
  misc_feature (1)..(335): Ceres Seq. ID no. 12351556
MAIRKGSSYAVAALLALASVAAVAGEVFFQEKFEDGWESRWVKSEWKKDENMAGEWNHTSGKWNGDAEDKGIQTSEDYRFYAISAEYPEFSNKDKTLVLQFSVKHEQKLDCGGGYVKLLGGGDVDQKKFGGDTSYSIMFGPDICGYSTKKVHTILTKDGKNHLIKKDVPCETDQLTHVYTLIIRPDATYSILIDNEDKQTGSIYEHWDILPPKKIKDPEAKKPEDWDDKEYIPDPEDKKPEGYDDIPKEIPDPDAKKPEDWDDEEDGEWTAPTIPNPEYKGPWKQKKIKNPNYQGKWKAPMIDNPDFKDDPYIYAFDSLKYIGIELWQVKIGHSV

SEQ ID NO: 16224 - protein, 284 aa, Zea mays subsp. mays
  misc_feature (1)..(284): Ceres Seq. ID no. 12351557
MAGEWNHTSGKWNGDAEDKGIQTSEDYRFYAISAEYPEFSNKDKTLVLQFSVKHEQKLDCGGGYVKLLGGGDVDQKKFGGDTSYSIMFGPDICGYSTKKVHTILTKDGKNHLIKKDVPCETDQLTHVYTLIIRPDATYSILIDNEDKQTGSIYEHWDILPPKKIKDPEAKKPEDWDDKEYIPDPEDKKPEGYDDIPKEIPDPDAKKPEDWDDEEDGEWTAPTIPNPEYKGPWKQKKIKNPNYQGKWKAPMIDNPDFKDDPYIYAFDSLKYIGIELWQVKIGHSV

SEQ ID NO: 16225 - DNA, 1232 bp, Zea mays subsp. mays
  misc_feature (1)..(1232): Ceres Seq. ID no. 12351655
agaactccaaattccacgccgatccgcccccaccactactccaccgcgcgcctcccctcccgaatcccgatccatctccatccagccgccgccggcatccgcgagaggccatggacgtgagcaggaagaagaagtgggtggcctgggcggtggcggccgccatcttcgtcgtcctcatgctcgtcacgcccgccatcccgcaggacgaagcctaccacgacttcgcggaccagcgcacccttttcttagggattcccaacaccttgaatgtgatctcagacatccctttcttctttgttggcgtcacggggctcatcctgtgccacttcaacaactatttcaggctaagctcgcagggggagctctggagttggacgctgttctttgctggtgtcacggctgttggatttggttcttcctattatcatctcaacccgaatgacgccaccctagtttgggacagactgccaatgacgattgctttcacttctgtcatggctatattcattattgaaagggttgatgatagagcaggggcaaaatcccttgcaccacttgtgattgcgggtgccttgagcatcatgtattggagacactttgatgatcttcgcccgtacgcagtagttcagtttgttccatgcattgctttacctgtgatggctatagtaattccaccgatgtatacacattcaagctactggttgtgggcagcaggattttacctccttgctaaagtggaagaggctgctgacaaaactatctacaattggactcatcagattgttagtggtcatactcttaagcatctatgtgctgcgatggtaccggttttcctggctctcatgctagctaaaaggactaccgaaccagaaaggataagcttgctccagaagtggaagaccagttgggttgcggtgagagagaggcgtttcaaagatagcagtacagttgatgtggattgcggctacgctgttgtttcaagtatatctgaacagtaaattgtcatgcatctaattaacatgcacgttgtttcaagtattagcatgcatgctgcgcatgtgtatgagagaagatccctgtgaagtattaagaaaccaacctacctagttgagtttgctggtcggagttagctgtgcctgtgggtgacatatcttgtacatagcagaaagcaatacaagtaacggaagcatgtattacaagatttgcgtatatcatttcaatttttttcctcg

SEQ ID NO: 16226 - protein, 331 aa, Zea mays subsp. mays
  misc_feature (1)..(331): Ceres Seq. ID no. 12351656
NSKFHADPPPPLLHRAPPLPNPDPSPSSRRRHPREAMDVSRKKKWVAWAVAAAIFVVLMLVTPAIPQDEAYHDFADQRTLFLGIPNTLNVISDIPFFFVGVTGLILCHFNNYFRLSSQGELWSWTLFFAGVTAVGFGSSYYHLNPNDATLVWDRLPMTIAFTSVMAIFIIERVDDRAGAKSLAPLVIAGALSIMYWRHFDDLRPYAVVQFVPCIALPVMAIVIPPMYTHSSYWLWAAGFYLLAKVEEAADKTIYNWTHQIVSGHTLKHLCAAMVPVFLALMLAKRTTEPERISLLQKWKTSWVAVRERRFKDSSTVDVDCGYAVVSSISEQ

SEQ ID NO: 16227 - protein, 295 aa, Zea mays subsp. mays
  misc_feature (1)..(295): Ceres Seq. ID no. 12351657
MDVSRKKKWVAWAVAAAIFVVLMLVTPAIPQDEAYHDFADQRTLFLGIPNTLNVISDIPFFFVGVTGLILCHFNNYFRLSSQGELWSWTLFFAGVTAVGFGSSYYHLNPNDATLVWDRLPMTIAFTSVMAIFIIERVDDRAGAKSLAPLVIAGALSIMYWRHFDDLRPYAVVQFVPCIALPVMAIVIPPMYTHSSYWLWAAGFYLLAKVEEAADKTIYNWTHQIVSGHTLKHLCAAMVPVFLALMLAKRTTEPERISLLQKWKTSWVAVRERRFKDSSTVDVDCGYAVVSSISEQ

SEQ ID NO: 16228 - protein, 273 aa, Zea mays subsp. mays
  misc_feature (1)..(273): Ceres Seq. ID no. 12351658
MLVTPAIPQDEAYHDFADQRTLFLGIPNTLNVISDIPFFFVGVTGLILCHFNNYFRLSSQGELWSWTLFFAGVTAVGFGSSYYHLNPNDATLVWDRLPMTIAFTSVMAIFIIERVDDRAGAKSLAPLVIAGALSIMYWRHFDDLRPYAVVQFVPCIALPVMAIVIPPMYTHSSYWLWAAGFYLLAKVEEAADKTIYNWTHQIVSGHTLKHLCAAMVPVFLALMLAKRTTEPERISLLQKWKTSWVAVRERRFKDSSTVDVDCGYAVVSSISEQ

SEQ ID NO: 16229 - DNA, 1534 bp, Zea mays subsp. mays
  misc_feature (1)..(1534): Ceres Seq. ID no. 12351659
actactacttcccccccccgtcctctcgatctctctccccgttcccctgacgagccaggcgtcaagtggcagggaggagaggaggcaccgcgtgtgaggctcaatggggacggggagcgcgcgggcgctggccctggcgctcgccgtgcttctggcctgctccgacgtcgccgtcgtcacggctcaggaaaccgagcggatcgaaggaagcgctggtgatgtgttagaagatgaccctgttgggaggctcaaggtctatgtctatgatctccccagcaaatacaacaagaagctgctcaagaaggatcctaggtgcctgaaccatatgtttgccgctgagatcttcatgcaccggttcctgttgtcaagcgctgtccgaacttttaatcctgaggaagcagattggttctacacacccgtatacacgacgtgtgatctgacccctaagggtcttcccttgcctttcaagtctcctcggatgatgcgtagcgcaatccagctgattgctacgaactggccttactggaatagatcagatggcgcagatcatttctttgtcacaccccatgactttggtgcttgctttcattatcaggaagagaaagccattggacggggaatccttcccttgcttcagcgtgctacgttggttcagacctttggacagaagaaccatgtctgcctgaaggatgggtccatcacgatcccgccatatgcgcctcctcagaaaatgcagactcaccttatccccccggacacccctcgatccatctttgtgtacttccgaggtctgttctatgacaccggcaatgaccccgagggcggatactacgcaagaggtgctcgtgcatcggtctgggagaacttcaagaacaacccgctgtttgacatctcgaccgatcacccaccaacatactacgaagacatgcagcgctcggtgttctgcctctgcccgttgggctgggcaccgtggagtcccaggctagtcgaagccgtggtctttggctgcatcccggtgatcatcgcagacgacatcgtcctccccttcgcggacgccatccccgtgggaggagatcggcgtcttcgttgcagaggatgatgtcccgcagctggacagcatcctgacatccatccccacagacgtcgtgctgaggaagcagcggctccttgcgaacccgtcgatgaagcaggccatgctgttcccccagcctgctcagccaggagatgcgttccaccagatcctgaacggcctagcgcgcaagctcccgcacggcagcaatgtcttcctgaagcctggtgagagggccctgaactggaccgctggaccaccaggcgacctgaaaccttggtagcgtcctgtggatctgagatggatacgacttgttctgaaaggaaatatggagaacatgattatatatatacccgtgcctttgagttaccatgggtgcatagtgctgacaagaagccaaatgtacatcgttctatgttctttttctataactgttatatacatataaatatcttcgtttcttcc

SEQ ID NO: 16230 - protein, 331 aa, Zea mays subsp. mays
  misc_feature (1)..(331): Ceres Seq. ID no. 12351660
MGTGSARALALALAVLLACSDVAVVTAQETERIEGSAGDVLEDDPVGRLKVYVYDLPSKYNKKLLKKDPRCLNHMFAAEIFMHRFLLSSAVRTFNPEEADWFYTPVYTTCDLTPKGLPLPFKSPRMMRSAIQLIATNWPYWNRSDGADHFFVTPHDFGACFHYQEEKAIGRGILPLLQRATLVQTFGQKNHVCLKDGSITIPPYAPPQKMQTHLIPPDTPRSIFVYFRGLFYDTGNDPEGGYYARGARASVWENFKNNPLFDISTDHPPTYYEDMQRSVFCLCPLGWAPWSPRLVEAVVFGCIPVIIADDIVLPFADAIPVGGDRRLRCRG

SEQ ID NO: 16231 - protein, 257 aa, Zea mays subsp. mays
  misc_feature (1)..(257): Ceres Seq. ID no. 12351661
MFAAEIFMHRFLLSSAVRTFNPEEADWFYTPVYTTCDLTPKGLPLPFKSPRMMRSAIQLIATNWPYWNRSDGADHFFVTPHDFGACFHYQEEKAIGRGILPLLQRATLVQTFGQKNHVCLKDGSITIPPYAPPQKMQTHLIPPDTPRSIFVYFRGLFYDTGNDPEGGYYARGARASVWENFKNNPLFDISTDHPPTYYEDMQRSVFCLCPLGWAPWSPRLVEAVVFGCIPVIIADDIVLPFADAIPVGGDRRLRCRG

SEQ ID NO: 16232 - protein, 250 aa, Zea mays subsp. mays
  misc_feature (1)..(250): Ceres Seq. ID no. 12351662
MHRFLLSSAVRTFNPEEADWFYTPVYTTCDLTPKGLPLPFKSPRMMRSAIQLIATNWPYWNRSDGADHFFVTPHDFGACFHYQEEKAIGRGILPLLQRATLVQTFGQKNHVCLKDGSITIPPYAPPQKMQTHLIPPDTPRSIFVYFRGLFYDTGNDPEGGYYARGARASVWENFKNNPLFDISTDHPPTYYEDMQRSVFCLCPLGWAPWSPRLVEAVVFGCIPVIIADDIVLPFADAIPVGGDRRLRCRG

SEQ ID NO: 16233 - DNA, 1341 bp, Zea mays subsp. mays
  misc_feature (1)..(1341): Ceres Seq. ID no. 12351670
atcactcaccaagaaccagagaggagcttcatcagctcattcaattctcgttccatccctcgtctcttgtgtcccgcctccgttccataattcaccagcgtcgtcctacccatatctcccatcgtcttctccctcgcgccatcagcttccccaagccagcggcgaccatgatctccccggacaccatccgcacggccatcggcgtcatcggcaatggaactgcactcgtgctcttcctctccccagtgcctacgttcatccgcatctggaagaaagggtcggtggagcagtactcgccgatcccgtacgtggcgacgctgctgaactgcatgatgtgggtgctgtacgggctgccggcggtgcacccgcacagcatgctggtgatcaccatcaacggcaccggcatggcgatccagctgacctacgtggcgctcttcctcctctactccgcgggggcggccggcgcaaggtggtcctgctgctggccgccgaggtgggcttcgtcggcgccgtcgccgcgctggtgctcagcctggcgcacacgcacgagcgcaggtccatggtggtcggcatcctctgcgtcctcttcggcaccggcatgtacgccgccccgctctccgtcaaaaatggtgatccagacaaagagcgtggagtacatgcccctgttcctgtcgctggcttccctcgtgaatggcatctgctggactgcttacgcgctcatccgcttcgacctctacattactatccccaacgggctgggcgtgctgttcgcggtggcgcagctggtgctgtacgccatctactacaagtccacccaggagatcatcgaggcgcgcaagcgcaaggccgaccagatcgccatgaccggggtggtcgtcgacggcggcaagaccaacaaccaagccgccgcgggccaatactgaccgacgatcaagtgacgatcgacaccaatatgctcatgcaagaagccagcggcaaatcaattatgtcgccgctgggttttatgtattttgtgattctatctgcacgctgcttgtccgtcccaatggaaaaaaaagggggggaagaaaaaggtttgtcggtatatgtgttctcgccgaataactctcgcgcatagctagctggtggggctgagtcactgccttcgctatatgtatacgtgcaaaaattagaggtggagggttgttttagctaatcccaccttaattccaaggcagagtgacctttttttttttctccttctgtttcctaggattttgctataattgagcaatttagcgcgacttgttattggtgttggtgtgtctcaatcaaatagtaaaatgttcattttactctttc

SEQ ID NO: 16234 - protein, 371 aa, Zea mays subsp. mays
  misc_feature (1)..(371): Ceres Seq. ID no. 12351671
SLTKNQRGASSAHSILVPSLVSCVPPPFHNSPASSYPYLPSSSPSRHQLPQASGDHDLPGHHPHGHRRHRQWNCTRALPLPSAYVHPHLEERVGGAVLADPVRGDAAELHDVGAVRAAGGAPAQHAGDHHQRHRHGDPADLRGALPPLLRGGGRRKVVLLLAAEVGFVGAVAALVLSLAHTHERRSMVVGILCVLFGTGMYAAPLSVKNGDPDKERGVHAPVPVAGFPREWHLLDCLRAHPLRPLHYYPQRAGRAVRGGAAGAVRHLLQVHPGDHRGAQAQGRPDRHDRGGRRRRQDQQPSRRGPILTDDQVTIDTNMLMQEASGKSIMSPLGFMYFVILSARCLSVPMEKKGGEEKGLSVYVFSPNNSRA

SEQ ID NO: 16235 - protein, 306 aa, Zea mays subsp. mays
  misc_feature (1)..(306): Ceres Seq. ID no. 12351672
HSPRTREELHQLIQFSFHPSSLVSRLRSIIHQRRPTHISHRLLPRAISFPKPAATMISPDTIRTAIGVIGNGTALVLFLSPVPTFIRIWKKGSVEQYSPIPYVATLLNCMMWVLYGLPAVHPHSMLVITINGTGMAIQLTYVALFLLYSAGAAGARWSCCWPPRWASSAPSPRWCSAWRTRTSAGPWWSASSASSSAPACTPPRSPSKMVIQTKSVEYMPLFLSLASLVNGICWTAYALIRFDLYITIPNGLGVLFAVAQLVLYAIYYKSTQEIIEARKRKADQIAMTGVVVDGGKTNNQAAAGQY

SEQ ID NO: 16236 - protein, 251 aa, Zea mays subsp. mays
  misc_feature (1)..(251): Ceres Seq. ID no. 12351673
MISPDTIRTAIGVIGNGTALVLFLSPVPTFIRIWKKGSVEQYSPIPYVATLLNCMMWVLYGLPAVHPHSMLVITINGTGMAIQLTYVALFLLYSAGAAGARWSCCWPPRWASSAPSPRWCSAWRTRTSAGPWWSASSASSSAPACTPPRSPSKMVIQTKSVEYMPLFLSLASLVNGICWTAYALIRFDLYITIPNGLGVLFAVAQLVLYAIYYKSTQEIIEARKRKADQIAMTGVVVDGGKTNNQAAAGQY

SEQ ID NO: 16237 - DNA, 1511 bp, Zea mays subsp. mays
  misc_feature (1)..(1511): Ceres Seq. ID no. 12351690
agcccggcacaccgagccgcggcgtcaaggacgacatatccgagctcaccgaaacgctcactcgccgcctctggggcgtcgcatccttcctcgcaccgcccccgaccccgccggaggcctccaccccgcgcgccgcgactccggcacaaggggaagatgaggggattgaggatggggaggaggccgcggtgctgtccccccggactgcggggatccgcagcgatctagccgagataggcggaaggatgtggagcggtttctcgatgctgcagaacaacttggccgtggccgagatctccaagatcgcctcgtcgctcctgccgttcgggcaaggggaggcggacgagggggagtccgtgcccggcatcaccgaagaggtggtggtgttcgtcaggcacatctccacgcggcccgagacatggctcgattttcccctcttcatcagcgagcgctacgcggatgatttcgaactgtcagatgctcagtacgtgcatgctctgtctgtagagcaccttgtgccaggattatcagatttaaaggctcagatttgctctactgacatgactgaagcatgtttctggaagatctactttgtgcttttgcactcgaaactcaataagcaagatgctgaggttctttcgacgccacagatcctagaagcaagggagcagttgttgcaaagtttagggtctgagaaaaagcggggatccaagtttcccgacgagtcatccgccgagagctcgaacgcatcctccgctcctgctgaagagaaggtgattcaacctccagtcatccaagacaaagcagacgcttgggagaaatcatcgtccgaagaaccttctgaaaccgtgtccgagaaattcccagtctcaaccaccgaagtggaaatggtggacaaatcagtggttgaggaagagctgactgtggcaaatgagagcaagacctcaccggtgaagtccaagcttccctacgaggctgatgaagaggaggaagtcgacgagtggcccgatgacgatgacgaccccaccgatgaggctggccaggcggcgggtgacaggactttgctagggcgggaggaggaggacgtatcgttcagtgatctggaggacgacgaggacgatgataggaggtagaaggggatgatgggcagtagccaagttggctaggggaagctcgtactatggtcccggcgcaaccacatgctggcttcattggagtagggccgagaacgcactcacacccaaggatcaatgtttcgttagttattattattattagagtccggaagtaatgagtcccaagcagtagcaataagcatgtatgtatctgccgcgcgtgttagtgctaatggcaagtcctgctgcttctgtattattggccccgtcctgtagcttgtacatagagcgctcacggctgggttgggcctttgtgtaataaacctaccgtccgggaacttgagcttgtgtttaaaaggacctgttcattagggagggacctggggttccagttcc

SEQ ID NO: 16238 - protein, 376 aa, Zea mays subsp. mays
  misc_feature (1)..(376): Ceres Seq. ID no. 12351691
PGTPSRGVKDDISELTETLTRRLWGVASFLAPPPTPPEASTPRAATPAQGEDEGIEDGEEAAVLSPRTAGIRSDLAEIGGRMWSGFSMLQNNLAVAEISKIASSLLPFGQGEADEGESVPGITEEVVVFVRHISTRPETWLDFPLFISERYADDFELSDAQYVHALSVEHLVPGLSDLKAQICSTDMTEACFWKIYFVLLHSKLNKQDAEVLSTPQILEAREQLLQSLGSEKKRGSKFPDESSAESSNASSAPAEEKVIQPPVIQDKADAWEKSSSEEPSETVSEKFPVSTTEVEMVDKSVVEEELTVANESKTSPVKSKLPYEADEEEEVDEWPDDDDDPTDEAGQAAGDRTLLGREEEDVSFSDLEDDEDDDRR

SEQ ID NO: 16239 - protein, 295 aa, Zea mays subsp. mays
  misc_feature (1)..(295): Ceres Seq. ID no. 12351692
MWSGFSMLQNNLAVAEISKIASSLLPFGQGEADEGESVPGITEEVVVFVRHISTRPETWLDFPLFISERYADDFELSDAQYVHALSVEHLVPGLSDLKAQICSTDMTEACFWKIYFVLLHSKLNKQDAEVLSTPQILEAREQLLQSLGSEKKRGSKFPDESSAESSNASSAPAEEKVIQPPVIQDKADAWEKSSSEEPSETVSEKFPVSTTEVEMVDKSVVEEELTVANESKTSPVKSKLPYEADEEEEVDEWPDDDDDPTDEAGQAAGDRTLLGREEEDVSFSDLEDDEDDDRR

SEQ ID NO: 16240 - protein, 289 aa, Zea mays subsp. mays
  misc_feature (1)..(289): Ceres Seq. ID no. 12351693
MLQNNLAVAEISKIASSLLPFGQGEADEGESVPGITEEVVVFVRHISTRPETWLDFPLFISERYADDFELSDAQYVHALSVEHLVPGLSDLKAQICSTDMTEACFWKIYFVLLHSKLNKQDAEVLSTPQILEAREQLLQSLGSEKKRGSKFPDESSAESSNASSAPAEEKVIQPPVIQDKADAWEKSSSEEPSETVSEKFPVSTTEVEMVDKSVVEEELTVANESKTSPVKSKLPYEADEEEEVDEWPDDDDDPTDEAGQAAGDRTLLGREEEDVSFSDLEDDEDDDRR

SEQ ID NO: 16241 - DNA, 1055 bp, Zea mays subsp. mays
  misc_feature (1)..(1055): Ceres Seq. ID no. 12351694
attctccactgcctccagcaagtgttctaaaatctgaatggcatcttgctcctctgtccacgccgcaccatcgctcctcgtctcggcgccgcctagtaggcggcgcacaagtacggccgtatgtcttcagggtgttcgccgcggcagggtcgcgtcctgccgcgtgcggtgtagcgccggggccgggcagggcggggtcaaggtccctgcgaagctggcggagctgtggtcggcggcgaagagcgcgcctcccctggccgtgctcgcgggtgtggcggcggcggtggcgatatacaaggtcgggtccagtctccttgcgccgcgccatcccccgccccgtcggctggaggcccagacggccccgccgcctccagtcccggagccggtgcaggtgggcgagataacggaggaggaactacggcagtacgacggggtccgaccccgagaaaccgctgctgatggccatcaaggggcagatctatgacgtctcagagagcaggatgttctatggacctggcgcagcttatgctctgtttgctggtaaagatgccagtagggcattggctaagatgtcctttgaatcacaggatctgaatggtgatatatctggtctaacgccaatggagctcggcgccttgaatgactgggagtacaagttcgccaccaagtatgcgaaggtaggaaccataagaagagcagcgcccgtcgaagtggtttatggcaacatttcgcctgaaatgagggaagaagttagtgaacctgtggttgaacctgagcttgagcctgagcccgagcctgagccgcatgacgacgatgcaccatgaataggaaaaacacaaagacatcagttcgggtaggaagatgaaatggagggcggcacactgcttataatgttccagaggtagtcagaatttcgaaataatgaaaagcctcataggctcgtacttgttgcgtggatattcagaaagaatagtgtctaaatttaaaccaatagtagatgtgtactctgtagtaggattgaattgttggatatgtacatgtcattcttctatttt

SEQ ID NO: 16242 - protein, 148 aa, Zea mays subsp. mays
  misc_feature (1)..(148): Ceres Seq. ID no. 12351695
MASCSSVHAAPSLLVSAPPSRRRTSTAVCLQGVRRGRVASCRVRCSAGAGQGGVKVPAKLAELWSAAKSAPPLAVLAGVAAAVAIYKVGSSLLAPRHPPPRRLEAQTAPPPPVPEPVQVGEITEEELRQYDGVRPRETAADGHQGADL

SEQ ID NO: 16243 - protein, 133 aa, Zea mays subsp. mays
  misc_feature (1)..(133): Ceres Seq. ID no. 12351696
SPLPPASVLKSEWHLAPLSTPHHRSSSRRRLVGGAQVRPYVFRVFAAAGSRPAACGVAPGPGRAGSRSLRSWRSCGRRRRARLPWPCSRVWRRRWRYTRSGPVSLRRAIPRPVGWRPRRPRRLQSRSRCRWAR

SEQ ID NO: 16244 - protein, 121 aa, Zea mays subsp. mays
  misc_feature (1)..(121): Ceres Seq. ID no. 12351697
MAIKGQIYDVSESRMFYGPGAAYALFAGKDASRALAKMSFESQDLNGDISGLTPMELGALNDWEYKFATKYAKVGTIRRAAPVEVVYGNISPEMREEVSEPVVEPELEPEPEPEPHDDDAP

SEQ ID NO: 16245 - DNA, 1354 bp, Zea mays subsp. mays
  misc_feature (1)..(1354): Ceres Seq. ID no. 12351706
acaagcaagtggccacctttgagtggatgttggaagaaatagcagccacaagcaagtagtcacctgtgtcatcttattccgatcctagcccctcccatctccaattcctcgcttcctcctcccttctctagttctctgatcctcagcacttagcatcaagcttagcacaccggcgagatggcctccacctccaccttcctgtccaccctcgccagcaggtccgcggcagccgatagcctgcgcagcgccgtgccgtccttcgccaagatcgtcaggttcttgcccgcgcaggcgcagatcagccgcaggcggcgcgcggcggtgctgcccacgccgagggcggcggtgtcgggcaccgagaaggcgccgtcgagcaagcacgagcgcgtggtcaggggtgcacagcacccaggagttcgacgacgcgctcaaggccgccaagaaccggctggtggtggtggagttcgcggcgagcgacagcgaggacagcagccagatctacccgaccatggtgcagctcagccgcacctgcggcgacgtggacttcctgctggtcctgcgcgacgacgagtcggaggccaccgaggagctgttccgccgggagggcgtcacgaaggtgcctcacttcaacttctacaagggcgccgagaaggtgcacgaggaggaggccatcggccccgagcggctcgcgggcgacgtcctctactacggcgacagccactcggcggtggtgcagctgcactcgcgggaggacgtggaggcgctcatcgacgagcaccgcggcgacaagggcaagctcgtcgtgctggacgtgggcctcaagcactgcgggccctgcgtcaaggtgtaccccaccgtgctgaagctgtcgcggtccatggtcgacaacaccgtcttcgcgcgcatgaacggcgacgagaacgacagctgcatggagttcctcagggccatgaagatcgtggaggtgcccactttcgtcttcatcagggacgtccagatcgtcggccgctacgtcggctccggcaagggggagctcgtcggtgagatcctccgatacaacggcgtcagggtcacctactgaagtgaagtagtgaacaacaaaccagtcagagtcagagcaagcaccagccgacaagcaacgcttcgatacaaaattgaagacgatacaaaattttagattactgcgacgtccatcgacgattggtcgatgtttagactgtttattgtgtaccattaccatacttgcccgttaatcgctactattcaatagtaatagtaggcttttgtagggctagcagctgcttgctgctttgcaactttaatcttgtttggtgatctatcaggttgattgtcc

SEQ ID NO: 16246 - protein, 288 aa, Zea mays subsp. mays
  misc_feature (1)..(288): Ceres Seq. ID no. 12351707
MASTSTFLSTLASRSAAADSLRSAVPSFAKIVRFLPAQAQISRRRRAAVLPTPRAAVSGTEKAPSSKHERVVRGAQHPGVRRRAQGRQEPAGGGGVRGERQRGQQPDLPDHGAAQPHLRRRGLPAGPARRRVGGHRGAVPPGGRHEGASLQLLQGRREGARGGGHRPRAARGRRPLLRRQPLGGGAAALAGGRGGAHRRAPRRQGQARRAGRGPQALRALRQGVPHRAEAVAVHGRQHRLRAHERRRERQLHGVPQGHEDRGGAHFRLHQGRPDRRPLRRLRQGGARR

SEQ ID NO: 16247 - protein, 190 aa, Zea mays subsp. mays
  misc_feature (1)..(190): Ceres Seq. ID no. 12351708
MVQLSRTCGDVDFLLVLRDDESEATEELFRREGVTKVPHFNFYKGAEKVHEEEAIGPERLAGDVLYYGDSHSAVVQLHSREDVEALIDEHRGDKGKLVVLDVGLKHCGPCVKVYPTVLKLSRSMVDNTVFARMNGDENDSCMEFLRAMKIVEVPTFVFIRDVQIVGRYVGSGKGELVGEILRYNGVRVTY

SEQ ID NO: 16248 - DNA, 1563 bp, Zea mays subsp. mays
  misc_feature (1)..(1563): Ceres Seq. ID no. 12351717
actcccccgcctcgccgccagtcagattcaccaccggctcccctgcacaaccgcgtccgcgctgcaccaccaccgttcatcgaggaggaggggggacggagaccacggacatggagagatctcaacggcagtctcctccgccaccgtcgccgtcctcctcctcgtcctccgtctccgcggacaccgtcctcgtccctcccggaaagaggcggagggcggcgacggccaaggccggcgccgagcctaataagaggatccgcaaggaccccgccgccgccgccgcggggaagaggagctccgtctacaggggagtcaccaggcacaggtggacgggcaggttcgaggcgcatctctgggacaagcactgcctcgccgcgctccacaacaagaagaaaggcaggcaagtctacctgggggcgtatgacagcgaggaggcagctgctcgtgcctatgacctcgcagctctcaagtactggggtcctgagactctgctcaacttccctgtggaggattactccagcgagatgccggagatggaggccgtttcccgggaggagtacctggcctccctccgccgcaggagcagcggcttctccaggggcgtctccaagtacagaggcgtcgccaggcatcaccacaacgggaggtgggaggcacggattgggcgagtctttgggaacaagtacctctacttgggaacatttgacactcaagaagaggcagccaaggcctatgaccttgcggccattgaataccgtggcgtcaatgctgtaaccaacttcgacatcagctgctacctggaccacccgctgttcctggcacagctccaacaggagccacaggtggtgccggcactcaaccaagaacctcaacctgatcagagcgaaaccggaactacagagcaagagccggagtcaagcgaagccaagacaccggatggcagtgcagaacccgatgagaacgcggtgcctgacgacaccgcggagcccctcagcacagtcgacgacagcatcgaagagggcttatggagcccttgcatggattacgagctagacaccatgtcgagaccaaactttggcagctcaatcaatctgagcgagtggttcgctgacgcagacttcgactgcaacatcgggtgcctgttcgatgggtgttctgcggctgacgaaggaagcaaggatggtgtaggtctggcagatttcagtctgtttgaggcaggtgatgtccagctgaaggatgttctttcggatatggaagaggggatacaacctccagcgatgatcagtgtgtgcaactaattctggaacccgaggaggttttcgctttccaggtgtcctgtcttgggtaatccttgatctgtctaatgccacagtgccactgcaccagagcagctgagaactttcttgtagaaagcccatggcagtttggcgttagacaagtgtgtcgatgttctttaattctttgaatttgcccctaggctgcttggctaacgttaagggtttgtcattgtctcacttagcctagattcaactaatcacatcctgaatctgaagtggttgtgct

SEQ ID NO: 16249 - protein, 431 aa, Zea mays subsp. mays
  misc_feature (1)..(431): Ceres Seq. ID no. 12351718
SPASPPVRFTTGSPAQPRPRCTTTVHRGGGGTETTDMERSQRQSPPPPSPSSSSSSVSADTVLVPPGKRRRAATAKAGAEPNKRIRKDPAAAAAGKRSSVYRGVTRHRWTGRFEAHLWDKHCLAALHNKKKGRQVYLGAYDSEEAAARAYDLAALKYWGPETLLNFPVEDYSSEMPEMEAVSREEYLASLRRRSSGFSRGVSKYRGVARHHHNGRWEARIGRVFGNKYLYLGTFDTQEEAAKAYDLAAIEYRGVNAVTNFDISCYLDHPLFLAQLQQEPQVVPALNQEPQPDQSETGTTEQEPESSEAKTPDGSAEPDENAVPDDTAEPLSTVDDSIEEGLWSPCMDYELDTMSRPNFGSSINLSEWFADADFDCNIGCLFDGCSAADEGSKDGVGLADFSLFEAGDVQLKDVLSDMEEGIQPPAMISVCN

SEQ ID NO: 16250 - protein, 395 aa, Zea mays subsp. mays
  misc_feature (1)..(395): Ceres Seq. ID no. 12351719
MERSQRQSPPPPSPSSSSSSVSADTVLVPPGKRRRAATAKAGAEPNKRIRKDPAAAAAGKRSSVYRGVTRHRWTGRFEAHLWDKHCLAALHNKKKGRQVYLGAYDSEEAAARAYDLAALKYWGPETLLNFPVEDYSSEMPEMEAVSREEYLASLRRRSSGFSRGVSKYRGVARHHHNGRWEARIGRVFGNKYLYLGTFDTQEEAAKAYDLAAIEYRGVNAVTNFDISCYLDHPLFLAQLQQEPQVVPALNQEPQPDQSETGTTEQEPESSEAKTPDGSAEPDENAVPDDTAEPLSTVDDSIEEGLWSPCMDYELDTMSRPNFGSSINLSEWFADADFDCNIGCLFDGCSAADEGSKDGVGLADFSLFEAGDVQLKDVLSDMEEGIQPPAMISVCN

SEQ ID NO: 16251 - protein, 257 aa, Zea mays subsp. mays
  misc_feature (1)..(257): Ceres Seq. ID no. 12351720
MPEMEAVSREEYLASLRRRSSGFSRGVSKYRGVARHHHNGRWEARIGRVFGNKYLYLGTFDTQEEAAKAYDLAAIEYRGVNAVTNFDISCYLDHPLFLAQLQQEPQVVPALNQEPQPDQSETGTTEQEPESSEAKTPDGSAEPDENAVPDDTAEPLSTVDDSIEEGLWSPCMDYELDTMSRPNFGSSINLSEWFADADFDCNIGCLFDGCSAADEGSKDGVGLADFSLFEAGDVQLKDVLSDMEEGIQPPAMISVCN

SEQ ID NO: 16252 - DNA, 1289 bp, Zea mays subsp. mays
  misc_feature (1)..(1289): Ceres Seq. ID no. 12351725
gacctgatcctgacccgtgcgggcgtgcggctcctcgcggacagctccagactccagagccgcctcttcgccctctcgccatcggcaggctacggtggctgcttccccgagcctgcaggtagaccaccttgtgttgattcctcgagtcttcacctggtgcttccgtttgcagcttcatttttaactaagatgtcacaagccaaggaagtgaggtacactgcacggtctattacacctcctgctgatagaaatggcacttcaaggtcgcctcctccaaagagacgcagcccttcaaggtcacctccaccaaagagtgcttcacggtccccacgtccaaggagtccaaagagacgcagcacttcaaggtctcctcctaggagacgtggtagatcaaggtcaagggataggagtcggtccaggagcccagatgatagaaatccagggaataacctttatgtaactggattgtctactcgtgtaacggaagatgatcttgagaagttctttagtaaagaaggaaaggttaagaactgtcatgttgttcttgatcctaggacaaaagaatcccgtggctttgccttcgtgactatggatactcttgaaggtgcaagacgctccatcaagtatctgcaccgcactgtacttgaaggtcgcctggtcactgtagagaaggctaaaagaactcgtgaaaggacccctactcctggaaaatactgtggtcgaagaggaggatctcaaaggagcccatcaccttaccgccctcgtagaagggagcgttcgcgctcaagggaacgcagaagggagcgttcgcgttcaagggatcgaagggagcggtctcgctcaagggatcgaagggagcggtctcgctcaagggaacgccgaagggagcggtctcgttcaagggaccgcagggagaggtctcgctcaagggaccgccggagggagcgctcacgctcaagggaccgcagaagggagcgctcacgctcaagggaccggaggggcagttcaccccatggcagaaggcatagagatcggtccaggtcacccaccagcaatgggaaccataaggcagactaggaagcgcttttatggacttgtcgttgattgcgtgaacaaaggaacttgtaacactacctataaactggtcagactgagacggttagcatggatttttagtagtgttgctgtattttgttgtttcatacaagtactctattctgttagctttcggatcgaaatgtcggatgatgatggttgttattgttctggaaatcgtagacatgtcctcc

SEQ ID NO: 16253 - protein, 358 aa, Zea mays subsp. mays
  misc_feature (1)..(358): Ceres Seq. ID no. 12351726
DLILTRAGVRLLADSSRLQSRLFALSPSAGYGGCFPEPAGRPPCVDSSSLHLVLPFAASFLTKMSQAKEVRYTARSITPPADRNGTSRSPPPKRRSPSRSPPPKSASRSPRPRSPKRRSTSRSPPRRRGRSRSRDRSRSRSPDDRNPGNNLYVTGLSTRVTEDDLEKFFSKEGKVKNCHVVLDPRTKESRGFAFVTMDTLEGARRSIKYLHRTVLEGRLVTVEKAKRTRERTPTPGKYCGRRGGSQRSPSPYRPRRRERSRSRERRRERSRSRDRRERSRSRDRRERSRSRERRRERSRSRDRRERSRSRDRRRERSRSRDRRRERSRSRDRRGSSPHGRRHRDRSRSPTSNGNHKAD

SEQ ID NO: 16254 - protein, 295 aa, Zea mays subsp. mays
  misc_feature (1)..(295): Ceres Seq. ID no. 12351727
MSQAKEVRYTARSITPPADRNGTSRSPPPKRRSPSRSPPPKSASRSPRPRSPKRRSTSRSPPRRRGRSRSRDRSRSRSPDDRNPGNNLYVTGLSTRVTEDDLEKFFSKEGKVKNCHVVLDPRTKESRGFAFVTMDTLEGARRSIKYLHRTVLEGRLVTVEKAKRTRERTPTPGKYCGRRGGSQRSPSPYRPRRRERSRSRERRRERSRSRDRRERSRSRDRRERSRSRERRRERSRSRDRRERSRSRDRRRERSRSRDRRRERSRSRDRRGSSPHGRRHRDRSRSPTSNGNHKAD

SEQ ID NO: 16255 - DNA, 1288 bp, Zea mays subsp. mays
  misc_feature (1)..(1288): Ceres Seq. ID no. 12351736
acacacacccacacaccccgcttcacgttctcaataatggcgccgttcccacgtcgtcttccggccgccgtgccacttctcctcctcctcggcgccgcagtggccagcgccggcgcggaggacaccgatggcggcaactcccgccggcggcactcccgcttgctgttcgcgttcggcaactcgctcaccgacacgggaaacggggccatcttcccggtgactgcaggcgggccattcacccggccgccgtacggggagaccttcttcggtcgtcccagcggccgggcttgcaacggcaggctcgtcctcgacttcctcgtggaggagctgaaggtgccagagccgacgccgtacctggccggcagtacggccgccgactttgcgaagaacggggccaactttgcgctgggtggtgcaacggcgctcgaccaggcgttcttagcaagcaaggggataaagtcgttcgtgcccatctctctcatcaacgagacgagctggttccagaacgtttcgaagctactggacgcgtcacactacgatgagcgtaagatcatggcgaagtcgatcttctacgtcggggagatcggtgtcaacgactacttcgccgccctaagcaacaacgactccgtcgacgtcgcggtcagcctggtgccgcacatcatcgacaccatccgttcggccctgaccgtcatgatcgatgccggggcgaggacagtggtgatcacggggatgctaccgatcggctgcgagccgcagcagctggcccagttcgcaggcggccccggccggcgactacgaccctaccaccggctgcatcacgcggttcaaccagctcgccgagcaccacaaccacatgctgaggatgatgctgagggagctgcggaccaagtaccgcaggcgcaggcccctcaccctccactacgccgacatctaccgccccgtgatcgaggccgtcgcgtcccccgcctcgtacggcttcggcgacacgccgctggcagcgtgctgcgggggcggtggcggccccaacaacttcaacttcatcgccttctgcggcacgccggcgtcgaccacgtgcaccgacccgtccaagttcgtctcctgggacgggatccacttcaccgaggctaccaacaggcttctcgctcgtaaaatgcttcaggaactgctaagccgtggagcttacaatgttgcaatctgatttttctatgcccgcgagtcgtatcaacgtgtttcccatagcggatcggacctagcgtggaacctcttgtgtaataaaataataagtgtc

SEQ ID NO: 16256 - protein, 382 aa, Zea mays subsp. mays
  misc_feature (1)..(382): Ceres Seq. ID no. 12351737
THTHTPRFTFSIMAPFPRRLPAAVPLLLLLGAAVASAGAEDTDGGNSRRRHSRLLFAFGNSLTDTGNGAIFPVTAGGPFTRPPYGETFFGRPSGRACNGRLVLDFLVEELKVPEPTPYLAGSTAADFAKNGANFALGGATALDQAFLASKGIKSFVPISLINETSWFQNVSKLLDASHYDERKIMAKSIFYVGEIGVNDYFAALSNNDSVDVAVSLVPHIIDTIRSALTVMIDAGARTVVITGMLPIGCEPQQLAQFAGGPGRRLRPYHRLHHAVQPARRAPQPHAEDDAEGAADQVPQAQAPHPPLRRHLPPRDRGRRVPRLVRLRRHAAGSVLRGRWRPQQLQLHRLLRHAGVDHVHRPVQVRLLGRDPLHRGYQQASRS

SEQ ID NO: 16257 - protein, 370 aa, Zea mays subsp. mays
  misc_feature (1)..(370): Ceres Seq. ID no. 12351738
MAPFPRRLPAAVPLLLLLGAAVASAGAEDTDGGNSRRRHSRLLFAFGNSLTDTGNGAIFPVTAGGPFTRPPYGETFFGRPSGRACNGRLVLDFLVEELKVPEPTPYLAGSTAADFAKNGANFALGGATALDQAFLASKGIKSFVPISLINETSWFQNVSKLLDASHYDERKIMAKSIFYVGEIGVNDYFAALSNNDSVDVAVSLVPHIIDTIRSALTVMIDAGARTVVITGMLPIGCEPQQLAQFAGGPGRRLRPYHRLHHAVQPARRAPQPHAEDDAEGAADQVPQAQAPHPPLRRHLPPRDRGRRVPRLVRLRRHAAGSVLRGRWRPQQLQLHRLLRHAGVDHVHRPVQVRLLGRDPLHRGYQQASRS

SEQ ID NO: 16258 - protein, 198 aa, Zea mays subsp. mays
  misc_feature (1)..(198): Ceres Seq. ID no. 12351739
MAKSIFYVGEIGVNDYFAALSNNDSVDVAVSLVPHIIDTIRSALTVMIDAGARTVVITGMLPIGCEPQQLAQFAGGPGRRLRPYHRLHHAVQPARRAPQPHAEDDAEGAADQVPQAQAPHPPLRRHLPPRDRGRRVPRLVRLRRHAAGSVLRGRWRPQQLQLHRLLRHAGVDHVHRPVQVRLLGRDPLHRGYQQASRS

SEQ ID NO: 16259 - DNA, 1443 bp, Zea mays subsp. mays
  misc_feature (1)..(1443): Ceres Seq. ID no. 12351752
atctctagttctctacacaccgacacgcatgcagatcggttgccggggcacgatgaggaccgcgtggccgctgctcctcgtggcgacggcgctgctttcgacttcggcagcaagggccaggaggacctgcaggttccctgccgtcttcaacttcggcgactccaactccgacaccggcggcttctgggcggccttcccggcgcagcagggcccgttcggcatgacgtacttcggcaggccggccggccgcgcctccgacggccgcctcgtcatcgacttcatagcgcaagcgatggggctgccgctgctgagcccctacctgcagtccatagggtcggactaccggcacggcgccaacttcgcgacgctggcgtcgacggcgctgctgcccaacacgtcggtgttcgtcaccgggaccagccccttctccctcggcatccagctcaaccagatgaaggagttcaggaacagagtgctcgcctccaaaggaaacaacggccaactccctggcccggaaatcttgggcgacgctctgtacacaatcgacatcgggcagaacgacttcacctcgaaccttggatccctcggggtcgaaagcgtcaagcgaagcctaccttcagtcgtcagccagatctcctggacgatacagcatcggagctcgcaacttcatggtgttcaacatggcgcccgtaggatgctacccggcattcctcgcggggcttcctcgtgacagcaaggacctggacgagttcgggtgcgtgaaaagctacaacggcggggtcacgtactacaaccagctgctgaacgacagcctagccgagatgaggaagacgctgcaggacgcgtcggtcgtgtacgtcgacaagcatgctgtgacgctcgaactgttccagcacccaaccgctcacgggctgaagcacggggctagagcttgctgcgggtacggcggtggaacctacaatttcgatcgagatgtttattgtggtgacagcaaggtagtgaatggagaagctgcgacggcgggggcttgtgcagacccgcaaaactatgtcagctgggacgggatacatgccactgaagctgcaaatagtaggatagcgtatgctgtgatcagcggctcctattcgtacccacctttcgatctttcaaagctatgtagcccttaggcatcatcagtcgtgaaagggagtacagcatcaccatacaccgcatttctntgaaacaagcagccacatttctttcattgacagcatcaacacacaggacaaaagctacgaactcaagaacgacgcacgcctacaacgagtcacgacgagaacagaggctaaagacctactccctctgccctagaaatgaagtcgtttgacttttttaagacaagtttgactggtttgttttattcaaaatatttatgaaaatatagaaaaaaaacatttgatagtc

SEQ ID NO: 16260 - protein, 242 aa, Zea mays subsp. mays
  misc_feature (1)..(242): Ceres Seq. ID no. 12351753
SLVLYTPTRMQIGCRGTMRTAWPLLLVATALLSTSAARARRTCRFPAVFNFGDSNSDTGGFWAAFPAQQGPFGMTYFGRPAGRASDGRLVIDFIAQAMGLPLLSPYLQSIGSDYRHGANFATLASTALLPNTSVFVTGTSPFSLGIQLNQMKEFRNRVLASKGNNGQLPGPEILGDALYTIDIGQNDFTSNLGSLGVESVKRSLPSVVSQISWTIQHRSSQLHGVQHGARRMLPGIPRGASS

SEQ ID NO: 16261 - protein, 233 aa, Zea mays subsp. mays
  misc_feature (1)..(233): Ceres Seq. ID no. 12351754
MQIGCRGTMRTAWPLLLVATALLSTSAARARRTCRFPAVFNFGDSNSDTGGFWAAFPAQQGPFGMTYFGRPAGRASDGRLVIDFIAQAMGLPLLSPYLQSIGSDYRHGANFATLASTALLPNTSVFVTGTSPFSLGIQLNQMKEFRNRVLASKGNNGQLPGPEILGDALYTIDIGQNDFTSNLGSLGVESVKRSLPSVVSQISWTIQHRSSQLHGVQHGARRMLPGIPRGASS

SEQ ID NO: 16262 - protein, 230 aa, Zea mays subsp. mays
  misc_feature (1)..(230): Ceres Seq. ID no. 12351755
ISSSLHTDTHADRLPGHDEDRVAAAPRGDGAAFDFGSKGQEDLQVPCRLQLRRLQLRHRRLLGGLPGAAGPVRHDVLRQAGRPRLRRPPRHRLHSASDGAAAAEPLPAVHRVGLPARRQLRDAGVDGAAAQHVGVRHRDQPLLPRHPAQPDEGVQEQSARLQRKQRPTPWPGNLGRRSVHNRHRAERLHLEPWIPRGRKRQAKPTFSRQPDLLDDTASELATSWCSTWRP

SEQ ID NO: 16263 - DNA, 1620 bp, Zea mays subsp. mays
  misc_feature (1)..(1620): Ceres Seq. ID no. 12351756
ctagactgtagcccttaatcgaaaccgtccccaacccttcttcctccacgctctcgtctccgccgcgctaggaacttccaactcccaagcccagccgcctgcctagggttaaggtcgcccctccgccccctcgctccgctcgtgaccggcagggttcgtcgccgccgttggatatgtcgcggacgctggtgcagccggtggggcagaagcgcctcaccaacgtggctgtggtgcggctgcgcaagcacggccagcgcttcgagatcgcctgcttcccaaacaaggtgctctcgtggcgctcccgcgtcgagaaggacatcgacgaggtgctccagtcccacaccgtctactccaacgtctccaagggcatcctcgccaactccaaggaactcgccaaggccttcggcaccgacgaccttacccaaatctgcatcgagattctggagaaaggggaactccaggtctccggcaaggagagggaggcgcagctctccagccagttccgcgacatcgcaactattgtcatggagaagaccatcaacccagagacccgccgcccctacaccatcaccatgatcgagcgcctcatgcacgagatacacttcgccgtcgacccaaacctcacctccaaggaacaggctctaaaagttatcaagaagctcacagagcatttccccataaagcgtgcaccgctaagggtgcggttcactgcaccaaaacccaattttccaggccttacggagaagattggcggatggaatgctaccataatttcaaaggatgaattgagcactcagccttctattgtatgcgagatcgagccatctcttctgcgctcatgtgaggagcggttgaaggatgtccaagggagggtcgaagtgctgtctgtctccacgcacgtagaaagtggcccatctgtggaacaacacaacagtgtggaagtgccacacgcggctcctgtaaaggaacctgatgctgttgctcagataagtgagaccatgcagaaacagagcatttctactgaaagccagggcaatgcacaaggcaagcaacagagaaggtgcaaggagtgtgatgtactcgtggaggacaagctttacagagagcactgcaagagtgggtggcacaaacacaactacacacgccacaagaatgggctcccgcctctcagccaagaggagtgtatggtggagatggaattggccgactccaagaaagaccttaaagactacgatttctgatgaggttacctggaagttcctttgacatgctatcttgtatttgggcactaatgttgtctgtctaatgcttttctaccacccaatcttatccaggatggttaacaaggggtgcacagggcatgaagttgtttccaatccgtttttattttaacgaggaagtgaggagtgaggcacatggtcgttttctgatgctgtataggaattattagaatgagatggtttagccacatctttgaactgagggtagaacctgtctgtctgtggattgctttggctttgtatcgtggacgagtgaacttggtagtggcattccaaattcgacattctatgcgggctagaaacttcgcttgttttaatacttatcggcatcctttctttt

SEQ ID NO: 16264 - protein, 355 aa, Zea mays subsp. mays
  misc_feature (1)..(355): Ceres Seq. ID no. 12351757
MSRTLVQPVGQKRLTNVAVVRLRKHGQRFEIACFPNKVLSWRSRVEKDIDEVLQSHTVYSNVSKGILANSKELAKAFGTDDLTQICIEILEKGELQVSGKEREAQLSSQFRDIATIVMEKTINPETRRPYTITMIERLMHEIHFAVDPNLTSKEQALKVIKKLTEHFPIKRAPLRVRFTAPKPNFPGLTEKIGGWNATIISKDELSTQPSIVCEIEPSLLRSCEERLKDVQGRVEVLSVSTHVESGPSVEQHNSVEVPHAAPVKEPDAVAQISETMQKQSISTESQGNAQGKQQRRCKECDVLVEDKLYREHCKSGWHKHNYTRHKNGLPPLSQEECMVEMELADSKKDLKDYDF

SEQ ID NO: 16265 - protein, 238 aa, Zea mays subsp. mays
  misc_feature (1)..(238): Ceres Seq. ID no. 12351758
MEKTINPETRRPYTITMIERLMHEIHFAVDPNLTSKEQALKVIKKLTEHFPIKRAPLRVRFTAPKPNFPGLTEKIGGWNATIISKDELSTQPSIVCEIEPSLLRSCEERLKDVQGRVEVLSVSTHVESGPSVEQHNSVEVPHAAPVKEPDAVAQISETMQKQSISTESQGNAQGKQQRRCKECDVLVEDKLYREHCKSGWHKHNYTRHKNGLPPLSQEECMVEMELADSKKDLKDYDF

SEQ ID NO: 16266 - protein, 222 aa, Zea mays subsp. mays
  misc_feature (1)..(222): Ceres Seq. ID no. 12351759
MIERLMHEIHFAVDPNLTSKEQALKVIKKLTEHFPIKRAPLRVRFTAPKPNFPGLTEKIGGWNATIISKDELSTQPSIVCEIEPSLLRSCEERLKDVQGRVEVLSVSTHVESGPSVEQHNSVEVPHAAPVKEPDAVAQISETMQKQSISTESQGNAQGKQQRRCKECDVLVEDKLYREHCKSGWHKHNYTRHKNGLPPLSQEECMVEMELADSKKDLKDYDF

SEQ ID NO: 16267 - DNA, 1439 bp, Zea mays subsp. mays
  misc_feature (1)..(1439): Ceres Seq. ID no. 12351772
ctatgggctttgtggccgccctgtcggaaaacccgcgcaagaaaagagaaacccgcaagccgcccgcgcagaccatcgccccgttgccacggtcaaattcgtcggcgtttggtgccgcggcgtgactgtccgccggtcgcggcgcgcgtcctgcctggttggatcccttcggacttccgcagattcccgcgcgggggtgtttgatttggatgagaggagcgcggcggcgggatggggaccccttcgcagggctcggcggccgtgacggcggcccgggtcgacctctgcgcgctcgacctcatgcctgtctttgccaaggagatgatcgccggcggcgtcgccggcgccttctccaaaaccgccatcgcgccgctcgagcgcgtcaagatattgctgcagaccagaacaaatgagtttgggtctcttggagttctcaaatcattgaagaaactgagacaacttgatggagtcatggggttttacaaaggaaatggtgccagtgtgatgagaattgttccttatgctgcattacatttcatggcatatgagcggtaccggtgttggattttgaataactgtccctcactgggaacagggcctttagtagatcttttagccggttcagcatcagggggaactgctgtattgtgtacttatcccttggatttggcccggactaagcttgcctttcaggtcaatagttcagatgaactcagcagagctttgaaaaggggaagtccccagccagcatatggaggaatcattgatgtctttagatgtgtttactcagaaggtggagtgcgggctctttaccgaggtgtaggtccaacactcatggggatacttccttatgctggtcttaagttctacatatatgaagggctgaaggtacatgtaccagaagattacagaagttctgtaacattgaagctgtcatgtggtgctgctgctggtttatttggacagactctgacatatccattagatgttgtcaggaggcagatgcaggttcaaaatcagcaacaacatgaacaatttggtgccccacgaataacgggcacattccagggtcttgtgtccattaaacaaacacagggttggaaacaattatttgctggcttgagcctcaattacatcaaggtggtgccttcagtggccattggtttcaccgcatatgacaccatgaagcatttgctgaagatacctccaagagagaagaataaggtctgagcatggtcctgcttgaaattttggccgctcaattctgcagctagcagaaaagcactgcttctttctaaggcatgggagtgccgtatgaagcttacaatagaatgaagcagcctcgcccgcaattctgttacctagtactaattgcgttgtgtcacgtgatagcttatgtacctgacatattctttcattctaattttcctcattcatct

SEQ ID NO: 16268 - protein, 332 aa, Zea mays subsp. mays
  misc_feature (1)..(332): Ceres Seq. ID no. 12351773
MGTPSQGSAAVTAARVDLCALDLMPVFAKEMIAGGVAGAFSKTAIAPLERVKILLQTRTNEFGSLGVLKSLKKLRQLDGVMGFYKGNGASVMRIVPYAALHFMAYERYRCWILNNCPSLGTGPLVDLLAGSASGGTAVLCTYPLDLARTKLAFQVNSSDELSRALKRGSPQPAYGGIIDVFRCVYSEGGVRALYRGVGPTLMGILPYAGLKFYIYEGLKVHVPEDYRSSVTLKLSCGAAAGLFGQTLTYPLDVVRRQMQVQNQQQHEQFGAPRITGTFQGLVSIKQTQGWKQLFAGLSLNYIKVVPSVAIGFTAYDTMKHLLKIPPREKNKV

SEQ ID NO: 16269 - protein, 309 aa, Zea mays subsp. mays
  misc_feature (1)..(309): Ceres Seq. ID no. 12351774
MPVFAKEMIAGGVAGAFSKTAIAPLERVKILLQTRTNEFGSLGVLKSLKKLRQLDGVMGFYKGNGASVMRIVPYAALHFMAYERYRCWILNNCPSLGTGPLVDLLAGSASGGTAVLCTYPLDLARTKLAFQVNSSDELSRALKRGSPQPAYGGIIDVFRCVYSEGGVRALYRGVGPTLMGILPYAGLKFYIYEGLKVHVPEDYRSSVTLKLSCGAAAGLFGQTLTYPLDVVRRQMQVQNQQQHEQFGAPRITGTFQGLVSIKQTQGWKQLFAGLSLNYIKVVPSVAIGFTAYDTMKHLLKIPPREKNKV

SEQ ID NO: 16270 - protein, 302 aa, Zea mays subsp. mays
  misc_feature (1)..(302): Ceres Seq. ID no. 12351775
MIAGGVAGAFSKTAIAPLERVKILLQTRTNEFGSLGVLKSLKKLRQLDGVMGFYKGNGASVMRIVPYAALHFMAYERYRCWILNNCPSLGTGPLVDLLAGSASGGTAVLCTYPLDLARTKLAFQVNSSDELSRALKRGSPQPAYGGIIDVFRCVYSEGGVRALYRGVGPTLMGILPYAGLKFYIYEGLKVHVPEDYRSSVTLKLSCGAAAGLFGQTLTYPLDVVRRQMQVQNQQQHEQFGAPRITGTFQGLVSIKQTQGWKQLFAGLSLNYIKVVPSVAIGFTAYDTMKHLLKIPPREKNKV

SEQ ID NO: 16271 - DNA, 1801 bp, Zea mays subsp. mays
  misc_feature (1)..(1801): Ceres Seq. ID no. 12351800
atcagcgtgttttgttttgtttcgtctcgtcgaccgagccgtccgtcgtcctccctggcggtctggccgcctccgccttcctccccgtgcgtctcacccttttcctctacagcttcctctgcccaatcagctcgtcctctcccctcctctccctcccgtgaactgctaaaatccctcgccaagcatttccgtcgggttaggtggtagataagccgaaaatcgagtggaaaagcatcaatcgagtgctgcgctagttgcctggttcgtcccaacaaattccaccgggaatcagggtcgtccggcagcggctgaggcgtctgggttctggaggagcggccgtcggtgaggggggatggggggcggcggcggatcctccgggccggagctgtcgacggacaacatgaaggggatagtcctggcgctgctctccagcggcttcatcggcgccagcttcatcatcaagaagaagggtctccgccgggccgctgtcgcctccggcgtccgtgcaggtgtaggcgggtactcatacctcatggagcccctgtggtgggttggcatgatcattatgattgtaggtgagattgccaatttcgtggcatatgctttcgcccccgctgttctggttactccccttggagcactcagcataattgttagtgcagtgctggctcatttcattctgaacgagaggctgcatgccctcggggtgctcggctgcgtgatgtgcattgcagggtctgtggtcattgttatccacgctccacaggagcaggagattacttcagttaaggaaatatggaacatggcgacacaacctgctttcttgttatatgttgcgtcagttattgtgattgtttttgtcctggtgttctatttctcccctctctatgggcagtccaatgtgttgatctacactgccatttgctctttgatgggctctctttcggttatgagtgttaaagctcttggtacatcactaaagcttacttttgagggaacaaaccaattaatatatccagagacttggttctttatgcttgttgtggctacttgtgtgttgactcagatgaattatctgaacaaggcacttgacacgttcaacacggcaattgtatctccaatatattatgtaatgttcacaactcttacaatacttgccagcgtcataatgttcaaggattggtctggtcaaagccctggaagcgtcatttctgaaatttgtggcttggttgtggtgttgtctggtaccattttgttgcatgtgacgaaggattatgaaaggatcccacaatcaagaagtgtttatgcaccattatctccctctttgacaactagattaaatggagaattgttgaagcatgtcgtggatgagaggacttcggacgaagaaaaggccttgagaagacaggagatgtattagcgtgcgtcagaatatcaaaggaaatataggttactctgatggattctccggcaggggcttgtacatggcgtagtgataaccttcccatagcgattgttgattcctccattacagtttgttggtttgtgtatataactgcagcaatttgtggctaccgagtgattgcaaatctgccgaggtggtggaaggctgcagagttccaccaaaaagaatctaagtcgggtgcatagattcttatcgaattcccttcttcctttcgtaacttcctcagttttgtccacggcatttgttccatgtgagttttagagtgaatcacggaccctatgcaactgatgtacattattattgtcatagtgaagttcgtgcaactgtgaatgatgt

SEQ ID NO: 16272 - protein, 355 aa, Zea mays subsp. mays
  misc_feature (1)..(355): Ceres Seq. ID no. 12351801
MGGGGGSSGPELSTDNMKGIVLALLSSGFIGASFIIKKKGLRRAAVASGVRAGVGGYSYLMEPLWWVGMIIMIVGEIANFVAYAFAPAVLVTPLGALSIIVSAVLAHFILNERLHALGVLGCVMCIAGSVVIVIHAPQEQEITSVKEIWNMATQPAFLLYVASVIVIVFVLVFYFSPLYGQSNVLIYTAICSLMGSLSVMSVKALGTSLKLTFEGTNQLIYPETWFFMLVVATCVLTQMNYLNKALDTFNTAIVSPIYYVMFTTLTILASVIMFKDWSGQSPGSVISEICGLVVVLSGTILLHVTKDYERIPQSRSVYAPLSPSLTTRLNGELLKHVVDERTSDEEKALRRQEMY

SEQ ID NO: 16273 - protein, 339 aa, Zea mays subsp. mays
  misc_feature (1)..(339): Ceres Seq. ID no. 12351802
MKGIVLALLSSGFIGASFIIKKKGLRRAAVASGVRAGVGGYSYLMEPLWWVGMIIMIVGEIANFVAYAFAPAVLVTPLGALSIIVSAVLAHFILNERLHALGVLGCVMCIAGSVVIVIHAPQEQEITSVKEIWNMATQPAFLLYVASVIVIVFVLVFYFSPLYGQSNVLIYTAICSLMGSLSVMSVKALGTSLKLTFEGTNQLIYPETWFFMLVVATCVLTQMNYLNKALDTFNTAIVSPIYYVMFTTLTILASVIMFKDWSGQSPGSVISEICGLVVVLSGTILLHVTKDYERIPQSRSVYAPLSPSLTTRLNGELLKHVVDERTSDEEKALRRQEMY

SEQ ID NO: 16274 - protein, 295 aa, Zea mays subsp. mays
  misc_feature (1)..(295): Ceres Seq. ID no. 12351803
MEPLWWVGMIIMIVGEIANFVAYAFAPAVLVTPLGALSIIVSAVLAHFILNERLHALGVLGCVMCIAGSVVIVIHAPQEQEITSVKEIWNMATQPAFLLYVASVIVIVFVLVFYFSPLYGQSNVLIYTAICSLMGSLSVMSVKALGTSLKLTFEGTNQLIYPETWFFMLVVATCVLTQMNYLNKALDTFNTAIVSPIYYVMFTTLTILASVIMFKDWSGQSPGSVISEICGLVVVLSGTILLHVTKDYERIPQSRSVYAPLSPSLTTRLNGELLKHVVDERTSDEEKALRRQEMY

SEQ ID NO: 16275 - DNA, 1112 bp, Zea mays subsp. mays
  misc_feature (1)..(1112): Ceres Seq. ID no. 12351804
aagttcaggcagtttcgtgcccttttcttctccaccagctcaaagctgaacgcggcatccttcctttcctcccctcttctgcccccatttcgttcctttcacaccggggaccggcgagcagagccgcgcacagcagaacgcggaagcaagaggaggcgatcgactactcgaccagccctctccgtgtctccgatggcggctcgcgtcctcgcggccctcgcccttgccctcgccctcgccctcgtcgccgtacccgctcccacgcgggcgtccaacgacgagggggacgcgctctacgcgctgcggcagcggctgtcggaccccaacggcgtgctgcagagctgggatcccacgctcgtcaccccctgcacctggttccacatctcctgcgaccaggtcggccgcgtcgtccgcctggacttgggcaactccaacgtctccggctccatcggccctgagctcggccgccttgtcaacctcaagtacctggagctgtacaggaacaaccttgacggcgagatccccaaggaattgggcaacctcaagaacctgatcagcttggatctgtatgccaacaagctcacgggaggaatccccaagtcactctccaagctcgactcactcagattcatgcgcttgaacaacaacaagcttacaggatcaattccaagggagtttgccaagctctccaacctgaaagtcatcgatttgtctaacaatgatctctgtggaactatccctgttgatgggcctttctcaacctttcctctccgaagctttgagaacaacagcaggctcaacggtccagagctacaaggattggttccttatgattttggatgttagatgccgatcaacaatgtaccaccttccccagttgaaagggggaaagacaagatagtattatcaatagaaacctagcttcaagaatgtcgtgactatatatatgtatgatattaagactagatttgataagggtggcatagcaagtcctgatattctgtgtgcattcagaatagctgcttttatgcccttgtgttgatattttgcaaaccaaaacaaactgttctgaaacgagggcacatattgttcatgaataaatttgagcctcc

SEQ ID NO: 16276 - protein, 281 aa, Zea mays subsp. mays
  misc_feature (1)..(281): Ceres Seq. ID no. 12351805
KFRQFRALFFSTSSKLNAASFLSSPLLPPFRSFHTGDRRAEPRTAERGSKRRRSTTRPALSVSPMAARVLAALALALALALVAVPAPTRASNDEGDALYALRQRLSDPNGVLQSWDPTLVTPCTWFHISCDQVGRVVRLDLGNSNVSGSIGPELGRLVNLKYLELYRNNLDGEIPKELGNLKNLISLDLYANKLTGGIPKSLSKLDSLRFMRLNNNKLTGSIPREFAKLSNLKVIDLSNNDLCGTIPVDGPFSTFPLRSFENNSRLNGPELQGLVPYDFGC

SEQ ID NO: 16277 - protein, 217 aa, Zea mays subsp. mays
  misc_feature (1)..(217): Ceres Seq. ID no. 12351806
MAARVLAALALALALALVAVPAPTRASNDEGDALYALRQRLSDPNGVLQSWDPTLVTPCTWFHISCDQVGRVVRLDLGNSNVSGSIGPELGRLVNLKYLELYRNNLDGEIPKELGNLKNLISLDLYANKLTGGIPKSLSKLDSLRFMRLNNNKLTGSIPREFAKLSNLKVIDLSNNDLCGTIPVDGPFSTFPLRSFENNSRLNGPELQGLVPYDFGC

SEQ ID NO: 16278 - protein, 151 aa, Zea mays subsp. mays
  misc_feature (1)..(151): Ceres Seq. ID no. 12351807
VQAVSCPFLLHQLKAERGILPFLPSSAPISFLSHRGPASRAAHSRTRKQEEAIDYSTSPLRVSDGGSRPRGPRPCPRPRPRRRTRSHAGVQRRGGRALRAAAAAVGPQRRAAELGSHARHPLHLVPHLLRPGRPRRPPGLGQLQRLRLHRP

SEQ ID NO: 16279 - DNA, 1393 bp, Zea mays subsp. mays
  misc_feature (1)..(1393): Ceres Seq. ID no. 12351858
aagggtggccagctagccgaagaaacacccagacgaagcggccgtttttggcatctcgtatgtgcaacttcgctggaaccctcctcgactgattttaccgcacagcagaaaaggagataaaacacgacaaaaattgaaggaaaacgcattcacatcttctcttcgtccgccgccgccgcctctcttcattggtagcaccttaatccgaccccagtccagcccgccgccatggaggcgctgacggccacggacaaatgcttctccccggccagggcgatgttcccgatgccgattgtgaggccacctgcatcaccagaccatgccagtcagtatctggaggacttgttgcaggagcaacagaagctcgggccattcgtgcaggtgctcccaatctgcggcaggctgttgaatcaagagataatgagaacatcaaacctgctttctaactttggagttagaggaaatgagaggttgccaccaattgcaagtccgaaccacatgcatccattgccccggggacctgatttctgtggaaacggtttcggtccatggaatgagatgcatcctgagagaagtggttttcctaggggagccatgggttggcaaggtgctgtacagaaccattcctcctacattgtcaagaagatcgtgcgattggaagttccaacagatgcttaccccaattttaacttcattggccgtttgcttgggccgaggggacactcactaaagagaatcgaagctactacaggttgccgtgttttcatcagagggaaaggctccataaaagatcctgtgaaagaggaacagctcaagggaagacctggctatgaacacttggatgatccaacacatatcttgattgaggccgaattacctgctgatgttattgatgctagactggcacaagcacaggagatactagaggagtcgctgaaaccagtggatgagtcacaagacaacatcaagagacaacaacttcgagaacttgccatgttgaactctgtatatcgagagggtagcctgcatcagaacggcagcgcctctccgttcagcaatggggcacaaaacagtgacagggaggagattcagctctgatccttcccggaaactctcgcgttagtcctgctctcatgacagacatagcttctctgatgctcaagctcccgtgatggtattggaattcatgccattgctaactggtgaattttgatatcccttgtgacattgacctgcggatgagaagactagcgagaaaaaactcccccatggctgtgtacttaggatatttcgtttattgcttgcgcccactattagtgcagagatgtctaagttctagtattttgagctctttgattatctataaagttatgactccgcaaaatatttgatt

SEQ ID NO: 16280 - protein, 289 aa, Zea mays subsp. mays
  misc_feature (1)..(289): Ceres Seq. ID no. 12351859
MEALTATDKCFSPARAMFPMPIVRPPASPDHASQYLEDLLQEQQKLGPFVQVLPICGRLLNQEIMRTSNLLSNFGVRGNERLPPIASPNHMHPLPRGPDFCGNGFGPWNEMHPERSGFPRGAMGWQGAVQNHSSYIVKKIVRLEVPTDAYPNFNFIGRLLGPRGHSLKRIEATTGCRVFIRGKGSIKDPVKEEQLKGRPGYEHLDDPTHILIEAELPADVIDARLAQAQEILEESLKPVDESQDNIKRQQLRELAMLNSVYREGSLHQNGSASPFSNGAQNSDREEIQL

SEQ ID NO: 16281 - protein, 273 aa, Zea mays subsp. mays
  misc_feature (1)..(273): Ceres Seq. ID no. 12351860
MFPMPIVRPPASPDHASQYLEDLLQEQQKLGPFVQVLPICGRLLNQEIMRTSNLLSNFGVRGNERLPPIASPNHMHPLPRGPDFCGNGFGPWNEMHPERSGFPRGAMGWQGAVQNHSSYIVKKIVRLEVPTDAYPNFNFIGRLLGPRGHSLKRIEATTGCRVFIRGKGSIKDPVKEEQLKGRPGYEHLDDPTHILIEAELPADVIDARLAQAQEILEESLKPVDESQDNIKRQQLRELAMLNSVYREGSLHQNGSASPFSNGAQNSDREEIQL

SEQ ID NO: 16282 - protein, 270 aa, Zea mays subsp. mays
  misc_feature (1)..(270): Ceres Seq. ID no. 12351861
MPIVRPPASPDHASQYLEDLLQEQQKLGPFVQVLPICGRLLNQEIMRTSNLLSNFGVRGNERLPPIASPNHMHPLPRGPDFCGNGFGPWNEMHPERSGFPRGAMGWQGAVQNHSSYIVKKIVRLEVPTDAYPNFNFIGRLLGPRGHSLKRIEATTGCRVFIRGKGSIKDPVKEEQLKGRPGYEHLDDPTHILIEAELPADVIDARLAQAQEILEESLKPVDESQDNIKRQQLRELAMLNSVYREGSLHQNGSASPFSNGAQNSDREEIQL

SEQ ID NO: 16283 - DNA, 1364 bp, Zea mays subsp. mays
  misc_feature (1)..(1364): Ceres Seq. ID no. 12351866
gtgtctctcgcgtcgcgcccggccgtcgcctcccctccctccctgcaccgaccgatccctcccctgatcccctcttcacatcctaccacctctttaaagctacccagctacctgcctgcctcgcctcaacctcgccggcggccgcagccgcatagaccggaagagaaaggaagcagagatcggaggcaggcgaagatggggcgcggcaaggtgcagctgaagcggatagagaacaagataaaccggcaggtgaccttctccaagcgccggaacgggctgctgaagaaggcgcacgagatctccgtcctctgcgacgccgaggtcgccgtcatcgtcttctcccccaagggcaagctctacgagtacgcctccgactcccgcatggacaaaattctagaacgttatgagcgatattcctatgctgaaaaggctcttatttcagctgaatctgaaagtgagggaaattggtgccacgaatacaggaaactgaaggccaaaattgagaccatacaaagatgccacaagcacctgatgggagaggatctagagtctttgaatccaaaagagctccaacaactagagcagcagctggagagctcactgaagcacatcagatcaagaaagagccaccttatggccgagtcaatttctgagctacagaagaaggagaggtcactgcaggaggagaacaagattctacagaaggaactttcagagaggcagaaggcggtcgctagccggcagcagcagcagcagcaggtgcagtgggaccagcagacacaggtccaggtccagacaagctcatcgtcttcttccttcatgatgaggcaggatcagcagggactgccacctccacaaaacatctgcttcccgccgttgagcatcggagagagaggcgaagaggtggctgcggcggcgcagcagcagctgcctcctccggggcaggcgcaaccacagctccgcatcgcaggtctgccgccatggatgctgagccacctcaatgcataaggagggcgagcaaatggcgtgcgaagtgattgattgctcaccgttgattgaacgctagcctaagttcatggcggcagcaaactaagctaaaactattgttatgtttgcaaggaagggtagggtaacccgctgtgtaatctttgtccagctagcatgtaccaactgagatgcatgcatgcttattattgtccaattacccgtgaatctagcggtgcttttggtgagaggccggccggacgggtgcagtttacttcaaatatggtttgtgattttgtgtaaatagtattaactaggagtcctatggtaagtaaattaattaatgggaggatgcatgaataaaacctctcttgtgctgc

SEQ ID NO: 16284 - protein, 335 aa, Zea mays subsp. mays
  misc_feature (1)..(335): Ceres Seq. ID no. 12351867
VSLASRPAVASPPSLHRPIPPLIPSSHPTTSLKLPSYLPASPQPRRRPQPHRPEEKGSRDRRQAKMGRGKVQLKRIENKINRQVTFSKRRNGLLKKAHEISVLCDAEVAVIVFSPKGKLYEYASDSRMDKILERYERYSYAEKALISAESESEGNWCHEYRKLKAKIETIQRCHKHLMGEDLESLNPKELQQLEQQLESSLKHIRSRKSHLMAESISELQKKERSLQEENKILQKELSERQKAVASRQQQQQQVQWDQQTQVQVQTSSSSSSFMMRQDQQGLPPPQNICFPPLSIGERGEEVAAAAQQQLPPPGQAQPQLRIAGLPPWMLSHLNA

SEQ ID NO: 16285 - protein, 270 aa, Zea mays subsp. mays
  misc_feature (1)..(270): Ceres Seq. ID no. 12351868
MGRGKVQLKRIENKINRQVTFSKRRNGLLKKAHEISVLCDAEVAVIVFSPKGKLYEYASDSRMDKILERYERYSYAEKALISAESESEGNWCHEYRKLKAKIETIQRCHKHLMGEDLESLNPKELQQLEQQLESSLKHIRSRKSHLMAESISELQKKERSLQEENKILQKELSERQKAVASRQQQQQQVQWDQQTQVQVQTSSSSSSFMMRQDQQGLPPPQNICFPPLSIGERGEEVAAAAQQQLPPPGQAQPQLRIAGLPPWMLSHLNA

SEQ ID NO: 16286 - protein, 208 aa, Zea mays subsp. mays
  misc_feature (1)..(208): Ceres Seq. ID no. 12351869
MDKILERYERYSYAEKALISAESESEGNWCHEYRKLKAKIETIQRCHKHLMGEDLESLNPKELQQLEQQLESSLKHIRSRKSHLMAESISELQKKERSLQEENKILQKELSERQKAVASRQQQQQQVQWDQQTQVQVQTSSSSSSFMMRQDQQGLPPPQNICFPPLSIGERGEEVAAAAQQQLPPPGQAQPQLRIAGLPPWMLSHLNA

SEQ ID NO: 16287 - DNA, 1616 bp, Zea mays subsp. mays
  misc_feature (1)..(1616): Ceres Seq. ID no. 12351870
aaacacagtcaccaccacctacacccccgttgtctcctctccttccattgccacagtcggccttctccgtggaagccggcgggccgccgcctcctttgtccctgtcgtcgtgctcttccgtaccgccattccctagcactgtccacgggcgagatctcgcgtgtacctcgtttccctcggcgggtggatcagtgacggcttggtcgagatggacgatgtggttgatgacatcatctgtggaacggatgcggcggttgccgtcgaggatggggccagtgggacgcccgcaatgcctagcttagggtgccagggtgaggaagagcataggaagggcaatgaggacaactcaggtgagagcgaggtgattaacccggccagcaagaggctggcggggaggccacctcgcccctggaaggcaggaagcctcgcctttccaaggggaatcaaagccatgtacctaaggctgtcaaatctaagagtccaaggagtggagatgaaaatcagacaaggagaaaagctcccaactcttcttttcctaaggcacccattgtccaggagtcccatggtgactctggtgtcggcagtaataaagctggcaagaatgagtctcactcatccccaattgatgcagcattgcccgatgagtccaaggagaaaaggaaaactcaaaagccaccagcacagctctcttccatcaaaagagatgaagaacagtcaaatggtgagagtgcaaagcctcgcaaagttggaagcacgccatcatatggtttcaccttcaagtgtgatgagagatctgaaaaaagacgagagttctattcgaagcttgaggagaagattcatgcaagagagttagaaataagcaatttgcaagccaagtcaaaggaaactgaagaagcagaactcaaaatgctgagaaagagtttgaatttcaaggcaacaccaatgccaagcttttataaggaaccaacccctgccaaggttgaattgaaaaagatccccccaaccagagctaaatcaccaaagcttggtcggtctaaaaacaagtccatatcagagactgaagaaaatactactacggaccaacctgcccgtctgagccttgacgaaaaggtttctcaaaacggtgtgaaaaaaccaaccccgtcgagttcagcaaagaagccccagagaaagtcactccccaggctgccatctgaagaaacttgtccgcttgatgccacctcaaggcagctgaagaacaacaaactggatgaagttaatgctcaggagacaggatcagctacagggcaggtacaaggaagtgagacggaaacagattctgttcagagcgcaactcaagctggagctaaccctgatgaacagagtgtcgctcagtgaacagagtgtcgctcagtgaagatctcggtggccaagccaagtgatttgtgatggatggtgtgccttatctttgtgtgatgttgtgcttgtctactagagtgacttgtggcctgtatcatgctgtgttatactcctgtttttgttttcctgcgattgagcctgtatgttgcttatcaatctagatagcttttgttcataatctacagatatatccaaattgtcctaagtcatttgcagtt

SEQ ID NO: 16288 - protein, 214 aa, Zea mays subsp. mays
  misc_feature (1)..(214): Ceres Seq. ID no. 12351871
MDDVVDDIICGTDAAVAVEDGASGTPAMPSLGCQGEEEHRKGNEDNSGESEVINPASKRLAGRPPRPWKAGSLAFPRGIKAMYLRLSNLRVQGVEMKIRQGEKLPTLLFLRHPLSRSPMVTLVSAVIKLARMSLTHPQLMQHCPMSPRRKGKLKSHQHSSLPSKEMKNSQMVRVQSLAKLEARHHMVSPSSVMRDLKKDESSIRSLRRRFMQES

SEQ ID NO: 16289 - protein, 187 aa, Zea mays subsp. mays
  misc_feature (1)..(187): Ceres Seq. ID no. 12351872
MPSLGCQGEEEHRKGNEDNSGESEVINPASKRLAGRPPRPWKAGSLAFPRGIKAMYLRLSNLRVQGVEMKIRQGEKLPTLLFLRHPLSRSPMVTLVSAVIKLARMSLTHPQLMQHCPMSPRRKGKLKSHQHSSLPSKEMKNSQMVRVQSLAKLEARHHMVSPSSVMRDLKKDESSIRSLRRRFMQES

SEQ ID NO: 16290 - protein, 156 aa, Zea mays subsp. mays
  misc_feature (1)..(156): Ceres Seq. ID no. 12351873
MLRKSLNFKATPMPSFYKEPTPAKVELKKIPPTRAKSPKLGRSKNKSISETEENTTTDQPARLSLDEKVSQNGVKKPTPSSSAKKPQRKSLPRLPSEETCPLDATSRQLKNNKLDEVNAQETGSATGQVQGSETETDSVQSATQAGANPDEQSVAQ

SEQ ID NO: 16291 - DNA, 1273 bp, Zea mays subsp. mays
  misc_feature (1)..(1273): Ceres Seq. ID no. 12351874
atcgtccccgcctgcacctcgcgagcatccaaagctgtacttgcggcaagttctcgcaaaatcctactcccaccgccgactcgtacctccgctcccctcctccccaacccttccacgcttgcttctccgggagggaaggcacacgggaggtcgccccgccacccatcgcaaaagccacgcgccaccaaactcttttttccctcacccagtcgctttcgcgttcagcgcgagctgagccagccagtgggtcggtcgctggaggcggagccataaaggcgtcagcgacggcagcatgatgagcggcagatcgggcgggagggacgccgagggcgagtgggaggttcggcccggcgggatgctggtgcagcgcagggacggtgaggcggccggccccgtcatcaggatcagggtctcccacggcgccaacttccgcgaggtcgtcgtgccggcgcaggctaccttcggtgagttgaagaggatccttgttcagactactggcttggagcctgagaggcagaggctcttcttccgtgggaaggagaagagtgacagagagttcctgcacacggcaggtgttaaggatggagcaaagctgcttctgctcgagaagcctgcccctgccaacatagagcagaaggttgagcctgtgattatggatgaaagcatgatgaaggcatgtgcggctgttgctcgtgttagagttgaagttgataagctgtctgctaaggtgtgtgacttggagaagaatgtactaggagggagaaaggttgaggataaagaatttgttgtcttgacggagctgcttatgatgcagctgctgaaactcgatggcattgaagctgaaggagaagcaagggcacagaggaaggctgaggtgcgccgagttcagtcccttgtggagaccttggataagctgaaagcaagaaatgcaaaccccttcagcgatcataataaggctgtttcagtaacaacgcagtgggagacgtttgagaacggcatgggcagcttgagtgctccacctccccgtgtttcttcaacgcaagctaacactgactgggagcagttcgactaggctcagatgaagctgttgatgtatcatgaaatctgtgagatcggtatggacattcctttccgaggcagcgaggtgttgtgtatatgcaccacgtttgataacttttggcgtcccaagtgcctgtgattctgtgaatgttaccagatcgtgccactgccatactaccatgtgaattgcatcgctcattgagggtcatattcc

SEQ ID NO: 16292 - protein, 259 aa, Zea mays subsp. mays
  misc_feature (1)..(259): Ceres Seq. ID no. 12351875
MMSGRSGGRDAEGEWEVRPGGMLVQRRDGEAAGPVIRIRVSHGANFREVVVPAQATFGELKRILVQTTGLEPERQRLFFRGKEKSDREFLHTAGVKDGAKLLLLEKPAPANIEQKVEPVIMDESMMKACAAVARVRVEVDKLSAKVCDLEKNVLGGRKVEDKEFVVLTELLMMQLLKLDGIEAEGEARAQRKAEVRRVQSLVETLDKLKARNANPFSDHNKAVSVTTQWETFENGMGSLSAPPPRVSSTQANTDWEQFD

SEQ ID NO: 16293 - protein, 258 aa, Zea mays subsp. mays
  misc_feature (1)..(258): Ceres Seq. ID no. 12351876
MSGRSGGRDAEGEWEVRPGGMLVQRRDGEAAGPVIRIRVSHGANFREVVVPAQATFGELKRILVQTTGLEPERQRLFFRGKEKSDREFLHTAGVKDGAKLLLLEKPAPANIEQKVEPVIMDESMMKACAAVARVRVEVDKLSAKVCDLEKNVLGGRKVEDKEFVVLTELLMMQLLKLDGIEAEGEARAQRKAEVRRVQSLVETLDKLKARNANPFSDHNKAVSVTTQWETFENGMGSLSAPPPRVSSTQANTDWEQFD

SEQ ID NO: 16294 - protein, 238 aa, Zea mays subsp. mays
  misc_feature (1)..(238): Ceres Seq. ID no. 12351877
MLVQRRDGEAAGPVIRIRVSHGANFREVVVPAQATFGELKRILVQTTGLEPERQRLFFRGKEKSDREFLHTAGVKDGAKLLLLEKPAPANIEQKVEPVIMDESMMKACAAVARVRVEVDKLSAKVCDLEKNVLGGRKVEDKEFVVLTELLMMQLLKLDGIEAEGEARAQRKAEVRRVQSLVETLDKLKARNANPFSDHNKAVSVTTQWETFENGMGSLSAPPPRVSSTQANTDWEQFD

SEQ ID NO: 16295 - DNA, 1100 bp, Zea mays subsp. mays
  misc_feature (1)..(1100): Ceres Seq. ID no. 12351878
aatctacagatatgaaccaagttagataaggtactcgtacaccgaacatgttcgatagaatgctctagtgacagcgaaaaaaccaaacaacaaaaaccaacgaaatccctgccatttttataggagacgacggtgcggggaggcaagggaagggggcgacgaagaggaaagcgaagaaagcgtcatggggcttggccttggcgtgcgggcggcgcccttcacgtacgcggcgcacgcgctggccgtcgcggcggcggccatggtgttggtctgggccatctacttccgcggtgggctcgccatcgaggccaccaacaagaacctcatcttcaacgttcaccctgttcttatgcttatcggttatattatcatcggcggcgaagctataatggtatacagggtacttccaacatcgaaccacgggacaaataagctgatccatctagttctccacgggattgcacttgtccttggtgcggttggaatatatttcgccttcaaaaatcataatgagagtgggattgccaatctttacagtctgcactcttggattgggatagggacgattactttgtatggtattcagtggatagttggattcgttacattcttcttccctggtgctgcgccaaacgtgaagaagggtgttcttccttggcacatactctttgggctctttgtctacatcttagcactggctaatgcggaactcggctttcttgagaagctcactttcctcgagagctcgggtctcgacaaatacggcacagaggcattcttggtgaacttcacagcgttggttgtcgtgttgtttggtgcctctgttgtggtggctgctatagctccagttcgccttgaagaaccacagggttatgttccaattccagaaaactagtacaaatgaaatgtacatcatatgcagttgccaggattggctgttaccatatggagctaagctattcatctctctttattaaggagaagaagatgatggagttatcacgataagaagatagtgcatcgtcattgtgtgtgtatatgtatatacattccgtgatacttcaaaatttcagtatatgcgaaattgaatatactgcttc

SEQ ID NO: 16296 - protein, 236 aa, Zea mays subsp. mays
  misc_feature (1)..(236): Ceres Seq. ID no. 12351879
MGLGLGVRAAPFTYAAHALAVAAAAMVLVWAIYFRGGLAIEATNKNLIFNVHPVLMLIGYIIIGGEAIMVYRVLPTSNHGTNKLIHLVLHGIALVLGAVGIYFAFKNHNESGIANLYSLHSWIGIGTITLYGIQWIVGFVTFFFPGAAPNVKKGVLPWHILFGLFVYILALANAELGFLEKLTFLESSGLDKYGTEAFLVNFTALVVVLFGASVVVAAIAPVRLEEPQGYVPIPEN

SEQ ID NO: 16297 - protein, 211 aa, Zea mays subsp. mays
  misc_feature (1)..(211): Ceres Seq. ID no. 12351880
MVLVWAIYFRGGLAIEATNKNLIFNVHPVLMLIGYIIIGGEAIMVYRVLPTSNHGTNKLIHLVLHGIALVLGAVGIYFAFKNHNESGIANLYSLHSWIGIGTITLYGIQWIVGFVTFFFPGAAPNVKKGVLPWHILFGLFVYILALANAELGFLEKLTFLESSGLDKYGTEAFLVNFTALVVVLFGASVVVAAIAPVRLEEPQGYVPIPEN

SEQ ID NO: 16298 - protein, 181 aa, Zea mays subsp. mays
  misc_feature (1)..(181): Ceres Seq. ID no. 12351881
MLIGYIIIGGEAIMVYRVLPTSNHGTNKLIHLVLHGIALVLGAVGIYFAFKNHNESGIANLYSLHSWIGIGTITLYGIQWIVGFVTFFFPGAAPNVKKGVLPWHILFGLFVYILALANAELGFLEKLTFLESSGLDKYGTEAFLVNFTALVVVLFGASVVVAAIAPVRLEEPQGYVPIPEN

SEQ ID NO: 16299 - DNA, 1607 bp, Zea mays subsp. mays
  misc_feature (1)..(1607): Ceres Seq. ID no. 12351896
atcatctcttcgacactctcacatgcatcggaagattccgctgacactaaaaagatcgaaatggcgccgggatcgtcgtcgtctcgtaaggccaaggccctcaaggcatcgtaccggctcgtcgccgacaacttcctcgccgtcctcgccatggtttctgtcgtcgccgtgctcttcgctgcatggccgatcagcatcgaggaccttgcctgccggctgcacgcggtgcggccactccacgtcctcacggcggcgatcctgacggcggccctcgcgaagctgaggcgcatgagccggccgagcgacgtgtatctcgtggagtacggctgcttctggcccaagccgtgcttccgggcgccgttcgcgacgtgcctggagcacgtgcggctcttgccgtacctggtcaacgaggacgacatcagctggggctggcggctcctccagcggtccgggatcggcgaggagacctgcgtgccgtacgcctaccactacctgcccccggaccgcagctttagggcctccctggacgagaccgagctggtcatcttctccgccgtcgacgatgtgttcgcccggacgacggccgtgacgcccgcggacatcggcgtggtgatcgtgaactgcagcatcttcacgcccacgccggtgttcacggacatgatcgtgaacaggtacaagctgcgcgccgacgtgcggagcgtgaacctgtccgggatggggtgcagcgcggcgctcatctcgatcggtctcgccaggaacatgctgcaggtggcgccgccgggcacgcacgcgctgatcgtgtccacggagatcctctcgtcgcagtactacgtcggcatggaccgctccatgctcctgcccaactgcctcttccgcatgggcgccgccgccatgatcatgtccaacaccgcggcccgaggcgcgcggttccggctcgcccgcgtcgtgcgcacggtggcctccgcgcgggacgccgcctaccggtgcgtgttccaggtggaggacgaggagagcaacacggggatccggctctccaaggacctcgtgcccactgccgcccagaccctgaaaagcaacatcgtcgccttcgggcccctggtcctgcctgcctcggagaagctcctcgtcgctctgtccatcctgaggcggaggctagtacagagcagccgggggagggtgtaccgcccggacttccgcaccgcgttcgagcacttctgcatccacgccggcgggcgcggggtcatcgacgaggtgcagcgcggcctcggcctctccgacgaggacgtggaggcgtcgcggatgacgctgcaccggttcgggaacacgtccagcagttcggtggtgtacgagctggcgtacatcgaggccaagggcagcatgaggaagggagaccgcgtgtggatgatctccttcggcgccggcttcgactgcagcagcgtggcgtgggagtgcatcgagcccgccgccgacgctgctgggccgtgggccgactgtatccaccgctacccagtgcagctccctaaattgatggaggcccttgattgaatccgtacatgtagacgtgaagtggcataatcaatcaatgttgtactgtatctttaatgtcc

SEQ ID NO: 16300 - protein, 514 aa, Zea mays subsp. mays
  misc_feature (1)..(514): Ceres Seq. ID no. 12351897
IISSTLSHASEDSADTKKIEMAPGSSSSRKAKALKASYRLVADNFLAVLAMVSVVAVLFAAWPISIEDLACRLHAVRPLHVLTAAILTAALAKLRRMSRPSDVYLVEYGCFWPKPCFRAPFATCLEHVRLLPYLVNEDDISWGWRLLQRSGIGEETCVPYAYHYLPPDRSFRASLDETELVIFSAVDDVFARTTAVTPADIGVVIVNCSIFTPTPVFTDMIVNRYKLRADVRSVNLSGMGCSAALISIGLARNMLQVAPPGTHALIVSTEILSSQYYVGMDRSMLLPNCLFRMGAAAMIMSNTAARGARFRLARVVRTVASARDAAYRCVFQVEDEESNTGIRLSKDLVPTAAQTLKSNIVAFGPLVLPASEKLLVALSILRRRLVQSSRGRVYRPDFRTAFEHFCIHAGGRGVIDEVQRGLGLSDEDVEASRMTLHRFGNTSSSSVVYELAYIEAKGSMRKGDRVWMISFGAGFDCSSVAWECIEPAADAAGPWADCIHRYPVQLPKLMEALD

SEQ ID NO: 16301 - protein, 494 aa, Zea mays subsp. mays
  misc_feature (1)..(494): Ceres Seq. ID no. 12351898
MAPGSSSSRKAKALKASYRLVADNFLAVLAMVSVVAVLFAAWPISIEDLACRLHAVRPLHVLTAAILTAALAKLRRMSRPSDVYLVEYGCFWPKPCFRAPFATCLEHVRLLPYLVNEDDISWGWRLLQRSGIGEETCVPYAYHYLPPDRSFRASLDETELVIFSAVDDVFARTTAVTPADIGVVIVNCSIFTPTPVFTDMIVNRYKLRADVRSVNLSGMGCSAALISIGLARNMLQVAPPGTHALIVSTEILSSQYYVGMDRSMLLPNCLFRMGAAAMIMSNTAARGARFRLARVVRTVASARDAAYRCVFQVEDEESNTGIRLSKDLVPTAAQTLKSNIVAFGPLVLPASEKLLVALSILRRRLVQSSRGRVYRPDFRTAFEHFCIHAGGRGVIDEVQRGLGLSDEDVEASRMTLHRFGNTSSSSVVYELAYIEAKGSMRKGDRVWMISFGAGFDCSSVAWECIEPAADAAGPWADCIHRYPVQLPKLMEALD

SEQ ID NO: 16302 - protein, 464 aa, Zea mays subsp. mays
  misc_feature (1)..(464): Ceres Seq. ID no. 12351899
MVSVVAVLFAAWPISIEDLACRLHAVRPLHVLTAAILTAALAKLRRMSRPSDVYLVEYGCFWPKPCFRAPFATCLEHVRLLPYLVNEDDISWGWRLLQRSGIGEETCVPYAYHYLPPDRSFRASLDETELVIFSAVDDVFARTTAVTPADIGVVIVNCSIFTPTPVFTDMIVNRYKLRADVRSVNLSGMGCSAALISIGLARNMLQVAPPGTHALIVSTEILSSQYYVGMDRSMLLPNCLFRMGAAAMIMSNTAARGARFRLARVVRTVASARDAAYRCVFQVEDEESNTGIRLSKDLVPTAAQTLKSNIVAFGPLVLPASEKLLVALSILRRRLVQSSRGRVYRPDFRTAFEHFCIHAGGRGVIDEVQRGLGLSDEDVEASRMTLHRFGNTSSSSVVYELAYIEAKGSMRKGDRVWMISFGAGFDCSSVAWECIEPAADAAGPWADCIHRYPVQLPKLMEALD

SEQ ID NO: 16303 - DNA, 1549 bp, Zea mays subsp. mays
  misc_feature (1)..(1549): Ceres Seq. ID no. 12351900
actcgacaccgcacggcctcaagcagaggaagctttccgcccgggaacgccatggggtcgcttcctctccttgctgcctgctgctccctcctgctcacggtcgcagctcctgcccgggacagcactaccagcgtctgcgcttcgcaaatcggcgatttcccgcaccggaacagttcgggcctccacctgacgctgcaccacccgcagagcccctgctcgccggcgccgctcccgtccgacctccccttctccacagtcctcacccacgacgatgcgcgcgtcgcccacctcgcgtcgcgactcgccgccagtgatccgccgtcccgccgtccgacatcactccgcaagcagaagaaggccgccggtggtgcttccggcggccaccacctcgacgacgactccctggcctccgtgcctctctcgcccggaacgtcagtgggcgtggggaactacgttacccagctcggcctcggcacgccgtccacctcctacgcaatggtagtcgacacgggctcctcgctcacctggctgcagtgctcgccttgcgtcgtgtcgtgccaccgccaggtggggccgctcttcgaccccagggcctccagcacctacgcctccgtgcgctgctcggcgtcgcagtgcgacgagctccaggccgccacgctcaacccgtccgcctgctccgcctcaaacgtctgcatctaccaggccagctacggcgacagctccttctccgtcggctccctcagcacggacaccgtctccttcggctccacccgctacccgagcttctactacggctgcggccaggacaatgaggggctcttcggccgctcggcggggctcatcggcctcgcgcgcaacaagctctcgctgctctaccagctcgcgcccagcctcggctactccttctcctattgcctcccgacggctgcgtcaacggggtatctctccatcgggccctacaacacggggcactactactcgtacacgcccatggcctcgagctctctcgacgcctcgctctacttcatcaccctgtccgggatgtcggtcggcgggagcccactcgcggtctcgccgtcggagtacagcagcctgcccacgatcatagactcgggcacggtgatcacgcgcctgccgacggctgtgcacacggcgctcagcaaggcggtggcccaggccatggcaggggcgcagcgcgcaccggccttctccatcctggacacgtgcttcgagggccaggcgtcgcagctgcgcgtgcccaccgtggccatggcgttcgcgggcggcgcctccatgaagctgacgacgcggaacgtgctcatagacgtcgacgactccacgacgtgcctggcgtttgcgcccaccgacagcacggccatcatcggcaacacgcagcagcagacgttcagcgtcatctacgacgtcgcgcaatccaggatcggcttctcggcaggcggatgcagctgaatagctgatgggtgaaaagtgaaaactgattattgagctctatggagtgggcagctcaagcttggtaatagaaaatgcgtac

SEQ ID NO: 16304 - protein, 488 aa, Zea mays subsp. mays
  misc_feature (1)..(488): Ceres Seq. ID no. 12351901
TRHRTASSRGSFPPGNAMGSLPLLAACCSLLLTVAAPARDSTTSVCASQIGDFPHRNSSGLHLTLHHPQSPCSPAPLPSDLPFSTVLTHDDARVAHLASRLAASDPPSRRPTSLRKQKKAAGGASGGHHLDDDSLASVPLSPGTSVGVGNYVTQLGLGTPSTSYAMVVDTGSSLTWLQCSPCVVSCHRQVGPLFDPRASSTYASVRCSASQCDELQAATLNPSACSASNVCIYQASYGDSSFSVGSLSTDTVSFGSTRYPSFYYGCGQDNEGLFGRSAGLIGLARNKLSLLYQLAPSLGYSFSYCLPTAASTGYLSIGPYNTGHYYSYTPMASSSLDASLYFITLSGMSVGGSPLAVSPSEYSSLPTIIDSGTVITRLPTAVHTALSKAVAQAMAGAQRAPAFSILDTCFEGQASQLRVPTVAMAFAGGASMKLTTRNVLIDVDDSTTCLAFAPTDSTAIIGNTQQQTFSVIYDVAQSRIGFSAGGCS

SEQ ID NO: 16305 - protein, 471 aa, Zea mays subsp. mays
  misc_feature (1)..(471): Ceres Seq. ID no. 12351902
MGSLPLLAACCSLLLTVAAPARDSTTSVCASQIGDFPHRNSSGLHLTLHHPQSPCSPAPLPSDLPFSTVLTHDDARVAHLASRLAASDPPSRRPTSLRKQKKAAGGASGGHHLDDDSLASVPLSPGTSVGVGNYVTQLGLGTPSTSYAMVVDTGSSLTWLQCSPCVVSCHRQVGPLFDPRASSTYASVRCSASQCDELQAATLNPSACSASNVCIYQASYGDSSFSVGSLSTDTVSFGSTRYPSFYYGCGQDNEGLFGRSAGLIGLARNKLSLLYQLAPSLGYSFSYCLPTAASTGYLSIGPYNTGHYYSYTPMASSSLDASLYFITLSGMSVGGSPLAVSPSEYSSLPTIIDSGTVITRLPTAVHTALSKAVAQAMAGAQRAPAFSILDTCFEGQASQLRVPTVAMAFAGGASMKLTTRNVLIDVDDSTTCLAFAPTDSTAIIGNTQQQTFSVIYDVAQSRIGFSAGGCS

SEQ ID NO: 16306 - protein, 323 aa, Zea mays subsp. mays
  misc_feature (1)..(323): Ceres Seq. ID no. 12351903
MVVDTGSSLTWLQCSPCVVSCHRQVGPLFDPRASSTYASVRCSASQCDELQAATLNPSACSASNVCIYQASYGDSSFSVGSLSTDTVSFGSTRYPSFYYGCGQDNEGLFGRSAGLIGLARNKLSLLYQLAPSLGYSFSYCLPTAASTGYLSIGPYNTGHYYSYTPMASSSLDASLYFITLSGMSVGGSPLAVSPSEYSSLPTIIDSGTVITRLPTAVHTALSKAVAQAMAGAQRAPAFSILDTCFEGQASQLRVPTVAMAFAGGASMKLTTRNVLIDVDDSTTCLAFAPTDSTAIIGNTQQQTFSVIYDVAQSRIGFSAGGCS

SEQ ID NO: 16307 - DNA, 1374 bp, Zea mays subsp. mays
  misc_feature (1)..(1374): Ceres Seq. ID no. 12351930
agcatctccaacaaacaccagacgtcgtatagcggcagtccagtccacctcctccgaagccgacggtcgccgccggccatcgccgcggaggatatggcgtccctccgtgtggtgtcggtgctagtgttggtggcaatggcggcgagcgcgggcggcgtcgcggcgcggcctctggtaggggtaggcggggcgtgggagaacagggcgccgctgcagacgtcgcgccccttcaacatcgcgcaccggggctccaacggggagctccccgaggagacggcggcggcctacgcggcgcgccatcgacgagggcgcggacttcatcgaggcggacatcgaggccaccaaggacggccacctcgtctgcttccacgacaccacgctcgacggtaccaccgacgtcgcccaccacccggagttcgccggccgccggcgcaccctcgaggtgcagtgggccaacgtcaccggatacttcgtcactgatttcacgctggcggagctcaagacgctgcgggcgaagcagcgatgggacttccgtgacaagtcccacaacggcgtctcgccgatcatcacgttcgacgagttcatcgacgtcgcgctgaacgccaagaggggtcgggatctacccggagatgaagaaccctgtgttcatgaacaagcacgtgcagtgggctgacgggaagaagtacgaggacaagttcatcgcgacgctgaagaagtacggctacggcggcaagtacatgtcgccggcgtggcgcgccaggccggtcttcgtccagtctttcgcgccgacgtcgctggtccgcgcggccggcctcacggactcgccgctcgtcttcctcgtcgacgacgtgaccgtgcggaccgaggacaccaaccagccgtacgacgatatcacctccggcgagcacctggactacatgaacaggtacgtggtgggcatcgggccctggaaggacacggtggtgccgccgaccaaggacaaccggctggccacgccgtcggacctcgtcgcaatggcgcacgcgaggggactgcaggtgcacccctacacgtaccgcaacgagaacaagttcctgcacttcgacttccggcaggacccctacgccgagtacgactactggatcaacgacgtcggcatcgatggcctcttcaccgacttcccggcgagcctccgccggttccaggagtggaccgccaagaacaaagactgattgtgattggcaactcggtcttggtagctagcttctttgattcagtcattcagatcgtagctctggagatgttttcagggtagagacaattctttggtgttccttgttttaaatagccatatattttcttgattggatcagtaacagttaacagttcttacct

SEQ ID NO: 16308 - protein, 193 aa, Zea mays subsp. mays
  misc_feature (1)..(193): Ceres Seq. ID no. 12351931
MKNPVFMNKHVQWADGKKYEDKFIATLKKYGYGGKYMSPAWRARPVFVQSFAPTSLVRAAGLTDSPLVFLVDDVTVRTEDTNQPYDDITSGEHLDYMNRYVVGIGPWKDTVVPPTKDNRLATPSDLVAMAHARGLQVHPYTYRNENKFLHFDFRQDPYAEYDYWINDVGIDGLFTDFPASLRRFQEWTAKNKD

SEQ ID NO: 16309 - protein, 187 aa, Zea mays subsp. mays
  misc_feature (1)..(187): Ceres Seq. ID no. 12351932
MNKHVQWADGKKYEDKFIATLKKYGYGGKYMSPAWRARPVFVQSFAPTSLVRAAGLTDSPLVFLVDDVTVRTEDTNQPYDDITSGEHLDYMNRYVVGIGPWKDTVVPPTKDNRLATPSDLVAMAHARGLQVHPYTYRNENKFLHFDFRQDPYAEYDYWINDVGIDGLFTDFPASLRRFQEWTAKNKD

SEQ ID NO: 16310 - protein, 159 aa, Zea mays subsp. mays
  misc_feature (1)..(159): Ceres Seq. ID no. 12351933
SISNKHQTSYSGSPVHLLRSRRSPPAIAAEDMASLRVVSVLVLVAMAASAGGVAARPLVGVGGAWENRAPLQTSRPFNIAHRGSNGELPEETAAAYAARHRRGRGLHRGGHRGHQGRPPRLLPRHHARRYHRRRPPPGVRRPPAHPRGAVGQRHRILRH

SEQ ID NO: 16311 - DNA, 1558 bp, Zea mays subsp. mays
  misc_feature (1)..(1558): Ceres Seq. ID no. 12351948
aagcttccgcttctctcatggccgacgccaccgccgccctctcagctcggagcaaggtgcaggctttcctggaggctgcgcgcgccggcgacctccaatccctcaagaacctcgtcgcggcgctcgacgaggacggcacgggcgccgcctccgtcgccgccgccgtgcgtgacgccaacaagcgcaccgccctccacttcgcggcgatcggatgtcgcaccgacgtctgtgaattcctcatcggcgagctcggcctccctgtcgacccaaaggacgatgatggcgaaactccgctcatccatgcgacacgccagggccatctggacactgtcaagtatcttctcgaccatggagctgatccttcgctggccaccagcctaggagccacagcgctacaccatgctgcaggcatagggaacacggaactcatgaagcttctcctctccaagggagttgacgtcgagtcagaaagtgatgctggcactccccttgtgtgggctgctggtcatggcaaccaggatgctgtcaaacttctgcttcaacacaatgctaagccaaatactgaaaacgatgatggtgtcacagcattgttatctgctgttgctgcaggttccctcccatgcttggaggtcctaattgaggctggtgcaaacccaaatgtcaaggctggtggagcaaccccattgcatattgctgcagatagtggaaatatagaagtcatcaaatgtttgcttaaagctggagctgacccaaatacctgtgatgatgatgaattgaagccagttcaggttgctgcttggagaaataaccatgaagctgttgaacttcttttaccgttaacatccccaattccaggtgtttcaaactggaacgtagatgggattatagaacacatgctccctaaagagtatgaggaaaagtctcaactgaaggaagcgacatctctgaaatcaggcctaacacaaactattgaggtgtcatctgaagcaaaaaagaggtccttggaagccaaatcaagaggtgatgatgccttcagaagaaaggactaccttgtagcggtggatgcttatacgcaggctacagagttggacccaactgatgcaacagtgctctcaaacagaagcctgtgctggctgcgggcagggcaagctgagcgtgctctggaggacgccaaagcatgccgtgcattgagaccagattgggcgaaagcctgctacagggaaggtgcggcgcatcgtctgttacagaggtttgaggaagccgcaaacgccttctatgagggggtgcaacttgagccagagaacacggagctcgtcaacgcattcagggaggccatcgaagccgggaggaagttccatggcgtcgacacgccaagctcaacacaatgagactttgctgtttggttggataggtagatgatgaggcggatggacatgaacgttgtcttagttggaatttggtgagatgatgaatgagatgatcatgaaatttgaaagagcgaatttgccagatttattttgtgttttgtgattgttttcttaaacttgttttcttgcgc

SEQ ID NO: 16312 - protein, 461 aa, Zea mays subsp. mays
  misc_feature (1)..(461): Ceres Seq. ID no. 12351949
ASASLMADATAALSARSKVQAFLEAARAGDLQSLKNLVAALDEDGTGAASVAAAVRDANKRTALHFAAIGCRTDVCEFLIGELGLPVDPKDDDGETPLIHATRQGHLDTVKYLLDHGADPSLATSLGATALHHAAGIGNTELMKLLLSKGVDVESESDAGTPLVWAAGHGNQDAVKLLLQHNAKPNTENDDGVTALLSAVAAGSLPCLEVLIEAGANPNVKAGGATPLHIAADSGNIEVIKCLLKAGADPNTCDDDELKPVQVAAWRNNHEAVELLLPLTSPIPGVSNWNVDGIIEHMLPKEYEEKSQLKEATSLKSGLTQTIEVSSEAKKRSLEAKSRGDDAFRRKDYLVAVDAYTQATELDPTDATVLSNRSLCWLRAGQAERALEDAKACRALRPDWAKACYREGAAHRLLQRFEEAANAFYEGVQLEPENTELVNAFREAIEAGRKFHGVDTPSSTQ

SEQ ID NO: 16313 - protein, 456 aa, Zea mays subsp. mays
  misc_feature (1)..(456): Ceres Seq. ID no. 12351950
MADATAALSARSKVQAFLEAARAGDLQSLKNLVAALDEDGTGAASVAAAVRDANKRTALHFAAIGCRTDVCEFLIGELGLPVDPKDDDGETPLIHATRQGHLDTVKYLLDHGADPSLATSLGATALHHAAGIGNTELMKLLLSKGVDVESESDAGTPLVWAAGHGNQDAVKLLLQHNAKPNTENDDGVTALLSAVAAGSLPCLEVLIEAGANPNVKAGGATPLHIAADSGNIEVIKCLLKAGADPNTCDDDELKPVQVAAWRNNHEAVELLLPLTSPIPGVSNWNVDGIIEHMLPKEYEEKSQLKEATSLKSGLTQTIEVSSEAKKRSLEAKSRGDDAFRRKDYLVAVDAYTQATELDPTDATVLSNRSLCWLRAGQAERALEDAKACRALRPDWAKACYREGAAHRLLQRFEEAANAFYEGVQLEPENTELVNAFREAIEAGRKFHGVDTPSSTQ

SEQ ID NO: 16314 - protein, 319 aa, Zea mays subsp. mays
  misc_feature (1)..(319): Ceres Seq. ID no. 12351951
MKLLLSKGVDVESESDAGTPLVWAAGHGNQDAVKLLLQHNAKPNTENDDGVTALLSAVAAGSLPCLEVLIEAGANPNVKAGGATPLHIAADSGNIEVIKCLLKAGADPNTCDDDELKPVQVAAWRNNHEAVELLLPLTSPIPGVSNWNVDGIIEHMLPKEYEEKSQLKEATSLKSGLTQTIEVSSEAKKRSLEAKSRGDDAFRRKDYLVAVDAYTQATELDPTDATVLSNRSLCWLRAGQAERALEDAKACRALRPDWAKACYREGAAHRLLQRFEEAANAFYEGVQLEPENTELVNAFREAIEAGRKFHGVDTPSSTQ

SEQ ID NO: 16315 - DNA, 1416 bp, Zea mays subsp. mays
  misc_feature (1)..(1416): Ceres Seq. ID no. 12351956
aactcaccaaacaaacactcgagcaaagctcagcctcacacagcctctcctctcgagctagagtgctactagcttagaagaagcagcagcttaccgctgaagctgcagcaatggcgaaatcttacaccttactgttcgtcgcactggtcgttctggcccttctagtgagccccattgcttgctcccgcaagctcgccaagccgaacaagcccaagccgacccacaagccggcggccagggtcacgcccggcagcaaccacaccggtatccccgcagtgtccgccgcctacggctccggcggctggttgtctgccggcgcgacgtactacggcgccccaaacggcgacggcagtgacggcggtgcgtgcgggtaccagaccgccgtcgggcagcgccccttctcgtcgatgatcgccgccgggagcccgtctctgttcaagggaggcaagggctgcggcgcctgctacgaggttaaatgcgacggcaacccggcatgctccggccagccggccaccgtggtcatcaccgacgagtgccccggcggtgtctgcctcgcagaggcggctcacttcgacatgagcggcacctccatgggcgccatggcgaagcccggcatggccgacaggcttcgcgccgccggcatcctcaagatccagtacaagagggtgccgtgcaagtacagcggcgtgaacatcgccttccgggtggaccagggatccaacccgttctacttggaggtgctcatcgagttcgaggacggcgacggcgacctcagcgccgtccacctcatggaggccgggtgcggcacgtggaccccgatggtgcagaactggggcgcgctctggcgctacaactccaacaccggcaaggcgctgaaggcgcccttctcgctccggctgacctccgactccggcagggtgctcgtcgccaacaacgtcatccccgccggctggaaccccggggccacgtaccgctccttggtgaactactcctgattgatgaactgcggcggcggttcggttctccgcgccccattgcatgcgcttggctggattattatgcgtggccaagaagtgctttgcagggtgcgtggtgtttaaggaacgagctagctagtctcgagtttgttttctgagaagaagaaaaaaatgtctgttcgggtgtccgcgagaggcggtggaagaagaagaggaggaggaggacaagaaggttaaggagccgtgtgttcttcactccctccacggtctctgcagtcacctagttatgtgtgtagtggtcggtgtaggtttctttttcgttgtgatggctcaggagaggagttggattggacgttgtatcagtctgtgtgtgtgtgcgcgcgtagttttctgtaccacgcaatcctttcagagaattgaattcctgctttcttgtttc

SEQ ID NO: 16316 - protein, 294 aa, Zea mays subsp. mays
  misc_feature (1)..(294): Ceres Seq. ID no. 12351957
MAKSYTLLFVALVVLALLVSPIACSRKLAKPNKPKPTHKPAARVTPGSNHTGIPAVSAAYGSGGWLSAGATYYGAPNGDGSDGGACGYQTAVGQRPFSSMIAAGSPSLFKGGKGCGACYEVKCDGNPACSGQPATVVITDECPGGVCLAEAAHFDMSGTSMGAMAKPGMADRLRAAGILKIQYKRVPCKYSGVNIAFRVDQGSNPFYLEVLIEFEDGDGDLSAVHLMEAGCGTWTPMVQNWGALWRYNSNTGKALKAPFSLRLTSDSGRVLVANNVIPAGWNPGATYRSLVNYS

SEQ ID NO: 16317 - protein, 219 aa, Zea mays subsp. mays
  misc_feature (1)..(219): Ceres Seq. ID no. 12351958
MRRQPGMLRPAGHRGHHRRVPRRCLPRRGGSLRHERHLHGRHGEARHGRQASRRRHPQDPVQEGAVQVQRREHRLPGGPGIQPVLLGGAHRVRGRRRRPQRRPPHGGRVRHVDPDGAELGRALALQLQHRQGAEGALLAPADLRLRQGARRQQRHPRRLEPRGHVPLLGELLLIDELRRRFGSPRPIACAWLDYYAWPRSALQGAWCLRNELASLEFVF

SEQ ID NO: 16318 - protein, 213 aa, Zea mays subsp. mays
  misc_feature (1)..(213): Ceres Seq. ID no. 12351959
MLRPAGHRGHHRRVPRRCLPRRGGSLRHERHLHGRHGEARHGRQASRRRHPQDPVQEGAVQVQRREHRLPGGPGIQPVLLGGAHRVRGRRRRPQRRPPHGGRVRHVDPDGAELGRALALQLQHRQGAEGALLAPADLRLRQGARRQQRHPRRLEPRGHVPLLGELLLIDELRRRFGSPRPIACAWLDYYAWPRSALQGAWCLRNELASLEFVF

SEQ ID NO: 16319 - DNA, 1385 bp, Zea mays subsp. mays
  misc_feature (1)..(1385): Ceres Seq. ID no. 12351964
accagcctgctccggtcctcttggagttgggcctgcccacctcccggccggtccgccgcgcggttccagtttcgcctctcgtcgccggtcctggcgagccccgcctccttgatctccgaccagcagcttccccactgcccactccccagccccggacgtgcccttcgccggtgctgtcatggcgttcggccgacggagccccggatcctcgcggcaccctcccgcgctcaccatcgtcacggcgctactcctcgcctccctctacttcgccgccgcggcggcggctctatcgcccaccgacgcgatgcacaacaacaactgggccgtgctcgtgtgtacctcccgcttctggtttaattatcgacacatggcgaatacattgtccctatacaggactgttaagagattaggaatacctgatgagcgaatcatacttatgttggcggacgatatggcctgtaacccaaggaacagctatcctgcccaagttttcaataatgagaaccaccagctaaatctctatggtgacaatgttgaggtcgattatcgagggtatgaggtgacagttgaaaatttcttgagagttttgactggccgacatgaaagtgctgtaccaagatcgaagcgtcttcttagtgatgaaggaagtcatatacttttgtacatgactggacatggtggtgatgaatttttgaagttccaagattctgaagagcttcagagccatgacttagcagatgctgtgaagcaaatgaaggagaagcatagatttaaagagctgctgataatggtagatacctgccaagctgctactctcttttcacagcttcagtcacctggtgttttggcgattggtagtagcatgaagggtgaaaactcttattctcaccatcttgattcagatgtaggtgtttctgttgtggataggtttacctattatacacttgctttctttgagaaactgaacatgtatagcaatgcctcactgaacagccttttcacctcatacaatccttccatgctgttgtctactgcatattatcgaatggatctttatgaacgtcccttaaatgaggtgcctgtgacaaatttttttggatcagtcatgaagactctccacactgattcagcctacacaggtttcttggctgcgcatgacaatgaaactccaatgtccacgggagataaccttgatgatcatttcatgttaaagggcagggctatcgcacgaagatcaaccatagaaaaggaggcacaattaacaccgcatggatggactgaagttctggctgaacagctggagggaaagaatactgatactgttgtgatgtatggtctgggagctatgggtatactgttggcactttcaacctggttatcaatgt

SEQ ID NO: 16320 - protein, 402 aa, Zea mays subsp. mays
  misc_feature (1)..(402): Ceres Seq. ID no. 12351965
MAFGRRSPGSSRHPPALTIVTALLLASLYFAAAAAALSPTDAMHNNNWAVLVCTSRFWFNYRHMANTLSLYRTVKRLGIPDERIILMLADDMACNPRNSYPAQVFNNENHQLNLYGDNVEVDYRGYEVTVENFLRVLTGRHESAVPRSKRLLSDEGSHILLYMTGHGGDEFLKFQDSEELQSHDLADAVKQMKEKHRFKELLIMVDTCQAATLFSQLQSPGVLAIGSSMKGENSYSHHLDSDVGVSVVDRFTYYTLAFFEKLNMYSNASLNSLFTSYNPSMLLSTAYYRMDLYERPLNEVPVTNFFGSVMKTLHTDSAYTGFLAAHDNETPMSTGDNLDDHFMLKGRAIARRSTIEKEAQLTPHGWTEVLAEQLEGKNTDTVVMYGLGAMGILLALSTWLSM

SEQ ID NO: 16321 - protein, 360 aa, Zea mays subsp. mays
  misc_feature (1)..(360): Ceres Seq. ID no. 12351966
MHNNNWAVLVCTSRFWFNYRHMANTLSLYRTVKRLGIPDERIILMLADDMACNPRNSYPAQVFNNENHQLNLYGDNVEVDYRGYEVTVENFLRVLTGRHESAVPRSKRLLSDEGSHILLYMTGHGGDEFLKFQDSEELQSHDLADAVKQMKEKHRFKELLIMVDTCQAATLFSQLQSPGVLAIGSSMKGENSYSHHLDSDVGVSVVDRFTYYTLAFFEKLNMYSNASLNSLFTSYNPSMLLSTAYYRMDLYERPLNEVPVTNFFGSVMKTLHTDSAYTGFLAAHDNETPMSTGDNLDDHFMLKGRAIARRSTIEKEAQLTPHGWTEVLAEQLEGKNTDTVVMYGLGAMGILLALSTWLSM

SEQ ID NO: 16322 - protein, 339 aa, Zea mays subsp. mays
  misc_feature (1)..(339): Ceres Seq. ID no. 12351967
MANTLSLYRTVKRLGIPDERIILMLADDMACNPRNSYPAQVFNNENHQLNLYGDNVEVDYRGYEVTVENFLRVLTGRHESAVPRSKRLLSDEGSHILLYMTGHGGDEFLKFQDSEELQSHDLADAVKQMKEKHRFKELLIMVDTCQAATLFSQLQSPGVLAIGSSMKGENSYSHHLDSDVGVSVVDRFTYYTLAFFEKLNMYSNASLNSLFTSYNPSMLLSTAYYRMDLYERPLNEVPVTNFFGSVMKTLHTDSAYTGFLAAHDNETPMSTGDNLDDHFMLKGRAIARRSTIEKEAQLTPHGWTEVLAEQLEGKNTDTVVMYGLGAMGILLALSTWLSM

SEQ ID NO: 16323 - DNA, 1800 bp, Zea mays subsp. mays
  misc_feature (1)..(1800): Ceres Seq. ID no. 12351993
atctagacggcgccacacgactgacggcttcatccgattggtgtggcctatttatctcccagtcccccactcgagctctccaccagctttccccttctctccggtccgggaatcggaagctcagggcagaagaatcaacctgaacaagaagagactggacaaggaagctttgactgctgcgaaattggcgaagaaggagagccaccttcgaaggtctgtgggtgctgaccagtatctcagtgcctcaactgatgacatagtccctttggacaactacctggacacccagtactttggacagatcagcatcggcacgccaccacagaacttcacagtgatattcgacactggaagctccaacttgtgggttccctcatccaagtgctacttttcgatagcgtgctacttacaccacagatacaagtcaaccaagtcgaagacttacacaaagaatggagaatcttgtacgataacatatggttctgggcaaatcgctggcttcttcagtgaggacaatgtgttggttggtaaccttgttgtgcaaaatcagaaatttattgagacaactcgagaaaccagccctactttcatcattgggaagtttgatggaattcttggtctcggatttcctgaaatttctgtaggaggagcccctccaatttggcagagcatgaaacagcagaaactggtcgcaaaggatgtcttctctttctggcttaatcgtgaccctgatgcatctgctggaggcgagcttgtctttggtggtgttgacccaaaacactacaaaggggaccatacatatgttcctgttacacgcaaaggctactggcagtttgacatgggagatcttattattggtggccactcaactggtttctgtgctggtggctgtgctgctattgtggactcagggacttcattgcttgctggtccaactaccatagtggctcaagtcaatcatgcaattggggctgagggaatcatcagtacagaatgcaaagaagtggtgagcgagtatggagagatgatccttgagttgctcatatcgcagacaagcccacagaaagtgtgcactcagattggtctctgtgtatttgatggtgcccattctgtcagcaatccaattgaatctgttgttgagaaacagaagcgtggttctgatcttttctgtactgcttgtgagatggctgttgtctggatacagaatcagctccgtgaaaacaagacaaaagaactcattttgaattatgctaatcagctctgtgagcgtctccctagccccaatggcgagtcaactgttgattgccatcagatctcaaagatgccaaatcttgcattcaccatagcaaacaagactttcaccttaacaccagagcagtacatagtgaagctggagcaagcaggacaaactatctgcatcagtgggtttatggcatttgacgtaccgcctcctcgtggtcctctctggatacttggtgatgtttttatgggtgcctaccacactgtttttgacttcggcgagaacaggattgggtttgccaaatctgcatgaggactggagttctgcgctttagtagcatgtccagtttgttatcccagtattgtacatatatatgttgccaactggtgtaatccgcagtgtttaatagtatatattcatgcagaaatctagaagattgtggcatgatatgtgtttgcaaatggagctatgctatgtatggagctccaggacctagagttttatgtaaagggagacgatgaggattagggcttttaacctattctcatcacgttattgtc

SEQ ID NO: 16324 - protein, 516 aa, Zea mays subsp. mays
  misc_feature (1)..(516): Ceres Seq. ID no. 12351994
SRRRHTTDGFIRLVWPIYLPVPHSSSPPAFPFSPVRESEAQGRRINLNKKRLDKEALTAAKLAKKESHLRRSVGADQYLSASTDDIVPLDNYLDTQYFGQISIGTPPQNFTVIFDTGSSNLWVPSSKCYFSIACYLHHRYKSTKSKTYTKNGESCTITYGSGQIAGFFSEDNVLVGNLVVQNQKFIETTRETSPTFIIGKFDGILGLGFPEISVGGAPPIWQSMKQQKLVAKDVFSFWLNRDPDASAGGELVFGGVDPKHYKGDHTYVPVTRKGYWQFDMGDLIIGGHSTGFCAGGCAAIVDSGTSLLAGPTTIVAQVNHAIGAEGIISTECKEVVSEYGEMILELLISQTSPQKVCTQIGLCVFDGAHSVSNPIESVVEKQKRGSDLFCTACEMAVVWIQNQLRENKTKELILNYANQLCERLPSPNGESTVDCHQISKMPNLAFTIANKTFTLTPEQYIVKLEQAGQTICISGFMAFDVPPPRGPLWILGDVFMGAYHTVFDFGENRIGFAKSA

SEQ ID NO: 16325 - protein, 293 aa, Zea mays subsp. mays
  misc_feature (1)..(293): Ceres Seq. ID no. 12351995
MKQQKLVAKDVFSFWLNRDPDASAGGELVFGGVDPKHYKGDHTYVPVTRKGYWQFDMGDLIIGGHSTGFCAGGCAAIVDSGTSLLAGPTTIVAQVNHAIGAEGIISTECKEVVSEYGEMILELLISQTSPQKVCTQIGLCVFDGAHSVSNPIESVVEKQKRGSDLFCTACEMAVVWIQNQLRENKTKELILNYANQLCERLPSPNGESTVDCHQISKMPNLAFTIANKTFTLTPEQYIVKLEQAGQTICISGFMAFDVPPPRGPLWILGDVFMGAYHTVFDFGENRIGFAKSA

SEQ ID NO: 16326 - DNA, 1338 bp, Zea mays subsp. mays
  misc_feature (1)..(1338): Ceres Seq. ID no. 12352000
atcattcattccctcacccccttcccttagaagctgcaggtgcagtgcatgcaaggagacaggccacgatactgtctgagatggaaggggccatgacgacgagaagcaagcatcgtcgtcatgaggaggaccaggagatgacgatggtggagctgaggagaggcccctggacgctcgaggaagacaacctcctcatgaactacattgcttgccacggcgagggccgctggaatctcctggcccgctgctccgggctgaagaggaccggcaagagctgccggctgaggtggctcaactacctcaagccggacatcaagcgcggcaacctggcgccggaggagcagctcctcatcctggagctccactccaagtgggggaaccggtggtccaggatagcncagcacctgccggggcggaccgacaacgagatcaagaactactggcggacgcgcctgctcgagaagacgatggcggccgccgcggcatccacgtccggcgaagtgctgctgccgccgctaccgccgccgccgcaactgcacccctcgcgcgtcgccggcttattggcctcttcctcctcgtcgccagtccagcgggacaccagcgacagcgactacctgccgcagcggtaccaccaccaccccgtcgacccgagcccgagcgcgtcgtcgacggtttcctcgtcggccgcgctcgcgccggtgccctgcttctccgaactgagctgggtcgaccagtacgggtacggcccttattacagttacggcgccaacctcgacgacggcgccggcgtgttcgacgactcggcagcgctggaggaaggcctcggcctggacgcgctggacctgggtccggccgacgacagcgacgtcgcccactcggacgcgacgctgctggactacctcaactccgcgtgcgccggcggcggcaccatgatgatggctgtgacgggcggcggcggcggcgtccaaagcagcggctgcggcgccacgggaggtgccgacgccgactaccggccgtcgccgtgcacgtggcggacggacgagctcggcgatcctcgtcagcatcaatggggaggaggaatctagaagcaatcaaagagagcttgcttctcggcacgtctctctctctctctctccctctccctctccctcccaaagcgacgatcgatcgatcgagatgtcacactagttaattagtggatcggagctagatagcaggtagcaagatgcgtgagtggcgataaaaaaacattaggggccggggccgggcatattctgctgttaattcgaccgatcattcgttcgatcgtgtagtagagagatgtgtggtttgatgtcg

SEQ ID NO: 16327 - protein, 360 aa, Zea mays subsp. mays
  misc_feature (1)..(360): Ceres Seq. ID no. 12352001
  misc_feature (132)..(132): Xaa is any aa, unknown or other
HSFPHPLPLEAAGAVHARRQATILSEMEGAMTTRSKHRRHEEDQEMTMVELRRGPWTLEEDNLLMNYIACHGEGRWNLLARCSGLKRTGKSCRLRWLNYLKPDIKRGNLAPEEQLLILELHSKWGNRWSRIXQHLPGRTDNEIKNYWRTRLLEKTMAAAAASTSGEVLLPPLPPPPQLHPSRVAGLLASSSSSPVQRDTSDSDYLPQRYHHHPVDPSPSASSTVSSSAALAPVPCFSELSWVDQYGYGPYYSYGANLDDGAGVFDDSAALEEGLGLDALDLGPADDSDVAHSDATLLDYLNSACAGGGTMMMAVTGGGGGVQSSGCGATGGADADYRPSPCTWRTDELGDPRQHQWGGGI

SEQ ID NO: 16328 - protein, 334 aa, Zea mays subsp. mays
  misc_feature (1)..(334): Ceres Seq. ID no. 12352002
  misc_feature (106)..(106): Xaa is any aa, unknown or other
MEGAMTTRSKHRRHEEDQEMTMVELRRGPWTLEEDNLLMNYIACHGEGRWNLLARCSGLKRTGKSCRLRWLNYLKPDIKRGNLAPEEQLLILELHSKWGNRWSRIXQHLPGRTDNEIKNYWRTRLLEKTMAAAAASTSGEVLLPPLPPPPQLHPSRVAGLLASSSSSPVQRDTSDSDYLPQRYHHHPVDPSPSASSTVSSSAALAPVPCFSELSWVDQYGYGPYYSYGANLDDGAGVFDDSAALEEGLGLDALDLGPADDSDVAHSDATLLDYLNSACAGGGTMMMAVTGGGGGVQSSGCGATGGADADYRPSPCTWRTDELGDPRQHQWGGGI

SEQ ID NO: 16329 - protein, 330 aa, Zea mays subsp. mays
  misc_feature (1)..(330): Ceres Seq. ID no. 12352003
  misc_feature (102)..(102): Xaa is any aa, unknown or other
MTTRSKHRRHEEDQEMTMVELRRGPWTLEEDNLLMNYIACHGEGRWNLLARCSGLKRTGKSCRLRWLNYLKPDIKRGNLAPEEQLLILELHSKWGNRWSRIXQHLPGRTDNEIKNYWRTRLLEKTMAAAAASTSGEVLLPPLPPPPQLHPSRVAGLLASSSSSPVQRDTSDSDYLPQRYHHHPVDPSPSASSTVSSSAALAPVPCFSELSWVDQYGYGPYYSYGANLDDGAGVFDDSAALEEGLGLDALDLGPADDSDVAHSDATLLDYLNSACAGGGTMMMAVTGGGGGVQSSGCGATGGADADYRPSPCTWRTDELGDPRQHQWGGGI

SEQ ID NO: 16330 - DNA, 1608 bp, Zea mays subsp. mays
  misc_feature (1)..(1608): Ceres Seq. ID no. 12352004
aacaaaatctctccttagtttccccaacctgcttctgtttaccgaattcctaaatccaatccccttgccaagctctctctttgctgcgggaggtcgaggccggagaggtattccgggatgggatcaagaaaggggtggttccccgtggccctcctgctgttggccgcctctgccctctggccgccggtcgccgccgccgccgccggaggcggcgaggccgaacacgccgttcagcagcatagcgagcgcatctcagggagtgctggtgatgtgttagaagataatcctgtgggtaggttgaaggtcttcatttatgacttaccaaggaagtacaacaagaagatggtcaccaaggattcacggtgcctcagtcacatgtttgccgctgaaattttcatgcatcgtttcttgctctcgagtgctgtccggacactaaatcccaaggaagctgattggttctatacaccagtttacactacttgcgatttaactaacgctggactgcccttgccgtttaagtcaccacgggtgatgaggagcgcgatccaatatatttcaaacaaatggcccttctggaataggactgatggagcagatcatttcttcgttgttccgcatgattttgcagcatgcttccactatcaggaagaaaaagctatcgagcgtggaattcttccattgctgcgacgtgctacattggtccaaacctttggacaggagaatcatgtttgcctgaaggagggttccatcattattccaccctatgctcctccgcagaaaatgcaagctcacttgatttccccagacactccacgctcaatcttcgtttacttccggggacttttttatgacacggggaatgaccccgagggcggatactatgcaagaggtgcgcgagcttcgctatgggagaacttcaagagcaaccctctgtttgacatttccacagaccaccctgccacttactatgaagacatgcagcgcgctgtcttctgcctgtgcccattgggctgggcaccgtggagccctaggttggttgaggctgtggtctttggctgcattccagtcatcatagctgatgacatcgtgcttccatttgcagacgcgatcccatgggaggaaatcggcgtctttgtcgaggagaaggatgtcccaaagcttgacacgatcctcacgtcgatgcctatagatgacatcttaaggaagcaaaggttactcgcaaatccatcgatgaagcaggcaatgttgttcccacagccagcgcaaccaagggacgcgttccaccaaatcttgaacggccttgctcggaagctcccgcacccagagggtacgttcttacaacctggcgatcagcgcctcaactggaccgctggtcctgtgggagatctgaagccgtggtagagaagaatagctatcttcttctttgataatccaagctttgccacgagcaccccttaggactaatgcacgcttcatgagatgttatgtaatcaatatgctgtgcgtgctttaggtgcaaaatacaccttggccgtgcttagtccttatgaacgccatgtaacttattgatttcccatggaaatgaaatggtatatttatcttgctgtc

SEQ ID NO: 16331 - protein, 427 aa, Zea mays subsp. mays
  misc_feature (1)..(427): Ceres Seq. ID no. 12352005
MGSRKGWFPVALLLLAASALWPPVAAAAAGGGEAEHAVQQHSERISGSAGDVLEDNPVGRLKVFIYDLPRKYNKKMVTKDSRCLSHMFAAEIFMHRFLLSSAVRTLNPKEADWFYTPVYTTCDLTNAGLPLPFKSPRVMRSAIQYISNKWPFWNRTDGADHFFVVPHDFAACFHYQEEKAIERGILPLLRRATLVQTFGQENHVCLKEGSIIIPPYAPPQKMQAHLISPDTPRSIFVYFRGLFYDTGNDPEGGYYARGARASLWENFKSNPLFDISTDHPATYYEDMQRAVFCLCPLGWAPWSPRLVEAVVFGCIPVIIADDIVLPFADAIPWEEIGVFVEEKDVPKLDTILTSMPIDDILRKQRLLANPSMKQAMLFPQPAQPRDAFHQILNGLARKLPHPEGTFLQPGDQRLNWTAGPVGDLKPW

SEQ ID NO: 16332 - protein, 352 aa, Zea mays subsp. mays
  misc_feature (1)..(352): Ceres Seq. ID no. 12352006
MVTKDSRCLSHMFAAEIFMHRFLLSSAVRTLNPKEADWFYTPVYTTCDLTNAGLPLPFKSPRVMRSAIQYISNKWPFWNRTDGADHFFVVPHDFAACFHYQEEKAIERGILPLLRRATLVQTFGQENHVCLKEGSIIIPPYAPPQKMQAHLISPDTPRSIFVYFRGLFYDTGNDPEGGYYARGARASLWENFKSNPLFDISTDHPATYYEDMQRAVFCLCPLGWAPWSPRLVEAVVFGCIPVIIADDIVLPFADAIPWEEIGVFVEEKDVPKLDTILTSMPIDDILRKQRLLANPSMKQAMLFPQPAQPRDAFHQILNGLARKLPHPEGTFLQPGDQRLNWTAGPVGDLKPW

SEQ ID NO: 16333 - protein, 341 aa, Zea mays subsp. mays
  misc_feature (1)..(341): Ceres Seq. ID no. 12352007
MFAAEIFMHRFLLSSAVRTLNPKEADWFYTPVYTTCDLTNAGLPLPFKSPRVMRSAIQYISNKWPFWNRTDGADHFFVVPHDFAACFHYQEEKAIERGILPLLRRATLVQTFGQENHVCLKEGSIIIPPYAPPQKMQAHLISPDTPRSIFVYFRGLFYDTGNDPEGGYYARGARASLWENFKSNPLFDISTDHPATYYEDMQRAVFCLCPLGWAPWSPRLVEAVVFGCIPVIIADDIVLPFADAIPWEEIGVFVEEKDVPKLDTILTSMPIDDILRKQRLLANPSMKQAMLFPQPAQPRDAFHQILNGLARKLPHPEGTFLQPGDQRLNWTAGPVGDLKPW

SEQ ID NO: 16334 - DNA, 1226 bp, Zea mays subsp. mays
  misc_feature (1)..(1226): Ceres Seq. ID no. 12352008
aatttccctcgccatcctacgcctcgcgccgccgccacagcaacccttgcagccccaatcccccacggcgaccatggccggcgcgcaggagtccctctccctggtgggcacgatgcgcggccataacggcgaggtgacggcgatcgcgaccccgatcgacaactcgcctttcatcgtctcctcctcccgggacaagtccgtgctggtgtgggacctgaccaacccggtccactccaccccggaatccggcgtcaccgccgactacggcgtccccttccgccgcctcaccggccactcccacttcgtccaggacgtcgtccttagttccgacggccagttcgcactctctggctcctgggacggcgagctccgcctttgggacctctccaccggcctcaccacccgccgcttcgtcggccacgagaaggacgtcatctccgtcgccttctccgtcgacaaccgccagatcgtctccgcgtcccgcgacaagaccatcaagctctggaacactctcggcgagtgcaagtacaccatcggcggcgacctcggcggcggcgagggccacaacgggtgggtctcctgcgttaggttctccccaaacaccttccagcccaccattgtctccggatcctgggaccgcaccgtcaaggtctggaaccttaccaactgcaagctgcgctgcactctggatgggcacggtggctatgttaacgccgtcgctgtgagccccgacgggtcgctgtgcgcctccggcgggaaggacggtgttactctgctgtgggatttggctgaggggaagaggctgtactcgctggacgcgggctccatcatccactctctctgcttctcacccaaccgctactggctctgcgctgcgacgcaggactctgtcaagatctgggacctcgagtcgaagcacgttgtgcaggacctcaagcccgacatccaggtctccaagaaccagatcctgtactgtacaagcttgagctggagtgcggacggaagcaccctctacactggctacaccgatgggtctatcagggtttggaagatctccgggtacggctacgcaggctagatgttgaaatcagcttggtctaggcagtctttcgggggaaaacattgtaatgtttgtcaagtttttgatgtcgtgagctatattgtctcttcgctactttccggtcgcccaaccattttaatcttactatggaagaatcttgttttgc

SEQ ID NO: 16335 - protein, 358 aa, Zea mays subsp. mays
  misc_feature (1)..(358): Ceres Seq. ID no. 12352009
ISLAILRLAPPPQQPLQPQSPTATMAGAQESLSLVGTMRGHNGEVTAIATPIDNSPFIVSSSRDKSVLVWDLTNPVHSTPESGVTADYGVPFRRLTGHSHFVQDVVLSSDGQFALSGSWDGELRLWDLSTGLTTRRFVGHEKDVISVAFSVDNRQIVSASRDKTIKLWNTLGECKYTIGGDLGGGEGHNGWVSCVRFSPNTFQPTIVSGSWDRTVKVWNLTNCKLRCTLDGHGGYVNAVAVSPDGSLCASGGKDGVTLLWDLAEGKRLYSLDAGSIIHSLCFSPNRYWLCAATQDSVKIWDLESKHVVQDLKPDIQVSKNQILYCTSLSWSADGSTLYTGYTDGSIRVWKISGYGYAG

SEQ ID NO: 16336 - protein, 334 aa, Zea mays subsp. mays
  misc_feature (1)..(334): Ceres Seq. ID no. 12352010
MAGAQESLSLVGTMRGHNGEVTAIATPIDNSPFIVSSSRDKSVLVWDLTNPVHSTPESGVTADYGVPFRRLTGHSHFVQDVVLSSDGQFALSGSWDGELRLWDLSTGLTTRRFVGHEKDVISVAFSVDNRQIVSASRDKTIKLWNTLGECKYTIGGDLGGGEGHNGWVSCVRFSPNTFQPTIVSGSWDRTVKVWNLTNCKLRCTLDGHGGYVNAVAVSPDGSLCASGGKDGVTLLWDLAEGKRLYSLDAGSIIHSLCFSPNRYWLCAATQDSVKIWDLESKHVVQDLKPDIQVSKNQILYCTSLSWSADGSTLYTGYTDGSIRVWKISGYGYAG

SEQ ID NO: 16337 - protein, 321 aa, Zea mays subsp. mays
  misc_feature (1)..(321): Ceres Seq. ID no. 12352011
MRGHNGEVTAIATPIDNSPFIVSSSRDKSVLVWDLTNPVHSTPESGVTADYGVPFRRLTGHSHFVQDVVLSSDGQFALSGSWDGELRLWDLSTGLTTRRFVGHEKDVISVAFSVDNRQIVSASRDKTIKLWNTLGECKYTIGGDLGGGEGHNGWVSCVRFSPNTFQPTIVSGSWDRTVKVWNLTNCKLRCTLDGHGGYVNAVAVSPDGSLCASGGKDGVTLLWDLAEGKRLYSLDAGSIIHSLCFSPNRYWLCAATQDSVKIWDLESKHVVQDLKPDIQVSKNQILYCTSLSWSADGSTLYTGYTDGSIRVWKISGYGYAG

SEQ ID NO: 16338 - DNA, 1338 bp, Zea mays subsp. mays
  misc_feature (1)..(1338): Ceres Seq. ID no. 12352016
tcaagcttaataaaaggttgctccgctcagctgccctctgcgcctcataaccgaaaaaacccaaagtcacgtttcctcctcaacaaaaaccctcgcaaaaatctgggatctatctagaagcaccactcaacaaaccctaggttgcctgatcggctgatcgctccatggcgatcatctccgacttcaaggacgacgaggcaccggagcagcagctggcggcccggcccacggcgtcgaggaggccctcgtggcggcgttggagaggagcggcggcgcgctccccttcctacaggcggctatcgatgtcgcccaccgcaggtccggcctgttccgcgacccttcggcggtgagcaaggtcaccgcgatggcggcggcagccagggcgcagatcgaagccgaggagagggtgaccagagaggcggaggccaagaggaaggcggaggaggacgagaggaaggcggaagccgaggcgcagagggctgccaaggaggcggtaatggcgacggcagaggagaagccagagagcacggtggagaaggacatcatggaggtggataagaaggaggaagccaacgtgagacaaccaaatgctggcaatggtcttgacttggagaagtactcgtggactcaacagttgccagaggttaacatcaccattcctgttcctcaaggaacaaaatcaagatttgtggtatttgatttaaagaagaaccatctgaaggttggtctgaagggccagccacctatcattgatggtgagctctataagccagttaaggttgatgactgcttctggagcatagaggatgggagaaccctgtccatattgcttacaaagcatgaccaaatggaatggtggaagtctgttataaagggtgatcctgaagttgatacccaaaaggtggaacctgagaacagtaaactctctgatttggatcctgagactagacaaactgtggaaaagatgatgtttgaccagcgctagaagcagatgggccttccaacaagtgatgaaatgcaaaagcaagaaattctcaagaagttcatgtctgagcacccggagatggacttctctagagcgaaattagattgaggatgtgtttgaccatttgtctgaatgcgttattagtatgaaacattttttgatcagtttgcatgtaatgcgtcagaaatatctggagatagacttctctagagcgaaaatagcttgaggatgtgttcggccagttatttctaccagtgtgcattaggttgtctgagtgcgttattagtatgaaacaaaaattttgatcagttcacgtgtaatcgtcagaaatatccggagatggacttctctag

SEQ ID NO: 16339 - protein, 206 aa, Zea mays subsp. mays
  misc_feature (1)..(206): Ceres Seq. ID no. 12352017
MAAAARAQIEAEERVTREAEAKRKAEEDERKAEAEAQRAAKEAVMATAEEKPESTVEKDIMEVDKKEEANVRQPNAGNGLDLEKYSWTQQLPEVNITIPVPQGTKSRFVVFDLKKNHLKVGLKGQPPIIDGELYKPVKVDDCFWSIEDGRTLSILLTKHDQMEWWKSVIKGDPEVDTQKVEPENSKLSDLDPETRQTVEKMMFDQR

SEQ ID NO: 16340 - protein, 162 aa, Zea mays subsp. mays
  misc_feature (1)..(162): Ceres Seq. ID no. 12352018
MATAEEKPESTVEKDIMEVDKKEEANVRQPNAGNGLDLEKYSWTQQLPEVNITIPVPQGTKSRFVVFDLKKNHLKVGLKGQPPIIDGELYKPVKVDDCFWSIEDGRTLSILLTKHDQMEWWKSVIKGDPEVDTQKVEPENSKLSDLDPETRQTVEKMMFDQR

SEQ ID NO: 16341 - protein, 146 aa, Zea mays subsp. mays
  misc_feature (1)..(146): Ceres Seq. ID no. 12352019
MEVDKKEEANVRQPNAGNGLDLEKYSWTQQLPEVNITIPVPQGTKSRFVVFDLKKNHLKVGLKGQPPIIDGELYKPVKVDDCFWSIEDGRTLSILLTKHDQMEWWKSVIKGDPEVDTQKVEPENSKLSDLDPETRQTVEKMMFDQR

SEQ ID NO: 16342 - DNA, 1816 bp, Zea mays subsp. mays
  misc_feature (1)..(1816): Ceres Seq. ID no. 12352030
aaaatcaccaattctagcaaggcagctcagcagcttttgtagcgagcttcttggagccttgaaatgagtagtagtggtagcctagccaccacgagtagcaagtaggcactataggcactaggaagtagctaaagcagtcataaccatgggttcgctgccgccggtgtacgggcagagacgccccccacacgttgtgatgatcccgtacccggcgcagggccacatcacgccgatgctgcagtttgccaagctcctccatactcgcggcttccacgtcaccttcgtcaacaacgagttcaatcatcgacgccacctgcgtgcgcgagggcccaacgcgctcgacggcacggatgggtttcgcttcgccgccatcgacgacggtctcccgctctttgaagcggacgccacccaggacatccccgcgctctgccactccaccttgaccacctgcctgccccggtttaaggatctcatcgccaggattaacgccgaggctgaggccgagggacaacccaccgtgacatgcgtcgtcggcgacagcaccatgaccttcgcgctccgcgccgcgcgagagctcggcctccgctgcgctacactctggaccgccagcgcctgcggcttcatcggctacttccactaccgccacctcgtcgagcgtggtatggtccccctcaagaacgaggagcagctcacggacgggtacctagacaccatcgtcgactggatcccgggcgcgcccaaggacctgcggctccgggacttcccgagcttcgtgcgcaccacggatccgaacgacgtcatgctcaacttcttcatccacgagacggagggcatgtcgcangcgtcggcggtggtcatcaacaccttcgacgagctcgacgcgacgctgctcgctgccatggcgaagctcctgccgcccatctacaccgtgggcccgctccagctgacggtgcggaacaacgtgcaggcgaacagtcctgtcgctgctattgggtccaacctgtggaaggagcaggaggcgccgctccggtggctcaacggccgtgcgccgcgctccgttgtgtatgtcaacttcgggagcatcacggtgatgtccaacgagcagctggtcgagttcgcgtgggggctggccaacaccggctactacttcctatggaacgtacgcccggacctcgtcaagagtggcgactccgccgggctgccgccagagttctcagctgcgacagagggacgaagcatgctgtctacgtggtgcccgcaggcagctgtgctggagcatgatgccgtgggggtgttcctgacgcactccgggtggaactccacgctggagagtattgcggcggcgttcccatgctgtgctggcccttcttcgccgagcagcagaccaactgccgatacaagtgcaccgagtggggcatcggaaaagagatcggtgacgatgtacagcggggcgaggtagagtcgctcatacgggaggccatggagggggagaaagggcaaggagatgctccggcgcgtgactgaactcagggacagcgccgtggccgctgcagggcctgacggacggtctatgcgcaacgtagacaggctcatcgaagaggtgctcctagcctagattgagcactggtgagcatcctagcagtcatgtgtcttcgcgtctggcactccaatcgattcaaatcctttgtgttttgatgtcaagcgtttaccttcggtacccataaaagtattttctcgtacaaggtggtgattacacgcaaagcacattgttataagttcagtttgtaagatctatgggtaaaaccaagcgttttgt

SEQ ID NO: 16343 - protein, 437 aa, Zea mays subsp. mays
  misc_feature (1)..(437): Ceres Seq. ID no. 12352031
  misc_feature (232)..(232): Xaa is any aa, unknown or other
MGSLPPVYGQRRPPHVVMIPYPAQGHITPMLQFAKLLHTRGFHVTFVNNEFNHRRHLRARGPNALDGTDGFRFAAIDDGLPLFEADATQDIPALCHSTLTTCLPRFKDLIARINAEAEAEGQPTVTCVVGDSTMTFALRAARELGLRCATLWTASACGFIGYFHYRHLVERGMVPLKNEEQLTDGYLDTIVDWIPGAPKDLRLRDFPSFVRTTDPNDVMLNFFIHETEGMSXASAVVINTFDELDATLLAAMAKLLPPIYTVGPLQLTVRNNVQANSPVAAIGSNLWKEQEAPLRWLNGRAPRSVVYVNFGSITVMSNEQLVEFAWGLANTGYYFLWNVRPDLVKSGDSAGLPPEFSAATEGRSMLSTWCPQAAVLEHDAVGVFLTHSGWNSTLESIAAAFPCCAGPSSPSSRPTADTSAPSGASEKRSVTMYSGAR

SEQ ID NO: 16344 - protein, 420 aa, Zea mays subsp. mays
  misc_feature (1)..(420): Ceres Seq. ID no. 12352032
  misc_feature (215)..(215): Xaa is any aa, unknown or other
MIPYPAQGHITPMLQFAKLLHTRGFHVTFVNNEFNHRRHLRARGPNALDGTDGFRFAAIDDGLPLFEADATQDIPALCHSTLTTCLPRFKDLIARINAEAEAEGQPTVTCVVGDSTMTFALRAARELGLRCATLWTASACGFIGYFHYRHLVERGMVPLKNEEQLTDGYLDTIVDWIPGAPKDLRLRDFPSFVRTTDPNDVMLNFFIHETEGMSXASAVVINTFDELDATLLAAMAKLLPPIYTVGPLQLTVRNNVQANSPVAAIGSNLWKEQEAPLRWLNGRAPRSVVYVNFGSITVMSNEQLVEFAWGLANTGYYFLWNVRPDLVKSGDSAGLPPEFSAATEGRSMLSTWCPQAAVLEHDAVGVFLTHSGWNSTLESIAAAFPCCAGPSSPSSRPTADTSAPSGASEKRSVTMYSGAR

SEQ ID NO: 16345 - protein, 408 aa, Zea mays subsp. mays
  misc_feature (1)..(408): Ceres Seq. ID no. 12352033
  misc_feature (203)..(203): Xaa is any aa, unknown or other
MLQFAKLLHTRGFHVTFVNNEFNHRRHLRARGPNALDGTDGFRFAAIDDGLPLFEADATQDIPALCHSTLTTCLPRFKDLIARINAEAEAEGQPTVTCVVGDSTMTFALRAARELGLRCATLWTASACGFIGYFHYRHLVERGMVPLKNEEQLTDGYLDTIVDWIPGAPKDLRLRDFPSFVRTTDPNDVMLNFFIHETEGMSXASAVVINTFDELDATLLAAMAKLLPPIYTVGPLQLTVRNNVQANSPVAAIGSNLWKEQEAPLRWLNGRAPRSVVYVNFGSITVMSNEQLVEFAWGLANTGYYFLWNVRPDLVKSGDSAGLPPEFSAATEGRSMLSTWCPQAAVLEHDAVGVFLTHSGWNSTLESIAAAFPCCAGPSSPSSRPTADTSAPSGASEKRSVTMYSGAR

SEQ ID NO: 16346 - DNA, 1132 bp, Zea mays subsp. mays
  misc_feature (1)..(1132): Ceres Seq. ID no. 12352055
tatatatgcatgcgcatcaagatcaagaataatccagcgccacacgggatcgacctagtacatagatacaacaagtcaacaacgtactaactagcccaccatggcgtcacgcctcgccgccgcccttctcctctccgtcgtcgccctgctgacgtccgtggcgccgctggcgtgcggccaggcagcgtcggcgccgtccccagcccccgcgccgcccaagaccatcacggcgatcctgagcaaggccgggcagttcaccaagttcctccagctgctgcagtcgacgcgggaggcggagcagatcaccaaccagctcaagggcaagccgtccaacggcgggctcacggtgttcgcgccgcccgacagcgccttctccgcgctccccgccggcacgctcaactccctctccgaccagcagaagacgtcgctggtgcagttccacgtcgtgtccgcggcgctccccgccgcgcagctcgagaccgtcagcaacccgctgcggacgcaggctggcgacaccggcaggggcaagtacccgctcaacctcaccgcggacggctccagcgtcaacgtctccacgggggtcgtcaacgccacgctcgacgccacgccgctttacgccggggacaggctcgtcgtctaccaggtcagcaaggtgctgctgccgtgggcgctctacggcccgccggtccccgcgccggccccttccccggcggagagcaagaagaagaagaaggccacgccggatgctgtggcggatgcgccggcggctgagactgcggcggggacgacgacggcgtcggcggccgcgcgcgcgggagggaccccagctggcgtccgagctgcttcgtcctgcgtcgtggcgctcgccgccgtggcagctttgtggtgggctatctgaccacgtacagtacagtaaggatgcatgcgtgttttgccatcgtggagcttctttccggacagatttgtttctaattcatcaatcgaccagttcattattcttttcttcgttttataaaaaaagatgtattgtggatgtatttggtggcgttttgtaatgtttgtattgtatactttgaagaactgtacatcatattttgtggacgtatattgttatccaattgtattaatgtgg

SEQ ID NO: 16347 - protein, 265 aa, Zea mays subsp. mays
  misc_feature (1)..(265): Ceres Seq. ID no. 12352056
MASRLAAALLLSVVALLTSVAPLACGQAASAPSPAPAPPKTITAILSKAGQFTKFLQLLQSTREAEQITNQLKGKPSNGGLTVFAPPDSAFSALPAGTLNSLSDQQKTSLVQFHVVSAALPAAQLETVSNPLRTQAGDTGRGKYPLNLTADGSSVNVSTGVVNATLDATPLYAGDRLVVYQVSKVLLPWALYGPPVPAPAPSPAESKKKKKATPDAVADAPAAETAAGTTTASAAARAGGTPAGVRAASSCVVALAAVAALWWAI

SEQ ID NO: 16348 - DNA, 1168 bp, Zea mays subsp. mays
  misc_feature (1)..(1168): Ceres Seq. ID no. 12352064
atgcgcatatatctttctctcttttttttctgtccaagggaaagaaggaaggcttgtgtgtatctgccagttttcggtctgcgattctgtagcctaacctatggtcatgcgactatgcgagttagattaatcagcgatctgcagtgctacttggtttgcattatcatgatcccctaggcgttttcttcttatcttttgactgaaatgctagcagcacaatagtttattagatgcttgagcagctactctgcactttcatttcctctgtatgtatttcctagtgtggaatttggtacttactttgcaattgtagcagacttgggattgagggtatccatggagatgcttgtggatttgagcaatctaatttggggaaaaggggtagagatgaaccatgttcatctggcccaacatccaaagcttgtcgtgaaaaaatgaggagagacaagctgaatgacaggttcctggaattaagttcagttatgagtcatggtaaggaagcaaagttagataaagcaaatatattgagtgatgcagcccgtatggtggcacaacttagaggtgaggcagaaaagcttaaggaatcaaatgagaagctgcgggagaatatcaaggatctgaaggaggagaagaacgagctccgtgaagagaaagtgagactaaaggtagaaaaggataggctggagcagcaagtcaaagctatgagtgtagctcctacaggatatgtaccccatctccctcatccagcttcataccatcctgctgcgttcactccatttgcgccgcctccagccaacaaaagtgctccaatcccagcaccgttccctgggatggcgatgtggcagtggttgcctccgaccatcgtggacacaactcaagatccaaagctctggcccccaaatgcttaggggcagctaccttggaatgttgtctcattgtgccttttcatgcatctggtgggcaaatcagtgtcagttaggtccctggagactggagaggaatcaagttcgcaattcgcgccatgtttatgctgtaacagctggtttccagcactagttatgaacttactatgttctactgaagggtggtgcctgtaattaatatatggatctcaaccctctagttggcatgtatatcatttgttctattcgagagctgcattttaagg

SEQ ID NO: 16349 - protein, 157 aa, Zea mays subsp. mays
  misc_feature (1)..(157): Ceres Seq. ID no. 12352065
MRRDKLNDRFLELSSVMSHGKEAKLDKANILSDAARMVAQLRGEAEKLKESNEKLRENIKDLKEEKNELREEKVRLKVEKDRLEQQVKAMSVAPTGYVPHLPHPASYHPAAFTPFAPPPANKSAPIPAPFPGMAMWQWLPPTIVDTTQDPKLWPPNA

SEQ ID NO: 16350 - protein, 141 aa, Zea mays subsp. mays
  misc_feature (1)..(141): Ceres Seq. ID no. 12352066
MSHGKEAKLDKANILSDAARMVAQLRGEAEKLKESNEKLRENIKDLKEEKNELREEKVRLKVEKDRLEQQVKAMSVAPTGYVPHLPHPASYHPAAFTPFAPPPANKSAPIPAPFPGMAMWQWLPPTIVDTTQDPKLWPPNA

SEQ ID NO: 16351 - protein, 121 aa, Zea mays subsp. mays
  misc_feature (1)..(121): Ceres Seq. ID no. 12352067
MVAQLRGEAEKLKESNEKLRENIKDLKEEKNELREEKVRLKVEKDRLEQQVKAMSVAPTGYVPHLPHPASYHPAAFTPFAPPPANKSAPIPAPFPGMAMWQWLPPTIVDTTQDPKLWPPNA

SEQ ID NO: 16352 - DNA, 1570 bp, Zea mays subsp. mays
  misc_feature (1)..(1570): Ceres Seq. ID no. 12352072
aatcgaaaacctgaacacctctctctcgccacctcacctgaacacctgctcgccccacccattccctccgcatggctggcctccgccctcgcgccgccgtagcttcgaattgcctccgaccggcaattcggcgaggcgcccgtcacgcatcgggggcagcgtttggatactacacctgctggcagctacagggaaatattttgaattggagatctatatccgcaactaaaaagctctggagtacagtagctagtgcaaagcctgatgattctaaatttgaaagtgtggatgcaccacttgagccccaaacatgtgaaggcagcttcttgtgtggtctgttgaagaacctgccacacatttttctagctgcagcagagaagcagttgcaagaactgtcttaccaaagagaagagagcttaaaacgctgggagcatagtattggttctaaagaggattgccttcacaggaggattgctgaactcaaggaacacgagtgtcagagagctattgaggacatcatgtacatgttgattgtttataagttttttaagattgaagtaccaatggttcccaatctatcgaaactcatcagcaacagaaggttacagttatggccaccaagggagacagatcttgaatccattcatggacctgaggtgctagagctaattagggaacacttgaccagcattatcagatgggtgcacagaaatggtcccaagatcaatcgttcaacacttcgcattaaaagactgcaatttgttcggatatattctgcttcaataatgtacggatacttcctgaaatctgtcagcatcaggcatcgattggagctgacccttactcgctcagaaggagtgcctccgattcaatttctgaatgctcaactcacaaataaacaagagcaggaaggggccattggaggctctagtgaagcttcgtcttctttgagaccaagttctgtggtcaacccacacgacttgaggggctacataatgggattcgatccaaagaccttgcagctttgcgcgaagctgcgctcatctgaagcttctaatctcatcgagaggcacagctgggctctttttgggggcgacatggaactctcccaggagaatgatgaagcggttatacttgatccttcatccctgaaaagactactgcttgaagccattgcattcggttccttcctctgggacgtcgaggattatgtggacgagatcttcaagttatcggatagctgaagaaactgctacagaaagctcctacagcctttgtggttgtggatagatgaagccagctgaaaagaggagctgcagttcttttctctagatttgtatatatggctggctgttatgtacatgcatatacatcttcatctcaagtttgctttttggagggtacacaagtttttttttgtaagttatgtcatcttacactagtacacaatagcatcagcctatcaacgcagaggacgtgtgacataattttatggtcccaaaataactgggcattttgctaatctagaacgacattattttggaatgaaatgagttgtatcagcatttgt

SEQ ID NO: 16353 - protein, 390 aa, Zea mays subsp. mays
  misc_feature (1)..(390): Ceres Seq. ID no. 12352073
MAGLRPRAAVASNCLRPAIRRGARHASGAAFGYYTCWQLQGNILNWRSISATKKLWSTVASAKPDDSKFESVDAPLEPQTCEGSFLCGLLKNLPHIFLAAAEKQLQELSYQREESLKRWEHSIGSKEDCLHRRIAELKEHECQRAIEDIMYMLIVYKFFKIEVPMVPNLSKLISNRRLQLWPPRETDLESIHGPEVLELIREHLTSIIRWVHRNGPKINRSTLRIKRLQFVRIYSASIMYGYFLKSVSIRHRLELTLTRSEGVPPIQFLNAQLTNKQEQEGAIGGSSEASSSLRPSSVVNPHDLRGYIMGFDPKTLQLCAKLRSSEASNLIERHSWALFGGDMELSQENDEAVILDPSSLKRLLLEAIAFGSFLWDVEDYVDEIFKLSDS

SEQ ID NO: 16354 - protein, 241 aa, Zea mays subsp. mays
  misc_feature (1)..(241): Ceres Seq. ID no. 12352074
MYMLIVYKFFKIEVPMVPNLSKLISNRRLQLWPPRETDLESIHGPEVLELIREHLTSIIRWVHRNGPKINRSTLRIKRLQFVRIYSASIMYGYFLKSVSIRHRLELTLTRSEGVPPIQFLNAQLTNKQEQEGAIGGSSEASSSLRPSSVVNPHDLRGYIMGFDPKTLQLCAKLRSSEASNLIERHSWALFGGDMELSQENDEAVILDPSSLKRLLLEAIAFGSFLWDVEDYVDEIFKLSDS

SEQ ID NO: 16355 - protein, 239 aa, Zea mays subsp. mays
  misc_feature (1)..(239): Ceres Seq. ID no. 12352075
MLIVYKFFKIEVPMVPNLSKLISNRRLQLWPPRETDLESIHGPEVLELIREHLTSIIRWVHRNGPKINRSTLRIKRLQFVRIYSASIMYGYFLKSVSIRHRLELTLTRSEGVPPIQFLNAQLTNKQEQEGAIGGSSEASSSLRPSSVVNPHDLRGYIMGFDPKTLQLCAKLRSSEASNLIERHSWALFGGDMELSQENDEAVILDPSSLKRLLLEAIAFGSFLWDVEDYVDEIFKLSDS

SEQ ID NO: 16356 - DNA, 1341 bp, Zea mays subsp. mays
  misc_feature (1)..(1341): Ceres Seq. ID no. 12352079
actgcaactctgcgagtgccagaaaaaaaatactgccacccaccaccgcgccgccgcgccatggcttccccatccccttcctcgcccctccacccgcaccagcacccacctcctccgaatgttcaccaccaattccaatccctaccgccttcgatgccgccaccgccgccgtcaacggcgctgccaaaggcgctcgaccttgaggttaccgtcgtctgcgggaagcacctgaagaatgtcaactggcgccgtggcgacctccgtgcctacgtcgtggtgtaccttgacccctcccgccgcgccgctacccgccccgacgacggcggcgggtgcaaaccaacctggaacgagcgcctcgtcctcccgcttccgccccacctctccccgcacgacccctccatcctcctgtccctcgacgttttccactctaagccctccgattcgcccaagccgctcgtcggatccgcccgctctcctctccgcgacctcctcttccccgcaaaccctaaccctagccacgatcccgcagcctccgctctcgtcagcctgccactcctccgcccttccggccgcccacaggggaagatccggatccgcgtcgccatccgcgagcgctcgccgccgcctccggagccgcaataccctccgccttccagctccccgtactactttccaccgcctcctcccgcctactcggccccgcctcagtacggatctgaccagtactatcgccctagtggatactactctgcacctgcacctccaccacatccgtatgagtacaccggagggccctctgcaccggtggactacaacaggcaatatgagcagagagggaggactggggcccgctggtagtggcagtgggaacggaaggtatggagcaggcactgggcttgcggtgggtgctgtggctggagccctcgggggtctagcaattgatgaagcggtgaagtacaaggaggataagggtgcagaacgggtggaagagaaggtggtacctgctgggagggatgattacagcgagtatcgtggcgactattgaaccgaagtttgtgtgagtgtggaagaaagcgctgtgagttgattcttcttccatgcctatgtgggaataaatccagtgttagtctatggctttccccatgtatgtatatatatttgtgatgttgtgaattattctgatacctataaactactccttcggttcttgtttatttgtcgctgtttagttcaaaaatgaactagcgggcgacaaatattcgagaacggaggtagtacaatgttttatgatgacagatttggtgtgtaacataaatatctcatggcttgctttgatggtgc

SEQ ID NO: 16357 - protein, 285 aa, Zea mays subsp. mays
  misc_feature (1)..(285): Ceres Seq. ID no. 12352080
TATLRVPEKKYCHPPPRRRAMASPSPSSPLHPHQHPPPPNVHHQFQSLPPSMPPPPPSTALPKALDLEVTVVCGKHLKNVNWRRGDLRAYVVVYLDPSRRAATRPDDGGGCKPTWNERLVLPLPPHLSPHDPSILLSLDVFHSKPSDSPKPLVGSARSPLRDLLFPANPNPSHDPAASALVSLPLLRPSGRPQGKIRIRVAIRERSPPPPEPQYPPPSSSPYYFPPPPPAYSAPPQYGSDQYYRPSGYYSAPAPPPHPYEYTGGPSAPVDYNRQYEQRGRTGARW

SEQ ID NO: 16358 - protein, 269 aa, Zea mays subsp. mays
  misc_feature (1)..(269): Ceres Seq. ID no. 12352081
MSTGAVATSVPTSWCTLTPPAAPLPAPTTAAGANQPGTSASSSRFRPTSPRTTPPSSCPSTFSTLSPPIRPSRSSDPPALLSATSSSPQTLTLATIPQPPLSSACHSSALPAAHRGRSGSASPSASARRRLRSRNTLRLPAPRTTFHRLLPPTRPRLSTDLTSTIALVDTTLHLHLHHIRMSTPEGPLHRWTTTGNMSREGGLGPAGSGSGNGRYGAGTGLAVGAVAGALGGLAIDEAVKYKEDKGAERVEEKVVPAGRDDYSEYRGDY

SEQ ID NO: 16359 - protein, 265 aa, Zea mays subsp. mays
  misc_feature (1)..(265): Ceres Seq. ID no. 12352082
MASPSPSSPLHPHQHPPPPNVHHQFQSLPPSMPPPPPSTALPKALDLEVTVVCGKHLKNVNWRRGDLRAYVVVYLDPSRRAATRPDDGGGCKPTWNERLVLPLPPHLSPHDPSILLSLDVFHSKPSDSPKPLVGSARSPLRDLLFPANPNPSHDPAASALVSLPLLRPSGRPQGKIRIRVAIRERSPPPPEPQYPPPSSSPYYFPPPPPAYSAPPQYGSDQYYRPSGYYSAPAPPPHPYEYTGGPSAPVDYNRQYEQRGRTGARW

SEQ ID NO: 16360 - DNA, 1667 bp, Zea mays subsp. mays
  misc_feature (1)..(1667): Ceres Seq. ID no. 12352083
agtttactggagcacgcaccgcagcgtctcccccttctgctcatcctccgtccctccgtcggaagggctggcgctaagggacgatccctccgtccgcccgtccgttcgacgggacctcggttggtttcgtcggtcgctgggaggacaggtgacggaacggtgatatgaggcggtggttatgttgtaactgccactatgacgtcgaggaagatgaccacgccaaggaacaggccaaagctcagagcaataagaccgactccaagcagaagtcttcaaagcctcctggtagtcaacctgagccagagttctcccctcctacaattgatgtccctgaattgtctttggatgatttgaaactaaagactgatgattttggatcaagtgctctgattggtgaaggttcttatggacgagtatatcatgccactttggacgatgggagacaagcagcagttaaaaaacttgatgcatctgaaaatgagcctaatgatgagtttctcaaacaggtctcactggcatcaaagctaaaacatgaaaatcttgttgagatgttgggttactgtgtcgatgggaattaccgtatactcgcatatgaatttgcaaccatgggttcgcttcatgatgttttacatggaagaaaaggcgttcaaggtgcgcagcctggacctgtacttgactggatgcagagggtcaaaattgctattgaggctgcaaaaggtatagaatatctgcatgaaaaggttcagccttcaatcatccatcgggacatcagatcaagcaatgtactgctgtttgaggatttcaaggcaaaaattgcagactttaatcttttgaaccaagcaccagatatggcagctcgtctccattcaactcgtgtattggggacttttggatatcatgctcctgagtatgctatgactggccagctgacacaaaaaagtgatgtctacagctttggtgtggttcttttggaacttttgactggaaggaaaccagtagatcacacaatgcctcgaggtcaacaaagtttagtcacatgggctactccaaggttaagtgaagacaaggtgaagcaatgtgtagatcccaggttgaagggagaatatcctccaaagggagtcgctaagcttgctgcagtggcagctctatgtgcacagtacgaagcagagttcaggcccaacatgagcatcgttgttaaggcgctttcgcctctccttcaacaaagacctgcaccaaccaccgaagagccagctccacaacctgggagctgaaaccagtcacatgtgatgggacccctaggcataagccatctccgcaaccattcaatcagcacattctataaatcattgagagtattttgggtatttgttctgtagcgttctcagttgggtatagcatacatgaacttgcccctgctgtttgtggccacctagttcgtggcttgatgttggcgccgcacaatggtatatgaagttggttcgaagtttttttttaccttctctataccaataccaagtgaccaactgtttgtaggttttcataattcgcggcttgaagaatagatgcaggatggtctggatttttttttgtccgtggcgtggtgttgctgcctgacctacgtgatgtacttcctctcttccaaatcccaattcaccttttcttgttct

SEQ ID NO: 16361 - protein, 368 aa, Zea mays subsp. mays
  misc_feature (1)..(368): Ceres Seq. ID no. 12352084
MRRWLCCNCHYDVEEDDHAKEQAKAQSNKTDSKQKSSKPPGSQPEPEFSPPTIDVPELSLDDLKLKTDDFGSSALIGEGSYGRVYHATLDDGRQAAVKKLDASENEPNDEFLKQVSLASKLKHENLVEMLGYCVDGNYRILAYEFATMGSLHDVLHGRKGVQGAQPGPVLDWMQRVKIAIEAAKGIEYLHEKVQPSIIHRDIRSSNVLLFEDFKAKIADFNLLNQAPDMAARLHSTRVLGTFGYHAPEYAMTGQLTQKSDVYSFGVVLLELLTGRKPVDHTMPRGQQSLVTWATPRLSEDKVKQCVDPRLKGEYPPKGVAKLAAVAALCAQYEAEFRPNMSIVVKALSPLLQQRPAPTTEEPAPQPGS

SEQ ID NO: 16362 - protein, 240 aa, Zea mays subsp. mays
  misc_feature (1)..(240): Ceres Seq. ID no. 12352085
MLGYCVDGNYRILAYEFATMGSLHDVLHGRKGVQGAQPGPVLDWMQRVKIAIEAAKGIEYLHEKVQPSIIHRDIRSSNVLLFEDFKAKIADFNLLNQAPDMAARLHSTRVLGTFGYHAPEYAMTGQLTQKSDVYSFGVVLLELLTGRKPVDHTMPRGQQSLVTWATPRLSEDKVKQCVDPRLKGEYPPKGVAKLAAVAALCAQYEAEFRPNMSIVVKALSPLLQQRPAPTTEEPAPQPGS

SEQ ID NO: 16363 - protein, 221 aa, Zea mays subsp. mays
  misc_feature (1)..(221): Ceres Seq. ID no. 12352086
MGSLHDVLHGRKGVQGAQPGPVLDWMQRVKIAIEAAKGIEYLHEKVQPSIIHRDIRSSNVLLFEDFKAKIADFNLLNQAPDMAARLHSTRVLGTFGYHAPEYAMTGQLTQKSDVYSFGVVLLELLTGRKPVDHTMPRGQQSLVTWATPRLSEDKVKQCVDPRLKGEYPPKGVAKLAAVAALCAQYEAEFRPNMSIVVKALSPLLQQRPAPTTEEPAPQPGS

SEQ ID NO: 16364 - DNA, 1212 bp, Zea mays subsp. mays
  misc_feature (1)..(1212): Ceres Seq. ID no. 12352091
gttgacatcggttcaccgtccgcccaggtaccttccgtacgtacaagaggcggtcgcgacgctctagcttgcattgcaccagcgcgcagagcggaaggaggtggaaagcgcccagagagatctcgagagagaggctggtcggcacagactagttcattccgtttggatagagacgcacgcaacgcaggccaccacaacgtgaggagcgggaggagggagagggaggatgcaggcgcatcaccgtcagtcgtactacgcggtgctcggcgtgcagccgggcgccaccgctgccgagatccgcgcctcctaccaccgcctcgccatgaggtggcacccggacaagatcgccagcggcggcggcgccggcgccgatccggcgcgcgcggaggaggccaagagcaggttccagcagatacacgaggcgtaccaagtgctgtcggatgacaagaggagggcgctgtacgacgccggcatgtacgacccgctggacgacgacgacgaccaggaggacgtcgagggattccacgacttcgtgcaggagatggtctcgctcatggccagagaggagcccgtgtacagcttggccgagctgcaatccatgctggacgggatgatcaaggatttcaccgcgccacagccttggcctagcggcttcttctacactggtggtggcggtggcggtggcggtggggcgtcgtcgccgtcgccgctcggcaaaccaagcagccaagagcagagtacggcttcgtcacgcttgcatccctacgggttcggggacgcgccgtgcttcagccgcacggcgttctcacaatgatggcgatgatgaataaattgatacatggatcgagcttttattcttctggcagcaatgggggtttcctcgctcgtgctcgtggaggtggagggatagtaggaacccgtgaccgtgaaagccatcgtccgccagggccagactctgattggcagttgcaattgctttggactgtggggatgaaagaaggtgaggtgggaagatagaccacaaggagagcacgtagtcgcctagaatcgccacccatcagcaaaagaaggggtgtttgtttgtttgtactgtttggtttggtttggttttcgtctcttgcctgccatggtagagatgagttatgccagagcatttgtatacaagggtatgccatcaagaataagttacgtcaatacaatttgtacataaat

SEQ ID NO: 16365 - protein, 195 aa, Zea mays subsp. mays
  misc_feature (1)..(195): Ceres Seq. ID no. 12352092
MQAHHRQSYYAVLGVQPGATAAEIRASYHRLAMRWHPDKIASGGGAGADPARAEEAKSRFQQIHEAYQVLSDDKRRALYDAGMYDPLDDDDDQEDVEGFHDFVQEMVSLMAREEPVYSLAELQSMLDGMIKDFTAPQPWPSGFFYTGGGGGGGGGASSPSPLGKPSSQEQSTASSRLHPYGFGDAPCFSRTAFSQ

SEQ ID NO: 16366 - protein, 163 aa, Zea mays subsp. mays
  misc_feature (1)..(163): Ceres Seq. ID no. 12352093
MRWHPDKIASGGGAGADPARAEEAKSRFQQIHEAYQVLSDDKRRALYDAGMYDPLDDDDDQEDVEGFHDFVQEMVSLMAREEPVYSLAELQSMLDGMIKDFTAPQPWPSGFFYTGGGGGGGGGASSPSPLGKPSSQEQSTASSRLHPYGFGDAPCFSRTAFSQ

SEQ ID NO: 16367 - protein, 147 aa, Zea mays subsp. mays
  misc_feature (1)..(147): Ceres Seq. ID no. 12352094
VDIGSPSAQVPSVRTRGGRDALACIAPARRAEGGGKRPERSRERGWSAQTSSFRLDRDARNAGHHNVRSGRREREDAGASPSVVLRGARRAAGRHRCRDPRLLPPPRHEVAPGQDRQRRRRRRRSGARGGGQEQVPADTRGVPSAVG

SEQ ID NO: 16368 - DNA, 1641 bp, Zea mays subsp. mays
  misc_feature (1)..(1641): Ceres Seq. ID no. 12352107
ttctctagactccccttcgtccctttctctctcttcacactcgcctcgccattaaagctccaaaaaagaaaaaaaggctgcgaaaaaaatcatcttctcttctcctaaaatcttccacctttaaccgtccctgtccgcgaatttctagatgccccgatcgcttccgattttttcctggatttctccgattttttgaagtatttttccttggggacggtttcattgccattcctcgacggggttagggtttgcggggatgagggtgcacggcgaggtgtcggacgatgaggcggccgtggctgtggttggggaaacggtgccctcctcgccgcctcccgcctccgtggtgcagccgctggtggtggggtacgccctcaccaagaagaaagtcaagagcttcctgcagcccaagctgctcgcgctggccaggaagaaaggcattcatttcgtatcaattgatgagacttgccccctctctgaacaaggtccatttgacatcattttgcacaagcttactagtaaggagtggcagcaagttttggaggactatcgtgaagagcatccagaagtgactgtcctcgacccaccaaatgctatccaacatttgcacaatcgccaatcaatgctacaagaagttgctgatttgaacctgtccaatggttatggagaggtttgcgctccacgacaactagtcatcatgaaagatccgtcttccatacctgatgcagttgccaaggctggactaaccttgcctttggttgccaaaccattggtcgctgatggtacatcaaaatctcatgagctatcccttgcatatgtggaagcatcattgcctttgcttgaccctcctttggttctccaggaatttgtcaatcatggtgggatcctatttaaggtatatattgttggtgaaacaatacaggtagtccgcaggttttcacttcctgatgttaatacgtatgacctgggaaacaatgacggtatctttcgattcccaagagtttcttgtgctacaaataatgcagaagatgcagatgttgacccttgtattgcagaacttcctccaaagccacttcttgagaaacttggccgggagcttcgacgccggctgggtcttagactgtttaacatagatatgattagagaacatggaagaaaggaccggtactatgtcattgacatcaactattttcctggatatggcaagatgccaggatatgagcacatattcactgacttcctgctaagcctcgtgcaaagcaagtacaagaggctaagtgggagctgaagcgtagagaagatttactttcgatggagactattaacagatgccagctagcctggccatataacagtggggcagctagaaaggtcttccaggttgtacatagcaagggggtgggtcttagcatgaatgcggtgtttgggccggggccttgactgaaggcgcatagcagaactaagacaaaaaatgcagtgtttgggccggggcagtatctgaagaaaggttttggctccgtgcccagcctactgtgtaattcgtttgaccgagtggccgacctgtgtaaatcgttttaccgagtgccgacctgggcttctttagtttcaaaaacaaacaaacaaaacctttgcttcgttttt

SEQ ID NO: 16369 - protein, 343 aa, Zea mays subsp. mays
  misc_feature (1)..(343): Ceres Seq. ID no. 12352108
MRVHGEVSDDEAAVAVVGETVPSSPPPASVVQPLVVGYALTKKKVKSFLQPKLLALARKKGIHFVSIDETCPLSEQGPFDIILHKLTSKEWQQVLEDYREEHPEVTVLDPPNAIQHLHNRQSMLQEVADLNLSNGYGEVCAPRQLVIMKDPSSIPDAVAKAGLTLPLVAKPLVADGTSKSHELSLAYVEASLPLLDPPLVLQEFVNHGGILFKVYIVGETIQVVRRFSLPDVNTYDLGNNDGIFRFPRVSCATNNAEDADVDPCIAELPPKPLLEKLGRELRRRLGLRLFNIDMIREHGRKDRYYVIDINYFPGYGKMPGYEHIFTDFLLSLVQSKYKRLSGS

SEQ ID NO: 16370 - protein, 221 aa, Zea mays subsp. mays
  misc_feature (1)..(221): Ceres Seq. ID no. 12352109
MLQEVADLNLSNGYGEVCAPRQLVIMKDPSSIPDAVAKAGLTLPLVAKPLVADGTSKSHELSLAYVEASLPLLDPPLVLQEFVNHGGILFKVYIVGETIQVVRRFSLPDVNTYDLGNNDGIFRFPRVSCATNNAEDADVDPCIAELPPKPLLEKLGRELRRRLGLRLFNIDMIREHGRKDRYYVIDINYFPGYGKMPGYEHIFTDFLLSLVQSKYKRLSGS

SEQ ID NO: 16371 - protein, 196 aa, Zea mays subsp. mays
  misc_feature (1)..(196): Ceres Seq. ID no. 12352110
MKDPSSIPDAVAKAGLTLPLVAKPLVADGTSKSHELSLAYVEASLPLLDPPLVLQEFVNHGGILFKVYIVGETIQVVRRFSLPDVNTYDLGNNDGIFRFPRVSCATNNAEDADVDPCIAELPPKPLLEKLGRELRRRLGLRLFNIDMIREHGRKDRYYVIDINYFPGYGKMPGYEHIFTDFLLSLVQSKYKRLSGS

SEQ ID NO: 16372 - DNA, 1486 bp, Zea mays subsp. mays
  misc_feature (1)..(1486): Ceres Seq. ID no. 12352115
atctcctatctctctctctctctccactcgccgccgcctcgacctgcccggtgcccgcccgcacacaccacctgtccccgctccgctccgcgttcccttcccctcccggcattcccgatcgccgccgcccgcccgcctgacctcgacctcccctctcccctctcgcgccatccctcaggcccgggtttgtctcgccgccgctactggccttcgctcggtccgccgcgatggtgtctggcgggtgcgtgggggcggagggggaggcggaccgcgcggcggcgcctccggaggccgcggaggagccggtggtgccggcgcctcccgcgcgggaggtcgtggtggggtacgcgctcacgacgaagaaggccaagagcttcctccagcccaagctccgggggctcgccaggaaaaagggaatcttgtttgttgctattgatcagaaacgtccattgtctgatcaaggtccatttgacattgttcttcataagttgactggaaaggggtggcagcaattgctggaggaatatagggaggctcacccagaagttactgttcttgatccacctggcgcaatagcaaacttgctagatcgccaatctatgcttcaagaagtatctgaattggacctcaccgattgtcatggtaaagtacgcgtgcctaaacagctattcattaatactgatccctcatcaataccagctgcagttaggagggcgggtctctctctcccattggtggcaaaacccttggtggcgaagtcccatgagctatctctggcttatgatccaacttcactgaccaaacttgagccccctttagttcttcaggaatttgttaaccatggtggcgtcatgtttaaggtgtacattgttggggatgcaataagggttgtacgtcggttttcacttccaaatgttgatgaaggtgatctgtcgaataatgctggggtatttcggtttccaagggtctcttgtgctgcagccagtgcagatgatgcagatcttgaccctggtgttgctgaacttcctccgagaccattgcttgagatcttggcacgagagctgcggcgacgactgggtcttagactattcaacattgatatgattagggagcacggaacaagagaccggttttatgtcatagacatgaactactttcctgggtacggcaaaatgcccgggtacgagcacgtgttcaccgacttcctgctgagccttgcccagaaagagtacaagaggcgaccaagctatagctccctaggctcaggcgaagggtgacaagtgaggaggaggctacttggcgggggcgccctgtatatgtatagcatccgcaatgcgtgcgtacagatgtgctgcgtgacgggagatgatgggtcgtagagctggggcatcactgcatcacatcagtagccgcgataaaagaagcgaggacttttggcaggctgtaattaaattgttactttgcatgtgctaactgttcatgcttc

SEQ ID NO: 16373 - protein, 349 aa, Zea mays subsp. mays
  misc_feature (1)..(349): Ceres Seq. ID no. 12352116
MVSGGCVGAEGEADRAAAPPEAAEEPVVPAPPAREVVVGYALTTKKAKSFLQPKLRGLARKKGILFVAIDQKRPLSDQGPFDIVLHKLTGKGWQQLLEEYREAHPEVTVLDPPGAIANLLDRQSMLQEVSELDLTDCHGKVRVPKQLFINTDPSSIPAAVRRAGLSLPLVAKPLVAKSHELSLAYDPTSLTKLEPPLVLQEFVNHGGVMFKVYIVGDAIRVVRRFSLPNVDEGDLSNNAGVFRFPRVSCAAASADDADLDPGVAELPPRPLLEILARELRRRLGLRLFNIDMIREHGTRDRFYVIDMNYFPGYGKMPGYEHVFTDFLLSLAQKEYKRRPSYSSLGSGEG

SEQ ID NO: 16374 - protein, 225 aa, Zea mays subsp. mays
  misc_feature (1)..(225): Ceres Seq. ID no. 12352117
MLQEVSELDLTDCHGKVRVPKQLFINTDPSSIPAAVRRAGLSLPLVAKPLVAKSHELSLAYDPTSLTKLEPPLVLQEFVNHGGVMFKVYIVGDAIRVVRRFSLPNVDEGDLSNNAGVFRFPRVSCAAASADDADLDPGVAELPPRPLLEILARELRRRLGLRLFNIDMIREHGTRDRFYVIDMNYFPGYGKMPGYEHVFTDFLLSLAQKEYKRRPSYSSLGSGEG

SEQ ID NO: 16375 - DNA, 1415 bp, Zea mays subsp. mays
  misc_feature (1)..(1415): Ceres Seq. ID no. 12352133
aatacttgcttgcattgcctcccgtttgccccgatccaacgacgacgttcgctggccgtagccaagaaggtatctcgcccaaacaaaggccgtcaagccaccatatggccgtgtccggcgagaagccgccaccgccaccgccaccggccacggcgtccggcggaacggcaaggaagctcatcctagcgctgcttacatgtctgtcgtcggcgctgctgtacaggcagattcagccgctaccgcccaagatccccggcacgccgggcggcccgccggtgacggcgaccaggacgaggctcagcgacggcaggtacctggcctatctggaaaccggcgtcccgagggagaaggccaagcacaggctcgtctttgtccatgggttcgactcctgcagacacgacgcgcttccgatctccacggagcttgcgcaagagctgggcgtttacatgttgtccttcgatcgccccgggtacgccgagagcgacccgcacccggccaggaccgaggagagcatcgccctcgacatcgccgagctcgccgacaacctgcagctgggtcgcaagttctaccttgctggcttctccatgggcggcgagatcatgtggagctgcctcaagtacatcccacacaggctctccggcgtggccattctcggccccgtaggcaactactggtggcccggcttgccgtcgaacgtgtcgcgggacgcctggtaccagcagctccctcgggaccagtgggcggtctgggtcgcgcatcacctgccgtggctcacctactggtggaacacccagaagctcttcccggcctccagcgtcatcgcctacaaccctgccctcctgtcccaagaggacgagatgctcatggccaagtttggctatagagcctacatgccgcagatcaggcaacagggggagcacgagtgcctgcaccgggacatgatggtcgggttcggcaagtggagctggagccccgctgcagctggagaacccgttcgccgacgccgacgccgacgatggccagggggcggggaaggtgcacctgtggcacggcgccgaggacctcatcgtgccggtcagcctgtccaggtacatcagccagaagctgccgtgggtcgtctaccacgagctccccaagtcgggacatctcttcccgatcgccgaggggatggctgacatcattgtcaagtccctgctgctcggagacgatcatccgtcgtcgtcggcctcacagcgtcctcattctccatgaatccaggtcgtcacgtagtccgttcgcatctcgtggcccgtctctcactgtttctgtaaagggaccgatggtgcagctttctctagcgtgtagctaggatgctcttttttttttgaaaaataatggaactaagttttagcctatatatatcatctgataatgtt

SEQ ID NO: 16376 - protein, 390 aa, Zea mays subsp. mays
  misc_feature (1)..(390): Ceres Seq. ID no. 12352134
YLLALPPVCPDPTTTFAGRSQEGISPKQRPSSHHMAVSGEKPPPPPPPATASGGTARKLILALLTCLSSALLYRQIQPLPPKIPGTPGGPPVTATRTRLSDGRYLAYLETGVPREKAKHRLVFVHGFDSCRHDALPISTELAQELGVYMLSFDRPGYAESDPHPARTEESIALDIAELADNLQLGRKFYLAGFSMGGEIMWSCLKYIPHRLSGVAILGPVGNYWWPGLPSNVSRDAWYQQLPRDQWAVWVAHHLPWLTYWWNTQKLFPASSVIAYNPALLSQEDEMLMAKFGYRAYMPQIRQQGEHECLHRDMMVGFGKWSWSPAAAGEPVRRRRRRRWPGGGEGAPVARRRGPHRAGQPVQVHQPEAAVGRLPRAPQVGTSLPDRRGDG

SEQ ID NO: 16377 - protein, 356 aa, Zea mays subsp. mays
  misc_feature (1)..(356): Ceres Seq. ID no. 12352135
MAVSGEKPPPPPPPATASGGTARKLILALLTCLSSALLYRQIQPLPPKIPGTPGGPPVTATRTRLSDGRYLAYLETGVPREKAKHRLVFVHGFDSCRHDALPISTELAQELGVYMLSFDRPGYAESDPHPARTEESIALDIAELADNLQLGRKFYLAGFSMGGEIMWSCLKYIPHRLSGVAILGPVGNYWWPGLPSNVSRDAWYQQLPRDQWAVWVAHHLPWLTYWWNTQKLFPASSVIAYNPALLSQEDEMLMAKFGYRAYMPQIRQQGEHECLHRDMMVGFGKWSWSPAAAGEPVRRRRRRRWPGGGEGAPVARRRGPHRAGQPVQVHQPEAAVGRLPRAPQVGTSLPDRRGDG

SEQ ID NO: 16378 - protein, 242 aa, Zea mays subsp. mays
  misc_feature (1)..(242): Ceres Seq. ID no. 12352136
MLSFDRPGYAESDPHPARTEESIALDIAELADNLQLGRKFYLAGFSMGGEIMWSCLKYIPHRLSGVAILGPVGNYWWPGLPSNVSRDAWYQQLPRDQWAVWVAHHLPWLTYWWNTQKLFPASSVIAYNPALLSQEDEMLMAKFGYRAYMPQIRQQGEHECLHRDMMVGFGKWSWSPAAAGEPVRRRRRRRWPGGGEGAPVARRRGPHRAGQPVQVHQPEAAVGRLPRAPQVGTSLPDRRGDG

SEQ ID NO: 16379 - DNA, 1906 bp, Zea mays subsp. mays
  misc_feature (1)..(1906): Ceres Seq. ID no. 12352137
aactaaccaccacacacacaggcaggaagaagccgactgaggctggccggtcgtgctttgttcttcttcttttctccgattcttttttttttactgacggctttggcagtagcgggcgcacacacttatactgccatttaacattgattgaggttgttttgaggtggcctcgtggtgaagaaaggcgggagctggagagcaacgagacaagcacggcggtgtgcgtgcgcacaggcactagagtgagacagctctagaagagagcaagccgccgccgccgccgcatcatcgtcagaagcggccactcctacctctgatcctgatacaaaatccaggccagaaggcaggagcctccaaaagagatccactcccccggatggcttcttgcttctgcttccgcagacgccgccgcccaatcattgcctcctctgtccccttattcctcctcctcgtctccttcctcgcctcggcctcggcctcttccgcgacgacgacgaagctgctaggcagcggcaataatgccacgcggcgggtggcgttcagctcggaggagctgcgcgggttgcggagcatcacggcccggcttgcgcggctcagggacgcgtccgtcaagacgatccagagccccgacggcgacgtcatcgactgcgtgccggcgcacctgcagccggcgttcgagcaccccaagctgaggagccagaagccagaggaggagcccgaagagaggccgaggagcagcgctggccgcttctccgacgctggccaggacgaggacgacgacccgttgccgcaggtgtggcggcgctccggcgagtcctgcccggaggggaccataccagtgcggcgaaccacggaggacgacgtgctcagggccaccgcctcttccgccacccggttcgggatgaaggcccgcggtgcggggctcgggttcgcgcggcgcgactccaccggtggcggccacgagcacgcggtggggtacgtgaccggcgggcagttctacggcgccaaggcgagcctgaacgtgtggccggcgcaggtggcgtcgccggcggagttcagcctctcgcagatctgggtcatctccggcgccttcggcaacgacctcaacaccatcgaggccggctggcaggtcagccctcagttgtacggcgacaacagccccaggttcttcacctactggacagacgacgcgtaccaggagacgggctgctacaacctccactgctcgggcttcgtgcagaccagcagccgcgtggccatcggcgccgccatctcgcccgtctcctcctacgccggccgccagttcgacgtcacgcttctcatctggaaggacccgcgccggggccactggtggctgcagctcggctccggcgcgctcgtcggctactggccctccgcgctcttcacgcacctcggctcgcgcgccgacatggtgcagttcgggggcgaggtcgtcaacgcgcgccccgccggcgcgccgcacacgcccacgcagatgggctccggccgcttccccgccgagggatacgcgcgcgccgcatacttccgcaacgtgcagctcgtcgactgggacaacaacctcgtcccggcccgccgggctccgcctgctcgccgaccggccgggatgctatgacatcgccggcggcagcggcggcgcgtggggcacctacttctattacggcgggcccggcaggaacgcacggtgcccgtagctttatagtattagctaggaactgaatcgagtgcatgggatgggtgttgtacgtgtttttcgtacgtgcgcactcaagcacacattagcagaggctgatttctatatattactccaaatgagtctgcgttcacttttttttatctctccatgtgaatatgatgccgttgtgatcatctaactatttgctcattt

SEQ ID NO: 16380 - protein, 418 aa, Zea mays subsp. mays
  misc_feature (1)..(418): Ceres Seq. ID no. 12352138
MASCFCFRRRRRPIIASSVPLFLLLVSFLASASASSATTTKLLGSGNNATRRVAFSSEELRGLRSITARLARLRDASVKTIQSPDGDVIDCVPAHLQPAFEHPKLRSQKPEEEPEERPRSSAGRFSDAGQDEDDDPLPQVWRRSGESCPEGTIPVRRTTEDDVLRATASSATRFGMKARGAGLGFARRDSTGGGHEHAVGYVTGGQFYGAKASLNVWPAQVASPAEFSLSQIWVISGAFGNDLNTIEAGWQVSPQLYGDNSPRFFTYWTDDAYQETGCYNLHCSGFVQTSSRVAIGAAISPVSSYAGRQFDVTLLIWKDPRRGHWWLQLGSGALVGYWPSALFTHLGSRADMVQFGGEVVNARPAGAPHTPTQMGSGRFPAEGYARAAYFRNVQLVDWDNNLVPARRAPPARRPAGML

SEQ ID NO: 16381 - protein, 243 aa, Zea mays subsp. mays
  misc_feature (1)..(243): Ceres Seq. ID no. 12352139
MKARGAGLGFARRDSTGGGHEHAVGYVTGGQFYGAKASLNVWPAQVASPAEFSLSQIWVISGAFGNDLNTIEAGWQVSPQLYGDNSPRFFTYWTDDAYQETGCYNLHCSGFVQTSSRVAIGAAISPVSSYAGRQFDVTLLIWKDPRRGHWWLQLGSGALVGYWPSALFTHLGSRADMVQFGGEVVNARPAGAPHTPTQMGSGRFPAEGYARAAYFRNVQLVDWDNNLVPARRAPPARRPAGML

SEQ ID NO: 16382 - DNA, 1228 bp, Zea mays subsp. mays
  misc_feature (1)..(1228): Ceres Seq. ID no. 12352148
ctattcctcagctcctggaccggccatggccgcaccttccggcacgatgcgcgccgtgcagtacgacagatacggcggaggagcacgggggctcaagcatgtggaggtgccgatcccgtcgccgaagaaaggcgaggtgctcatcaggatggaggccaccagcatcaacgtcgtcgactggaagttccagaacggcttcgcgcggcccttcatgcccaggaggttccctttcatctctggtttcgacctagcaggagaggtcgtagagttgggtgctggagtgagcagcttcaaaccaggggataaggtgatcgccatcaacttcccgaacggcggagggctcgccgagtacgcggtcgcgtcagcgtctcgtacagccgcaaggccgccggaggtgtcggccgtcgaaggtgtctgcgtgccgatcgccgcagtcaccgcgctcgggtcgctgcggacagccggggtcacagtcacactggacgacccggctcgcgcccccgccacgcccaagaacgtgctggtcaccgcggcctccggcgccgtcggccacttcgccgtgcagctcgccaggatgggcggccacaacgtcacggccacctgcggcgcgcgcaacctcggcctggtccggagcctcggcgccgacgaggcgctggactacaagacccccgagggcgccaagctgcggagcccctccggcaggaagtacgacgcggtggtgcactgcgccgcgaaggggctcccgtggtccgtgttcaggcccgtgctcgccgcctcgggcacggtcgtcgacatcacgccagggttcgtggccgtcgtcaccgcgatcctccaggtggcgaccttctccaagaagaggctggtgccgctcatagtgacgcccaagaaggaggagatggagctgctgctgggcatgctgaagcagggtaggctcaagacggtcatagattcccggcacccgctgggcagcgctcacgaaggctgggccaagagcatgagcggccacgccaccggcaaggtcgtcatagagatcggagccgcgcaaccataataatagtgcagcaatatattgattcaaaaaataattatgaattttgtaatttttagatctataatttctatatttttttgttcatgaattatgtatttttatttaaaatttatgaatcatgtatttttatttttatatgaattatgtatttttactagatgaatgcacgtgcgttgc

SEQ ID NO: 16383 - protein, 349 aa, Zea mays subsp. mays
  misc_feature (1)..(349): Ceres Seq. ID no. 12352149
YSSAPGPAMAAPSGTMRAVQYDRYGGGARGLKHVEVPIPSPKKGEVLIRMEATSINVVDWKFQNGFARPFMPRRFPFISGFDLAGEVVELGAGVSSFKPGDKVIAINFPNGGGLAEYAVASASRTAARPPEVSAVEGVCVPIAAVTALGSLRTAGVTVTLDDPARAPATPKNVLVTAASGAVGHFAVQLARMGGHNVTATCGARNLGLVRSLGADEALDYKTPEGAKLRSPSGRKYDAVVHCAAKGLPWSVFRPVLAASGTVVDITPGFVAVVTAILQVATFSKKRLVPLIVTPKKEEMELLLGMLKQGRLKTVIDSRHPLGSAHEGWAKSMSGHATGKVVIEIGAAQP

SEQ ID NO: 16384 - protein, 341 aa, Zea mays subsp. mays
  misc_feature (1)..(341): Ceres Seq. ID no. 12352150
MAAPSGTMRAVQYDRYGGGARGLKHVEVPIPSPKKGEVLIRMEATSINVVDWKFQNGFARPFMPRRFPFISGFDLAGEVVELGAGVSSFKPGDKVIAINFPNGGGLAEYAVASASRTAARPPEVSAVEGVCVPIAAVTALGSLRTAGVTVTLDDPARAPATPKNVLVTAASGAVGHFAVQLARMGGHNVTATCGARNLGLVRSLGADEALDYKTPEGAKLRSPSGRKYDAVVHCAAKGLPWSVFRPVLAASGTVVDITPGFVAVVTAILQVATFSKKRLVPLIVTPKKEEMELLLGMLKQGRLKTVIDSRHPLGSAHEGWAKSMSGHATGKVVIEIGAAQP

SEQ ID NO: 16385 - protein, 334 aa, Zea mays subsp. mays
  misc_feature (1)..(334): Ceres Seq. ID no. 12352151
MRAVQYDRYGGGARGLKHVEVPIPSPKKGEVLIRMEATSINVVDWKFQNGFARPFMPRRFPFISGFDLAGEVVELGAGVSSFKPGDKVIAINFPNGGGLAEYAVASASRTAARPPEVSAVEGVCVPIAAVTALGSLRTAGVTVTLDDPARAPATPKNVLVTAASGAVGHFAVQLARMGGHNVTATCGARNLGLVRSLGADEALDYKTPEGAKLRSPSGRKYDAVVHCAAKGLPWSVFRPVLAASGTVVDITPGFVAVVTAILQVATFSKKRLVPLIVTPKKEEMELLLGMLKQGRLKTVIDSRHPLGSAHEGWAKSMSGHATGKVVIEIGAAQP

SEQ ID NO: 16386 - DNA, 1597 bp, Zea mays subsp. mays
  misc_feature (1)..(1597): Ceres Seq. ID no. 12352156
tcacactctgcccagctaagctaagctccctccgtccatcggcatggcgactaccactactaccatcctcctcctcctcctcgtcgcagccacagccgtctcggcggccgacctctccgtgtaccacaacgtgcacccgccgtccccgtccccgctcgagtccatcatcgcgctcgcccgcgccgacgacgcgcggctcctcttcctctcatccaaggcggcctcgtccggcggcgtcacctccgctcccgtcgcctccggccagactccgccctcgtacgtcgtccgcgcggggctcggcaccccggtccagcagctgctcctcgcgctcgacaccagcgccgacgccacctggtcgcactgcgcgccgtgcgacacgtgccccgccggcagccgcttcatcccggccagctcctcctcgtacgcctccctcccgtgcgcctccgactggtgcccgctcttcgagggccagccgtgcccggcgaatcaggacgcctcggcgccgctgccggcgtgcgccttctccaagccgttcgcggacacctcgttccaggcgtcgctgggcagcgacacgctgcgcctgggcaaggacgccatcgccggctacgcgttcgggtgcgtgggcgcggtggccgggccgacgaccaacctgccgaagcaggggctcctcggcctcggccggggccccatgtctctgctatcccagaccgggagcacgtacaacggcgtcttctcctactgcctgcccagctacaggtcctactacttctccggctccctccggctgggagccgccgggcagcccaggaacgtccggtacacgccgctgctgaccaacccgcaccgcccgtcgctctactacgtgaacgtgacggggctcagcgtgggtcggacctgggtgaaggtccccgcggggtcgttcgcgttcgacccggccaccggcgccggcacggtgatcgactcgggcacggtgatcacgcggtggacagcacccgtgtacgcggcgctgcgcgaggagttccggcggcaggtggcggcgccgagcgggtacacgtcgctgggagcgttcgacacgtgcttcaacacggacgaggtggcggcgggcggcgcgccgcccgtgacgctgcacatggacggcggcgtggacctgacgctgccgatggagaacacgctgatccacagcagcgccacgccgctggcgtgcctggccatggccgaggcgccgcagaacgtgaacgccgtcgtgaacgtggtggccaaccttcagcagcagaacgtgcgggtcgtcgtcgacgtcgccggctcgcgcgtcgggttcgcgagggagccctgcaactgagcccctgaatccgtccgtgccctatgcacgggaggaaggaggagacgcgctgcggctgctgcatcggtcggtgtgcagttagttgtcctgttagtctatgctacgttgtctgcactctgcaataacggacgtgacccggggaaaaaaactgtttcgtcacgggtagctagagaatcacgtaaggctcttgttttcgtttgtgtcctataatgtatggctattggcctgtttcgagaggttaaaatttggaggtgctgc

SEQ ID NO: 16387 - protein, 431 aa, Zea mays subsp. mays
  misc_feature (1)..(431): Ceres Seq. ID no. 12352157
MATTTTTILLLLLVAATAVSAADLSVYHNVHPPSPSPLESIIALARADDARLLFLSSKAASSGGVTSAPVASGQTPPSYVVRAGLGTPVQQLLLALDTSADATWSHCAPCDTCPAGSRFIPASSSSYASLPCASDWCPLFEGQPCPANQDASAPLPACAFSKPFADTSFQASLGSDTLRLGKDAIAGYAFGCVGAVAGPTTNLPKQGLLGLGRGPMSLLSQTGSTYNGVFSYCLPSYRSYYFSGSLRLGAAGQPRNVRYTPLLTNPHRPSLYYVNVTGLSVGRTWVKVPAGSFAFDPATGAGTVIDSGTVITRWTAPVYAALREEFRRQVAAPSGYTSLGAFDTCFNTDEVAAGGAPPVTLHMDGGVDLTLPMENTLIHSSATPLACLAMAEAPQNVNAVVNVVANLQQQNVRVVVDVAGSRVGFAREPCN

SEQ ID NO: 16388 - protein, 276 aa, Zea mays subsp. mays
  misc_feature (1)..(276): Ceres Seq. ID no. 12352158
TLCPAKLSSLRPSAWRLPLLPSSSSSSSQPQPSRRPTSPCTTTCTRRPRPRSSPSSRSPAPTTRGSSSSHPRRPRPAASPPLPSPPARLRPRTSSARGSAPRSSSCSSRSTPAPTPPGRTARRATRAPPAAASSRPAPPRTPPSRAPPTGARSSRASRARRIRTPRRRCRRAPSPSRSRTPRSRRRWAATRCAWARTPSPATRSGAWARWPGRRPTCRSRGSSASAGAPCLCYPRPGARTTASSPTACPATGPTTSPAPSGWEPPGSPGTSGTRRC

SEQ ID NO: 16389 - protein, 216 aa, Zea mays subsp. mays
  misc_feature (1)..(216): Ceres Seq. ID no. 12352159
MSLLSQTGSTYNGVFSYCLPSYRSYYFSGSLRLGAAGQPRNVRYTPLLTNPHRPSLYYVNVTGLSVGRTWVKVPAGSFAFDPATGAGTVIDSGTVITRWTAPVYAALREEFRRQVAAPSGYTSLGAFDTCFNTDEVAAGGAPPVTLHMDGGVDLTLPMENTLIHSSATPLACLAMAEAPQNVNAVVNVVANLQQQNVRVVVDVAGSRVGFAREPCN

SEQ ID NO: 16390 - DNA, 1620 bp, Zea mays subsp. mays
  misc_feature (1)..(1620): Ceres Seq. ID no. 12352160
gacatgcccgatcccgacgccctggcggccgcggtcgccgtcgccgggtgcgagggggtcgcctctcctgtgtcctgtgcccgtagataaggtcctcaatcctgaggaaagttccggtccaatctcttccaattgacaccgtgttggtgttgttctgacttctgttgaataggatgaacctgcatttacggaaaaaattctccctttgatgacccaacccctgtgaaaacaaaacaaccctcagaagatgtccaaactccaaacacacgaaaaggggagcgtgcgacgactttccgccgacctgcagagctgaatgtgcatttttggtcgtttgcatccttcgccgccggctctttctgcgtgttcttcttcttgtcgatttccgtcttgtgtatatactatatactatgctgctgtgctgggttacaagacaagcaagtggcaactggcaatatacggacaagccgtggcgggtatatacggacgaagaggaggaccggaggaggaagcttcagtgaggccctggactgcagcgggatggcgtcgccgccgccaccacgcgtgtgcgtaaccggtggcggcgggtacgtcgcctcatggctcgtcaagctcctgctctcccgcggctacgccgtgcacgccactgtccgcgacccaagtgatcccaagaacgcccacctgcaacagctggacggggcccgggagaggttgcgcctgttcaaggccgacgtgctcgaccgcgacgccctggcgaccgcggtcgtcgcgtgcgagggcgtcttccacgtcgcctcccctgtgcccgcggacaaagtcctcgatcccgagtccgaggtgctgtctcctgctgtcaagggcactctgaacgtcctccaggcctgctcggcaaacaacgttcagaaagttgtcgtggtttcgtccacggctgctgtttactttaacccgagctggccccaaggtagaaccaaagacgagagttgctggtcagacagagatttatgcattaagaacgagaactggtactgtgctgccaagacgattgctgaagaaactgcagtggagtatggagagaagaacgggctggttgttgtcacggtctgcccttgtatcgttttaggcccactcctgcagccgctgatcaatgccagcagcgaattactcatctacattataaaaggaggtcctagggtgctgaaaaacctcccctggaacatagtcgacgtccgtgacgtagctgatgctttgctcctagtatacgagaaagtggaatcatccgggagatacatctgtgcgcctaatcggatcagcacaaacaacatggtgaacttgtttaaaaagtcctaccctaactacaattatgtgaactgcgacaacaaggactatgaatctgaaatctcaccagttacatcggagaaacttaagagtctaggctggaacccaaggacaatggagaaaactttgttggacaacattgagtatttcgagaaggcagggtttttgcgtgatgcagagggttatccttgtcgtctactacctcatatttttcatttcgcttctgactaatgaaatagattctgtaaaacaattacgacaactactataactgtctttggacaattc

SEQ ID NO: 16391 - protein, 341 aa, Zea mays subsp. mays
  misc_feature (1)..(341): Ceres Seq. ID no. 12352161
MASPPPPRVCVTGGGGYVASWLVKLLLSRGYAVHATVRDPSDPKNAHLQQLDGARERLRLFKADVLDRDALATAVVACEGVFHVASPVPADKVLDPESEVLSPAVKGTLNVLQACSANNVQKVVVVSSTAAVYFNPSWPQGRTKDESCWSDRDLCIKNENWYCAAKTIAEETAVEYGEKNGLVVVTVCPCIVLGPLLQPLINASSELLIYIIKGGPRVLKNLPWNIVDVRDVADALLLVYEKVESSGRYICAPNRISTNNMVNLFKKSYPNYNYVNCDNKDYESEISPVTSEKLKSLGWNPRTMEKTLLDNIEYFEKAGFLRDAEGYPCRLLPHIFHFASD

SEQ ID NO: 16392 - DNA, 1191 bp, Zea mays subsp. mays
  misc_feature (1)..(1191): Ceres Seq. ID no. 12352162
aagatataggttggaaccagactctgacaccgactacggagccaatccctcctgctggttcgatccaaaccctaccaaatcgatggccgacggcggcaacggcgggccgggcggcggcaatgcatcggcgccggtgtgcagtttcgtgaggaaaccacccaagaacatccggaagcgccccgccgcgcccgcggggtctgatgacgacgacgacggcggcggcggcgccctagccgccgcgcgctccaagaaggggccaccgtcctcaaccgctggcaagctcgttttctccaccgcaggtgcttcctccgaggcgccgcggttccagtacgaatcgtcccggacgatccagtccacggacacccgcgcaactgccacgctcgagacggagacggagtttgaccgcgacgcgcgctccatccgcgagagacagctcaagcaggccgaggagtccctcaagaagaacccctccgctgttgctgcttccgcctccgcctccaccgctggagaggtgtacaaggggatccacggctacacggactacaaagctgggttccgacgggagcacacggtatctagcgagaaggccggcggttcgcatggtccgctccgggcgtccgcgcacattcgcctctcccagcggtttgactaccagcccgacatctgcaaggactacaaggagacggggtactgtggttacggcgattcctgcaaattcatgcacgaccgaggggattacaaatccgggtggcagctcgagaaggaatatgaggaggctgagaaggcccgcaagcgacgaattgccatgggtggtggtggtgagagtgatgatgaggcagcagatgacgaggatgaggaggaggcgctgccctttgcctgcttcatttgtcgggagccattcgttgatccagtggtcaccaaatgcaagcactacttttgtgaacattgcgctttgaagcaccactcgaagaacaagaagtgctacgtctgcaacaaaccgacgctgggcatcttcaacgctgcacaggagatccgcaagaagatggcacaggacaagaagcagcagcagcaggagtaggagagctcaaaacacaccgttgctaatttagctgtgttgtacaacgatgattggtgcgataactagagtccggtatttttcgctatcagataaaagagaccaagttttgaacg

SEQ ID NO: 16393 - protein, 358 aa, Zea mays subsp. mays
  misc_feature (1)..(358): Ceres Seq. ID no. 12352163
RYRLEPDSDTDYGANPSCWFDPNPTKSMADGGNGGPGGGNASAPVCSFVRKPPKNIRKRPAAPAGSDDDDDGGGGALAAARSKKGPPSSTAGKLVFSTAGASSEAPRFQYESSRTIQSTDTRATATLETETEFDRDARSIRERQLKQAEESLKKNPSAVAASASASTAGEVYKGIHGYTDYKAGFRREHTVSSEKAGGSHGPLRASAHIRLSQRFDYQPDICKDYKETGYCGYGDSCKFMHDRGDYKSGWQLEKEYEEAEKARKRRIAMGGGGESDDEAADDEDEEEALPFACFICREPFVDPVVTKCKHYFCEHCALKHHSKNKKCYVCNKPTLGIFNAAQEIRKKMAQDKKQQQQE

SEQ ID NO: 16394 - protein, 331 aa, Zea mays subsp. mays
  misc_feature (1)..(331): Ceres Seq. ID no. 12352164
MADGGNGGPGGGNASAPVCSFVRKPPKNIRKRPAAPAGSDDDDDGGGGALAAARSKKGPPSSTAGKLVFSTAGASSEAPRFQYESSRTIQSTDTRATATLETETEFDRDARSIRERQLKQAEESLKKNPSAVAASASASTAGEVYKGIHGYTDYKAGFRREHTVSSEKAGGSHGPLRASAHIRLSQRFDYQPDICKDYKETGYCGYGDSCKFMHDRGDYKSGWQLEKEYEEAEKARKRRIAMGGGGESDDEAADDEDEEEALPFACFICREPFVDPVVTKCKHYFCEHCALKHHSKNKKCYVCNKPTLGIFNAAQEIRKKMAQDKKQQQQE

SEQ ID NO: 16395 - DNA, 1993 bp, Zea mays subsp. mays
  misc_feature (1)..(1993): Ceres Seq. ID no. 12352173
attagaatagccaggggcctcgctcctctccaccacgtactccactccatccatccatcatcgtctatccatgaagagcttgcaggaggagagggcggcgttggtgccgtcgccgtggccccagcaacagagaaaggacggcggcgagcatgatccggagcagctgatggatgaggatgacggtgacgatgaggaggatctgcaggatgagcagcacacaagaacaattaggacgtcgaccaagacggcggaagcatcgtcatcagcggagcggcgggtgccggcgtggtggaggcggcggcgggcgcagaagctggtgcccaccagaggtgttggcctggtcatcgccggtctcctcgtgctggtcttgctcgtcgtcgtcggcggcggcggcaacaccagtcgtcgtcgctggatccacctcgactatgcatcgtcgtttctgctaggcagcggcggcggcggcggcttgaagcagcatcaatggcctcctcaccacgtcccttcacccgcagcggacctcgtgcccatacccttcagctgcggcggcaacggctcggcatgtccccgtcgtcaaaccgcaacatcacccccctctccgtcgccgtcatcgtcatcgccaccagcagccaccaagtcatcatcgtccaagaataaacaaccccctcctcagtgcccggattacttccgcttcatccactccgacctgtcgccgtggcgcgagacggggatcacgcgcgaggcggtggagcgggggcgccaccgggcggcgttccggctggtggtcgtggacggccgcgcgtacgtggagacgtaccaccgcgtgttccagacgcgtgacaccttcacgcagtggggcatcgcgcagctgctggcgcgctaccccggacgcgtcccggacctggacctcatgttcaactgcgaggacatgcccgaggtcaaggtcaagccgtcggaggagtcgtccgcgccgccgctgttccgctactgcaaggacgactccacggtggacatcgtgttcccggactggtccttctggggctggcccgaggtcaacatccgtccctgggcgccgctgctggaggagatggccgccgagatgggtcgcctgccgtgggcggaccgggagccgtacgcgtactggaagggcaaccccaccgtgtccgccgagcgcgccgacctccgccgctgcaacgactcctcgtcgtccggcggcacgcgcgtgttctggcaggactggggcgccgccatccgggacggcttccgggactccaacctggccaagcagtgccgctaccgctacaagatctacgtgcgtggccggtcctggtcggtcagcctcaagtacatcctcgcctgcgactcgccggtgctgctcatcgccacgcccttcaaggacttcttctcccggggcctcgtcgccggcaggcactactggcccatcgaccccggagcccgcaagtgcgccgacatcaacttcgccgtccacgactggggcaacgcgcacccggagcaggcgcgccggatggcggaggaaggcagcggcttcgcgcgccaccagctcagcatggactacgtctacgactacatgctgcacctgctcacccagtacgccggcctgctccgctacaagcccaccgtgccggagaacgccgtagagctgtgcgccgagaccgtcgcctgccccgctgcgcaccacagcaacaggagggagttcgacttcatgatgcagtccagggagaggtacatcgccgactaccagccctgcacgctgccgccgccctttaccgaccgtcacatcagggagatgacgcgaagagaccaggaggtgcgcgccaacgtgcacaagatgatgaccaccgtcactccatgacgtcaccaattaagggattctcttgttctctatctatctatctatcttgaatatccacttcgttatactacgtcctggtctctgtctctataatattaaaatatcagttttaatggtctt

SEQ ID NO: 16396 - protein, 600 aa, Zea mays subsp. mays
  misc_feature (1)..(600): Ceres Seq. ID no. 12352174
MKSLQEERAALVPSPWPQQQRKDGGEHDPEQLMDEDDGDDEEDLQDEQHTRTIRTSTKTAEASSSAERRVPAWWRRRRAQKLVPTRGVGLVIAGLLVLVLLVVVGGGGNTSRRRWIHLDYASSFLLGSGGGGGLKQHQWPPHHVPSPAADLVPIPFSCGGNGSACPRRQTATSPPSPSPSSSSPPAATKSSSSKNKQPPPQCPDYFRFIHSDLSPWRETGITREAVERGRHRAAFRLVVVDGRAYVETYHRVFQTRDTFTQWGIAQLLARYPGRVPDLDLMFNCEDMPEVKVKPSEESSAPPLFRYCKDDSTVDIVFPDWSFWGWPEVNIRPWAPLLEEMAAEMGRLPWADREPYAYWKGNPTVSAERADLRRCNDSSSSGGTRVFWQDWGAAIRDGFRDSNLAKQCRYRYKIYVRGRSWSVSLKYILACDSPVLLIATPFKDFFSRGLVAGRHYWPIDPGARKCADINFAVHDWGNAHPEQARRMAEEGSGFARHQLSMDYVYDYMLHLLTQYAGLLRYKPTVPENAVELCAETVACPAAHHSNRREFDFMMQSRERYIADYQPCTLPPPFTDRHIREMTRRDQEVRANVHKMMTTVTP

SEQ ID NO: 16397 - protein, 568 aa, Zea mays subsp. mays
  misc_feature (1)..(568): Ceres Seq. ID no. 12352175
MDEDDGDDEEDLQDEQHTRTIRTSTKTAEASSSAERRVPAWWRRRRAQKLVPTRGVGLVIAGLLVLVLLVVVGGGGNTSRRRWIHLDYASSFLLGSGGGGGLKQHQWPPHHVPSPAADLVPIPFSCGGNGSACPRRQTATSPPSPSPSSSSPPAATKSSSSKNKQPPPQCPDYFRFIHSDLSPWRETGITREAVERGRHRAAFRLVVVDGRAYVETYHRVFQTRDTFTQWGIAQLLARYPGRVPDLDLMFNCEDMPEVKVKPSEESSAPPLFRYCKDDSTVDIVFPDWSFWGWPEVNIRPWAPLLEEMAAEMGRLPWADREPYAYWKGNPTVSAERADLRRCNDSSSSGGTRVFWQDWGAAIRDGFRDSNLAKQCRYRYKIYVRGRSWSVSLKYILACDSPVLLIATPFKDFFSRGLVAGRHYWPIDPGARKCADINFAVHDWGNAHPEQARRMAEEGSGFARHQLSMDYVYDYMLHLLTQYAGLLRYKPTVPENAVELCAETVACPAAHHSNRREFDFMMQSRERYIADYQPCTLPPPFTDRHIREMTRRDQEVRANVHKMMTTVTP

SEQ ID NO: 16398 - protein, 320 aa, Zea mays subsp. mays
  misc_feature (1)..(320): Ceres Seq. ID no. 12352176
MFNCEDMPEVKVKPSEESSAPPLFRYCKDDSTVDIVFPDWSFWGWPEVNIRPWAPLLEEMAAEMGRLPWADREPYAYWKGNPTVSAERADLRRCNDSSSSGGTRVFWQDWGAAIRDGFRDSNLAKQCRYRYKIYVRGRSWSVSLKYILACDSPVLLIATPFKDFFSRGLVAGRHYWPIDPGARKCADINFAVHDWGNAHPEQARRMAEEGSGFARHQLSMDYVYDYMLHLLTQYAGLLRYKPTVPENAVELCAETVACPAAHHSNRREFDFMMQSRERYIADYQPCTLPPPFTDRHIREMTRRDQEVRANVHKMMTTVTP

SEQ ID NO: 16399 - DNA, 914 bp, Zea mays subsp. mays
  misc_feature (1)..(914): Ceres Seq. ID no. 12352193
atcccggggcacgaaaccctaactgaacccatggcgctctccgccgctcgccggctctccaccaccgcgtcctcctcctccgtcgccgaagcgccgccaaagctctcttcgctgttccagaacccgaagcctcgaccgctgcctgtccgcggcgtcgaggagccgcggcggggggccaggcccaggccgaggcagccctgggaggaggaggcgggggcgctgctgctgcggctccacaaggggaggtacctcccgggccccgacctctcgtcggcgccgcacgctgtctcacccgacgccgtcaagaccgccgccgagtggttcgggcatgaccaccagcccgtcgccaaatggctgtcagggagtgatttgaagaagcttgccttgtttgggtgtcccactgttgagcgaagaacggtttttgcatcaaaaagattaagagccttcttcaacatccaggaagacaaaatatgcggttcctgtaaactgagaagttcgtgcaagtttgtgaaccaggaagtggccaggcataatagagtgattctatcagatacgatgagaattatctccttgtttgtactggacgcttgcccacaagagctcgagattaccgctgagttaaaagccagtgtctgcaagctgctaaaggacgccataaatctcagcagttaactgctgagcattacggagcagaagtttgctagttttcttgtccttgtagttctaatagcgtgctgtcagcatttatctggacttatggaggaaattgccgaggcccatgtttgacgttgcgctcgcaatcgctccctgtgaaggttggagtggtgaaccccagcgacttccttctgatccgtgttttcttttgtgcaactaatatgaagatgaagtacagagtatgtaaaaacttaagatgc

SEQ ID NO: 16400 - protein, 223 aa, Zea mays subsp. mays
  misc_feature (1)..(223): Ceres Seq. ID no. 12352194
IPGHETLTEPMALSAARRLSTTASSSSVAEAPPKLSSLFQNPKPRPLPVRGVEEPRRGARPRPRQPWEEEAGALLLRLHKGRYLPGPDLSSAPHAVSPDAVKTAAEWFGHDHQPVAKWLSGSDLKKLALFGCPTVERRTVFASKRLRAFFNIQEDKICGSCKLRSSCKFVNQEVARHNRVILSDTMRIISLFVLDACPQELEITAELKASVCKLLKDAINLSS

SEQ ID NO: 16401 - protein, 213 aa, Zea mays subsp. mays
  misc_feature (1)..(213): Ceres Seq. ID no. 12352195
MALSAARRLSTTASSSSVAEAPPKLSSLFQNPKPRPLPVRGVEEPRRGARPRPRQPWEEEAGALLLRLHKGRYLPGPDLSSAPHAVSPDAVKTAAEWFGHDHQPVAKWLSGSDLKKLALFGCPTVERRTVFASKRLRAFFNIQEDKICGSCKLRSSCKFVNQEVARHNRVILSDTMRIISLFVLDACPQELEITAELKASVCKLLKDAINLSS

SEQ ID NO: 16402 - DNA, 1331 bp, Zea mays subsp. mays
  misc_feature (1)..(1331): Ceres Seq. ID no. 12352196
aaaaaggggaagttctcgccagcgtgctgccttgcaagctgctaactagaataggaattcgacgtcgcccccgcccccccctgtgaaaattcgtgatgcggagaacagctaccgccgccctcgtcctcgtccccctcctcgctgcggcggtacagacctccgccctgcctttcatcgtcctgcacgggattggggaccagtgcgccaaccatggcgttgccaagttcactaaacttctcgccgattggtccggctccgacggctactgcctagagattggcagaggaacatgggactcttgggtcatgcctcttcaacaacaggctgatataatctgcaacaaggtcaaggaaatgaaacaactgagaggtggctacaacatagttggtctgtctcaggggaacttgattggtcgagcagtggttgagtactgtgatgatggaccgccggtcaagaatttcatctctctaggaggtcctcatgctggtaccgcttcagtgcctctttgtggttctggatttttttgcattattgttgatgctctgatcaaattggagatctactcagactatgtgcaggaacatcttgcacctagtggctacctcaaaatcccaactgatatggcagattatctgaagagttgtaggtttcttccaaaacttaacaatgaaattccagataaaagaaatgccacctacaaggaaagattcagtagcttagagaatttggttctgattatgtttcaggatgatgcagtcctgataccacgagaaacggcatggtttggttactaccctgatggagcctttgatccagttctaccacctcagaagacgaaactgtatgaggaagactggattggtttgaagacactggatgaagcagggcgggtgaagtttgtgtctgtgccgggaggtcatcttggtatctccaaaggtgacatgaagaagtacattgtgccttacctgacaaacaaaaaggcatcggtgacggtttctgatttgctagttgccatttggcacgctgtgcttgggctggcactggcagagggtgatgacgctgttttgatttgatgcatgggcttccgacagtggcttggattgttacgctgcctctgcttggttggcttggcactcagtcacaaataagattcatctcatctcatattctgttctgttggaaggccctttgattcatggtcacagaaataacagaatgcatgcatgcatgcatccaactagctagctagcttatagtcggagacaatctgtgcggtgcagctagttaattatctatctatacagggcaggcccatgccatgagtattgttg

SEQ ID NO: 16403 - protein, 325 aa, Zea mays subsp. mays
  misc_feature (1)..(325): Ceres Seq. ID no. 12352197
MRRTATAALVLVPLLAAAVQTSALPFIVLHGIGDQCANHGVAKFTKLLADWSGSDGYCLEIGRGTWDSWVMPLQQQADIICNKVKEMKQLRGGYNIVGLSQGNLIGRAVVEYCDDGPPVKNFISLGGPHAGTASVPLCGSGFFCIIVDALIKLEIYSDYVQEHLAPSGYLKIPTDMADYLKSCRFLPKLNNEIPDKRNATYKERFSSLENLVLIMFQDDAVLIPRETAWFGYYPDGAFDPVLPPQKTKLYEEDWIGLKTLDEAGRVKFVSVPGGHLGISKGDMKKYIVPYLTNKKASVTVSDLLVAIWHAVLGLALAEGDDAVLI

SEQ ID NO: 16404 - protein, 255 aa, Zea mays subsp. mays
  misc_feature (1)..(255): Ceres Seq. ID no. 12352198
MPLQQQADIICNKVKEMKQLRGGYNIVGLSQGNLIGRAVVEYCDDGPPVKNFISLGGPHAGTASVPLCGSGFFCIIVDALIKLEIYSDYVQEHLAPSGYLKIPTDMADYLKSCRFLPKLNNEIPDKRNATYKERFSSLENLVLIMFQDDAVLIPRETAWFGYYPDGAFDPVLPPQKTKLYEEDWIGLKTLDEAGRVKFVSVPGGHLGISKGDMKKYIVPYLTNKKASVTVSDLLVAIWHAVLGLALAEGDDAVLI

SEQ ID NO: 16405 - protein, 239 aa, Zea mays subsp. mays
  misc_feature (1)..(239): Ceres Seq. ID no. 12352199
MKQLRGGYNIVGLSQGNLIGRAVVEYCDDGPPVKNFISLGGPHAGTASVPLCGSGFFCIIVDALIKLEIYSDYVQEHLAPSGYLKIPTDMADYLKSCRFLPKLNNEIPDKRNATYKERFSSLENLVLIMFQDDAVLIPRETAWFGYYPDGAFDPVLPPQKTKLYEEDWIGLKTLDEAGRVKFVSVPGGHLGISKGDMKKYIVPYLTNKKASVTVSDLLVAIWHAVLGLALAEGDDAVLI

SEQ ID NO: 16406 - DNA, 1935 bp, Zea mays subsp. mays
  misc_feature (1)..(1935): Ceres Seq. ID no. 12352214
accccattcgcatctctgcttctttctgcttgggtgccctctgccctgaccacagggcccaaccatatcttcttcctcacacagagacactgagcgagcgagcttgagatcgatctcaggaggcggccggcggcggcagcagcagcagagcttgttggcgccgccatggcgataggtggcttcgtggaagcccctgccggcgccgactacggtggccgcgtgacgtccttcgtggtgctctcctgcatcgtagccggtagcggcggcatcctcttcggctacgacctcggcatctcaggtggggttacctccatggagtcgttccttagaaagttcttcccggacgtgtaccaccagatgaaaggagacaaggacgtgagcaactactgccgcttcgacagcgagcttctcaccgtcttcacctcctccctctacatcgccggcctcgtcgccacgctcttcgcctcctccgtcaccaggaggttcggccgccgcacctccatacttatcggaggcaccgtcttcgtcatcggctccgtcttcggcggggcagccgtcaacgtatacatgctcctactcaacaggatactccttggagtaggcctcggattcacaaaccagtccatcccgctgtacctctcagagatggcgccaccgcagtaccgtggcgccatcaacaacggcttcgagctctgcatcagcatcggcatcctcatcgccaacctcatcaactacggcgtggagaagatagcaggtggatggggctggaggatctctctgtccctggccgccgtgccggccgcgttcctcaccgtcggcgccatctacctgcccgagacgcccagcttcatcatccaacgccgcggcggcagcaacaacgtcgacgaggcaaggctgctcctccagaggctgcgtggcaccaccagggtccagaaagagctcgacgatctcgtgtccgcgaccaggacgaccaccacagggcgtcccttccgcaccatactgaggcgcaagtacaggccgcagctggtcatagctctcctcgtacccttcttcaaccaggtcaccggcatcaacgtcatcaacttctacgcgccggtcatgttccggaccatcgggctcaaggagagcgcgtccctcatgtcggccgtggtcacgcgcgtctgcgccacggccgccaacgtggtggccatggtggtcgtggacaggttcggccgccggaagctcttcctggtgggcggcgtgcagatgatcctgtcgcaggccatggtgggagcggtgctggccgccaagttccaggagcacggagggatggagaaggagtacgcgtacctggtgctcgtcatcatgtgcgtcttcgtcgcgggcttcgcctggtcctggggccctctcacctacctggtgcccaccgagatctgcccgctggagatcaggtcggcggggcagagcgtcgtcatcgccgtcatcttcttcgtcaccttcctcatcggccagaccttcctggcgatgctgtgccacctcaagttcggcaccttcttcctcttcggcggctgggtgtgcgtcatgacgctcttcgtgtatttcttcctgccggagaccaagcagctgcccatggcagcagatggaacaggtctggaggacccactggttttggaaaaggattgtagacgaagatgcagcaggggagcaaccgagagaggaagcagcaggaaccatagctctgtcgtccacgtccaccacaacatagtcatcatcaacaatactcatggcatgggcctgccctgtatagatagataattaactagctgcaccgcacagattgtctccgactataagctagctagctagttggatgcatgcatgcatgcattctgttatttctgtgaccatgaatcaaagggccttccaacagaacagaatatgagatgagatgaatcc

SEQ ID NO: 16407 - protein, 542 aa, Zea mays subsp. mays
  misc_feature (1)..(542): Ceres Seq. ID no. 12352215
MAIGGFVEAPAGADYGGRVTSFVVLSCIVAGSGGILFGYDLGISGGVTSMESFLRKFFPDVYHQMKGDKDVSNYCRFDSELLTVFTSSLYIAGLVATLFASSVTRRFGRRTSILIGGTVFVIGSVFGGAAVNVYMLLLNRILLGVGLGFTNQSIPLYLSEMAPPQYRGAINNGFELCISIGILIANLINYGVEKIAGGWGWRISLSLAAVPAAFLTVGAIYLPETPSFIIQRRGGSNNVDEARLLLQRLRGTTRVQKELDDLVSATRTTTTGRPFRTILRRKYRPQLVIALLVPFFNQVTGINVINFYAPVMFRTIGLKESASLMSAVVTRVCATAANVVAMVVVDRFGRRKLFLVGGVQMILSQAMVGAVLAAKFQEHGGMEKEYAYLVLVIMCVFVAGFAWSWGPLTYLVPTEICPLEIRSAGQSVVIAVIFFVTFLIGQTFLAMLCHLKFGTFFLFGGWVCVMTLFVYFFLPETKQLPMAADGTGLEDPLVLEKDCRRRCSRGATERGSSRNHSSVVHVHHNIVIINNTHGMGLPCIDR

SEQ ID NO: 16408 - protein, 493 aa, Zea mays subsp. mays
  misc_feature (1)..(493): Ceres Seq. ID no. 12352216
MESFLRKFFPDVYHQMKGDKDVSNYCRFDSELLTVFTSSLYIAGLVATLFASSVTRRFGRRTSILIGGTVFVIGSVFGGAAVNVYMLLLNRILLGVGLGFTNQSIPLYLSEMAPPQYRGAINNGFELCISIGILIANLINYGVEKIAGGWGWRISLSLAAVPAAFLTVGAIYLPETPSFIIQRRGGSNNVDEARLLLQRLRGTTRVQKELDDLVSATRTTTTGRPFRTILRRKYRPQLVIALLVPFFNQVTGINVINFYAPVMFRTIGLKESASLMSAVVTRVCATAANVVAMVVVDRFGRRKLFLVGGVQMILSQAMVGAVLAAKFQEHGGMEKEYAYLVLVIMCVFVAGFAWSWGPLTYLVPTEICPLEIRSAGQSVVIAVIFFVTFLIGQTFLAMLCHLKFGTFFLFGGWVCVMTLFVYFFLPETKQLPMAADGTGLEDPLVLEKDCRRRCSRGATERGSSRNHSSVVHVHHNIVIINNTHGMGLPCIDR

SEQ ID NO: 16409 - protein, 478 aa, Zea mays subsp. mays
  misc_feature (1)..(478): Ceres Seq. ID no. 12352217
MKGDKDVSNYCRFDSELLTVFTSSLYIAGLVATLFASSVTRRFGRRTSILIGGTVFVIGSVFGGAAVNVYMLLLNRILLGVGLGFTNQSIPLYLSEMAPPQYRGAINNGFELCISIGILIANLINYGVEKIAGGWGWRISLSLAAVPAAFLTVGAIYLPETPSFIIQRRGGSNNVDEARLLLQRLRGTTRVQKELDDLVSATRTTTTGRPFRTILRRKYRPQLVIALLVPFFNQVTGINVINFYAPVMFRTIGLKESASLMSAVVTRVCATAANVVAMVVVDRFGRRKLFLVGGVQMILSQAMVGAVLAAKFQEHGGMEKEYAYLVLVIMCVFVAGFAWSWGPLTYLVPTEICPLEIRSAGQSVVIAVIFFVTFLIGQTFLAMLCHLKFGTFFLFGGWVCVMTLFVYFFLPETKQLPMAADGTGLEDPLVLEKDCRRRCSRGATERGSSRNHSSVVHVHHNIVIINNTHGMGLPCIDR

SEQ ID NO: 16410 - DNA, 1163 bp, Zea mays subsp. mays
  misc_feature (1)..(1163): Ceres Seq. ID no. 12352218
actctcccgactcaggatttatacccacccccgtcggtcgatcccctccctccctcccgccgccgccgccgccgcccgtagccaagaccaagatcccgtctcgcccggcgtcgcacctgacctaaccctgagccctgtgatatgccggttcaggtcggaggcagcaaggtggcggacccgaggccggccagggtggtggacctatcgcccgtaggcgacaggtcccgcgcctcctccaagaagaaccgccgccgccacaagaaggccgacgccgcctcttccatctcgcccatgcagaggctcttcgacaccagcagggaggtcttcgccaactcctacccgggcttcgtcccgccgccggacgccgtcgcccgcctctcgggcctcctcaatgagctgaagcctcgtgacgtcagggttgccccaagcatgtccgtcttcaagcatgccgatcctacaagcccccctccagttacctatttgcacttctacggttcctccgagttttcgtttggtatcttctgtttaccgaaatcggcaattattcccctccacaaccatcctgggatgacagtgtttagcaagatactgtttggttccatgcacctcaagtcctatgattgggctaaaagtctgccggcgggtagcaacgataatgcacttgagaactctgatggagcaggagctcgtctggccaaggtgaacacagatgccgtttttgacgcttcatctgagaccgtagttctgtaccctgaaaatggagggaacttgcactgctttacggcgctgaccccttgtgccgtgctggatgtgatgggccctccctacaaccgtgctcaaggaagggattgcgcgtattacagcgaatcgccctactcgtgtgctggagatgcacaatattcttggctcaaagaggttcacagcacatttgagatggaaggcataaagatggagcccaacttcatcgtctaataattaagcaggcatggcatggcatgtcatcgtaatgctgctagtttcatgtagataatctctagctgcgggggtgtagtacaactggaagacggccagatgctcttttgacattcgtttgccttaatttcatatgcctccctttatgtatgttaacaattcgaatcttgggtcatggtcactttttttcc

SEQ ID NO: 16411 - protein, 276 aa, Zea mays subsp. mays
  misc_feature (1)..(276): Ceres Seq. ID no. 12352219
MPVQVGGSKVADPRPARVVDLSPVGDRSRASSKKNRRRHKKADAASSISPMQRLFDTSREVFANSYPGFVPPPDAVARLSGLLNELKPRDVRVAPSMSVFKHADPTSPPPVTYLHFYGSSEFSFGIFCLPKSAIIPLHNHPGMTVFSKILFGSMHLKSYDWAKSLPAGSNDNALENSDGAGARLAKVNTDAVFDASSETVVLYPENGGNLHCFTALTPCAVLDVMGPPYNRAQGRDCAYYSESPYSCAGDAQYSWLKEVHSTFEMEGIKMEPNFIV

SEQ ID NO: 16412 - protein, 226 aa, Zea mays subsp. mays
  misc_feature (1)..(226): Ceres Seq. ID no. 12352220
MQRLFDTSREVFANSYPGFVPPPDAVARLSGLLNELKPRDVRVAPSMSVFKHADPTSPPPVTYLHFYGSSEFSFGIFCLPKSAIIPLHNHPGMTVFSKILFGSMHLKSYDWAKSLPAGSNDNALENSDGAGARLAKVNTDAVFDASSETVVLYPENGGNLHCFTALTPCAVLDVMGPPYNRAQGRDCAYYSESPYSCAGDAQYSWLKEVHSTFEMEGIKMEPNFIV

SEQ ID NO: 16413 - protein, 180 aa, Zea mays subsp. mays
  misc_feature (1)..(180): Ceres Seq. ID no. 12352221
MSVFKHADPTSPPPVTYLHFYGSSEFSFGIFCLPKSAIIPLHNHPGMTVFSKILFGSMHLKSYDWAKSLPAGSNDNALENSDGAGARLAKVNTDAVFDASSETVVLYPENGGNLHCFTALTPCAVLDVMGPPYNRAQGRDCAYYSESPYSCAGDAQYSWLKEVHSTFEMEGIKMEPNFIV

SEQ ID NO: 16414 - DNA, 1524 bp, Zea mays subsp. mays
  misc_feature (1)..(1524): Ceres Seq. ID no. 12352222
aggatacacctatctgcttctgctagctttctttacagagacgacaggatagctagagccgagggagagatcagggtcgacgatagatgggggtgcatggggctgttgccaaacgaccctgcagcaggcagcatctcctcctcctcgtcgtcgctattctcataggtagctacttcgccgccgccgccgccgccgctgcggacgagcagaaaagcaggaatagaggagctggtcgtcgcagccgcaggaggcgggccgcggcggcagtgacgtcgccgcctgcgcccctcatggtgcccatcaccatcctcgagtccgccgtcgacttgggagccgtgtgcatggacggaacaccgcctgcttaccacctgcacccgggctccggagcagggaacaacagctggatcgtcaacctggaggtgaacgggttttacttccgcgggcagcgcgtctgggacgccaccgtccggcacctcctctccatcgggatggccgctgcggaccaggtgttgctcgctggctgctccgccggcgggctggcggtcatactgcactgcgaccagttccaggccttcttccctcggtccaacaacgccgccgccgccggcggtaccaccaccactactaccgtcaagtgcctcgccgacgccggcctcttcctcgacgccatcgacgtctccggcgggcgcagccttcggtcctactactccgacatcgtggccatgcagggggtgggtcccaacctgccgccggcgtgcactgcccgtttggacaccgcctcgtgcttcttccctcagaacgtgatcgatggcgtaaacacccccatcttcctgctcaacgcagcgtacgacgcctggcagatacaggagagcctggcacccagcggagctgaccccagcggagcctggcgagcctgcaagtccaaccactctgcctgcgacgcgacccagatgaaattcctgcaaggtttcagggaccagatggtagcgtccgtgttgggcgggcgcttcgccggctccaggagcaacaacgggctcttcatcaactcctgcttcgcgcactgccagtccgagctgccggccacctggagctggagccacgcggcaggtgcctcccccgccatccaaagcagggggattgccaagtcagtgggcgactggtacttcggtcgagctcaagtcaaggcgatcgactgcccctacccctgcgacggaacatgccgcaacatcatatgatcacagacagacaggctcatgttgttgtaccctgtggctttgtgccgcacacgtcggccgtgtccgctgcagcttgcataactctcgtgggccactaaaagccgacggaattaattgattctcgtcggtggtcaacagaaattaattaaaccttgtccacaaagtcccatcggttctcaagaaccgacgagaattactaattttcgtcgatatattgcttattctcaggtgtgagaaatgttcccgtcattattcatcaagaatggcactcgacatgtgtgttttgccg

SEQ ID NO: 16415 - protein, 382 aa, Zea mays subsp. mays
  misc_feature (1)..(382): Ceres Seq. ID no. 12352223
MGVHGAVAKRPCSRQHLLLLVVAILIGSYFAAAAAAAADEQKSRNRGAGRRSRRRRAAAAVTSPPAPLMVPITILESAVDLGAVCMDGTPPAYHLHPGSGAGNNSWIVNLEVNGFYFRGQRVWDATVRHLLSIGMAAADQVLLAGCSAGGLAVILHCDQFQAFFPRSNNAAAAGGTTTTTTVKCLADAGLFLDAIDVSGGRSLRSYYSDIVAMQGVGPNLPPACTARLDTASCFFPQNVIDGVNTPIFLLNAAYDAWQIQESLAPSGADPSGAWRACKSNHSACDATQMKFLQGFRDQMVASVLGGRFAGSRSNNGLFINSCFAHCQSELPATWSWSHAAGASPAIQSRGIAKSVGDWYFGRAQVKAIDCPYPCDGTCRNII

SEQ ID NO: 16416 - protein, 314 aa, Zea mays subsp. mays
  misc_feature (1)..(314): Ceres Seq. ID no. 12352224
MVPITILESAVDLGAVCMDGTPPAYHLHPGSGAGNNSWIVNLEVNGFYFRGQRVWDATVRHLLSIGMAAADQVLLAGCSAGGLAVILHCDQFQAFFPRSNNAAAAGGTTTTTTVKCLADAGLFLDAIDVSGGRSLRSYYSDIVAMQGVGPNLPPACTARLDTASCFFPQNVIDGVNTPIFLLNAAYDAWQIQESLAPSGADPSGAWRACKSNHSACDATQMKFLQGFRDQMVASVLGGRFAGSRSNNGLFINSCFAHCQSELPATWSWSHAAGASPAIQSRGIAKSVGDWYFGRAQVKAIDCPYPCDGTCRNII

SEQ ID NO: 16417 - protein, 297 aa, Zea mays subsp. mays
  misc_feature (1)..(297): Ceres Seq. ID no. 12352225
MDGTPPAYHLHPGSGAGNNSWIVNLEVNGFYFRGQRVWDATVRHLLSIGMAAADQVLLAGCSAGGLAVILHCDQFQAFFPRSNNAAAAGGTTTTTTVKCLADAGLFLDAIDVSGGRSLRSYYSDIVAMQGVGPNLPPACTARLDTASCFFPQNVIDGVNTPIFLLNAAYDAWQIQESLAPSGADPSGAWRACKSNHSACDATQMKFLQGFRDQMVASVLGGRFAGSRSNNGLFINSCFAHCQSELPATWSWSHAAGASPAIQSRGIAKSVGDWYFGRAQVKAIDCPYPCDGTCRNII

SEQ ID NO: 16418 - DNA, 1375 bp, Zea mays subsp. mays
  misc_feature (1)..(1375): Ceres Seq. ID no. 12352226
gatctggccacccgagcacggccaaaaaggcgctcgcccagcgcttcaccagatagagcaacacagctcagctcagctcagcctcggaccagcagccggcgtgcggagctgcggtgcggcgtcgtgcgtgcgccagaacaggatgctgcccgccgggtgcggcctcctctcgtgcctccgcctcgacaagcagggcgacgcgggccgaaccgacccccgcgtcgcggacgagcccgccgcgtcgctcggcaagggcagcgggtcgtcggccaggcggttcgcgtgggccgagatcgagtccgtcacggcgggcttctcctcccgcgtcatcggccagggcggcttcagcaccgtctacctggcctgcctctcctcctcccgcctcggcgccgtcaaggtgcagcgcagcagcgagcgcctccaccgcgccttccgccaggagctccacgtgctcctctcgctccgccacccgcacatcgtccgcctgctcggctactgcgacgaacgagaggaaggcgtgttggtctttgagtacgcaccgaacggcgacctccacgagaggctccacggcagcggcaaggcgccgctcccgtgggcgcgccgcatggcggtggcgttccaggtggccatggcgctggagcacctccacgagagccgcgacccggcggtgatccacggcgacgtgaaggcctccaacgtgctgctggacgccagcctcgacgccaagctctgcgacctgggcttcgcgcacgtgggcttctcggccgcgctccagccgccggaggccagcggggccagggccagggcgtcgtcggcgccgcgcgccgtcgtcatgggctccccgggctacgtggacccgcacttcctccgctccggcgtcgccacccaagaagggcgacgtgtacagcttcggcgtgctgctgctcgagctcctcacggggagggaggccatatgcgccgacacggggcgccggctcgccgccgcggtgggtcctacgctcggcgaaggaagagtagcggaggcagtggaccggaggctcggagacgagtacgacacgcacgaggcggccaccgtggcggcgcttgcgctgcggtgcatcggcgacggccccgggacgcggccctccatggtggaggtggttcgcgagctccaggagaagacgaccgcgctgatctcggccgctggatgcaaacctgccggcaagatgggttcctgagctgtattgtcggccgaagaagaccgtaaataccattagctttgtttagagagagtagaaggtgaaggtaatgtttttttatttattttacttatataagtttcttgatgtagtggattagtagtagttgaatcggattacatagaaaaatttccgtg

SEQ ID NO: 16419 - protein, 414 aa, Zea mays subsp. mays
  misc_feature (1)..(414): Ceres Seq. ID no. 12352227
IWPPEHGQKGARPALHQIEQHSSAQLSLGPAAGVRSCGAASCVRQNRMLPAGCGLLSCLRLDKQGDAGRTDPRVADEPAASLGKGSGSSARRFAWAEIESVTAGFSSRVIGQGGFSTVYLACLSSSRLGAVKVQRSSERLHRAFRQELHVLLSLRHPHIVRLLGYCDEREEGVLVFEYAPNGDLHERLHGSGKAPLPWARRMAVAFQVAMALEHLHESRDPAVIHGDVKASNVLLDASLDAKLCDLGFAHVGFSAALQPPEASGARARASSAPRAVVMGSPGYVDPHFLRSGVATQEGRRVQLRRAAARAPHGEGGHMRRHGAPARRRGGSYARRRKSSGGSGPEARRRVRHARGGHRGGACAAVHRRRPRDAALHGGGGSRAPGEDDRADLGRWMQTCRQDGFLSCIVGRRRP

SEQ ID NO: 16420 - protein, 367 aa, Zea mays subsp. mays
  misc_feature (1)..(367): Ceres Seq. ID no. 12352228
MLPAGCGLLSCLRLDKQGDAGRTDPRVADEPAASLGKGSGSSARRFAWAEIESVTAGFSSRVIGQGGFSTVYLACLSSSRLGAVKVQRSSERLHRAFRQELHVLLSLRHPHIVRLLGYCDEREEGVLVFEYAPNGDLHERLHGSGKAPLPWARRMAVAFQVAMALEHLHESRDPAVIHGDVKASNVLLDASLDAKLCDLGFAHVGFSAALQPPEASGARARASSAPRAVVMGSPGYVDPHFLRSGVATQEGRRVQLRRAAARAPHGEGGHMRRHGAPARRRGGSYARRRKSSGGSGPEARRRVRHARGGHRGGACAAVHRRRPRDAALHGGGGSRAPGEDDRADLGRWMQTCRQDGFLSCIVGRRRP

SEQ ID NO: 16421 - protein, 213 aa, Zea mays subsp. mays
  misc_feature (1)..(213): Ceres Seq. ID no. 12352229
MAVAFQVAMALEHLHESRDPAVIHGDVKASNVLLDASLDAKLCDLGFAHVGFSAALQPPEASGARARASSAPRAVVMGSPGYVDPHFLRSGVATQEGRRVQLRRAAARAPHGEGGHMRRHGAPARRRGGSYARRRKSSGGSGPEARRRVRHARGGHRGGACAAVHRRRPRDAALHGGGGSRAPGEDDRADLGRWMQTCRQDGFLSCIVGRRRP

SEQ ID NO: 16422 - DNA, 1415 bp, Zea mays subsp. mays
  misc_feature (1)..(1415): Ceres Seq. ID no. 12352230
atcgaatcggatcggaggggaagcaggagcccgcagggggcggctagcgctggtgcgtgcttcctccattatattatcattgcgcctcgtcctccccaatcctcattgcccatcacattccatcgaccagtctcaattcaaggagctgaggacgacctgtccgtccggagctgatcgagaaacggaggggcggttccagtttcagtccagctagctagctagctagaagatcccattcgctgacagatgggttcctacatccaaggagatgatgaggtccctgtgtacgagtcgggcgccgaggtgcttgcgaaggtgcaagagaaatgggcggcggcggcggcatcgcggcctcctccctacccggccatgtactcgagcgtgttcggcggcatcatcctggacccggccatgatggttctccccatcgacgaccacatggtccaccggggccacggcgtgttcgacacggccatgatcctggacggcgccctgtacgagctggacgcgcacctggaccgcttcctccggtcggccgcggcggcgcgcgtggacacggccccgttcccgcgcgaggcgctgcggcgcatcctgatccagatgaccgccgcctcgggctgccgcatgggctccatccgctactggctcagctccgggcccggcgacttcctgctgtcatccaggggctgcccgtcgccggcgttctacggcgtggtgatcgcgtcggagtacgagcagtgcggggtggacggcaccggggtgcgcgcggtcacggccacggtgcccatgaagccgccgcagttcgcgaccgtgaagaacgtgaactacctgcccaacgtgctgtccatcatggacgccgaggaccgcggcgccttcgcgtccgtgtgggtggacgaccaagggtacgtggccgagggccccatggtgaacgtggcgttcgtgacgcccgagcgggagctcgtgctcccggccttcgacaagatcctcagcgggtgcacggccaagaggatgctcgcgctggcgcctcgcctcgtggacgccggcctgctcgcgggcgtcagcaccagggacatcacggccgaggacgccaagcgcagcgccgagatggcgttcgtcggcagcggcctccccgtgctgcccgtcgtcgagtgggacggcaaacccatcggagacgggaaggttgggaagctgatgccggcgctgtctgatctgctgtgggaggacatgaagtccggtcccgacaggatccccgttccatacaagcagtagcctgaagcgaaggcgaagccatgacatctctctctctgtgtgtgtgtgtgtttgcagtcgaatggtgattgccttgcctgaataaaaataaacctctctctgtatatctgagcgaatcgttttggaaatacgagcagattccattc

SEQ ID NO: 16423 - protein, 340 aa, Zea mays subsp. mays
  misc_feature (1)..(340): Ceres Seq. ID no. 12352231
MGSYIQGDDEVPVYESGAEVLAKVQEKWAAAAASRPPPYPAMYSSVFGGIILDPAMMVLPIDDHMVHRGHGVFDTAMILDGALYELDAHLDRFLRSAAAARVDTAPFPREALRRILIQMTAASGCRMGSIRYWLSSGPGDFLLSSRGCPSPAFYGVVIASEYEQCGVDGTGVRAVTATVPMKPPQFATVKNVNYLPNVLSIMDAEDRGAFASVWVDDQGYVAEGPMVNVAFVTPERELVLPAFDKILSGCTAKRMLALAPRLVDAGLLAGVSTRDITAEDAKRSAEMAFVGSGLPVLPVVEWDGKPIGDGKVGKLMPALSDLLWEDMKSGPDRIPVPYKQ

SEQ ID NO: 16424 - protein, 299 aa, Zea mays subsp. mays
  misc_feature (1)..(299): Ceres Seq. ID no. 12352232
MYSSVFGGIILDPAMMVLPIDDHMVHRGHGVFDTAMILDGALYELDAHLDRFLRSAAAARVDTAPFPREALRRILIQMTAASGCRMGSIRYWLSSGPGDFLLSSRGCPSPAFYGVVIASEYEQCGVDGTGVRAVTATVPMKPPQFATVKNVNYLPNVLSIMDAEDRGAFASVWVDDQGYVAEGPMVNVAFVTPERELVLPAFDKILSGCTAKRMLALAPRLVDAGLLAGVSTRDITAEDAKRSAEMAFVGSGLPVLPVVEWDGKPIGDGKVGKLMPALSDLLWEDMKSGPDRIPVPYKQ

SEQ ID NO: 16425 - protein, 293 aa, Zea mays subsp. mays
  misc_feature (1)..(293): Ceres Seq. ID no. 12352233
MGGGGGIAASSLPGHVLERVRRHHPGPGHDGSPHRRPHGPPGPRRVRHGHDPGRRPVRAGRAPGPLPPVGRGGARGHGPVPARGAAAHPDPDDRRLGLPHGLHPLLAQLRARRLPAVIQGLPVAGVLRRGDRVGVRAVRGGRHRGARGHGHGAHEAAAVRDREERELPAQRAVHHGRRGPRRLRVRVGGRPRVRGRGPHGERGVRDARAGARAPGLRQDPQRVHGQEDARAGASPRGRRPARGRQHQGHHGRGRQAQRRDGVRRQRPPRAARRRVGRQTHRRREGWEADAGAV

SEQ ID NO: 16426 - DNA, 1389 bp, Zea mays subsp. mays
  misc_feature (1)..(1389): Ceres Seq. ID no. 12352271
gaagtaagcgtggatgttgcccacgtggcccccggctcctccagaagtagccatacggattcagatcgcggccgcggcgactccccgagcagaagaacccgatcgaacgcggccgcggcggcgactccccgatctcagatccctgctgcgagcgaagtgttcgattcgagcagagatggcggcggcatgggcggtgctggctttgttcctcgtcgcggcgcaggtggcggcggcggcgccggtcacggcgccagcgttcctgtgggcgcccaaaaactacggattcagctctgatgatgctaaggaggtagtccattaccaaacaatctcaccaaagagcttagctaaatctgttctcgaggaaggtggctggtcaaacttcatgtgctcaagggaggatactcagaataatgttgatgttgccattgtttttattggctcaaagctgcaatcgtcagacatatctaaagataagcaagttgatccagctttagcagacacactgaagctctccttcacacgctcagagttttccatggcattcccctacgtttccaccacagtcgacgagagactagaggactcgttgctatccagctttgccgagaactgcaacaatggtttcggaagaaaccgcgtcacctacacagacacgtgtaccggtcaagatctgaagaaataccacaacatggatgccatcaatgacctggtagtgtcaggggtagcgtcaaggagagtcaaccacccaagtggacagaccgatgtaatcgtcttctgtagcggcgggttcgagaatccaggcactgcgaaatcagaaggagagctgctttcccagcttgtggacttgctggacttgtcgggagccaaatatacggtcctctatgcgtcccaaccgtctggtttgctggagagcccttcgggcctgccgctgggtaggcatctcgcggagaagaagactaacggcacgaaagctgtccagggcgaaaaatgcgatggcgagtgcctcgtcaaatctagtctcctcgaaggaactttcgttgggatagtgcttctcatcatcctgatatcaggactcatgtgcatgatggggatcgatactccctcgaggtttgaagctccccaggagtcttgatctctcccttggactgcagaatccgcgggggggttgtgacgagggcacgcggcggcgttgaggggggccggtgttctgttggtctgcactgtggatatatatcgtttagcttcccatttggaagggagtacgccttgtgtatttttttttaccgagccaactgtcactcacaatgtgctagaattttttggtgtaatatttggctatttgcgtttcgcgtctacggacaactaataagctgaggcctgaggcattgc

SEQ ID NO: 16427 - protein, 372 aa, Zea mays subsp. mays
  misc_feature (1)..(372): Ceres Seq. ID no. 12352272
MLPTWPPAPPEVAIRIQIAAAATPRAEEPDRTRPRRRLPDLRSLLRAKCSIRAEMAAAWAVLALFLVAAQVAAAAPVTAPAFLWAPKNYGFSSDDAKEVVHYQTISPKSLAKSVLEEGGWSNFMCSREDTQNNVDVAIVFIGSKLQSSDISKDKQVDPALADTLKLSFTRSEFSMAFPYVSTTVDERLEDSLLSSFAENCNNGFGRNRVTYTDTCTGQDLKKYHNMDAINDLVVSGVASRRVNHPSGQTDVIVFCSGGFENPGTAKSEGELLSQLVDLLDLSGAKYTVLYASQPSGLLESPSGLPLGRHLAEKKTNGTKAVQGEKCDGECLVKSSLLEGTFVGIVLLIILISGLMCMMGIDTPSRFEAPQES

SEQ ID NO: 16428 - protein, 318 aa, Zea mays subsp. mays
  misc_feature (1)..(318): Ceres Seq. ID no. 12352273
MAAAWAVLALFLVAAQVAAAAPVTAPAFLWAPKNYGFSSDDAKEVVHYQTISPKSLAKSVLEEGGWSNFMCSREDTQNNVDVAIVFIGSKLQSSDISKDKQVDPALADTLKLSFTRSEFSMAFPYVSTTVDERLEDSLLSSFAENCNNGFGRNRVTYTDTCTGQDLKKYHNMDAINDLVVSGVASRRVNHPSGQTDVIVFCSGGFENPGTAKSEGELLSQLVDLLDLSGAKYTVLYASQPSGLLESPSGLPLGRHLAEKKTNGTKAVQGEKCDGECLVKSSLLEGTFVGIVLLIILISGLMCMMGIDTPSRFEAPQES

SEQ ID NO: 16429 - protein, 249 aa, Zea mays subsp. mays; identical to SEQ ID NO: 16053
  misc_feature (1)..(249): Ceres Seq. ID no. 12352274

SEQ ID NO: 16430 - DNA, 1493 bp, Zea mays subsp. mays
  misc_feature (1)..(1493): Ceres Seq. ID no. 12352289
atagtcactcccccaactctgctgcttcccgtggccgtggttcaaaattcgaatccagaaagacttccccaagcattttccgtttctttaaaccgtcatcgtcctccctcgtgctagcctcgctcgttgcgcgttcaaatttcgaaccacctccgccttcgacgccccaaaccctagcccgacccctcctcctccacctgcgccaccgcccaccatgagctccgccgccgcgccagctgccgtcggcagcggcaaggagcttgccaacccgcccgccgacggaatcaccaacctccgcttctccaaccacagcaacaacctcctcgtctcctcatgggacaagacggtgcggctctacgacgccgacgccaacgtgctcaagggggagttcatgcaccccggggccgtcctcgactgctgcttccacgacgactcctcgggctttagcgccggtgccgaccacaccgtgcggaggttggtatttagctcgtccaaggaagatgttttggggcggcatgatggtccggttcgttgcgtggaatactcttatgctgcaggtcaagtcatcaccggcagctgggataaaactgtaaaatgctgggatccaagaggagttagtggaccagagcgcacccttgttgggacatatgctcaacctgaacgtgtatattctctttcgttagtaggaaataggttggttgttgcaacagctggaagacatgtaaatatttatgatctgcgcaatatgtctcaacctgagcaaaaaagagactcttctttgaaatatcaaacacgatgtgttcgatgttttcccaacggaacaggatatgctcttagttctgttgaagggcgagtttctatggaattctttgatctatctgagtctgctcaatctaaaaagtatgctttcaagtgtcatcggaagtctgaggccggcagggacaccgtttatcctgtcaatgcaattgctttccatcccatatatggaacatttgccaccggagggtgtgatggatttgtgaatgtgtgggatggcattaacaagaaaagactatatcagtactcgaagtacgcatcaagcatcgctgctctatcattcagtaaggatgggcatctgcttgctgtggcatccagctacacttatgaagagggagaaaaaacgcatgaacctgacgctatatttatccggacagtgaatgaagtcgaggtgaagccgaagcccaaggcattggcagccccccagtagtgctgtgacctgttctggaggctagatgacccgtacttctctgcgttgatgtcaattacattagttgacggagtgcttgtttgtgttgaaagagctgaaacgcctgtgtttcttaatctggaaccctcttctcccgttttacttgtccgtggaaacatttcatgttccagctggttgtatattccgaaacagaccatgttttagttcactcggttcttcgttgacttaagttatttatcaaatattt

SEQ ID NO: 16431 - protein, 343 aa, Zea mays subsp. mays
  misc_feature (1)..(343): Ceres Seq. ID no. 12352290
MSSAAAPAAVGSGKELANPPADGITNLRFSNHSNNLLVSSWDKTVRLYDADANVLKGEFMHPGAVLDCCFHDDSSGFSAGADHTVRRLVFSSSKEDVLGRHDGPVRCVEYSYAAGQVITGSWDKTVKCWDPRGVSGPERTLVGTYAQPERVYSLSLVGNRLVVATAGRHVNIYDLRNMSQPEQKRDSSLKYQTRCVRCFPNGTGYALSSVEGRVSMEFFDLSESAQSKKYAFKCHRKSEAGRDTVYPVNAIAFHPIYGTFATGGCDGFVNVWDGINKKRLYQYSKYASSIAALSFSKDGHLLAVASSYTYEEGEKTHEPDAIFIRTVNEVEVKPKPKALAAPQ

SEQ ID NO: 16432 - protein, 284 aa, Zea mays subsp. mays
  misc_feature (1)..(284): Ceres Seq. ID no. 12352291
MHPGAVLDCCFHDDSSGFSAGADHTVRRLVFSSSKEDVLGRHDGPVRCVEYSYAAGQVITGSWDKTVKCWDPRGVSGPERTLVGTYAQPERVYSLSLVGNRLVVATAGRHVNIYDLRNMSQPEQKRDSSLKYQTRCVRCFPNGTGYALSSVEGRVSMEFFDLSESAQSKKYAFKCHRKSEAGRDTVYPVNAIAFHPIYGTFATGGCDGFVNVWDGINKKRLYQYSKYASSIAALSFSKDGHLLAVASSYTYEEGEKTHEPDAIFIRTVNEVEVKPKPKALAAPQ

SEQ ID NO: 16433 - DNA, 1417 bp, Zea mays subsp. mays
  misc_feature (1)..(1417): Ceres Seq. ID no. 12352296
accgcgcgtgtaggcattctacgagcagctcggtcttgtcgttggagagatgaagaagaacaccatgagggatttcttgggtttcttgttcggagtagctgccgcggcggcctgcttcggcctgctcctgctgcatgttccatgcccccgtggcctcttgcccgcacagcaaggcctcatcatcttgggtaggagtactactaacggaacaaactctgatcccactcccagcaccaagaaacctggcatcgtatgtgcacagatttcactccaaaaatgattccgatcctatgttaccatacgcgcgttgatctccaattggtcaccctgcactggttctggtttcatatattgcatattcactggtttaatcagtcaccttcttctattttctcttaataaacaggcccctgctccagctccaggtgacgacaagctggaggcgctgctgaggcgagcgtccatggccgaccttgacaagaccgtcatactaaccttcgcgagccaagcgtggacggctccgggctcactccaggacctcttgctccagagcttccgcctgggcgtggggacggagccccttctcaagcacttggtcatcgtcgccgacggcgccaaggcgtacgaacagtgccagctcgtgcacccgctctgctaccacctcgaagccggcggcgtcgactacgccgcacagcaatcgtacatggccaagggctacctcgagatcgtgtggcgcaagttcctgtcccaggcccgggtcctcaacctcggctacagcttcgtcttcaccgacatggacatcatctggctgcggaacccgctgctgcgcatccccatcggcgccgacctggccatgtcgtgcgacaagtactacggcgacaacccctacgacctcgacaagctggccaacaccgggttcatgtacgtgaaggcgagccccaggatggtggccttctacgagagctggtacaaggcgcggctgtcctaccggtacacgcacgagcagtatgtgttccagcaggtgaaggacaagctgccggcgcagcacggcatacgggtgcagttcgtggacacggcgtacttcaccggcttctgtcagctacgcaaggattttaacaaggtatgcacggtgcatgcgaactgcctcgtcgggctcaagtccaagcaggagaagctcactcaagtcttagacgagtggaaggagttcaagaagaaggctgctttgctaggcagcaataccactactgccctaactcactgaacaattaacatcttcactgggggcggatctatctaggaaaagtgtagttgtttaaagccattctacgtttttaaacatatatagatgaataattcaaaatacagcataagatgcaatttttcaatacaaataaactaatagttcttctgtggcgct

SEQ ID NO: 16434 - protein, 265 aa, Zea mays subsp. mays
  misc_feature (1)..(265): Ceres Seq. ID no. 12352297
MADLDKTVILTFASQAWTAPGSLQDLLLQSFRLGVGTEPLLKHLVIVADGAKAYEQCQLVHPLCYHLEAGGVDYAAQQSYMAKGYLEIVWRKFLSQARVLNLGYSFVFTDMDIIWLRNPLLRIPIGADLAMSCDKYYGDNPYDLDKLANTGFMYVKASPRMVAFYESWYKARLSYRYTHEQYVFQQVKDKLPAQHGIRVQFVDTAYFTGFCQLRKDFNKVCTVHANCLVGLKSKQEKLTQVLDEWKEFKKKAALLGSNTTTALTH

SEQ ID NO: 16435 - protein, 185 aa, Zea mays subsp. mays
  misc_feature (1)..(185): Ceres Seq. ID no. 12352298
MAKGYLEIVWRKFLSQARVLNLGYSFVFTDMDIIWLRNPLLRIPIGADLAMSCDKYYGDNPYDLDKLANTGFMYVKASPRMVAFYESWYKARLSYRYTHEQYVFQQVKDKLPAQHGIRVQFVDTAYFTGFCQLRKDFNKVCTVHANCLVGLKSKQEKLTQVLDEWKEFKKKAALLGSNTTTALTH

SEQ ID NO: 16436 - protein, 155 aa, Zea mays subsp. mays
  misc_feature (1)..(155): Ceres Seq. ID no. 12352299
MDIIWLRNPLLRIPIGADLAMSCDKYYGDNPYDLDKLANTGFMYVKASPRMVAFYESWYKARLSYRYTHEQYVFQQVKDKLPAQHGIRVQFVDTAYFTGFCQLRKDFNKVCTVHANCLVGLKSKQEKLTQVLDEWKEFKKKAALLGSNTTTALTH

SEQ ID NO: 16437 - DNA, 1309 bp, Zea mays subsp. mays
  misc_feature (1)..(1309): Ceres Seq. ID no. 12352316
cgaaaaatataataagcagagagggtatgcgctggtggtggtggcgactggcgacggccgcgatcgaccatggctacgacggcgccgctcgttctcctcttccccctcgtgctgctgctgcaggcgaggtggtcgtcgcagcagcagcagcagcaggctgtgacggcggtgatcgtgttcggcgactccatcgtggacccggggaacaacaatggtttgcacacgctgatcaaggccaaccatccgccctacggcatggacatgttgaaccacgaggccaccggacgctactccaacggcctcataccaacagacctcattgcccagcagctcggcgtcaagcagctgcttccgccctacctgggcgtggacctgagccccgatgaccttctcaccggcgtcagcttcgcgtccggcgccaccggattcgacccgctcacgcccgtcgtggtcagcgtcatctcgctggaccagcagctcgcctacttcgacgggtaccgggggaggctggtggacatcgccggcgaggccgagacggcgcggatcatcgacggcgcgctgttcctggtgtgcgccggcaccgacgacgtggccaacacctacttcaccacgccgttccgcagcgccgagtacgacatcccgggctacgtggacctgctggtgggccatgccgaggagttcctccgcgagctggtcgtcagctccaggggcgccaggaggatcggcttcgtggggatgccgccggtaggctgcgtgccgtcgcagcgcacgctcgggggcggcctcgccaccagggcctgcgagcccaagcgaaacgaggcggcgctgctgtacaacgccagggcccaggagatgatcgccgccttcaacaacaacaacgccgacgccgatgtgctggtcgtgttcctcgacatctaccgcatcctggacgacctcatggagcgcggggaggagtacggcttctccgagaccaccaggggatgctgcggcaccggcaccatcgaggtcacggggctatgtgactcccgcttcgtctccgtctgcgacgacgtctcgcagcacgtcttcttcgacagctaccacccaacagagagagcctacaggatcatcgtcaacgacatctttctaaactacgcacacgtgctcttctcatgactatatatcacgtactctctgtctctgtctctgtctctgtctctgtctctgtctctggtagctggcccaatcgacccaacagcatccaaatataattaaatgagctagcccatcctccaaataccgcagcccattgttacactactactttcct

SEQ ID NO: 16438 - protein, 361 aa, Zea mays subsp. mays
  misc_feature (1)..(361): Ceres Seq. ID no. 12352317
MATTAPLVLLFPLVLLLQARWSSQQQQQQAVTAVIVFGDSIVDPGNNNGLHTLIKANHPPYGMDMLNHEATGRYSNGLIPTDLIAQQLGVKQLLPPYLGVDLSPDDLLTGVSFASGATGFDPLTPVVVSVISLDQQLAYFDGYRGRLVDIAGEAETARIIDGALFLVCAGTDDVANTYFTTPFRSAEYDIPGYVDLLVGHAEEFLRELVVSSRGARRIGFVGMPPVGCVPSQRTLGGGLATRACEPKRNEAALLYNARAQEMIAAFNNNNADADVLVVFLDIYRILDDLMERGEEYGFSETTRGCCGTGTIEVTGLCDSRFVSVCDDVSQHVFFDSYHPTERAYRIIVNDIFLNYAHVLFS

SEQ ID NO: 16439 - protein, 299 aa, Zea mays subsp. mays
  misc_feature (1)..(299): Ceres Seq. ID no. 12352318
MDMLNHEATGRYSNGLIPTDLIAQQLGVKQLLPPYLGVDLSPDDLLTGVSFASGATGFDPLTPVVVSVISLDQQLAYFDGYRGRLVDIAGEAETARIIDGALFLVCAGTDDVANTYFTTPFRSAEYDIPGYVDLLVGHAEEFLRELVVSSRGARRIGFVGMPPVGCVPSQRTLGGGLATRACEPKRNEAALLYNARAQEMIAAFNNNNADADVLVVFLDIYRILDDLMERGEEYGFSETTRGCCGTGTIEVTGLCDSRFVSVCDDVSQHVFFDSYHPTERAYRIIVNDIFLNYAHVLFS

SEQ ID NO: 16440 - protein, 297 aa, Zea mays subsp. mays
  misc_feature (1)..(297): Ceres Seq. ID no. 12352319
MLNHEATGRYSNGLIPTDLIAQQLGVKQLLPPYLGVDLSPDDLLTGVSFASGATGFDPLTPVVVSVISLDQQLAYFDGYRGRLVDIAGEAETARIIDGALFLVCAGTDDVANTYFTTPFRSAEYDIPGYVDLLVGHAEEFLRELVVSSRGARRIGFVGMPPVGCVPSQRTLGGGLATRACEPKRNEAALLYNARAQEMIAAFNNNNADADVLVVFLDIYRILDDLMERGEEYGFSETTRGCCGTGTIEVTGLCDSRFVSVCDDVSQHVFFDSYHPTERAYRIIVNDIFLNYAHVLFS

SEQ ID NO: 16441 - DNA, 1474 bp, Zea mays subsp. mays
  misc_feature (1)..(1474): Ceres Seq. ID no. 12352327
agaaatcctccttcaagatggtcgttttgggccaacaacgtacgactcctcccacaggggggctgctgccggagaaatccgtgcaggagcagaactcagtctcatcatcttcctccacccgacagatgattggaggaggtatccagtggtggagcaggtccctgtgggtcaagtccagggcgtggatccggaaccccatgaacatggccctgtccgtctggatcctggccgtcggcgtctcgggcgccatcctcttcatggtgatgacggggatgctcaaccgcgtgctgccaagcaagccgcggagggacacgtggttcgaggtgaacaaccagatcctgaacgcgctcttcaccctcatgtgcctgtaccagcacccgaggaggttctaccacctggccctcgtgtgccgctggaaggccggcgacatgcaccagctccgccaagcgtactgcaaggacggggcctgcaagcccaacgagaggaagcacatgacggctgtcatcctgctgctccacctcaactgctttgctcagtacgcgctctgtggcctcaaccttggctaccggaggccccggcgtccggtggtcggtgtcgccctcaccgtagcggtcgccatctgcgcgccggccgtcgctgggatgtacaacaacctcagtcctctcgggagagactacgaggcgccggcgccggcggaggggatgataataagtgaggaagagtcgcagctccagcgcaaaacgcccgacaccgagaggcgctactcgttggtgccacggcaaggacaaggagaagaaccgcagtgggtcggcgggctgtgggaggacctgtgggacgacatgtcgctggcgtacctgtcgctgttctgcagctgctgcgtgttcgggtggaacgcgagcaggctcggcttgggcaacatgtacgtccacgtcgccaccttcgtgctcctgtgcctggcgcccttcttcatcttggacctggcggccatcaacgtggacgacgaggcggtcagggacgcgctggggctggccggcatcttcctctgcgtgttcggcctgctctacggcggattctggaggatccagatgcgcaggcggttcggcctccccgagaaccgcgcctgctgcggcaagccggacctcaccgactgcctactgtggctctgctgctacccgtgctcgctagcgcaggaggtccgtacggcagacgcctacgaggtggtggtgctgctggacacgccgatgcatcgccatccgactctgcaggaagagctggccacgatgcaggagccaccagatgaagaagaaggaggcggtgtcatccccccttcgacagtgtcagctacacgctcataagcagtacccaacatgtacaggatgagcagtttcaatttcaacatcaggtggtcatttcaatgtatccatgcagccgctgaatatcatcattaaaaaaagcagcaaaaacagccttctct

SEQ ID NO: 16442 - protein, 450 aa, Zea mays subsp. mays
  misc_feature (1)..(450): Ceres Seq. ID no. 12352328
KSSFKMVVLGQQRTTPPTGGLLPEKSVQEQNSVSSSSSTRQMIGGGIQWWSRSLWVKSRAWIRNPMNMALSVWILAVGVSGAILFMVMTGMLNRVLPSKPRRDTWFEVNNQILNALFTLMCLYQHPRRFYHLALVCRWKAGDMHQLRQAYCKDGACKPNERKHMTAVILLLHLNCFAQYALCGLNLGYRRPRRPVVGVALTVAVAICAPAVAGMYNNLSPLGRDYEAPAPAEGMIISEEESQLQRKTPDTERRYSLVPRQGQGEEPQWVGGLWEDLWDDMSLAYLSLFCSCCVFGWNASRLGLGNMYVHVATFVLLCLAPFFILDLAAINVDDEAVRDALGLAGIFLCVFGLLYGGFWRIQMRRRFGLPENRACCGKPDLTDCLLWLCCYPCSLAQEVRTADAYEVVVLLDTPMHRHPTLQEELATMQEPPDEEEGGGVIPPSTVSATRS

SEQ ID NO: 16443 - protein, 445 aa, Zea mays subsp. mays
  misc_feature (1)..(445): Ceres Seq. ID no. 12352329
MVVLGQQRTTPPTGGLLPEKSVQEQNSVSSSSSTRQMIGGGIQWWSRSLWVKSRAWIRNPMNMALSVWILAVGVSGAILFMVMTGMLNRVLPSKPRRDTWFEVNNQILNALFTLMCLYQHPRRFYHLALVCRWKAGDMHQLRQAYCKDGACKPNERKHMTAVILLLHLNCFAQYALCGLNLGYRRPRRPVVGVALTVAVAICAPAVAGMYNNLSPLGRDYEAPAPAEGMIISEEESQLQRKTPDTERRYSLVPRQGQGEEPQWVGGLWEDLWDDMSLAYLSLFCSCCVFGWNASRLGLGNMYVHVATFVLLCLAPFFILDLAAINVDDEAVRDALGLAGIFLCVFGLLYGGFWRIQMRRRFGLPENRACCGKPDLTDCLLWLCCYPCSLAQEVRTADAYEVVVLLDTPMHRHPTLQEELATMQEPPDEEEGGGVIPPSTVSATRS

SEQ ID NO: 16444 - protein, 409 aa, Zea mays subsp. mays
  misc_feature (1)..(409): Ceres Seq. ID no. 12352330
MIGGGIQWWSRSLWVKSRAWIRNPMNMALSVWILAVGVSGAILFMVMTGMLNRVLPSKPRRDTWFEVNNQILNALFTLMCLYQHPRRFYHLALVCRWKAGDMHQLRQAYCKDGACKPNERKHMTAVILLLHLNCFAQYALCGLNLGYRRPRRPVVGVALTVAVAICAPAVAGMYNNLSPLGRDYEAPAPAEGMIISEEESQLQRKTPDTERRYSLVPRQGQGEEPQWVGGLWEDLWDDMSLAYLSLFCSCCVFGWNASRLGLGNMYVHVATFVLLCLAPFFILDLAAINVDDEAVRDALGLAGIFLCVFGLLYGGFWRIQMRRRFGLPENRACCGKPDLTDCLLWLCCYPCSLAQEVRTADAYEVVVLLDTPMHRHPTLQEELATMQEPPDEEEGGGVIPPSTVSATRS

SEQ ID NO: 16445 - DNA, 1337 bp, Zea mays subsp. mays
  misc_feature (1)..(1337): Ceres Seq. ID no. 12352345
atggagaagcttccttcagtgagtcctccctttccgtttaaggcagcaagcaggagcagacaggaggcgccgagagcccagcgtcggagatctccgccgccatggagacgctggccagcgccatgcggcgcgagaaccgccggtccaaggccccgccctcctcctctgcttcctccgccctcgcctcgggcagggtccctctcgtcatggccttcctctcctgcctcgcctggctctacgtcgccggccgtttgtggcaggacgcgcagacccgggcgatcctgtccggcctcctcgagaagagctctaccagcgtcccgaaggtgctctcggtggaggacaagcttaggaaccttgggtgcaaggcgattggaaggaaaattgttgaggcggagatggacctgaccaaggccaagagcgaggggtacctgtgggggaacaggactgcagctgtggactccgacaagaagcagcaccttcttgccgtcattggagtttacactgggtttggctcccgtctcaagaggaacgtcttccgtggctcctggatgccaagaggtgatgctctgaagaagcttgaggaaaagggtgtagctattcgttttgttattggtcggagtgcaaatcgaggtgatagcttggaccgtaatattgatgatgaaaatcggcagacaaaggacttcttgattcttgaaagtcatgaagaggctgcagaagaattaccgagcaaagcaaaaattttcttcagtgctgcagttgaagcctgggatgcagaattttatgtcaaagttgaagataacattaatcttgacttagctgggttaattgagatgctcgaaggccgtcgaggtagccaaggattgtacatgggttgtatgaaatcagggatggtcataagtgaagagggccaacaatggtatgaacctgagtggtggaaatttggagattcaaaaacgtattttcgacacgcttctggttctttgtttatcctctcaaaaaatttggctcgctacatcaacataaatagtgcgtcactgcagagttatgcacacgatgatatatcagtaggttcatggatgatgggactgaatgcaacttacgtggatgatgaccggttgtgctgcagcagttccagacaagagaaaatctgttccaatgcttgagcggaaggcgtggctgctggcctgttgctgtacatcctgatgaagattttgcacacctgtcattttgtatacactgctttcgtgaaccggaaaaggctactatccagatagaaacggcttgcaccaaaatttaggaacttccatcaaaaagaaaaaaaaagaacaattttttcc

SEQ ID NO: 16446 - protein, 353 aa, Zea mays subsp. mays
  misc_feature (1)..(353): Ceres Seq. ID no. 12352346
METLASAMRRENRRSKAPPSSSASSALASGRVPLVMAFLSCLAWLYVAGRLWQDAQTRAILSGLLEKSSTSVPKVLSVEDKLRNLGCKAIGRKIVEAEMDLTKAKSEGYLWGNRTAAVDSDKKQHLLAVIGVYTGFGSRLKRNVFRGSWMPRGDALKKLEEKGVAIRFVIGRSANRGDSLDRNIDDENRQTKDFLILESHEEAAEELPSKAKIFFSAAVEAWDAEFYVKVEDNINLDLAGLIEMLEGRRGSQGLYMGCMKSGMVISEEGQQWYEPEWWKFGDSKTYFRHASGSLFILSKNLARYININSASLQSYAHDDISVGSWMMGLNATYVDDDRLCCSSSRQEKICSNA

SEQ ID NO: 16447 - protein, 346 aa, Zea mays subsp. mays
  misc_feature (1)..(346): Ceres Seq. ID no. 12352347
MRRENRRSKAPPSSSASSALASGRVPLVMAFLSCLAWLYVAGRLWQDAQTRAILSGLLEKSSTSVPKVLSVEDKLRNLGCKAIGRKIVEAEMDLTKAKSEGYLWGNRTAAVDSDKKQHLLAVIGVYTGFGSRLKRNVFRGSWMPRGDALKKLEEKGVAIRFVIGRSANRGDSLDRNIDDENRQTKDFLILESHEEAAEELPSKAKIFFSAAVEAWDAEFYVKVEDNINLDLAGLIEMLEGRRGSQGLYMGCMKSGMVISEEGQQWYEPEWWKFGDSKTYFRHASGSLFILSKNLARYININSASLQSYAHDDISVGSWMMGLNATYVDDDRLCCSSSRQEKICSNA

SEQ ID NO: 16448 - protein, 318 aa, Zea mays subsp. mays
  misc_feature (1)..(318): Ceres Seq. ID no. 12352348
MAFLSCLAWLYVAGRLWQDAQTRAILSGLLEKSSTSVPKVLSVEDKLRNLGCKAIGRKIVEAEMDLTKAKSEGYLWGNRTAAVDSDKKQHLLAVIGVYTGFGSRLKRNVFRGSWMPRGDALKKLEEKGVAIRFVIGRSANRGDSLDRNIDDENRQTKDFLILESHEEAAEELPSKAKIFFSAAVEAWDAEFYVKVEDNINLDLAGLIEMLEGRRGSQGLYMGCMKSGMVISEEGQQWYEPEWWKFGDSKTYFRHASGSLFILSKNLARYININSASLQSYAHDDISVGSWMMGLNATYVDDDRLCCSSSRQEKICSNA

SEQ ID NO: 16449 - DNA, 1589 bp, Zea mays subsp. mays
  misc_feature (1)..(1589): Ceres Seq. ID no. 12352373
tttttttcgaaaaccggttttccccactccacaccaccaccaccaccattgacgacttgactacaaagcccagatccattcctcggggtcgggcggccgccaatcccgccgcataccgctggccgagtcctcgtcggcgccggacggggtgaagtgaaggccgactgggagaattttgtggatcttatctggtctccatcatggaacaagacggcacgacgaacctggctgtcactgaggctgtgcgctcggtgcagctgctcaagatcgacggctactgcgccaccgctaccatgaaatcatcggagttcatcaaattccgatggcacatcgatggccacgagtgggaggtccgtttctatcctgattactggtacttcttcgaggacgaggactgcttcagcacttatggcgacgacgatcactccgagtgggtaggtctgaagctcatccttgtcagtgaaccccagagggacgacgacaaggtgagggtgaacctgagctgccggcttgtatgccccagccccaccagccagcggcggcatctcggtacctgctggtccgaagagaagagggtgtcccatgtgtttgccagcaactcgaaatgctcgcctgaacttctcctcatcctgaagcacgagctaccatcgtcaggttatctcgtggacgattcactgaccgtggaatgcacggtcaccgtgctacgcgacttggacgccgccacggataaggcgctgtcgtccctgccagtgccgccaccctcggacctacaccagcacctcggcgacctcctgcagagcgaggacggagcggacgtcacgttccgtgtctccggggagtccttcgccgcccacagggccatactcgccgcaaggtcccctgtttttaaggccgagttcttcggaggcatggaggaacgcagctccgcttctgtggaggtcaaaggcatggaggctgctgtgttcaggtccatgcttcgcttcatctataccgacacggctccagagctcgacggtgcccaggaccaggagcctgaggcggcggtggccatggctcagcacctactggtagctgctgacaggtatgggctgaacagactgaagctcatgtgcgaatgcaagctctctggcggcatcgacatcggcacagcggccgcgacgttggctctcgccgagcagcacaactgctcgctgctcaaagccaagtgccttgagttcgtcaccaggtcgcctgagactctcgatgctatcctggcgactgacggctacgagcatctggtggcaagctgcccctcggtgctggctgaactgctgagggctgcgcgtggaaggaagatctgagctggacgatgatttcatattatggtttgcctaagatgtgtgcgaactaaaaaccatgcatgatgaactagtagtgcttgcagttgatttcctgcccctcctttcagtttgacctgcgcttgtcatgcatgtattgtatgcacatacatgagacgggcagctagcattttctgtggttcgatctcgtctcggctttgtgcctgccatttgggggcttaattgtaccggttgccgtttctcgttcttcgc

SEQ ID NO: 16450 - protein, 379 aa, Zea mays subsp. mays
  misc_feature (1)..(379): Ceres Seq. ID no. 12352374
MEQDGTTNLAVTEAVRSVQLLKIDGYCATATMKSSEFIKFRWHIDGHEWEVRFYPDYWYFFEDEDCFSTYGDDDHSEWVGLKLILVSEPQRDDDKVRVNLSCRLVCPSPTSQRRHLGTCWSEEKRVSHVFASNSKCSPELLLILKHELPSSGYLVDDSLTVECTVTVLRDLDAATDKALSSLPVPPPSDLHQHLGDLLQSEDGADVTFRVSGESFAAHRAILAARSPVFKAEFFGGMEERSSASVEVKGMEAAVFRSMLRFIYTDTAPELDGAQDQEPEAAVAMAQHLLVAADRYGLNRLKLMCECKLSGGIDIGTAAATLALAEQHNCSLLKAKCLEFVTRSPETLDAILATDGYEHLVASCPSVLAELLRAARGRKI

SEQ ID NO: 16451 - protein, 348 aa, Zea mays subsp. mays
  misc_feature (1)..(348): Ceres Seq. ID no. 12352375
MKSSEFIKFRWHIDGHEWEVRFYPDYWYFFEDEDCFSTYGDDDHSEWVGLKLILVSEPQRDDDKVRVNLSCRLVCPSPTSQRRHLGTCWSEEKRVSHVFASNSKCSPELLLILKHELPSSGYLVDDSLTVECTVTVLRDLDAATDKALSSLPVPPPSDLHQHLGDLLQSEDGADVTFRVSGESFAAHRAILAARSPVFKAEFFGGMEERSSASVEVKGMEAAVFRSMLRFIYTDTAPELDGAQDQEPEAAVAMAQHLLVAADRYGLNRLKLMCECKLSGGIDIGTAAATLALAEQHNCSLLKAKCLEFVTRSPETLDAILATDGYEHLVASCPSVLAELLRAARGRKI

SEQ ID NO: 16452 - DNA, 1358 bp, Zea mays subsp. mays
  misc_feature (1)..(1358): Ceres Seq. ID no. 12352397
agtattctctgtcttttgtcttgagattaagaagtacagaaagcagtccttcgttgttcgtcaggaaaaagaacaatgcagcacgtaatcctttgcctgcaaatctctctgctactctccagcttctcctatttgatgcaagcccagtacacctcgatctttagcttcggcgactcctacaccgacaccggcaacaaggtcatcctctacggcccggcggcggcggatctgtggatcaacaagccgccgttcgggatgaccttcttcggccatccggccgggcgcctctccgacggcagactggtcatagatttcatcgcccaggcactagggctacctctccttccgccctcgctggcgaaggaccagagcttcaagcaaggcgcgaacttcgccgtggctggcgccacggcgctgaagacgagcactacaagcccagcgctctacccgcagctggccgtcgccggcgatgccgtgcctcctccgaacaacatctccctcgctgacgagctgggctggttcgacgccatgaaacccgcgctctgcggctcaccccaagcatgcaaggactacttcgcgaaggcgctgttcgtcgtgggcgagctgggctggaacgactacggggtcatggtggtcggcggcaaaagcgtcgccgaagcgcaatcctacgtgcctcagatcgtcgcaacaatcgtcgctgccacggagaagctgatcaacgacggcgccacgacggtcgtggtgtcggggatctcgccgatgggctgcgcgccggggaatctggtgctgctggcgagccaggacccggccgactatgagcccgacacggggtgcctcaagggaatgaacgagctatccagggaccacaacgcgcagctgagccaggcgctgacgacgctgggcggcaggtaccccggcgcgcgcgtcacctacgccgacctgtacggccccgtcatcgccttcgcggccgcgccggcgcgcttcggcttcgactccgcgctgagggactgctgcggcagtggcggcggcaagtacaacttcaacctgagcgccgcgtgcgggatgcccggcgtggccgcctgcccgaacccgtcggtgtacgtcaactgggacggcgtccacctcaccgaggcggcgtaccaccgcgtcgccgatggctggctcaggggaccctacgccaacccgcccattctcgccacggcgtagcgaactaggcgacgtggatgcgtgtattaattcaatttcttgcggccgggaatcacgtaaataatttgctgagttttctgtctgatcgtctgattcatgaaccacgtacaatttctctatataatacgtataattatattctgtgttcgtgc

SEQ ID NO: 16453 - protein, 376 aa, Zea mays subsp. mays
  misc_feature (1)..(376): Ceres Seq. ID no. 12352398
MQHVILCLQISLLLSSFSYLMQAQYTSIFSFGDSYTDTGNKVILYGPAAADLWINKPPFGMTFFGHPAGRLSDGRLVIDFIAQALGLPLLPPSLAKDQSFKQGANFAVAGATALKTSTTSPALYPQLAVAGDAVPPPNNISLADELGWFDAMKPALCGSPQACKDYFAKALFVVGELGWNDYGVMVVGGKSVAEAQSYVPQIVATIVAATEKLINDGATTVVVSGISPMGCAPGNLVLLASQDPADYEPDTGCLKGMNELSRDHNAQLSQALTTLGGRYPGARVTYADLYGPVIAFAAAPARFGFDSALRDCCGSGGGKYNFNLSAACGMPGVAACPNPSVYVNWDGVHLTEAAYHRVADGWLRGPYANPPILATA

SEQ ID NO: 16454 - protein, 356 aa, Zea mays subsp. mays
  misc_feature (1)..(356): Ceres Seq. ID no. 12352399
MQAQYTSIFSFGDSYTDTGNKVILYGPAAADLWINKPPFGMTFFGHPAGRLSDGRLVIDFIAQALGLPLLPPSLAKDQSFKQGANFAVAGATALKTSTTSPALYPQLAVAGDAVPPPNNISLADELGWFDAMKPALCGSPQACKDYFAKALFVVGELGWNDYGVMVVGGKSVAEAQSYVPQIVATIVAATEKLINDGATTVVVSGISPMGCAPGNLVLLASQDPADYEPDTGCLKGMNELSRDHNAQLSQALTTLGGRYPGARVTYADLYGPVIAFAAAPARFGFDSALRDCCGSGGGKYNFNLSAACGMPGVAACPNPSVYVNWDGVHLTEAAYHRVADGWLRGPYANPPILATA

SEQ ID NO: 16455 - protein, 316 aa, Zea mays subsp. mays
  misc_feature (1)..(316): Ceres Seq. ID no. 12352400
MTFFGHPAGRLSDGRLVIDFIAQALGLPLLPPSLAKDQSFKQGANFAVAGATALKTSTTSPALYPQLAVAGDAVPPPNNISLADELGWFDAMKPALCGSPQACKDYFAKALFVVGELGWNDYGVMVVGGKSVAEAQSYVPQIVATIVAATEKLINDGATTVVVSGISPMGCAPGNLVLLASQDPADYEPDTGCLKGMNELSRDHNAQLSQALTTLGGRYPGARVTYADLYGPVIAFAAAPARFGFDSALRDCCGSGGGKYNFNLSAACGMPGVAACPNPSVYVNWDGVHLTEAAYHRVADGWLRGPYANPPILATA

SEQ ID NO: 16456 - DNA, 913 bp, Zea mays subsp. mays
  misc_feature (1)..(913): Ceres Seq. ID no. 12352405
agatctctagcactagctttgatcctttccgccgccaactttggcttgggatttgtctctgacttgggacactcgctgaagagagtacatctccgacttgggatttgtcttacgaccagcagcggcggcggcggcggcgcgccaggacaaggagcagcgggactacagactcatcgcaaaagccgtggacgaagcgtaccgggcggtggagtgcgacggcggcgggtaccccttcggcgcggtcgtcgtccacggcggcggcgacgacgaggtggtcagcagcagccacaactcggtccggaaggacgccgacccgtcggcgcacgccgaagtgaccgccatcagacaggcgtgcaagaagctggggaaaaccagcctcgccggctgcgagatctacacgtcctgcgagccgtgcccgatgtgcctggggctcattcgcctggccaagataaagaaggtggtgtacggagccaagtcggaggtcgccgctgccgccgggctcaacggcgtcctcccagaggtcttcagagagtactaccagaaatccggcgtggagatgaggcaggccgagggcgaggcggcaacccgggatcgccgaggaggtgttcgaggagaccaagggcaagtttcgcaacaagtaaacgcgctggagatggcgccgggcggatggctgttgcctgttgctagtggaatggttgccgtttccaagctttttgtccgggggacctttgatcagaggtcacatgcccagagaccggaataaattcacccctttccccccctaaaaaatactccatttcacatggtttgttgtatcagtgtgttatttctttttttaacgcccgcctcgaccgtgtgacattttttttcttaataatgtagggtgttacttgttgggaacataattaggtgt

SEQ ID NO: 16457 - protein, 228 aa, Zea mays subsp. mays
  misc_feature (1)..(228): Ceres Seq. ID no. 12352406
RSLALALILSAANFGLGFVSDLGHSLKRVHLRLGICLTTSSGGGGGAPGQGAAGLQTHRKSRGRSVPGGGVRRRRVPLRRGRRPRRRRRRGGQQQPQLGPEGRRPVGARRSDRHQTGVQEAGENQPRRLRDLHVLRAVPDVPGAHSPGQDKEGGVRSQVGGRRCRRAQRRPPRGLQRVLPEIRRGDEAGRGRGGNPGSPRRCSRRPRASFATSKRAGDGAGRMAVACC

SEQ ID NO: 16458 - protein, 114 aa, Zea mays subsp. mays
  misc_feature (1)..(114): Ceres Seq. ID no. 12352407
MCLGLIRLAKIKKVVYGAKSEVAAAAGLNGVLPEVFREYYQKSGVEMRQAEGEAATRDRRGGVRGDQGQVSQQVNALEMAPGGWLLPVASGMVAVSKLFVRGTFDQRSHAQRPE

SEQ ID NO: 16459 - DNA, 1445 bp, Zea mays subsp. mays
  misc_feature (1)..(1445): Ceres Seq. ID no. 12352438
ctttccttcctactttcccactgccgtgacgattttcacagcgaattctccggccggcgccgccccgtccgtccgtccgttcttccgataccgaactcgccagtcgccacagcgatctctctcgctcgctccgccgacgcagcgctcggcttcagctcgagaggaggaaatggccagcagcggctacgaagggatcctcctggggatggggaaccccctcctcgacatctccgctgtcgtcgacgagggcttcctcgccaagtatgatgtgaaaccgggcaatgtcattcttgctgaggacaagcatttgccaatgtatgacgaattggctagcaagagcaatgttgaatacattgctggaggagccactcaaaactctatcagggttgcccaatggatgcttcaaattcctggtgcatcaagttacataggttgcatcgggaaggataagtttggtgaggagatgaaaaaaaatgcacaagctgctggtattaatgcccattatcatgaggatgataatgctccaacgggcacatgtgctgtttgtgttgttggtggagaaaggtcacttattgctaacttgtctgcggcaaactgctataagtctgaacatctgaagaaacctgagaattgggcacttgttgagaaggcaaaatatatttacattgctggatttttccttacggtatccccggattctattcaacttgttgctgagcatgccgctgcaactaacaaggtgtttatgatgaacctttccgctccctttatctgcgaggttttccgtgatgcccaagagaaagctcttccgtacgtggattacatctttggaaatgaaactgaggcgaggacctttgctaaagttcgaggttgggagattgagaatgttgaggagatcgctttgaagatctcccaattaccgaaggcttcaggaacacacaagaggattactgttatcactcaaggttgcgatccggtagttgtggctgatgatggaaaggtgaaaactttccctgtgatcctcttgcctaaggagaagcttgttgacaccaatggtgcaggtgatgcgttcgttggaggcttcctgtcccagttggtacaagagaagagcatcgatgagtgtgtcagagctgcctgttacgccgccaatgttgtcatccaacgttctggctgcacttaccctgagaagcctgacttcaactagagccatttcagaatttagagtcttatggcatctggtctgtataattagtcgggttcgccttggtctgtttacggcacattctagtgtcaccgtacaggtcaaatgttcatgcgtgtaaggcgtgtcatactgtcatggcactctacaagtgcatgtgccagaaacgtgcatgcgtctctcggttacggactctttacagttgcatctaaaacaattcaaagcaccttgcggtgcatccttg

SEQ ID NO: 16460 - protein, 400 aa, Zea mays subsp. mays
  misc_feature (1)..(400): Ceres Seq. ID no. 12352439
FPSYFPTAVTIFTANSPAGAAPSVRPFFRYRTRQSPQRSLSLAPPTQRSASAREEEMASSGYEGILLGMGNPLLDISAVVDEGFLAKYDVKPGNVILAEDKHLPMYDELASKSNVEYIAGGATQNSIRVAQWMLQIPGASSYIGCIGKDKFGEEMKKNAQAAGINAHYHEDDNAPTGTCAVCVVGGERSLIANLSAANCYKSEHLKKPENWALVEKAKYIYIAGFFLTVSPDSIQLVAEHAAATNKVFMMNLSAPFICEVFRDAQEKALPYVDYIFGNETEARTFAKVRGWEIENVEEIALKISQLPKASGTHKRITVITQGCDPVVVADDGKVKTFPVILLPKEKLVDTNGAGDAFVGGFLSQLVQEKSIDECVRAACYAANVVIQRSGCTYPEKPDFN

SEQ ID NO: 16461 - protein, 344 aa, Zea mays subsp. mays
  misc_feature (1)..(344): Ceres Seq. ID no. 12352440
MASSGYEGILLGMGNPLLDISAVVDEGFLAKYDVKPGNVILAEDKHLPMYDELASKSNVEYIAGGATQNSIRVAQWMLQIPGASSYIGCIGKDKFGEEMKKNAQAAGINAHYHEDDNAPTGTCAVCVVGGERSLIANLSAANCYKSEHLKKPENWALVEKAKYIYIAGFFLTVSPDSIQLVAEHAAATNKVFMMNLSAPFICEVFRDAQEKALPYVDYIFGNETEARTFAKVRGWEIENVEEIALKISQLPKASGTHKRITVITQGCDPVVVADDGKVKTFPVILLPKEKLVDTNGAGDAFVGGFLSQLVQEKSIDECVRAACYAANVVIQRSGCTYPEKPDFN

SEQ ID NO: 16462 - protein, 332 aa, Zea mays subsp. mays
  misc_feature (1)..(332): Ceres Seq. ID no. 12352441
MGNPLLDISAVVDEGFLAKYDVKPGNVILAEDKHLPMYDELASKSNVEYIAGGATQNSIRVAQWMLQIPGASSYIGCIGKDKFGEEMKKNAQAAGINAHYHEDDNAPTGTCAVCVVGGERSLIANLSAANCYKSEHLKKPENWALVEKAKYIYIAGFFLTVSPDSIQLVAEHAAATNKVFMMNLSAPFICEVFRDAQEKALPYVDYIFGNETEARTFAKVRGWEIENVEEIALKISQLPKASGTHKRITVITQGCDPVVVADDGKVKTFPVILLPKEKLVDTNGAGDAFVGGFLSQLVQEKSIDECVRAACYAANVVIQRSGCTYPEKPDFN

SEQ ID NO: 16463 - DNA, 1579 bp, Zea mays subsp. mays
  misc_feature (1)..(1579): Ceres Seq. ID no. 12352446
aaaagacggcgactctgcctgcacagcattgaccgccgccttcgctcctccacctccccgctcgctctcctgcctccgcgcgggccgcggatcccttcactcgccacagcaagcgctagaagagggaatggagcccggcctcgcatcccgcgtcgcccgttcagccgctcagccgctttccggctgcctgtcgcggcactcgctctcgccgtggctcaagatccagaaccacatttatcctatgccaagtctctgtcacaaggttcctagcacgggaaaatgccacgcttctatgacaacaagttacatggaaacatcagatgtcactgatttggactgggaaaaccttggctttggcctcatcgagactgactttatgtatgttgcaaaatgtggaactgatggaatcttttccaaaggtgaagtcctaccatttggtcctatagcactgagtccttcagctggagtcttaaattatgggcagggattgtttgaaggcctaaaagcatataggaaaactgatgggtccatccttctatttcgtccagaggagaatgctataaggatgctaagcggtgcagagaggatgtgtatgcctgctccaactgttgagcaattcgttgatgctgttaaacaaactgttttggcaaataaaagatgggtgcctcctactggtaaaggttccctatatatcaggccactcctaataggaagcggtgcagttcttggtcttgcgcctgctcctgagtatagctttatcatttttgtatcccctgttgggaattatttcaaggaaggtttatctcctattaatttgatcgttgaggataaatttcaccgtgccagccctggtggaactggaggtgtgaaaaccattggaaactatgcctcggtactgaaagcacaaaagattgcaaaggggaaaggatattctgatgtcctttatttggatgctgttcatgacaaatatcttgaagaagtctcttcctgcaatatttttgttgtgaaagacaatgttatttctacgcctgccattaaaggaacaatacttcctggtataacgaggaaaagtatcattgaagttgctcagagcaaaggtttcaaggttgaggagcgtctggtgtgtgtagatgagttgattaacgctgatgaagttttctgcacggggactgctgttgtggtgtcacctgtggggagtgttacatatatggggaaaagggtggaatatggcaaccaaggagtcggtgtcgtgtctcagcaactatacaagtcacttacaagcctccagatgggcaatgtggaggactggatgggttggaccatgcaacttaatcagtagcggatcacagatattgccttggcagatcccggattattacagctactgggtgcgatagttttttttttggcagatccatcttgagcatatttgactgtaccggtttcccttgagactaagacgaaagtgatcttactgatcttttgtttcaaatctaaaacgataaaataaaatgtggtttgcaccttgccatgtactgtaagaatggacccataaaaaatttcatgctgctgttgcttg

SEQ ID NO: 16464 - protein, 445 aa, Zea mays subsp. mays
  misc_feature (1)..(445): Ceres Seq. ID no. 12352447
KDGDSACTALTAAFAPPPPRSLSCLRAGRGSLHSPQQALEEGMEPGLASRVARSAAQPLSGCLSRHSLSPWLKIQNHIYPMPSLCHKVPSTGKCHASMTTSYMETSDVTDLDWENLGFGLIETDFMYVAKCGTDGIFSKGEVLPFGPIALSPSAGVLNYGQGLFEGLKAYRKTDGSILLFRPEENAIRMLSGAERMCMPAPTVEQFVDAVKQTVLANKRWVPPTGKGSLYIRPLLIGSGAVLGLAPAPEYSFIIFVSPVGNYFKEGLSPINLIVEDKFHRASPGGTGGVKTIGNYASVLKAQKIAKGKGYSDVLYLDAVHDKYLEEVSSCNIFVVKDNVISTPAIKGTILPGITRKSIIEVAQSKGFKVEERLVCVDELINADEVFCTGTAVVVSPVGSVTYMGKRVEYGNQGVGVVSQQLYKSLTSLQMGNVEDWMGWTMQLNQ

SEQ ID NO: 16465 - protein, 403 aa, Zea mays subsp. mays
  misc_feature (1)..(403): Ceres Seq. ID no. 12352448
MEPGLASRVARSAAQPLSGCLSRHSLSPWLKIQNHIYPMPSLCHKVPSTGKCHASMTTSYMETSDVTDLDWENLGFGLIETDFMYVAKCGTDGIFSKGEVLPFGPIALSPSAGVLNYGQGLFEGLKAYRKTDGSILLFRPEENAIRMLSGAERMCMPAPTVEQFVDAVKQTVLANKRWVPPTGKGSLYIRPLLIGSGAVLGLAPAPEYSFIIFVSPVGNYFKEGLSPINLIVEDKFHRASPGGTGGVKTIGNYASVLKAQKIAKGKGYSDVLYLDAVHDKYLEEVSSCNIFVVKDNVISTPAIKGTILPGITRKSIIEVAQSKGFKVEERLVCVDELINADEVFCTGTAVVVSPVGSVTYMGKRVEYGNQGVGVVSQQLYKSLTSLQMGNVEDWMGWTMQLNQ

SEQ ID NO: 16466 - protein, 365 aa, Zea mays subsp. mays
  misc_feature (1)..(365): Ceres Seq. ID no. 12352449
MPSLCHKVPSTGKCHASMTTSYMETSDVTDLDWENLGFGLIETDFMYVAKCGTDGIFSKGEVLPFGPIALSPSAGVLNYGQGLFEGLKAYRKTDGSILLFRPEENAIRMLSGAERMCMPAPTVEQFVDAVKQTVLANKRWVPPTGKGSLYIRPLLIGSGAVLGLAPAPEYSFIIFVSPVGNYFKEGLSPINLIVEDKFHRASPGGTGGVKTIGNYASVLKAQKIAKGKGYSDVLYLDAVHDKYLEEVSSCNIFVVKDNVISTPAIKGTILPGITRKSIIEVAQSKGFKVEERLVCVDELINADEVFCTGTAVVVSPVGSVTYMGKRVEYGNQGVGVVSQQLYKSLTSLQMGNVEDWMGWTMQLNQ

SEQ ID NO: 16467 - DNA, 1601 bp, Zea mays subsp. mays
  misc_feature (1)..(1601): Ceres Seq. ID no. 12352454
aggtcggtcctacacggtcccgttctgcctggtgcctgcaacctgccttttcttcttccgtcgccacccagcgtgctctctctccctctttctctctctctcgtggcggcgcctgggcagccgtcgctgccgcctgcgctaggtgccaggtcttcttcgggcccttcgccggcgacgagtaccaccaggttgtacatgtgtacacccatgtgctttactgggtcggaccctactcatcctccacactaaggccatctccatagactgcactgtttagactccactgtttagagagtggagatagggagtgagatagagagtggaatagggaggatgctggagatagcctaaggttgccactgagtgtgtgcatgattcagaggcaatgtcatcacaaactggaggtggcaaagagagtgacgccggccctgggcaacacaggcagatgcaaagtttggcaagacaagggtctttatacaaccttaccctcgatgaggtgcagaaccatttgggggagccattgcttagcatgaattttgatgagctcctgaagagcgtgtttcctgatggtgtagattcagatggtgctgtcacaggcaagcctgatcggacctcgagcctgcagcgacaggggagcatcctgatgcctccgcagttgagcaagaagactgttgacgaggtgtggaagggcatccagggtggaccagagaccagtactgtggtggatggtctgcagaggcgagagaggcatccaacacttggggagatgacacttgaggacttcttggtcaaagctggggttgttactgaaggacttgtgaaggattcagctgattttccaagcaatatggatacagctggcagcagtgttgttgtggctgctgcttctagtttgaaccctggagcacagtggttgcaacagtaccagcagcaagttttggggtcccagcaattgagtttggcaggttcatacatggctagtcagttgcgccctcagccattgtctattgctacaggtgctactttggattcaatttactctgatgaccagattacttcgccatcatttggtgcactttcggaccctcagacacctgggcgcaagcgtggtgccttaggggaggtagtggataaggtggttgaaagaaggcagaagaggatgataaagaatagggaatcagctgcgcgatcaagagcgagaaagcaggcttatactaatgaacttgaaaacaaggtattccgtctagaagaggagaataagaggctaaagaaacagcaggagttggatgagatactgagctctgctcctcccccagaacccaaatatcaactcaggagaacgggttcggctgccttttgagtttcggcgctgacaatgctcatagtgatttttgtacattatacaaggattctactttatatggtttccttccttttgtattagaaacatttgatagattgagggtatagctttttcccggcccggtaggtcagtgtatgtaggtcgctagcaagctgtagcatgtcctggcggatcatttccttggtgtctgtcagtgtgtacatcttctagacacatgtctaagtctgagagcttcctt

SEQ ID NO: 16468 - protein, 324 aa, Zea mays subsp. mays
  misc_feature (1)..(324): Ceres Seq. ID no. 12352455
MSSQTGGGKESDAGPGQHRQMQSLARQGSLYNLTLDEVQNHLGEPLLSMNFDELLKSVFPDGVDSDGAVTGKPDRTSSLQRQGSILMPPQLSKKTVDEVWKGIQGGPETSTVVDGLQRRERHPTLGEMTLEDFLVKAGVVTEGLVKDSADFPSNMDTAGSSVVVAAASSLNPGAQWLQQYQQQVLGSQQLSLAGSYMASQLRPQPLSIATGATLDSIYSDDQITSPSFGALSDPQTPGRKRGALGEVVDKVVERRQKRMIKNRESAARSRARKQAYTNELENKVFRLEEENKRLKKQQELDEILSSAPPPEPKYQLRRTGSAAF

SEQ ID NO: 16469 - protein, 304 aa, Zea mays subsp. mays
  misc_feature (1)..(304): Ceres Seq. ID no. 12352456
MQSLARQGSLYNLTLDEVQNHLGEPLLSMNFDELLKSVFPDGVDSDGAVTGKPDRTSSLQRQGSILMPPQLSKKTVDEVWKGIQGGPETSTVVDGLQRRERHPTLGEMTLEDFLVKAGVVTEGLVKDSADFPSNMDTAGSSVVVAAASSLNPGAQWLQQYQQQVLGSQQLSLAGSYMASQLRPQPLSIATGATLDSIYSDDQITSPSFGALSDPQTPGRKRGALGEVVDKVVERRQKRMIKNRESAARSRARKQAYTNELENKVFRLEEENKRLKKQQELDEILSSAPPPEPKYQLRRTGSAAF

SEQ ID NO: 16470 - protein, 276 aa, Zea mays subsp. mays
  misc_feature (1)..(276): Ceres Seq. ID no. 12352457
MNFDELLKSVFPDGVDSDGAVTGKPDRTSSLQRQGSILMPPQLSKKTVDEVWKGIQGGPETSTVVDGLQRRERHPTLGEMTLEDFLVKAGVVTEGLVKDSADFPSNMDTAGSSVVVAAASSLNPGAQWLQQYQQQVLGSQQLSLAGSYMASQLRPQPLSIATGATLDSIYSDDQITSPSFGALSDPQTPGRKRGALGEVVDKVVERRQKRMIKNRESAARSRARKQAYTNELENKVFRLEEENKRLKKQQELDEILSSAPPPEPKYQLRRTGSAAF

SEQ ID NO: 16471 - DNA, 1378 bp, Zea mays subsp. mays
  misc_feature (1)..(1378): Ceres Seq. ID no. 12352458
atagctgaagcctcggattgcaggttgcagccatgccaatgacaatcgagcgtgatctccacatggccacagggaacggagaaactagctacacgaaaaactctaggattcaggagaaagttatgtttcagatcaagccagtccttgaggaggccactagagcagcatactcagctctcctccctcaaaccatggtcgtggccgacttaggctgctcatcggggcctaacacactgcgcttcgtctccgaggtgattggcatcatagctcgccattgcaaagaacacgaccgacgacatgactacccacaacttcagttcttcctgaatgacctgccgggaaacgacttcaacaatctcttcctactcatccagcagttcaataagtcgatggcaagaaaccacaagggtgaggcagccgaggcactgcctccgtgctatatctctggtttgccaggctccttctacactaggatcttccctagcgaaagcgttcaccttttccactctttgttctccgttcactggcactctcaggcatcagaacaactaaaggacaccaaaaataaatgcttagatatctacatcacaaagaatatgccaccgtcgatggtgaagttgtttcaacagcagtttgagaaggacttctccctcttcctcaagctacgctatgaggaactcgtgtctggtggccaaatggttctaacatttattggaagaaagcatgaggatgtgttcactggagagtccaaccatctttacggattgcttgcgcagtcactgaaatccctagttgatgagggtcttgtggagaaagaaaaacttgagtcattctatcttccgatctactcaccgtcggttggtgaagtggaggcgatagtgaagcaagttgggttgttcaacatgaatcatgttaaagtatttgagataaattgggatccctacggtgactcataaggtgatgatgtgcatgacagtattaggagcggtgaaaatgttgctaagtgcctacgagcagttatggagccgttggttgcaagccaatttggagaacacatactcgacaagttattcaaagagtacgctcgtcgtgttgccaaacaccttgagaatgagaaaaccaagcatgctattcttgtcctatccatcgagaaagcaataattcatgtgtgaagtgtcttgtttctcactatctttccattattatcacatggtaatgtatgtttgttttgaatgtgcatgtttgtgccactagtatattgaatggcatggtgtttttgttgttttctttatcgcttctcctatattttagatgcctgaattttaaggtgatttcaggaaacattcttgtacaaggaattaatacaaataatttgctc

SEQ ID NO: 16472 - protein, 307 aa, Zea mays subsp. mays
  misc_feature (1)..(307): Ceres Seq. ID no. 12352459
MPMTIERDLHMATGNGETSYTKNSRIQEKVMFQIKPVLEEATRAAYSALLPQTMVVADLGCSSGPNTLRFVSEVIGIIARHCKEHDRRHDYPQLQFFLNDLPGNDFNNLFLLIQQFNKSMARNHKGEAAEALPPCYISGLPGSFYTRIFPSESVHLFHSLFSVHWHSQASEQLKDTKNKCLDIYITKNMPPSMVKLFQQQFEKDFSLFLKLRYEELVSGGQMVLTFIGRKHEDVFTGESNHLYGLLAQSLKSLVDEGLVEKEKLESFYLPIYSPSVGEVEAIVKQVGLFNMNHVKVFEINWDPYGDS

SEQ ID NO: 16473 - protein, 305 aa, Zea mays subsp. mays
  misc_feature (1)..(305): Ceres Seq. ID no. 12352460
MTIERDLHMATGNGETSYTKNSRIQEKVMFQIKPVLEEATRAAYSALLPQTMVVADLGCSSGPNTLRFVSEVIGIIARHCKEHDRRHDYPQLQFFLNDLPGNDFNNLFLLIQQFNKSMARNHKGEAAEALPPCYISGLPGSFYTRIFPSESVHLFHSLFSVHWHSQASEQLKDTKNKCLDIYITKNMPPSMVKLFQQQFEKDFSLFLKLRYEELVSGGQMVLTFIGRKHEDVFTGESNHLYGLLAQSLKSLVDEGLVEKEKLESFYLPIYSPSVGEVEAIVKQVGLFNMNHVKVFEINWDPYGDS

SEQ ID NO: 16474 - protein, 297 aa, Zea mays subsp. mays
  misc_feature (1)..(297): Ceres Seq. ID no. 12352461
MATGNGETSYTKNSRIQEKVMFQIKPVLEEATRAAYSALLPQTMVVADLGCSSGPNTLRFVSEVIGIIARHCKEHDRRHDYPQLQFFLNDLPGNDFNNLFLLIQQFNKSMARNHKGEAAEALPPCYISGLPGSFYTRIFPSESVHLFHSLFSVHWHSQASEQLKDTKNKCLDIYITKNMPPSMVKLFQQQFEKDFSLFLKLRYEELVSGGQMVLTFIGRKHEDVFTGESNHLYGLLAQSLKSLVDEGLVEKEKLESFYLPIYSPSVGEVEAIVKQVGLFNMNHVKVFEINWDPYGDS

SEQ ID NO: 16475 - DNA, 1274 bp, Zea mays subsp. mays
  misc_feature (1)..(1274): Ceres Seq. ID no. 12352466
ctacaaatatatggctgcagctgaggtccgacaccacacaaacagcacatctgtttagccaagctgtggccaacctctgcgaggaatggagatggagtcgactcctctcttgacaccatacaagatgggcgatttcaacctggcacacagggttgtgctggcgccgctgacgaggtgccgggcgttcgggaacgtgccgcagccggagcacatggctctctactaccgccagcgggcgacgcccggcggcttcctcatcgccgaggcctgcgccgtgtcggagagcgcgcgcgggtacccggacgttccggggctgtggacccaccaacaggtcgtggcctggaagccgatcgtcgacgccgtccacgccagcggtgccgtcttcttcgcccagctctggcacaccggccgggcctccccctcagaattccaaccaaatgggcaggcaccgatctctagcacggacaagcaaatcccagcacaggtgaaccattccggtgacgtcaacacgttcgcggtgcctcggagactagagacagaggagataccacacgtcgtcaatgacttccgggttgccgccagaaacgccatcaaagcaggctttgatggagtggagatccacgcggcaaacgggtacctgttcgatcagttcatgaaggacagcaccaatgaccgagacgactcctacgggggcagcttggagaaccggtgccgtttcacagccgaggtgatggcagccgtcgcggacgaggtcggtgccaaccgcctcggtgtgcgcctctctccgttcgcggattatatggactgccacgactccaacccagaggcgctcgcgcttcatgtcatcgacgagacgctgaacccgctcggcgtgctttactgccacatggtagagccaaggatgcgggtgaacccagacgacggtattatgactctcgagcacatgctgctaccgttcaggagggcgtttcgcgggacgttcattgctaatggaggctacgaccgtgaggaaggcaatgacgccattgcccgtggccgtggctatgcagatctcatcgcatacggccggatattccttgccaacccggaccttccgatgcgttttgccaagaatgccccgctgaacaagtatgataggagcaccttctatacctctgatccggtggttgggtacacagattatccatttctcgatcaactctaggatgattggcttataaacaatttccccacctggagtactatcttgaccttaaaataaaatgagtgtcact

SEQ ID NO: 16476 - protein, 372 aa, Zea mays subsp. mays
  misc_feature (1)..(372): Ceres Seq. ID no. 12352467
MEMESTPLLTPYKMGDFNLAHRVVLAPLTRCRAFGNVPQPEHMALYYRQRATPGGFLIAEACAVSESARGYPDVPGLWTHQQVVAWKPIVDAVHASGAVFFAQLWHTGRASPSEFQPNGQAPISSTDKQIPAQVNHSGDVNTFAVPRRLETEEIPHVVNDFRVAARNAIKAGFDGVEIHAANGYLFDQFMKDSTNDRDDSYGGSLENRCRFTAEVMAAVADEVGANRLGVRLSPFADYMDCHDSNPEALALHVIDETLNPLGVLYCHMVEPRMRVNPDDGIMTLEHMLLPFRRAFRGTFIANGGYDREEGNDAIARGRGYADLIAYGRIFLANPDLPMRFAKNAPLNKYDRSTFYTSDPVVGYTDYPFLDQL

SEQ ID NO: 16477 - protein, 370 aa, Zea mays subsp. mays
  misc_feature (1)..(370): Ceres Seq. ID no. 12352468
MESTPLLTPYKMGDFNLAHRVVLAPLTRCRAFGNVPQPEHMALYYRQRATPGGFLIAEACAVSESARGYPDVPGLWTHQQVVAWKPIVDAVHASGAVFFAQLWHTGRASPSEFQPNGQAPISSTDKQIPAQVNHSGDVNTFAVPRRLETEEIPHVVNDFRVAARNAIKAGFDGVEIHAANGYLFDQFMKDSTNDRDDSYGGSLENRCRFTAEVMAAVADEVGANRLGVRLSPFADYMDCHDSNPEALALHVIDETLNPLGVLYCHMVEPRMRVNPDDGIMTLEHMLLPFRRAFRGTFIANGGYDREEGNDAIARGRGYADLIAYGRIFLANPDLPMRFAKNAPLNKYDRSTFYTSDPVVGYTDYPFLDQL

SEQ ID NO: 16478 - protein, 359 aa, Zea mays subsp. mays
  misc_feature (1)..(359): Ceres Seq. ID no. 12352469
MGDFNLAHRVVLAPLTRCRAFGNVPQPEHMALYYRQRATPGGFLIAEACAVSESARGYPDVPGLWTHQQVVAWKPIVDAVHASGAVFFAQLWHTGRASPSEFQPNGQAPISSTDKQIPAQVNHSGDVNTFAVPRRLETEEIPHVVNDFRVAARNAIKAGFDGVEIHAANGYLFDQFMKDSTNDRDDSYGGSLENRCRFTAEVMAAVADEVGANRLGVRLSPFADYMDCHDSNPEALALHVIDETLNPLGVLYCHMVEPRMRVNPDDGIMTLEHMLLPFRRAFRGTFIANGGYDREEGNDAIARGRGYADLIAYGRIFLANPDLPMRFAKNAPLNKYDRSTFYTSDPVVGYTDYPFLDQL

SEQ ID NO: 16479 - DNA, 1676 bp, Zea mays subsp. mays
  misc_feature (1)..(1676): Ceres Seq. ID no. 12352494
aactcactgcatatctgacatctcagttgctgaacgcctgaaccgcaagtcatccatgacctcttctattccgaagctgcttctcctcctcttctttctcagccatcgctctcccattgctcgcgcaggcgatgatggcagctacaaggttctgtccatgggctctccgagaactgactccgtctgttcccagtccaaagcggttccttcgtcgtccgccggtgccgccacggtgcccttgcatcaccgtcacggcccatgctcgccgttgccgaccaagaagatgccgacgttggaggagacgctccaccgcgatcagctccgagctgcctacatccagcggaagttctcaggcggcggtggcgctggtggtgacgtccagcgatcggacgccaccgtgccgacggccctgggcacctccctgaacacgctggagtacctgatcaccgtaggcctgggctcgccggccacgtcccagaccatgctcatccgacaccggcagcgacgtgtcgtgggtgcagtgcaagccgtgctcgcagtgccactcccaggcggacccactcttcgaccccagctcgtcgagcacgtactccccgttctcctgcggctccgccgcctgcgcgcagctcggccaggaaggcaacggctgctcctccagctcccagtgccagtacattgtcacgtacggcgacggctccagcaccacggggacctacagctccgacacgctcgcgctgggctccagcgccgtcaagagcttccagttcgggtgcagcaacgtggagtcgggcttcaacgaccagaccgacgggctcatggggctcggcggcggcgcgcagtcgctggtgtcacagacggcggggacgctcggcagggccttctcgtactgcctcccgccgacgccgagctcctccgggttcctcacgctcggcgctgctggcggtagcggaacctcgggcttcgtcaagacgccgatgctcaggagcagccaggtccccacgttctacggcgtgcgcctccaggccatccgggtgggcgggaggcagctcagcatacccgcctcggtcttctccgctgggacggtcatggactcgggcacggtcatcacgcggctgccgccgaccgcctactcggcgctgtcgtcggcgttcaaggccgggatgaagcagtacccgccggcgcagccgagcggcatcctcgacacctgctttgacttcagcggccagtccagcgtcagcataccgtccgtcgcgctagtcttctccgggggcgccgttgtcagcctcgacgccagcggcatcatcctcagcaactgcctcgccttcgcggccaacagcgacgacagctccttgggcatcatcggcaacgtgcagcagcggacgttcgaggtgctgtacgacgttggccggggcgtcgtggggttcagggctggggcgtgctgatcgatcgtgatcggcgcaaggacattgacaataccggccgggagtacgtactgtgctcgtttgggttgcgagtgcaacgtaaatggaagaagtgcaaaacatatacatactacttcgattttaattatctttgcgatagcatgcaataacgtcatgcatgcaagtgtgcaaactactaaaagctaaaagataatcttaatgtcacctgattgatgactataaaagattaatgat

SEQ ID NO: 16480 - protein, 314 aa, Zea mays subsp. mays
  misc_feature (1)..(314): Ceres Seq. ID no. 12352495
THCISDISVAERLNRKSSMTSSIPKLLLLLFFLSHRSPIARAGDDGSYKVLSMGSPRTDSVCSQSKAVPSSSAGAATVPLHHRHGPCSPLPTKKMPTLEETLHRDQLRAAYIQRKFSGGGGAGGDVQRSDATVPTALGTSLNTLEYLITVGLGSPATSQTMLIRHRQRRVVGAVQAVLAVPLPGGPTLRPQLVEHVLPVLLRLRRLRAARPGRQRLLLQLPVPVHCHVRRRLQHHGDLQLRHARAGLQRRQELPVRVQQRGVGLQRPDRRAHGARRRRAVAGVTDGGDARQGLLVLPPADAELLRVPHARRCWR

SEQ ID NO: 16481 - protein, 296 aa, Zea mays subsp. mays
  misc_feature (1)..(296): Ceres Seq. ID no. 12352496
MTSSIPKLLLLLFFLSHRSPIARAGDDGSYKVLSMGSPRTDSVCSQSKAVPSSSAGAATVPLHHRHGPCSPLPTKKMPTLEETLHRDQLRAAYIQRKFSGGGGAGGDVQRSDATVPTALGTSLNTLEYLITVGLGSPATSQTMLIRHRQRRVVGAVQAVLAVPLPGGPTLRPQLVEHVLPVLLRLRRLRAARPGRQRLLLQLPVPVHCHVRRRLQHHGDLQLRHARAGLQRRQELPVRVQQRGVGLQRPDRRAHGARRRRAVAGVTDGGDARQGLLVLPPADAELLRVPHARRCWR

SEQ ID NO: 16482 - protein, 262 aa, Zea mays subsp. mays
  misc_feature (1)..(262): Ceres Seq. ID no. 12352497
MGSPRTDSVCSQSKAVPSSSAGAATVPLHHRHGPCSPLPTKKMPTLEETLHRDQLRAAYIQRKFSGGGGAGGDVQRSDATVPTALGTSLNTLEYLITVGLGSPATSQTMLIRHRQRRVVGAVQAVLAVPLPGGPTLRPQLVEHVLPVLLRLRRLRAARPGRQRLLLQLPVPVHCHVRRRLQHHGDLQLRHARAGLQRRQELPVRVQQRGVGLQRPDRRAHGARRRRAVAGVTDGGDARQGLLVLPPADAELLRVPHARRCWR

SEQ ID NO: 16483 - DNA, 1492 bp, Zea mays subsp. mays
  misc_feature (1)..(1492): Ceres Seq. ID no. 12352498
cttaaaccaacactccatacgttacacagctcatgtgacacgaggccaagaaaaccagtcaaacttccgcgcactgccgtctgtccactatggccttcgccgcctccccttccctctccgcactcgcttcctcctcgtcgtcaaccgccgccgcccccacgccttcttccaaccctttgcacgagccgaggcctctccacctctcgctcaagcccgtcttacccctccccaaaccgcatgcgctctcctgctccgcgccgcacatcccccgcgccgccgctggggacggatcgggcgtcgggaatggaggcaaggatggaggcggcggcgggggtggcgaggatgaagacgactgtgacgatgcggacttcggtccgctgctcggcttcaacgaggtgctgcacctcgccgcggcgcgcggcgttgcgctcccgggcgacatgctggaggcggccaaggacgccggcatccgggaagtcctcttgctccgctacttcgatctgcaggccgcgccgtggccactaggcgtgttgatccgcgccttctcgatgctccgcaaccggatgctcgccgacccgtcgttcctcttcaaagttagcaccgagattgtgatcgactcttgctgcgcgacatttgcagaggtgcagaagaggggaaaggatttttgggcagagtttgaactgtacgctgctgatcttcttgtcggtgtagcagttgatattgcacttgtggggctgctggctccatatgtgagaattgggaagccatctgcttcaacgggtctctttggaagattcagcaggatggctggatctttgccaagcagtgtttttgaagctgaaagaccaggctgcagatttacagcccagcaaagaatcggaacatacttttacaagggtgtcttgtatggttcagttggatttgtctgtggcataattggtcaaggaattgctaatatgataatgactgccaaaaggagtgtcaaaaaatcagatgaagatattcctgttccaccacttgttaaaagtgcagctctatggggtgtgttcctcgctgtatcatctaacacacgctaccagatcatcaatggcctggagcgggtagtggaggcatcgcctgtcgcaagacgtgttccccctgttgctatggcttttacggttggggttcgttttgccaacaatatctacggtggaatgcagttcgtggattgggctcggtggagcggcgttcagtaatgggctcttggttgcagttaccaaaacatcaatacattgtacgttcaaatcttagttgcagtaatcgttcaggtggatccgtgttgttttctcgttacatttcctggtaagtagcggaggctggggcagagctctatgaagttttaactcatttactatgagaaacaaggaagtacttcgcatcatatggcatttatattgctgctcctaattgatcatgtgcacttttgccatactgaatgaatagaagcgttctg

SEQ ID NO: 16484 - protein, 381 aa, Zea mays subsp. mays
  misc_feature (1)..(381): Ceres Seq. ID no. 12352499
MAFAASPSLSALASSSSSTAAAPTPSSNPLHEPRPLHLSLKPVLPLPKPHALSCSAPHIPRAAAGDGSGVGNGGKDGGGGGGGEDEDDCDDADFGPLLGFNEVLHLAAARGVALPGDMLEAAKDAGIREVLLLRYFDLQAAPWPLGVLIRAFSMLRNRMLADPSFLFKVSTEIVIDSCCATFAEVQKRGKDFWAEFELYAADLLVGVAVDIALVGLLAPYVRIGKPSASTGLFGRFSRMAGSLPSSVFEAERPGCRFTAQQRIGTYFYKGVLYGSVGFVCGIIGQGIANMIMTAKRSVKKSDEDIPVPPLVKSAALWGVFLAVSSNTRYQIINGLERVVEASPVARRVPPVAMAFTVGVRFANNIYGGMQFVDWARWSGVQ

SEQ ID NO: 16485 - protein, 264 aa, Zea mays subsp. mays
  misc_feature (1)..(264): Ceres Seq. ID no. 12352500
MLEAAKDAGIREVLLLRYFDLQAAPWPLGVLIRAFSMLRNRMLADPSFLFKVSTEIVIDSCCATFAEVQKRGKDFWAEFELYAADLLVGVAVDIALVGLLAPYVRIGKPSASTGLFGRFSRMAGSLPSSVFEAERPGCRFTAQQRIGTYFYKGVLYGSVGFVCGIIGQGIANMIMTAKRSVKKSDEDIPVPPLVKSAALWGVFLAVSSNTRYQIINGLERVVEASPVARRVPPVAMAFTVGVRFANNIYGGMQFVDWARWSGVQ

SEQ ID NO: 16486 - protein, 228 aa, Zea mays subsp. mays
  misc_feature (1)..(228): Ceres Seq. ID no. 12352501
MLRNRMLADPSFLFKVSTEIVIDSCCATFAEVQKRGKDFWAEFELYAADLLVGVAVDIALVGLLAPYVRIGKPSASTGLFGRFSRMAGSLPSSVFEAERPGCRFTAQQRIGTYFYKGVLYGSVGFVCGIIGQGIANMIMTAKRSVKKSDEDIPVPPLVKSAALWGVFLAVSSNTRYQIINGLERVVEASPVARRVPPVAMAFTVGVRFANNIYGGMQFVDWARWSGVQ

SEQ ID NO: 16487 - DNA, 1178 bp, Zea mays subsp. mays
  misc_feature (1)..(1178): Ceres Seq. ID no. 12352502
agtttaatacaaaccaggcttgctcgtggcggcaaaaaaccaacgtgcttgatctccctccgccactccatccatctcctcgctcccagtccccgggaagcatggcgtccgtcaccgcccgcgccccggtagcggcccttcgcccgtcgtcggcatcgctcaagtcgtcgtcggccttccttggccactctagccgcctcggccgcaccgcgtctcccacgaggcgcagcctcaaggcggaggccaagggcgagtggctccccggccttccctccccctcctacctcgacggcagcctggcgggtgacaatggcttcgacccgttgggcctggcggaggaccccgagaacctgcggtggttcgtgcaggcggagctggtgaacggccggtgggccatgcttggcgtggccgggatgctcatcccggaggtgctgaccaaagccgggctgatcaacgcgccgcagtggtacgacgccagcaagtcggagtacttcgcgtcgtcgtccacgctgttcgtggtcgagttcatcctgttccactacgtggagatccggcggtggcaggacatcaagaaccccggcagcgtcaaccaggaccccatcttcaagagctacagcctgccgccgcacgagtgcggctacccgggcagcgtcttcaacccgctcaacttcgcgcccacgctcgaggccaaggagaaggagctcgccaacgggaggctggcgatgctggcgttcctgggcttcctgatccagcacaacgtcaccggcaaggggcccttcgacaacctgctgcagcacctgtctgacccatggcacaacaccatcatccagaccttctccggttgagtcgaggtcgaggagggatacgatccatcgctggtgagctgatatggactggaaggcaaacattgaaaccttaagttcctttctggatcagtttgtgtgtgttgttaatctatctggagggtacagattcgggccgtgttgcaatgcatgcatggtctgaagggagcgagggctgaggagtgactggtatgtacattagctgaaggggatattaagggtagagatcgtttgatcagtatcatctgtatatccccatgcatggggtttcgttttgtgcgcttacttctggcttgccagcgtatggttcaatgtggaaacacatgtattagtacg

SEQ ID NO: 16488 - protein, 280 aa, Zea mays subsp. mays
  misc_feature (1)..(280): Ceres Seq. ID no. 12352503
FNTNQACSWRQKTNVLDLPPPLHPSPRSQSPGSMASVTARAPVAALRPSSASLKSSSAFLGHSSRLGRTASPTRRSLKAEAKGEWLPGLPSPSYLDGSLAGDNGFDPLGLAEDPENLRWFVQAELVNGRWAMLGVAGMLIPEVLTKAGLINAPQWYDASKSEYFASSSTLFVVEFILFHYVEIRRWQDIKNPGSVNQDPIFKSYSLPPHECGYPGSVFNPLNFAPTLEAKEKELANGRLAMLAFLGFLIQHNVTGKGPFDNLLQHLSDPWHNTIIQTFSG

SEQ ID NO: 16489 - protein, 247 aa, Zea mays subsp. mays
  misc_feature (1)..(247): Ceres Seq. ID no. 12352504
MASVTARAPVAALRPSSASLKSSSAFLGHSSRLGRTASPTRRSLKAEAKGEWLPGLPSPSYLDGSLAGDNGFDPLGLAEDPENLRWFVQAELVNGRWAMLGVAGMLIPEVLTKAGLINAPQWYDASKSEYFASSSTLFVVEFILFHYVEIRRWQDIKNPGSVNQDPIFKSYSLPPHECGYPGSVFNPLNFAPTLEAKEKELANGRLAMLAFLGFLIQHNVTGKGPFDNLLQHLSDPWHNTIIQTFSG

SEQ ID NO: 16490 - protein, 149 aa, Zea mays subsp. mays
  misc_feature (1)..(149): Ceres Seq. ID no. 12352505
MLGVAGMLIPEVLTKAGLINAPQWYDASKSEYFASSSTLFVVEFILFHYVEIRRWQDIKNPGSVNQDPIFKSYSLPPHECGYPGSVFNPLNFAPTLEAKEKELANGRLAMLAFLGFLIQHNVTGKGPFDNLLQHLSDPWHNTIIQTFSG

SEQ ID NO: 16491 - DNA, 1696 bp, Zea mays subsp. mays
  misc_feature (1)..(1696): Ceres Seq. ID no. 12352506
atagagagagccactggccacaggtaggcaggcaggaggacgagtcggcaaggaagctgcctgctttcagaaagagtcatagagatagttattaagatggcgttgcttcggctgcttgccctctccctgctcttcgcagtggccactcctgtcagggacatcgcccacgatgcctgctcgtcagaagtgaaggatttccagcacctgaacaacagctcggggctccacctgacgctgcaccacccgcagagcccctgctccccggcgccgctgcccgccgacctccccttctccgcggtgctcgcccacgacggcgcgcgcatcgcgtcgctcgccgcgcgcctcgccaagacgccgtcctctcggcccaccttgcttgacgagagccgcgcggggtcgtcgtcgtcgtcccccgatgacgagtccctcgcgtccgtgccgctcggcccgggcacgtccgtcggcgtcggcaactacgtcacccgcatgggcctcggcacgccggccaagtcgtacgtcatggtcgtggacacggggtcctcgctcacctggctccagtgctccccctgcgtcgtgtcgtgccaccgccagtccggcccggtgttcaaccccaaggcgtccagctcctacgcctccgtgtcctgctccgcgcagcagtgcagcgacctcaccaccgccacgctcaaccccgcctcctgctccacctccaacgtctgcatctaccaggccagctacggcgacagctccttctcggtcgggtatctgagcaaggacaccgtgtcgttcggctccaccagcgtgcccaacttctactacggctgcggacaagacaacgagggcctcttcgggcagtcggcggggctcatcggcctggcgcgtaacaagctgtcgctgctgtaccagctggcgccgagcatgggctactccttctcctactgcctcccgacgtcgtcgtcgtcctcctcggggtacctgtccatcggctcctacaacccggggcagtactcgtacacgcccatggcgtcgagctcgctggacgactcgctctacttcatcaagatgaccgggatcaaggtcgcgggcaagccgctgtccgtgtcgtcgtcggcctactccagcctgccgacgatcatcgactccggcacggtgatcacgcgcctgcctacgggcgtgtactcggcgctcagcaaggcggtggcgggcgccatgaaggggacgccccgcgcgtcggcgttctccatcctggacacgtgcttccagggccaggcggcgcggctgcgcgtgcccgaggtcaccatggccttcgccggcggcgcggcgctcaagctggccgccaggaacctgctggtggacgtggacagcgccaccacgtgcctggccttcgcgcccgcccggagcgccgccatcatcgggaacacgcagcagcagacgttcagcgtcgtctacgacgtcaagaacagcaagatcgggttcgccgccgccggctgcagctgagaagcgacacctacatacacgcgcatgcacagaccgactcggcaactaaaactaaaacgagcagcgcatgcatgcatctaccgtccggtttcgtctgaaaccatcattaatttcgatcgtccactccacgcacagcaagttctttacggaccttgccgcatatgatatgtacatggtgacaagataaggtacaggagaattg

SEQ ID NO: 16492 - protein, 465 aa, Zea mays subsp. mays
  misc_feature (1)..(465): Ceres Seq. ID no. 12352507
MALLRLLALSLLFAVATPVRDIAHDACSSEVKDFQHLNNSSGLHLTLHHPQSPCSPAPLPADLPFSAVLAHDGARIASLAARLAKTPSSRPTLLDESRAGSSSSSPDDESLASVPLGPGTSVGVGNYVTRMGLGTPAKSYVMVVDTGSSLTWLQCSPCVVSCHRQSGPVFNPKASSSYASVSCSAQQCSDLTTATLNPASCSTSNVCIYQASYGDSSFSVGYLSKDTVSFGSTSVPNFYYGCGQDNEGLFGQSAGLIGLARNKLSLLYQLAPSMGYSFSYCLPTSSSSSSGYLSIGSYNPGQYSYTPMASSSLDDSLYFIKMTGIKVAGKPLSVSSSAYSSLPTIIDSGTVITRLPTGVYSALSKAVAGAMKGTPRASAFSILDTCFQGQAARLRVPEVTMAFAGGAALKLAARNLLVDVDSATTCLAFAPARSAAIIGNTQQQTFSVVYDVKNSKIGFAAAGCS

SEQ ID NO: 16493 - protein, 335 aa, Zea mays subsp. mays
  misc_feature (1)..(335): Ceres Seq. ID no. 12352508
MGLGTPAKSYVMVVDTGSSLTWLQCSPCVVSCHRQSGPVFNPKASSSYASVSCSAQQCSDLTTATLNPASCSTSNVCIYQASYGDSSFSVGYLSKDTVSFGSTSVPNFYYGCGQDNEGLFGQSAGLIGLARNKLSLLYQLAPSMGYSFSYCLPTSSSSSSGYLSIGSYNPGQYSYTPMASSSLDDSLYFIKMTGIKVAGKPLSVSSSAYSSLPTIIDSGTVITRLPTGVYSALSKAVAGAMKGTPRASAFSILDTCFQGQAARLRVPEVTMAFAGGAALKLAARNLLVDVDSATTCLAFAPARSAAIIGNTQQQTFSVVYDVKNSKIGFAAAGCS

SEQ ID NO: 16494 - protein, 324 aa, Zea mays subsp. mays
  misc_feature (1)..(324): Ceres Seq. ID no. 12352509
MVVDTGSSLTWLQCSPCVVSCHRQSGPVFNPKASSSYASVSCSAQQCSDLTTATLNPASCSTSNVCIYQASYGDSSFSVGYLSKDTVSFGSTSVPNFYYGCGQDNEGLFGQSAGLIGLARNKLSLLYQLAPSMGYSFSYCLPTSSSSSSGYLSIGSYNPGQYSYTPMASSSLDDSLYFIKMTGIKVAGKPLSVSSSAYSSLPTIIDSGTVITRLPTGVYSALSKAVAGAMKGTPRASAFSILDTCFQGQAARLRVPEVTMAFAGGAALKLAARNLLVDVDSATTCLAFAPARSAAIIGNTQQQTFSVVYDVKNSKIGFAAAGCS

SEQ ID NO: 16495 - DNA, 1555 bp, Zea mays subsp. mays
  misc_feature (1)..(1555): Ceres Seq. ID no. 12352532
ctcttcgccttttcctcccctactttttcctgctactgttcacgctctacagtacggaggctcctacgtgcaggtagctcccaggaccagatccgaaccctaaccctagccaatttggtcggtgatggaagagcacgtgcctcgaggcggcggcggcgggaggcccccgatcccggcggcggcggcgaggaagccggcgctcgcgcggcactcctcttttgtgaggagtcctgcaaacaatacaaagcctgcaactgagagagcttttgaaggcatggacactgaatttatccctattgtacgatctggtgggtgggctgatattggctccaggcacacaatggaggatgtctttatctgctttgataatttcatgcaagattttggaattgaaagttttgaagaaggacccagtgccttttatgggatttttgatgggcatggtggaaagcatgcagctgattttgtgtgcagtaatttaccaaggtttattgtcgaggatgaggattttcctagggagatagtgaaagcaatgtcctctgcattcttgcaggctgatgcttcttttgcagatgcttgttctctgaactgctctctttcttctggtacaactgctcttgcagcacttgtggttgggagatcacttctggtcgcgaatgctggtgactgccgagcagtactttgtcgtcgtggaaaggcaattgagatgtccagggatcacaaaccatcttgcaacagggagaagatacgtattgaggcattgggtggatatgtcgatgatggctacctgaatgggcagcttaatgtcgctcgagcaattggggactggcatatggaaggcatgaaggcatgtggtggtcttggtcctcttactgccgagcctgaggtaatgacaatggatctaactgatgaggacgaattcctgatcatgggctgtgatgggatctgggatgtattcctcagccaaaatgcagtagattttgctcgccgtaagctccaagaacacaatgacccggctgcctgctgtaaagaactagttgatgaggccattaagaggaagagtggtgataacctttctgtggttgtcgtctgcttcaactctaggccgcctcctgttctaacaactcctaggcctcgtgtacagaggagcatatctgcagaaggcctgagagagctgcagagcttccttgatagtttggccgattgacatggggttctagcagccccactataagttttgacattttccatagcttagcttggaaaataggtttagcatgtgctgtctcataacttcgctgagatggctgctgttgagtaatctagagttgtaaaatatgctgcggctaactgtgtcagcagttgagagcgtttatcagttgagagtatttatcagcatgttgactttgtgagtcctgaatgattagtcggcatttcttaggtctccataaatcggtggttcatcgttgtaaaaggctgttaatgcccttggatattttcctgtattgttcgctttggacaagttattaactgggaaaactgctgtttttgctgc

SEQ ID NO: 16496 - protein, 360 aa, Zea mays subsp. mays
  misc_feature (1)..(360): Ceres Seq. ID no. 12352533
MEEHVPRGGGGGRPPIPAAAARKPALARHSSFVRSPANNTKPATERAFEGMDTEFIPIVRSGGWADIGSRHTMEDVFICFDNFMQDFGIESFEEGPSAFYGIFDGHGGKHAADFVCSNLPRFIVEDEDFPREIVKAMSSAFLQADASFADACSLNCSLSSGTTALAALVVGRSLLVANAGDCRAVLCRRGKAIEMSRDHKPSCNREKIRIEALGGYVDDGYLNGQLNVARAIGDWHMEGMKACGGLGPLTAEPEVMTMDLTDEDEFLIMGCDGIWDVFLSQNAVDFARRKLQEHNDPAACCKELVDEAIKRKSGDNLSVVVVCFNSRPPPVLTTPRPRVQRSISAEGLRELQSFLDSLAD

SEQ ID NO: 16497 - protein, 310 aa, Zea mays subsp. mays
  misc_feature (1)..(310): Ceres Seq. ID no. 12352534
MDTEFIPIVRSGGWADIGSRHTMEDVFICFDNFMQDFGIESFEEGPSAFYGIFDGHGGKHAADFVCSNLPRFIVEDEDFPREIVKAMSSAFLQADASFADACSLNCSLSSGTTALAALVVGRSLLVANAGDCRAVLCRRGKAIEMSRDHKPSCNREKIRIEALGGYVDDGYLNGQLNVARAIGDWHMEGMKACGGLGPLTAEPEVMTMDLTDEDEFLIMGCDGIWDVFLSQNAVDFARRKLQEHNDPAACCKELVDEAIKRKSGDNLSVVVVCFNSRPPPVLTTPRPRVQRSISAEGLRELQSFLDSLAD

SEQ ID NO: 16498 - protein, 288 aa, Zea mays subsp. mays
  misc_feature (1)..(288): Ceres Seq. ID no. 12352535
MEDVFICFDNFMQDFGIESFEEGPSAFYGIFDGHGGKHAADFVCSNLPRFIVEDEDFPREIVKAMSSAFLQADASFADACSLNCSLSSGTTALAALVVGRSLLVANAGDCRAVLCRRGKAIEMSRDHKPSCNREKIRIEALGGYVDDGYLNGQLNVARAIGDWHMEGMKACGGLGPLTAEPEVMTMDLTDEDEFLIMGCDGIWDVFLSQNAVDFARRKLQEHNDPAACCKELVDEAIKRKSGDNLSVVVVCFNSRPPPVLTTPRPRVQRSISAEGLRELQSFLDSLAD

SEQ ID NO: 16499 - DNA, 1436 bp, Zea mays subsp. mays
  misc_feature (1)..(1436): Ceres Seq. ID no. 12352544
gaaacaaattgcgcattttcttctcctgcggtccttccttcgcttccccgttcttccagaatcctgtcgagacctgaatccaccctcacccagcggtccccatggcctccggcgaaggtgtagttgaccaaccgcctctcttctgttgatcctcgcatcggccaactcccccatctccgcaagctctcattccgccagaacctcctcgacgatgacgccgtcgcgccactcacgtcctgggaggctattgccgggttgaaggagttcgtccttagagataacaaacttacaaggattcctgatgctggcatattcaaggatcttctggtgttcgatgtatctttcaatgagatatcttctttgactggtctgtccaaggtttccatcaaattgaaggaactttatgtttcaaaaaatgaagttgcaaagatggaagagcttgaacatttccatgcgctggaaattcttgaacttggtagcaacagattacgggtaatggaaaatcttgaaaccttgacaaatctacaagaactgtggttgggaagaaatcgaattcgagctgtcaacttgtgtggtttgaagctaattaagaaaataagtttgcaaagcaacagactgacttcaatgcatgggtttcaggaatgtgctgcattagaggagttatacctcagccataatggaatccaaaagatggaaggcctctctactttgcataacctccgcattttggatgtttcagctaacaagctaacgactatagaaaatatcgaaaccttaaccaggctggaggacctgtggttgaatgacaaccaaataccatctctagagggtatagagacagctttggctggttcgcgggagaagttgacgacaatctatctcgaacgaaatccctgtgcaaaaactccagattactcgtcgacgttgaggaaaatatttccaaatctcgaacaaattgattcagatatcatagcatgataactagctaatccttgcccagatactaaggcaaagaaggctttggggttccccggagaagtcattaacagcaatcaacttgtgaggcgaacaatagacagtaatttgatccttaaagtcttcattgccaactctgctcgtgttgtggaagacattggttcggagtttgtagccttgagccgttacgggcttaatatagtgattggtaaccaaataattagaggtgtacgaggattgtcacaggatccatatccgtgttactagttttaagatgtttcatttcagttctctagattagtgttgatttttttttctctccaaatgaggctaggaacagccagcagttcatttctgtaagttgaatgcagacatctctgtgttgcatatcaacttgcaaggatgtgtcagcctgttgagaacccgaaattatcttttatttgaattttatttattactcc

SEQ ID NO: 16500 - protein, 182 aa, Zea mays subsp. mays
  misc_feature (1)..(182): Ceres Seq. ID no. 12352545
MEELEHFHALEILELGSNRLRVMENLETLTNLQELWLGRNRIRAVNLCGLKLIKKISLQSNRLTSMHGFQECAALEELYLSHNGIQKMEGLSTLHNLRILDVSANKLTTIENIETLTRLEDLWLNDNQIPSLEGIETALAGSREKLTTIYLERNPCAKTPDYSSTLRKIFPNLEQIDSDIIA

SEQ ID NO: 16501 - protein, 160 aa, Zea mays subsp. mays
  misc_feature (1)..(160): Ceres Seq. ID no. 12352546
MENLETLTNLQELWLGRNRIRAVNLCGLKLIKKISLQSNRLTSMHGFQECAALEELYLSHNGIQKMEGLSTLHNLRILDVSANKLTTIENIETLTRLEDLWLNDNQIPSLEGIETALAGSREKLTTIYLERNPCAKTPDYSSTLRKIFPNLEQIDSDIIA

SEQ ID NO: 16502 - protein, 117 aa, Zea mays subsp. mays
  misc_feature (1)..(117): Ceres Seq. ID no. 12352547
MHGFQECAALEELYLSHNGIQKMEGLSTLHNLRILDVSANKLTTIENIETLTRLEDLWLNDNQIPSLEGIETALAGSREKLTTIYLERNPCAKTPDYSSTLRKIFPNLEQIDSDIIA

SEQ ID NO: 16503 - DNA, 997 bp, Zea mays subsp. mays
  misc_feature (1)..(997): Ceres Seq. ID no. 12352560
gattcactcacgaattccccattcccttccctatcgcatcgcatcgagagccaggccagccagccacctctgcttggtctccatggccgccgcgctcaggtccccggcctcggccaaggtctcgagccccgccgccgcctccaaggtgcgccaggcgtccagagtcgcggtgggcgggttccggcagcatccccggagccgtggcggccccgtggccgtgcgggcgtcgctgttctcgcccaagcccgcggcggccaaggacgcgcggccgaccaaggtgcaggagctgtacgtgtacgagatgaacgagcgggaccgcgagagcccggcgtacctgcgcctcagcgccaagcagacggagaacgcgctgggcgacctggtccccttcacaaacaaggtttacaacggcagcctggacaagcggctgggcatcaccgccggcatctgcgtgctcatccagcacgtccccgaccgcaacggcgaccggtacgaggccatctacagcttctacttcggcgactacggccacatctcggtgcagggcgcgtacctgacctacgaggagtcgtacctggccgtcacgggcggctccggcgtcttcgagggcgcctacggccaggtcaagctccaccagatcgtcttccccttcaagatcttctacaccttctacctccggggcatcccggacctgcccagggacctgctctgcacgcccgtcccgccctcccccaccgtcgagcccacgcccgccgccagggccgccgagccgcacgcctgcgtcaacaactacaccaactgactcatcaattccagcccaggaaccatctctgcctgccgtgcctgtccccccctgctcctcactcgatttgtatgtttgtatggcttagggttcttcgattcgtacgcgcgtgcgtggtagcaccaataaagacgcgatcgatcgagttgtgtacttgtgtcacccttgaacaaacaatgagatatttgtttgtcgtcg

SEQ ID NO: 16504 - protein, 332 aa, Zea mays subsp. mays
  misc_feature (1)..(332): Ceres Seq. ID no. 12352561
DSLTNSPFPSLSHRIESQASQPPLLGLHGRRAQVPGLGQGLEPRRRLQGAPGVQSRGGRVPAASPEPWRPRGRAGVAVLAQARGGQGRAADQGAGAVRVRDERAGPREPGVPAPQRQADGERAGRPGPLHKQGLQRQPGQAAGHHRRHLRAHPARPRPQRRPVRGHLQLLLRRLRPHLGAGRVPDLRGVVPGRHGRLRRLRGRLRPGQAPPDRLPLQDLLHLLPPGHPGPAQGPALHARPALPHRRAHARRQGRRAARLRQQLHQLTHQFQPRNHLCLPCLSPPAPHSICMFVWLRVLRFVRACVVAPIKTRSIELCTCVTLEQTMRYLFVV

SEQ ID NO: 16505 - protein, 265 aa, Zea mays subsp. mays
  misc_feature (1)..(265): Ceres Seq. ID no. 12352562
IHSRIPHSLPYRIASRARPASHLCLVSMAAALRSPASAKVSSPAAASKVRQASRVAVGGFRQHPRSRGGPVAVRASLFSPKPAAAKDARPTKVQELYVYEMNERDRESPAYLRLSAKQTENALGDLVPFTNKVYNGSLDKRLGITAGICVLIQHVPDRNGDRYEAIYSFYFGDYGHISVQGAYLTYEESYLAVTGGSGVFEGAYGQVKLHQIVFPFKIFYTFYLRGIPDLPRDLLCTPVPPSPTVEPTPAARAAEPHACVNNYTN

SEQ ID NO: 16506 - protein, 238 aa, Zea mays subsp. mays
  misc_feature (1)..(238): Ceres Seq. ID no. 12352563
MAAALRSPASAKVSSPAAASKVRQASRVAVGGFRQHPRSRGGPVAVRASLFSPKPAAAKDARPTKVQELYVYEMNERDRESPAYLRLSAKQTENALGDLVPFTNKVYNGSLDKRLGITAGICVLIQHVPDRNGDRYEAIYSFYFGDYGHISVQGAYLTYEESYLAVTGGSGVFEGAYGQVKLHQIVFPFKIFYTFYLRGIPDLPRDLLCTPVPPSPTVEPTPAARAAEPHACVNNYTN

SEQ ID NO: 16507 - DNA, 1545 bp, Zea mays subsp. mays
  misc_feature (1)..(1545): Ceres Seq. ID no. 12352572
aaatcacctgttcccgcgacctcctccccggcgtacctccagtctccagagatccacacgaccacaccgacccaccaccatctgcatcggcaatggacgccgcgccacccaccataaccaagtccccgccgtccctggttccaccagcggggcccactcccggtggttccctcccgctctcctccatcgacaagaccgccgccgtccgtgtctccgtcgacttcatccaggtcttccccgcccctacgtcggggaaggaggactggagcccctcatctgcgatcgcggccatgcgcgagggctttgccagggcgctcgtgccgtactaccctatcgccggccgcatcgccgagcccgtgcctggtgagcctgagattgagtgcacgggggaaggggtgtggttcgtggaggctgaggcaagctgctccctcgaggaggcgcgtaacctcgagcgcccgctgtgcatcccgaaggaggagctgctcccgcgtccgccggccggtgtgcgcgtggaggacaccctgctgctcgcgcaggttacaaagttcacatgtggtgggttttctgtgggcatttgcttcagtcacttggtgttcgacgggcagggtgctgcgcaatttctgaaagcagttggtgagatggctaggggcctccctgagccatcgatcaagccaatctgggctcgtgatgccatccccaacccacctaagccacccctaggcccgccaccgtcattcaccgcattcaacttcgagaaatcagtcgtcgagatcgctctggacagcatcaagcgcgtgaaggatcaagttgcaagcgaaaccaaccagaagtgttccactttcgacgtggtcaccgccatgatcttcaaatgtcgcgccttggcagtcgacttcgcacctgacgctgaggttcgcctgggctttgcagccagcactcgccacctgctgagcaatgtgctgccctccgtcgatggctactacgggaactgtgtgtacccaggtggtctcaccaagaccagccaggaggtgaaggaagcttcactggtggagatcgtgaccgcgatcagggaggccaaggaggctctgtcgtcgaggttcctcgactggttgagcggcggcgccaaggagaaccactacaacgtgtcgctggactacggcaccctcgtcgtgaccgactggagccacgtgggtttcaacgacgttgactacgggttcggtgagccaagctacgtgttcaccctgaacgacgacgtgaacatcgttccctccgttgtgtacctgaagcctcccaagccgaagcagggcatcaggctggtgctgcagtgcgtggaagggcggcactctgccgtgttcagcgaggagctgcagaagcacgcatagagcgagtgtattccatcccacagtggagattgttgtattttgttgtgtcgaattgctgcccccggaatttgcttgcaataagatagggttggcacgtgtttatactctgtactgttatctcagcacgttacattatacatgtattgagtgagtattgacagtggtg

SEQ ID NO: 16508 - protein, 458 aa, Zea mays subsp. mays
  misc_feature (1)..(458): Ceres Seq. ID no. 12352573
ITCSRDLLPGVPPVSRDPHDHTDPPPSASAMDAAPPTITKSPPSLVPPAGPTPGGSLPLSSIDKTAAVRVSVDFIQVFPAPTSGKEDWSPSSAIAAMREGFARALVPYYPIAGRIAEPVPGEPEIECTGEGVWFVEAEASCSLEEARNLERPLCIPKEELLPRPPAGVRVEDTLLLAQVTKFTCGGFSVGICFSHLVFDGQGAAQFLKAVGEMARGLPEPSIKPIWARDAIPNPPKPPLGPPPSFTAFNFEKSVVEIALDSIKRVKDQVASETNQKCSTFDVVTAMIFKCRALAVDFAPDAEVRLGFAASTRHLLSNVLPSVDGYYGNCVYPGGLTKTSQEVKEASLVEIVTAIREAKEALSSRFLDWLSGGAKENHYNVSLDYGTLVVTDWSHVGFNDVDYGFGEPSYVFTLNDDVNIVPSVVYLKPPKPKQGIRLVLQCVEGRHSAVFSEELQKHA

SEQ ID NO: 16509 - protein, 428 aa, Zea mays subsp. mays
  misc_feature (1)..(428): Ceres Seq. ID no. 12352574
MDAAPPTITKSPPSLVPPAGPTPGGSLPLSSIDKTAAVRVSVDFIQVFPAPTSGKEDWSPSSAIAAMREGFARALVPYYPIAGRIAEPVPGEPEIECTGEGVWFVEAEASCSLEEARNLERPLCIPKEELLPRPPAGVRVEDTLLLAQVTKFTCGGFSVGICFSHLVFDGQGAAQFLKAVGEMARGLPEPSIKPIWARDAIPNPPKPPLGPPPSFTAFNFEKSVVEIALDSIKRVKDQVASETNQKCSTFDVVTAMIFKCRALAVDFAPDAEVRLGFAASTRHLLSNVLPSVDGYYGNCVYPGGLTKTSQEVKEASLVEIVTAIREAKEALSSRFLDWLSGGAKENHYNVSLDYGTLVVTDWSHVGFNDVDYGFGEPSYVFTLNDDVNIVPSVVYLKPPKPKQGIRLVLQCVEGRHSAVFSEELQKHA

SEQ ID NO: 16510 - protein, 362 aa, Zea mays subsp. mays
  misc_feature (1)..(362): Ceres Seq. ID no. 12352575
MREGFARALVPYYPIAGRIAEPVPGEPEIECTGEGVWFVEAEASCSLEEARNLERPLCIPKEELLPRPPAGVRVEDTLLLAQVTKFTCGGFSVGICFSHLVFDGQGAAQFLKAVGEMARGLPEPSIKPIWARDAIPNPPKPPLGPPPSFTAFNFEKSVVEIALDSIKRVKDQVASETNQKCSTFDVVTAMIFKCRALAVDFAPDAEVRLGFAASTRHLLSNVLPSVDGYYGNCVYPGGLTKTSQEVKEASLVEIVTAIREAKEALSSRFLDWLSGGAKENHYNVSLDYGTLVVTDWSHVGFNDVDYGFGEPSYVFTLNDDVNIVPSVVYLKPPKPKQGIRLVLQCVEGRHSAVFSEELQKHA

SEQ ID NO: 16511 - DNA, 809 bp, Zea mays subsp. mays
  misc_feature (1)..(809): Ceres Seq. ID no. 12352576
atgatgtccgggaaacaaatcctatccccgccgcctacgccggccgttcgcgctcacctagtcaccacattcgttctcgccgtggacgcgcgcgcgtgaggtgagtgagaccaccacgccagacaagaattaatggccctggagacgtgcttcagagcgtgggcgctgcacgccgcccctgctggcagcaagaacaggctcctcgtctgcagcagcggcggtaacctggtgctgccttcgaagcgggtcgcggccgcgccgctgtccgtcggccgcgtcgccacgcgccgggcgcggcacgtctgccagtccaagaacgccgtggacgaagtgctggtggcggacgagaagaactgggacgggatggtgatggcgtgcgagacgccggtgctggtggagttctgggcgccgtggtgcgggccgtgccggatgatcgcgccggtgatcgacgagctggccaaggactacgccggcaagatcatgtgctgcaaggtgaacacggacgacagccccaacgtggcatccacctacggcatccgcagcatccccaccgtgctcatcttcaagggcggcgagaagaaggagagcgtcatcggcgccgtccccaagtccacgctcaccaccctcatcgacaagtacatcggtagtagctcatgagcgcgcgagagaggcagcccatgtctcgtgatgtgcccccgagctgcatctgcatgcatgggatactgggatcgatgatacatgtgcccagctcgcgcataaacaccatgtatctctagccttgcccttgcatatatatggatggatatatg

SEQ ID NO: 16512 - protein, 174 aa, Zea mays subsp. mays
  misc_feature (1)..(174): Ceres Seq. ID no. 12352577
MALETCFRAWALHAAPAGSKNRLLVCSSGGNLVLPSKRVAAAPLSVGRVATRRARHVCQSKNAVDEVLVADEKNWDGMVMACETPVLVEFWAPWCGPCRMIAPVIDELAKDYAGKIMCCKVNTDDSPNVASTYGIRSIPTVLIFKGGEKKESVIGAVPKSTLTTLIDKYIGSSS

SEQ ID NO: 16513 - protein, 97 aa, Zea mays subsp. mays
  misc_feature (1)..(97): Ceres Seq. ID no. 12352578
MVMACETPVLVEFWAPWCGPCRMIAPVIDELAKDYAGKIMCCKVNTDDSPNVASTYGIRSIPTVLIFKGGEKKESVIGAVPKSTLTTLIDKYIGSSS

SEQ ID NO: 16514 - protein, 95 aa, Zea mays subsp. mays
  misc_feature (1)..(95): Ceres Seq. ID no. 12352579
MACETPVLVEFWAPWCGPCRMIAPVIDELAKDYAGKIMCCKVNTDDSPNVASTYGIRSIPTVLIFKGGEKKESVIGAVPKSTLTTLIDKYIGSSS

SEQ ID NO: 16515 - DNA, 1457 bp, Zea mays subsp. mays
  misc_feature (1)..(1457): Ceres Seq. ID no. 12352588
gaacgatttgggggaggaggtgttctattacacaaaagaggcaaaaaacaaaagccggtaacggaaaccctaatccccccaaatcccgaatccctctcgaatttctatttaatgttcctgttcttcccctccgatccgatgtccccaactgcgctcccgtcggcgatcaaacaccggatcgcggcactcgccgccgttgaggaggaggtttccggcgctgcttccagcgccttgccgtcagcaccatgaggaagaagctggacacgcgtttccccgctcctcggattaaaaagatcatgcaaacagatgaagacgtcggcaagattgctcaagctgtacctgttctagtgtccaaagcattggagctatttctgcaagatttatgtgataggacatatgatattacaattcggaagggggtcaagactgtgggttcttcccatttgaaacaatgcatacaaacgtacaacgtctatgacttcttgagggaagtagtcagcaaagttccagacattggtccttctgatgttattgctgatgataagcttggcaaaaggaggaaagccgaagaagatggaagtgaggaagaattgaagaggacaagaaatgagacagaaagctatacaagcaatggcagaggccgtgggagaggtcgtgggagaggtcgccgtggtgtacgtggagcttggcgggaggtggtcacaagtcctgagcaattcaaggaggagaatcaatctagcaaggtagccagcctaaaggtggaggtagcagatgaggtctcgaatgtaactgaagcaaaacaggacactacaccaatgagcaacgccaggccttccttaaggaacattgacttgaatttagatccaaccgatgaagaggatgaggttacagtgccaccccaaccccagctgtcagctccagcaactagttgcgatgcagccactgcagcacctggaccatctgttccacggttaagggaaggagcaaaactcaaggacttctttggtgcttgggaactggctgacatgaacaagatggagatggaccctgtccagtttgctctgtcaacaaaccatagattggaggaggacgaggattatgacaatgaagactagctccgccgttatatagcttcagagttgatgagtaggaatagcaggacaactgtaggttcagcttaactctgtagcagttctcatgtatcatatagccgccaaagctgccgatgtagcttataatgtcccagaggttaaggtcgtttgactagttgactgtaatgttctcaagttaggttctattagcagctattgctttcgcagatagtaccgtttgtacattccagttgctctccagttttatgttatctatccttctgctttcttggatagctgagacctgttggcggatgtatcatgtatggcaagttggcaacaaaaagcaagaaggctttcagattc

SEQ ID NO: 16516 - protein, 289 aa, Zea mays subsp. mays
  misc_feature (1)..(289): Ceres Seq. ID no. 12352589
MRKKLDTRFPAPRIKKIMQTDEDVGKIAQAVPVLVSKALELFLQDLCDRTYDITIRKGVKTVGSSHLKQCIQTYNVYDFLREVVSKVPDIGPSDVIADDKLGKRRKAEEDGSEEELKRTRNETESYTSNGRGRGRGRGRGRRGVRGAWREVVTSPEQFKEENQSSKVASLKVEVADEVSNVTEAKQDTTPMSNARPSLRNIDLNLDPTDEEDEVTVPPQPQLSAPATSCDAATAAPGPSVPRLREGAKLKDFFGAWELADMNKMEMDPVQFALSTNHRLEEDEDYDNED

SEQ ID NO: 16517 - protein, 272 aa, Zea mays subsp. mays
  misc_feature (1)..(272): Ceres Seq. ID no. 12352590
MQTDEDVGKIAQAVPVLVSKALELFLQDLCDRTYDITIRKGVKTVGSSHLKQCIQTYNVYDFLREVVSKVPDIGPSDVIADDKLGKRRKAEEDGSEEELKRTRNETESYTSNGRGRGRGRGRGRRGVRGAWREVVTSPEQFKEENQSSKVASLKVEVADEVSNVTEAKQDTTPMSNARPSLRNIDLNLDPTDEEDEVTVPPQPQLSAPATSCDAATAAPGPSVPRLREGAKLKDFFGAWELADMNKMEMDPVQFALSTNHRLEEDEDYDNED

SEQ ID NO: 16518 - DNA, 1527 bp, Zea mays subsp. mays
  misc_feature (1)..(1527): Ceres Seq. ID no. 12352599
actgcttcccgtagtcctttgtcgcgagctgctgtgctgtgtcctgtgtgcccgcaccatcgcctgaggcctgagggtgcgtgctgcaggtatttattggacgcttcccggatcaaagcaatgtcgagtggcgacagtcggcggtgggcgcgcatgcagtgggtggcgacgcgaccgagtgcggtggtggtacggcgagcgagcgagcgacacgagctgagtgagtgccctgcaagcccaagctcgtgacagagataggacttcagctcgactcgcgcggtcgccttgcctgctgcacacgagccgtcgccaactcgatcctcaccggtgacccctaccgcagctcatatcatcctgttcttgctcttcatcttactgttaatttcctgccaatttaatcccaccggccatcgttctcctgaaccaaagccatggcgcaagctgcttccggctccagcaagatcgacaccaaagctcccacctcagccgacgaggccgctcaacccaagagctacggcgacctggtatccactctcccggctagaggcgggtgggtatcgctcgtgcagtaccagaactactggctgaaccccggcaggctccagaacatcatncccgtgaaagagctctacaagcctcgcgccgacgacatcgtcctcgccacctacctgaaatgcgggaccacgtggctgaaggcgctggccttcgccatcacgacccgcggccgccaccaccaggccttcgccgccgccgaccaccccctgctcaccgtgcacccgcaggaggccgtgccgcacctggaggtgcacacgccagggcagggcctggcagacatcgagaggctgccgtcgccgaggctgctcgggacgcacctgcccctctccctgctcccgccggccgtggccacctccggctgccgcgtcgtgtacctgtgccggcagcccaaggacgtgttcgtctcgctctggcacttcgtgaagggcatgcgcgggggcaggtcccccgtggagctggacgccgcgctggccatgttctgcgagggggtctcgcctttcgggcccgtctgggagcactacctcgagtactggaaggagagcctggcgaggcctgagcgggtccttttcctcaggtacgaggagatggtggcggacccggtgcgtgccgtgaggacgctcgccggcttcttcgccgtcccgttcaccgacgaggaagaggggcgaggggtcccggaggagattgtgaggctgtgcagcttcgagatgctgagcggcttggaaagcaatcggaccggagatcttgattgcggagacaacacggtgatcggaaaatctaccttcttcaggaagggcaaggttggggactgggagaaccacttgacaaaagagatgggcaagaaggtcgacgccgttttcgaagacaagctccagggatctggtctcgtgttttgaattttgattactatccatgcatggcttttgtttgtgtgatgctgtttgtccagaataactaatcgtttgcgcatgttgc

SEQ ID NO: 16519 - protein, 338 aa, Zea mays subsp. mays
  misc_feature (1)..(338): Ceres Seq. ID no. 12352600
  misc_feature (61)..(61): Xaa is any aa, unknown or other
MAQAASGSSKIDTKAPTSADEAAQPKSYGDLVSTLPARGGWVSLVQYQNYWLNPGRLQNIXPVKELYKPRADDIVLATYLKCGTTWLKALAFAITTRGRHHQAFAAADHPLLTVHPQEAVPHLEVHTPGQGLADIERLPSPRLLGTHLPLSLLPPAVATSGCRVVYLCRQPKDVFVSLWHFVKGMRGGRSPVELDAALAMFCEGVSPFGPVWEHYLEYWKESLARPERVLFLRYEEMVADPVRAVRTLAGFFAVPFTDEEEGRGVPEEIVRLCSFEMLSGLESNRTGDLDCGDNTVIGKSTFFRKGKVGDWENHLTKEMGKKVDAVFEDKLQGSGLVF

SEQ ID NO: 16520 - DNA, 1246 bp, Zea mays subsp. mays
  misc_feature (1)..(1246): Ceres Seq. ID no. 12352601
atagttcccgtgatggtcgactgattgacactgccaacctcccaacttcccaaatatatcgtcgtcggtcaatgtcgacgagctcgcagtgcacgctcatggaaggcgctatctcccttcctcgcaacacaagcagaattgccgtggttaccggcgcgaacagaggtatcgggctagaggtgtgccggcagctggctggcaatggcgtcaccgtcgtcttgacagcagtggacgaggagctaggcgcgaaagccgtcggcaatctccaagggctagctctctccgatgttctttctcaccagctggatatcacggatgcttccagcatcgctcggttggccaacttcttgaaggcccgattcgggaagttggatatcctggtcaataatgctgcggttgctggggtcgtgtactctcaagatcatttggatgatctagaaccgagagaggaaaagttcaatctcatggatagggatcagaggcttgaatggctgtggaggaactgccgggagacctaccatgctgcaaaggaatgcctgcagacaaactactacggcacaaagcatgtgatcgaagccttgctgcctctgctgaaagcctccgatgatggaagaatcgtcaatatatcctccgactttgggttgttaaggcatttcagaaacgaggatctgaagcaagtgctgaacgacgtcggcaacctcaccgaggagcggctggacgaactgctggaccagttcctgagagacttcaaggtcggcacggcagaagcgcgcgggtggccagtggcgttcgcggcgtacaaggtgagcaaggcggccgtgaacgcgtactcgaggatgctggcggcgaagcagcccgcgctgcgcgttaactgcgcgcatcccggctacgtcaagactgacataaccttacactcggggctcctggcgccggaggagggcgcgagtaatgtggtgaaggtggcgctgctgccggacggcggggtgaccggcgccttctttgaggagggcaatgagctggcctccttcgtgtgatgtcaggatcggcctggttcgctagctgcggctgtttgccatcgcgtgagctcacggagtgtttggacccctcggtctgatgtttaagtgtgtggtagcaggatgcaagacgattctggtaataaactgattatgtttgtgaacggtgataacctgatgatgtatgtgttgtaaatttagagaacggtgataacctgatgatgtatgtgttg

SEQ ID NO: 16521 - protein, 343 aa, Zea mays subsp. mays
  misc_feature (1)..(343): Ceres Seq. ID no. 12352602
SSRDGRLIDTANLPTSQIYRRRSMSTSSQCTLMEGAISLPRNTSRIAVVTGANRGIGLEVCRQLAGNGVTVVLTAVDEELGAKAVGNLQGLALSDVLSHQLDITDASSIARLANFLKARFGKLDILVNNAAVAGVVYSQDHLDDLEPREEKFNLMDRDQRLEWLWRNCRETYHAAKECLQTNYYGTKHVIEALLPLLKASDDGRIVNISSDFGLLRHFRNEDLKQVLNDVGNLTEERLDELLDQFLRDFKVGTAEARGWPVAFAAYKVSKAAVNAYSRMLAAKQPALRVNCAHPGYVKTDITLHSGLLAPEEGASNVVKVALLPDGGVTGAFFEEGNELASFV

SEQ ID NO: 16522 - protein, 320 aa, Zea mays subsp. mays
  misc_feature (1)..(320): Ceres Seq. ID no. 12352603
MSTSSQCTLMEGAISLPRNTSRIAVVTGANRGIGLEVCRQLAGNGVTVVLTAVDEELGAKAVGNLQGLALSDVLSHQLDITDASSIARLANFLKARFGKLDILVNNAAVAGVVYSQDHLDDLEPREEKFNLMDRDQRLEWLWRNCRETYHAAKECLQTNYYGTKHVIEALLPLLKASDDGRIVNISSDFGLLRHFRNEDLKQVLNDVGNLTEERLDELLDQFLRDFKVGTAEARGWPVAFAAYKVSKAAVNAYSRMLAAKQPALRVNCAHPGYVKTDITLHSGLLAPEEGASNVVKVALLPDGGVTGAFFEEGNELASFV

SEQ ID NO: 16523 - protein, 311 aa, Zea mays subsp. mays
  misc_feature (1)..(311): Ceres Seq. ID no. 12352604
MEGAISLPRNTSRIAVVTGANRGIGLEVCRQLAGNGVTVVLTAVDEELGAKAVGNLQGLALSDVLSHQLDITDASSIARLANFLKARFGKLDILVNNAAVAGVVYSQDHLDDLEPREEKFNLMDRDQRLEWLWRNCRETYHAAKECLQTNYYGTKHVIEALLPLLKASDDGRIVNISSDFGLLRHFRNEDLKQVLNDVGNLTEERLDELLDQFLRDFKVGTAEARGWPVAFAAYKVSKAAVNAYSRMLAAKQPALRVNCAHPGYVKTDITLHSGLLAPEEGASNVVKVALLPDGGVTGAFFEEGNELASFV

SEQ ID NO: 16524 - DNA, 1182 bp, Zea mays subsp. mays
  misc_feature (1)..(1182): Ceres Seq. ID no. 12352605
aacctgtgcttccttccgtcgtcttcctgcctcctcttctgttcaccgctctggcgctctcctatactcttctctctctctcgctgaggcaggcggggggcagcctttcctccccggtcgccatcctcgtttatatacacacaccctctcttgccgaaccactgctcgcttctctgcctgcttctgcttgagtcgtgccagtgacccgtgaccgtgaccgcgagcttcagggacgcgggcggcggcgatcatggcgtggcgcggcccgctcggagccggagaggaggccctggacagcggcctcgagctcagcctcggcctcccggcatacttcgcccggccttcaggtttggacgccgccagggaggagcccgccgaggcctctgtctacgctatccaggccgccagtgggagcaatgtctccaaggcaagggtcaggccagcgggcgcggcgccggtggtggggtggccgccggtgcggtcgttccggaggaacctggccgcctcctcctccaggccgtcgtcggggaaacacacccgccaggagggcagcgccaaggacggcctgttcgtgaagatcaacatggacggcgtgccgatcaggcgcaaggtggacctcacggcgtacggcggctacgccgacctctccgccgccgtcggcaagctcttccgcggcctgcttgccgctcagagggaccgagcggccacggcgggtggcgaggaggaggaggagggggagggccccgtgatcggcggcgactacacgctggtgtacgaggacgacgagggcgacagggtccttgccggcgacgtcccctgggagatgttcgtggccaccgccaagaggctgcgcgtgctcaagagctccgacgtgccggcctcgtcggtgacgctgggagctgggggcccggagaggtctgcagccgactgctgctgctgaaacgtgctctgcttcgtcagctgcttgtaaaaagtcccgagtggaggagacgaggagtggccctatccctggcctcttttttgtgtgttgctcttgctgcctttctgctagtggtactagtattgggtgccagtaaaaagtaggagaacaaagtcatgacggtattaaggatgtaatgtgcaagattagcagtggtagtagtcgtaaggtgtttaatgaatctacggtctctgttttggggc

SEQ ID NO: 16525 - protein, 229 aa, Zea mays subsp. mays
  misc_feature (1)..(229): Ceres Seq. ID no. 12352606
MAWRGPLGAGEEALDSGLELSLGLPAYFARPSGLDAAREEPAEASVYAIQAASGSNVSKARVRPAGAAPVVGWPPVRSFRRNLAASSSRPSSGKHTRQEGSAKDGLFVKINMDGVPIRRKVDLTAYGGYADLSAAVGKLFRGLLAAQRDRAATAGGEEEEEGEGPVIGGDYTLVYEDDEGDRVLAGDVPWEMFVATAKRLRVLKSSDVPASSVTLGAGGPERSAADCCC

SEQ ID NO: 16526 - protein, 118 aa, Zea mays subsp. mays
  misc_feature (1)..(118): Ceres Seq. ID no. 12352607
MDGVPIRRKVDLTAYGGYADLSAAVGKLFRGLLAAQRDRAATAGGEEEEEGEGPVIGGDYTLVYEDDEGDRVLAGDVPWEMFVATAKRLRVLKSSDVPASSVTLGAGGPERSAADCCC

SEQ ID NO: 16527 - DNA, 1277 bp, Zea mays subsp. mays
  misc_feature (1)..(1277): Ceres Seq. ID no. 12352611
aggcacaaggaagaacgaagagagatcagcgacttaacaacaataatggccaccgccatagttcccacggacgccgagctgctgcaggcgcaggccgacctgtggcgccacagcctctactacctgacatccatggcgctcaagtgcgcggtggagctccacatcccgaccgccatccacaacctaggcgggtctgccacgctgccggacctcgtggccgcgctgtccctgccagcggccaagctcccgttcctcgggcgcgtgatgcggctgctggtcacgtcggggcgtcttcgcgtcgtccgacgacgtgcagtaccggctgaacccgctgtcctggctgctggtggagggcgtggagtcggaggaccacacctaccagaagtacttcgtgctgggcaccgtctcccgccactacgtggaggccggcatgtccctggccgactggttcaagaaggaggaggacgaggaccgccagctgccgtcgccgttcgaggccctgcacggggtgcccctcgtccacgagagcaccaagctgctggacgaggagctggacagggtcgtggaggaaggcgtggccgcgcacgacaacctggccatcgggaccgtcatacgggagtgcggcgccgacgtcttcagcggcctccgctcgctcacctactgctgcggcaggcaggggaacgccagcgcggccgccatcgtcaaggccttcccagacatcaagtgcaccgtgctcaaccttcccagggtcgtcgaggagacgacgaccaagaccatcaccatcccgcctgcgcaggctgtcatgctcaagctcgtcctgcacttctggagcgacgacgactgcgtcaagatcctggagctgtgcaggaaggccatcccttcccgccaagaaggagggaaggtgatcatcattgagatactcctgggcccgtacatggggccggtcatgtacgaggcccagctgctgatggacatgctcatgatggtgaacaccaagggcaggcagcgcggcgaagacgactggcgccacatctttaccaaggctggcttctccgactacaaggttgtcaagaaaatcggagctcgtggtgtcatcgaggtctacccatgatccatgatcgatgtcatgtgactgtgagaggacgatactgtacaattaaataaacggggtatctagctactactcagcttttgtacctcgagatccatgcatgttaattacttgcttccatctgttttcaaaatgcatctatgtaatgtacttcgcttcttcgtcc

SEQ ID NO: 16528 - protein, 304 aa, Zea mays subsp. mays
  misc_feature (1)..(304): Ceres Seq. ID no. 12352612
RHKEERREISDLTTIMATAIVPTDAELLQAQADLWRHSLYYLTSMALKCAVELHIPTAIHNLGGSATLPDLVAALSLPAAKLPFLGRVMRLLVTSGRLRVVRRRAVPAEPAVLAAGGGRGVGGPHLPEVLRAGHRLPPLRGGRHVPGRLVQEGGGRGPPAAVAVRGPARGAPRPREHQAAGRGAGQGRGGRRGRARQPGHRDRHTGVRRRRLQRPPLAHLLLRQAGERQRGRHRQGLPRHQVHRAQPSQGRRGDDDQDHHHPACAGCHAQARPALLERRRLRQDPGAVQEGHPFPPRRREGDHH

SEQ ID NO: 16529 - protein, 289 aa, Zea mays subsp. mays
  misc_feature (1)..(289): Ceres Seq. ID no. 12352613
MATAIVPTDAELLQAQADLWRHSLYYLTSMALKCAVELHIPTAIHNLGGSATLPDLVAALSLPAAKLPFLGRVMRLLVTSGRLRVVRRRAVPAEPAVLAAGGGRGVGGPHLPEVLRAGHRLPPLRGGRHVPGRLVQEGGGRGPPAAVAVRGPARGAPRPREHQAAGRGAGQGRGGRRGRARQPGHRDRHTGVRRRRLQRPPLAHLLLRQAGERQRGRHRQGLPRHQVHRAQPSQGRRGDDDQDHHHPACAGCHAQARPALLERRRLRQDPGAVQEGHPFPPRRREGDHH

SEQ ID NO: 16530 - protein, 260 aa, Zea mays subsp. mays
  misc_feature (1)..(260): Ceres Seq. ID no. 12352614
MALKCAVELHIPTAIHNLGGSATLPDLVAALSLPAAKLPFLGRVMRLLVTSGRLRVVRRRAVPAEPAVLAAGGGRGVGGPHLPEVLRAGHRLPPLRGGRHVPGRLVQEGGGRGPPAAVAVRGPARGAPRPREHQAAGRGAGQGRGGRRGRARQPGHRDRHTGVRRRRLQRPPLAHLLLRQAGERQRGRHRQGLPRHQVHRAQPSQGRRGDDDQDHHHPACAGCHAQARPALLERRRLRQDPGAVQEGHPFPPRRREGDHH

SEQ ID NO: 16531 - protein, 226 aa, Zea mays subsp. mays
  misc_feature (1)..(226): Ceres Seq. ID no. 12352615
MSLADWFKKEEDEDRQLPSPFEALHGVPLVHESTKLLDEELDRVVEEGVAAHDNLAIGTVIRECGADVFSGLRSLTYCCGRQGNASAAAIVKAFPDIKCTVLNLPRVVEETTTKTITIPPAQAVMLKLVLHFWSDDDCVKILELCRKAIPSRQEGGKVIIIEILLGPYMGPVMYEAQLLMDMLMMVNTKGRQRGEDDWRHIFTKAGFSDYKVVKKIGARGVIEVYP

SEQ ID NO: 16532 - DNA, 1475 bp, Zea mays subsp. mays
  misc_feature (1)..(1475): Ceres Seq. ID no. 12352669
cccaagaaggcagctgctagctgagagcctccagctcaggtagtgagcaagctcctctctgccctggcctcttcttcgttcattcttgtccactcgaggactgcccgtttgacgactgctcgatcagtgtgctagctagctagagcaagagaagggctgtaagcgaggagatcgatcgagatggctttcctcaacatggagcagcagacctgggccttcacctttggtatcctaggtaacatagtctcactgatggtgtttctttcgccgctgccgacgttctaccgcgtgtaccgcaacaagtcgacggaggggttccagtcgacgccgtacgtggtgaccctcttcagctgcatgctgtggatcttgtacgccctgctcaagcccggcgccgagctgctggtcaccatcaacggcgtgggctgcgtcgtcgagaccgtgtacctggccatgtacctggtgtacgcgcccaaggccgcccgggtgctggcggccaagatgctgctggggctcaacgtcgccgtcttcggcctcgtcgcgctcgtcaccatgcttctctccgacgccggcctccgcgtgcacgtgctcggctggatctgcgtcagcgtctcgctcagcgtcttcgccgcgccgctcagcataatgcggcaggtgatccggaccaagagcgtggagttcatgcccatctcgctctccttcttcctggtgctcagcgcggtggtctggttcgcgtacggcgcgctgaagaaggacgtgttcgtggcgttccccaacgtgctgggcttcgtcttcggcctcgcacagatggcgctgtacatggcgtacagcaggaacaggaagcccgcggcggcgctggtgatactaccggagcagtccaaggaggaggcggccgagggcaaggccagctgcggcggcgccgaggtgcaccccatcgacatcgcggaggtccacgacctgcaggccgtggtcgtcgacgtagacgtggagcctgtcacctacgccgctgcgtccggtatggtcgacggcagtgtcggcaggcctagggcgccggagcagctggtgatcaagcccgacatggtcaccgtcattgcggcggaggcgtaggttggttaagtagtagcagagtgagtcgatatcgatctgcctacctacagtacagccgcggcggccagatgtactggcagcgttcatgcaggctcgttgacttgaccggtcgagatggttggagtagccgggccgagtagcccagacgtactggcctgtgtcatgaaccggcaagctgataacgcgagcgagagggacgttggttcatcacattcagaagacggcaagctgatagtttctgtctctaggtctgtgtgtgtgtgtctgtaatcgactccatcagcttgccgcctttcctgtcctattctgattgttttcatccattgatgccgtcgtcgcagtaataaacttggaacgaacgattccacact

SEQ ID NO: 16533 - protein, 307 aa, Zea mays subsp. mays
  misc_feature (1)..(307): Ceres Seq. ID no. 12352670
MAFLNMEQQTWAFTFGILGNIVSLMVFLSPLPTFYRVYRNKSTEGFQSTPYVVTLFSCMLWILYALLKPGAELLVTINGVGCVVETVYLAMYLVYAPKAARVLAAKMLLGLNVAVFGLVALVTMLLSDAGLRVHVLGWICVSVSLSVFAAPLSIMRQVIRTKSVEFMPISLSFFLVLSAVVWFAYGALKKDVFVAFPNVLGFVFGLAQMALYMAYSRNRKPAAALVILPEQSKEEAAEGKASCGGAEVHPIDIAEVHDLQAVVVDVDVEPVTYAAASGMVDGSVGRPRAPEQLVIKPDMVTVIAAEA

SEQ ID NO: 16534 - protein, 302 aa, Zea mays subsp. mays
  misc_feature (1)..(302): Ceres Seq. ID no. 12352671
MEQQTWAFTFGILGNIVSLMVFLSPLPTFYRVYRNKSTEGFQSTPYVVTLFSCMLWILYALLKPGAELLVTINGVGCVVETVYLAMYLVYAPKAARVLAAKMLLGLNVAVFGLVALVTMLLSDAGLRVHVLGWICVSVSLSVFAAPLSIMRQVIRTKSVEFMPISLSFFLVLSAVVWFAYGALKKDVFVAFPNVLGFVFGLAQMALYMAYSRNRKPAAALVILPEQSKEEAAEGKASCGGAEVHPIDIAEVHDLQAVVVDVDVEPVTYAAASGMVDGSVGRPRAPEQLVIKPDMVTVIAAEA

SEQ ID NO: 16535 - protein, 283 aa, Zea mays subsp. mays
  misc_feature (1)..(283): Ceres Seq. ID no. 12352672
MVFLSPLPTFYRVYRNKSTEGFQSTPYVVTLFSCMLWILYALLKPGAELLVTINGVGCVVETVYLAMYLVYAPKAARVLAAKMLLGLNVAVFGLVALVTMLLSDAGLRVHVLGWICVSVSLSVFAAPLSIMRQVIRTKSVEFMPISLSFFLVLSAVVWFAYGALKKDVFVAFPNVLGFVFGLAQMALYMAYSRNRKPAAALVILPEQSKEEAAEGKASCGGAEVHPIDIAEVHDLQAVVVDVDVEPVTYAAASGMVDGSVGRPRAPEQLVIKPDMVTVIAAEA

SEQ ID NO: 16536 - DNA, 950 bp, Zea mays subsp. mays
  misc_feature (1)..(950): Ceres Seq. ID no. 12352680
gccgcaatacacactactgttcctccgattaacggaccggccggcgacgtgcatagcaggtacgcagcagctctagctagcaatggcgcctccccgccggccgagcatggggcggcagaagatcgagatccggcgcatagagagcgacgaggcgcggcaggtgtgcttctcgaagcgccgcgcggggctgttcaagaaggccagcgagctgtccatcctctgcggcgccgacgtggccgccgtcgtcttctcccccgccggcaaggccttctccttcggccacccgtccgtggagtccgtcgtcgagcgcttcctcgcctcgtcgtccccctcgcctgccggtgccggtgccggccactccgccagcggcggcgaggaccgcgcggtctcggagctgaaccgccagcacggcgagctgcgcgcgcagctggacgccgtgaaggcgaggcaggagcgcgcggacgaggcgatccggaaggagcgcgaggcggggagcccggcgatggcgtggatcgacgcggaactgagcgggggcgcgatggggcacgacgacctggtcgcgttctgggccgcgcttgcgggcgtgcaggccgccgtggcggccagcgccgaccggctgctgcgcgacgcgctgctcgtcgggcgcaggggccggcagcagcagcagccggcccagcttgccgggggtggtggcgtggcctttgacgtcggcgcgtttggcggcgttggcgtgcaggtgcagccgcctccgggattcgccggcgtcgtcgacctgcaggggttcggggggcaggctgcggccatcctcggcgccggcggtccctcatgagtgatcgaatgcgtgtgtgcatacttcactcaagttgtttggagataacgtcgcaaataaatttgcgacaaatgttttggttaatttgttcgtatgcattgttcgttctcaccttgctctc

SEQ ID NO: 16537 - protein, 248 aa, Zea mays subsp. mays
  misc_feature (1)..(248): Ceres Seq. ID no. 12352681
MAPPRRPSMGRQKIEIRRIESDEARQVCFSKRRAGLFKKASELSILCGADVAAVVFSPAGKAFSFGHPSVESVVERFLASSSPSPAGAGAGHSASGGEDRAVSELNRQHGELRAQLDAVKARQERADEAIRKEREAGSPAMAWIDAELSGGAMGHDDLVAFWAALAGVQAAVAASADRLLRDALLVGRRGRQQQQPAQLAGGGGVAFDVGAFGGVGVQVQPPPGFAGVVDLQGFGGQAAAILGAGGPS

SEQ ID NO: 16538 - protein, 240 aa, Zea mays subsp. mays
  misc_feature (1)..(240): Ceres Seq. ID no. 12352682
MGRQKIEIRRIESDEARQVCFSKRRAGLFKKASELSILCGADVAAVVFSPAGKAFSFGHPSVESVVERFLASSSPSPAGAGAGHSASGGEDRAVSELNRQHGELRAQLDAVKARQERADEAIRKEREAGSPAMAWIDAELSGGAMGHDDLVAFWAALAGVQAAVAASADRLLRDALLVGRRGRQQQQPAQLAGGGGVAFDVGAFGGVGVQVQPPPGFAGVVDLQGFGGQAAAILGAGGPS

SEQ ID NO: 16539 - protein, 234 aa, Zea mays subsp. mays
  misc_feature (1)..(234): Ceres Seq. ID no. 12352683
AAIHTTVPPINGPAGDVHSRYAAALASNGASPPAEHGAAEDRDPAHRERRGAAGVLLEAPRGAVQEGQRAVHPLRRRRGRRRLLPRRQGLLLRPPVRGVRRRALPRLVVPLACRCRCRPLRQRRRGPRGLGAEPPARRAARAAGRREGEAGARGRGDPEGARGGEPGDGVDRRGTERGRDGARRPGRVLGRACGRAGRRGGQRRPAAARRAARRAQGPAAAAAGPACRGWWRGL

SEQ ID NO: 16540 - DNA, 1549 bp, Zea mays subsp. mays
  misc_feature (1)..(1549): Ceres Seq. ID no. 12352684
tcaaaaaaaaaggaaaataaaaaaaaaatcgtagagagttcgattggcagttgctgagcccgagcgcgccctccggcgccgacaagccgggaccccacctccgccggcggcgatgggcaactcgcaggcttcgccggcgtccgcctccagctcccgcttcgtcatggcctcgagggccttcccgaaggcaggagctggacggcctccgcgagctattcgcctccctcgcagcgcagtcgcggaccggcggccgcgccatctcacgccccgtcttcctcgaatactatcaggtccgggggcgattaggagacaggctgttccagcttgtggcgaaggagagtggcgggagcgatggggtcacgttcgaggatttgatcatctccaaagcaacatatggaaggggaactcgtgatgaggtcgatgaattcatttatcaactatgtgatgtcacaggagatggcgccttaacaaggtctgatttggaatcagtcttggcgtctgttcatgaaactgtatttgcaataaagaaggaagttgtcgaagtttccaacaatagaccattcgaagaattcctcaactctgcagtgttttcaaaggatgttgaaggggtctcagggaagtctatgtcattgtcagactttaggaactggtgcactctcttgccatcattgaggaatttcttggaaatttgttgatgccccctgattcaggtagaccaggatttgaagtaccactgcttcatcatcctgaaaacatctgcactgatacgctgcttctaaacaaagagtatgcctggcatattggaggaggtttctcccaacatgaggtgcaagagtggaagcttttatatcatagttctcttcatggacaaagcttcaacactttcttgggcaaagtaacgaatggagatgctcagactgttctgattgttaaagatacagaaggatcaatttatggtggatatgcttcacagccttgggaaaggcacagtgatttttatggtgacatgaagacattcctcttcaaatgctatcctcaagcatccatttttcgtcctactggagcaaacaagaatttgcaatggtgtgctgtaaacttcagctctgagaacatacccaatggtattggatttggagggcagccacatcatttcggactctttttatcagcaaattttgaccaagggcactcatttacgtgtagcacatttaccagccctcccctttccaagacaaataggttcaggccagaagttattgaatgttggggtatacaaatgagaggagcacaagatgaaaaactggagttagtcaaggggacagtcctcgagagattcaaggaggaccggaacatgctgaagatggttggtttggcaaatgcaagtgattaagtgatagaggatcacaatgatgtacatgatggagagtctgtacagcacatgttcataaaaataatcaaatctgagaccatgtttctatattctactgttcatattttgtcactcaaaatattcatttgatccacactttgtaacaattgaccagtcgtt

SEQ ID NO: 16541 - protein, 231 aa, Zea mays subsp. mays
  misc_feature (1)..(231): Ceres Seq. ID no. 12352685
MPPDSGRPGFEVPLLHHPENICTDTLLLNKEYAWHIGGGFSQHEVQEWKLLYHSSLHGQSFNTFLGKVTNGDAQTVLIVKDTEGSIYGGYASQPWERHSDFYGDMKTFLFKCYPQASIFRPTGANKNLQWCAVNFSSENIPNGIGFGGQPHHFGLFLSANFDQGHSFTCSTFTSPPLSKTNRFRPEVIECWGIQMRGAQDEKLELVKGTVLERFKEDRNMLKMVGLANASD

SEQ ID NO: 16542 - protein, 127 aa, Zea mays subsp. mays
  misc_feature (1)..(127): Ceres Seq. ID no. 12352686
MKTFLFKCYPQASIFRPTGANKNLQWCAVNFSSENIPNGIGFGGQPHHFGLFLSANFDQGHSFTCSTFTSPPLSKTNRFRPEVIECWGIQMRGAQDEKLELVKGTVLERFKEDRNMLKMVGLANASD

SEQ ID NO: 16543 - DNA, 1435 bp, Zea mays subsp. mays
  misc_feature (1)..(1435): Ceres Seq. ID no. 12352690
accaaacccactcgcaacaacggataacgctctcttccttcggctcctcccctctcgctcctatcctctcccctccaatggcgaccgccatttcctctctagtaactcctccgaccctccaccgccgctgcctgggccctgcctgcgtctccgtctccgtgtgcacccctatccgcatctccttccggcccgccgccgcgcctcaggtgtcgcgccggggctcggcgctgcgggtgtccgcctcctcggcggtgctcgaggcgccagaggcggtggcggcgcggaagctctacgtggggaatatccccaggaccgttacaaacgacgagctccgcgacatgttcgctgcgcacggcaccgtcgagcgggccgaggttatgtacgacaagtatacgaatcgcagccggcggtttgggtttgtcacgatgagcacagcggaagaggccaatgctgcagttgaggctctcaatgggactgaggttggtgatagaaaaattaaagtgaacgtcacagagagcttcttaccgaacattgaccgatcagcaccagaaccagaggctctgtttgtagatagtcagtacaaggtttatgttggtaatcttgcgaagactgtaacaaccgaagttcttaaaaacttcttctccgaaaaggggaatatcctcagtgcaacagtctcccacattccggggacctccaagtcaaaggggtatggctttgtcacattctcttctgaggaagaagttgaagctgctgttgctactttcaataacgcggtaagcttctcttgcaaattttatgcatttctgccatttctttccaacctcataaaatagtagtcaccatttggctattgccaaacaaaagaaaaacgttgtgctacaatcttctatgttatcatttaggtgtcaaatagatggaaatatggaattaacatattgactgttaattgtacagatgagttagaattacatcatctcaactacgtcaactggtgccatattgttctgacatatcattcccacagaaacttatttgctgatattaataacattgcccgttcttcaaccgtacttcagcacacatcaagaccataatctcctatatttgctattcaaaagatttctgaagccttgaaagttggcatgcttttgatatcaaactttggaacataacctgtcgctaatgttttatattgttctacaattaaatgtggtgtcaggaattggaaggacaactcattcgtgtgaatagagcttagattagcagaaatttgcaggggcaccggaggagggggaatatcttggcgaatacatgtagtaggagggatgttttgaggctagattttgataacaaagtgatcaagaccttcaatgtgatttcgatatgtcatacaatttttgtaccataacagtatatttttcttaacggcacttct

SEQ ID NO: 16544 - protein, 276 aa, Zea mays subsp. mays
  misc_feature (1)..(276): Ceres Seq. ID no. 12352691
QTHSQQRITLSSFGSSPLAPILSPPMATAISSLVTPPTLHRRCLGPACVSVSVCTPIRISFRPAAAPQVSRRGSALRVSASSAVLEAPEAVAARKLYVGNIPRTVTNDELRDMFAAHGTVERAEVMYDKYTNRSRRFGFVTMSTAEEANAAVEALNGTEVGDRKIKVNVTESFLPNIDRSAPEPEALFVDSQYKVYVGNLAKTVTTEVLKNFFSEKGNILSATVSHIPGTSKSKGYGFVTFSSEEEVEAAVATFNNAVSFSCKFYAFLPFLSNLIK

SEQ ID NO: 16545 - protein, 251 aa, Zea mays subsp. mays
  misc_feature (1)..(251): Ceres Seq. ID no. 12352692
MATAISSLVTPPTLHRRCLGPACVSVSVCTPIRISFRPAAAPQVSRRGSALRVSASSAVLEAPEAVAARKLYVGNIPRTVTNDELRDMFAAHGTVERAEVMYDKYTNRSRRFGFVTMSTAEEANAAVEALNGTEVGDRKIKVNVTESFLPNIDRSAPEPEALFVDSQYKVYVGNLAKTVTTEVLKNFFSEKGNILSATVSHIPGTSKSKGYGFVTFSSEEEVEAAVATFNNAVSFSCKFYAFLPFLSNLIK

SEQ ID NO: 16546 - protein, 164 aa, Zea mays subsp. mays
  misc_feature (1)..(164): Ceres Seq. ID no. 12352693
MFAAHGTVERAEVMYDKYTNRSRRFGFVTMSTAEEANAAVEALNGTEVGDRKIKVNVTESFLPNIDRSAPEPEALFVDSQYKVYVGNLAKTVTTEVLKNFFSEKGNILSATVSHIPGTSKSKGYGFVTFSSEEEVEAAVATFNNAVSFSCKFYAFLPFLSNLIK

SEQ ID NO: 16547 - DNA, 1648 bp, Zea mays subsp. mays
  misc_feature (1)..(1648): Ceres Seq. ID no. 12352702
gtcctgcagtctccatggccgccgcagtcgacaccgcggccgtggcgggcgcgaccgggaggctcagggtgttcttcctgccctccttcatccggggacacctcatcccgcagaccgacatggcgtgccgcgtcgccgcggcaaggcccgcggaggtggaggcgaccgtggtcgtgacgccggccaacgcggccctcatcgcgccgaccgtggcgcgcgccgcggccgccggccacgccgtgcgcgtgctctgctacccgttcccggacgtcggcctcggggagggcgtggagtgcctcgccaccgccaccgcgcgcgacgcgtggcgcgtctaccgcgccatggaggtggtgcagccgtcccacgagtcgctgctccgggaccaccgccccgacgccatcgtcgccgacgtgccgttctggtggaccaccggtgtcgccgccgagctcggggtgccgcgcctcacgttccaccctgtcggaatcttcgctctgctcgccatgaacagcctgttcaccatacggcccgacatcatcggccgggccagctccgacgccgctgggacggtgctgtccgtgccgggcttgcccgggaaggagatcacgatcccggtgtccgagctcccgaccttcttggtccaggacgaccacctctccaaggcgtggcagcggatgagggcgtgccagctcactggcttcggcgtcatcgtcaacaccttcgccgacctggagcagccctactgcgaggaattcagccgcgtggaggcgcgccgcgcctacttcgtcgggcccctgggaaagccatcgcgctccaccatgcaccgcggcggcagcggcaacgcggactgcctgagctggttgtccaccaaaccgagccggtcggtagtgttcgtctgcttcgggagctgggccgagttctcagcgactcagacaagagagctcgccctggggctcgaggcgtcgaaccagccattcctgtgggttgtccgctccaatgactccagcgatgaccagtgggcaccggagggctgggagcagcgcgtcgccaaccgtggcctggtcgtccacggatgggccccgcagctggccgttctggcccacccgtcggtgggcgcgttcgtgacgcactgcggttggaactcggtcctcgaagccgcgtccgccggcgtgccggtgctcacgtggccgttagtgttcgagcagttcatcaacgagcggctggccaccgaggtggccgccttcggcgtgcgcctgtgggacggcggcaggcgcagcgagagggccgaggatgcggagatcgtgccggcggaggcgatcgcgcgggccgtggccggtttcatggaaggcggagagcagcgcgacaagttgaacgccagggccggggaactagcggagcgcgcgcgcgccgctgtcagtgaggacgggtcgtcgtggcgtgacataaaccgcctgatcgatgatctcctgcaggcgagagcgtcagggctgccacaaatgaattccgtccagcttgagtgatttaaattattctacacagacattgtacgcaaatgcaaggctaaaaataaagagtgaagttaaggtggtgtttggttcatctaaatgtaacgtaaatagtttacatgggtaatggataccgctaattttgt

SEQ ID NO: 16548 - protein, 504 aa, Zea mays subsp. mays
  misc_feature (1)..(504): Ceres Seq. ID no. 12352703
PAVSMAAAVDTAAVAGATGRLRVFFLPSFIRGHLIPQTDMACRVAAARPAEVEATVVVTPANAALIAPTVARAAAAGHAVRVLCYPFPDVGLGEGVECLATATARDAWRVYRAMEVVQPSHESLLRDHRPDAIVADVPFWWTTGVAAELGVPRLTFHPVGIFALLAMNSLFTIRPDIIGRASSDAAGTVLSVPGLPGKEITIPVSELPTFLVQDDHLSKAWQRMRACQLTGFGVIVNTFADLEQPYCEEFSRVEARRAYFVGPLGKPSRSTMHRGGSGNADCLSWLSTKPSRSVVFVCFGSWAEFSATQTRELALGLEASNQPFLWVVRSNDSSDDQWAPEGWEQRVANRGLVVHGWAPQLAVLAHPSVGAFVTHCGWNSVLEAASAGVPVLTWPLVFEQFINERLATEVAAFGVRLWDGGRRSERAEDAEIVPAEAIARAVAGFMEGGEQRDKLNARAGELAERARAAVSEDGSSWRDINRLIDDLLQARASGLPQMNSVQLE

SEQ ID NO: 16549 - protein, 500 aa, Zea mays subsp. mays
  misc_feature (1)..(500): Ceres Seq. ID no. 12352704
MAAAVDTAAVAGATGRLRVFFLPSFIRGHLIPQTDMACRVAAARPAEVEATVVVTPANAALIAPTVARAAAAGHAVRVLCYPFPDVGLGEGVECLATATARDAWRVYRAMEVVQPSHESLLRDHRPDAIVADVPFWWTTGVAAELGVPRLTFHPVGIFALLAMNSLFTIRPDIIGRASSDAAGTVLSVPGLPGKEITIPVSELPTFLVQDDHLSKAWQRMRACQLTGFGVIVNTFADLEQPYCEEFSRVEARRAYFVGPLGKPSRSTMHRGGSGNADCLSWLSTKPSRSVVFVCFGSWAEFSATQTRELALGLEASNQPFLWVVRSNDSSDDQWAPEGWEQRVANRGLVVHGWAPQLAVLAHPSVGAFVTHCGWNSVLEAASAGVPVLTWPLVFEQFINERLATEVAAFGVRLWDGGRRSERAEDAEIVPAEAIARAVAGFMEGGEQRDKLNARAGELAERARAAVSEDGSSWRDINRLIDDLLQARASGLPQMNSVQLE

SEQ ID NO: 16550 - protein, 465 aa, Zea mays subsp. mays
  misc_feature (1)..(465): Ceres Seq. ID no. 12352705
MACRVAAARPAEVEATVVVTPANAALIAPTVARAAAAGHAVRVLCYPFPDVGLGEGVECLATATARDAWRVYRAMEVVQPSHESLLRDHRPDAIVADVPFWWTTGVAAELGVPRLTFHPVGIFALLAMNSLFTIRPDIIGRASSDAAGTVLSVPGLPGKEITIPVSELPTFLVQDDHLSKAWQRMRACQLTGFGVIVNTFADLEQPYCEEFSRVEARRAYFVGPLGKPSRSTMHRGGSGNADCLSWLSTKPSRSVVFVCFGSWAEFSATQTRELALGLEASNQPFLWVVRSNDSSDDQWAPEGWEQRVANRGLVVHGWAPQLAVLAHPSVGAFVTHCGWNSVLEAASAGVPVLTWPLVFEQFINERLATEVAAFGVRLWDGGRRSERAEDAEIVPAEAIARAVAGFMEGGEQRDKLNARAGELAERARAAVSEDGSSWRDINRLIDDLLQARASGLPQMNSVQLE

SEQ ID NO: 16551 - DNA, 695 bp, Zea mays subsp. mays
  misc_feature (1)..(695): Ceres Seq. ID no. 12352718
aatacaagaatgaagggcatgacactattatcctggctggtgccgagtacgggagtggaagctctcgggattgggctgcaaagggcccaatgctgcagggagtgaaggctgtgatagcaaagagcttcgagaggattcaccgcagcaatcttgctggcatgggaatcatccctctatgcttcaaagcaggggaggatgcagacaccctgggcctaaccggccatgagcgctacacggtccaccttccaaccaatgtgagtgagatcaagcctggccaagatgttaccgtgacaactgataatggaaagtcgttcacttgcacactcagattcgacactgaggtggagcttgcttactacgatcatggtggcattctaccatatgtcgctagaaagatagcggaacaatagattgtaccgttgagatggttgcgatacttgcggtgaatcgtaattggtgtaaacggtttgtttagtagtacaacccatttttgcggactacttataataacctctgagtatctcagagtgagctgtctgaaatttgatgaactgctacaattctggtgcgccatgaggatgggatctttttgccttctatgttaataatatgctaacttctgcaatacctgatatacatttggcagaagattttgcacgctgtaaatgacactagtcgtaacactgatgcggtcc

SEQ ID NO: 16552 - protein, 135 aa, Zea mays subsp. mays
  misc_feature (1)..(135): Ceres Seq. ID no. 12352719
YKNEGHDTIILAGAEYGSGSSRDWAAKGPMLQGVKAVIAKSFERIHRSNLAGMGIIPLCFKAGEDADTLGLTGHERYTVHLPTNVSEIKPGQDVTVTTDNGKSFTCTLRFDTEVELAYYDHGGILPYVARKIAEQ

SEQ ID NO: 16553 - protein, 106 aa, Zea mays subsp. mays
  misc_feature (1)..(106): Ceres Seq. ID no. 12352720
MLQGVKAVIAKSFERIHRSNLAGMGIIPLCFKAGEDADTLGLTGHERYTVHLPTNVSEIKPGQDVTVTTDNGKSFTCTLRFDTEVELAYYDHGGILPYVARKIAEQ

SEQ ID NO: 16554 - protein, 83 aa, Zea mays subsp. mays
  misc_feature (1)..(83): Ceres Seq. ID no. 12352721
MGIIPLCFKAGEDADTLGLTGHERYTVHLPTNVSEIKPGQDVTVTTDNGKSFTCTLRFDTEVELAYYDHGGILPYVARKIAEQ

SEQ ID NO: 16555 - DNA, 1600 bp, Zea mays subsp. mays
  misc_feature (1)..(1600): Ceres Seq. ID no. 12352722
atcctcaacctcatccgcccccgcccgcaccccgcaggcaccatcaccaaaaaggtccccgccttcttcttcttcttcttcttctcctctgcccctgcttgtcgtttgctcgtgctcccccaccccctttctgattcagcaagggttccttccgcggcgcggcgcgtcgccatgggcaactgctggggcgccaagatcagctccgacagcccgtcccgcggcgcctcatccccgtcagggacggcgtccaagttggcgagcaggaacggggcggcggcagccctgagcgggtgcagcagccacgcgtcgtccgcgtccatgctgccgacgccccgcagcgaggacgagatcctggagtcggccaacgtcagggccttcagcttcaacgagctgaggaccgccaccaggaacttcaggccggacagcgtgctgggcgagggcgggttcggatccgtcttcaagggctgggtcgacgagaagacgctcgccccggctaggcccggcacggggatggtcattgccgtcaagaagctcaaccaggatggataccagggccacaaggagtggctgactgaagtgaactaccttggaacgctgtcgcacccctaccttgtgaagctcgttggctactgcctcgaggacgaacagcgcctcctcgtctacgagttcatgccacgcgggagtctggagaaccatctgttcaggaggagctcctatttccagcctctgtcctggaacctacggatgaagattgcgctcggagcagctaaaggcctcgcgtatctccacagcgacgaggctaaagtcatctaccgtgacttcaagacatctaatgtccttctagatgcgaacttcaatgcaaagctctctgatttcgggctggcgaaggatggtccgaccggcgacaagagccatgtctccactagggtgatggggactcacgggtatgcagctccagaataccttgcgacaggtcatctgaccaccaagagcgacgtgtacagctttggggtggtgctcctagagatgctgtcagggcggcgggcgctggacaagaaccgcccgaacggggagcacaacctggtggagtgggctaggccatacctgagaagcaagcggcgcatatttcgcatcctggacccacggctgggcgggcagtactcccttgccagggcgcagaaggctgcggcgctcgccctgcaatgcctctcggtggagtccaggcacaggcccagcatggacgaggtggtcacagcgttagagcagctccaggacaccaaagaaggaggtaaccatcacctacagaagaggccaggcagccggagcttggataacaatggcggcaaagcggcagggaaggggaagcctgctcctcatgtaaaaccagtttgagtgattggattttatatgccagagtatctctctttttttttcccatccatttgtaggtgtaggtaatatagtagggttcttagagggatttgtaaagaggcaggcagagttctggatgttttctgtctattatgtagttttttttacatcttcaagtctctgtaaagtacgctatgtaaatacataatgacatccagttcggagtgcg

SEQ ID NO: 16556 - protein, 463 aa, Zea mays subsp. mays
  misc_feature (1)..(463): Ceres Seq. ID no. 12352723
ILNLIRPRPHPAGTITKKVPAFFFFFFFSSAPACRLLVLPHPLSDSARVPSAARRVAMGNCWGAKISSDSPSRGASSPSGTASKLASRNGAAAALSGCSSHASSASMLPTPRSEDEILESANVRAFSFNELRTATRNFRPDSVLGEGGFGSVFKGWVDEKTLAPARPGTGMVIAVKKLNQDGYQGHKEWLTEVNYLGTLSHPYLVKLVGYCLEDEQRLLVYEFMPRGSLENHLFRRSSYFQPLSWNLRMKIALGAAKGLAYLHSDEAKVIYRDFKTSNVLLDANFNAKLSDFGLAKDGPTGDKSHVSTRVMGTHGYAAPEYLATGHLTTKSDVYSFGVVLLEMLSGRRALDKNRPNGEHNLVEWARPYLRSKRRIFRILDPRLGGQYSLARAQKAAALALQCLSVESRHRPSMDEVVTALEQLQDTKEGGNHHLQKRPGSRSLDNNGGKAAGKGKPAPHVKPV

SEQ ID NO: 16557 - protein, 406 aa, Zea mays subsp. mays
  misc_feature (1)..(406): Ceres Seq. ID no. 12352724
MGNCWGAKISSDSPSRGASSPSGTASKLASRNGAAAALSGCSSHASSASMLPTPRSEDEILESANVRAFSFNELRTATRNFRPDSVLGEGGFGSVFKGWVDEKTLAPARPGTGMVIAVKKLNQDGYQGHKEWLTEVNYLGTLSHPYLVKLVGYCLEDEQRLLVYEFMPRGSLENHLFRRSSYFQPLSWNLRMKIALGAAKGLAYLHSDEAKVIYRDFKTSNVLLDANFNAKLSDFGLAKDGPTGDKSHVSTRVMGTHGYAAPEYLATGHLTTKSDVYSFGVVLLEMLSGRRALDKNRPNGEHNLVEWARPYLRSKRRIFRILDPRLGGQYSLARAQKAAALALQCLSVESRHRPSMDEVVTALEQLQDTKEGGNHHLQKRPGSRSLDNNGGKAAGKGKPAPHVKPV

SEQ ID NO: 16558 - protein, 357 aa, Zea mays subsp. mays
  misc_feature (1)..(357): Ceres Seq. ID no. 12352725
MLPTPRSEDEILESANVRAFSFNELRTATRNFRPDSVLGEGGFGSVFKGWVDEKTLAPARPGTGMVIAVKKLNQDGYQGHKEWLTEVNYLGTLSHPYLVKLVGYCLEDEQRLLVYEFMPRGSLENHLFRRSSYFQPLSWNLRMKIALGAAKGLAYLHSDEAKVIYRDFKTSNVLLDANFNAKLSDFGLAKDGPTGDKSHVSTRVMGTHGYAAPEYLATGHLTTKSDVYSFGVVLLEMLSGRRALDKNRPNGEHNLVEWARPYLRSKRRIFRILDPRLGGQYSLARAQKAAALALQCLSVESRHRPSMDEVVTALEQLQDTKEGGNHHLQKRPGSRSLDNNGGKAAGKGKPAPHVKPV

SEQ ID NO: 16559 - DNA, 1728 bp, Zea mays subsp. mays
  misc_feature (1)..(1728): Ceres Seq. ID no. 12352730
acatcacactcgcttcaatattgacaccaccaacgcacgcacgacccttcttcctcctcccggcggcggctaggctaccgctattgatttctccttgcatcgcctttattgcgctcacctgctctgccaagtgccaacgtcgtacacttccagcagtggagggagccggagcacgagctgcccgctggacgagccgtcgccgccacagaaatctacatataattgcagccccaaccacctcgttcctcttccccttccccctccccagccaaatccgctttcctagctctaatcgccgccgatctcgccggaggaactgctagctcgctgctcccttcacttctcagattaaaagttgcctcaagaagaagatccctctgcgccgctgcatgttgagcgagcctaccgtagcgacgagcgcggatatgaattggtgttgtgttcctaaggccaagagagaagagaacccttactccaacagcatcggcggcatctactccgagaagaacataaggctcttctcctatgccgagttaagatctgctaccgacaacttcaaccgcaccaacaaagtgggacgaggcggattcgggacagtctataagggaaccatccgaagcgggcgagaggtcgcggtgaaggtcctctccgccgagtccaggcagggcatcagggagttcctgacggagatcgacgtcatcagcaacgtcaagcaccccaacctcgtcgaactcatcggctgctgcgtcgagggaagcaaccggattctggtgtatgagtacctcaagaacagcagccttgaccgtgcgctgctggcttctaacagtgagcctgccgacttcacctggagcgtcaggtctgctatatgcctcggagtcgctcggggccttgcgtacctgcacgaagagatcgcggcgccgatcgtgcacagagacatcaaggccagcaacatactgctcgacaggaactacgtccccaagatcggggatttcggtctggccaagctgtttcctgacaatgtcacccacatcagcacccgcgtcgcgggaacaacaggctaccttgcgcctgagtacgcctggcatggccagctcaccaagaaagcggacatctacagctttggtgtccttgtcctggagatagtgagcggcactagtagctccaggagcatactcatggatgacaagattctcctagagaaggcatgggagctgtacgaagcgaagaggctcaaggaactggtggatccagcccttgtagactgccctgaggaagaagccatcaggtacatcatggtggccctcttctgcctacaggcggccgccgcgcgccggccgacgatgccccaggtcgtcaccatgctgtccaagcccgtccggatcaacgagagcgagctgacggcgccggggtacctccaggagtacagcaggcggagccccttgtccaaggccaccacttccaccgactccaggttcaagaacctggcgtcccaggaggactccaacatgttcagcacggtggtgccacccacggtgaccgagatgagccccaggtgaagcaaccgccatgtaattttgactgattccttccttgcgttttgtcaaccggcgactatatgatgtagtgccaagtgtgttttcctcctgcaaatgcggcaactagatcttgtacatatagattagtgaatccatgccagacccagagcaatgcaagattgctgtttgttgc

SEQ ID NO: 16560 - protein, 388 aa, Zea mays subsp. mays
  misc_feature (1)..(388): Ceres Seq. ID no. 12352731
MLSEPTVATSADMNWCCVPKAKREENPYSNSIGGIYSEKNIRLFSYAELRSATDNFNRTNKVGRGGFGTVYKGTIRSGREVAVKVLSAESRQGIREFLTEIDVISNVKHPNLVELIGCCVEGSNRILVYEYLKNSSLDRALLASNSEPADFTWSVRSAICLGVARGLAYLHEEIAAPIVHRDIKASNILLDRNYVPKIGDFGLAKLFPDNVTHISTRVAGTTGYLAPEYAWHGQLTKKADIYSFGVLVLEIVSGTSSSRSILMDDKILLEKAWELYEAKRLKELVDPALVDCPEEEAIRYIMVALFCLQAAAARRPTMPQVVTMLSKPVRINESELTAPGYLQEYSRRSPLSKATTSTDSRFKNLASQEDSNMFSTVVPPTVTEMSPR

SEQ ID NO: 16561 - protein, 376 aa, Zea mays subsp. mays
  misc_feature (1)..(376): Ceres Seq. ID no. 12352732
MNWCCVPKAKREENPYSNSIGGIYSEKNIRLFSYAELRSATDNFNRTNKVGRGGFGTVYKGTIRSGREVAVKVLSAESRQGIREFLTEIDVISNVKHPNLVELIGCCVEGSNRILVYEYLKNSSLDRALLASNSEPADFTWSVRSAICLGVARGLAYLHEEIAAPIVHRDIKASNILLDRNYVPKIGDFGLAKLFPDNVTHISTRVAGTTGYLAPEYAWHGQLTKKADIYSFGVLVLEIVSGTSSSRSILMDDKILLEKAWELYEAKRLKELVDPALVDCPEEEAIRYIMVALFCLQAAAARRPTMPQVVTMLSKPVRINESELTAPGYLQEYSRRSPLSKATTSTDSRFKNLASQEDSNMFSTVVPPTVTEMSPR

SEQ ID NO: 16562 - DNA, 1671 bp, Zea mays subsp. mays
  misc_feature (1)..(1671): Ceres Seq. ID no. 12352733
accaagcgcccaacaactgccgccccaagccaagggaagggaaaaggctatcgttctcgtcagtcgtcacgagagccgcgacggcgcgcatggcggcgacggcagcggcgctccggtgctgcttccccggatcctccggtgtcggtagtggcttcgtcaagcccaactcctccaggcgaggctggtgcgcagcggccgtggcggcgccgtcgcgggaggcggaaccggtttcgtcgctggggcaccgcacccgcgtcgacttccccatccttcaccaggaatttgatgatgccaaattagtttacttcgacaatggtgcaacatcgcagaaaccatgtagtgtgatgaaaacattagatgagtactaccgatcgtacaattcgaatgttcatcgtggtatccatgcactcaggctactcatgcatatgaggatgcaagaagaaaagttgcaaattttgtcaacgcagctgatagcagagagattgttttcactcgtaatgctactgaagctattaatctggtagcctattcatggggactatctaacttgaaagaaggagatgaaattgttcttacagttgcagagcatcatagtgctattgttccatggcaatttgtttcccagaagactggtgccaccttaaaatatgttggattgactaaagaaaatgtcccagacattgagcagttaaaagggtttctgtcgaacaagacaaagatagttgttgttcatcatgtctcaaatgttctaggttccatgcttcctatcgaggagattgtaacatggtcaaacagagttggagctaaagtccttgtagatgcttgccaaagtgttccccatatgccagttgatgttcagaaacttggcgcggactttcttgtcgcatcctctcataagatgtgtggccctacaggcgtcggatttttgcatggtaaatttgagattttgtcgtctatggagcctttcttaggtggtggtgaaatgattgcggatgtattcgaagacaaatccacatatgctgagcctccctctagatttgaggctggaactcctgcaattggagaagctataggactgggagcagccatcgactatttatcatgcattggcatggagcagatccacgaatatgagaaagagctggggacatacctctacgaaagccttctctctgttccaaatgtccagatatatggcccggcgccttcccagactgtccaccgtgctccgttgtgctccttcaatatcgagaacgtccatcctacagatatcgcagagattcttgatctgcagcatagcgtagcgattcggtcggggcatcactgcgcgcagatcttgcataggacccttggcatcaacgcaagtgctcgtgcgagtcttcacttctacaacacaaaagacgaggtggataccttcgtcgacgcgcttaaagccaccgttgatttcctcacggatcgatactagtgcggttcagttcacttcccttttttttttgccagtttcatcgctctctcgtttgaactgttgtatgcacacacaaaaaagtatgcatatatatttggtataaagaaaacatacaaagtgtacggcttggcaaagtgagctcccttatttggagttttggactgtactcccttatttggcggttgttgttgaattaaacgtagttc

SEQ ID NO: 16563 - protein, 235 aa, Zea mays subsp. mays
  misc_feature (1)..(235): Ceres Seq. ID no. 12352734
MLPIEEIVTWSNRVGAKVLVDACQSVPHMPVDVQKLGADFLVASSHKMCGPTGVGFLHGKFEILSSMEPFLGGGEMIADVFEDKSTYAEPPSRFEAGTPAIGEAIGLGAAIDYLSCIGMEQIHEYEKELGTYLYESLLSVPNVQIYGPAPSQTVHRAPLCSFNIENVHPTDIAEILDLQHSVAIRSGHHCAQILHRTLGINASARASLHFYNTKDEVDTFVDALKATVDFLTDRY

SEQ ID NO: 16564 - protein, 207 aa, Zea mays subsp. mays
  misc_feature (1)..(207): Ceres Seq. ID no. 12352735
MPVDVQKLGADFLVASSHKMCGPTGVGFLHGKFEILSSMEPFLGGGEMIADVFEDKSTYAEPPSRFEAGTPAIGEAIGLGAAIDYLSCIGMEQIHEYEKELGTYLYESLLSVPNVQIYGPAPSQTVHRAPLCSFNIENVHPTDIAEILDLQHSVAIRSGHHCAQILHRTLGINASARASLHFYNTKDEVDTFVDALKATVDFLTDRY

SEQ ID NO: 16565 - protein, 188 aa, Zea mays subsp. mays
  misc_feature (1)..(188): Ceres Seq. ID no. 12352736
MCGPTGVGFLHGKFEILSSMEPFLGGGEMIADVFEDKSTYAEPPSRFEAGTPAIGEAIGLGAAIDYLSCIGMEQIHEYEKELGTYLYESLLSVPNVQIYGPAPSQTVHRAPLCSFNIENVHPTDIAEILDLQHSVAIRSGHHCAQILHRTLGINASARASLHFYNTKDEVDTFVDALKATVDFLTDRY

SEQ ID NO: 16566 - DNA, 1539 bp, Zea mays subsp. mays
  misc_feature (1)..(1539): Ceres Seq. ID no. 12352768
ataccggatgtgcagcgcagggtcaacttcgtcaggtttcttggctccaacaaccttcctgggtcactctaaattgtaaagagatggggtgtggcccatcgatccccgacaagtacacgataggtgggaaggggcgcaagcgccggagcgtcatacaggaggttgccgtgttcgtgcccaccatccgcatcccagtggcctctgacatagctcatccactcaggggaatagtttccaaggatcttgtcgaccgactctccacactccgtgcccatgtcgcctcgctggctgaagaaatctatcacgcggacgtatcagctgttcaggaactgcagcatgcgttagaggagtacttgccagttgttcttggtttaacaacgaaatagagccgtcttgaatcgtcagtacagttcagatggaagaccttagacgacgaccaggagtgttgtctggcgagcgcgtggtatgaggtgctctcggtggtccacatgatggccatgcttgcgttgtttcaggctaacctattgctcatcccaaagagcagccaaggtggtggtgaaaggaaggtagcagaagacgcaaagaaggatgtcgtcgattcgttgctccgggcgtcgggatgcttagactactccgtgcatcgcatacttgttcagatacctgcgcaagtcaagaagagttttcccagttacttgcaggagggcatgcttgaggccatctcaattcaggcattggctcagtgtgtggaaatacagcttggcttggcttctgaatgtgagaaggcaacgctgtcagtaaagaggaggctagcttgtgagcaagtcagctatttttctcaggctcactattgtctgtcgggatgcgatacaagtgactcgtacgggaagaagcttctgctgttcctcaagtggaagtggatggaggccaaggctgtagcgtattactaccatggtctggtgctcgacaagggcggcgaaccggcaaaccatatcagtgcagtctgctgcctctctgcagctgatgacctgctctcagacagcaaaagggcttgcttgagtttttgcttggcaaatcctgtcacgagggtgcctcctccttggggtgtcatgaaaaacatgcacaaaaagatcccagatgtcgcttacaagaagttccaagcgcacgggcatctgtttgagcaaaacaagaacagcgcactccaatccgttcctgacctaccagagtttgcgctgtcgctgagaccggatggatacgagttgccaatcactgattcgatctgggagaatgttgatggccaacctcagattcagagcctcaaggagcatatgatagatgacgaagatgaagtaggcacaaaatgatagttctcacttccaaatgcttcttttcattgtaccaccaaaagtagcagagttcaaaaacgcttaatccaaaatgttttggattcagcaaatggctcaactgaaaaaggaatcgcgatctctgtattattgcaagtattaccatatggtatagtaaagtcttatgtgtaatagaatc

SEQ ID NO: 16567 - protein, 290 aa, Zea mays subsp. mays
  misc_feature (1)..(290): Ceres Seq. ID no. 12352769
MMAMLALFQANLLLIPKSSQGGGERKVAEDAKKDVVDSLLRASGCLDYSVHRILVQIPAQVKKSFPSYLQEGMLEAISIQALAQCVEIQLGLASECEKATLSVKRRLACEQVSYFSQAHYCLSGCDTSDSYGKKLLLFLKWKWMEAKAVAYYYHGLVLDKGGEPANHISAVCCLSAADDLLSDSKRACLSFCLANPVTRVPPPWGVMKNMHKKIPDVAYKKFQAHGHLFEQNKNSALQSVPDLPEFALSLRPDGYELPITDSIWENVDGQPQIQSLKEHMIDDEDEVGTK

SEQ ID NO: 16568 - protein, 289 aa, Zea mays subsp. mays
  misc_feature (1)..(289): Ceres Seq. ID no. 12352770
MAMLALFQANLLLIPKSSQGGGERKVAEDAKKDVVDSLLRASGCLDYSVHRILVQIPAQVKKSFPSYLQEGMLEAISIQALAQCVEIQLGLASECEKATLSVKRRLACEQVSYFSQAHYCLSGCDTSDSYGKKLLLFLKWKWMEAKAVAYYYHGLVLDKGGEPANHISAVCCLSAADDLLSDSKRACLSFCLANPVTRVPPPWGVMKNMHKKIPDVAYKKFQAHGHLFEQNKNSALQSVPDLPEFALSLRPDGYELPITDSIWENVDGQPQIQSLKEHMIDDEDEVGTK

SEQ ID NO: 16569 - protein, 287 aa, Zea mays subsp. mays
  misc_feature (1)..(287): Ceres Seq. ID no. 12352771
MLALFQANLLLIPKSSQGGGERKVAEDAKKDVVDSLLRASGCLDYSVHRILVQIPAQVKKSFPSYLQEGMLEAISIQALAQCVEIQLGLASECEKATLSVKRRLACEQVSYFSQAHYCLSGCDTSDSYGKKLLLFLKWKWMEAKAVAYYYHGLVLDKGGEPANHISAVCCLSAADDLLSDSKRACLSFCLANPVTRVPPPWGVMKNMHKKIPDVAYKKFQAHGHLFEQNKNSALQSVPDLPEFALSLRPDGYELPITDSIWENVDGQPQIQSLKEHMIDDEDEVGTK

SEQ ID NO: 16570 - DNA, 1282 bp, Zea mays subsp. mays
  misc_feature (1)..(1282): Ceres Seq. ID no. 12352776
acccagacgggtcctggttcctccccctccaagccggctctgaaatttgaggcccatagccccgtcggcccccatcgccacgccgccggccacgccccagacgaccccgcccgccgccgccgcctcccgctccctccgcgcgcagccctcgtccggccgcccgggtccgagcccgctcgctcctcctccccacgttggacagtttaagtgtggcttcattgcatgagtagttgcagttagcgtggcttttctccgtgcttgctcctggtcgtgctttgccttgcaaaggaaggaatcatgacatctgttgttcacagtgtttcaggtgaccacagggctgaggatcaaaatcaacagaagaagcaagctgaacctggggaccagcaagaagccccagttactagttcagatagccaaccaacagtaggcacaccatcaacagattatgtggcaccctatgcccctcatgacatgagccatgcaatgggtcaatacgcttatccaaatattgacccatactatggaagcctttatgcagcagcttacggtggacagccattgatgcatccaccgttagttggaatgcatccggctggcttacctttgcctaccgatgcaattgaagagcctgtgtatgtaaatgcaaagcaatacaatgccatattaagacggcgtcaatctcgggctaaagctgaatcagaacgaaagcttatcaaggggcgtaagccctatctccatgagtcacgtcatcagcatgccttgaaaagggccaggggagctggaggtcggtttctcaactcaaagtcagatgacaaggaagagaactccgactcgagtcacaaagagaatcagaacggagttgcgccccacaggagcggccaaccgtcaacccctccgtctcccaacggtgcatcgtcagctaatcagggcaggcagtcgtgaatgatgattcaaaactcacagctgaagagatttcagcccctgagctagatatggcagcagttttgtacagaaaacgctagtgggcagcagcaacatggtgtcgatcggtcggtgggtcggttgttgtaggacatgttccatagaaaaagcatagacgagtctacaggttttggagccttggtttggtcctctgtgtattcacctttctgtacaatcttagtagcgttgtgtaccttcccctggaaggatagcttcagttagcgcttcagaaagtcaagtgtgtagcatattggcttattgtttgctttgcttggacaatggagatttgggagtggagttc

SEQ ID NO: 16571 - protein, 214 aa, Zea mays subsp. mays
  misc_feature (1)..(214): Ceres Seq. ID no. 12352777
MTSVVHSVSGDHRAEDQNQQKKQAEPGDQQEAPVTSSDSQPTVGTPSTDYVAPYAPHDMSHAMGQYAYPNIDPYYGSLYAAAYGGQPLMHPPLVGMHPAGLPLPTDAIEEPVYVNAKQYNAILRRRQSRAKAESERKLIKGRKPYLHESRHQHALKRARGAGGRFLNSKSDDKEENSDSSHKENQNGVAPHRSGQPSTPPSPNGASSANQGRQS

SEQ ID NO: 16572 - protein, 156 aa, Zea mays subsp. mays
  misc_feature (1)..(156): Ceres Seq. ID no. 12352778
MSHAMGQYAYPNIDPYYGSLYAAAYGGQPLMHPPLVGMHPAGLPLPTDAIEEPVYVNAKQYNAILRRRQSRAKAESERKLIKGRKPYLHESRHQHALKRARGAGGRFLNSKSDDKEENSDSSHKENQNGVAPHRSGQPSTPPSPNGASSANQGRQS

SEQ ID NO: 16573 - protein, 152 aa, Zea mays subsp. mays
  misc_feature (1)..(152): Ceres Seq. ID no. 12352779
MGQYAYPNIDPYYGSLYAAAYGGQPLMHPPLVGMHPAGLPLPTDAIEEPVYVNAKQYNAILRRRQSRAKAESERKLIKGRKPYLHESRHQHALKRARGAGGRFLNSKSDDKEENSDSSHKENQNGVAPHRSGQPSTPPSPNGASSANQGRQS

SEQ ID NO: 16574 - DNA, 1230 bp, Zea mays subsp. mays
  misc_feature (1)..(1230): Ceres Seq. ID no. 12352808
agccgccgcaaccttctttctacgatgcctcgcaagcccaaacggaaggctccggcctcaccggcgaggcacgacccttcgccggagccctacccttcccatgcctccccctgctcggcacaatgcctggtagtccgcgacgccctcctcgcgttccacgggttccccgaagagttcgcggccttccgcgtcctccgcctcggtggcctctcgcctaaccgtgaccctcggccttcgtcccccacagtgcttgacggcctcgtcaccacgctcctctcccagaacactaccgacgccatctcccgccgcgccttcgcctcgctcaaggccgctttcccctcctgggaccaggtggtggatgaggagggaaagaggttggaggacgccatccggtgcggcggcctggcggcgacgaaggcggccaggatacggtccatgctgagggacgtgagggagcggaggggcaagatttgcctcgagtacctgcgggaactgtcggtggatgaggtgaagaaggagctctcgcggttcaaagggattggaccaaagaccgtggcatgtgtgctgatgttctatctacagaaggatgattttccagtggatactcatgtactccgcattacgaaggctatgggctgggttcctgctacagctagcagggagaaggcctacattcatctaaataataagattcctgatgatctgaagtttgatttgaattgtctttttgtaactcatggaaagctttgtcagtcatgtaccaaaaaggtgggaagtgataaaagaaagagttccaattctgcctgtcctctagcaggttactgttgtattggagaaaagcttcagcaactgtgaagagcaggcagtagctgggggcgttcaaaaggctctgctgtgtttgattcggcaaatgctttatcacaatcggtgcaaacttagctgaatgctaccgccccacttgtttgaaaaggacgtctgcacttgagttcaactgtgtaaacctgggagctttggatggaggacttgtggatccttgatgcgcatttgttgcaaatgctttggattgaagcagagcaatgtaccataccatgctggcatgcgatctaagtggccggcggcttgcttcatgctcacatgaagtttaactaccatcaccatcggttgcagcttcaagtttggttcggttgtaatgaaacggattctcatatgttaaacctgagagccttctgc

SEQ ID NO: 16575 - protein, 284 aa, Zea mays subsp. mays
  misc_feature (1)..(284): Ceres Seq. ID no. 12352809
SRRNLLSTMPRKPKRKAPASPARHDPSPEPYPSHASPCSAQCLVVRDALLAFHGFPEEFAAFRVLRLGGLSPNRDPRPSSPTVLDGLVTTLLSQNTTDAISRRAFASLKAAFPSWDQVVDEEGKRLEDAIRCGGLAATKAARIRSMLRDVRERRGKICLEYLRELSVDEVKKELSRFKGIGPKTVACVLMFYLQKDDFPVDTHVLRITKAMGWVPATASREKAYIHLNNKIPDDLKFDLNCLFVTHGKLCQSCTKKVGSDKRKSSNSACPLAGYCCIGEKLQQL

SEQ ID NO: 16576 - protein, 276 aa, Zea mays subsp. mays
  misc_feature (1)..(276): Ceres Seq. ID no. 12352810
MPRKPKRKAPASPARHDPSPEPYPSHASPCSAQCLVVRDALLAFHGFPEEFAAFRVLRLGGLSPNRDPRPSSPTVLDGLVTTLLSQNTTDAISRRAFASLKAAFPSWDQVVDEEGKRLEDAIRCGGLAATKAARIRSMLRDVRERRGKICLEYLRELSVDEVKKELSRFKGIGPKTVACVLMFYLQKDDFPVDTHVLRITKAMGWVPATASREKAYIHLNNKIPDDLKFDLNCLFVTHGKLCQSCTKKVGSDKRKSSNSACPLAGYCCIGEKLQQL

SEQ ID NO: 16577 - DNA, 1374 bp, Zea mays subsp. mays
  misc_feature (1)..(1374): Ceres Seq. ID no. 12352823
accaaaccgccccgccgagcgacccagtccgtcagcgagcacccctgtcgccgaagcccaggcagcagcagcgggcagcggcgtccgtccggtccgcgcgcgttcgttccccacttcccctccccgaccggcagattccccgtccacgcccccgccttaaaacgcccgccactaatcccgtttctcactgcccttccgcggctgtgctgtgctgttctgtgctctgctctgctctgctccccgtctttcctcctctcccggtctttcctcctctccccttcccgcccagcgcgtccccccgaggaaccaaccccgcggcatggggatcgtggaggaggcgcacaacctgcgagtggtgggcgaggggaagcgcggggtcatcgtgctggcgcacggcttcggcaccgaccagtccgtgtggaagcacctggtgccgcacctcgtcgcccgactaccgcgtcgtgctcttcgacaccatgggcgccggccccaccaacccggactacttcgacttctcccgctacgccacgctcgagggctacgcgctcgacctcctcgccatcctccaggagctcggcgtccgctcctgcatctacgtcggccactccgtctccgcggtcatcggcgcgctcgcctccatctccaggcctgacctcttcaccaagctcgtgctcctctccgcgtccccaaggtacctcaatgatgtggactactatggcgggtttgagcaagatgagcttgatgagctgtttgaggcgatgcgatcaaactacaaggcctggtgctcaggttttgcgcccctgtgtgttggcggagacatggaatcagtggcagttcaggagtttagcaggacgctcttcaatatacgtccggacattgcgcttagtgttgcccagacgatcttccagagcgacgtgcgcagcctcctcccgcacgtcactgtcccatgccacattgttcagagcaccaaggatctcgcggtgccggtcgtggtgtctgagtacctgcacaggcaccttggtggcgactccatcgtggaggtgatgccctctgaaggccatcttccccagcttagctctccggacattgtaatccctgtcttactccgacacatccagcacgatatcgcagtctaggttggtcaatcgttcctccaagacgatgagcatccgaagctgtctacttgtctgtttgtatcttgcttaattgttcaacgtaggatcgcatctatttgatgttctaataaggtttcaaaggtgttatgtagtgttggcggtggaaagtgtagcatatatgtatgtgttatccattggtcgtctaatgtaggctaccatgttggatgctctgacatctgaagtccttcagaagctcttc

SEQ ID NO: 16578 - protein, 377 aa, Zea mays subsp. mays
  misc_feature (1)..(377): Ceres Seq. ID no. 12352824
QTAPPSDPVRQRAPLSPKPRQQQRAAASVRSARVRSPLPLPDRQIPRPRPRLKTPATNPVSHCPSAAVLCCSVLCSALLPVFPPLPVFPPLPFPPSASPRGTNPAAWGSWRRRTTCEWWARGSAGSSCWRTASAPTSPCGSTWCRTSSPDYRVVLFDTMGAGPTNPDYFDFSRYATLEGYALDLLAILQELGVRSCIYVGHSVSAVIGALASISRPDLFTKLVLLSASPRYLNDVDYYGGFEQDELDELFEAMRSNYKAWCSGFAPLCVGGDMESVAVQEFSRTLFNIRPDIALSVAQTIFQSDVRSLLPHVTVPCHIVQSTKDLAVPVVVSEYLHRHLGGDSIVEVMPSEGHLPQLSSPDIVIPVLLRHIQHDIAV

SEQ ID NO: 16579 - protein, 347 aa, Zea mays subsp. mays
  misc_feature (1)..(347): Ceres Seq. ID no. 12352825
TKPPRRATQSVSEHPCRRSPGSSSGQRRPSGPRAFVPHFPSPTGRFPVHAPALKRPPLIPFLTALPRLCCAVLCSALLCSPSFLLSRSFLLSPSRPARPPEEPTPRHGDRGGGAQPASGGRGEARGHRAGARLRHRPVRVEAPGAAPRRPTTASCSSTPWAPAPPTRTTSTSPATPRSRATRSTSSPSSRSSASAPASTSATPSPRSSARSPPSPGLTSSPSSCSSPRPQGTSMMWTTMAGLSKMSLMSCLRRCDQTTRPGAQVLRPCVLAETWNQWQFRSLAGRSSIYVRTLRLVLPRRSSRATCAASSRTSLSHATLFRAPRISRCRSWCLSTCTGTLVATPSWR

SEQ ID NO: 16580 - protein, 219 aa, Zea mays subsp. mays
  misc_feature (1)..(219): Ceres Seq. ID no. 12352826
MGAGPTNPDYFDFSRYATLEGYALDLLAILQELGVRSCIYVGHSVSAVIGALASISRPDLFTKLVLLSASPRYLNDVDYYGGFEQDELDELFEAMRSNYKAWCSGFAPLCVGGDMESVAVQEFSRTLFNIRPDIALSVAQTIFQSDVRSLLPHVTVPCHIVQSTKDLAVPVVVSEYLHRHLGGDSIVEVMPSEGHLPQLSSPDIVIPVLLRHIQHDIAV

SEQ ID NO: 16581 - DNA, 1682 bp, Zea mays subsp. mays
  misc_feature (1)..(1682): Ceres Seq. ID no. 12352831
acaaacgccatcatcgcaccgactctgatccaatttcacacgcatactagcgccgccggtagcagcaccggcagccgcgttcccctccgccatggatcccgcgaacagcagcgcgggcgccgagctcgacgacgcgtccgagtggcgcacccgggcgctgggcggcacggagtacagctggctccgcgccgtgccgggcggcacgggcaccacgctgctcgcgctccgcctatcccacggcgacgcggccgaggcggcgctgcgctccctgcgggacgcgcaccccgtcctccgcgcccgcctccggacctcttctccctccggcccgacgctggcgttccccgatccggcaccgccgttcctgctggcgccgatcccggccccgggctccgcgcccgacttccacgcgctcctcgagcacgagctcaaccgcaacccgtgggccgacgaccccgcgtcctccgacgacgccccggtcctcttcgcgacgctctacgagctcccagccgccacgggcggcgcggcgctgttcgtccggatccacacggtcgcgtgcgaccgctcggcggcgagtgcgctggccagggagctcgtcgcgctgctggccggcgccggcggcgaggagcccgacccggaggatgcggcggcggaagcggggctggaggcgaggatccctcagagggacatctggaagccgttctgggcgcgcgggttggatatggtgggctactccatcaacggcctgcggacgtccacgctgccgttcgtggagaccggcacggagaggtccacgcagatgctgcggctcgggctcggcctcgacgagacgacgaggctgctcgacgcgtgcaaggagaatggggtgaggttgtgctccgccgtggccgccgcgacgatgctcgccgcgcggcagtcgaagccgatggagagcggccagcaggagacgtactctgtcgtgacccttatcaattgccgcaagtttcttgagccagtcttggaggaccgcaacgttgggttcttctactctgccatcaccaacacgcacacgatccacggcggggaagggctgtgggagctggccaagaggtgccaggactcgtacaccagcgccaagagcaacaagaaacacctcaccgacatcagcgacctcaacttcctcatgtgccgggccatcgagaacccccagctgacgaccgccggcgcgctccggacggcgctcgtctccgtgttcgaggaccccgtggtcgccgacgtggccgaggcgcagagcaaggccggcgtggaggactgcgtctgctgcgccaccgtgcacggcatcggcccgtcgatcggcgtgttcgactcgatcaaggacggcaagctggactgggcgtgcgtctacccttctcctctgcactccaggaagcaggtccaggagatattcgacaaggtgaagcagattttgcgccatgcggctgcggctgaggagaattttgaagactgcacctaagtacctaacgatgtcgtcgggagctttatggggcatctcggtagagctattgctccatttgtgtctttgtgaggcattcttttctcgtgagggttgtaatgtaagtatagtgaaccttgtgttagcctttttattctttcaattctcggcgcaatgaaaattttccggtgggaggctggtagctttatgatcc

SEQ ID NO: 16582 - protein, 465 aa, Zea mays subsp. mays
  misc_feature (1)..(465): Ceres Seq. ID no. 12352832
MDPANSSAGAELDDASEWRTRALGGTEYSWLRAVPGGTGTTLLALRLSHGDAAEAALRSLRDAHPVLRARLRTSSPSGPTLAFPDPAPPFLLAPIPAPGSAPDFHALLEHELNRNPWADDPASSDDAPVLFATLYELPAATGGAALFVRIHTVACDRSAASALARELVALLAGAGGEEPDPEDAAAEAGLEARIPQRDIWKPFWARGLDMVGYSINGLRTSTLPFVETGTERSTQMLRLGLGLDETTRLLDACKENGVRLCSAVAAATMLAARQSKPMESGQQETYSVVTLINCRKFLEPVLEDRNVGFFYSAITNTHTIHGGEGLWELAKRCQDSYTSAKSNKKHLTDISDLNFLMCRAIENPQLTTAGALRTALVSVFEDPVVADVAEAQSKAGVEDCVCCATVHGIGPSIGVFDSIKDGKLDWACVYPSPLHSRKQVQEIFDKVKQILRHAAAAEENFEDCT

SEQ ID NO: 16583 - protein, 328 aa, Zea mays subsp. mays
  misc_feature (1)..(328): Ceres Seq. ID no. 12352833
TNAIIAPTLIQFHTHTSAAGSSTGSRVPLRHGSREQQRGRRARRRVRVAHPGAGRHGVQLAPRRAGRHGHHAARAPPIPRRRGRGGAALPAGRAPRPPRPPPDLFSLRPDAGVPRSGTAVPAGADPGPGLRARLPRAPRARAQPQPVGRRPRVLRRRPGPLRDALRAPSRHGRRGAVRPDPHGRVRPLGGECAGQGARRAAGRRRRRGARPGGCGGGSGAGGEDPSEGHLEAVLGARVGYGGLLHQRPADVHAAVRGDRHGEVHADAAARARPRRDDEAARRVQGEWGEVVLRRGRRDDARRAAVEADGERPAGDVLCRDPYQLPQVS

SEQ ID NO: 16584 - protein, 256 aa, Zea mays subsp. mays
  misc_feature (1)..(256): Ceres Seq. ID no. 12352834
MVGYSINGLRTSTLPFVETGTERSTQMLRLGLGLDETTRLLDACKENGVRLCSAVAAATMLAARQSKPMESGQQETYSVVTLINCRKFLEPVLEDRNVGFFYSAITNTHTIHGGEGLWELAKRCQDSYTSAKSNKKHLTDISDLNFLMCRAIENPQLTTAGALRTALVSVFEDPVVADVAEAQSKAGVEDCVCCATVHGIGPSIGVFDSIKDGKLDWACVYPSPLHSRKQVQEIFDKVKQILRHAAAAEENFEDCT

SEQ ID NO: 16585 - DNA, 1890 bp, Zea mays subsp. mays
  misc_feature (1)..(1890): Ceres Seq. ID no. 12352835
aattgctttataaataacataacatacaatataaaattgtatcgtctcctctccttcctgacattggcactggcagctgcactcaccggaagccatggaagacttgctctactactccctcaccatagccatctgcatcgcagtcatcgccctcctctccatccttcgttcgttcaccgctaccggaccgccgccggcgctcccgcccggcccgtcgctgctgtcgctgatcaccccgctcctcttcctcggccgaacgaacttcggcatcgagcggatcctctccgccgcgcggtcccgctacggccccgtcttcacgctctacctgctcccgtcccgcccggccatcttcatcgccgaccacgccgtggcgcaccgcgtgctggtgcagggcggcgccgccttcgccgacaggccgccggccagcctccccttccgcctcttctccagtgaccagcgcaacatcacatccggcgcctacggcccggtctggcgcgcgctccgtcacaacctcacgggcaacgtgttccacccgtcgcgcatgggccggttcgccgccgcccgccgccgcgcgctgcgggggctcgtcgccggcgtcgcgcgcgacgccggcagcggggccgtcgtcgtcgaggggctcctgcaccgggccatgttccacgtcctcgtcaccatgtgcttcggcgagggcctcgccaccgacgccgtcgtcgcgtccgtggaggcgctgcagcgggagttcctcacgtcggtgctcggctttcaagtgttcgacgtgtgccccgcgctcaccagcctcctgttccggcgccggtggaagcagatgctgtccctccgccgccggcaggaggagctcttcgcccctctcatacgggcgtgccgcgcgcaacgaggctccgacgccaacgccggcgcggacacgtacgtggacacgctgctcgacctccggatcccccgaggacggggggcaggaacctcacggagggcgagatggtgagcttgtgcgccgagttcgtggccgtcggcaccgacaacacggcgaccgaggcgcaatggatcatggccaacctcgtggcgcatccggagatccaagcaaggctccgggccgagatccaccaggtcaccggcggcgcgggcgtccaggagcaggacctgccgcggatgccgtaccttcgcgcagtggtcctggaggggctccgccgccacccgccgggccacttcgcgatcccgcacgccgcgaccggcatccaagacgacggcggcggcggcgaccacgcgaccatcgaaggcttccgcgtgccgcggcgcgcgtccctcaacttcacgctcgtcgcgctggggctcgacgaggcggtgtggcccgacccgctgcggttccggccggagcggttcctgccccggcggcgagggcgcggacgttgacctcaccggcgcgaaggaggtcaagatgataccgttcggcgccgggcggcggatctgccccgggatggcgctcgctctgctgcacctcgagttcttcgtggccagtctcgtcgccgagttcgagtggctccaggtccccggtgagccggtggagttcgccgagaagcaggagctgtccgtcgtgatgcgccggccgctccgtgccaccgtcgtccggtgcacaaggaacgccaactgaccacacgggttgtcgttgtcgaaccgaacgtctgcacttttctgctcttgtttgttgctgcatgcatgtgcttttctttcagtgaagttcagcgaatttcgtaaaaaattcgctaccaactttcctgtggacttgtggagtcatgttgttagcatgccctgctcttgttggctagaggctttcatgtatttgcactgcactgctctgattgtcctaaaagttataatatt

SEQ ID NO: 16586 - protein, 300 aa, Zea mays subsp. mays
  misc_feature (1)..(300): Ceres Seq. ID no. 12352836
MEDLLYYSLTIAICIAVIALLSILRSFTATGPPPALPPGPSLLSLITPLLFLGRTNFGIERILSAARSRYGPVFTLYLLPSRPAIFIADHAVAHRVLVQGGAAFADRPPASLPFRLFSSDQRNITSGAYGPVWRALRHNLTGNVFHPSRMGRFAAARRRALRGLVAGVARDAGSGAVVVEGLLHRAMFHVLVTMCFGEGLATDAVVASVEALQREFLTSVLGFQVFDVCPALTSLLFRRRWKQMLSLRRRQEELFAPLIRACRAQRGSDANAGADTYVDTLLDLRIPRGRGAGTSRRARW

SEQ ID NO: 16587 - protein, 151 aa, Zea mays subsp. mays
  misc_feature (1)..(151): Ceres Seq. ID no. 12352837
MGRFAAARRRALRGLVAGVARDAGSGAVVVEGLLHRAMFHVLVTMCFGEGLATDAVVASVEALQREFLTSVLGFQVFDVCPALTSLLFRRRWKQMLSLRRRQEELFAPLIRACRAQRGSDANAGADTYVDTLLDLRIPRGRGAGTSRRARW

SEQ ID NO: 16588 - protein, 150 aa, Zea mays subsp. mays
  misc_feature (1)..(150): Ceres Seq. ID no. 12352838
NCFINNITYNIKLYRLLSFLTLALAAALTGSHGRLALLLPHHSHLHRSHRPPLHPSFVHRYRTAAGAPARPVAAVADHPAPLPRPNELRHRADPLRRAVPLRPRLHALPAPVPPGHLHRRPRRGAPRAGAGRRRLRRQAAGQPPLPPLLQ

SEQ ID NO: 16589 - DNA, 1184 bp, Zea mays subsp. mays
  misc_feature (1)..(1184): Ceres Seq. ID no. 12352843
attcaacaactctggcgagcagcagtgaacgtacttacgtcttcccccagctagctagctatctaccttggtggtggcgattggtatatagattaaacatggcgcctcaaagcctggatctcgggctgagtctcggcctgggcgtggcggcattccagcccagcttctgccacccggccggcaatgcggcggcggagcgggagaccagcccgaccgcggcggacgagagggagcggaggtgctcgcccgccggcagcccgacgtcgagcggcagcggcagcgggaagcgcgtcgcgacggagagatcggccggcagcggcagcggcgacgaggacgacgacgggggcgctcgcaagaagctgcggttgtccaaggaccaggccgccgtgctcgaggagtgcttcaaaacgcaccacaccctcactccgaagcagaaggcagcgctggccagccgcctgggcctccgggcgcggcaggtggaggtgtggttccagaaccggcgcgcccggaccaagctgaagcagacggaggtcgactgcgagtacctcaggcgctggtgcgagcagctcgccgaggagaaccggcgcctgggcaaggaggtcgccgagctcagggcgctgagcgccgcgcccgcgccagcggcccctctcaccgccctcacaatgtgcctctcctgcaggcgcgtctcctcttcatcctgctcatcctcgccgcctaacacgcacgcgcacgcgcatgccgctgcagctggcactggcactggcgggagcgtggcctctccggcggcggcgacgttgcccgcccaccggcagttcttgtgcgggttcagagacggcggggcggccgccgccgcagtgtacgggacctcatcggctctcgcaaaagccctcagggcggccagataggcgtagtcgtcgtcactagctctctccgctgatctggacttgctctgctcaccggagctccggcgatcgagggatgccacggaagtgcgtggccccaagttgcaactaattgcaactgcagagcaagtgttgtagctgaatcatcttttgttttttttcctccgtatctttagagcggaatgccgcatgcaaatgttctttagaatcgatttcatgtgggtcagtgggtgtatgattgtactcatgctgtggaaattaataacggtttgtagatgaggt

SEQ ID NO: 16590 - protein, 300 aa, Zea mays subsp. mays
  misc_feature (1)..(300): Ceres Seq. ID no. 12352844
STTLASSSERTYVFPQLASYLPWWWRLVYRLNMAPQSLDLGLSLGLGVAAFQPSFCHPAGNAAAERETSPTAADERERRCSPAGSPTSSGSGSGKRVATERSAGSGSGDEDDDGGARKKLRLSKDQAAVLEECFKTHHTLTPKQKAALASRLGLRARQVEVWFQNRRARTKLKQTEVDCEYLRRWCEQLAEENRRLGKEVAELRALSAAPAPAAPLTALTMCLSCRRVSSSSCSSSPPNTHAHAHAAAAGTGTGGSVASPAAATLPAHRQFLCGFRDGGAAAAAVYGTSSALAKALRAAR

SEQ ID NO: 16591 - protein, 268 aa, Zea mays subsp. mays
  misc_feature (1)..(268): Ceres Seq. ID no. 12352845
MAPQSLDLGLSLGLGVAAFQPSFCHPAGNAAAERETSPTAADERERRCSPAGSPTSSGSGSGKRVATERSAGSGSGDEDDDGGARKKLRLSKDQAAVLEECFKTHHTLTPKQKAALASRLGLRARQVEVWFQNRRARTKLKQTEVDCEYLRRWCEQLAEENRRLGKEVAELRALSAAPAPAAPLTALTMCLSCRRVSSSSCSSSPPNTHAHAHAAAAGTGTGGSVASPAAATLPAHRQFLCGFRDGGAAAAAVYGTSSALAKALRAAR

SEQ ID NO: 16592 - DNA, 1818 bp, Zea mays subsp. mays
  misc_feature (1)..(1818): Ceres Seq. ID no. 12352877
cagaagttgtcttctcgtgtaaggtttatgttgagagattcaattgacctcaggagaaataaatggcaacagaggcgtaaagttgaaggccccaagaagattgaggaggtgcacagagatgcagctcaagaaagacatgctcagtcaagtaggctaggacgtggtccagctgttagttctgtttcaagaagaggagcaccttctatggattatggctctcgtggctcatctgcgttagcatcctcaagttcccaacaagggagcattcgtggaatgcctccacactcgcgtggttcacaagacatccgatatgaggagaggaaccagtttgacaatagaactgttcttccccagcgtgtagtcaaggatgaagctatcactcttgggccacaaggtggccttgctaggggtatgtctataagagggctgtcaccagcatcaaatactgaacttccttctgttattgaccaccggagaatattatctggttctaatggttataactctgtgactgattggacatcatcatctggaagagaagattctagctcaataattccagatcgaacctctggccgaacttctgcttctagtcaatctgctggaccttcacagaggcctgccagccaggaaggccgtccaggaagtaaatcatattctgaggatgaattgagagaaaaatctgttttggccattcgggaatattacagtgcaaaagatgaaaaggaggttgctttgtgtattgaggagctgaatgctccgagtttctatccttctgttgtatcactttgggtaaatgattccttcgagagaaaagacatggaaagagagttgttggctaaacttctcgtcagcctttgcagtggtcgacataatttgttgagcaagcaacaactcagtgatggcctttcatctgttcttaccttattggaagatactctaagtgatgctccaagggccaccgagtaccttggacgactttttgcaaggtttgtggaggaaagcatattgctcttggaagaggtaggtaaattgattcaagaagttggagaagaaccagggtatctaatacgagatggcatcgccgctgacatccttggtgctgttctggattccataaaatcagacaaaggggattcattcttgaatgaggttaagtcaacttcgagtttaaaattggttgatttcagaccacatcatcttaagcgatcaaagttggatgccttcatgtagctacatgagttattattacctgattcaccaatgggtgcggccgccaagcagtttactttgttcgcacgcaaatacccatcggcctttttgatgtactgtgaaaaattcctctgatgctactcctacttgctgtacctgatcgtgcactatttataagatggaaggcgatgggtcacccattttttcagagttgatgctggttgtaaactactgtcaatgaagggtcatgggtgggaagcagctagctaggcccccataagaggatcagggaatatttttgcgatcacagggagaagtctgctaaccaatattagttggtagttgggggaactgtaggttgaacttaatgcctcctgcgggcttctgaccaaatactcctttgtgatcagaattggtagtcggttaacttagcggcattttcgtgatagccaatgtttctcgtgatggtctgaatatgttgatgttgcttaaattttgctgtaatttgctatttttcctcgttctttgtttttgtacttattgagaattgatgcctcggattctctgatgtatgtatgattgggctcaggctcagggcactttgcc

SEQ ID NO: 16593 - protein, 410 aa, Zea mays subsp. mays
  misc_feature (1)..(410): Ceres Seq. ID no. 12352878
QKLSSRVRFMLRDSIDLRRNKWQQRRKVEGPKKIEEVHRDAAQERHAQSSRLGRGPAVSSVSRRGAPSMDYGSRGSSALASSSSQQGSIRGMPPHSRGSQDIRYEERNQFDNRTVLPQRVVKDEAITLGPQGGLARGMSIRGLSPASNTELPSVIDHRRILSGSNGYNSVTDWTSSSGREDSSSIIPDRTSGRTSASSQSAGPSQRPASQEGRPGSKSYSEDELREKSVLAIREYYSAKDEKEVALCIEELNAPSFYPSVVSLWVNDSFERKDMERELLAKLLVSLCSGRHNLLSKQQLSDGLSSVLTLLEDTLSDAPRATEYLGRLFARFVEESILLLEEVGKLIQEVGEEPGYLIRDGIAADILGAVLDSIKSDKGDSFLNEVKSTSSLKLVDFRPHHLKRSKLDAFM

SEQ ID NO: 16594 - protein, 401 aa, Zea mays subsp. mays
  misc_feature (1)..(401): Ceres Seq. ID no. 12352879
MLRDSIDLRRNKWQQRRKVEGPKKIEEVHRDAAQERHAQSSRLGRGPAVSSVSRRGAPSMDYGSRGSSALASSSSQQGSIRGMPPHSRGSQDIRYEERNQFDNRTVLPQRVVKDEAITLGPQGGLARGMSIRGLSPASNTELPSVIDHRRILSGSNGYNSVTDWTSSSGREDSSSIIPDRTSGRTSASSQSAGPSQRPASQEGRPGSKSYSEDELREKSVLAIREYYSAKDEKEVALCIEELNAPSFYPSVVSLWVNDSFERKDMERELLAKLLVSLCSGRHNLLSKQQLSDGLSSVLTLLEDTLSDAPRATEYLGRLFARFVEESILLLEEVGKLIQEVGEEPGYLIRDGIAADILGAVLDSIKSDKGDSFLNEVKSTSSLKLVDFRPHHLKRSKLDAFM

SEQ ID NO: 16595 - protein, 342 aa, Zea mays subsp. mays
  misc_feature (1)..(342): Ceres Seq. ID no. 12352880
MDYGSRGSSALASSSSQQGSIRGMPPHSRGSQDIRYEERNQFDNRTVLPQRVVKDEAITLGPQGGLARGMSIRGLSPASNTELPSVIDHRRILSGSNGYNSVTDWTSSSGREDSSSIIPDRTSGRTSASSQSAGPSQRPASQEGRPGSKSYSEDELREKSVLAIREYYSAKDEKEVALCIEELNAPSFYPSVVSLWVNDSFERKDMERELLAKLLVSLCSGRHNLLSKQQLSDGLSSVLTLLEDTLSDAPRATEYLGRLFARFVEESILLLEEVGKLIQEVGEEPGYLIRDGIAADILGAVLDSIKSDKGDSFLNEVKSTSSLKLVDFRPHHLKRSKLDAFM

SEQ ID NO: 16596 - DNA, 852 bp, Zea mays subsp. mays
  misc_feature (1)..(852): Ceres Seq. ID no. 12352905
aagcaagatggctgatttgaagagtggaagagataaagattgatttatttttcttcgtcttctgattttcacaatagcccaggttcaactgacggcttgaaccgtggtcgcattgcattgcagatagtacagcctgccgctgccaagtacagttatgcattccaagtccccagagaagcaatcacttctggacgagggatcgaggagaaacccagcaaataatgggagtacggaggatgaaaagggagacggcgggatcccatggctgacatttctggggttcgtgttcctgaccttcaactcgggcatggcgatctaccgctcggaccgcgaccccgggtcaatagcgttcgtgtcgggctcgtacgtcgacctgctgctgctcttcctctgccttcgcctgttcgagcggacgccgcctgactcgcctcgccgggggtggatcaaggcctgcgtctgggggctgaccacgctgctcaccgtcatgttctcgcagaaggtggccgccatcatgccgccgctgctggcgctcgtcgtgtgggcgatggcgttcgccaccatcggcggtggcttctacgcgttcttcatccacaaggacaaggccgcccttgtggaggcggagaacccgtagatgtctctgccgctgccatgcgctcgtggctgtttcagactatctccagccccgtcctatgattttgaggcctctagtcgaactgatcatggtggaccctctagactataaaaaaaattctatattatacaatagagcatattaatacctcgtaaataaatgatcatgtatattgaaattggttttttaaaaatctaagaagctagataatatacatcggt

SEQ ID NO: 16597 - protein, 158 aa, Zea mays subsp. mays
  misc_feature (1)..(158): Ceres Seq. ID no. 12352906
MHSKSPEKQSLLDEGSRRNPANNGSTEDEKGDGGIPWLTFLGFVFLTFNSGMAIYRSDRDPGSIAFVSGSYVDLLLLFLCLRLFERTPPDSPRRGWIKACVWGLTTLLTVMFSQKVAAIMPPLLALVVWAMAFATIGGGFYAFFIHKDKAALVEAENP

SEQ ID NO: 16598 - protein, 107 aa, Zea mays subsp. mays
  misc_feature (1)..(107): Ceres Seq. ID no. 12352907
MAIYRSDRDPGSIAFVSGSYVDLLLLFLCLRLFERTPPDSPRRGWIKACVWGLTTLLTVMFSQKVAAIMPPLLALVVWAMAFATIGGGFYAFFIHKDKAALVEAENP

SEQ ID NO: 16599 - DNA, 1113 bp, Zea mays subsp. mays
  misc_feature (1)..(1113): Ceres Seq. ID no. 12353094
aaatagagcccgagcgccgagggaggagggcaaaccgggagagagagagagagacacctcctccttttcccccctttgcattgggttgccgcaacactacagacacaaacacagtctaggaggcttcttccgctcgctcaggtaggtgtactgtactgtagtaggttggttctccattcatcattcagctcacaggtccctccgcctccgccgtatcggagggagaggaagcggaaggcttggaaggagaagagaatggcggggcggcgcgcggaggaggagtacgactacctgttcaaggtggtgctgatcggggactcgggcgtcggcaagtccaacctcctctcccgcttcacccgcaacgagttctgcctcgagtccaagtccaccatcggcgtcgagttcgccacacggacactccatgttgagggcaagatcatcaaggcgcagatctgggacacggcaggccaggagcgggtaccgggcgatcaccagcgcctactatcgcggggcgctgggcgcggtcctggtctacgacgtgagcaagcccaccaccttcgagaacatcagccggtggctcaaggagctacgcgaccacgccgactccaacaccaggatcatgctcgtcggcaacaagaccgacctgaggcacctccgggccgtcgccaccgacgacgctcggagcttcgctgaggcagaaggcctgtcctacatcgagacgtccgcgctggaggccaccaacgtggaggaggcgttccagctcatcctgggcgacatttaccgggccgtcagcaagaagcctgtggcgtccgacgaggttggcgccggccagggaggcgtcaaggaaggtaagaccatcgatgtggcgactggtgctgatgccgccgctcacaagaagcagtgctgctcggcttagaagttagaagaacccatgctggtggtctctcgttcagtggcgtatgtgttgttgtgatggttgtcgttgttgttttttttctcttcttccagtccaaaagtttgttgattcgttttgccagatagtacctttgttggagggataatcatgctcacatatatattctctaaagcaagcagttatatatgattataccg

SEQ ID NO: 16600 - protein, 164 aa, Zea mays subsp. mays
  misc_feature (1)..(164): Ceres Seq. ID no. 12353095
MLRARSSRRRSGTRQARSGYRAITSAYYRGALGAVLVYDVSKPTTFENISRWLKELRDHADSNTRIMLVGNKTDLRHLRAVATDDARSFAEAEGLSYIETSALEATNVEEAFQLILGDIYRAVSKKPVASDEVGAGQGGVKEGKTIDVATGADAAAHKKQCCSA

SEQ ID NO: 16601 - protein, 145 aa, Zea mays subsp. mays
  misc_feature (1)..(145): Ceres Seq. ID no. 12353096
MAGRRAEEEYDYLFKVVLIGDSGVGKSNLLSRFTRNEFCLESKSTIGVEFATRTLHVEGKIIKAQIWDTAGQERVPGDHQRLLSRGAGRGPGLRREQAHHLREHQPVAQGATRPRRLQHQDHARRQQDRPEAPPGRRHRRRSELR

SEQ ID NO: 16602 - protein, 98 aa, Zea mays subsp. mays
  misc_feature (1)..(98): Ceres Seq. ID no. 12353097
MLVGNKTDLRHLRAVATDDARSFAEAEGLSYIETSALEATNVEEAFQLILGDIYRAVSKKPVASDEVGAGQGGVKEGKTIDVATGADAAAHKKQCCSA

SEQ ID NO: 16603 - DNA, 1237 bp, Zea mays subsp. mays
  misc_feature (1)..(1237): Ceres Seq. ID no. 12353106
accatttcacaccctcttgcctccccgtgactacctcgctgtcccctctcagtgtccaagcgacgacaccacgccgccgagatgtggatctcagattccgcctttgtggagccctcatcttcctccccatccgcctctgcctccccgccgccgagcccgccaccagcacgccttctccgccaacgcaaccgccgccgacgccgcaacagccggaaacagggcagtgccagcgccgtcgacggcgtcgccgaccccgaggcggaggacgtgtggcgtggggcgcagtgggaggcggcgtggccggcgaggcgggactcgaaacccgtcgtgctcgcgggcggagacgacgcggtggggcggtccaggagcctcacggacgacgacctcgaggagctcaagggatgcgccgacctgggcttcggcttcaactacgacgagatccccgagctccggagcaccctgccggcgctcgagctgtgctactccatgagccagcgcctccagctggacgacgagaagccgccgcagcagcacgagggcgccgcaccagatgccgccacgccgtcgccgcctgtcaccaactggaagatctccagccccggtgacagccctgacgaggtgaaggcgcggctcaagtactgggcgcaggcggtggcgtgcaccgtccgcctttgcagctgaacggcgccgatccatgcgcgccattcttcgccgtctggaagcacacaccataccggtatgccggccgccaccacacaagaaaccggatgaccagacctaatcgcgaacacgttgctgctgctgtaaagtgatccaggtgcaccgtttcagctgcgacggcgggcgttggcagctgccatgattgcagctgcagagtttggtggagcatcgttggtagtcgtgtagcagcacacataggggctgggtaaatgggttggttgcccaaccgacatgctgtgctctctgttccagctgagcaacctgcctttgcctgatgaaccaaccatccgagtgtgcagcagccatctccagcggaaataaactattgtaattgtactgctagcagtagtgatcaaaataatgtgcagagtaattagtactgcaagcaaatcggggaatcattgtgaatacataaatctgtggatctcattactatactgttatcttaatcattagctggtgtacctgctacctactgcagctgtttggtaataatggtgcagatgctttccttctc

SEQ ID NO: 16604 - protein, 200 aa, Zea mays subsp. mays
  misc_feature (1)..(200): Ceres Seq. ID no. 12353107
HFTPSCLPVTTSLSPLSVQATTPRRRDVDLRFRLCGALIFLPIRLCLPAAEPATSTPSPPTQPPPTPQQPETGQCQRRRRRRRPRGGGRVAWGAVGGGVAGEAGLETRRARGRRRRGGAVQEPHGRRPRGAQGMRRPGLRLQLRRDPRAPEHPAGARAVLLHEPAPPAGRREAAAAARGRRTRCRHAVAACHQLEDLQPR

SEQ ID NO: 16605 - protein, 199 aa, Zea mays subsp. mays
  misc_feature (1)..(199): Ceres Seq. ID no. 12353108
MWISDSAFVEPSSSSPSASASPPPSPPPARLLRQRNRRRRRNSRKQGSASAVDGVADPEAEDVWRGAQWEAAWPARRDSKPVVLAGGDDAVGRSRSLTDDDLEELKGCADLGFGFNYDEIPELRSTLPALELCYSMSQRLQLDDEKPPQQHEGAAPDAATPSPPVTNWKISSPGDSPDEVKARLKYWAQAVACTVRLCS

SEQ ID NO: 16606 - protein, 162 aa, Zea mays subsp. mays
  misc_feature (1)..(162): Ceres Seq. ID no. 12353109
PFHTLLPPRDYLAVPSQCPSDDTTPPRCGSQIPPLWSPHLPPHPPLPPRRRARHQHAFSANATAADAATAGNRAVPAPSTASPTPRRRTCGVGRSGRRRGRRGGTRNPSCSRAETTRWGGPGASRTTTSRSSRDAPTWASASTTTRSPSSGAPCRRSSCATP

SEQ ID NO: 16607 - DNA, 1461 bp, Zea mays subsp. mays
  misc_feature (1)..(1461): Ceres Seq. ID no. 12353132
actagttcagcacttcagccttcactccactccaccacagtccacgcagcccaccgaaatggggaagctgctccctcgccacccttcccccctcctcctcctcgccgcggcgatctgcatctccagcagcagcctcgcggccgtccggggcgcgccggtgtaccgcgcggactacctggtggacgggaaccagctggtggacatgcagtaccacatgggccccgtcgtgtccgggacgccgaccaacctctacctcatctggtacgggcggtgggaggccgcggcgcaggccgtgctccgggacttcctcgcctcgctctcggccccggccccgttcccggccgtctccgactggtgggcgcgcacgccgcggatgtacgcggaccagacgggcgccaacgtgacgggcgccttcgccgtcgccggggagcactccgacgccgggtactcccacggcgcgtcgctccggcgcatcgacgtgcagtccgtgatccggtcggcggtgtacgcgtacccggacccgctgccgctggacccctacagcggggcgtacctggtgctgacgtcccccgacgtgcaggtggacgagttctgccgcgccgtctgcggcttccactacttcaccttcgcgtccgtggtcggggtcacggtgccctacgcctgggtcgggaacagcgccacgcagtgcccgggcaagtgcgcgtacccgttcgccgccgccgccgagtacggcgccgggggagcccagccccaggcggtgctgcggccgcccaacggcgacgctggggtggacgggatggtgatcgtgctggggcacgagctggcggagatgtccacgaacccgctggtgaacgcgtggtacgccggggacacgcccacggcgccgaccgagatcgcggacctgtgcctgggcgtgtacggtgatggcggcggcgcgggcggcctggtcgggaacgtgtcccgcgcgcccgatggcagcgcctacaacgtcaacggcgtcaacggccggcggttcctcgtgcagtggctctggaaccccgtccgcggcgcctgctacggccccaactccagcaactgacccgagtcgtcgctaggggcgagggcggttggaggacgcctcatgccattctgctggattgaatggcattgcagaaatccatggcggtttcaatggatggagacagcgttcgtccacttccctgtccgttcagggaatggtccacaggagacgggacgaggatcagatgatgaagccgacccagtaatttgaagctgcactgcatgagacacatcgtgtggatcctgcctgatctatctgcagttcggtaggaaacaacgagaaaatgccattttgttgttcgttttttttaccttgatttccgggactcgaattttgtttcagctcccgagccagcatctcttgcttgctgaaacaaagtggtcgcctgatcgattgctttc

SEQ ID NO: 16608 - protein, 358 aa, Zea mays subsp. mays
  misc_feature (1)..(358): Ceres Seq. ID no. 12353133
LVQHFSLHSTPPQSTQPTEMGKLLPRHPSPLLLLAAAICISSSSLAAVRGAPVYRADYLVDGNQLVDMQYHMGPVVSGTPTNLYLIWYGRWEAAAQAVLRDFLASLSAPAPFPAVSDWWARTPRMYADQTGANVTGAFAVAGEHSDAGYSHGASLRRIDVQSVIRSAVYAYPDPLPLDPYSGAYLVLTSPDVQVDEFCRAVCGFHYFTFASVVGVTVPYAWVGNSATQCPGKCAYPFAAAAEYGAGGAQPQAVLRPPNGDAGVDGMVIVLGHELAEMSTNPLVNAWYAGDTPTAPTEIADLCLGVYGDGGGAGGLVGNVSRAPDGSAYNVNGVNGRRFLVQWLWNPVRGACYGPNSSN

SEQ ID NO: 16609 - protein, 339 aa, Zea mays subsp. mays
  misc_feature (1)..(339): Ceres Seq. ID no. 12353134
MGKLLPRHPSPLLLLAAAICISSSSLAAVRGAPVYRADYLVDGNQLVDMQYHMGPVVSGTPTNLYLIWYGRWEAAAQAVLRDFLASLSAPAPFPAVSDWWARTPRMYADQTGANVTGAFAVAGEHSDAGYSHGASLRRIDVQSVIRSAVYAYPDPLPLDPYSGAYLVLTSPDVQVDEFCRAVCGFHYFTFASVVGVTVPYAWVGNSATQCPGKCAYPFAAAAEYGAGGAQPQAVLRPPNGDAGVDGMVIVLGHELAEMSTNPLVNAWYAGDTPTAPTEIADLCLGVYGDGGGAGGLVGNVSRAPDGSAYNVNGVNGRRFLVQWLWNPVRGACYGPNSSN

SEQ ID NO: 16610 - protein, 307 aa, Zea mays subsp. mays
  misc_feature (1)..(307): Ceres Seq. ID no. 12353135
TSSALQPSLHSTTVHAAHRNGEAAPSPPFPPPPPRRGDLHLQQQPRGRPGRAGVPRGLPGGREPAGGHAVPHGPRRVRDADQPLPHLVRAVGGRGAGRAPGLPRLALGPGPVPGRLRLVGAHAADVRGPDGRQRDGRLRRRRGALRRRVLPRRVAPAHRRAVRDPVGGVRVPGPAAAGPLQRGVPGADVPRRAGGRVLPRRLRLPLLHLRVRGRGHGALRLGREQRHAVPGQVRVPVRRRRRVRRRGSPAPGGAAAAQRRRWGGRDGDRAGARAGGDVHEPAGERVVRRGHAHGADRDRGPVPGRVR

SEQ ID NO: 16611 - DNA, 1548 bp, Zea mays subsp. mays
  misc_feature (1)..(1548): Ceres Seq. ID no. 12353157
cttcggccacacaacccaggtgttcgaccatgtcctcgccggcaccatcatcgccctccaggtccagccacggctcacgaggctccccgcgcatcgtcctcttcccgagcgctggcatgggccacctggtcccgttcacccgcctcgccgtcgcgctttcccggccacggttgcgagatctccctcctgacggcgctgcccacagtttcgtccgcggagtcccgccacatcgccgcgctctacgctgcgttccccgccatccggcagctggacctccgctttgcccctttcgacgcgtcgtccgaattccccggcgccgatccattctacctccgctacgaggccctgcgccgctgcgcgccctcgctcctcggcccgctcctcgctggcgcaggcgcgtcggctctcgtcgtggacatggcgctggcctccgtggccatacccgtagccagggagctccacgtcccgtgcttcgtcttcttcaccgcgtcggccacgatgctctcattcaaagcctactttcccacctacctcgacgacgtcggtgccggacatggcgttggcgacgttgacgtgcccggcgtgtaccgcatcccaagttcgtccgtcccacaggcgctgcatgatcccgacaacatcttcacccggcagttcgtcgcgaatggacgggcgctcgcgacagccgacggcctcctggtcaacgccttccacgccatggagccggaggccgtcgaggcactacagggtcgcttcgtgctctccgttttgccgcccgtgttcgccgtggggccgcttatgccggtgaacgacctccgggagacaggggaggcagcgcaaaaacaggggaactatagggcgtggctggacgagcagccgccgcggtctgtggtgtatgtcagctttggcagccgcaaggctctccccaaggaccagatcaaggagctcgccgccggactggaagcgtgtggccaccgcttcttgtgggttgtgaagggcgctgtcgtggacagggatgacgctggggagctcagcgaactgcttggcgaggccttcctgcggcgcgtgcaaggccgtggcctggtgaccaagtcatgggtcgagcaagaggaggtgctcaggcacccggccgtggcgctgttcgtcagccactgcggatggaactcggtgacggaggcagtgagcagcggcgtgccagtgctggcgtggccgaggttcgccgaccagcgagtgaacgcccgcgtggtggtccgttgcgggctcggtgtgtgggctgagcagtggagctgggagggggaagaggcgctggtgagagcggaggagatcgcagcgctggtgatggaggctatgggagacgacgcgatggcagtgaaagcggcgaacgtccgcgaggctgcgtcgagagccgtggtggacggcggcacgagctaccgatgcctggcggcgttcgtgcgtcgttgcaccgcgtgattgcgtgaagttatataaaaaaaaaacttatataacttcacgttcgtgtcgatccgcttcataaacttttaaaatgtgcct

SEQ ID NO: 16612 - protein, 488 aa, Zea mays subsp. mays
  misc_feature (1)..(488): Ceres Seq. ID no. 12353158
LRPHNPGVRPCPRRHHHRPPGPATAHEAPRASSSSRALAWATWSRSPASPSRFPGHGCEISLLTALPTVSSAESRHIAALYAAFPAIRQLDLRFAPFDASSEFPGADPFYLRYEALRRCAPSLLGPLLAGAGASALVVDMALASVAIPVARELHVPCFVFFTASATMLSFKAYFPTYLDDVGAGHGVGDVDVPGVYRIPSSSVPQALHDPDNIFTRQFVANGRALATADGLLVNAFHAMEPEAVEALQGRFVLSVLPPVFAVGPLMPVNDLRETGEAAQKQGNYRAWLDEQPPRSVVYVSFGSRKALPKDQIKELAAGLEACGHRFLWVVKGAVVDRDDAGELSELLGEAFLRRVQGRGLVTKSWVEQEEVLRHPAVALFVSHCGWNSVTEAVSSGVPVLAWPRFADQRVNARVVVRCGLGVWAEQWSWEGEEALVRAEEIAALVMEAMGDDAMAVKAANVREAASRAVVDGGTSYRCLAAFVRRCTA

SEQ ID NO: 16613 - protein, 349 aa, Zea mays subsp. mays
  misc_feature (1)..(349): Ceres Seq. ID no. 12353159
MALASVAIPVARELHVPCFVFFTASATMLSFKAYFPTYLDDVGAGHGVGDVDVPGVYRIPSSSVPQALHDPDNIFTRQFVANGRALATADGLLVNAFHAMEPEAVEALQGRFVLSVLPPVFAVGPLMPVNDLRETGEAAQKQGNYRAWLDEQPPRSVVYVSFGSRKALPKDQIKELAAGLEACGHRFLWVVKGAVVDRDDAGELSELLGEAFLRRVQGRGLVTKSWVEQEEVLRHPAVALFVSHCGWNSVTEAVSSGVPVLAWPRFADQRVNARVVVRCGLGVWAEQWSWEGEEALVRAEEIAALVMEAMGDDAMAVKAANVREAASRAVVDGGTSYRCLAAFVRRCTA

SEQ ID NO: 16614 - protein, 322 aa, Zea mays subsp. mays
  misc_feature (1)..(322): Ceres Seq. ID no. 12353160
MLSFKAYFPTYLDDVGAGHGVGDVDVPGVYRIPSSSVPQALHDPDNIFTRQFVANGRALATADGLLVNAFHAMEPEAVEALQGRFVLSVLPPVFAVGPLMPVNDLRETGEAAQKQGNYRAWLDEQPPRSVVYVSFGSRKALPKDQIKELAAGLEACGHRFLWVVKGAVVDRDDAGELSELLGEAFLRRVQGRGLVTKSWVEQEEVLRHPAVALFVSHCGWNSVTEAVSSGVPVLAWPRFADQRVNARVVVRCGLGVWAEQWSWEGEEALVRAEEIAALVMEAMGDDAMAVKAANVREAASRAVVDGGTSYRCLAAFVRRCTA

SEQ ID NO: 16615 - DNA, 1419 bp, Zea mays subsp. mays
  misc_feature (1)..(1419): Ceres Seq. ID no. 12353172
ccggcaaatcccgtatccaaatccaatagggtaaacctagccgcccatctgcccgccatgaaggcgtcgatcaagttccgcgacgacgaccgcccgctgctgcgcgccaaggtgccggtcggcgtgctggggctgcctttcttctcgggcctcgtggcggggggagacgccaaggacctccgcttcgacctctccaccgccttcacctccggcccggcgctccgcctctcgtaccgccccaacgaaccgctccagccctttgccctctccatccgcacggggctggggccgctggggtcccctgtccgagcccccttcgccctcgccgccgaattcaacctcacctcctcgaacccgcccgccttctcgctcgttttcaagccccggatcggagacttcgccgtcgccagctccgtccgctccccgccgccgccgccgcccgcatcaactctgcccccgctgtcggtcaagatgtccgacctcgtcaccaacggcgacgaccacgaccgcaaagcgcacggtaacgggttctccttctctgggaatgggttcgcggcgaacgtggcggccgccgccgggaccggcggcggcggcgtgggcgcgctgctgtccaggatgcggctcacgaccaggagtgtgctgccactgtggagtaaggcgagcctgcggttccagtgggggctgcgcgtgccgccggagatcaaggccgcgctcgcagacgacgggtacgggcgcaaggctgggagcctcgccatcagcaagctgccgctgctggtgatgaacaagatcaccatcgagcacacgcccaaggtgccttcgcagtctgaaacggataagaagaggaagaaagatgccccaccagcagccgagggcgaggtgttctcactaatgaagaggcaattggaggagctgaatgctgagagcaccatgctgcgtctggcagtcgaggacttgcgtgcagaggttggagccagcaaaggcgatggacgtaagctgccagcaacagtgccacatccacagcgttcattcgtgtcgaaaccagatcaccattttcacagcgatgctaaggatttgggagacagtgggacgaaaccggcctccaatgatgcaagtgaggggttgaagaaggcgctggaggccagacgaaagtaggaaacacctagataggggggccatagggcttgctgacactgcaagcgctacaatatgatatggctgctgacggctgtgtcaagttttgtgcttaataataatgcttcctcaatggagaagattggtaagggctgtgaggtagccattttccataggtgatgtagtagttttgcctatattctatttccattgtttgtgttaggatattatccgttctgtataaatccgcaacttgcgatctaaaatgaatgaaggattagttttttt

SEQ ID NO: 16616 - protein, 383 aa, Zea mays subsp. mays
  misc_feature (1)..(383): Ceres Seq. ID no. 12353173
PANPVSKSNRVNLAAHLPAMKASIKFRDDDRPLLRAKVPVGVLGLPFFSGLVAGGDAKDLRFDLSTAFTSGPALRLSYRPNEPLQPFALSIRTGLGPLGSPVRAPFALAAEFNLTSSNPPAFSLVFKPRIGDFAVASSVRSPPPPPPASTLPPLSVKMSDLVTNGDDHDRKAHGNGFSFSGNGFAANVAAAAGTGGGGVGALLSRMRLTTRSVLPLWSKASLRFQWGLRVPPEIKAALADDGYGRKAGSLAISKLPLLVMNKITIEHTPKVPSQSETDKKRKKDAPPAAEGEVFSLMKRQLEELNAESTMLRLAVEDLRAEVGASKGDGRKLPATVPHPQRSFVSKPDHHFHSDAKDLGDSGTKPASNDASEGLKKALEARRK

SEQ ID NO: 16617 - protein, 364 aa, Zea mays subsp. mays
  misc_feature (1)..(364): Ceres Seq. ID no. 12353174
MKASIKFRDDDRPLLRAKVPVGVLGLPFFSGLVAGGDAKDLRFDLSTAFTSGPALRLSYRPNEPLQPFALSIRTGLGPLGSPVRAPFALAAEFNLTSSNPPAFSLVFKPRIGDFAVASSVRSPPPPPPASTLPPLSVKMSDLVTNGDDHDRKAHGNGFSFSGNGFAANVAAAAGTGGGGVGALLSRMRLTTRSVLPLWSKASLRFQWGLRVPPEIKAALADDGYGRKAGSLAISKLPLLVMNKITIEHTPKVPSQSETDKKRKKDAPPAAEGEVFSLMKRQLEELNAESTMLRLAVEDLRAEVGASKGDGRKLPATVPHPQRSFVSKPDHHFHSDAKDLGDSGTKPASNDASEGLKKALEARRK

SEQ ID NO: 16618 - protein, 226 aa, Zea mays subsp. mays
  misc_feature (1)..(226): Ceres Seq. ID no. 12353175
MSDLVTNGDDHDRKAHGNGFSFSGNGFAANVAAAAGTGGGGVGALLSRMRLTTRSVLPLWSKASLRFQWGLRVPPEIKAALADDGYGRKAGSLAISKLPLLVMNKITIEHTPKVPSQSETDKKRKKDAPPAAEGEVFSLMKRQLEELNAESTMLRLAVEDLRAEVGASKGDGRKLPATVPHPQRSFVSKPDHHFHSDAKDLGDSGTKPASNDASEGLKKALEARRK

SEQ ID NO: 16619 - DNA, 1157 bp, Zea mays subsp. mays
  misc_feature (1)..(1157): Ceres Seq. ID no. 12353179
ctctctctagtccagatttccagcggtccagaccgagagctcggctccctacacgacatcatcatggacgccgccccgctcctcgctctcctcctcgcggccgtgtccctctccgcggcggcggcgggcgacggcgcgcacccgggctactccgacgagggcacctgcacggtggacgccgccggagcgggcgtgggctcgggcccggagctgcggcgcctggaggagcgccggcccgggcgcatcatcgacatcacgcacgcgtacgtgccggaccttctggcgttcgcgccgggggctgtcacggggcccttggtccacctcaaggagtccatggcgaacgggtccgagtacaacctgtcggagctgcggttggagtgccacatgggcacccacgtcgacgcgccaggccacatgaaccaaggccacttcgccgccggcctcgacgtggacacgctcgacctcgacgtcctcaactgacctgcgttgctggttgatgttccgagggacacaaatataacagctgaagcgatggaattcctgaatatccctagaggagttcgccgagttctattcaggacgctgaacactgacaggaagttgatgtggaggaagggaggtgacatgagctatgttgggtttacagaggatggcgcacagtggctagttgacaacactgacataaagctagtcggaatcgacagtctatcggttgcagcatttgagcacttgatctctgcccatgtggtcttcttcaagaccccggatataatccctgtcgaaggcctgaagctagacaacattgagacgggaatatacatgctgcattgtttacctctcagactggttggagccgagggtgcaccgaccagatgcatcctcatcaagtgatcacccccctgctcttgctggaggtgacattgtatcatgccagctgagctgatgcttcatcgtggccaacgcattgattcgcagtcttcgtcttcgtctatatgaaacatagtgttgtatgcccatgtagatatgcttgtacggacaatagagacacagcaatacttccatcaaggaaatacttttgggtaagccggtaatgtaaaagacagacatacagttgactgaataaactagaggcctgagaggctgaggcctcgtgcttc

SEQ ID NO: 16620 - protein, 164 aa, Zea mays subsp. mays
  misc_feature (1)..(164): Ceres Seq. ID no. 12353180
LSSPDFQRSRPRARLPTRHHHGRRPAPRSPPRGRVPLRGGGGRRRAPGLLRRGHLHGGRRRSGRGLGPGAAAPGGAPARAHHRHHARVRAGPSGVRAGGCHGALGPPQGVHGERVRVQPVGAAVGVPHGHPRRRARPHEPRPLRRRPRRGHARPRRPQLTCVAG

SEQ ID NO: 16621 - protein, 159 aa, Zea mays subsp. mays
  misc_feature (1)..(159): Ceres Seq. ID no. 12353181
LSLVQISSGPDRELGSLHDIIMDAAPLLALLLAAVSLSAAAAGDGAHPGYSDEGTCTVDAAGAGVGSGPELRRLEERRPGRIIDITHAYVPDLLAFAPGAVTGPLVHLKESMANGSEYNLSELRLECHMGTHVDAPGHMNQGHFAAGLDVDTLDLDVLN

SEQ ID NO: 16622 - protein, 138 aa, Zea mays subsp. mays
  misc_feature (1)..(138): Ceres Seq. ID no. 12353182
MDAAPLLALLLAAVSLSAAAAGDGAHPGYSDEGTCTVDAAGAGVGSGPELRRLEERRPGRIIDITHAYVPDLLAFAPGAVTGPLVHLKESMANGSEYNLSELRLECHMGTHVDAPGHMNQGHFAAGLDVDTLDLDVLN

SEQ ID NO: 16623 - DNA, 1097 bp, Zea mays subsp. mays
  misc_feature (1)..(1097): Ceres Seq. ID no. 12353369
ctatcagcccaaaaccgaacccacacctctgcccttcccatggcggccacgctattctccacctccctcttgccccagttcctctccctctccgctaagcccgccgccgccgccgccgccccgtccgccgccgccttcccatcggggatgccgcagctccacgcgctgtccgccgcggcggtgggctttaggccgctcgagcccgtgcgagcagccgcgaccgcggccgtgacggaggagctcgaggcggaggggcgttcgggcggggacgagttttcagatgatctcagggtcttcgtcggtaaccttccgttcagcgtcgacagcgcccagctcgcgggacttttcgagcaggccggctccgtcgagatggtcgaggttatctatgacaaattgacgggaagaagccgtggattcgggtttgtgaccatgtcttcggtcgaagaagttgaggtggctgttgaccaatttaatggctatgtgcttgatggaagaagtttgagggtgaactctgggccgccaccacccagagatcggtcatcaccgtcaccgcaaagacccaggggtgatgccaacagggtctacgtgggtaacctttcctggggagttgacaattcagctctcgcaaacctgttcagtgagcaaggtgaggtactggaagcaaggatcatctatgacagggagagtggaaggtcaagggggtttggttttgtcacgtacggttctgccgaagaggttgagaatgcaatatctaatctcgatggcgctgacttggacggcagacagatccgtgttacggtagcagagtcgaagccacctaggcagcaatactgaaattcctcttgagatttttgtaggtgtaccggtagcccaaactctggattatagtgacgccagtcctggatttggtctcgagattcattgaagttaaaaagccctcatgtatatggctcactatttatatacatgtaatattggattcccgtgttcagtgtccttttgtatcaatttggctgcatagtgtcttgtggcacttcaaaggacatagattgttgacgggcaaccaaacctcaagaaagtatcttgtattgtttctt

SEQ ID NO: 16624 - protein, 277 aa, Zea mays subsp. mays
  misc_feature (1)..(277): Ceres Seq. ID no. 12353370
LSAQNRTHTSALPMAATLFSTSLLPQFLSLSAKPAAAAAAPSAAAFPSGMPQLHALSAAAVGFRPLEPVRAAATAAVTEELEAEGRSGGDEFSDDLRVFVGNLPFSVDSAQLAGLFEQAGSVEMVEVIYDKLTGRSRGFGFVTMSSVEEVEVAVDQFNGYVLDGRSLRVNSGPPPPRDRSSPSPQRPRGDANRVYVGNLSWGVDNSALANLFSEQGEVLEARIIYDRESGRSRGFGFVTYGSAEEVENAISNLDGADLDGRQIRVTVAESKPPRQQY

SEQ ID NO: 16625 - protein, 264 aa, Zea mays subsp. mays
  misc_feature (1)..(264): Ceres Seq. ID no. 12353371
MAATLFSTSLLPQFLSLSAKPAAAAAAPSAAAFPSGMPQLHALSAAAVGFRPLEPVRAAATAAVTEELEAEGRSGGDEFSDDLRVFVGNLPFSVDSAQLAGLFEQAGSVEMVEVIYDKLTGRSRGFGFVTMSSVEEVEVAVDQFNGYVLDGRSLRVNSGPPPPRDRSSPSPQRPRGDANRVYVGNLSWGVDNSALANLFSEQGEVLEARIIYDRESGRSRGFGFVTYGSAEEVENAISNLDGADLDGRQIRVTVAESKPPRQQY

SEQ ID NO: 16626 - protein, 228 aa, Zea mays subsp. mays
  misc_feature (1)..(228): Ceres Seq. ID no. 12353372
MPQLHALSAAAVGFRPLEPVRAAATAAVTEELEAEGRSGGDEFSDDLRVFVGNLPFSVDSAQLAGLFEQAGSVEMVEVIYDKLTGRSRGFGFVTMSSVEEVEVAVDQFNGYVLDGRSLRVNSGPPPPRDRSSPSPQRPRGDANRVYVGNLSWGVDNSALANLFSEQGEVLEARIIYDRESGRSRGFGFVTYGSAEEVENAISNLDGADLDGRQIRVTVAESKPPRQQY

SEQ ID NO: 16627 - DNA, 1228 bp, Zea mays subsp. mays
  misc_feature (1)..(1228): Ceres Seq. ID no. 12353392
aaacggacgcagattgccgttcatgatccggctctttaaaataacgcagtagaaacggagagcgatctgaacacggtctgcagatttcaacgaggtgtggtgtgagcgcgatgagcgttcatggcccgtaatccgacgggatatccgacatttgtgccgtatccagcgcatgccgacaatccgtccggagatccctctccctctctctcatggcattcatgttttaaaccaaccaagccgcctctgctgctccgatccgtctccctctgttccagcagtcaggatggaggccgccgcaacacttccgccgctgctgctcctcatcctccttgctgcgactgcggtgccggctccgtcgcacgcatggggagtcgacggccatctcatggtctgccagatcgcacagggccgtctgagtggcgcggcggccgcggcggtgaaggacctgctgccgtcctacgccggcaacaacctgagcagcctctgctcctgggcggacgacgtcaagttcaggtacccctggtcgtcgccgctccactacatcgacacccccgacggcctctgcacctaccgctacgacagggactgcaaggacgaggacggcgtcgagggccggtgcgtcgcgggcgccatcaacaactacacctcccagctcctcgcctaccggagatcttcacccactgagtataacctaacgcaagcgctcctcttcctctcgcacttcatcggagacatacaccagccacttcacgtggggttcacctccgacaaaggagggaacaccattgacgtccactggtacacaaggaagactgttctacaccatgtttgggacgccagcatcatccagacggccgaagatgacttctacggcgacagcgtagccgggtatatcgacaccctgaagaaaaatataacgcagggagaatggtcggagcaagtgtctagctgggaagcgtgcggtacgaaccagactgcatgtccagacatatatgcgtctgagagcgtcgctgcagcatgcgactgggcgtacaagggagtcgaggaagactcaaccctacaagatccctatttctccagcaggctgccggtagtcagcctgaggctagcgcaaggcggcgtcagattagccgccactctgaacaggatttttggataatggtggagtacatttactatacatggaactattatggaattaaatgatatatataactattggtttccc

SEQ ID NO: 16628 - protein, 329 aa, Zea mays subsp. mays
  misc_feature (1)..(329): Ceres Seq. ID no. 12353393
MPTIRPEIPLPLSHGIHVLNQPSRLCCSDPSPSVPAVRMEAAATLPPLLLLILLAATAVPAPSHAWGVDGHLMVCQIAQGRLSGAAAAAVKDLLPSYAGNNLSSLCSWADDVKFRYPWSSPLHYIDTPDGLCTYRYDRDCKDEDGVEGRCVAGAINNYTSQLLAYRRSSPTEYNLTQALLFLSHFIGDIHQPLHVGFTSDKGGNTIDVHWYTRKTVLHHVWDASIIQTAEDDFYGDSVAGYIDTLKKNITQGEWSEQVSSWEACGTNQTACPDIYASESVAAACDWAYKGVEEDSTLQDPYFSSRLPVVSLRLAQGGVRLAATLNRIFG

SEQ ID NO: 16629 - protein, 291 aa, Zea mays subsp. mays
  misc_feature (1)..(291): Ceres Seq. ID no. 12353394
MEAAATLPPLLLLILLAATAVPAPSHAWGVDGHLMVCQIAQGRLSGAAAAAVKDLLPSYAGNNLSSLCSWADDVKFRYPWSSPLHYIDTPDGLCTYRYDRDCKDEDGVEGRCVAGAINNYTSQLLAYRRSSPTEYNLTQALLFLSHFIGDIHQPLHVGFTSDKGGNTIDVHWYTRKTVLHHVWDASIIQTAEDDFYGDSVAGYIDTLKKNITQGEWSEQVSSWEACGTNQTACPDIYASESVAAACDWAYKGVEEDSTLQDPYFSSRLPVVSLRLAQGGVRLAATLNRIFG

SEQ ID NO: 16630 - protein, 257 aa, Zea mays subsp. mays
  misc_feature (1)..(257): Ceres Seq. ID no. 12353395
MVCQIAQGRLSGAAAAAVKDLLPSYAGNNLSSLCSWADDVKFRYPWSSPLHYIDTPDGLCTYRYDRDCKDEDGVEGRCVAGAINNYTSQLLAYRRSSPTEYNLTQALLFLSHFIGDIHQPLHVGFTSDKGGNTIDVHWYTRKTVLHHVWDASIIQTAEDDFYGDSVAGYIDTLKKNITQGEWSEQVSSWEACGTNQTACPDIYASESVAAACDWAYKGVEEDSTLQDPYFSSRLPVVSLRLAQGGVRLAATLNRIFG

SEQ ID NO: 16631 - DNA, 1196 bp, Zea mays subsp. mays
  misc_feature (1)..(1196): Ceres Seq. ID no. 12353396
gctttacaactccccaccccatcccatccacacacacttcacccagcgcggcggccgccggccgccggcaatggaggccgtggcgcacagcggcgactacctttggcggttcgtggcggagacagagtggtacaacgaggttgtcctcagcgccgtggcgccaggcgactggtggcgcggcctgccgcacccggtgcagtcatggatgcgcaactgcgtcggcggttacctcctctatttcatctctggtttcctctggtgcttcgtcatctactactggaagcgccacgcctacatccccaaagatgccatccccacaaatgacgctatgaagaagcaaatagttgtagcatcgaaggctatgcctttttactgcgctcttccaactttatctgaatatatgattgagagcggatggactcagtgctacttcaatatcagcgaaattggtttttctatgtacctctgttatatggctatgtatctcatctttgtggagtttggaatttactggatgcacagggagttgcatgacataaaaccattatacaaatatctgcatgcaacccaccatatttacaacaaggagaataccttgtctccatttgctggacttgcatttcatccactggatggtattctgcaagcaataccacatgtgttcgcgctcttcctctttccaacgcacttcaggacacatattgcactcttgttcctagaggctgtgtggacaacaaacatccacgactgcattcatggcaagatatggccagtcatgggtgctggatatcacaccattcaccatacgacttaccgtcacaactatggccactacaccatctggatggactggatgtttggtacgctcaatgagccagaagatatcctcaagaaggcttgagtttctcggagctgtggtattcctatggtgctgctgctggaactgctcgatctgttcccagtgtttctaatccgttgagcctgttcagcactgtctgtttatgtaggcatcagtgtgttaattactttgctaggttcatatggctttgtgcttattctgtaatttagcgatgtttgtctcatgacgcaacggagttcaggacgaataaaactttgctagacacattctggattccagttgcttgtacaatgttggaactcaactgtcaatataggatgtaaaacggattccttcc

SEQ ID NO: 16632 - protein, 299 aa, Zea mays subsp. mays
  misc_feature (1)..(299): Ceres Seq. ID no. 12353397
LYNSPPHPIHTHFTQRGGRRPPAMEAVAHSGDYLWRFVAETEWYNEVVLSAVAPGDWWRGLPHPVQSWMRNCVGGYLLYFISGFLWCFVIYYWKRHAYIPKDAIPTNDAMKKQIVVASKAMPFYCALPTLSEYMIESGWTQCYFNISEIGFSMYLCYMAMYLIFVEFGIYWMHRELHDIKPLYKYLHATHHIYNKENTLSPFAGLAFHPLDGILQAIPHVFALFLFPTHFRTHIALLFLEAVWTTNIHDCIHGKIWPVMGAGYHTIHHTTYRHNYGHYTIWMDWMFGTLNEPEDILKKA

SEQ ID NO: 16633 - protein, 276 aa, Zea mays subsp. mays; identical to SEQ ID NO: 16122
  misc_feature (1)..(276): Ceres Seq. ID no. 12353398

SEQ ID NO: 16634 - protein, 231 aa, Zea mays subsp. mays; identical to SEQ ID NO: 16123
  misc_feature (1)..(231): Ceres Seq. ID no. 12353399

SEQ ID NO: 16635 - DNA, 1228 bp, Zea mays subsp. mays
  misc_feature (1)..(1228): Ceres Seq. ID no. 12353510
gagacttgagacagagacgcaggagcgcggaggaaaaggaggcccagaccaccgacggggaaaaaaacatcacgaacaccgttctccatagcgggagtagtgaggaacgaaagagagggggcggcctagggcttcgattccgcagccatggacgccgctgacgtgtggggccgctcatcgtcctcgtcttcttcgtccgccgccgccgcgaggcgcctgcaggcgcgctacgatctgtacatggggatcgacgacgcggacgccggcttggacgaggtgacggagccgcgcggcggggcggagtcctacaactgccccttctgcggcgaggacttcgactttgtcggcctctgctgtcacatcgacgacgagcatgccgttgaggctaagagcggggcatgccccatctgtgctacaagggtcggaatggacttgataggacatttgactatgcaacatggaagttatttcaagatgcaacgcaggcgcagagtccgaaaagtatcttctgggtcccattctttattatctttgttgagaaaggacttgagaaatggcagtttgcagtcatttctcggtggatcatcctatgtatccaatcctcctgctgcagcaccagatccatttgtgtcatctttaatttgtactttgcctgtggctgaaccatccaaagatttacattccgactcatctgacaataactttttgctaaataaattcccagatgaaaagcctgtagagagggctgaaccatcattgtcggagaaagatcagaaggaaagggttcaaaggagcaaattcgtccgagggcttgtgctctcgacaatatttgatgatgataacttgtaaagggggtcatcaaacttgataacagcatcacaatagttaaggaacacgaagagaatcatcagactctgctgctgttgtcgtgatcacacaagaggcccatctaagttcgtatatgtacggatggaatatttatgcatgtatgtatttatgtttatctccctgcatttacccttagtgcaacagggtggtaggggacggttgtagtattccaaatttatgtatcaaataaatgaggacactgtccttggggtgcaattgtgtatataatataataatagggagctactcgccatgatttaggatattttatttaactgttgtaataatatgcagtgttttgtatgatgaccccatttttttatatataactgttcatttt

SEQ ID NO: 16636 - protein, 233 aa, Zea mays subsp. mays
  misc_feature (1)..(233): Ceres Seq. ID no. 12353511
MDAADVWGRSSSSSSSSAAAARRLQARYDLYMGIDDADAGLDEVTEPRGGAESYNCPFCGEDFDFVGLCCHIDDEHAVEAKSGACPICATRVGMDLIGHLTMQHGSYFKMQRRRRVRKVSSGSHSLLSLLRKDLRNGSLQSFLGGSSYVSNPPAAAPDPFVSSLICTLPVAEPSKDLHSDSSDNNFLLNKFPDEKPVERAEPSLSEKDQKERVQRSKFVRGLVLSTIFDDDNL

SEQ ID NO: 16637 - protein, 202 aa, Zea mays subsp. mays
  misc_feature (1)..(202): Ceres Seq. ID no. 12353512
MGIDDADAGLDEVTEPRGGAESYNCPFCGEDFDFVGLCCHIDDEHAVEAKSGACPICATRVGMDLIGHLTMQHGSYFKMQRRRRVRKVSSGSHSLLSLLRKDLRNGSLQSFLGGSSYVSNPPAAAPDPFVSSLICTLPVAEPSKDLHSDSSDNNFLLNKFPDEKPVERAEPSLSEKDQKERVQRSKFVRGLVLSTIFDDDNL

SEQ ID NO: 16638 - protein, 140 aa, Zea mays subsp. mays
  misc_feature (1)..(140): Ceres Seq. ID no. 12353513
MDLIGHLTMQHGSYFKMQRRRRVRKVSSGSHSLLSLLRKDLRNGSLQSFLGGSSYVSNPPAAAPDPFVSSLICTLPVAEPSKDLHSDSSDNNFLLNKFPDEKPVERAEPSLSEKDQKERVQRSKFVRGLVLSTIFDDDNL

SEQ ID NO: 16639 - DNA, 1457 bp, Zea mays subsp. mays
  misc_feature (1)..(1457): Ceres Seq. ID no. 12353525
gccgtggagtagaggagcacaagtgagctagctagctctagctaggccacgcactgctgcctccttcatcatcaggtcgtgctagctagctagctatagctgggccgggggacgtacgacatcagcgcgcggccatgggcgtggggaagctgatgaacgacgtgaagccatacctggcgatggtgctgctgcaggtggggttctccgggatgtacatcgtctccgtcgcctccctcaagcgcggcatgaaccacttcgtcctcgtcgtctaccgcaacctcgtcgccaccgtcgtcatggcccccttcgccctcctcttcgagaggcgagtgaggcccaagatgacgccgctcatcttcctcaagatcatggggctcgccgtgctcgagcctgtgctcgaccagaacatgtactacctcggcgcgaagctgacgtccgcgaccttcgcctcagcgctggtcaacatcctccccgccatcacgttcctgctggccctcgccctgaggatggagaggctgaggctccggagcctccgcagccaggccaaggtggtcggcacggtctgcaccgtcgccggcgccgtgctgatgatcctctaccacggcccggtggtgccgttcccgtggtccgcgggtcgtcttcaccaccacgtccccgcggcggcggtggagagccagagcagcgcctcctggctcaacggcatctgcatgatcatcggcagctgcctgtgctggtccggcttcttcatcctccagtcgaacacgctgcagagctaccctgcggagctgacgctgacgactctgatctgcttcctgggctcggtgctgaccggcggcgtggcgctcgtggcggagcgccgcgacatgagcgcctgggtcattggcttcgacacccgcctcttcaccgccgtctactccgggatcgtgtgctccggcgtggccttctacgtgcaggggatcgtgacgcaggcgcgcgggccggtgttcgtgacggcgttccagcccctgtgcatgatcatcaccacggttcttggctccaccatactgaaagaggagaccaccctgggaagcgtgattggcgcggcgatcatagtggtggggctctactgcctcatctggggcaagagcaaggaccacctcggcagcaacggcggcaagcccggcgccgcggccgtcgccgagctgcccctgacctcgtcggctcctgcttggtccaacggcaagcaagctctggccgtcgtcgagacgacaccgccttcgtctttgcccaacaagtgcgttcactgacgcgcggatcggagctccatgcatgatgcggaccgtacaccaccgcacactactagtagtgcattgccagtgactgtaagccgccggccgtgtatgatcatgcatgcataccgtcataccgatatgatgtcccatactcccatcgttgcgtttaacactctcgagtttttg

SEQ ID NO: 16640 - protein, 383 aa, Zea mays subsp. mays
  misc_feature (1)..(383): Ceres Seq. ID no. 12353526
MGVGKLMNDVKPYLAMVLLQVGFSGMYIVSVASLKRGMNHFVLVVYRNLVATVVMAPFALLFERRVRPKMTPLIFLKIMGLAVLEPVLDQNMYYLGAKLTSATFASALVNILPAITFLLALALRMERLRLRSLRSQAKVVGTVCTVAGAVLMILYHGPVVPFPWSAGRLHHHVPAAAVESQSSASWLNGICMIIGSCLCWSGFFILQSNTLQSYPAELTLTTLICFLGSVLTGGVALVAERRDMSAWVIGFDTRLFTAVYSGIVCSGVAFYVQGIVTQARGPVFVTAFQPLCMIITTVLGSTILKEETTLGSVIGAAIIVVGLYCLIWGKSKDHLGSNGGKPGAAAVAELPLTSSAPAWSNGKQALAVVETTPPSSLPNKCVH

SEQ ID NO: 16641 - protein, 377 aa, Zea mays subsp. mays
  misc_feature (1)..(377): Ceres Seq. ID no. 12353527
MNDVKPYLAMVLLQVGFSGMYIVSVASLKRGMNHFVLVVYRNLVATVVMAPFALLFERRVRPKMTPLIFLKIMGLAVLEPVLDQNMYYLGAKLTSATFASALVNILPAITFLLALALRMERLRLRSLRSQAKVVGTVCTVAGAVLMILYHGPVVPFPWSAGRLHHHVPAAAVESQSSASWLNGICMIIGSCLCWSGFFILQSNTLQSYPAELTLTTLICFLGSVLTGGVALVAERRDMSAWVIGFDTRLFTAVYSGIVCSGVAFYVQGIVTQARGPVFVTAFQPLCMIITTVLGSTILKEETTLGSVIGAAIIVVGLYCLIWGKSKDHLGSNGGKPGAAAVAELPLTSSAPAWSNGKQALAVVETTPPSSLPNKCVH

SEQ ID NO: 16642 - protein, 368 aa, Zea mays subsp. mays
  misc_feature (1)..(368): Ceres Seq. ID no. 12353528
MVLLQVGFSGMYIVSVASLKRGMNHFVLVVYRNLVATVVMAPFALLFERRVRPKMTPLIFLKIMGLAVLEPVLDQNMYYLGAKLTSATFASALVNILPAITFLLALALRMERLRLRSLRSQAKVVGTVCTVAGAVLMILYHGPVVPFPWSAGRLHHHVPAAAVESQSSASWLNGICMIIGSCLCWSGFFILQSNTLQSYPAELTLTTLICFLGSVLTGGVALVAERRDMSAWVIGFDTRLFTAVYSGIVCSGVAFYVQGIVTQARGPVFVTAFQPLCMIITTVLGSTILKEETTLGSVIGAAIIVVGLYCLIWGKSKDHLGSNGGKPGAAAVAELPLTSSAPAWSNGKQALAVVETTPPSSLPNKCVH

SEQ ID NO: 16643 - DNA, 1413 bp, Zea mays subsp. mays
  misc_feature (1)..(1413): Ceres Seq. ID no. 12353553
caccttttctttttcaagaggaagtttttaccatgctacagtttgttggacagatctacaattgggttttggcatgcaggtgagagcctgcacacgcctttcctgagcccatacctcaaggcgctgggcgcggatttcagcaacggcgtgaacttcgccatcggcggctcgacggcgacgccggggggctctccattctcgctggacgtgcagctccatcagtggctctacttcagggccaggtccatggagatgatcaacctaggacagaggcctcccatcgatcgcgaaggattccgaaaggccatctacaccatcgacatcgggcagaacgacgtgtctgcttacatgcacctgccctacgaccaagtgcttgccaagatccctggatttgttgctcagatcaagtacaccatcgagacgctgtactcgcacggggcccgcaagttctggatccacggcacgggcgcgctgggctgcctgccgcagaagctggccatcccgcgggacgccgacgacggcgaccagctggacgcccacggctgcctcaagacctacaacaacgccgccaagcgcttcaacgcgctgctcggcgacgcctgcgcccagctccggcgccggatggtggacgcggcgctcgtcttcgtcgacatgtacgccgtcaagtacgacctggtggccaaccacacgacgcacgggatcgagaaacctctcatggcgtgctgcggctacggcgggccgccgtacaactacaaccacttcaaggcgtgcatgtcggcggagatgcagctgtgcgacgtgggcacgcgcttcatcagctgggacggcgtgcacttcaccgaggccgccaacgccatcgtcgccgccaaggtgctcaccggcgactactccacgcccagggtcaccatcgccaaactcgtcaactccacgctgcccaacgacgactagctggctggccgatcgatcgatcgtcgtcgtcattctgataaacatactgcaggcaggcttctcatcgatccatatccaattgtccgtagaaatctacgactagctcattgtagatccgtaatgtgggctaagagatgcatgacgatcgactagctgcccaactcgtcaagagctggttcaccactctcgtcaggatcgagctagaatggacgagcaattccatggcaccgagtgacacaatttatatcctcattgactagtactagtagtcgtactagcaaaaagaaaacagggttgggccaactgagtgattctgtggggttaggcctttgaggcttttacatgcaattcgtacatgtgtgtgtgtgacatttacagtttttttttaaaaaaaattaggaaatccgatcaatgggtggagggaatgcgacaacatcaaaaagtttacgtaaaatccattacctt

SEQ ID NO: 16644 - protein, 315 aa, Zea mays subsp. mays
  misc_feature (1)..(315): Ceres Seq. ID no. 12353554
HLFFFKRKFLPCYSLLDRSTIGFWHAGESLHTPFLSPYLKALGADFSNGVNFAIGGSTATPGGSPFSLDVQLHQWLYFRARSMEMINLGQRPPIDREGFRKAIYTIDIGQNDVSAYMHLPYDQVLAKIPGFVAQIKYTIETLYSHGARKFWIHGTGALGCLPQKLAIPRDADDGDQLDAHGCLKTYNNAAKRFNALLGDACAQLRRRMVDAALVFVDMYAVKYDLVANHTTHGIEKPLMACCGYGGPPYNYNHFKACMSAEMQLCDVGTRFISWDGVHFTEAANAIVAAKVLTGDYSTPRVTIAKLVNSTLPNDD

SEQ ID NO: 16645 - protein, 233 aa, Zea mays subsp. mays
  misc_feature (1)..(233): Ceres Seq. ID no. 12353555
MEMINLGQRPPIDREGFRKAIYTIDIGQNDVSAYMHLPYDQVLAKIPGFVAQIKYTIETLYSHGARKFWIHGTGALGCLPQKLAIPRDADDGDQLDAHGCLKTYNNAAKRFNALLGDACAQLRRRMVDAALVFVDMYAVKYDLVANHTTHGIEKPLMACCGYGGPPYNYNHFKACMSAEMQLCDVGTRFISWDGVHFTEAANAIVAAKVLTGDYSTPRVTIAKLVNSTLPNDD

SEQ ID NO: 16646 - protein, 231 aa, Zea mays subsp. mays
  misc_feature (1)..(231): Ceres Seq. ID no. 12353556
MINLGQRPPIDREGFRKAIYTIDIGQNDVSAYMHLPYDQVLAKIPGFVAQIKYTIETLYSHGARKFWIHGTGALGCLPQKLAIPRDADDGDQLDAHGCLKTYNNAAKRFNALLGDACAQLRRRMVDAALVFVDMYAVKYDLVANHTTHGIEKPLMACCGYGGPPYNYNHFKACMSAEMQLCDVGTRFISWDGVHFTEAANAIVAAKVLTGDYSTPRVTIAKLVNSTLPNDD

SEQ ID NO: 16647 - DNA, 1422 bp, Zea mays subsp. mays
  misc_feature (1)..(1422): Ceres Seq. ID no. 12353579
gacagccacggccgcgacggcgtccgcgtgcaccggacaccacggccagacccagacggcaacgggaggccacacagccctctgaccaaacgcacggatccggccagccacccaccccgcccccctagcggccgccacccacccgtgcgcgcggcgcaccaaggcctggcccggcagtggcagccaggctctcacacgcctcgcctagtcgccttgccgccgcgcgttatataagccgccccggcaggcacggtcggtcgatccagcaatacccgacggcgcaagccagtgccgcgcccagatctccgcgacagatcagtcgttcgtccagctaactgcactgcacgcaatggccaccacggcgaccgaggcgaccaagacgactgcaccggcgcaggagcagcaggccaacggcaacggcaacggcgagcagaagacgcgccactccgaggtcggccacaagagcctgctcaagagcgacgacctctaccagtacatcctggacacgagcgtgtacccgcgggagccggagagcatgaaggagctgcgcgagatcaccgccaagcacccatggaacctgatgaccacctccgccgacgagggccagttcctcaacatgctcatcaagctcatcggcgccaagaagaccatggagatcggcgtctacaccggctactcgctcctcgccaccgcgctcgcactcccggaggacggcacgatcttggccatggacatcaaccgcgagaactacgagctaggccttccctgcatcaacaaggccggcgtgggccacaagatcgacttccgcgagggccccgcgctccccgtcctggacgacctcgtggcggacaaggagcagcacgggtcgttcgacttcgccttcgtggacgccgacaaggacaactacctcaactaccacgagcggctcctgaagctggtgaggcccggcggcctcatcggctacgacaacacgctgtggaacggctccgtcgtgctccccgacgacgcgcccatgcgcaagtacatccgcttctaccgcgacttcgtcctcgccctcaacagcgcgctcgccgccgacgaccgcgtcgagatctgccagctccccgtcggcgacggcgtcacgctctgccgccgcgtcaagtgaaaaaaagaaagaaaaaaaaaacacacataccctgcgttcctgctgcccccggctccgtctggcccccaccgccaccgacggcggcgccgcaccccccgttccaatcatatcgtagacgacgcgcagcattaaattatcaatcaccggctctggctctttcttggccctgtactgtactactatactaatgtcccttcttgtttttttttcttgggaattgtcgccgtttcagtatacgtaaaatctcgatgtcgataatacagtactactaccaattt

SEQ ID NO: 16648 - protein, 264 aa, Zea mays subsp. mays
  misc_feature (1)..(264): Ceres Seq. ID no. 12353580
MATTATEATKTTAPAQEQQANGNGNGEQKTRHSEVGHKSLLKSDDLYQYILDTSVYPREPESMKELREITAKHPWNLMTTSADEGQFLNMLIKLIGAKKTMEIGVYTGYSLLATALALPEDGTILAMDINRENYELGLPCINKAGVGHKIDFREGPALPVLDDLVADKEQHGSFDFAFVDADKDNYLNYHERLLKLVRPGGLIGYDNTLWNGSVVLPDDAPMRKYIRFYRDFVLALNSALAADDRVEICQLPVGDGVTLCRRVK

SEQ ID NO: 16649 - protein, 253 aa, Zea mays subsp. mays
  misc_feature (1)..(253): Ceres Seq. ID no. 12353581
MEPDDHLRRRGPVPQHAHQAHRRQEDHGDRRLHRLLAPRHRARTPGGRHDLGHGHQPRELRARPSLHQQGRRGPQDRLPRGPRAPRPGRPRGGQGAARVVRLRLRGRRQGQLPQLPRAAPEAGEARRPHRLRQHAVERLRRAPRRRAHAQVHPLLPRLRPRPQQRARRRRPRRDLPAPRRRRRHALPPRQVKKRKKKKTHIPCVPAAPGSVWPPPPPTAAPHPPFQSYRRRRAALNYQSPALALSWPCTVLLY

SEQ ID NO: 16650 - protein, 202 aa, Zea mays subsp. mays
  misc_feature (1)..(202): Ceres Seq. ID no. 12353582
MKELREITAKHPWNLMTTSADEGQFLNMLIKLIGAKKTMEIGVYTGYSLLATALALPEDGTILAMDINRENYELGLPCINKAGVGHKIDFREGPALPVLDDLVADKEQHGSFDFAFVDADKDNYLNYHERLLKLVRPGGLIGYDNTLWNGSVVLPDDAPMRKYIRFYRDFVLALNSALAADDRVEICQLPVGDGVTLCRRVK

SEQ ID NO: 16651 - DNA, 1394 bp, Zea mays subsp. mays
  misc_feature (1)..(1394): Ceres Seq. ID no. 12353583
agatcccctcacagtcatcctccacccaccccacccaccgcctccgcctctctctctctctcgtttgttcgtctcggcttccggtcgccgattcttctctgcgcaaaagattcctggtggtggtgcccgtaccttgctccacgcctcgctcgcgtcgcgtgcatggggctggacgtcggcggcatcgggatgggcctggatctgggtctggacctcgggctgttcgccgcgcggagcgccggagggatggcggccgcggccaagggtgcgccggcggagatcgagtcctgcatcaggagcctcgaggaggagcgccggaagatcgaggtgttcaggcgcgagctcccgctctgcgtgcgtctcctcgccgatgtaatcgacgaattgaaggatgaggccgccaagagaggcggagacgcggaggccaaggccgacgacggcgataagcggaaatggatgagcaccgctcagctgtggctcgacagcgacgccaaatccgacgagtctgacaaagagcaactgagtgaaatcacttcgccggagcccaagttgctcggtggcgcacccatgcccataagggccgttgcggcggtgccacccctgccgcctccattcttcaggagagaagacagctctgccggcagtggtctgtcgctggtaccacccgcagctaagccgccgattcctcccatgtctgccagcgacaacgcgagcggcagattctgtgccactatgccaccgtctggctctggggccaacttgcactctcaggctcagcagcaagccaggaaggcgaggcggtgctggtcgccggagcttcaccggctgtttgttgccgccttgcatcaactcggcggccctcaagttgctactccgaagcagatcagggaggtgatgaaggtggacgggcttacaaacgatgaagtgaaaagccatctccagaagtaccggctgcacaacagaagatcccccggcgtcgtggctccggtgagccagtcggtcatgctggcgggcggcctctgggctcctcctcatcaggagcaaagcagctcgcagtccgggtctccccagggcccgcttcagttctctggatccggtgtagcggccaccgtcggcggcgatagcagcagcagcgacgaggacgacaagtccgaaggctacagccggaaatacgtgtaaaggccgcgttcgacggatgagagtgtagagatagcgtcgcggcttctgcttgcccgtctgtggcaataacagattcatcagtcttgagagaggttgtagtgcgtgcgcccaagagctcaactgatcatgggttggattgtttgtttgtcatgtacgtacatggaaagctgatggcttcctgacttttaatttctgggcaggtcccaaaattttcg

SEQ ID NO: 16652 - protein, 392 aa, Zea mays subsp. mays
  misc_feature (1)..(392): Ceres Seq. ID no. 12353584
RSPHSHPPPTPPTASASLSLSFVRLGFRSPILLCAKDSWWWCPYLAPRLARVACMGLDVGGIGMGLDLGLDLGLFAARSAGGMAAAAKGAPAEIESCIRSLEEERRKIEVFRRELPLCVRLLADVIDELKDEAAKRGGDAEAKADDGDKRKWMSTAQLWLDSDAKSDESDKEQLSEITSPEPKLLGGAPMPIRAVAAVPPLPPPFFRREDSSAGSGLSLVPPAAKPPIPPMSASDNASGRFCATMPPSGSGANLHSQAQQQARKARRCWSPELHRLFVAALHQLGGPQVATPKQIREVMKVDGLTNDEVKSHLQKYRLHNRRSPGVVAPVSQSVMLAGGLWAPPHQEQSSSQSGSPQGPLQFSGSGVAATVGGDSSSSDEDDKSEGYSRKYV

SEQ ID NO: 16653 - protein, 338 aa, Zea mays subsp. mays
  misc_feature (1)..(338): Ceres Seq. ID no. 12353585
MGLDVGGIGMGLDLGLDLGLFAARSAGGMAAAAKGAPAEIESCIRSLEEERRKIEVFRRELPLCVRLLADVIDELKDEAAKRGGDAEAKADDGDKRKWMSTAQLWLDSDAKSDESDKEQLSEITSPEPKLLGGAPMPIRAVAAVPPLPPPFFRREDSSAGSGLSLVPPAAKPPIPPMSASDNASGRFCATMPPSGSGANLHSQAQQQARKARRCWSPELHRLFVAALHQLGGPQVATPKQIREVMKVDGLTNDEVKSHLQKYRLHNRRSPGVVAPVSQSVMLAGGLWAPPHQEQSSSQSGSPQGPLQFSGSGVAATVGGDSSSSDEDDKSEGYSRKYV

SEQ ID NO: 16654 - protein, 329 aa, Zea mays subsp. mays
  misc_feature (1)..(329): Ceres Seq. ID no. 12353586
MGLDLGLDLGLFAARSAGGMAAAAKGAPAEIESCIRSLEEERRKIEVFRRELPLCVRLLADVIDELKDEAAKRGGDAEAKADDGDKRKWMSTAQLWLDSDAKSDESDKEQLSEITSPEPKLLGGAPMPIRAVAAVPPLPPPFFRREDSSAGSGLSLVPPAAKPPIPPMSASDNASGRFCATMPPSGSGANLHSQAQQQARKARRCWSPELHRLFVAALHQLGGPQVATPKQIREVMKVDGLTNDEVKSHLQKYRLHNRRSPGVVAPVSQSVMLAGGLWAPPHQEQSSSQSGSPQGPLQFSGSGVAATVGGDSSSSDEDDKSEGYSRKYV

SEQ ID NO: 16655 - DNA, 1155 bp, Zea mays subsp. mays
  misc_feature (1)..(1155): Ceres Seq. ID no. 12353616
cacgggcgcctgcctctacgaggtggcctacggcgacggctcctacaccgtgggcgacttcgccaccgagacgctcacgctgggggactccaccccggtcggcaacgtcgccatcgggtgcggccacgacaacgagggcctcttcgtcggcgccgcggggctgctggcgctgggcggcgggccgctctccttcccgtcccagatctccgcgtccaccttctcctactgcctcgtggaccgcgactccccggccgcgtccacgctccagttcggcgacggcgccgccgaggcgggcaccgtgacggcgcctctcgtgcgcagcccgcgcacgagcaccttctactacgtggcgctgtcgggcatctcggtgggcgggcagccgctgtccatcccggcatccgccttcgccatggacgccacgtcgggctcgggcggcgtcatcgtggactccggcaccgccgtgacgcggctccagtccgccgcctacgcggcgctccgcgacgccttcgtccagggcgcgccgtcgcttccccggacctccggggtgtcgctgttcgacacgtgctacgacctgtcggaccggacgagcgtggaggtgcccgcggtgtcgctgcggttcgagggcggcggcgcgctgcggctgccggcgaagaactacctgatccccgtggacggagccggcacctactgcctggccttcgcgccgacgaacgcggccgtgtccatcatcgggaacgtgcagcagcagggcacccgcgtcagcttcgacaccgccaggggcgccgtcggcttcacccccaacaagtgctagcctagcctagcctaagcctgccttctggccctgttagccacggttgtcagtagtaatgacaagccggtgtttaattagcgggagaatgattagatggggggtaattaagcggtgggccctgccgggtctggggaggagcgaaaggcaaaggcgaggacagatgatgccattgccatgccagcctgtgtccggccgatgggtccagctccagcagtgtttctctctttctctcgagtatgcgtgcgtggagccttgtcatgacgaattagatcgtgggggctcccaagttaagagtatttatttttattttatttgctatgtcaagaaaatggaagtttccatcc

SEQ ID NO: 16656 - protein, 271 aa, Zea mays subsp. mays
  misc_feature (1)..(271): Ceres Seq. ID no. 12353617
HGRLPLRGGLRRRLLHRGRLRHRDAHAGGLHPGRQRRHRVRPRQRGPLRRRRGAAGAGRRAALLPVPDLRVHLLLLPRGPRLPGRVHAPVRRRRRRGGHRDGASRAQPAHEHLLLRGAVGHLGGRAAAVHPGIRLRHGRHVGLGRRHRGLRHRRDAAPVRRLRGAPRRLRPGRAVASPDLRGVAVRHVLRPVGPDERGGARGVAAVRGRRRAAAAGEELPDPRGRSRHLLPGLRADERGRVHHRERAAAGHPRQLRHRQGRRRLHPQQVLA

SEQ ID NO: 16657 - protein, 269 aa, Zea mays subsp. mays
  misc_feature (1)..(269): Ceres Seq. ID no. 12353618
TGACLYEVAYGDGSYTVGDFATETLTLGDSTPVGNVAIGCGHDNEGLFVGAAGLLALGGGPLSFPSQISASTFSYCLVDRDSPAASTLQFGDGAAEAGTVTAPLVRSPRTSTFYYVALSGISVGGQPLSIPASAFAMDATSGSGGVIVDSGTAVTRLQSAAYAALRDAFVQGAPSLPRTSGVSLFDTCYDLSDRTSVEVPAVSLRFEGGGALRLPAKNYLIPVDGAGTYCLAFAPTNAAVSIIGNVQQQGTRVSFDTARGAVGFTPNKC

SEQ ID NO: 16658 - DNA, 963 bp, Zea mays subsp. mays
  misc_feature (1)..(963): Ceres Seq. ID no. 12353619
ctgttctccaccagccccggaggtcgacacgtgcgccacaccatagggcagggcccagggagcccggcgacctccatctccatggccgagtgcgaggagctggtggagagcggcggcgccgaggaggacatgccccgcgtcgtagccgccctcgccggcatcctggagcgcgtcgcgaaccgcaacgacgctgcggcggtcgcagaggtctcggccgtagccccggcgtcggcgttccgggcgacgacgaagccgggcatctcggtgcgcgcgtacatggcgcgcatcgcgcggttcgctgggtgcagccccgcgtgctacgtcgtggcctacgtctacctcgaccgcctcctgcgccgcggccgcctcctggcgctggccgtcgactcctacagcgtgcaccgcctcctcattaccgccgtgcttgccgccgtcaagttcatggacgacatatgctacaacaacgcctacttcgccaaggtcgggggcatcagcctggtggagatgaactacctggaggtggacttcctgttcggcgtcggcttcgacctcaacgtggcgccggagacgttcggcgactactgcgccgtgctgcggtcggagctactgtgcgcggaggctgcccccgcgccactcaggctgcagcactgctgcctgtccgaggatgacgccggggccggatgcagcgcccagcagcagctcgctgcatgaatgaaagaaacctaagcccatcgatcgatcgacgactcatccggtggcttgggcgcaggagttgtaagccggtgcaaattgttccaaattattagatgttttgtcttttctagattataaagctttcgatatatacacacatctatatatacagtgtgtctagaggtgtagtggtggtgtaggtcgtcgtcggttgtaccagctgctacagtagattgtgtatacagtgctggtgtctttggtgactttctg

SEQ ID NO: 16659 - protein, 236 aa, Zea mays subsp. mays
  misc_feature (1)..(236): Ceres Seq. ID no. 12353620
LFSTSPGGRHVRHTIGQGPGSPATSISMAECEELVESGGAEEDMPRVVAALAGILERVANRNDAAAVAEVSAVAPASAFRATTKPGISVRAYMARIARFAGCSPACYVVAYVYLDRLLRRGRLLALAVDSYSVHRLLITAVLAAVKFMDDICYNNAYFAKVGGISLVEMNYLEVDFLFGVGFDLNVAPETFGDYCAVLRSELLCAEAAPAPLRLQHCCLSEDDAGAGCSAQQQLAA

SEQ ID NO: 16660 - protein, 221 aa, Zea mays subsp. mays
  misc_feature (1)..(221): Ceres Seq. ID no. 12353621
VLHQPRRSTRAPHHRAGPREPGDLHLHGRVRGAGGERRRRGGHAPRRSRPRRHPGARREPQRRCGGRRGLGRSPGVGVPGDDEAGHLGARVHGAHRAVRWVQPRVLRRGLRLPRPPPAPRPPPGAGRRLLQRAPPPHYRRACRRQVHGRHMLQQRLLRQGRGHQPGGDELPGGGLPVRRRLRPQRGAGDVRRLLRRAAVGATVRGGCPRATQAAALLPVRG

SEQ ID NO: 16661 - protein, 209 aa, Zea mays subsp. mays
  misc_feature (1)..(209): Ceres Seq. ID no. 12353622
MAECEELVESGGAEEDMPRVVAALAGILERVANRNDAAAVAEVSAVAPASAFRATTKPGISVRAYMARIARFAGCSPACYVVAYVYLDRLLRRGRLLALAVDSYSVHRLLITAVLAAVKFMDDICYNNAYFAKVGGISLVEMNYLEVDFLFGVGFDLNVAPETFGDYCAVLRSELLCAEAAPAPLRLQHCCLSEDDAGAGCSAQQQLAA

SEQ ID NO: 16662 - DNA, 1670 bp, Zea mays subsp. mays
  misc_feature (1)..(1670): Ceres Seq. ID no. 12353627
aaatttctgggcctctctcctccagcctgcatagccaacccttttgataaagaaacgggcctacactacacgggacacctgcctcctccccttctcccatctctccccctctccctctcgtggccacgactgccgctgccgccctacgccaggtgtccaggtcatctccggcccattcgccggcgacgagcaccccactagatcgaccgagatatggacggcctgtggcatctgggggacgagctccgcgggcagcccaaggtggtggaggaccgccagtggtcgctcatgacgtccaagctggcagagatcaccaggtccaggggcgagaggacgaacgacctcgactacgccaggatgaacgccgcccccgacgccaagcggtggggcaaggcggcgtcctaccagcaccatgacgagggcaggatggaccaccacgtcggcctcagcctcaagatgaacgatctcaagatgaacgaggccgccgctgccgccgtcatgaagctccccttccgcggcgtgccctacaacgtcaacccgatgtaccccaaggggagcaacgccaacgccaatgtcaacgcgttcaagatgaatgtcggggtgaacaagtactccagcagcgcgaacgggaaagacgccggcgggaaaagcagtggcggtggcagcaacaacaacagcggcggcggaggcaacggcaatgggaccgccaacggcagttccgcggtcgacaagcgcttcaagacgttgccgacgagcgagatgctgccaaagaacgaagtccttggtgggtacatctttgtctgcaacaacgataccatgcaggaggacctcaagaggcagctttttggattgccagcaagatatcgtgattcagtccgggcaattactcctggcctgcctcttttcctctataactacaccactcaccagcttcatggggtatttgaggctgccagtttcggtgggtctaatatcgatcccactgcatggggaggataagaagtgtaaaggtgaatctagattcccagcgcaggtgaggatccgcgttaggaagctctgcaagccgttggaagaggattccttcaggccagttttgcaccactatgatggcccaaagtttcgccttgagctctccatcgcggagaccctgtccctgctagacctatgcgagaaggaaggcatctgagctgttggctgcctcgtgaggttctagtaaatatcaatcatccttgtatgttctgtggatggtggttggcaatgttgtttatttttcaagcgcaagctgctgccggtctcgttttccctgtcctggatggaagcaaagggacctggtactttgaaggccccccctcaaacataagctgtgagcctgtcagtgcacgtgtccgccgttgtcgtcaagaaccaaaccaaatcatgaaatcttgcgccgacggagagttggagcgtgtatgttttgctatctctatctacatgtctcagtagagtggatataccctggggtccccaaaagatgggggcctgtatgtaacactacgtgtaatggttaaggtgaatgtgccgtgaggccccccaaaagttggagtgtgtattttttgttgtcaccttgaaccgactttgcgtatgctttttttagtgctgctaccttttgcgctgtgtttggcttctgg

SEQ ID NO: 16663 - protein, 261 aa, Zea mays subsp. mays
  misc_feature (1)..(261): Ceres Seq. ID no. 12353628
MDGLWHLGDELRGQPKVVEDRQWSLMTSKLAEITRSRGERTNDLDYARMNAAPDAKRWGKAASYQHHDEGRMDHHVGLSLKMNDLKMNEAAAAAVMKLPFRGVPYNVNPMYPKGSNANANVNAFKMNVGVNKYSSSANGKDAGGKSSGGGSNNNSGGGGNGNGTANGSSAVDKRFKTLPTSEMLPKNEVLGGYIFVCNNDTMQEDLKRQLFGLPARYRDSVRAITPGLPLFLYNYTTHQLHGVFEAASFGGSNIDPTAWGG

SEQ ID NO: 16664 - protein, 236 aa, Zea mays subsp. mays
  misc_feature (1)..(236): Ceres Seq. ID no. 12353629
MTSKLAEITRSRGERTNDLDYARMNAAPDAKRWGKAASYQHHDEGRMDHHVGLSLKMNDLKMNEAAAAAVMKLPFRGVPYNVNPMYPKGSNANANVNAFKMNVGVNKYSSSANGKDAGGKSSGGGSNNNSGGGGNGNGTANGSSAVDKRFKTLPTSEMLPKNEVLGGYIFVCNNDTMQEDLKRQLFGLPARYRDSVRAITPGLPLFLYNYTTHQLHGVFEAASFGGSNIDPTAWGG

SEQ ID NO: 16665 - protein, 213 aa, Zea mays subsp. mays
  misc_feature (1)..(213): Ceres Seq. ID no. 12353630
MNAAPDAKRWGKAASYQHHDEGRMDHHVGLSLKMNDLKMNEAAAAAVMKLPFRGVPYNVNPMYPKGSNANANVNAFKMNVGVNKYSSSANGKDAGGKSSGGGSNNNSGGGGNGNGTANGSSAVDKRFKTLPTSEMLPKNEVLGGYIFVCNNDTMQEDLKRQLFGLPARYRDSVRAITPGLPLFLYNYTTHQLHGVFEAASFGGSNIDPTAWGG

SEQ ID NO: 16666 - DNA, 1781 bp, Zea mays subsp. mays
  misc_feature (1)..(1781): Ceres Seq. ID no. 12353639
ctccgtcccctcctcctgcgaaggctcctccagcaccactagctagagctaaccccgtgctgctgctgctgctactacctgctgccgcgcgccgttcgttgccgtgcgggcgtgttgtggtccgctgatctcgttcgcgggacgccggggggtggtggtggtggcagcggtggttggtggtgcgcggcgtgaaagaaagaaagaaaaaaaaaaggcccgccgctttgcgctgctctgcttccgtaggtgtcacgagatttggccctagcctttcgctttcctttttcatctcgctcacaagggaagggaccgagggacgagggagacgttggggaggggagcgagcgagccgtaacatccgagctgttccaatggcgacccctgccgttgctttcgtcgccagcgctttgttggggcggtggtagcgctaggagcggagcagtactaggttggtaggtggttgtagctttgcgcgtgacccgagcgcgcgctcgctcgctcctgtgcctctctacctcgcttgcgtgcgccgggaaggcagtgggtggctggtcggttctcgcaagaggttgctggtgctgttcctcctcccccggttgatgagcatggggcattgctccgagcagcggacggggttcgaggtgactaaggactggaacggcgccgaccagttcgcgatccggtccccgcggggggcgtccgttcgggtctgcctgcacggcgggcaggtcgtctcgtggaggaaccaccgcggcgaggagctcctcttcagcagcagcaaggcaatcttcaagccgccaagagcgacccgtggtggcattccgatatgcttcccacagtttggaaactgtggaacattggagcagcatggatttgcaaggaacaagatatggacaatagacgatgaggctccacctctaaattatggtgataataacagcaacaaagcttctgttgaccttctgctaaagccatctgaagatgacctgaagtgctggccacactgttttgagttacgtctcagagtctctctttcaatggatggagacctttcactgatatcacgggtcagaaatgttaatgggaagccattcagtttcgcatttgcttaccatacatacctttctgtttctgacatcagtgaagtgaggatagaaggtctggagacccttgattatcttgacaaccttagccagcgggaacgttttaccgaacagggagatgccataacatttgaatcagaggttgatcgagtctatgttggctgcccaggcgtaatagctgttcttgaccatggaaagaaacgcacattcatcgtgcggaaagaagggcttcctgatattgttgtgtggaacccctgggagaagaagtccaagacgatggcagacttcggcgacgacgagtacaagcagatgctgtgcgtggatgcagccgcggtcgagagggccatcacgctgaagcccggggaggagtggacggggaagctggagctctccgccgtggcgtcgaccaactgcagcgaccacctggatcgcccgggcaggctgtagagcgctgggtgggtgggttcgttcgcccctgacgaaaggcatgtactagttttttttcatgtacatgggggcgctaggtccggcccttgcaggctgcagtatcatctacctgtcaggtgtgtcatgtgtgagtttaaacttatgtcagatccaagtattgctgtgatcgacatgttcgatgttcctggactgcgaagtctcaagcgcaggctgttcgtttggctggctttt

SEQ ID NO: 16667 - protein, 316 aa, Zea mays subsp. mays; identical to SEQ ID NO: 15675
  misc_feature (1)..(316): Ceres Seq. ID no. 12353640

SEQ ID NO: 16668 - protein, 314 aa, Zea mays subsp. mays; identical to SEQ ID NO: 15676
  misc_feature (1)..(314): Ceres Seq. ID no. 12353641

SEQ ID NO: 16669 - protein, 170 aa, Zea mays subsp. mays; identical to SEQ ID NO: 15677
  misc_feature (1)..(170): Ceres Seq. ID no. 12353642

SEQ ID NO: 16670 - DNA, 1379 bp, Zea mays subsp. mays
  misc_feature (1)..(1379): Ceres Seq. ID no. 12353653
cccagctagacctacagaaaaaaaactctaaaatagttgttggtaaaccagcaggtgagcagtcgaacatcgtggccgcctctgctcagcccagatctccgatggccaccgcacccgccgccccgccgccggcctccgcggacgacgagatcatctacgagtccatgccctgcatccgcgtctacaaggaccgcgtggagcgctacttcggcaccgagttcgtcgccgcctcgacgaacgactccaccggcgtggcctccagggacgtcgtcatctcccccaacgtctccgcgcgcctctacctcccgcgcctggacgacgggaacgccaagctccccatcttcgtctactaccacggcggcggcttctgcatcggctccgccttcaaccccatcttccacgactacttcaactgcctcgtggccctcgccgacatcctcgtcgtctccgtcgagtaccgcctcgccccggagcaccccgtccccgccgcctacgccgactcctgggaagcgctcgcctgggtcatctctcacctcggccccgccggcgacggcgcccgggacccgtggatcgcgagccacgccgacttctcccgcctcttcctgggcggcgagagcgcgggctccaacatcgcgcaccacatggcgatgcgcgctgccgcggaggggctggcccacggcgcccggatccggggactcgtcatgatccacccctacttcctgggcacggacaaggtgccctccgacgacctcagcccggaggtgcgcgagagcctggggtccctgtggcgcttcatgtgcccgaccaccacgggggaggacgacccgctcatcaaccccttcgttgacggcgccccgccgctagcgtccctgccgtgcggccgcgtgctcgtgtgcatcggcgagggcgacgtcctccgcgaccgcggccgcgcctactacgaccggctcagggccagcgggtggcccggcaaggcagagatttggcaggcgcccggcaagggacacacgttccacctcctggatccgtgctgcgacgaggccatcgcgcaggataaagtcatcagctacttcctcagccactgactcgcctcgcgtcctcgccggtggtggtggcgttgttgggcttggatcaaaattagcttctttcatgctggcgctacactacataccttacttctagtacatatcaggttcagagttgtatccgtattctttgaaattggatctcagaatggagctttgcccattgttagtaggcaatggtgttgatgtattgcacctggtaatttggggacgatgatacagtcatagtgtcatacatatgaaattatacttgtttgtcacacagaatttgttgaaacaaatgttccatctttt

SEQ ID NO: 16671 - protein, 360 aa, Zea mays subsp. mays
  misc_feature (1)..(360): Ceres Seq. ID no. 12353654
QLDLQKKNSKIVVGKPAGEQSNIVAASAQPRSPMATAPAAPPPASADDEIIYESMPCIRVYKDRVERYFGTEFVAASTNDSTGVASRDVVISPNVSARLYLPRLDDGNAKLPIFVYYHGGGFCIGSAFNPIFHDYFNCLVALADILVVSVEYRLAPEHPVPAAYADSWEALAWVISHLGPAGDGARDPWIASHADFSRLFLGGESAGSNIAHHMAMRAAAEGLAHGARIRGLVMIHPYFLGTDKVPSDDLSPEVRESLGSLWRFMCPTTTGEDDPLINPFVDGAPPLASLPCGRVLVCIGEGDVLRDRGRAYYDRLRASGWPGKAEIWQAPGKGHTFHLLDPCCDEAIAQDKVISYFLSH

SEQ ID NO: 16672 - protein, 327 aa, Zea mays subsp. mays
  misc_feature (1)..(327): Ceres Seq. ID no. 12353655
MATAPAAPPPASADDEIIYESMPCIRVYKDRVERYFGTEFVAASTNDSTGVASRDVVISPNVSARLYLPRLDDGNAKLPIFVYYHGGGFCIGSAFNPIFHDYFNCLVALADILVVSVEYRLAPEHPVPAAYADSWEALAWVISHLGPAGDGARDPWIASHADFSRLFLGGESAGSNIAHHMAMRAAAEGLAHGARIRGLVMIHPYFLGTDKVPSDDLSPEVRESLGSLWRFMCPTTTGEDDPLINPFVDGAPPLASLPCGRVLVCIGEGDVLRDRGRAYYDRLRASGWPGKAEIWQAPGKGHTFHLLDPCCDEAIAQDKVISYFLSH

SEQ ID NO: 16673 - protein, 306 aa, Zea mays subsp. mays
  misc_feature (1)..(306): Ceres Seq. ID no. 12353656
MPCIRVYKDRVERYFGTEFVAASTNDSTGVASRDVVISPNVSARLYLPRLDDGNAKLPIFVYYHGGGFCIGSAFNPIFHDYFNCLVALADILVVSVEYRLAPEHPVPAAYADSWEALAWVISHLGPAGDGARDPWIASHADFSRLFLGGESAGSNIAHHMAMRAAAEGLAHGARIRGLVMIHPYFLGTDKVPSDDLSPEVRESLGSLWRFMCPTTTGEDDPLINPFVDGAPPLASLPCGRVLVCIGEGDVLRDRGRAYYDRLRASGWPGKAEIWQAPGKGHTFHLLDPCCDEAIAQDKVISYFLSH

SEQ ID NO: 16674 - DNA, 1114 bp, Zea mays subsp. mays
  misc_feature (1)..(1114): Ceres Seq. ID no. 12353671
aagcagcttctcgtttcatcagccagccaccaccaaccaaccacagcgaaacacctctttctcgctctctcataaacgacgaggaggccgtacggcactccgcaagcttctcagttcactctctggtctccagtctccaccgctccagcagcctgagctagtgagctgagccccgagctgctataccgtacaccaagtgcacaagcggatcggatcggatcggagcgagatggccgcggccgggctgggcgtgaaggcgacgccgttcacgtacgcggcgcacgcgctggccgcggtggcggcggcgctggtgctggtgtggtgcgtccacttccgcggcggcctcgcgctcgaggcacagaacaagaacctcatcttcaacgttcatcctgttcttatgctgatcggctacattatcctcggcagtgaagccattatgatctacaaggtgtttccgaacctgaaccacgacacggccaagctgacgcacctgatcctccacgccgtcgcgaccgtgctcggcgccttcggcatctactgcgcgttcaagtaccacaacgacagcgggcatcgccaacctctacagcctgcactcctggctcgggatcgggaccatcgctctgtacgccattcagtgggtgttcgggttcgtgaccttcttcctccccggcgcggcgcccggcgtgaggcgcggcgcgctgccctggcacgcgctcttcggcctcttcgtctacgttctggcgctggcgaccgcggagctcgggttcctggagaagctgaccttcctggagagcggggggctcgacaagtacggcgccgaggcgttcctggtcaacttcacggcgctcgtcgtcgtgctgctcggcagccttcgtcgtcgtcgccgcagtcactccggcgcacgccgaggaaccgcggggctacgccccgattccggtcagctagagggggaggagttcgctgggcagtcagaagagggcagctgtgttttgtttttgaattgaaccatgacacatcaggcgtgtgcgtgcctcgcgtccgggtttacttcgaagcggacgcgacgggtttcggtctatgaatgaatacagcccgatgggccgcagctttcccc

SEQ ID NO: 16675 - protein, 283 aa, Zea mays subsp. mays
  misc_feature (1)..(283): Ceres Seq. ID no. 12353672
MAAAGLGVKATPFTYAAHALAAVAAALVLVWCVHFRGGLALEAQNKNLIFNVHPVLMLIGYIILGSEAIMIYKVFPNLNHDTAKLTHLILHAVATVLGAFGIYCAFKYHNDSGHRQPLQPALLARDRDHRSVRHSVGVRVRDLLPPRRGARREARRAALARALRPLRLRSGAGDRGARVPGEADLPGERGARQVRRRGVPGQLHGARRRAARQPSSSSPQSLRRTPRNRGATPRFRSARGGGVRWAVRRGQLCFVFELNHDTSGVCVPRVRVYFEADATGFGL

SEQ ID NO: 16676 - protein, 227 aa, Zea mays subsp. mays
  misc_feature (1)..(227): Ceres Seq. ID no. 12353673
MLIGYIILGSEAIMIYKVFPNLNHDTAKLTHLILHAVATVLGAFGIYCAFKYHNDSGHRQPLQPALLARDRDHRSVRHSVGVRVRDLLPPRRGARREARRAALARALRPLRLRSGAGDRGARVPGEADLPGERGARQVRRRGVPGQLHGARRRAARQPSSSSPQSLRRTPRNRGATPRFRSARGGGVRWAVRRGQLCFVFELNHDTSGVCVPRVRVYFEADATGFGL

SEQ ID NO: 16677 - protein, 214 aa, Zea mays subsp. mays
  misc_feature (1)..(214): Ceres Seq. ID no. 12353674
MIYKVFPNLNHDTAKLTHLILHAVATVLGAFGIYCAFKYHNDSGHRQPLQPALLARDRDHRSVRHSVGVRVRDLLPPRRGARREARRAALARALRPLRLRSGAGDRGARVPGEADLPGERGARQVRRRGVPGQLHGARRRAARQPSSSSPQSLRRTPRNRGATPRFRSARGGGVRWAVRRGQLCFVFELNHDTSGVCVPRVRVYFEADATGFGL

SEQ ID NO: 16678 - DNA, 1125 bp, Zea mays subsp. mays
  misc_feature (1)..(1125): Ceres Seq. ID no. 12353686
actcagacgccacctgttcttccttcctctcctctctgcaacgcgtcgggaagcagctgccagccatggcaatggcgtcgtcgtcgagcgggctgaggagctgcagcgcattgggcgtgcccagcctgctggcgccgtcgacgtcgtcgtcgtcccggtccggccgcctgccgttctgcgcccacgccaccacctccggccgcgtcaccatgtccgcggagtggatgcccgggcagccccgccccgcccacctcgacggctcctcgccaggtgacttcggcttcgaccccctgggcctggccacggtgccggagaacttcgagcggttcaaggagtcggaggtgtaccactgccggtgggccatgctggccgtgccgggggtgctggtgccggaggcgctggggctgggcaactgggtgaaggcgcaggagtgggcggccgtccccggcgggcaggccacgtacctgggcgccccggtgccgtggggcacgctgccgaccatcctggcggtcgagttcgtggccatcgccttcgccgagcaccagcgcaccatggagaaggaccccgagaagaagaagtaccccggcggcgccttcgacccgctcggcttctccagggaccccgccaagctcgaggagtacaagctcaaggagatcaagaacggccgcctcgccatgctggccttcgtcggcttctgcgtccagcagtcggcgtacccgggcaccggtccgctcgagaaccttgccgcccacctcgccgacccctggcacaacaacatcggagacatcatcatccctagatcgatctccccttgacaattatattggttgattattacgactaggcactaggcactgcctgcctgcgtgcaggagcagtacaacgacgacgacggcgagtcggcgacttccctcccgcccggaaagctctcgtaatctaaaggaaaaggaaattggtaccatgttgtgcacttctagcatgcatgacagcaatcgcaagcttcttcctcagccactaacctctatgtacattttcagcgcaagatcattgtcgacagtagtatacataaaagtgtacacaatatactgaacaaacaaccaagacacaagtgaatgtaatttggcg

SEQ ID NO: 16679 - protein, 270 aa, Zea mays subsp. mays
  misc_feature (1)..(270): Ceres Seq. ID no. 12353687
SDATCSSFLSSLQRVGKQLPAMAMASSSSGLRSCSALGVPSLLAPSTSSSSRSGRLPFCAHATTSGRVTMSAEWMPGQPRPAHLDGSSPGDFGFDPLGLATVPENFERFKESEVYHCRWAMLAVPGVLVPEALGLGNWVKAQEWAAVPGGQATYLGAPVPWGTLPTILAVEFVAIAFAEHQRTMEKDPEKKKYPGGAFDPLGFSRDPAKLEEYKLKEIKNGRLAMLAFVGFCVQQSAYPGTGPLENLAAHLADPWHNNIGDIIIPRSISP

SEQ ID NO: 16680 - protein, 249 aa, Zea mays subsp. mays
  misc_feature (1)..(249): Ceres Seq. ID no. 12353688
MAMASSSSGLRSCSALGVPSLLAPSTSSSSRSGRLPFCAHATTSGRVTMSAEWMPGQPRPAHLDGSSPGDFGFDPLGLATVPENFERFKESEVYHCRWAMLAVPGVLVPEALGLGNWVKAQEWAAVPGGQATYLGAPVPWGTLPTILAVEFVAIAFAEHQRTMEKDPEKKKYPGGAFDPLGFSRDPAKLEEYKLKEIKNGRLAMLAFVGFCVQQSAYPGTGPLENLAAHLADPWHNNIGDIIIPRSISP

SEQ ID NO: 16681 - protein, 247 aa, Zea mays subsp. mays
  misc_feature (1)..(247): Ceres Seq. ID no. 12353689
MASSSSGLRSCSALGVPSLLAPSTSSSSRSGRLPFCAHATTSGRVTMSAEWMPGQPRPAHLDGSSPGDFGFDPLGLATVPENFERFKESEVYHCRWAMLAVPGVLVPEALGLGNWVKAQEWAAVPGGQATYLGAPVPWGTLPTILAVEFVAIAFAEHQRTMEKDPEKKKYPGGAFDPLGFSRDPAKLEEYKLKEIKNGRLAMLAFVGFCVQQSAYPGTGPLENLAAHLADPWHNNIGDIIIPRSISP

SEQ ID NO: 16682 - DNA, 873 bp, Zea mays subsp. mays
  misc_feature (1)..(873): Ceres Seq. ID no. 12353716
gtttgatgtgagccttggagtgctagattctgtttccattgtccattctcagtcacctgagcagccgaacgttctcagtcacctgcaggtcaggaaccaacgatgccgggcatccaccgctacaccgccgagctgctggtgctgctcaccatcattacccgcctcctgctgctggccacggcgtggccggcattgcccgccccagcgtcgctcgagccgtcgctgcttttcccgtccgccggcgccacctcgcccacgcagacccagtcagccggggtcgcctccacaatcccggccttcccggagcagtcagaggccgccgcggctgctgccacctccgtctgccagctcaccccgtcgcctccgctccttcccgctgtcctagcatcgtgcaacgccaatgccggcgggagtggcgtgacgctcccgccgcgcctaagatgctgcccggcgctcgccgcgtggctgtacactgcgtacgcgcccaccgcgctctcgggcagcggcgtcggagaagcgtcggtggccgcgtcggccgaggccgccgccgtggtggacttgccagtgctgccggacgacgcggaggaatgcgccggcgcggcggaccgtgcgctgcgggcggccggggtggcgctaccgcggccgcattggggcgaaagcaccggcactggcaacgggacggcggcgtgcgacgtagcgttctgctactgcggggtgaggctgcggcggcctgcgtgcgcggcgccgcagggccggatggcaaggagactggagagggactgcgcgctgccggggctcgccggctgctccaggtgcctgcgggcgctcagcaagctgggtgggaggagcaacgccacgtcgtcggcgaaggcg

SEQ ID NO: 16683 - protein, 257 aa, Zea mays subsp. mays
  misc_feature (1)..(257): Ceres Seq. ID no. 12353717
MPGIHRYTAELLVLLTIITRLLLLATAWPALPAPASLEPSLLFPSAGATSPTQTQSAGVASTIPAFPEQSEAAAAAATSVCQLTPSPPLLPAVLASCNANAGGSGVTLPPRLRCCPALAAWLYTAYAPTALSGSGVGEASVAASAEAAAVVDLPVLPDDAEECAGAADRALRAAGVALPRPHWGESTGTGNGTAACDVAFCYCGVRLRRPACAAPQGRMARRLERDCALPGLAGCSRCLRALSKLGGRSNATSSAKA

SEQ ID NO: 16684 - protein, 144 aa, Zea mays subsp. mays
  misc_feature (1)..(144): Ceres Seq. ID no. 12353718
MLPGARRVAVHCVRAHRALGQRRRRSVGGRVGRGRRRGGLASAAGRRGGMRRRGGPCAAGGRGGATAAALGRKHRHWQRDGGVRRSVLLLRGEAAAACVRGAAGPDGKETGEGLRAAGARRLLQVPAGAQQAGWEEQRHVVGEG

SEQ ID NO: 16685 - DNA, 1377 bp, Zea mays subsp. mays
  misc_feature (1)..(1377): Ceres Seq. ID no. 12353719
gtgctccccccaggctcctcttcctcgctttccctccaccccgggcgcaaaccctaaccctaccgtcgctcgccccgcggcgtctgccaatggcgcgccccgtgtgagtgtgcgcgagagaggggtagaccttgaggccgctacccggggaggagagcgagagatgtataaacaggggggagcggggggaggggctgggctggaccggaagcggatcaacgacgcgctggataagcatctcgagaaggcggtcgcgtcgccgtccacgtcgagggggtcggcgggcggcgggcgcgaccaccaccgcctcgtcgtgccgtcctccgtgtcgtccatccccaagggccgctgctccgaaggggagtctgattctgatagtgaagcatcggatgttagcggctctgatggagaagacacctcatggatttcatggtattgcaacttaagagggaatgagttcttctgtgaagtcgacgatgattatattcaagacgacttcaacctttgtggtctcagcagccaagttccttattatgattatgctctcgatctcattttagatatcgagtcatctcatggtgatatgttcactgaggaacaaaatgagctcgtagaatcagctgcagagatgctttatgggctgatccatgcacgatacattctgaccagtaaagggctggctgcaatgctggagaagtataggaactatgactttgggcggtgcccgcgtgtttactgctgtggtcaaccatgcctgccagttggacaatcagacatccatcgatctagtaccgtgaagatatactgccccaagtgtgaagacatctactacccacggtccaagtaccaaggcaacatcgacggcgcatactttgggacaacgttccctcatctgttcctgatgacatacgagcacctcaagccacagaagctctcgcagcgctatgttcctcgtgtctttggcttcaagctccacaagccatgaacctcatgtatttgtcttttaaactcctcaagacgtggcactgggggcatgcgggagttttgcaatccttgaagacttgcatataagagcgccattggcaggtcagtggattggtaaaattctatcatgctgcagcgtgcttgtaccttagctggctggcacctatccaacatttgaatgtagctctaaggatatcaatgttgtaacctaactgctattgttctttgattagtaaaccaggagccccccctacaatgtagaatatggcaattatttatggctttgcagaaaataacaacccttcatctgcttggttctcgtaagatggccctttaattttgtagtttgcgaacttctattttgaaatgtgatttgcaaaggtgcgtcatctc

SEQ ID NO: 16686 - protein, 327 aa, Zea mays subsp. mays
  misc_feature (1)..(327): Ceres Seq. ID no. 12353720
CSPQAPLPRFPSTPGANPNPTVARPAASANGAPRVSVRERGVDLEAATRGGEREMYKQGGAGGGAGLDRKRINDALDKHLEKAVASPSTSRGSAGGGRDHHRLVVPSSVSSIPKGRCSEGESDSDSEASDVSGSDGEDTSWISWYCNLRGNEFFCEVDDDYIQDDFNLCGLSSQVPYYDYALDLILDIESSHGDMFTEEQNELVESAAEMLYGLIHARYILTSKGLAAMLEKYRNYDFGRCPRVYCCGQPCLPVGQSDIHRSSTVKIYCPKCEDIYYPRSKYQGNIDGAYFGTTFPHLFLMTYEHLKPQKLSQRYVPRVFGFKLHKP

SEQ ID NO: 16687 - protein, 273 aa, Zea mays subsp. mays
  misc_feature (1)..(273): Ceres Seq. ID no. 12353721
MYKQGGAGGGAGLDRKRINDALDKHLEKAVASPSTSRGSAGGGRDHHRLVVPSSVSSIPKGRCSEGESDSDSEASDVSGSDGEDTSWISWYCNLRGNEFFCEVDDDYIQDDFNLCGLSSQVPYYDYALDLILDIESSHGDMFTEEQNELVESAAEMLYGLIHARYILTSKGLAAMLEKYRNYDFGRCPRVYCCGQPCLPVGQSDIHRSSTVKIYCPKCEDIYYPRSKYQGNIDGAYFGTTFPHLFLMTYEHLKPQKLSQRYVPRVFGFKLHKP

SEQ ID NO: 16688 - DNA, 1380 bp, Zea mays subsp. mays
  misc_feature (1)..(1380): Ceres Seq. ID no. 12353756
aaccatttcttcttcctttttctatatcgcgttacgtccctacccagcgatctaggccgccgcctctcctactgcatctccctcgctctcgtcgcctcgttcgcttcgcctccgccccgccccgccccgagcagagcgcagccctatccggagctgggatggcggacgcgaagcagcagcagcagcagcagcagccacagcaggcggcagcggcagccaccggcgtgtggaagacggtcaagcccttcgttaacggcggggcctctgggatgctcgcgacctgcgtcatccagcctatcgacatggtcaaggtgaggatccagttgggtgagggctctgctggtcaggtcacaaggaacatgcttgcaaatgagggtgtccgttctttctacaagggtttgtccgccggattgctgaggcaagcgacgtacacgactgctcgtcttggatcctttagggttctaactaacaaagcagttgaaaagaatgaagggaagccattgcctctatttcagaaagcttttattggtctgactgctggtgcaattggtgcttgtgttggtagtcctgctgatctggcactcattagaatgcaagccgattcgaccctgccagttgcacaacgacgcaactataaatgctttccatgcactctaccgtatcagtggtgatgagggagtccttgcgctttggaagggtgcaggtccaactgtggtgagagctatggcactcaatatgggtatgcttgcttcctatgaccagagtgtcgagctatttagggacaaatttggcgcaggagaaatttctactgttgttggagccagcgctgtttctggattctttgcctcagcatgcagtttgccctttgactatgtgaagacacagattcagaagatgcaacctgatgcgaatggcaagtacccatacacagggtctttggactgtgctgtgaagaccttcaagagcggtggcccattcaagttctacactggtttcccggtgtactgcgtcaggattgcaccccatgtcatgatgacctggatattcttgaatcagatccagaagtttgagaagaagatcggcatataggattcccatgggacggatacagggttgacagttctatgctattactgcttgactctgtaataacattccagctgctttcgcaccatggtagttggttttggtagagacaagtctgttacaattttttaccttagctttccaattattgtgttgcaataatcgaattaattgttgctgggggatttttttggggggttgggagggtggcatgcttttgttggctgggatgtagccataaggagagggggatactgcctagttatgtcattgaatggaattggaccatatttt

SEQ ID NO: 16689 - protein, 222 aa, Zea mays subsp. mays
  misc_feature (1)..(222): Ceres Seq. ID no. 12353757
PFLLPFSISRYVPTQRSRPPPLLLHLPRSRRLVRFASAPPRPEQSAALSGAGMADAKQQQQQQQPQQAAAAATGVWKTVKPFVNGGASGMLATCVIQPIDMVKVRIQLGEGSAGQVTRNMLANEGVRSFYKGLSAGLLRQATYTTARLGSFRVLTNKAVEKNEGKPLPLFQKAFIGLTAGAIGACVGSPADLALIRMQADSTLPVAQRRNYKCFPCTLPYQW

SEQ ID NO: 16690 - protein, 170 aa, Zea mays subsp. mays
  misc_feature (1)..(170): Ceres Seq. ID no. 12353758
MADAKQQQQQQQPQQAAAAATGVWKTVKPFVNGGASGMLATCVIQPIDMVKVRIQLGEGSAGQVTRNMLANEGVRSFYKGLSAGLLRQATYTTARLGSFRVLTNKAVEKNEGKPLPLFQKAFIGLTAGAIGACVGSPADLALIRMQADSTLPVAQRRNYKCFPCTLPYQW

SEQ ID NO: 16691 - protein, 133 aa, Zea mays subsp. mays
  misc_feature (1)..(133): Ceres Seq. ID no. 12353759
MLATCVIQPIDMVKVRIQLGEGSAGQVTRNMLANEGVRSFYKGLSAGLLRQATYTTARLGSFRVLTNKAVEKNEGKPLPLFQKAFIGLTAGAIGACVGSPADLALIRMQADSTLPVAQRRNYKCFPCTLPYQW

SEQ ID NO: 16692 - DNA, 1387 bp, Zea mays subsp. mays
  misc_feature (1)..(1387): Ceres Seq. ID no. 12353776
attcagtgtagccagcaggtagctgcatcagctagctagctagatagacacttagacaggcataaaaccatctcgggcactcgttccctgcacaagtgtaggagagagctgaggcctgctggccatggacaccaccagcaagaaagcctacggggttgccgtcgtcatacagctcatctacaccggcatgtacgtcgtctccaaggcggcattcgaccatggcatgagcacctacgtgttcatcttctaccgccaggcggccgccactgcgctgttgctccccatagccattgtgcttgaaaggaagaatgcaccacccatgtcattcaggctgtttctgaagctgttcttctatgcattgcttggcaacacattgagcatgaatctgtacaacataagcctcaagtacacctctgcaacagtggcatcggcaacgagcaactctgtccctgtggtcaccttcttcctggcagtcctgttaaggctggaagtggttcggctgagaagcccgtcaggcatggcgaaggcggcgggcgtggcgctgtgcctggccggggtcctgaccatcgcgctgtacacggggccgtcgatgagcccggtgaaccaccaccgcgccttcgcgtcgcaccagcagcacccccatccccatgccgatggcggcggcggcggcaaggggacgtggatcaagggcacgttcctgatgctgctgtccaacacgacgtggtccctctggatcgtgctgcaggcgtcgctgctcaaggagtaccccaacaagctgttgtccacgctggtgcagtgcgcgctcagcaccgcccagtccttcctcctcgccgtcgccgtcgagcgggaccccgccgcctggaagctgcagctcgacgtcggcctcctcgccgtcgcctactccggtctggtggtgacgggcgtgtcgttctacctgcaggcgtggtgcatcgagaagcgcgggcccgtgttcctggccatgtccaacccgctgggcctgctgctcaccatcttctgctcctccttcttcctcggcgagatcgtgcgcctgggcagcctcctcggcagcggcctcctcgtcggagggctctacagcgtcctctggggcaagagcaaggaccacctccaccaggagcatcaagacgacgaagagaagcagcagcagcagccgagcgcagcaggcggagacaaccagaagcagctcaaggagcagttcgcaatggagccatcatcgccactgcgccatcagtccggatgatgaggaatggtctacgcgtgtatgtgtgtgagtaggttctacgtacgtgcctatatatgtcttaatgtctatgtggtgggtctgggcgtatccaactccgatgcacatggatggtctcttgttcgcccg

SEQ ID NO: 16693 - protein, 377 aa, Zea mays subsp. mays
  misc_feature (1)..(377): Ceres Seq. ID no. 12353777
MDTTSKKAYGVAVVIQLIYTGMYVVSKAAFDHGMSTYVFIFYRQAAATALLLPIAIVLERKNAPPMSFRLFLKLFFYALLGNTLSMNLYNISLKYTSATVASATSNSVPVVTFFLAVLLRLEVVRLRSPSGMAKAAGVALCLAGVLTIALYTGPSMSPVNHHRAFASHQQHPHPHADGGGGGKGTWIKGTFLMLLSNTTWSLWIVLQASLLKEYPNKLLSTLVQCALSTAQSFLLAVAVERDPAAWKLQLDVGLLAVAYSGLVVTGVSFYLQAWCIEKRGPVFLAMSNPLGLLLTIFCSSFFLGEIVRLGSLLGSGLLVGGLYSVLWGKSKDHLHQEHQDDEEKQQQQPSAAGGDNQKQLKEQFAMEPSSPLRHQSG

SEQ ID NO: 16694 - protein, 356 aa, Zea mays subsp. mays
  misc_feature (1)..(356): Ceres Seq. ID no. 12353778
MYVVSKAAFDHGMSTYVFIFYRQAAATALLLPIAIVLERKNAPPMSFRLFLKLFFYALLGNTLSMNLYNISLKYTSATVASATSNSVPVVTFFLAVLLRLEVVRLRSPSGMAKAAGVALCLAGVLTIALYTGPSMSPVNHHRAFASHQQHPHPHADGGGGGKGTWIKGTFLMLLSNTTWSLWIVLQASLLKEYPNKLLSTLVQCALSTAQSFLLAVAVERDPAAWKLQLDVGLLAVAYSGLVVTGVSFYLQAWCIEKRGPVFLAMSNPLGLLLTIFCSSFFLGEIVRLGSLLGSGLLVGGLYSVLWGKSKDHLHQEHQDDEEKQQQQPSAAGGDNQKQLKEQFAMEPSSPLRHQSG

SEQ ID NO: 16695 - protein, 344 aa, Zea mays subsp. mays
  misc_feature (1)..(344): Ceres Seq. ID no. 12353779
MSTYVFIFYRQAAATALLLPIAIVLERKNAPPMSFRLFLKLFFYALLGNTLSMNLYNISLKYTSATVASATSNSVPVVTFFLAVLLRLEVVRLRSPSGMAKAAGVALCLAGVLTIALYTGPSMSPVNHHRAFASHQQHPHPHADGGGGGKGTWIKGTFLMLLSNTTWSLWIVLQASLLKEYPNKLLSTLVQCALSTAQSFLLAVAVERDPAAWKLQLDVGLLAVAYSGLVVTGVSFYLQAWCIEKRGPVFLAMSNPLGLLLTIFCSSFFLGEIVRLGSLLGSGLLVGGLYSVLWGKSKDHLHQEHQDDEEKQQQQPSAAGGDNQKQLKEQFAMEPSSPLRHQSG

SEQ ID NO: 16696 - DNA, 1468 bp, Zea mays subsp. mays
  misc_feature (1)..(1468): Ceres Seq. ID no. 12353780
gcatctccctttaccattgtctcccccctcgtccgacctcctcgccgccgcagacgaccgccgccgccgctgccgctgccgctgccgctgcgaaccctttgtgaatcttcgttgtccgggctgtgtggggcaggcatggcgctccggaggctgctgcaggggagcgtcctgccgcggataatcggcagggatttggcaccggccgtggcgccgttttcaacggagtccggggagaccattcgtgccacgctctttcccggcgatggcatcgggccagagatcgctgagtctgtcaagcaggtattcaatgttgcaggggtaccaattgaatgggaagaacactatgtcggtacagaagttgatcccagaacagagagttttttgacttgggaaagcctggagtcagtgcgtagaaacaaagttggcttgaaaggacctatggctacacctattggaaagggccatcgatctttgaatcttacattaaggaaagaacttgggctctatgccaatgtcagaccttgcaacagcctcccaggttacaagaccagatacgatgatgttaaccttgtaacaattcgtgaaaatactgaaggagaatatagtggtcttgagcatcaggttgtgagaggtgttgtggaaagtttgaaaattattacacgccaagcaagtttgagagtggcagagtatgctttccattatgccaaggccaatggccgggaaagagtctctgcgatccacaaagccaatattatgaggaagacagatggtcttttcctcaagtgttgccgtgaagtgtctgaaaagtaccctgaaattcaatacgaggaggtcatcattgacaattgctgtatgacgcttgtgaagaatcctggtctttttgacgtattagtgatgccaaatctctatggtgacattattagtgatctatgtgctggtttgatcgggggcttgggcctaacacccagttgcaatattggtgaaggtggcatttgtctggcagaagctgttcatggttctgctcctgatattgctggcaagaacctcgcgaacccgactgctcttatgctgagtgctgtcatgttgttgcgccacatgcaattcaacgacaaagcagaccggatccacaacgccatcctccagaccatcgccgaggggaagtacaggactgctgatcttggtggaaaggcatcgacatcagagtttacaaacgcagtctgtgatcacatctgagaaacggatgtgattcttccttctgattgttttgtcatcctaatatttttttgtcacatatgagaggagctttagctttaagaggttaactggcagcacctcgaacttctttggggtgtttaacacggtttgagaccgtcaaataattttgtcacatttcttgcggttcagaaattctttcaacattggaatggagccaagaattgtctgtaataatcaacatcagcattataac

SEQ ID NO: 16697 - protein, 410 aa, Zea mays subsp. mays
  misc_feature (1)..(410): Ceres Seq. ID no. 12353781
ASPFTIVSPLVRPPRRRRRPPPPLPLPLPLRTLCESSLSGLCGAGMALRRLLQGSVLPRIIGRDLAPAVAPFSTESGETIRATLFPGDGIGPEIAESVKQVFNVAGVPIEWEEHYVGTEVDPRTESFLTWESLESVRRNKVGLKGPMATPIGKGHRSLNLTLRKELGLYANVRPCNSLPGYKTRYDDVNLVTIRENTEGEYSGLEHQVVRGVVESLKIITRQASLRVAEYAFHYAKANGRERVSAIHKANIMRKTDGLFLKCCREVSEKYPEIQYEEVIIDNCCMTLVKNPGLFDVLVMPNLYGDIISDLCAGLIGGLGLTPSCNIGEGGICLAEAVHGSAPDIAGKNLANPTALMLSAVMLLRHMQFNDKADRIHNAILQTIAEGKYRTADLGGKASTSEFTNAVCDHI

SEQ ID NO: 16698 - protein, 365 aa, Zea mays subsp. mays
  misc_feature (1)..(365): Ceres Seq. ID no. 12353782
MALRRLLQGSVLPRIIGRDLAPAVAPFSTESGETIRATLFPGDGIGPEIAESVKQVFNVAGVPIEWEEHYVGTEVDPRTESFLTWESLESVRRNKVGLKGPMATPIGKGHRSLNLTLRKELGLYANVRPCNSLPGYKTRYDDVNLVTIRENTEGEYSGLEHQVVRGVVESLKIITRQASLRVAEYAFHYAKANGRERVSAIHKANIMRKTDGLFLKCCREVSEKYPEIQYEEVIIDNCCMTLVKNPGLFDVLVMPNLYGDIISDLCAGLIGGLGLTPSCNIGEGGICLAEAVHGSAPDIAGKNLANPTALMLSAVMLLRHMQFNDKADRIHNAILQTIAEGKYRTADLGGKASTSEFTNAVCDHI

SEQ ID NO: 16699 - protein, 264 aa, Zea mays subsp. mays
  misc_feature (1)..(264): Ceres Seq. ID no. 12353783
MATPIGKGHRSLNLTLRKELGLYANVRPCNSLPGYKTRYDDVNLVTIRENTEGEYSGLEHQVVRGVVESLKIITRQASLRVAEYAFHYAKANGRERVSAIHKANIMRKTDGLFLKCCREVSEKYPEIQYEEVIIDNCCMTLVKNPGLFDVLVMPNLYGDIISDLCAGLIGGLGLTPSCNIGEGGICLAEAVHGSAPDIAGKNLANPTALMLSAVMLLRHMQFNDKADRIHNAILQTIAEGKYRTADLGGKASTSEFTNAVCDHI

SEQ ID NO: 16700 - DNA, 1140 bp, Zea mays subsp. mays
  misc_feature (1)..(1140): Ceres Seq. ID no. 12353784
atcctgtccccctcccacctttcccttccccgccgctctcgcttcgcttgcccgcacaccgagatttcctgcccgctcgttccgctgctctcatcgactcctcctgcgtgcctgccgaccggtccgaggcacgccgcggcggaggctctgccggccgggtcgtcggattcggccttaggttggttggttgggttgggtcgcatgtccacggcggtggcgcggccggcgcacggcggattccggcggtcggggagcgggaagccggatccggacgaggcggacaggatgacgcggagcgccaacgggtacttggtccaagaagaggaggaggaagagcatggcgaagaggcggcggcgaggagagaggatgaggacgaggaagaggaagaggaggaggcggaggcggtgtcggaggcctcgtcgatcggggcggcgtcgtccgacagctcctcctccatcggggagaactccgcgtccgacaaggaggaggaggaggaggaggttgagagtaaggcgcaggggcttggcatgatggggctggccacgctcgaatccttggatgatgccctgccctccaagcggggcctgtccagcttctacgcgggcaagtccaagtcgttcacgagcctggcggaggccgcggcggcggcggccgccagggagatcgccaagccggagaacccgttcaacaagcggcggcgcgtgctgcaggcgtggtcgcggcggcgggcgtcgtgcagcgcgctggccgccgcgtacctgccgccgctgctggccccggaccacgccgtggtggaggaggacgacgaggagggcgcggacgacgaggaggaggaggacgaggatgaggagcatggtggtggcggcggcgggctcaggggcacgaggaagccgcccacgttcccgtccccgcggctgagcgtgcacgtcgccgccgccggccagatggcgcggaacgggtcgtttcggtccccgaggtccttctccatgacggatctccacagcgccgccggctacgagtagccccggcgggcgggcggacaggattagagagtgctgatgtgttctaggtgcttttgttttactggtgatgtcgccattggtgctgccattaattactgctatatgatcatcattatg

SEQ ID NO: 16701 - protein, 340 aa, Zea mays subsp. mays
  misc_feature (1)..(340): Ceres Seq. ID no. 12353785
ILSPSHLSLPRRSRFACPHTEISCPLVPLLSSTPPACLPTGPRHAAAEALPAGSSDSALGWLVGLGRMSTAVARPAHGGFRRSGSGKPDPDEADRMTRSANGYLVQEEEEEEHGEEAAARREDEDEEEEEEEAEAVSEASSIGAASSDSSSSIGENSASDKEEEEEEVESKAQGLGMMGLATLESLDDALPSKRGLSSFYAGKSKSFTSLAEAAAAAAAREIAKPENPFNKRRRVLQAWSRRRASCSALAAAYLPPLLAPDHAVVEEDDEEGADDEEEEDEDEEHGGGGGGLRGTRKPPTFPSPRLSVHVAAAGQMARNGSFRSPRSFSMTDLHSAAGYE

SEQ ID NO: 16702 - protein, 273 aa, Zea mays subsp. mays
  misc_feature (1)..(273): Ceres Seq. ID no. 12353786
MSTAVARPAHGGFRRSGSGKPDPDEADRMTRSANGYLVQEEEEEEHGEEAAARREDEDEEEEEEEAEAVSEASSIGAASSDSSSSIGENSASDKEEEEEEVESKAQGLGMMGLATLESLDDALPSKRGLSSFYAGKSKSFTSLAEAAAAAAAREIAKPENPFNKRRRVLQAWSRRRASCSALAAAYLPPLLAPDHAVVEEDDEEGADDEEEEDEDEEHGGGGGGLRGTRKPPTFPSPRLSVHVAAAGQMARNGSFRSPRSFSMTDLHSAAGYE

SEQ ID NO: 16703 - protein, 245 aa, Zea mays subsp. mays
  misc_feature (1)..(245): Ceres Seq. ID no. 12353787
MTRSANGYLVQEEEEEEHGEEAAARREDEDEEEEEEEAEAVSEASSIGAASSDSSSSIGENSASDKEEEEEEVESKAQGLGMMGLATLESLDDALPSKRGLSSFYAGKSKSFTSLAEAAAAAAAREIAKPENPFNKRRRVLQAWSRRRASCSALAAAYLPPLLAPDHAVVEEDDEEGADDEEEEDEDEEHGGGGGGLRGTRKPPTFPSPRLSVHVAAAGQMARNGSFRSPRSFSMTDLHSAAGYE

SEQ ID NO: 16704 - DNA, 1212 bp, Zea mays subsp. mays
  misc_feature (1)..(1212): Ceres Seq. ID no. 12353792
attacgcaccttcacataacactgcaaaagcactcctctcttcgtcctccccctcccacctccatcccatcacataccataccattccataccaccagagaagaaccagtctcgctcgctcccaactcccaagccaagccggatcccaaatcggcacagcgcacccactccgctcggtcccttcgttcacccccatcatccatccatccatccagccatgggcggcaaggactgcggcaaccacggcgaggacgacctgcggcggtcgtgccggcgcctgctagcgatcctcctagtcctggccctgatcgtgggcgtgatcgcgctgatcatctacctggtggtccggcccacgcacccgcgcttctacctacaggacgcgtcgctccagcagctagacctgtccaactccaccaccgcctcctccccctccgcgtcctcgtccctcctctccacgacgctgcaggtgacgctggcctcgcgcaacccgaacgagcgcgtgggggtgtactacgaccggctggacgtgtacgcgtcgtacaagtaccagcaggtgacggtggccgcggcgctgccggccgtgtaccagggccacggcgacgtggacgtgtggtcgcccgtgctgtcgggcgggcccggcgtccccttcgcgccctacctcgccgacgcgctccgccaggactgccaggcgggctacctcgtcctccaggtcaaggtcgacggccgcgtgcggtggaaggtcggcagctggatctccggccactaccacctcttcgtcacctgccccgcgttcctcgtcaccgccggcggcaacggcgcccccggcgcttccgggttcaggttccagaccaccacctactgccacgtcgaagtttaatagattaggagcgagaggaggaggagggaggggaaggaagcanagagaccatggtccatggctctgctgctcctcctgctgccgttgcctggtgtggtaataactctctctatctctctctctgtccgctgctggcgttactgctgcagtgatgcgggatgtaaaggaggggtaaaaaagttcctttcgttttcgcctccctcttttttttttgttttttttttttttgcatcttctccttcacctttccatatactactagtatgctctgtcgactgttgttcaaaggaagcttccaattgtcaataaacattttggatcggaggatcaattgc

SEQ ID NO: 16705 - protein, 294 aa, Zea mays subsp. mays
  misc_feature (1)..(294): Ceres Seq. ID no. 12353793
ITHLHITLQKHSSLRPPPPTSIPSHTIPFHTTREEPVSLAPNSQAKPDPKSAQRTHSARSLRSPPSSIHPSSHGRQGLRQPRRGRPAAVVPAPASDPPSPGPDRGRDRADHLPGGPAHAPALLPTGRVAPAARPVQLHHRLLPLRVLVPPLHDAAGDAGLAQPERARGGVLRPAGRVRVVQVPAGDGGRGAAGRVPGPRRRGRVVARAVGRARRPLRALPRRRAPPGLPGGLPRPPGQGRRPRAVEGRQLDLRPLPPLRHLPRVPRHRRRQRRPRRFRVQVPDHHLLPRRSLID

SEQ ID NO: 16706 - protein, 219 aa, Zea mays subsp. mays
  misc_feature (1)..(219): Ceres Seq. ID no. 12353794
MGGKDCGNHGEDDLRRSCRRLLAILLVLALIVGVIALIIYLVVRPTHPRFYLQDASLQQLDLSNSTTASSPSASSSLLSTTLQVTLASRNPNERVGVYYDRLDVYASYKYQQVTVAAALPAVYQGHGDVDVWSPVLSGGPGVPFAPYLADALRQDCQAGYLVLQVKVDGRVRWKVGSWISGHYHLFVTCPAFLVTAGGNGAPGASGFRFQTTTYCHVEV

SEQ ID NO: 16707 - DNA, 860 bp, Zea mays subsp. mays
  misc_feature (1)..(860): Ceres Seq. ID no. 12353809
catccaaaaaaccagaagctagaagcctagaacagccaagaaaagccgaaacaacaacaatcccaatcccccccccccccccgcccnntgtcactcaaaactcgaccaacaatgtcgctgattcgccgtggaagcgcattcgaccccttctccctcgacctctgggaccccttccagggctttcccttcggctctggaagcagcagcagcagcagcctgttcccctcgttcggaggcaccaccaccagctcggagacggccgccttcgccggcgctcgcgtcgactggaaggagacgccggaggcgcacgtgttcaagaccgacgtgccggggctgaagaaggaggaggttaaggtggagctggaggacggcaacgtgctccagatcagcggcgagcgcagcaaggagcaggaggagaagagggacacctggcaccgcgtggagcgcagcagcggcaagttcctgcgcaggttccgcctgccggagaacgccaggacggagcagatcagtgcgtccatggagaacggcgtgctcaccgtcaccgtgcctaaggaggaggccaagaaggccgacgtcaagtctatccagatctccggctagtatgctcaagctcacaaccgatggtgtgccgtcttcgtcttgtcttcacatgccgggggtccataaaatgccagcgtccgtgtaatgtacttgtcacagtgtcagtgtattgtactggtatcatggttgtcttgagtagcgtgtgttgtggctattgtgttccgaacgatattgaagtctcatccgtcgtgtatcagtgtcgtctgtaacgaacccagttttaaaacatttcgaagtgagttgcttggtactcgtaaact

SEQ ID NO: 16708 - protein, 162 aa, Zea mays subsp. mays
  misc_feature (1)..(162): Ceres Seq. ID no. 12353810
MSLIRRGSAFDPFSLDLWDPFQGFPFGSGSSSSSSLFPSFGGTTTSSETAAFAGARVDWKETPEAHVFKTDVPGLKKEEVKVELEDGNVLQISGERSKEQEEKRDTWHRVERSSGKFLRRFRLPENARTEQISASMENGVLTVTVPKEEAKKADVKSIQISG

SEQ ID NO: 16709 - protein, 116 aa, Zea mays subsp. mays
  misc_feature (1)..(116): Ceres Seq. ID no. 12353811
  misc_feature (29)..(29): Xaa is any aa, unknown or other
SKKPEARSLEQPRKAETTTIPIPPPPPPXVTQNSTNNVADSPWKRIRPLLPRPLGPLPGLSLRLWKQQQQQPVPLVRRHHHQLGDGRLRRRSRRLEGDAGGARVQDRRAGAEEGGG

SEQ ID NO: 16710 - DNA, 667 bp, Zea mays subsp. mays
  misc_feature (1)..(667): Ceres Seq. ID no. 12353842
aatcgtccatccgtatttccgtcacaactcacaacccgagccccccaaacccgaagcagcaggagctcccctgaccttgctccgcctccgatcaaggaaaaggaagatgagctactacggccagcagccccccgtcggcgtcccgccgcagcaaggctacccggggaaggacggctacccgccagcggggtacccgccggccggctaccccccgccggcgcagggctacccgcagcagggttacccacagcagggctacccgccgcagtacgcgcagccgcctccacagcagcagcagagcagcgggccttccttcatggaaggatgcttggctgccctctgctgctgctgcctcctggacgcctgcttctgacggatccatccgtgccgggttcaacacggctgcaagtgaagcaacaagcttacggaagagctggaactgggccgtgctattctagctttgtcctgcgttatcgccctcttttcttttcttttcttttttttttctctctctctctctctctgttataagactactggtactctgtcgatgtcgattggattagactagggctggtgtgtattctgtggatgctccgtgtttctggtgggattcaagttcaaacctgggattattgtatttcttctacctgttactctgttgccg

SEQ ID NO: 16711 - protein, 176 aa, Zea mays subsp. mays
  misc_feature (1)..(176): Ceres Seq. ID no. 12353843
NRPSVFPSQLTTRAPQTRSSRSSPDLAPPPIKEKEDELLRPAAPRRRPAAARLPGEGRLPASGVPAGRLPPAGAGLPAAGLPTAGLPAAVRAAASTAAAEQRAFLHGRMLGCPLLLLPPGRLLLTDPSVPGSTRLQVKQQAYGRAGTGPCYSSFVLRYRPLFFSFLFFFSLSLSLL

SEQ ID NO: 16712 - protein, 123 aa, Zea mays subsp. mays
  misc_feature (1)..(123): Ceres Seq. ID no. 12353844
IVHPYFRHNSQPEPPKPEAAGAPLTLLRLRSRKRKMSYYGQQPPVGVPPQQGYPGKDGYPPAGYPPAGYPPPAQGYPQQGYPQQGYPPQYAQPPPQQQQSSGPSFMEGCLAALCCCCLLDACF

SEQ ID NO: 16713 - protein, 88 aa, Zea mays subsp. mays
  misc_feature (1)..(88): Ceres Seq. ID no. 12353845
MSYYGQQPPVGVPPQQGYPGKDGYPPAGYPPAGYPPPAQGYPQQGYPQQGYPPQYAQPPPQQQQSSGPSFMEGCLAALCCCCLLDACF

SEQ ID NO: 16714 - DNA, 1453 bp, Zea mays subsp. mays
  misc_feature (1)..(1453): Ceres Seq. ID no. 12353850
cagaaagcgacccgaccgtctctccgctccctccctcccccacaccacccacctgtgatctcccgcgcgggagatccgcccgccccatggcgccgtcgcgcccgctcatgcgggggatccgcccgccgcgcgtcttcccgacccgcggcggccgcgcctcgccgtacgctgtcgccctcacggccctgctcctcgtctccgccgccctcctcgcgctcatcgccttcggcgtcttctcgctccccgtgtcagcgccgaacgccgccgccaccaccacagccggaggggagaccgaatccgccgacacccgccccgcgcgcccccgcgcccgccgggacctgggggaggggctgggagagcgcggcgcgcagtggaccgaggtcatctcgtgggagccaagggcattcgtctaccacaacttcctgtctaaggaagagtgtgaatacctaattggattggccaagcctcacatggtaaaatcaacagttgtcgacagcactactggtaaaagcaaggacagcagggtccggacaagttcgggcatgtttcttcaaagaggaagggacaaggttattcgagtaattgaaaagaggattgcagactataccttcatacctgtagatcatggagagggactccaagtactgcattatgaagtcgggcagaagtatgagcctcactttgattattttcttgatgagtttaacaccaagaatggtggtcagaggatggctactcttctgatgtatctatcagatgttgaagaagggggcgagactattttccctgatgcaaatgtgaacgtcagttctttaccatggtacaatgagctttcagagtgtgccaagagaggcctttctgtcaaaccaaagatgggagatgcacttcttttctggagcatgaaaccagatgccaccctggacccattaagtttgcatgggggttgtcctgtgattagaggaaataaatggtcgtcaaccaagtggatgcatatccacgagtacaaagcttgagccttcaagactcgagagtcgagcgtaccaaagatggatctctatgcatgtgacttggggctgtctactgggttgacacccatgtatgctttacagacccactgaagctgtattctttgctcctttgttggaggggggagaattgcagataataggggccaataagcaggggccttgctcatccctgcagtatttttgggtctgatccttgctgacttggcttttgtcttttcttttctttttcttaccttgccgtaccccagctatagaggaatggtttagtgtctgggggcatagagtttgagattttgttttgtgccacacctgtgttactagtataagctttggtactaatgaataacgaggcctaagctcacatctactacatgaatggtgtaatattgttgaagatagaaagcatctaatgttcggtggttttg

SEQ ID NO: 16715 - protein, 336 aa, Zea mays subsp. mays
  misc_feature (1)..(336): Ceres Seq. ID no. 12353851
ESDPTVSPLPPSPTPPTCDLPRGRSARPMAPSRPLMRGIRPPRVFPTRGGRASPYAVALTALLLVSAALLALIAFGVFSLPVSAPNAAATTTAGGETESADTRPARPRARRDLGEGLGERGAQWTEVISWEPRAFVYHNFLSKEECEYLIGLAKPHMVKSTVVDSTTGKSKDSRVRTSSGMFLQRGRDKVIRVIEKRIADYTFIPVDHGEGLQVLHYEVGQKYEPHFDYFLDEFNTKNGGQRMATLLMYLSDVEEGGETIFPDANVNVSSLPWYNELSECAKRGLSVKPKMGDALLFWSMKPDATLDPLSLHGGCPVIRGNKWSSTKWMHIHEYKA

SEQ ID NO: 16716 - protein, 308 aa, Zea mays subsp. mays
  misc_feature (1)..(308): Ceres Seq. ID no. 12353852
MAPSRPLMRGIRPPRVFPTRGGRASPYAVALTALLLVSAALLALIAFGVFSLPVSAPNAAATTTAGGETESADTRPARPRARRDLGEGLGERGAQWTEVISWEPRAFVYHNFLSKEECEYLIGLAKPHMVKSTVVDSTTGKSKDSRVRTSSGMFLQRGRDKVIRVIEKRIADYTFIPVDHGEGLQVLHYEVGQKYEPHFDYFLDEFNTKNGGQRMATLLMYLSDVEEGGETIFPDANVNVSSLPWYNELSECAKRGLSVKPKMGDALLFWSMKPDATLDPLSLHGGCPVIRGNKWSSTKWMHIHEYKA

SEQ ID NO: 16717 - protein, 301 aa, Zea mays subsp. mays
  misc_feature (1)..(301): Ceres Seq. ID no. 12353853
MRGIRPPRVFPTRGGRASPYAVALTALLLVSAALLALIAFGVFSLPVSAPNAAATTTAGGETESADTRPARPRARRDLGEGLGERGAQWTEVISWEPRAFVYHNFLSKEECEYLIGLAKPHMVKSTVVDSTTGKSKDSRVRTSSGMFLQRGRDKVIRVIEKRIADYTFIPVDHGEGLQVLHYEVGQKYEPHFDYFLDEFNTKNGGQRMATLLMYLSDVEEGGETIFPDANVNVSSLPWYNELSECAKRGLSVKPKMGDALLFWSMKPDATLDPLSLHGGCPVIRGNKWSSTKWMHIHEYKA

SEQ ID NO: 16718 - DNA, 1010 bp, Zea mays subsp. mays
  misc_feature (1)..(1010): Ceres Seq. ID no. 12353858
agaaatcagcccgccgtgtcgtgcctactctctccttcccccaaaataaaagaagcgattttgaacggctccgctagctaaagcagggcaaggcggccggaaggcaggaaatccgtacgcacgccgaggtcgaggtcgaggtctcagcagggaggatggagacggagcagcagggcgtggttgcggcggtgaagccgacgctggccaaggggacgccgtcggcgtcgttccggctccgcaacgggagcctaaacgcggtgcgcctccgccgcgtgttcgacctgttcgaccgcaacggggacggcgagatcacggtggacgagctggcgcaggcgctggacgcgctgggcctagacgcggaccgcggcgggctggccgccaccgttggcacctacgtgcccgacggcgccgcaggcctccgctttgaggacttcgaccggctgcaccgcgcgctcggggacgccttcttcggagcgctggcgggccaggacgacgcggccgcggacggcgccggcgccggggaggacgacgacgagcaggagatgcgggaggcgttcagggtcttcgacgtcgacggcgacggcttcatctctgccgccgagctgcaggaggtgctcaagaagctcggcctccccgaggccagcagcatggccaacgtccgggagatgatctgcaacgtcgaccgcgacagcgacggccgcgtcgacttcgccgagttcaagtgcatgatgcaggggatcaccgtctggggcgcctgatcgatcccatcgtcgtcggagcggacgagagtgtgtgtgtgtgtgtcgaggagcgggggcgaggcaaattgaaccacaaagctccgtatttccttcctcgagacagcgatgcgactgcgaccttcattcttgtcttgtcttgtggtggcaccggtgtgtctctacttgtgtgtgctcttcttttaaattcattaattattaatcttgtcgtctttcgctggtcaagcagaggcgatgagaatggttcatgct

SEQ ID NO: 16719 - protein, 200 aa, Zea mays subsp. mays
  misc_feature (1)..(200): Ceres Seq. ID no. 12353859
METEQQGVVAAVKPTLAKGTPSASFRLRNGSLNAVRLRRVFDLFDRNGDGEITVDELAQALDALGLDADRGGLAATVGTYVPDGAAGLRFEDFDRLHRALGDAFFGALAGQDDAAADGAGAGEDDDEQEMREAFRVFDVDGDGFISAAELQEVLKKLGLPEASSMANVREMICNVDRDSDGRVDFAEFKCMMQGITVWGA

SEQ ID NO: 16720 - DNA, 875 bp, Zea mays subsp. mays
  misc_feature (1)..(875): Ceres Seq. ID no. 12353860
agccacagcccaccacctttgcttgctctgcccctccatcatcgccagcctgccagtgccgccgctaccgtagtaccgtaccctcagctagtcagctacctccatccaccagaccagaccataccagaccagaccagaccaatggccctgcgcctaccaatctcatcgtcccacgggctggcctccacgccggcgccaatctccacgacgacgtgccggccggccgtcttggcgacggccgcggcccagaagaggagcctgctgctggcgacggcctccgagacgaggggagtcgcgccggtgaggtccagcgggatcgagacgagcacggtgggtctgggatgtgaggccgtcaccgggcaggtcacggaggtcaacaaggacaccttctggcccatcgtcgaggccgccggcgacaaggtcgtcgtcctcgacatgtacaccgaatggtgcgggccttgcaaagtgatggctccgaaattccaggagatgtctgagaagaacctggatgttgtgttcctgaagctcgactgcaaccaggacaacaagccgcttgcgaaggagctgggcataaaggttgtgccaacgttcaagatcctcaagggtgggaaggtcgtgaaggaggtgaccggcgccaagatcgacgagctagcgcaagccatcgacacagtcaattcagactgacaaagaaagcaagtgatgcaactagctagtgtagacgatgaatgaatgagtccctggccggcaaggctgctagatacgtacgtacgtacgtactcatcaacaattaatgatggatgatggcaatggcaaatatacagtcaatgattcatatatgcatgcatggactgctatgctagctagcagccctttgt

SEQ ID NO: 16721 - protein, 227 aa, Zea mays subsp. mays
  misc_feature (1)..(227): Ceres Seq. ID no. 12353861
SHSPPPLLALPLHHRQPASAAATVVPYPQLVSYLHPPDQTIPDQTRPMALRLPISSSHGLASTPAPISTTTCRPAVLATAAAQKRSLLLATASETRGVAPVRSSGIETSTVGLGCEAVTGQVTEVNKDTFWPIVEAAGDKVVVLDMYTEWCGPCKVMAPKFQEMSEKNLDVVFLKLDCNQDNKPLAKELGIKVVPTFKILKGGKVVKEVTGAKIDELAQAIDTVNSD

SEQ ID NO: 16722 - protein, 180 aa, Zea mays subsp. mays
  misc_feature (1)..(180): Ceres Seq. ID no. 12353862
MALRLPISSSHGLASTPAPISTTTCRPAVLATAAAQKRSLLLATASETRGVAPVRSSGIETSTVGLGCEAVTGQVTEVNKDTFWPIVEAAGDKVVVLDMYTEWCGPCKVMAPKFQEMSEKNLDVVFLKLDCNQDNKPLAKELGIKVVPTFKILKGGKVVKEVTGAKIDELAQAIDTVNSD

SEQ ID NO: 16723 - protein, 114 aa, Zea mays subsp. mays
  misc_feature (1)..(114): Ceres Seq. ID no. 12353863
PQPTTFACSAPPSSPACQCRRYRSTVPSASQLPPSTRPDHTRPDQTNGPAPTNLIVPRAGLHAGANLHDDVPAGRLGDGRGPEEEPAAGDGLRDEGSRAGEVQRDRDEHGGSGM

SEQ ID NO: 16724 - DNA, 1449 bp, Zea mays subsp. mays
  misc_feature (1)..(1449): Ceres Seq. ID no. 12353868
ttttttttctactcccgcgcccctccgcgagctccctacccctcgcgctcacgccggcgacaagtttccgccagagttaggtagatcaggtgctgcgccggcagccgtggaagggatggaggacctcgcgagttcgcgtggcggcgggggatgcggtggtcttgatgcgcagatcgaacagctcatggagtgccgcccgctcccagagacggaggttaaaacactgtgtgagaaggccaaggagatattaatggaggaaagcaatgttcagccagttaaaagccctgtgacgatttgtggtgatattcatggccaattccatgatcttttagaacttttccggattggtgggaagtgtccagatacaaattatttgtttatgggtgattatgtggatcgtggctattactctgttgagacagtaacgcttttagttgcacttaaggtgcggtacccgcaacgcattacaattcttcgtggaaaccatgaaagtaggcagatcacacaggtgtatggcttctatgatgaatgcctacgaaaatatggcagtgcaaatgtctggaagatcttcactgatctttttgattattttccgttgacagcattggtggaatcagaaattttctgcctccatggtggtttatctccatccattgagaatcttgataacgttcgcagtttagaccgtgtccaagaggtccctcatgagggacctatgtgcgaccttctgtggtctgatccagacgatagatgtggctggggcatatctccacgtggtgctggatacacttttggccaagacatatcggagcagtttaatcacaccaacaatcttaaactcgtagctcgggctcaccagttggttatggagggatacaactgggcacatgaacaaaaggtggtgaccatattcagcgcacctaactactgttaccggtgcggcaacatggcgtccatcctcgaggtcgatgactgcaggaatcacacatttattcagtttgagccagctcctaggagaggtgaaccagacgtgacgcggaggacacctgattatttcctttgagttatctgccagaccatttttggaatttgcccaatgttggaatagtgatgctagccagtaacaatttttgttggatctatatgataacttaaccgaccagcaacagtaagaaaatgtggaagctgcatctgtcattgcaagaggtgctcgctaacagtaacaggtcgacgacctatacaccccaagctgtcaaaagatccgcttgtctacccaacccaccaagtggtgcctcccttgggctttgggacgtcgagtttacgctttcagcgtagagttgcctcagttctgtcttgtgtgtcagctagttttgtgtttgtgtcttgtgtggttgctcgttgtagcttctgtgattaaatgacaacagacaagctggtctcgagtgttgc

SEQ ID NO: 16725 - protein, 353 aa, Zea mays subsp. mays
  misc_feature (1)..(353): Ceres Seq. ID no. 12353869
FFSTPAPLRELPTPRAHAGDKFPPELGRSGAAPAAVEGMEDLASSRGGGGCGGLDAQIEQLMECRPLPETEVKTLCEKAKEILMEESNVQPVKSPVTICGDIHGQFHDLLELFRIGGKCPDTNYLFMGDYVDRGYYSVETVTLLVALKVRYPQRITILRGNHESRQITQVYGFYDECLRKYGSANVWKIFTDLFDYFPLTALVESEIFCLHGGLSPSIENLDNVRSLDRVQEVPHEGPMCDLLWSDPDDRCGWGISPRGAGYTFGQDISEQFNHTNNLKLVARAHQLVMEGYNWAHEQKVVTIFSAPNYCYRCGNMASILEVDDCRNHTFIQFEPAPRRGEPDVTRRTPDYFL

SEQ ID NO: 16726 - protein, 315 aa, Zea mays subsp. mays
  misc_feature (1)..(315): Ceres Seq. ID no. 12353870
MEDLASSRGGGGCGGLDAQIEQLMECRPLPETEVKTLCEKAKEILMEESNVQPVKSPVTICGDIHGQFHDLLELFRIGGKCPDTNYLFMGDYVDRGYYSVETVTLLVALKVRYPQRITILRGNHESRQITQVYGFYDECLRKYGSANVWKIFTDLFDYFPLTALVESEIFCLHGGLSPSIENLDNVRSLDRVQEVPHEGPMCDLLWSDPDDRCGWGISPRGAGYTFGQDISEQFNHTNNLKLVARAHQLVMEGYNWAHEQKVVTIFSAPNYCYRCGNMASILEVDDCRNHTFIQFEPAPRRGEPDVTRRTPDYFL

SEQ ID NO: 16727 - protein, 292 aa, Zea mays subsp. mays
  misc_feature (1)..(292): Ceres Seq. ID no. 12353871
MECRPLPETEVKTLCEKAKEILMEESNVQPVKSPVTICGDIHGQFHDLLELFRIGGKCPDTNYLFMGDYVDRGYYSVETVTLLVALKVRYPQRITILRGNHESRQITQVYGFYDECLRKYGSANVWKIFTDLFDYFPLTALVESEIFCLHGGLSPSIENLDNVRSLDRVQEVPHEGPMCDLLWSDPDDRCGWGISPRGAGYTFGQDISEQFNHTNNLKLVARAHQLVMEGYNWAHEQKVVTIFSAPNYCYRCGNMASILEVDDCRNHTFIQFEPAPRRGEPDVTRRTPDYFL

SEQ ID NO: 16728 - DNA, 1285 bp, Zea mays subsp. mays
  misc_feature (1)..(1285): Ceres Seq. ID no. 12353872
tcctccccgctccagcgcccctgcagttctcgctccactgacagctcgccgaggggccgcgccgcgctcgagacccgtcgatggcgaggcggagcctggcggtcgacgcaaccgcaggcgccgcatcccgggttcggttcgcgcccacctccaataacctgctcgtctcctcatgggattcggggctgcggttgtacgatgccgacgagggcacgctcagggtcaacgtggagtcagaggcggcattcctcgactgctgcttcgaggatgagtctgcagcgtttgcctgcggctctgatggatctgtgagaaggtacgacttccactcaggttcgcaggatacggtggggctccatgaagatgcactagcctgcattgagttctcttcactgaccggtcagattatgacaggcagccttgacaagaagctaaagctttgggattcaaaaacaagaaatgtaagcccgagcggcaccataaccttaaattcagatgtggcctcaatttctatatgcggcatttacatattagctgcagttgagagaaatgtttatctttatgacatgaggaatctaacaagaccagttgatgaaaaagactgtcctctggattatcaaattcgatgccttcatacttctctagagtggaatgcttatgttgctggctctgtggatggagttgttgcattgaagtatcttgatcgtggaacagatagagatttgggatatgcatttcgttgtcatccaaattccagaaacggaaaatggaatctggtccctgtaaattgcatctcagttcatccctgcaacagaactttcgttacgggagatgataaaggatgcactattgtttgggatgctcaattgaaaaagaagctgattgagcttccaatgtatttgggcagtgtggcgtcagtggcatacaaccataatggccaacttctggcggttgcctcaaactattttttagaagtataaagaggagcaacaccaccaggtattcattgaaactgtggagaacttcaaaggcaagtcccgtgtgggatagagccttctaacaaaacatgttctgttcatctgttgtattgtattttgtctaccatacatgttaaaggtcaccaagatgtgacagcatgttgtattatgttgtatgactaagcattttttttaggaaacgacataatatggctaagcaatacttgtatatattggttacatctagtctgagacagctgtggtgtgttgtaactcttttgagcttttgcaaccagtattgctgttctggt

SEQ ID NO: 16729 - protein, 298 aa, Zea mays subsp. mays
  misc_feature (1)..(298): Ceres Seq. ID no. 12353873
MARRSLAVDATAGAASRVRFAPTSNNLLVSSWDSGLRLYDADEGTLRVNVESEAAFLDCCFEDESAAFACGSDGSVRRYDFHSGSQDTVGLHEDALACIEFSSLTGQIMTGSLDKKLKLWDSKTRNVSPSGTITLNSDVASISICGIYILAAVERNVYLYDMRNLTRPVDEKDCPLDYQIRCLHTSLEWNAYVAGSVDGVVALKYLDRGTDRDLGYAFRCHPNSRNGKWNLVPVNCISVHPCNRTFVTGDDKGCTIVWDAQLKKKLIELPMYLGSVASVAYNHNGQLLAVASNYFLEV

SEQ ID NO: 16730 - protein, 190 aa, Zea mays subsp. mays
  misc_feature (1)..(190): Ceres Seq. ID no. 12353874
MTGSLDKKLKLWDSKTRNVSPSGTITLNSDVASISICGIYILAAVERNVYLYDMRNLTRPVDEKDCPLDYQIRCLHTSLEWNAYVAGSVDGVVALKYLDRGTDRDLGYAFRCHPNSRNGKWNLVPVNCISVHPCNRTFVTGDDKGCTIVWDAQLKKKLIELPMYLGSVASVAYNHNGQLLAVASNYFLEV

SEQ ID NO: 16731 - DNA, 1075 bp, Zea mays subsp. mays
  misc_feature (1)..(1075): Ceres Seq. ID no. 12353875
attgccaacgcaacagttccgatcctccacaccagcacccgccgccgccgcctcttcccttgcgcacctgctgctgtgcggatcggtgaggcggaggagtaggatggcgagcgcggccggaggcggagcggcgggggaaggggagtggcttaaggtatcccagctcaggcccatggtggaagcgcaggaccccaacgccaaggcagtggacaacctgacgctgcgtcggttcctgcgcgcgcgcgaccacgacgtggacaaggcctccgccatgttcctcaagttcctcaagtggcggagggaggcggcgcccggcggctccgtgccggaggagcaggtgaggagggagctgtcgcaggacaagctgtgcatgggcggcgtcgacagggccggccgccccatcctcgtcgccttcgcggccaggcacttctccgccggccgtgacatggcagagttcaagagttttgttgtctacttcttcgacaagatctgtgccagaatccccagagggcaggagaaattcctctgcatcgttgatctcaagggctgggggtactcaaactgtgacgtccgggcatacattgccgctatagagatcttgcagaactactacccggagcggctcggcaaggcgctgatgatccacgtgccctacatcttcatgaaggcgtggaagatgatctaccccttcatcgacaccaacaccagggacaagttcgtgttcgtggaggacaagagcctgcaggagacgctgcggcgggagatcgacgaggggcagctcccggagttcctcggcggcaagatggacgtgatcccactcaaggactatggcgtgcagcagcagcctcaggccgtgtaatagccatgccatgcgtagcatacacgagttgtggctaggagcatagcatggcaataactgtgtagctgctgtgaaagtgaaaatgaaacgttgcgctgtttagccgggtcaattgaccagcccaactgcagatctctgggctaccactatgaacagcaagaactgtttcccttatccttttcagccaaactaatcaaaccagaaaatgtttcttgt

SEQ ID NO: 16732 - protein, 285 aa, Zea mays subsp. mays
  misc_feature (1)..(285): Ceres Seq. ID no. 12353876
LPTQQFRSSTPAPAAAASSLAHLLLCGSVRRRSRMASAAGGGAAGEGEWLKVSQLRPMVEAQDPNAKAVDNLTLRRFLRARDHDVDKASAMFLKFLKWRREAAPGGSVPEEQVRRELSQDKLCMGGVDRAGRPILVAFAARHFSAGRDMAEFKSFVVYFFDKICARIPRGQEKFLCIVDLKGWGYSNCDVRAYIAAIEILQNYYPERLGKALMIHVPYIFMKAWKMIYPFIDTNTRDKFVFVEDKSLQETLRREIDEGQLPEFLGGKMDVIPLKDYGVQQQPQAV

SEQ ID NO: 16733 - protein, 251 aa, Zea mays subsp. mays
  misc_feature (1)..(251): Ceres Seq. ID no. 12353877
MASAAGGGAAGEGEWLKVSQLRPMVEAQDPNAKAVDNLTLRRFLRARDHDVDKASAMFLKFLKWRREAAPGGSVPEEQVRRELSQDKLCMGGVDRAGRPILVAFAARHFSAGRDMAEFKSFVVYFFDKICARIPRGQEKFLCIVDLKGWGYSNCDVRAYIAAIEILQNYYPERLGKALMIHVPYIFMKAWKMIYPFIDTNTRDKFVFVEDKSLQETLRREIDEGQLPEFLGGKMDVIPLKDYGVQQQPQAV

SEQ ID NO: 16734 - protein, 228 aa, Zea mays subsp. mays
  misc_feature (1)..(228): Ceres Seq. ID no. 12353878
MVEAQDPNAKAVDNLTLRRFLRARDHDVDKASAMFLKFLKWRREAAPGGSVPEEQVRRELSQDKLCMGGVDRAGRPILVAFAARHFSAGRDMAEFKSFVVYFFDKICARIPRGQEKFLCIVDLKGWGYSNCDVRAYIAAIEILQNYYPERLGKALMIHVPYIFMKAWKMIYPFIDTNTRDKFVFVEDKSLQETLRREIDEGQLPEFLGGKMDVIPLKDYGVQQQPQAV

SEQ ID NO: 16735 - DNA, 1743 bp, Zea mays subsp. mays
  misc_feature (1)..(1743): Ceres Seq. ID no. 12353879
aaacccacagagacagccagacaccaggcaactagtgtgtgctctctccagatctttctcgtagtttctcacacgacgacgacgagtccatgtccgccgcggtgatgacggcgccgccctgccacaggcagccgtcccctctcaaccccaactcgagggccacgcagtcgccgatcagcaacggcaagcccaacgcggtctccacgacaaggaggcacctcgccaacctcgaccgcctcctcgtcaagccgccaccgctcccgctcccgctcccgccgcagcccaggaaactgccagccgatgaggtaccaggcgacggggaggccacccccgacgaccgcagcggccacggcgggctcctcaacgcgctgaacctgtccacgtttctgcccttcacgcggaaggcagccgtggacgagatgtccccgagcagcctggcgtacatgcagcgcctcctcacgctctccccgcggctgtcgcccaagggctccatcgcgggcgagtggcggaggtaccacggcgaaggcaggtgggagggcctcctcgacccgctcgaccagaacctgcgccgcgagctcctccgctacggcgacttcgtgcaggccgcgtacacggcgttccactccatgccgtcggcggcggaggcagcctccagcggtcagcagcgcaccctcgtgctcccggaccgctcgtaccacccgacccgcagcctgttcgcctcgtcgtcgctgtccatcccgccgtgggcgcagcggcggtcggcgcccagctggctcacgcagcgcaccagcttcgtcggctacgtcgccgtctgtgaaaacgagcgggaggtccgtcgcatgggccgccgcgacatagccatcgtgctacgtggcaccgccacgtgccccgagtgggccgagaacctccgcgccggcctcgtgccgctcacggcggacgacgacgcgtccgcgcccaaggtggcgaaggggttcctgagcctatacaggacgccaggagaccatgcgcccagcctctcgaccgccatagtggaggaggtgaagcgtctcgtgcaggtgtacaggggggaggagctcagcatcacagtcgtgggccacagccttggcgcgtcgctggccctcctcgccgccgacgagctcagcccctgcctggctgctcaaacagacggcaccgcggaccaccagccgccgccgatcgcggtggtctccttcggaggccccaagaccggaaaccgcgcgttcgcagagcgtctgcagcgcgagcgcggtgtgaacgtcttgcgggtggtgaacgcgggcgacgtggtgacgcgcgtgccggcgccgatcgcgcgggaagggtatgtgcacgcgggtggcgctgagctgagactgcacaacagcgactcgccgtgcctgcgtcccgacgcgggtccagcgtgctgccacgacctggaggcgtacctacaccttctggatgggttcgccggctccgggcggccgttccgccccgacgcgagccgcagcgtggcgcggctgctgacataccagcggcccaacgtgaagcgtgcgtacgtggagcacgcgcggatgctcgggttcgagccggcctcaccgaacgccagcgccaatggcgccaccgccgacggccagtacggctacctggccagccctacatgactctactttgtagctacaaagcaagcaagcaaacatgcatgcatgcaaactccattcttaacaaaggatatggacgtgtttcttg

SEQ ID NO: 16736 - protein, 522 aa, Zea mays subsp. mays
  misc_feature (1)..(522): Ceres Seq. ID no. 12353880
MSAAVMTAPPCHRQPSPLNPNSRATQSPISNGKPNAVSTTRRHLANLDRLLVKPPPLPLPLPPQPRKLPADEVPGDGEATPDDRSGHGGLLNALNLSTFLPFTRKAAVDEMSPSSLAYMQRLLTLSPRLSPKGSIAGEWRRYHGEGRWEGLLDPLDQNLRRELLRYGDFVQAAYTAFHSMPSAAEAASSGQQRTLVLPDRSYHPTRSLFASSSLSIPPWAQRRSAPSWLTQRTSFVGYVAVCENEREVRRMGRRDIAIVLRGTATCPEWAENLRAGLVPLTADDDASAPKVAKGFLSLYRTPGDHAPSLSTAIVEEVKRLVQVYRGEELSITVVGHSLGASLALLAADELSPCLAAQTDGTADHQPPPIAVVSFGGPKTGNRAFAERLQRERGVNVLRVVNAGDVVTRVPAPIAREGYVHAGGAELRLHNSDSPCLRPDAGPACCHDLEAYLHLLDGFAGSGRPFRPDASRSVARLLTYQRPNVKRAYVEHARMLGFEPASPNASANGATADGQYGYLASPT

SEQ ID NO: 16737 - protein, 517 aa, Zea mays subsp. mays
  misc_feature (1)..(517): Ceres Seq. ID no. 12353881
MTAPPCHRQPSPLNPNSRATQSPISNGKPNAVSTTRRHLANLDRLLVKPPPLPLPLPPQPRKLPADEVPGDGEATPDDRSGHGGLLNALNLSTFLPFTRKAAVDEMSPSSLAYMQRLLTLSPRLSPKGSIAGEWRRYHGEGRWEGLLDPLDQNLRRELLRYGDFVQAAYTAFHSMPSAAEAASSGQQRTLVLPDRSYHPTRSLFASSSLSIPPWAQRRSAPSWLTQRTSFVGYVAVCENEREVRRMGRRDIAIVLRGTATCPEWAENLRAGLVPLTADDDASAPKVAKGFLSLYRTPGDHAPSLSTAIVEEVKRLVQVYRGEELSITVVGHSLGASLALLAADELSPCLAAQTDGTADHQPPPIAVVSFGGPKTGNRAFAERLQRERGVNVLRVVNAGDVVTRVPAPIAREGYVHAGGAELRLHNSDSPCLRPDAGPACCHDLEAYLHLLDGFAGSGRPFRPDASRSVARLLTYQRPNVKRAYVEHARMLGFEPASPNASANGATADGQYGYLASPT

SEQ ID NO: 16738 - protein, 412 aa, Zea mays subsp. mays
  misc_feature (1)..(412): Ceres Seq. ID no. 12353882
MSPSSLAYMQRLLTLSPRLSPKGSIAGEWRRYHGEGRWEGLLDPLDQNLRRELLRYGDFVQAAYTAFHSMPSAAEAASSGQQRTLVLPDRSYHPTRSLFASSSLSIPPWAQRRSAPSWLTQRTSFVGYVAVCENEREVRRMGRRDIAIVLRGTATCPEWAENLRAGLVPLTADDDASAPKVAKGFLSLYRTPGDHAPSLSTAIVEEVKRLVQVYRGEELSITVVGHSLGASLALLAADELSPCLAAQTDGTADHQPPPIAVVSFGGPKTGNRAFAERLQRERGVNVLRVVNAGDVVTRVPAPIAREGYVHAGGAELRLHNSDSPCLRPDAGPACCHDLEAYLHLLDGFAGSGRPFRPDASRSVARLLTYQRPNVKRAYVEHARMLGFEPASPNASANGATADGQYGYLASPT

SEQ ID NO: 16739 - DNA, 1150 bp, Zea mays subsp. mays
  misc_feature (1)..(1150): Ceres Seq. ID no. 12353887
ctcgcccaaacagcagagcaagctatggcgcgcgcgcgtgacgccgccctccacctcctcctcctggcagcgggcgcactcctacttctagccgtggtgtctcaggccaccgtggtgccgccgagcgttccggcgggcgcccccgaggacccgcggtgccgcgcgctggcgccgcggcgtggcgcgctggcggtgtacccgagcgacatggagcaactgcagttccttctcaacgccaagttcgtggaggcggagtggttcctgcacgcggcgctgggacgtggcgtggacttcctggaccgcaacctgtccggcggcgggcctcggccgtccggggccaggaaggcggacctggacttccgcacaaccgaggtcgccgccgagctcgggtaccaggaggtgggccacatccgcgccatcaggcaggccgtgggcgggttcccgcggccgcccatcgacctcggcgccgaccgcttcgccatggtcatggacgacgccatgggcgtccgtctggacccgccgttcgacccgtacgccgggcccgtcaacttcctgctcgcctcctacgtgttcccgcacgtcaccgccgccgccgccatgggcatcggccccagcctcatgggctacgcctccaagcgcctccaggcgagcatcctggcggtggaggccgggcaggacgcggtgatccggctgctgctgtaccagcgcgccgacgatgccgtcccaccgtaccagggccacaccgtggccgacttcacgcgccggatctccgactggcgcaaccggatgtccgggtgcggcgccaaggacgaaggggtcaaggtgctggaccggcggcagggcgccgagcgccgcaccataagcaacatcctcggcgccggcgaggactcgctcgggttccaacgcacgcctgcggaggtgctccgcatcctctacggctcgcgcaacgagcagatccccggtgggttcctccccaggggtgccaatggaaccatcgctagaggtttcttccagctcgcgtagatcaaaagatactaacaacatcctagtctatcttgagacatcacaagctgatcgatggtagtaccaatcaacttgaaattaaaggtccaagaaatgtgataaaaaaacagaaaccattattattttg

SEQ ID NO: 16740 - protein, 340 aa, Zea mays subsp. mays
  misc_feature (1)..(340): Ceres Seq. ID no. 12353888
LAQTAEQAMARARDAALHLLLLAAGALLLLAVVSQATVVPPSVPAGAPEDPRCRALAPRRGALAVYPSDMEQLQFLLNAKFVEAEWFLHAALGRGVDFLDRNLSGGGPRPSGARKADLDFRTTEVAAELGYQEVGHIRAIRQAVGGFPRPPIDLGADRFAMVMDDAMGVRLDPPFDPYAGPVNFLLASYVFPHVTAAAAMGIGPSLMGYASKRLQASILAVEAGQDAVIRLLLYQRADDAVPPYQGHTVADFTRRISDWRNRMSGCGAKDEGVKVLDRRQGAERRTISNILGAGEDSLGFQRTPAEVLRILYGSRNEQIPGGFLPRGANGTIARGFFQLA

SEQ ID NO: 16741 - protein, 332 aa, Zea mays subsp. mays
  misc_feature (1)..(332): Ceres Seq. ID no. 12353889
MARARDAALHLLLLAAGALLLLAVVSQATVVPPSVPAGAPEDPRCRALAPRRGALAVYPSDMEQLQFLLNAKFVEAEWFLHAALGRGVDFLDRNLSGGGPRPSGARKADLDFRTTEVAAELGYQEVGHIRAIRQAVGGFPRPPIDLGADRFAMVMDDAMGVRLDPPFDPYAGPVNFLLASYVFPHVTAAAAMGIGPSLMGYASKRLQASILAVEAGQDAVIRLLLYQRADDAVPPYQGHTVADFTRRISDWRNRMSGCGAKDEGVKVLDRRQGAERRTISNILGAGEDSLGFQRTPAEVLRILYGSRNEQIPGGFLPRGANGTIARGFFQLA

SEQ ID NO: 16742 - protein, 271 aa, Zea mays subsp. mays
  misc_feature (1)..(271): Ceres Seq. ID no. 12353890
MEQLQFLLNAKFVEAEWFLHAALGRGVDFLDRNLSGGGPRPSGARKADLDFRTTEVAAELGYQEVGHIRAIRQAVGGFPRPPIDLGADRFAMVMDDAMGVRLDPPFDPYAGPVNFLLASYVFPHVTAAAAMGIGPSLMGYASKRLQASILAVEAGQDAVIRLLLYQRADDAVPPYQGHTVADFTRRISDWRNRMSGCGAKDEGVKVLDRRQGAERRTISNILGAGEDSLGFQRTPAEVLRILYGSRNEQIPGGFLPRGANGTIARGFFQLA

SEQ ID NO: 16743 - DNA, 2116 bp, Zea mays subsp. mays
  misc_feature (1)..(2116): Ceres Seq. ID no. 12353906
aaaatggctttatatactactggcttggcttgggcgtcgatggatgtgcgtggcaacgtccaaaatccagaccgctggtaggagtatctcgtagacattgaacaacggctgcatggcgagcgcctgcgccacctccatccccctcgtctcggcgccctctgcatgcccgtccaagaagaccaccgtcgccaggttccggcgccgcacggcgacgtgcagggccagcagcggcggtggcggtggccggggcggcgaaaatgatggcctcctttggctgcccccggcgggacgtgatgctcaacggcctgtccagtgtcgccgccgggctcgcctggtacccgggcgtcgcgtccggcgcggatgcggtgtgcaccagggccgacaaggtgaacgagaagaccgtgcagtgcacggacccggccgggcagcttccgtgccctctggtgtcgccgacggaccccgtggacttcaagccggaaagcaaggtgacgcgcatccggcagccggtgcatctcctgagccgggagtaccaggagaagtacaaggaggccgtcgcgaagatgaaggcgctaccggaagagaacccgctgagcttcgcggcccaggcggccatccaccaggcctactgcgacgcctactacaagtatgacccgacggccaaggacgcgccgttcgacgtgcacttctcgtggatcttcgcgccgtggcaccgcatgtacatctacttctacgagcgcgccctcgggcagctcatcggcgacgacaccttcgcgctgccgttctggaactgggatacgccggccggcatggtggtgccgccactcttcaaggactccatgggcaacccgctgtacgaccccaacaggaacccgtcgaacgtcgacgcgctggtggacttagactacctcaacgacaggaatgcggagcccatccctttcaagggcccacgggacgaaaagtacaaggaacttgtgaacaagaacctgtgcaccgtatacacccagcaaatacgtagcggcaagggcgccgagtcgttcctgggcgagaagtactgcaccgacatcggggtcaagcacgagcagcatgggttcgctggagcggatggcgcacactgccgtgcacgtctgggtcggcaaggcgggcccgacgccttcgtcggaggcgtgcagtgccgctaccggcggcttcccgaaccacaccaaaggcgggtacagctgcaacaacgacatggggttcctggggtcggcgggacacgacccgctcttctactcgcaccactccaacgtcgaccgcatgtggcacatctggtcgaccaggctcggcggcgggcagggcatcacggaggcggactggctcgacaccagcttcgtcttctacgacgacgtcaagagcccgcggaaggtgcgcatcaggttccgcgacgtcctggacacgcgcgacctcggctacacgtacgacgccgagtccgacaaggacctgccatggctgcgctgcaagatctcgtcgctggtgccccacggcaaggacagcccgccgaggtcatcgtcggcgaggaaggcggcggcgccggtgttcccgctcgccctgaccaagggccaggtggtggaggtgccggccgtgcctgtgccggccaaggacccggggaaggagcagctgctggtgatcgagggcatcgagtacgacccccaggcgaacaataagttcgacgtcgccatcaacctgcccgcggacaaagcgttgcaggtaggcccacagtacaaggagtacgccggaagcttcgccgtcgtgccgggctccggcgccgggaagacgcggaaagtgaagctctccctgtgcatcaccgaagtgctgttcgatatcgacgctgacggcgataaaaccgtcgacgtcgttatcgtgccgcgcacaaatgctaagatcacgctcaacgctcgccccaccatcaagaatcggaactaggagctagctgctactagtgctcatcaagcacactgtacgtacgtacgtatgtactcgatcgcgtggtcattcatcgaccatcatcgtttatatgctgtcacgcacagtgcgggccggtagggtgtctgcaataataaacccggccagtgttgcattg

SEQ ID NO: 16744 - protein, 480 aa, Zea mays subsp. mays
  misc_feature (1)..(480): Ceres Seq. ID no. 12353907
MMASFGCPRRDVMLNGLSSVAAGLAWYPGVASGADAVCTRADKVNEKTVQCTDPAGQLPCPLVSPTDPVDFKPESKVTRIRQPVHLLSREYQEKYKEAVAKMKALPEENPLSFAAQAAIHQAYCDAYYKYDPTAKDAPFDVHFSWIFAPWHRMYIYFYERALGQLIGDDTFALPFWNWDTPAGMVVPPLFKDSMGNPLYDPNRNPSNVDALVDLDYLNDRNAEPIPFKGPRDEKYKELVNKNLCTVYTQQIRSGKGAESFLGEKYCTDIGVKHEQHGFAGADGAHCRARLGRQGGPDAFVGGVQCRYRRLPEPHQRRVQLQQRHGVPGVGGTRPALLLAPLQRRPHVAHLVDQARRRAGHHGGGLARHQLRLLRRRQEPAEGAHQVPRRPGHARPRLHVRRRVRQGPAMAALQDLVAGAPRQGQPAEVIVGEEGGGAGVPARPDQGPGGGGAGRACAGQGPGEGAAAGDRGHRVRPPGEQ

SEQ ID NO: 16745 - protein, 479 aa, Zea mays subsp. mays
  misc_feature (1)..(479): Ceres Seq. ID no. 12353908
MASFGCPRRDVMLNGLSSVAAGLAWYPGVASGADAVCTRADKVNEKTVQCTDPAGQLPCPLVSPTDPVDFKPESKVTRIRQPVHLLSREYQEKYKEAVAKMKALPEENPLSFAAQAAIHQAYCDAYYKYDPTAKDAPFDVHFSWIFAPWHRMYIYFYERALGQLIGDDTFALPFWNWDTPAGMVVPPLFKDSMGNPLYDPNRNPSNVDALVDLDYLNDRNAEPIPFKGPRDEKYKELVNKNLCTVYTQQIRSGKGAESFLGEKYCTDIGVKHEQHGFAGADGAHCRARLGRQGGPDAFVGGVQCRYRRLPEPHQRRVQLQQRHGVPGVGGTRPALLLAPLQRRPHVAHLVDQARRRAGHHGGGLARHQLRLLRRRQEPAEGAHQVPRRPGHARPRLHVRRRVRQGPAMAALQDLVAGAPRQGQPAEVIVGEEGGGAGVPARPDQGPGGGGAGRACAGQGPGEGAAAGDRGHRVRPPGEQ

SEQ ID NO: 16746 - protein, 468 aa, Zea mays subsp. mays
  misc_feature (1)..(468): Ceres Seq. ID no. 12353909
MLNGLSSVAAGLAWYPGVASGADAVCTRADKVNEKTVQCTDPAGQLPCPLVSPTDPVDFKPESKVTRIRQPVHLLSREYQEKYKEAVAKMKALPEENPLSFAAQAAIHQAYCDAYYKYDPTAKDAPFDVHFSWIFAPWHRMYIYFYERALGQLIGDDTFALPFWNWDTPAGMVVPPLFKDSMGNPLYDPNRNPSNVDALVDLDYLNDRNAEPIPFKGPRDEKYKELVNKNLCTVYTQQIRSGKGAESFLGEKYCTDIGVKHEQHGFAGADGAHCRARLGRQGGPDAFVGGVQCRYRRLPEPHQRRVQLQQRHGVPGVGGTRPALLLAPLQRRPHVAHLVDQARRRAGHHGGGLARHQLRLLRRRQEPAEGAHQVPRRPGHARPRLHVRRRVRQGPAMAALQDLVAGAPRQGQPAEVIVGEEGGGAGVPARPDQGPGGGGAGRACAGQGPGEGAAAGDRGHRVRPPGEQ

SEQ ID NO: 16747 - DNA, 1109 bp, Zea mays subsp. mays
  misc_feature (1)..(1109): Ceres Seq. ID no. 12353933
gcacagtgccactgaccactgcgagctctccctccagtttcacacaccctgatctgttcgcatcagtctcccggtcgcaagcgcctccgaaaccctagactcgcctcgcgagttgcttcgcttctcctgcccccgatggagccgtccccggcggtcgctgcggagctctggtgctcaccgcacctcgccgcgggcggcggccgcccgttggaggcgacctcggccgtcacggagaagagcagcggcggccgcggaggaggcggcgccgtccggaggaggccgagggagaccccggtgtccgaggatgactcgtcccggatcgtctccacttccggcggtggcggcggccaggatttgactgatctagaagcaaagcgttccaaaacaaataagtccagtaataataaaggcagtctaagaacagaggttgaaactgactcaagaagtgctggcaaggctgttagtaaaaacattccagcagcagagccaccaaaacaagattatatccatgtcagggcaaggaggggtcaagcaactgatagtcatagtcttgcagagagggcacgtcgtgagaaaataagtgaacgaatgaaagttctccaagatcttgtgcctggatgcaacaaggttattggcaaagcatcagtacttgatgagataattaattacatccagtcgttgcaatgtcaagttgagttcctgtccatgaaactagaggcagtgaatgcccaggcaaaccagggagttgaagtatttccagccaaagattacggttctcagacatacaacacagctcctgggctgacatttgatacgcaaaccagtagagaatacgcccagggcacgtcgacctcggaatggcttcacatgcagattggcagtggctatgaaagggtttcatgaacgagatgaatccaggcagccgctaaataaagtgaaccatgatcaatcatggccgtgcttgtagatcattctttttcattttttttgaaaccatcatgttccagacgcattttttattcatgcttggagctgtaattccagccggaacatgtatttttgatgaggcgctcatttgtttccccatctgaatctcaagactgtttctg

SEQ ID NO: 16748 - protein, 255 aa, Zea mays subsp. mays
  misc_feature (1)..(255): Ceres Seq. ID no. 12353934
MEPSPAVAAELWCSPHLAAGGGRPLEATSAVTEKSSGGRGGGGAVRRRPRETPVSEDDSSRIVSTSGGGGGQDLTDLEAKRSKTNKSSNNKGSLRTEVETDSRSAGKAVSKNIPAAEPPKQDYIHVRARRGQATDSHSLAERARREKISERMKVLQDLVPGCNKVIGKASVLDEIINYIQSLQCQVEFLSMKLEAVNAQANQGVEVFPAKDYGSQTYNTAPGLTFDTQTSREYAQGTSTSEWLHMQIGSGYERVS

SEQ ID NO: 16749 - DNA, 1155 bp, Zea mays subsp. mays
  misc_feature (1)..(1155): Ceres Seq. ID no. 12353947
agtaacgcctttctccaagcctgagcactccatccactactttactcaaagtctagagctagctttttgctttgctcaccagacaaaccgcagcagatggcgtcgacgatcatggccgccacctcccgcatcgtcgcggccaagacgccgtttcttggccagggtcgcgccgccgccgccgccgccaatgccagccccctccgcgacgtcgccgccgccgctgctggcggccggatcaccatgggcaacgacctgtggtacggcccggaccgcgtcaagtacctgggccccttctccgcccagacgccctcgtacctgaccggcgagttccccggcgactacggctgggacaccgccgggctgtccgcggacccggaggcgttcgcgcggaacagggcgctggaggtgatccacgggcggtgggcgatgctgggtgcgctgggctgcatcaccccggaggtgctggagaagtgggtgcgcgtggacttcaaggagcccgtgtggttcaaggccggcgcgcagatcttctcggagggcgggctggactacctgggcaaccccaacctggtgcacgcgcagagcatcctggccgtgctcggcttccaggtcatcctcatgggcctcgtcgagggcttccgcatcaacggcctcgacggcgtcggcgagggcaacaacctctaccccggcggccagtacttcgacccgctgggcctcgccgacgaccccgtcaccttcgccgagctcaaggtcaaggagatcaagaacggccgcctcgccatgttctccatgttcggcttcttcgtccaggccatcgtcaccggcaaggggcccctcgagaacctgctcgaccacctcgacgaccccgtcgccaacaacgcctgggtctacgccaccaagttcgcaccagggtcttaagctagctaccgggccgcggcgtgccaggacattgtgttgtacactactcgtttctgtcgtgatctgtaccatgaacgaatgcaaatattcttgtgctctcccagaaggaacgaactggactagttttgctcttccattccatgtatactctgcttcagcatatatgtagttgtgtctactggtttttgcagttgttaactgatttgcgtccatatatgaggttgtgtctacttttttttt

SEQ ID NO: 16750 - protein, 272 aa, Zea mays subsp. mays
  misc_feature (1)..(272): Ceres Seq. ID no. 12353948
MASTIMAATSRIVAAKTPFLGQGRAAAAAANASPLRDVAAAAAGGRITMGNDLWYGPDRVKYLGPFSAQTPSYLTGEFPGDYGWDTAGLSADPEAFARNRALEVIHGRWAMLGALGCITPEVLEKWVRVDFKEPVWFKAGAQIFSEGGLDYLGNPNLVHAQSILAVLGFQVILMGLVEGFRINGLDGVGEGNNLYPGGQYFDPLGLADDPVTFAELKVKEIKNGRLAMFSMFGFFVQAIVTGKGPLENLLDHLDDPVANNAWVYATKFAPGS

SEQ ID NO: 16751 - protein, 267 aa, Zea mays subsp. mays
  misc_feature (1)..(267): Ceres Seq. ID no. 12353949
MAATSRIVAAKTPFLGQGRAAAAAANASPLRDVAAAAAGGRITMGNDLWYGPDRVKYLGPFSAQTPSYLTGEFPGDYGWDTAGLSADPEAFARNRALEVIHGRWAMLGALGCITPEVLEKWVRVDFKEPVWFKAGAQIFSEGGLDYLGNPNLVHAQSILAVLGFQVILMGLVEGFRINGLDGVGEGNNLYPGGQYFDPLGLADDPVTFAELKVKEIKNGRLAMFSMFGFFVQAIVTGKGPLENLLDHLDDPVANNAWVYATKFAPGS

SEQ ID NO: 16752 - protein, 224 aa, Zea mays subsp. mays
  misc_feature (1)..(224): Ceres Seq. ID no. 12353950
MGNDLWYGPDRVKYLGPFSAQTPSYLTGEFPGDYGWDTAGLSADPEAFARNRALEVIHGRWAMLGALGCITPEVLEKWVRVDFKEPVWFKAGAQIFSEGGLDYLGNPNLVHAQSILAVLGFQVILMGLVEGFRINGLDGVGEGNNLYPGGQYFDPLGLADDPVTFAELKVKEIKNGRLAMFSMFGFFVQAIVTGKGPLENLLDHLDDPVANNAWVYATKFAPGS

SEQ ID NO: 16753 - DNA, 874 bp, Zea mays subsp. mays
  misc_feature (1)..(874): Ceres Seq. ID no. 12353951
gcaatttcgtttgaaacagttcagttctcacaaaaaaaagagaaagccctgaagtttcatggattcaagaatttccatctgcggtggcgcctgcgggtacggcgacctggacatcttcaggtacgggcgctacacgacggggctgagcgcggcgctgttcgggcgcggcggcgcctgcggcggctgctacgagctgcggtgcgtcaaccacatccagtggtgcctccggggcagccccacggtggtggtgacggcgacggacttctgcccggccaacatgggcctcgccgacgacgacgccggcggctggtgcaacttcccgcgggagcacctcgagctgtcggaggcctcgttcctccgcgtcgccaaggccaaggccggcatcgtgccgggtgcagttccggagggtgagctgcgacagggccggcggcatggcggttcaccatcaccggtagcgcccacttcctgcaggtgctcatcaccaacgtggcggcggacggcgaggtggcggccgtgaaggtgaaggggtcgaggacggggtggatcccgatggggcggaactggggccagaactggcagtgcgacgccgacctccgcgcccagccgccttccgggaggccagcttcggccacgccacgctagacatcaagaaccggacgcacgcctactactcgtggcaccgcaaccatgacggcgcgaaggtcgtcgctgacggcgtctggttcaccaacaggtactggatgcccaccgacgacgacacaaactgacgatcaccgccgcagagggaacaaattactgatagatcagcgtagcacgttcctgagctagccccgccccctttatgttctccaattcagtaatgcaatgcgttttt

SEQ ID NO: 16754 - protein, 152 aa, Zea mays subsp. mays
  misc_feature (1)..(152): Ceres Seq. ID no. 12353952
MDSRISICGGACGYGDLDIFRYGRYTTGLSAALFGRGGACGGCYELRCVNHIQWCLRGSPTVVVTATDFCPANMGLADDDAGGWCNFPREHLELSEASFLRVAKAKAGIVPGAVPEGELRQGRRHGGSPSPVAPTSCRCSSPTWRRTARWRP

SEQ ID NO: 16755 - protein, 136 aa, Zea mays subsp. mays
  misc_feature (1)..(136): Ceres Seq. ID no. 12353953
AISFETVQFSQKKEKALKFHGFKNFHLRWRLRVRRPGHLQVRALHDGAERGAVRARRRLRRLLRAAVRQPHPVVPPGQPHGGGDGDGLLPGQHGPRRRRRRRLVQLPAGAPRAVGGLVPPRRQGQGRHRAGCSSGG

SEQ ID NO: 16756 - protein, 79 aa, Zea mays subsp. mays
  misc_feature (1)..(79): Ceres Seq. ID no. 12353954
MGLADDDAGGWCNFPREHLELSEASFLRVAKAKAGIVPGAVPEGELRQGRRHGGSPSPVAPTSCRCSSPTWRRTARWRP

SEQ ID NO: 16757 - DNA, 1229 bp, Zea mays subsp. mays
  misc_feature (1)..(1229): Ceres Seq. ID no. 12353971
ctttttgtgttgctctaaccctttcggctgcgctgcgcacgtcccctcccacgagaaacaccccacgtctcaagctgcccctttctcaccgccacggccgccacgcgcagcagcaaccgagcaggagcgcagccagcaagctcaggcccgagccctactgcaaccgccgctgctaccgcactgaacaccatggccgacccggcggagcaccgtccagcggaggaggacgaggaagccgcggcggccggcgaggatgaggacaccggcgctcaggtcgcgcccatcgtgaagctggaggaggtcgccgttaccaccggagaggaggacgaggacgtacttgtcgacatgaaggcgaagctctaccggttcgacaaggaggcgaaccagtggaaagaacgtggcacaggcactgtgaagctgcttaagcacaaggagaccgccaaggtccgcctcgtcatgcgtcaggcgaagacgcttaagatctgtgctaaccatcttgtggtggcgacgactaagatgcaggagcacgcagggagcgacaagtcgtgcgtgtggcacgcgctggacttcgccgacggtgagctcaaggaggagatgtttgctatccgttttggatctgtcgagaattgcaagaagttcaaggacactgttgaagagatagctgaagagcaaggaaagaccgaggtgaaagaaaacgaggaagtctccattgccgccgcagatttggtacagaagttaacagtgacagaggctagcaaggagggagatgcagaggaagaggaggctcctgcatctgaccataagaaggatgctaaagggtaaagattgaaggcaaacaaggccaaatgattatgattccattcatttcgttgtcaaggttcatcttccccacaaattttcattacaaagtttcattgcattttctcctgagatgatttgtgtgtgtgtgtgtgtgtgtgtgtgttgggtgaaatctgagttgtcagtcatctacatgtctttcttggttgttagacttattctcagtcgcctgtttatctgggatggctaggtacatcatgtttgtacaattatttggggttgattttggaatggctctaaagctcgagatgagatagatggtatcatggtagttattagtgatgatttcttttcgcttcttgttcgttcgttctgaaataatatgggatgctttgttatacttgttgatccattattagcttgatgcg

SEQ ID NO: 16758 - protein, 210 aa, Zea mays subsp. mays
  misc_feature (1)..(210): Ceres Seq. ID no. 12353972
MADPAEHRPAEEDEEAAAAGEDEDTGAQVAPIVKLEEVAVTTGEEDEDVLVDMKAKLYRFDKEANQWKERGTGTVKLLKHKETAKVRLVMRQAKTLKICANHLVVATTKMQEHAGSDKSCVWHALDFADGELKEEMFAIRFGSVENCKKFKDTVEEIAEEQGKTEVKENEEVSIAAADLVQKLTVTEASKEGDAEEEEAPASDHKKDAKG

SEQ ID NO: 16759 - protein, 158 aa, Zea mays subsp. mays
  misc_feature (1)..(158): Ceres Seq. ID no. 12353973
MKAKLYRFDKEANQWKERGTGTVKLLKHKETAKVRLVMRQAKTLKICANHLVVATTKMQEHAGSDKSCVWHALDFADGELKEEMFAIRFGSVENCKKFKDTVEEIAEEQGKTEVKENEEVSIAAADLVQKLTVTEASKEGDAEEEEAPASDHKKDAKG

SEQ ID NO: 16760 - protein, 121 aa, Zea mays subsp. mays
  misc_feature (1)..(121): Ceres Seq. ID no. 12353974
MRQAKTLKICANHLVVATTKMQEHAGSDKSCVWHALDFADGELKEEMFAIRFGSVENCKKFKDTVEEIAEEQGKTEVKENEEVSIAAADLVQKLTVTEASKEGDAEEEEAPASDHKKDAKG

SEQ ID NO: 16761 - DNA, 1125 bp, Zea mays subsp. mays
  misc_feature (1)..(1125): Ceres Seq. ID no. 12353975
acttgtttccagcatacgtagctagtgcaactgcaagctccggatcctcctcatatcagctataaattaaaaggtcgtgacaggtgaggccgcgccgcgaggaaccgcgtcgaccttgtcgtcgatgttggcttgcaaggcgagcccgagccggccgtgcgtcgtcccccttgtttgcctgctggtggtggcggccgcagtcgtcgtcgtcgctgcctcggcgccgccggcggaggcggcgttcgacgacaactacgtggcgcagtggggtagagatggttatcaccttgtcgtccggggcacggaggcgaatgtcaccatggaccagagctctggtgccgggttccggtccaagtccacgtacggctcagggttcttccacatgaggatgaagctgccctccgggtacacggccggcgtcgtcacgaccttctacctcatctcgcagccggaggatgggagccgcgacgaggtggacttggagttcctgggcgacaaggccggcgtgcccatcaccctccagaccaacgtcttcgtcgacggccgcggcgacagggagcagcggacgcgcctctggttcgaccccgccgccgacttccacgactacaagatcctctggaacccataccagctcgtgatgttcgtggacgacacgccggtccgggtgctgaggaacctgacgggcgccgtgccggggtacccgttcccggggaagcagacgatgctgatccgcgcgagcgtgtgggacggctccgactgggccacggacggcggccggaccaaggtggactggtccaggggccccttcaccgccggctaccggggcttcgacgtcgacggctgcgccaacaacgggagcgacgcgtgccaatcgcccgacctatggtggaacgccgccgagtaccggaacatcaccgcggagcagcgggcggcgtacgaggacgtgaagaggagttacatgaactacgactactgcgccgataaggccaggtttaacagcaccaccgtacccattgaatgcaactacgcttgagaagccagttaggagtggcggcgttgtatatcaacggtttatatatatatattatatatatatacacacacacgaaaaagatatgtcttctc

SEQ ID NO: 16762 - protein, 302 aa, Zea mays subsp. mays
  misc_feature (1)..(302): Ceres Seq. ID no. 12353976
MLACKASPSRPCVVPLVCLLVVAAAVVVVAASAPPAEAAFDDNYVAQWGRDGYHLVVRGTEANVTMDQSSGAGFRSKSTYGSGFFHMRMKLPSGYTAGVVTTFYLISQPEDGSRDEVDLEFLGDKAGVPITLQTNVFVDGRGDREQRTRLWFDPAADFHDYKILWNPYQLVMFVDDTPVRVLRNLTGAVPGYPFPGKQTMLIRASVWDGSDWATDGGRTKVDWSRGPFTAGYRGFDVDGCANNGSDACQSPDLWWNAAEYRNITAEQRAAYEDVKRSYMNYDYCADKARFNSTTVPIECNYA

SEQ ID NO: 16763 - protein, 237 aa, Zea mays subsp. mays
  misc_feature (1)..(237): Ceres Seq. ID no. 12353977
MDQSSGAGFRSKSTYGSGFFHMRMKLPSGYTAGVVTTFYLISQPEDGSRDEVDLEFLGDKAGVPITLQTNVFVDGRGDREQRTRLWFDPAADFHDYKILWNPYQLVMFVDDTPVRVLRNLTGAVPGYPFPGKQTMLIRASVWDGSDWATDGGRTKVDWSRGPFTAGYRGFDVDGCANNGSDACQSPDLWWNAAEYRNITAEQRAAYEDVKRSYMNYDYCADKARFNSTTVPIECNYA

SEQ ID NO: 16764 - protein, 216 aa, Zea mays subsp. mays
  misc_feature (1)..(216): Ceres Seq. ID no. 12353978
MRMKLPSGYTAGVVTTFYLISQPEDGSRDEVDLEFLGDKAGVPITLQTNVFVDGRGDREQRTRLWFDPAADFHDYKILWNPYQLVMFVDDTPVRVLRNLTGAVPGYPFPGKQTMLIRASVWDGSDWATDGGRTKVDWSRGPFTAGYRGFDVDGCANNGSDACQSPDLWWNAAEYRNITAEQRAAYEDVKRSYMNYDYCADKARFNSTTVPIECNYA

SEQ ID NO: 16765 - DNA, 822 bp, Zea mays subsp. mays
  misc_feature (1)..(822): Ceres Seq. ID no. 12354021
attcctgtcggcaaggtgaacgcgagagccgaccgtctcagtgtgcgcgcgaagaagagaaggaggaggaggaggaggaagaagtagaagaatgtatccggccaagcccaccgtcgccaccgccagcgagccggtaaccgggatggcggcgccgccggtgaccggcatcccgatcagcagccccggccccgcagtcgcggccagccagtggtcctcgggcctctgcgcctgcttcgacgactgcggcctctgctgcatgacgtgctggtgcccgtgcgtgacgttcgggcggatcgcggagatcgtggaccgcggcgcgacgtcgtgcgcggctgcggggggccatctacacgctgctggcctgcttcacggggttccagtgccactggatctactcctgcacgtaccgctccaagatgcgcgcgcagctggggctccccgacgtcggctgctgcgactgctgcgtccacttctgctgcgagccgtgcgcgctctgccagcagtacagggagctcagggcacgcggcttggaccccgcgctcggctgggacgtcaacgcccagaaggcggccaataataacgccggcgccggcatgacgatgtacccgccgacggcgcaggggatgggccgctaattacgctaccagctccatcggtaaactcatatgtgttgtgttgtgttgtgtcagccagatcatcgcgtacgtacgggtatacttgtgatatgtaatgtcagggaccggcatgcccatgtgtttcaagatatttcacgttcgagtcctttctgtccgctcactatccgaatgaaaatcattttccttg

SEQ ID NO: 16766 - protein, 161 aa, Zea mays subsp. mays
  misc_feature (1)..(161): Ceres Seq. ID no. 12354022
MYPAKPTVATASEPVTGMAAPPVTGIPISSPGPAVAASQWSSGLCACFDDCGLCCMTCWCPCVTFGRIAEIVDRGATSCAAAGGHLHAAGLLHGVPVPLDLLLHVPLQDARAAGAPRRRLLRLLRPLLLRAVRALPAVQGAQGTRLGPRARLGRQRPEGGQ

SEQ ID NO: 16767 - protein, 144 aa, Zea mays subsp. mays
  misc_feature (1)..(144): Ceres Seq. ID no. 12354023
MAAPPVTGIPISSPGPAVAASQWSSGLCACFDDCGLCCMTCWCPCVTFGRIAEIVDRGATSCAAAGGHLHAAGLLHGVPVPLDLLLHVPLQDARAAGAPRRRLLRLLRPLLLRAVRALPAVQGAQGTRLGPRARLGRQRPEGGQ

SEQ ID NO: 16768 - protein, 106 aa, Zea mays subsp. mays
  misc_feature (1)..(106): Ceres Seq. ID no. 12354024
MTCWCPCVTFGRIAEIVDRGATSCAAAGGHLHAAGLLHGVPVPLDLLLHVPLQDARAAGAPRRRLLRLLRPLLLRAVRALPAVQGAQGTRLGPRARLGRQRPEGGQ

SEQ ID NO: 16769 - DNA, 2052 bp, Zea mays subsp. mays
  misc_feature (1)..(2052): Ceres Seq. ID no. 12354033
agactctctctcgcgtcgggcacgcagtcgcacaagtagtgaactcaaacgggatctcctgctctgcctccctcgtcttcctctgcccgtgcgcgtttcagagcacgtacggagagggcgagcagcagcttgcggccgggcaccatcatggaggacgtcgcgccgggtgcggagccgtgggaggggtacgtggactggaggaaccggccggcgaccaggtcccggcacggcggcatggccgccgcctccttcgtgctcgtggtggaggtgctggagaacctggcgttcctggcgaacgccagcaacctggtgacctacctgatggggttcatgcactactcgccgtcgcagtcggccacggcggtcaccaacttcatgggcacggccttcctgctcgcgctcctcggcggcttcctctccgacgccttcttcaccacctacaccatctacatcgccagcgccttcatcgagctcatggggctggtgatcctgacggtccaggcgcggacgcagtcgctgatgccaccgcagtgcgccaagccagcggctccgtgcgagcccgtgtcgggcgccaagaaggcgatgctgttcgcggggctgtacctcacggcgctgggcgtgggcgggatcaagggctccctcccctcccacggcgcggagcagttcgacgagcatgcggcgcgggggcgcaagggccgctccaccttcttcaactacttcgtcttctgcctctcctgcggcgccctcgtcgccgtcaccttcgccgtctgggtcgaggacaacaagggctggcagtgggggttcggcatctccaccatcgccatcctgctctccatcccgctcttcgtcgccggctccagccgctaccggaacaaggtgcccacggggagcccgctcaccaccatcgccaaggtcctcatcgccgccgcgctcgcgcgccgcggctgcgcgccgagctccagcaacggcgccgtcatcgaccgcgcgcccagccccacggggagcaccgacatgaaagagtactgcaagcccggggacatggaggagatcacggtctccggcgccgcgatcgtggcgtcgtcgcccgccgagccgtcccgcgaactcgcgttcctcaaccgcgcggtgcagtgccagccgccgcggcacggccgcctggcgtgcacggtccaggaggtggaggacgtcaagatcgtgctcatggtgctgcccatcttcttgtccaccatcatgctcaactgctgcctggcgcagctgtccaccttctcggtcgagcaagcggccaccatggacacgcgcgtgggcagcctcaccgtgccgccggcgtcgctccccgtcttccctgtcacgttcatcatcatcctcgcgcccgtctacgatcacgtcatcgtcccgttcgcgcgccgcgtcacggggaccgagatgggcatcacacacctccagcgtatcggcaccgggctggtgctgtccatcgtcgcgatggccgtggccgccgtcgtcgaggtcaagcgcaagaacgtggcgtcccacaacgggatgctggactccaccaagccgctgcccatcaccttcttctggatcgcgttccagtacctgttcctgggttccgcggacctgttcacgttggcggggctgctcgagttcttcttcagcgaggcgccggcgcggatgagatccctggcgacgtcgctgtcgtgggcgtcgctggcgctgggttattacctcagctcggtgctggtgtccatcgtcaacagcgtgacagggcgcggcgaccaccggccgtggctgcagggtgccagcctgaaccattaccacctcgagaggttctactgggtcatgtgcgtgctcagcaccatcaactacctcttcttcctgttcttggccgtcaggtacaagtacagaaacgcgggggtcatcaaaggctaatgccatcttcatatggccagtcggcgttgccattaatccccgtggtcttgagcaatgctgggtgtaactaactgtttatataggtggaaaacagagggttgaagaaaatgtaggttaattttctgc

SEQ ID NO: 16770 - protein, 664 aa, Zea mays subsp. mays
  misc_feature (1)..(664): Ceres Seq. ID no. 12354034
TLSRVGHAVAQVVNSNGISCSASLVFLCPCAFQSTYGEGEQQLAAGHHHGGRRAGCGAVGGVRGLEEPAGDQVPARRHGRRLLRARGGGAGEPGVPGERQQPGDLPDGVHALLAVAVGHGGHQLHGHGLPARAPRRLPLRRLLHHLHHLHRQRLHRAHGAGDPDGPGADAVADATAVRQASGSVRARVGRQEGDAVRGAVPHGAGRGRDQGLPPLPRRGAVRRACGAGAQGPLHLLQLLRLLPLLRRPRRRHLRRLGRGQQGLAVGVRHLHHRHPALHPALRRRLQPLPEQGAHGEPAHHHRQGPHRRRARAPRLRAELQQRRRHRPRAQPHGEHRHERVLQARGHGGDHGLRRRDRGVVARRAVPRTRVPQPRGAVPAAAARPPGVHGPGGGGRQDRAHGAAHLLVHHHAQLLPGAAVHLLGRASGHHGHARGQPHRAAGVAPRLPCHVHHHPRARLRSRHRPVRAPRHGDRDGHHTPPAYRHRAGAVHRRDGRGRRRRGQAQERGVPQRDAGLHQAAAHHLLLDRVPVPVPGFRGPVHVGGAARVLLQRGAGADEIPGDVAVVGVAGAGLLPQLGAGVHRQQRDRARRPPAVAAGCQPEPLPPREVLLGHVRAQHHQLPLLPVLGRQVQVQKRGGHQRLMPSSYGQSALPLIPVVLSNAGCN

SEQ ID NO: 16771 - protein, 592 aa, Zea mays subsp. mays
  misc_feature (1)..(592): Ceres Seq. ID no. 12354035
MEDVAPGAEPWEGYVDWRNRPATRSRHGGMAAASFVLVVEVLENLAFLANASNLVTYLMGFMHYSPSQSATAVTNFMGTAFLLALLGGFLSDAFFTTYTIYIASAFIELMGLVILTVQARTQSLMPPQCAKPAAPCEPVSGAKKAMLFAGLYLTALGVGGIKGSLPSHGAEQFDEHAARGRKGRSTFFNYFVFCLSCGALVAVTFAVWVEDNKGWQWGFGISTIAILLSIPLFVAGSSRYRNKVPTGSPLTTIAKVLIAAALARRGCAPSSSNGAVIDRAPSPTGSTDMKEYCKPGDMEEITVSGAAIVASSPAEPSRELAFLNRAVQCQPPRHGRLACTVQEVEDVKIVLMVLPIFLSTIMLNCCLAQLSTFSVEQAATMDTRVGSLTVPPASLPVFPVTFIIILAPVYDHVIVPFARRVTGTEMGITHLQRIGTGLVLSIVAMAVAAVVEVKRKNVASHNGMLDSTKPLPITFFWIAFQYLFLGSADLFTLAGLLEFFFSEAPARMRSLATSLSWASLALGYYLSSVLVSIVNSVTGRGDHRPWLQGASLNHYHLERFYWVMCVLSTINYLFFLFLAVRYKYRNAGVIKG

SEQ ID NO: 16772 - protein, 563 aa, Zea mays subsp. mays
  misc_feature (1)..(563): Ceres Seq. ID no. 12354036
MAAASFVLVVEVLENLAFLANASNLVTYLMGFMHYSPSQSATAVTNFMGTAFLLALLGGFLSDAFFTTYTIYIASAFIELMGLVILTVQARTQSLMPPQCAKPAAPCEPVSGAKKAMLFAGLYLTALGVGGIKGSLPSHGAEQFDEHAARGRKGRSTFFNYFVFCLSCGALVAVTFAVWVEDNKGWQWGFGISTIAILLSIPLFVAGSSRYRNKVPTGSPLTTIAKVLIAAALARRGCAPSSSNGAVIDRAPSPTGSTDMKEYCKPGDMEEITVSGAAIVASSPAEPSRELAFLNRAVQCQPPRHGRLACTVQEVEDVKIVLMVLPIFLSTIMLNCCLAQLSTFSVEQAATMDTRVGSLTVPPASLPVFPVTFIIILAPVYDHVIVPFARRVTGTEMGITHLQRIGTGLVLSIVAMAVAAVVEVKRKNVASHNGMLDSTKPLPITFFWIAFQYLFLGSADLFTLAGLLEFFFSEAPARMRSLATSLSWASLALGYYLSSVLVSIVNSVTGRGDHRPWLQGASLNHYHLERFYWVMCVLSTINYLFFLFLAVRYKYRNAGVIKG

SEQ ID NO: 16773 - DNA, 1067 bp, Zea mays subsp. mays
  misc_feature (1)..(1067): Ceres Seq. ID no. 12354075
atatagatagataggagtacactgcgtaggagacagcaagagggcgaggctgtgtgtgagagagggagaggcagagaacattcggcagtgtgagaatcggaatcggagtcggagatggcttggaatggccgcttcggcaacgacgaggaggggagcggccttgagctcagccttagcctcccgggctacttctccggatcaccaacccaagctgcagcaggtttcgaggacaaagcagacggcggctctgctgctgctgctgctgctgcgcgagcaaagggaagcaatggcttcaaggccaggccggcggcagctgctccggtcgtgggatggccgccagtgcgcgcgttccggcggaacctcgcctcggcgtcctccaagccgtcccgcgatccgccaccaagccacagaggaaacgagtccgcgagcgtcggcgccggcggcaaggccgtcgagggcggcaacaagggcctgttcgtcaaggtcaacatggacggcgtgcccatcggccggaagctcgacctgggcggccacgccggctacgacacgctaaccgccgccgtcgaccacctcttccgcggcctcctctccgctcaaacgtcgggaccaggcggcgagcggcaggcggtcgcggggatcctgaacggtggcggcgagtacacgctggtgtacgaggacgacgagggagaccagatgctggtcggggacgtgccgtggcagatgttcgccgccaccgccaggcgtctgcgcgtgctgcggagctccgatctcaacccctcgtcgctaagggcagctaccaggaagagagctgcagcttagtgcttcgctggcgtaccctggagtctcaactctgaacattttgcggccttttcggagggccaccaatgtaaaattgaagcggtttttcgtggattttagttaccattaccatcatgtatgtgatcaagtagggaagcaggaatctagaggtgatgagcggtgttggtagaatcacgtaatttagtgctaggaccagcagtgtctcaacttttctgaaagtctaacaaggtgtcttggcgctggagtgt

SEQ ID NO: 16774 - protein, 234 aa, Zea mays subsp. mays
  misc_feature (1)..(234): Ceres Seq. ID no. 12354076
MAWNGRFGNDEEGSGLELSLSLPGYFSGSPTQAAAGFEDKADGGSAAAAAAARAKGSNGFKARPAAAAPVVGWPPVRAFRRNLASASSKPSRDPPPSHRGNESASVGAGGKAVEGGNKGLFVKVNMDGVPIGRKLDLGGHAGYDTLTAAVDHLFRGLLSAQTSGPGGERQAVAGILNGGGEYTLVYEDDEGDQMLVGDVPWQMFAATARRLRVLRSSDLNPSSLRAATRKRAAA

SEQ ID NO: 16775 - protein, 174 aa, Zea mays subsp. mays
  misc_feature (1)..(174): Ceres Seq. ID no. 12354077
MAASARVPAEPRLGVLQAVPRSATKPQRKRVRERRRRRQGRRGRQQGPVRQGQHGRRAHRPEARPGRPRRLRHANRRRRPPLPRPPLRSNVGTRRRAAGGRGDPERWRRVHAGVRGRRGRPDAGRGRAVADVRRHRQASARAAELRSQPLVAKGSYQEESCSLVLRWRTLESQL

SEQ ID NO: 16776 - protein, 142 aa, Zea mays subsp. mays
  misc_feature (1)..(142): Ceres Seq. ID no. 12354078
MAASATTRRGAALSSALASRATSPDHQPKLQQVSRTKQTAALLLLLLLREQREAMASRPGRRQLLRSWDGRQCARSGGTSPRRPPSRPAIRHQATEETSPRASAPAARPSRAATRACSSRSTWTACPSAGSSTWAATPATTR

SEQ ID NO: 16777 - DNA, 705 bp, Zea mays subsp. mays
  misc_feature (1)..(705): Ceres Seq. ID no. 12354101
tactttgctctgctctgctcctccatggccagcagctactactccctcatgctgctcctgctgctggcggccacggccgtagcagaagaagcagccgccgaggcgtccggaggcggcggcaacgcgaccgagacgtcgccgccgccgccgacggcgtacgagatgctggagcggtacggcttcccgcggggcatcctgccggcgggcgtgacagggtacgagctcggcgcggacggcgccttcgaggtgtacttcccgcgggcctgcgagttcctgctggcgaggacgtggctggtccgctacgaggcgcgcgtgtccgggtccgtcgccgcgggctcgctcacggcgctgcgggggatcagcgtgaaggtgctgttcctgtggctcggcgtcggcgaggtggaccgcgccggggagacgctcagcttctacatcggccccgtcgccacgtcgttcccgatcgacgacttcgccgagagcccgcgctgccgcggctatgatgccgaggcggcggcctcgtcgtgactcatgacgcagccttcagccggcggtgattattaggactgccttggtgatttagctggctatatatacacgtgtgcatcgatcgagtcggagccggcgattagctatttttcctcgtcctttaatttttgtttatttcgcggactttgagtaagctgtttgcggtgatcttgttgcccc

SEQ ID NO: 16778 - protein, 174 aa, Zea mays subsp. mays
  misc_feature (1)..(174): Ceres Seq. ID no. 12354102
YFALLCSSMASSYYSLMLLLLLAATAVAEEAAAEASGGGGNATETSPPPPTAYEMLERYGFPRGILPAGVTGYELGADGAFEVYFPRACEFLLARTWLVRYEARVSGSVAAGSLTALRGISVKVLFLWLGVGEVDRAGETLSFYIGPVATSFPIDDFAESPRCRGYDAEAAASS

SEQ ID NO: 16779 - protein, 166 aa, Zea mays subsp. mays
  misc_feature (1)..(166): Ceres Seq. ID no. 12354103
MASSYYSLMLLLLLAATAVAEEAAAEASGGGGNATETSPPPPTAYEMLERYGFPRGILPAGVTGYELGADGAFEVYFPRACEFLLARTWLVRYEARVSGSVAAGSLTALRGISVKVLFLWLGVGEVDRAGETLSFYIGPVATSFPIDDFAESPRCRGYDAEAAASS

SEQ ID NO: 16780 - protein, 165 aa, Zea mays subsp. mays
  misc_feature (1)..(165): Ceres Seq. ID no. 12354104
LCSALLLHGQQLLLPHAAPAAGGHGRSRRSSRRGVRRRRQRDRDVAAAADGVRDAGAVRLPAGHPAGGRDRVRARRGRRLRGVLPAGLRVPAGEDVAGPLRGARVRVRRRGLAHGAAGDQREGAVPVARRRRGGPRRGDAQLLHRPRRHVVPDRRLRREPALPRL

SEQ ID NO: 16781 - DNA, 1234 bp, Zea mays subsp. mays
  misc_feature (1)..(1234): Ceres Seq. ID no. 12354115
acccaaaaccagaattaattatctgacggtgcatgccatgcccatgacacccctcgagtgcgacatggcccctgcagcttctcgccagtcgtggcctcttcctcgctgcggcctgctggtcttggcccttgcactggcgacgaccgccgcggtgggcagcgcgcagctgtcgtcggagagctactacgacgcgtcctgccccgccgcccttctcaccatcaggaccgccgtctcgacggccgtgctgctggagccccgcatgggggcctcccttctccgcctccacttccacgactgtttcgtgcagggttgcgacgcgtcggtgctgctagacgacacggcgagcttcaccggcgagaagggggcggggccgaacgcggggtcgctccggggcttcgacgtgatcgacaacatcaagatgctgctggagctgctgtgccccgcagaccgtctcctgcgccgacatcctcgccgtcgccgcccgcgactcggttgcacaactgggaggaccatcgtgggcggttccgctgggcaggagggacgcgaccacggcgagcgcgtccctggccaacagtgacctccctgggcctaccagcagcctcaacggcctgctcaacgctttctccaacaagggtttgagcagcaccgacatggttgccctctcaggtgcccacaccgtcggccgggcgcagtgcaagaactgccgggcccggatctacaacgacaccgacatcgacgcctccttcgcggcgtcgctgcgggccagctgtcccgcgcaggccggcgccggcgacggcgcgctcgagccgctcgacggctccacgccggacgccttcgacaacgcctacttcggcaacctgctctcccagcgcggcctgctccactccgaccaggcgctcttcggcggcggcggcggcggcgcgactgacggcctggtcagcgcctacgcgtccaacgccggccagtggggggccgacttcgcggcggccatggtcaagatgggcagcatcagcccgctcaccggcacggacggcgagatcagggtcaactgccggagagtgaattaattatttattacagccacgttgattgcatttgctcttggggtagtggactagcgtgcatattttgcaaagaggcagagaagaattgaaatggagcctaagctcatatgtatacaaatgttgtttattattccatattatttcttgcatatataatatatatagcatac

SEQ ID NO: 16782 - protein, 191 aa, Zea mays subsp. mays
  misc_feature (1)..(191): Ceres Seq. ID no. 12354116
PKTRINYLTVHAMPMTPLECDMAPAASRQSWPLPRCGLLVLALALATTAAVGSAQLSSESYYDASCPAALLTIRTAVSTAVLLEPRMGASLLRLHFHDCFVQGCDASVLLDDTASFTGEKGAGPNAGSLRGFDVIDNIKMLLELLCPADRLLRRHPRRRRPRLGCTTGRTIVGGSAGQEGRDHGERVPGQQ

SEQ ID NO: 16783 - protein, 179 aa, Zea mays subsp. mays
  misc_feature (1)..(179): Ceres Seq. ID no. 12354117
MPMTPLECDMAPAASRQSWPLPRCGLLVLALALATTAAVGSAQLSSESYYDASCPAALLTIRTAVSTAVLLEPRMGASLLRLHFHDCFVQGCDASVLLDDTASFTGEKGAGPNAGSLRGFDVIDNIKMLLELLCPADRLLRRHPRRRRPRLGCTTGRTIVGGSAGQEGRDHGERVPGQQ

SEQ ID NO: 16784 - protein, 177 aa, Zea mays subsp. mays
  misc_feature (1)..(177): Ceres Seq. ID no. 12354118
MTPLECDMAPAASRQSWPLPRCGLLVLALALATTAAVGSAQLSSESYYDASCPAALLTIRTAVSTAVLLEPRMGASLLRLHFHDCFVQGCDASVLLDDTASFTGEKGAGPNAGSLRGFDVIDNIKMLLELLCPADRLLRRHPRRRRPRLGCTTGRTIVGGSAGQEGRDHGERVPGQQ

SEQ ID NO: 16785 - DNA, 726 bp, Zea mays subsp. mays
  misc_feature (1)..(726): Ceres Seq. ID no. 12354125
ccactcatctatttcttttgaatcattgtatactagctagctagctagccagagcttgtatggccactgctcatcatgcggatgaccatcgtgcagggagaagaagcgaggccgtcggagagaactacatgaggggcctctacggcgacgatgactacaacgccacccactacggtcaccagcagcagcagcggccgccgcccgcgcccatggcggtggccaaggcgttagccacagccacggcagccttctccatgttgttgttgtcggggctggcggtgacgggcacggtgctggcgctcatcgtggcgacgccattgatggtgatcttcagccccgtgctggtgccggcggccatcacggtggcgctgctcacggtaggcatcgtttcgtcgggagggttcggcgtggctgcggtggctgtgctggcgtgggtgtaccgctaccttcagaccacgacctcgtcgtcgggtcagcagccgcacatcgtcaaggactgggcgcagcagcaccgtctggagcagacacgcgcgcactgaaataaaaaaaaaagcgtagtacccctccgtttctttttatttgttgctgtttagttcatatttgtcactgtttcgttaaaaatgaactagcgggataacgagaacgggaggtaatatagcttttcatttaatgtaatgtaacgtaatcttatgtttgcagcagtaataatgtgtattatatatttgc

SEQ ID NO: 16786 - protein, 159 aa, Zea mays subsp. mays
  misc_feature (1)..(159): Ceres Seq. ID no. 12354126
MATAHHADDHRAGRRSEAVGENYMRGLYGDDDYNATHYGHQQQQRPPPAPMAVAKALATATAAFSMLLLSGLAVTGTVLALIVATPLMVIFSPVLVPAAITVALLTVGIVSSGGFGVAAVAVLAWVYRYLQTTTSSSGQQPHIVKDWAQQHRLEQTRAH

SEQ ID NO: 16787 - protein, 136 aa, Zea mays subsp. mays
  misc_feature (1)..(136): Ceres Seq. ID no. 12354127
MRGLYGDDDYNATHYGHQQQQRPPPAPMAVAKALATATAAFSMLLLSGLAVTGTVLALIVATPLMVIFSPVLVPAAITVALLTVGIVSSGGFGVAAVAVLAWVYRYLQTTTSSSGQQPHIVKDWAQQHRLEQTRAH

SEQ ID NO: 16788 - protein, 109 aa, Zea mays subsp. mays
  misc_feature (1)..(109): Ceres Seq. ID no. 12354128
MAVAKALATATAAFSMLLLSGLAVTGTVLALIVATPLMVIFSPVLVPAAITVALLTVGIVSSGGFGVAAVAVLAWVYRYLQTTTSSSGQQPHIVKDWAQQHRLEQTRAH

SEQ ID NO: 16789 - DNA, 1004 bp, Zea mays subsp. mays
  misc_feature (1)..(1004): Ceres Seq. ID no. 12354129
aggcaaacggttcacacgttcgaaccccatatggctgaacccaagtcaaataatggcggggcggacgcgacggcatcgatgatgctccacggccgcgtagccattgtcaccggtggtgccggcggcatcggctcggccgtgtcgaagcacctgtcgtcgctcggcgcgcgcgtcgtggtggggtacatcggcgacccggcacctgctctgacgctggtagccgccatcaactcctccgagcaccccggcgagagccagcagccgcgagccatcgcggtcgaggcggacgtgtccgacgcggcagccgtgaaggcgctgttcgacgcggccgccgcagccttcggcggggagctccacatcctggtaacgttggcggcggtgctggactactcctacccgccgctggcggagaccagcgaggcgacgttcgacgccgccttcagcgtcaacacacggggcaccttcctgtgctgccgcgaggcggccaggcggctggtgcgtgacggccgcggccgaatcgtgacgttctcttcgtcgggagttgggtctctgcgccctggctactcggcatacgcagcaagcaaggccgcggtggaggtgatgactaagatcctggcgcgcgagctgcgcggcacggggatcacggccaacgtggtggcgccagggtccacggggacacccatgatgtacaccggcaagacggaggatgacatggagcgatacatcgccgaggcgccgctgggccggctcggcatgcccgaggacatcgcgccgctcgtcagcttcctcgctagtgatgctggccactgggtcaacgcgcaggtcctgcgctgcaacggtggcaccatctagctagtactgcgtgcctactttttatggttgattagatgtattttcctcggagcataaatttaagcttgtggcgcagttatcgcttggcagttcattaatttatttaaagattgtgtcgtttattctattgtgtgtatttataatcaggctcc

SEQ ID NO: 16790 - protein, 283 aa, Zea mays subsp. mays
  misc_feature (1)..(283): Ceres Seq. ID no. 12354130
RQTVHTFEPHMAEPKSNNGGADATASMMLHGRVAIVTGGAGGIGSAVSKHLSSLGARVVVGYIGDPAPALTLVAAINSSEHPGESQQPRAIAVEADVSDAAAVKALFDAAAAAFGGELHILVTLAAVLDYSYPPLAETSEATFDAAFSVNTRGTFLCCREAARRLVRDGRGRIVTFSSSGVGSLRPGYSAYAASKAAVEVMTKILARELRGTGITANVVAPGSTGTPMMYTGKTEDDMERYIAEAPLGRLGMPEDIAPLVSFLASDAGHWVNAQVLRCNGGTI

SEQ ID NO: 16791 - protein, 273 aa, Zea mays subsp. mays
  misc_feature (1)..(273): Ceres Seq. ID no. 12354131
MAEPKSNNGGADATASMMLHGRVAIVTGGAGGIGSAVSKHLSSLGARVVVGYIGDPAPALTLVAAINSSEHPGESQQPRAIAVEADVSDAAAVKALFDAAAAAFGGELHILVTLAAVLDYSYPPLAETSEATFDAAFSVNTRGTFLCCREAARRLVRDGRGRIVTFSSSGVGSLRPGYSAYAASKAAVEVMTKILARELRGTGITANVVAPGSTGTPMMYTGKTEDDMERYIAEAPLGRLGMPEDIAPLVSFLASDAGHWVNAQVLRCNGGTI

SEQ ID NO: 16792 - protein, 257 aa, Zea mays subsp. mays
  misc_feature (1)..(257): Ceres Seq. ID no. 12354132
MMLHGRVAIVTGGAGGIGSAVSKHLSSLGARVVVGYIGDPAPALTLVAAINSSEHPGESQQPRAIAVEADVSDAAAVKALFDAAAAAFGGELHILVTLAAVLDYSYPPLAETSEATFDAAFSVNTRGTFLCCREAARRLVRDGRGRIVTFSSSGVGSLRPGYSAYAASKAAVEVMTKILARELRGTGITANVVAPGSTGTPMMYTGKTEDDMERYIAEAPLGRLGMPEDIAPLVSFLASDAGHWVNAQVLRCNGGTI

SEQ ID NO: 16793 - DNA, 1295 bp, Zea mays subsp. mays
  misc_feature (1)..(1295): Ceres Seq. ID no. 12354202
aggaaatgactcgtcaacgcaactaccccaagtcgccgctgagccactctctccgtccgcgaatccgtaaatggaaggggacgaaatgctcagggttaagctcggcaggcagggccttgaggtgtccaagcttggcttcgggtgcatgggcctcactggagtgtacaacgcccctgttcctgaccaagctgggatcgacataatcaagcacgcgtttgaggccggcatcaccttcttcgacaccgctgatgcctatgggccacacaccaacgaggtcctgctcggaaaggcattgaaacattttcctcgtgagaaggtgcaaattgccaccaaatgtggcattgcaggatttgatgcaagtggcatgcgtgtgaagggcactccagattatgttcgagcttgttgtgaagcaagccttcagcgccttgctactgactacattgatatatactaccaacatcgcattgatcagtcagtgcctatagaggaaactatgggagagctcaagaagttggttgaagaagggaaagtgaggtatgttggcttatcagaggctagtgccgataccattcgacgggcacatgctgtccatccaattactgcggtgcagttggagtggtcactatggaccagagatatagaggaagatataattccagtctgcagggagcttggtattggaatagttccatatagcccacttggccgtggcttctttgctggcagggcagctgtagaacgtgttccatcagaaagtctattgtctaaacatccaagatattctggggaaaacttggagaagaataaagttctgtatacacgacttgaaatgttgtccaagaagtatgggtgcacacctgctcaactcgctctctcctgggttcttcatcaaggagaagatgtggtccccatccctggaacaacaaaagccaagaaccttgacgaaaatatcggtgctgtaaaggtaaggctgagcaaggaagacctcgaagaaatctcaggcgcattccctgctggtgaggtggctgggtctagactccttggagtcttggagcctttttcctggaggctcgcaaataccccgcctccaaaatagcgagttcagatgcaaattcttggccatcctaccatttaggtcatgttatgttagatcatatctacatgatgcaaatgattgttcctgtgctcgcgcgtgaaaatgcatgtacctgaaacaaagagatgtaacagttggttctctgtgtggaacgtgctgattgctatagttgatcaaagaaatacgttggaattaagtt

SEQ ID NO: 16794 - protein, 341 aa, Zea mays subsp. mays
  misc_feature (1)..(341): Ceres Seq. ID no. 12354203
MEGDEMLRVKLGRQGLEVSKLGFGCMGLTGVYNAPVPDQAGIDIIKHAFEAGITFFDTADAYGPHTNEVLLGKALKHFPREKVQIATKCGIAGFDASGMRVKGTPDYVRACCEASLQRLATDYIDIYYQHRIDQSVPIEETMGELKKLVEEGKVRYVGLSEASADTIRRAHAVHPITAVQLEWSLWTRDIEEDIIPVCRELGIGIVPYSPLGRGFFAGRAAVERVPSESLLSKHPRYSGENLEKNKVLYTRLEMLSKKYGCTPAQLALSWVLHQGEDVVPIPGTTKAKNLDENIGAVKVRLSKEDLEEISGAFPAGEVAGSRLLGVLEPFSWRLANTPPPK

SEQ ID NO: 16795 - protein, 336 aa, Zea mays subsp. mays
  misc_feature (1)..(336): Ceres Seq. ID no. 12354204
MLRVKLGRQGLEVSKLGFGCMGLTGVYNAPVPDQAGIDIIKHAFEAGITFFDTADAYGPHTNEVLLGKALKHFPREKVQIATKCGIAGFDASGMRVKGTPDYVRACCEASLQRLATDYIDIYYQHRIDQSVPIEETMGELKKLVEEGKVRYVGLSEASADTIRRAHAVHPITAVQLEWSLWTRDIEEDIIPVCRELGIGIVPYSPLGRGFFAGRAAVERVPSESLLSKHPRYSGENLEKNKVLYTRLEMLSKKYGCTPAQLALSWVLHQGEDVVPIPGTTKAKNLDENIGAVKVRLSKEDLEEISGAFPAGEVAGSRLLGVLEPFSWRLANTPPPK

SEQ ID NO: 16796 - protein, 316 aa, Zea mays subsp. mays
  misc_feature (1)..(316): Ceres Seq. ID no. 12354205
MGLTGVYNAPVPDQAGIDIIKHAFEAGITFFDTADAYGPHTNEVLLGKALKHFPREKVQIATKCGIAGFDASGMRVKGTPDYVRACCEASLQRLATDYIDIYYQHRIDQSVPIEETMGELKKLVEEGKVRYVGLSEASADTIRRAHAVHPITAVQLEWSLWTRDIEEDIIPVCRELGIGIVPYSPLGRGFFAGRAAVERVPSESLLSKHPRYSGENLEKNKVLYTRLEMLSKKYGCTPAQLALSWVLHQGEDVVPIPGTTKAKNLDENIGAVKVRLSKEDLEEISGAFPAGEVAGSRLLGVLEPFSWRLANTPPPK

SEQ ID NO: 16797 - DNA, 1147 bp, Zea mays subsp. mays
  misc_feature (1)..(1147): Ceres Seq. ID no. 12354206
atccatccatccacacacacaaacagacagacagacaagcatacaacaccgttgccatttagttgtgttcttgctaggcagttgcgcacttacattgagccgcagctagctgtctacggcacaactatctcctgcgcgcgtgctcgatctgaagctaggccagacctgagcctgtccaattttgccttgttctacccaccggtagtcgagaaggttccataagcgcaagcagacagcaaaagagctaaggggtctgagacaaggttcgaacagatggaggatgtggtgaagttcgtctttggagtttctggaaatgtcatcgctctcttcctcttcctgtccccagtgcctacgttctggaggatcatcaggaggaagtcgacggaggatttctcaggggtgccgtacagcatgacactcctcaactgcctcttgtcagcttggtacgggctgccgttcgtgtccccgaacaacatgctggtgtcgacgatcaacggcgcgggcgcggcgatcgaggccgtgtacgtggtgatcttcctggcgtcggcggtctcggcggcgttcgccgccgtggcgctggcgtcgatgctggcgctgcacggacagggccggaagctcatgtgcggcctcgccgccaccgtctgctccatctgcatgtacgcctcgccgctctccatcatgaggctggtggtgaagaccaagagcgtggagtacatgccgttcctgctgtcgctggccgtgttcctgtgcggcacgtcctggttcgtctacggcctgctcggccgggaccccttcgtcgcgattcccaacgggtgcgggagctttctgggcgcagtgcagctggtcttgtacgccatctaccgcgacagcaacagcggcggcaagcagcaggccggcgacgacgtggagatggcctccgacgccaagagcagcaagaaggtcgccgacgacgtcggcggcaaggaggaccgcctggtctagcatggagctagccactttctctttcggtgcgcgagcgtatgtttcctccccccgtgattgtgtgtgtgtgcatgtatacgagagtgcgtgctgtactgtactacctctgcgtgtgtgcaataatgtaactgggtgtttcatctcgcaatcgggtgtttttctctcc

SEQ ID NO: 16798 - protein, 235 aa, Zea mays subsp. mays
  misc_feature (1)..(235): Ceres Seq. ID no. 12354207
MEDVVKFVFGVSGNVIALFLFLSPVPTFWRIIRRKSTEDFSGVPYSMTLLNCLLSAWYGLPFVSPNNMLVSTINGAGAAIEAVYVVIFLASAVSAAFAAVALASMLALHGQGRKLMCGLAATVCSICMYASPLSIMRLVVKTKSVEYMPFLLSLAVFLCGTSWFVYGLLGRDPFVAIPNGCGSFLGAVQLVLYAIYRDSNSGGKQQAGDDVEMASDAKSSKKVADDVGGKEDRLV

SEQ ID NO: 16799 - protein, 189 aa, Zea mays subsp. mays
  misc_feature (1)..(189): Ceres Seq. ID no. 12354208
MTLLNCLLSAWYGLPFVSPNNMLVSTINGAGAAIEAVYVVIFLASAVSAAFAAVALASMLALHGQGRKLMCGLAATVCSICMYASPLSIMRLVVKTKSVEYMPFLLSLAVFLCGTSWFVYGLLGRDPFVAIPNGCGSFLGAVQLVLYAIYRDSNSGGKQQAGDDVEMASDAKSSKKVADDVGGKEDRLV

SEQ ID NO: 16800 - protein, 168 aa, Zea mays subsp. mays
  misc_feature (1)..(168): Ceres Seq. ID no. 12354209
MLVSTINGAGAAIEAVYVVIFLASAVSAAFAAVALASMLALHGQGRKLMCGLAATVCSICMYASPLSIMRLVVKTKSVEYMPFLLSLAVFLCGTSWFVYGLLGRDPFVAIPNGCGSFLGAVQLVLYAIYRDSNSGGKQQAGDDVEMASDAKSSKKVADDVGGKEDRLV

SEQ ID NO: 16801 - DNA, 839 bp, Zea mays subsp. mays
  misc_feature (1)..(839): Ceres Seq. ID no. 12354220
acagtctcgcagccgccgcgatctgctagcccccgaaccctagctcaatgggaaccgccgcttctccttctccctcactttccctagacacagccgcctcccgtcctgatcctccttccccggaggccaccgctacaccagccaaagaagatcaccagcactccgcctccgacgccgcgaccgccgcagctggcggcggcgcagacgatgcggcggcggctccttctgttggaggcggcgcggaagaggctgctgagacggtggtcatcgatgcctccgcggtggccagcggagcaggggagggggaggaggaggaggagcaaggggagtgcgggttctgtctcttcatgaagggcggcggctgcaaggacgagttcgtcgcgtgggagaagtgcgtggaggagacggatgccgcggatgccagcattgacgtcgtggagcggtgccaagacgtcacggccgcgctgcggaagtgcatggacgcgcacgccgcctactacgagcctatcctccgggccgagcgcgccatggctgcggacctcgaggcctttcaggcccaagaagccgcctccgactccgcggcgtcggaggaaggccagaaggaggcggcagcggcggccgaggcagcgccgcgtccgtcagacgaaggccagaataagcaggtggctgaggcggcagttgcggaggagagcagagatcctgcagcctgattgggcgaaaaaaggcagcggcgtcttcaattttttgtgagggatttgaggatatgaattccgtttgtaccttaggagagcatcaattaacattttgtgagggggatagatttctgtccttttctcttt

SEQ ID NO: 16802 - protein, 220 aa, Zea mays subsp. mays
  misc_feature (1)..(220): Ceres Seq. ID no. 12354221
MGTAASPSPSLSLDTAASRPDPPSPEATATPAKEDHQHSASDAATAAAGGGADDAAAAPSVGGGAEEAAETVVIDASAVASGAGEGEEEEEQGECGFCLFMKGGGCKDEFVAWEKCVEETDAADASIDVVERCQDVTAALRKCMDAHAAYYEPILRAERAMAADLEAFQAQEAASDSAASEEGQKEAAAAAEAAPRPSDEGQNKQVAEAAVAEESRDPAA

SEQ ID NO: 16803 - protein, 120 aa, Zea mays subsp. mays
  misc_feature (1)..(120): Ceres Seq. ID no. 12354222
MKGGGCKDEFVAWEKCVEETDAADASIDVVERCQDVTAALRKCMDAHAAYYEPILRAERAMAADLEAFQAQEAASDSAASEEGQKEAAAAAEAAPRPSDEGQNKQVAEAAVAEESRDPAA

SEQ ID NO: 16804 - protein, 113 aa, Zea mays subsp. mays
  misc_feature (1)..(113): Ceres Seq. ID no. 12354223
MPRMPALTSWSGAKTSRPRCGSAWTRTPPTTSLSSGPSAPWLRTSRPFRPKKPPPTPRRRRKARRRRQRRPRQRRVRQTKARISRWLRRQLRRRAEILQPDWAKKGSGVFNFL

SEQ ID NO: 16805 - DNA, 1015 bp, Zea mays subsp. mays
  misc_feature (1)..(1015): Ceres Seq. ID no. 12354274
attggaagccaccagcaagagaccaacagcaagggtgcgaagaaagggtggccccctagctagcctagctagagagagagagagtcatcataatactcagagagaagcacgagcacagctgcactagctagctactgcaaagaagcaagctctcgatcacaatggccgccattccttctctgctgcgtcgtcgactcgccattgtcatcgccaccaccgccatgctcgtcctgcttccctccccgtccgtcgccggcgaccccgacctgctccaggacatctgcgtcgcggacctcacgtccaccgtgaaggtgaacgggtacgcctgcaaggcggcggcggcggtgacggcggacgacttctacttcagcggcctaggcggcgcgggcaacacgagcgccagcgcctacggctccgcggtgacgggcgcgaacgtggagaaggtgccggggctgaacacgctgggcgtgtccatgtcgcgcatcgactacgcgccgggcgggggcctgaacccgccgcacacgcacccgcgcgccaccgagatggtgttcgtgctgcagggcaccctggacgtgggcttcgtcaccgccgccaacaaccgcctggtggcccgcaccctggcgcccggcgacgtgttcgtcttcccgcgcggcctcgtccacttccagcgcaacgccggcgacggccccgccgccgtcttgtccgcgttcaacagccagcttcccggcacgcagtccctcgccgccgcgctgttcgcggcgtcgcccgagctgcccgacgccgtgctcgccaaggcgttccaggtcggcaccaaggaggtggacaagatcaaggctaggctcgcgcccaaaaaggcctgaaggtcgtactgtttacgcggtcatccttgaatattttttttcccagattatgatttatgacttggttgctaccctgctgtacctccactaataagcaactgtctctgctagtctgctgcatgccttttatctgttatgtatgattcttcagctcc

SEQ ID NO: 16806 - protein, 232 aa, Zea mays subsp. mays
  misc_feature (1)..(232): Ceres Seq. ID no. 12354275
MAAIPSLLRRRLAIVIATTAMLVLLPSPSVAGDPDLLQDICVADLTSTVKVNGYACKAAAAVTADDFYFSGLGGAGNTSASAYGSAVTGANVEKVPGLNTLGVSMSRIDYAPGGGLNPPHTHPRATEMVFVLQGTLDVGFVTAANNRLVARTLAPGDVFVFPRGLVHFQRNAGDGPAAVLSAFNSQLPGTQSLAAALFAASPELPDAVLAKAFQVGTKEVDKIKARLAPKKA

SEQ ID NO: 16807 - protein, 212 aa, Zea mays subsp. mays
  misc_feature (1)..(212): Ceres Seq. ID no. 12354276
MLVLLPSPSVAGDPDLLQDICVADLTSTVKVNGYACKAAAAVTADDFYFSGLGGAGNTSASAYGSAVTGANVEKVPGLNTLGVSMSRIDYAPGGGLNPPHTHPRATEMVFVLQGTLDVGFVTAANNRLVARTLAPGDVFVFPRGLVHFQRNAGDGPAAVLSAFNSQLPGTQSLAAALFAASPELPDAVLAKAFQVGTKEVDKIKARLAPKKA

SEQ ID NO: 16808 - protein, 128 aa, Zea mays subsp. mays
  misc_feature (1)..(128): Ceres Seq. ID no. 12354277
MSRIDYAPGGGLNPPHTHPRATEMVFVLQGTLDVGFVTAANNRLVARTLAPGDVFVFPRGLVHFQRNAGDGPAAVLSAFNSQLPGTQSLAAALFAASPELPDAVLAKAFQVGTKEVDKIKARLAPKKA

SEQ ID NO: 16809 - DNA, 1240 bp, Zea mays subsp. mays
  misc_feature (1)..(1240): Ceres Seq. ID no. 12354293
aaaaacagtgcactgactgagtgagtgtcatccagtgcaagctcccagtcccagtcccagtcccagtcccagggtagtagaggactagaggcaggctagagcaaagcacgcggattgcgtggctagcgcaacaatggcgatggccacggccaagctcgtccttctcatggtcctcgtggccggcagctccagcggcggcagcgcgtgggggccgctgatgagccgcctccggatgccgacggcgcgggtcgccccgtcgaggtggcgaaggagcgcctccaggaggactacgtcgtatcggcggctgcgccgctgatccacgcgctgcggccgctgctgggctccgcgggggacctgggccggcgcgccggcgtgccgtgcgacagctggcgcctggccgtggagacgtacaacaagcgcgattggacgacggtgccggccagctgcgagcgctacgtcggccactacatgctcggcggccactaccgccgggactcccgcgtcgtcatcgacgaggccatcgcctacgccgagggcctcaagctgggcggcaacggcaaggaggtctgggtcttcgatatcgacgagacgtccctctccaatctcccctactatgccacccacggcttcggcactaagctatacaacgcgacgagcttcaacgagtacgtgctggaggggagcgcgccggtgctcccggagacgcagcggctgttcaagaagctcgtctcgctgggcatcaagccggtgttcctgacgggccgcaccgaggaccagagggccatcaccgtcaccaacctccgccgccaggggtactccggctggatgacgctgctgctcaagcccgtcggcctcaaggccaccgccatcgcctacaagtccggcgagcgccagaagctccaggacgccgggtacgtcatcgtcggcaacatcggcgaccagtggagcgacatcctcggcgcgccggagggcgcgcgcaccttcaagctgcctgaccccctctactacattggctaagcagcgatgccaacggcgcggctctccatcagcccatcgatcaacccgtcaccccggctccagtgcctgtgctcaactgctctttgtttgttacccctcacttcttatcatcattaattcctaaggttaattccctgagctgagtggaaataaggccgactcggtggagagctgtcgacttctcaataattgctcatgaaaaccatgatggtttatgttatgc

SEQ ID NO: 16810 - protein, 182 aa, Zea mays subsp. mays
  misc_feature (1)..(182): Ceres Seq. ID no. 12354294
MLGGHYRRDSRVVIDEAIAYAEGLKLGGNGKEVWVFDIDETSLSNLPYYATHGFGTKLYNATSFNEYVLEGSAPVLPETQRLFKKLVSLGIKPVFLTGRTEDQRAITVTNLRRQGYSGWMTLLLKPVGLKATAIAYKSGERQKLQDAGYVIVGNIGDQWSDILGAPEGARTFKLPDPLYYIG

SEQ ID NO: 16811 - DNA, 1675 bp, Zea mays subsp. mays
  misc_feature (1)..(1675): Ceres Seq. ID no. 12354295
atagaacatcctaatcgaaaaattttctggttgcagattgattctttaccatttgtatcgccattcctccctgttcgttgggcgtggggtctcaacctaaaatcagtcccattccgcgctcctagtggagagtggattcgaacggaaacacctttttgtgccccaagatgcctgtttccgcttcgtttccacgccacaccttttgaatcctttgccgtcacctcgccttttgcagcactagttgtttgtcagccttcttggagtgtggaggggcagagagcgccgtcctgttgattcaggaaaacagtccgagccgatgggcaggaagagcgacggcgcgcggttgcaatgcgctgaggccaaactggcgacggattggacctgctgcttcctggccctgccaccggcagcaccatccgctgtggatggcgatggtggattcaacctctcgtggaacctccaccagtccttccacccgccggccggcttcttcgccagcgtgggccagcaggttggggttgggttcccagggccttcgtcccagtcgccggagacgccacgggacccatacatgaagtacgtctcgccggaggttgttgtgacacctctgccgagggaaggcgtggtggggttgagggacaaggggaagaagaaagtcgtgaagctcaagattaaggttgggaatcatcacctcaagagactgatcagtggagcaatcgcaggcgcagtgtcaagaactgctgttgcacctttggagacgatcaggacgcatttgatggtgggaagtaatgggaattcgacgacggaggtgttccagtctatcatgaagcatgagggatggactgggttgttccgtggtaacgttgttaatgtcatccgggtagccccaagcaaggcaatcgagctttttgcctttgatacagctaataagttcttgacccccaaatatggggagaaaccgaagatcccagtccctccttcactagtggctggggcatttgccggtgttagctcaactctgtgtacatacccactggaattaattaagacacggctaactatacagagaggcgtgtatgacaatttccttgatgcatttgtcaaaatcatccgcgacgaagggccttctgagctctaccgaggcttaaccccaagcttgattggagtggtgccatatgctgcaacgaactacttcgcctatgacagcctgaagaaggtgtacaagaagatgttcaagacaaatgagattggcagtgttccaacactgttcatcgggtctgccgcaggagctatctcaagcacagcgacgttccctcttgaggtggcacggaagcacatgcaagttggagctgttggtggcaggaaggtttacaagaacatgcttcatgccttgttgagcattcttgaggatgaaggggttgggggcctttacagagggttggggccaagctgcatgaagttggtgcctgctgctgggatttcgttcatgtgctacgaggcttgcaagaagattctgattgaggaagaggatgagtgaagtgtatgcagatcattagaactcagttttgtgacatcctgacagcaggcagcttgaggttactgctgtagtcggcataagttcttaacccctttttgcacccagttttatctgataaactcacctcgttttttcccc

SEQ ID NO: 16812 - protein, 406 aa, Zea mays subsp. mays
  misc_feature (1)..(406): Ceres Seq. ID no. 12354296
MGRKSDGARLQCAEAKLATDWTCCFLALPPAAPSAVDGDGGFNLSWNLHQSFHPPAGFFASVGQQVGVGFPGPSSQSPETPRDPYMKYVSPEVVVTPLPREGVVGLRDKGKKKVVKLKIKVGNHHLKRLISGAIAGAVSRTAVAPLETIRTHLMVGSNGNSTTEVFQSIMKHEGWTGLFRGNVVNVIRVAPSKAIELFAFDTANKFLTPKYGEKPKIPVPPSLVAGAFAGVSSTLCTYPLELIKTRLTIQRGVYDNFLDAFVKIIRDEGPSELYRGLTPSLIGVVPYAATNYFAYDSLKKVYKKMFKTNEIGSVPTLFIGSAAGAISSTATFPLEVARKHMQVGAVGGRKVYKNMLHALLSILEDEGVGGLYRGLGPSCMKLVPAAGISFMCYEACKKILIEEEDE

SEQ ID NO: 16813 - protein, 321 aa, Zea mays subsp. mays
  misc_feature (1)..(321): Ceres Seq. ID no. 12354297
MKYVSPEVVVTPLPREGVVGLRDKGKKKVVKLKIKVGNHHLKRLISGAIAGAVSRTAVAPLETIRTHLMVGSNGNSTTEVFQSIMKHEGWTGLFRGNVVNVIRVAPSKAIELFAFDTANKFLTPKYGEKPKIPVPPSLVAGAFAGVSSTLCTYPLELIKTRLTIQRGVYDNFLDAFVKIIRDEGPSELYRGLTPSLIGVVPYAATNYFAYDSLKKVYKKMFKTNEIGSVPTLFIGSAAGAISSTATFPLEVARKHMQVGAVGGRKVYKNMLHALLSILEDEGVGGLYRGLGPSCMKLVPAAGISFMCYEACKKILIEEEDE

SEQ ID NO: 16814 - protein, 253 aa, Zea mays subsp. mays
  misc_feature (1)..(253): Ceres Seq. ID no. 12354298
MVGSNGNSTTEVFQSIMKHEGWTGLFRGNVVNVIRVAPSKAIELFAFDTANKFLTPKYGEKPKIPVPPSLVAGAFAGVSSTLCTYPLELIKTRLTIQRGVYDNFLDAFVKIIRDEGPSELYRGLTPSLIGVVPYAATNYFAYDSLKKVYKKMFKTNEIGSVPTLFIGSAAGAISSTATFPLEVARKHMQVGAVGGRKVYKNMLHALLSILEDEGVGGLYRGLGPSCMKLVPAAGISFMCYEACKKILIEEEDE

SEQ ID NO: 16815 - DNA, 1330 bp, Zea mays subsp. mays
  misc_feature (1)..(1330): Ceres Seq. ID no. 12354315
attccgggtgctcaatccactagaaccgaacaggccctaaatagatccgtagccgtagcctggcgcgcacattgcagaaagatcgagcggaaggtcggcagcaggcgcatagatgcaggggtgagggcacgggcggcagcgcttgacgggcgacgagtaaaccctaacgctttgattgcgggcgtcgtcgtctgagccagtcccgagtcgatacgctgtcatgcctgtcaatcctcctccgccacctcctgggtcgtcgtctttggctccggcgggggccagctacttcccgctccctttccacctgcagcagcaccagccgccgccgccgcaggtgccgccgcctatggcggcgagcagctatcagcagtatcagcaacagctgcatcaggcccatcagctcttccagcgggacgcgcagaccataacccccgaagcgctgcagagcgtcaaggctgccctcgccaccagcgacgtcctcgaccccgtcgccgccgccaacgccaggctctccgatccctctaccagcaagaagcccatcccccgtcgcgctgccggacaatcctgggaggatcctaccctcactgaatggcccgaaaacgactaccggctgttctgtggagatctaggcaacgaagttaatgatgatgttctctccaaagcattttcacggtttccatcctttaacatggcaagggttgttagagataagaggactggcaaaactaaaggctatggatttgtgagcttttcaaaccctactgacctggctgcagcaataaaagagatgaatggaaagtatgttgggaaccgccctattaaattgcgtaagagtaactggaaggagaggacagatgttgaggctctggaaagacaaaagaatcatgtcaagaggaagcctaaaattcccaagaagactattcttcacaagtagagatacaaaggccctaccgagggtgaatgccagctcatgtgctgccttgggatgatgctaccttctggaatctctttactctctgcaatgctcggggtggaatcacgcaatgctcggggtggaatcacacgcaagggctgttgtttcatgtaaggtgtagtttggaaacttaaattcttttgggatacctgtcttttatcaggatgagtaacccagggatataatttaaataagacatttagttatttaggagatggtttctctctctggtttgacttccccttccaaactaggtctaaggccatcttcagcagatcgtgtaaatggacgtgtaaagtactgttttgcattgtatattgtaactagttgtgtgcccgtgcgttgcaacaggaacat

SEQ ID NO: 16816 - protein, 237 aa, Zea mays subsp. mays
  misc_feature (1)..(237): Ceres Seq. ID no. 12354316
MPVNPPPPPPGSSSLAPAGASYFPLPFHLQQHQPPPPQVPPPMAASSYQQYQQQLHQAHQLFQRDAQTITPEALQSVKAALATSDVLDPVAAANARLSDPSTSKKPIPRRAAGQSWEDPTLTEWPENDYRLFCGDLGNEVNDDVLSKAFSRFPSFNMARVVRDKRTGKTKGYGFVSFSNPTDLAAAIKEMNGKYVGNRPIKLRKSNWKERTDVEALERQKNHVKRKPKIPKKTILHK

SEQ ID NO: 16817 - protein, 195 aa, Zea mays subsp. mays
  misc_feature (1)..(195): Ceres Seq. ID no. 12354317
MAASSYQQYQQQLHQAHQLFQRDAQTITPEALQSVKAALATSDVLDPVAAANARLSDPSTSKKPIPRRAAGQSWEDPTLTEWPENDYRLFCGDLGNEVNDDVLSKAFSRFPSFNMARVVRDKRTGKTKGYGFVSFSNPTDLAAAIKEMNGKYVGNRPIKLRKSNWKERTDVEALERQKNHVKRKPKIPKKTILHK

SEQ ID NO: 16818 - DNA, 1244 bp, Zea mays subsp. mays
  misc_feature (1)..(1244): Ceres Seq. ID no. 12354322
aagcaaaccctaatccgtcggccatgtcgtcctcccccgcggcgctgcgcttctactgccaccagtgcgaccgcaccgtctccctcgcccctcccgcatccccggacgccgacgtcttctgcccccgctgcggcggcggattcgtcgaggagcttcctcccaaccctagccccgcgcctccggccgccgccttctttgccccgccctccttcgacatccgccaccccagcgacctctccgctttcttcggccccgcctcccccgagccgctcgccccaggcctcttcgatccctccaacttccttcacgaccacttcggcggcctcctctccggcggcgccaccatccagatcgtcctcgagggtgggcccccgcccccaggcctcaactttgccgactacttcgtcggctcctccggcctcgagcagctcatccagcagctcgccgagaacgaccccaaccgctacggcaccccgcccgccgccaaggccgccgtcgcctcgctccctgacgtcgctgtctcggccgacatgatgcaggccgacggcggcgctcagtgtgccgtctgcatggacgacttccacctcggcgccgccgccaagcagctcccctgcaagcacgtcttccacaaggactgcatcgtcccatggctacctccacagctcctgcccggtctgccgcttcgagctgcccaccgacgaccctgactacaatcacacccatcagcagcacggtgattcgtctgcccctgctcccccttcccccgctcccgcggtctcctcccccagggtggccgagaggaggtttaggatttcgctgccctggcctctcagggccgcttttggcgctgctcaggcagagagcagcaatcccaccgatgatgacgtgcctccgtctggcagcgatgcagctggtggccctcagtctcagactggatatgatgatctcgactgaggcctcaatagccgatcttggaaacaaataggctatacaccaaagatgagagatgataccgtcgtgtaccaaattaataaatgtgcatcagaagtatggagtcctttaggaacctctgctgactgttgatggaatatggttggtttgttgacactgtcagtgcattgtttctgaagggatatgggcctgttaatttaaaatttgtattcactaatggttgggggaggaacggtggagaaactgagtcatgtatagttgttccttttgcaattgctgcatggtttttttct

SEQ ID NO: 16819 - protein, 234 aa, Zea mays subsp. mays
  misc_feature (1)..(234): Ceres Seq. ID no. 12354323
ANPNPSAMSSSPAALRFYCHQCDRTVSLAPPASPDADVFCPRCGGGFVEELPPNPSPAPPAAAFFAPPSFDIRHPSDLSAFFGPASPEPLAPGLFDPSNFLHDHFGGLLSGGATIQIVLEGGPPPPGLNFADYFVGSSGLEQLIQQLAENDPNRYGTPPAAKAAVASLPDVAVSADMMQADGGAQCAVCMDDFHLGAAAKQLPCKHVFHKDCIVPWLPPQLLPGLPLRAAHRRP

SEQ ID NO: 16820 - protein, 227 aa, Zea mays subsp. mays
  misc_feature (1)..(227): Ceres Seq. ID no. 12354324
MSSSPAALRFYCHQCDRTVSLAPPASPDADVFCPRCGGGFVEELPPNPSPAPPAAAFFAPPSFDIRHPSDLSAFFGPASPEPLAPGLFDPSNFLHDHFGGLLSGGATIQIVLEGGPPPPGLNFADYFVGSSGLEQLIQQLAENDPNRYGTPPAAKAAVASLPDVAVSADMMQADGGAQCAVCMDDFHLGAAAKQLPCKHVFHKDCIVPWLPPQLLPGLPLRAAHRRP

SEQ ID NO: 16821 - protein, 177 aa, Zea mays subsp. mays
  misc_feature (1)..(177): Ceres Seq. ID no. 12354325
KQTLIRRPCRPPPRRCASTATSATAPSPSPLPHPRTPTSSAPAAAADSSRSFLPTLAPRLRPPPSLPRPPSTSATPATSPLSSAPPPPSRSPQASSIPPTSFTTTSAASSPAAPPSRSSSRVGPRPQASTLPTTSSAPPASSSSSSSSPRTTPTATAPRPPPRPPSPRSLTSLSRPT

SEQ ID NO: 16822 - DNA, 1672 bp, Zea mays subsp. mays
  misc_feature (1)..(1672): Ceres Seq. ID no. 12354367
acactcccactcggccactcccacctgtaggttcacgggaggcgaggaccttgcccccctgcattcttcccgtatcgcggaccgatcctcgccgcgggaggcgagcggagcggggcgtttctgcgggggagaagcgcgtccctgcaatttctgagagaggggaggcggcgagtggaaaagagcagacgttgctatcctatcttgctgacacagcggcgttgtggcgaggcgcatggcgagggcgcgcggtggcgccgcgtggtgggtgctggcagcggcgtgggtgctgtgggcggcggcggctgcggcggaggcagaggccaggtcgccgtcggcgaggagggtgcaccggcacctcaagcgcctcaacaagccggccgtcaagagcatcgagagtccagatggagacatcatcgactgcgtgcatatctcccaccagccagcctttgatcatcctctcctcaagaaccacacaatacagtttaggccggcgtaccaccctgaaggtctatacgatgataccaagagcagcataggctcaaacaatgctggcgagaggccgatgctccagatgtggcatcgaaatggcaggtgccccgagggcacggttccaatcaggagaaccaagaaggacgacctgcttcgagctagctccgtgaggcggtatggcaggaagcggcacactgctccgaacccactgtctgttgatcccaacatgctcagcgagggtggccaccaacacgccatcgcgtacgtccagggcgacaagtactatggtgcaaaggccaccattaatgtgtgggagcccaagattcagcaggctaacgaatttagcctgtcccagctctggatcttggggggttcatttggggaggatctcaacagcatagaggctggctggcaggttagccctgacctctatggagacaacaacaccaggctgttcacatattggactagtgatgcataccaagccacaggttgctacaacatgttgtgctctggtttcattcagataaacagcgaggttgccatgggggctagtatcttccccatctcgaactacgcgggctcccaatatgatattagcatcctgatctggaaggaccccaaggaaggcaactggtggatgcagtttggcaaggaatacgtcctgggctactggccgtccttcctcttctcctacctcgcggacagcgcgtcgatgatcgaatggggcggggaggtggtgaactcggagcccgacggcacgcacacatcgacccagatgggcagcgggcacttcccggaggaagggttcagcaaggcgagctacttcaagaacgttcaggtggtgtacagcagcaaccagctcagcgcccccaagggcgtaggcaccttcaccgagcagtccaactgctacgacgtgcagaacggtaacaatggggactggggcacctacttctactacggcggccctggcaagaactcgaactgcccgtgactggtgcttctaatgtgtagtgtgaagtgccgtcaccactagcaaaaaaatgtaacccaagcgttcaggttcgcttatacagcgtcaatctgcatctccttgttcagtcttaggtagtgtgtaacatgtgcatgtgctctctagaccctaatgttttcttcttcttttcattgtattttcttcttgtgc

SEQ ID NO: 16823 - protein, 416 aa, Zea mays subsp. mays
  misc_feature (1)..(416): Ceres Seq. ID no. 12354368
MARARGGAAWWVLAAAWVLWAAAAAAEAEARSPSARRVHRHLKRLNKPAVKSIESPDGDIIDCVHISHQPAFDHPLLKNHTIQFRPAYHPEGLYDDTKSSIGSNNAGERPMLQMWHRNGRCPEGTVPIRRTKKDDLLRASSVRRYGRKRHTAPNPLSVDPNMLSEGGHQHAIAYVQGDKYYGAKATINVWEPKIQQANEFSLSQLWILGGSFGEDLNSIEAGWQVSPDLYGDNNTRLFTYWTSDAYQATGCYNMLCSGFIQINSEVAMGASIFPISNYAGSQYDISILIWKDPKEGNWWMQFGKEYVLGYWPSFLFSYLADSASMIEWGGEVVNSEPDGTHTSTQMGSGHFPEEGFSKASYFKNVQVVYSSNQLSAPKGVGTFTEQSNCYDVQNGNNGDWGTYFYYGGPGKNSNCP

SEQ ID NO: 16824 - protein, 306 aa, Zea mays subsp. mays
  misc_feature (1)..(306): Ceres Seq. ID no. 12354369
MLQMWHRNGRCPEGTVPIRRTKKDDLLRASSVRRYGRKRHTAPNPLSVDPNMLSEGGHQHAIAYVQGDKYYGAKATINVWEPKIQQANEFSLSQLWILGGSFGEDLNSIEAGWQVSPDLYGDNNTRLFTYWTSDAYQATGCYNMLCSGFIQINSEVAMGASIFPISNYAGSQYDISILIWKDPKEGNWWMQFGKEYVLGYWPSFLFSYLADSASMIEWGGEVVNSEPDGTHTSTQMGSGHFPEEGFSKASYFKNVQVVYSSNQLSAPKGVGTFTEQSNCYDVQNGNNGDWGTYFYYGGPGKNSNCP

SEQ ID NO: 16825 - protein, 303 aa, Zea mays subsp. mays
  misc_feature (1)..(303): Ceres Seq. ID no. 12354370
MWHRNGRCPEGTVPIRRTKKDDLLRASSVRRYGRKRHTAPNPLSVDPNMLSEGGHQHAIAYVQGDKYYGAKATINVWEPKIQQANEFSLSQLWILGGSFGEDLNSIEAGWQVSPDLYGDNNTRLFTYWTSDAYQATGCYNMLCSGFIQINSEVAMGASIFPISNYAGSQYDISILIWKDPKEGNWWMQFGKEYVLGYWPSFLFSYLADSASMIEWGGEVVNSEPDGTHTSTQMGSGHFPEEGFSKASYFKNVQVVYSSNQLSAPKGVGTFTEQSNCYDVQNGNNGDWGTYFYYGGPGKNSNCP

SEQ ID NO: 16826 - DNA, 1542 bp, Zea mays subsp. mays
  misc_feature (1)..(1542): Ceres Seq. ID no. 12354375
accgctgttcttgctgagttgttgtggacaaaaagagcacaaaagtgggtagggcaagccaaccacactcgcagccagcctgcctgctcgcccgcccgccattcttgccgattcgagtcgacgtcacgcctccggcgcccccttcggttgtcacctcgggggtcgcggattggtggagtggaggatttgagcggcgcggccatggatacaacctctagggccgccaagatcccgtcgctccaccagacggagatcaactgggataacctcgacaagaccaagctctacgtggtgggcgcaggcatgttcagcggggtcaccgtggcgctgtaccctgtatcggtggtcaagacccggatgcaggttgcctctggggatgccatggggaggaacgcgctggctaccttcaagaacatccttaaggtggacggcgtgccagggctgtaccgggggtttcctactgttataattggggctgtaccaactaggattatcttcctcacggcgcttgagacaaccaaagcagcctctctcaagcttgttgagcccttcaagctgtcagagccggtgcaggccgcctttgccaatggccttgccggtctgtcggcatccacatgttcgcaggctatttttgtcccaattgatgtgatcagccagaaattgatggttcaagggtattctggtaatgtcagatacaaaggtggagtagatgttgctcgcaaggtcataaaggctgatggcattaaggggctctacagaggatttggactgtctgttatgacctatgcaccatcgagtgctgtgtggtgggcgagttatggttctagccagcgcataatttggagtgcccttggccatttgcataacaaagaagaggctcctagccaattgaaaatagttggtgttcaagcatcaggggggatttttgctggtgctgtgacctcttttgttacgactcccatagatacaatcaagaccaggctgcaggttatggataatgaaaataagccaaaagctggggaagttgttaaaagattgatcgctgaagatggatggaaaggtttgtacagagggttgggtccaagatttttcagctcatcagcttggggtacctcaatgatagtatgctacgagtacctgaagcgcttgtgtgctaaagttgaagaggtctgacttctgttcttactattctggaagttttgtattagaagaagtgaaataatgctgtatgtcgacaacattgacaccaccggaagcttcagttcttgctgacgtaggtgaaagcattcaacatggatgtttgatggtgtacttcatttggtgctagacaatagtctttacaaactttgcttctctgggctatatctcaaaaaatgtaggggcctatatttttttgctcatatgatgaatatgggtttggcggattattttaggtgagtataaacgatatcagatgtacacacttctcattcttttatacatgaaggctattttagcgaggctgtatgattatgaccagtctggatgattgagaccagttgt

SEQ ID NO: 16827 - protein, 390 aa, Zea mays subsp. mays
  misc_feature (1)..(390): Ceres Seq. ID no. 12354376
TAVLAELLWTKRAQKWVGQANHTRSQPACSPARHSCRFESTSRLRRPLRLSPRGSRIGGVEDLSGAAMDTTSRAAKIPSLHQTEINWDNLDKTKLYVVGAGMFSGVTVALYPVSVVKTRMQVASGDAMGRNALATFKNILKVDGVPGLYRGFPTVIIGAVPTRIIFLTALETTKAASLKLVEPFKLSEPVQAAFANGLAGLSASTCSQAIFVPIDVISQKLMVQGYSGNVRYKGGVDVARKVIKADGIKGLYRGFGLSVMTYAPSSAVWWASYGSSQRIIWSALGHLHNKEEAPSQLKIVGVQASGGIFAGAVTSFVTTPIDTIKTRLQVMDNENKPKAGEVVKRLIAEDGWKGLYRGLGPRFFSSSAWGTSMIVCYEYLKRLCAKVEEV

SEQ ID NO: 16828 - protein, 323 aa, Zea mays subsp. mays
  misc_feature (1)..(323): Ceres Seq. ID no. 12354377
MDTTSRAAKIPSLHQTEINWDNLDKTKLYVVGAGMFSGVTVALYPVSVVKTRMQVASGDAMGRNALATFKNILKVDGVPGLYRGFPTVIIGAVPTRIIFLTALETTKAASLKLVEPFKLSEPVQAAFANGLAGLSASTCSQAIFVPIDVISQKLMVQGYSGNVRYKGGVDVARKVIKADGIKGLYRGFGLSVMTYAPSSAVWWASYGSSQRIIWSALGHLHNKEEAPSQLKIVGVQASGGIFAGAVTSFVTTPIDTIKTRLQVMDNENKPKAGEVVKRLIAEDGWKGLYRGLGPRFFSSSAWGTSMIVCYEYLKRLCAKVEEV

SEQ ID NO: 16829 - protein, 289 aa, Zea mays subsp. mays
  misc_feature (1)..(289): Ceres Seq. ID no. 12354378
MFSGVTVALYPVSVVKTRMQVASGDAMGRNALATFKNILKVDGVPGLYRGFPTVIIGAVPTRIIFLTALETTKAASLKLVEPFKLSEPVQAAFANGLAGLSASTCSQAIFVPIDVISQKLMVQGYSGNVRYKGGVDVARKVIKADGIKGLYRGFGLSVMTYAPSSAVWWASYGSSQRIIWSALGHLHNKEEAPSQLKIVGVQASGGIFAGAVTSFVTTPIDTIKTRLQVMDNENKPKAGEVVKRLIAEDGWKGLYRGLGPRFFSSSAWGTSMIVCYEYLKRLCAKVEEV

SEQ ID NO: 16830 - DNA, 1446 bp, Zea mays subsp. mays
  misc_feature (1)..(1446): Ceres Seq. ID no. 12354451
acagctcgcgcgcgcaccagacagacgccttctccctctcccgcagtacagggtacagctcgcgctcacacaagacaccatctccctgcctgcgatccgatgcgtccaacgttttcagccggggtacggtcctaccaccgctgtgcctaataattggcggctagctagctagctagctgcagctgctgcgatcctggatcggcacagccggttcttgatgtggagggagcggcggcgggcgctgctcctgctggtggccggcgcggcgctgggactgatcggtgccgcgctcgcgagcgcgccgccggaggccgcgctgaaggtcgggttctaccatgcgacgtgccccatcgcggaggacgtggtcctcgccgagatgaggctcatcctcatggaggacgccacggtcgcgccgtccctgctccggatgcactaccacgactgcttcgtgcagggctgcgacgggtcgatcatgctccagtcgaggaagaaggggaaggcggagcgggacgcgctgcccaaccgtagcatgcgagggttcgacgccatcgagcggatcaaggcccggctcgagaccgtctgcccgctcaccgtctcctgcgccgacatcatcgccatggcggcgagggacgccgtctacctgagccacgggccgtggtacgacgtggagaccgggcggcgcgacggcaacgtcaccgtggccgagtacgtcgacaacgacctgccgccgccggactccaacattgtcgacgtgaagaccttcttcagcgtcaagtcgcttaactcgaaggacatcgccgtcctcttcgggtgccacagcatcgggacctcccactgcggcccgatccagaagcggctctacaacttcaccggcaacatggacggccaggacccgtcgctggacccggcctacgccgccgagctcaggaagctctgcccgcctcccagacccggcgacgatgctaggaaggtcaaggtgcctttggaccccggcagcaactacaccttcgacctgagctactaccgccacgtgctcgccacgggcgggctgttccagtccgacggcagcctcctgcacgaccccgtcaccagaggctacgtcgagaaggtggccaaggcgtcgtcgcccgacgagtactacgcggacttcgccgcggcgatggtcaagatgggccgcaccgacgtgcttgtcggcgatcatggggagatcaggccaacgtgtggcatttttgttgactaggttcaggattgggttgaagatgcgaagataatctgtacgggtttctgtcaacgtgtactgtgcgtgctgttagatcagaaagagcacggtcgctgttaactgtgtatccgggaatgctgttctgttcacacacggtcgtcactgatctactgaattgtcagccatgatgtaattatttatctacgtattagttgtatattcttctc

SEQ ID NO: 16831 - protein, 340 aa, Zea mays subsp. mays
  misc_feature (1)..(340): Ceres Seq. ID no. 12354452
MWRERRRALLLLVAGAALGLIGAALASAPPEAALKVGFYHATCPIAEDVVLAEMRLILMEDATVAPSLLRMHYHDCFVQGCDGSIMLQSRKKGKAERDALPNRSMRGFDAIERIKARLETVCPLTVSCADIIAMAARDAVYLSHGPWYDVETGRRDGNVTVAEYVDNDLPPPDSNIVDVKTFFSVKSLNSKDIAVLFGCHSIGTSHCGPIQKRLYNFTGNMDGQDPSLDPAYAAELRKLCPPPRPGDDARKVKVPLDPGSNYTFDLSYYRHVLATGGLFQSDGSLLHDPVTRGYVEKVAKASSPDEYYADFAAAMVKMGRTDVLVGDHGEIRPTCGIFVD

SEQ ID NO: 16832 - protein, 287 aa, Zea mays subsp. mays
  misc_feature (1)..(287): Ceres Seq. ID no. 12354453
MRLILMEDATVAPSLLRMHYHDCFVQGCDGSIMLQSRKKGKAERDALPNRSMRGFDAIERIKARLETVCPLTVSCADIIAMAARDAVYLSHGPWYDVETGRRDGNVTVAEYVDNDLPPPDSNIVDVKTFFSVKSLNSKDIAVLFGCHSIGTSHCGPIQKRLYNFTGNMDGQDPSLDPAYAAELRKLCPPPRPGDDARKVKVPLDPGSNYTFDLSYYRHVLATGGLFQSDGSLLHDPVTRGYVEKVAKASSPDEYYADFAAAMVKMGRTDVLVGDHGEIRPTCGIFVD

SEQ ID NO: 16833 - protein, 282 aa, Zea mays subsp. mays
  misc_feature (1)..(282): Ceres Seq. ID no. 12354454
MEDATVAPSLLRMHYHDCFVQGCDGSIMLQSRKKGKAERDALPNRSMRGFDAIERIKARLETVCPLTVSCADIIAMAARDAVYLSHGPWYDVETGRRDGNVTVAEYVDNDLPPPDSNIVDVKTFFSVKSLNSKDIAVLFGCHSIGTSHCGPIQKRLYNFTGNMDGQDPSLDPAYAAELRKLCPPPRPGDDARKVKVPLDPGSNYTFDLSYYRHVLATGGLFQSDGSLLHDPVTRGYVEKVAKASSPDEYYADFAAAMVKMGRTDVLVGDHGEIRPTCGIFVD

SEQ ID NO: 16834 - DNA, 1280 bp, Zea mays subsp. mays
  misc_feature (1)..(1280): Ceres Seq. ID no. 12354459
gacgagcaagcaagcagttgcagttgcagcggcctcctcctctgcttcctccctcctcctcctcaccatggtgctggctgcgcacgatccccctccccttgtgttcgacgctgcccgcctgagcggcctctccgacatcccgcagcagttcatctggccggcggacgagagccccaccccggactccgccgaggagctggccgtgccgctcatcgacctctccggggacgccgccgaggtggtccggcaggtccggcgcgcctgcgacctgcacggcttcttccaggtggtggggcacggcatcgacgcggcgctgacggcggaggcccaccgctgcatggacgccttcttcacgctgccgctcccggacaagcagcgcgcgcagcgccgccagggggacagctgcggctacgccagcagcttcacgggccggttcgcgtccaagctgccctggaaggagacgctgtcgttccgctacaccgacgacgacgacggcgacaagtccaaggacgtcgtggcgtcctacttcgtggacaagctgggcgaggggtaccggcaccacggggaggtgtacgggcgctactgctctgagatgagccgtctgtcgctggagctcatggaggtgctaggcgagagcctgggcgtgggccggcgccacttccggcgcttcttccaggggaacgactccatcatgcgcctcaactactacccgccgtgccagcggccctacgacacgctgggcacggggccgcattgcgaccccacgtcgctcaccatcctgcaccaggacgacgtgggcggactccaggtgttcgacgccgccacgctcgcgtggcgctccatcaggcccccgcccgggcgccttcgtcgtcaacatcggcgacaccttcatggcgctctccaacgggcgctacaggagctgcctccaccgcgccgtcgtcaacagccgggtggcacgccgctcgctcgccttcttcctgtgcccggagatggacaaggtggtcaggccgcccaaggagctggtggacgacgccaacccgagggcgtacccggacttcacgtggaggacgctgctggacttcaccatgaggcactacaggtcggacatgaggacgctcgaggccttctccaactggctcagcaccagtagcaatggcggacagcacctgctggagaagaagtaggcatgctatttgggtatggaagatggtggatgtaagcaaacaaagccaaattaagcagagtaggttaattaaggttggctgatgatccatttaggg

SEQ ID NO: 16835 - protein, 382 aa, Zea mays subsp. mays
  misc_feature (1)..(382): Ceres Seq. ID no. 12354460
TSKQAVAVAAASSSASSLLLLTMVLAAHDPPPLVFDAARLSGLSDIPQQFIWPADESPTPDSAEELAVPLIDLSGDAAEVVRQVRRACDLHGFFQVVGHGIDAALTAEAHRCMDAFFTLPLPDKQRAQRRQGDSCGYASSFTGRFASKLPWKETLSFRYTDDDDGDKSKDVVASYFVDKLGEGYRHHGEVYGRYCSEMSRLSLELMEVLGESLGVGRRHFRRFFQGNDSIMRLNYYPPCQRPYDTLGTGPHCDPTSLTILHQDDVGGLQVFDAATLAWRSIRPPPGRLRRQHRRHLHGALQRALQELPPPRRRQQPGGTPLARLLPVPGDGQGGQAAQGAGGRRQPEGVPGLHVEDAAGLHHEALQVGHEDARGLLQLAQHQ

SEQ ID NO: 16836 - protein, 360 aa, Zea mays subsp. mays
  misc_feature (1)..(360): Ceres Seq. ID no. 12354461
MVLAAHDPPPLVFDAARLSGLSDIPQQFIWPADESPTPDSAEELAVPLIDLSGDAAEVVRQVRRACDLHGFFQVVGHGIDAALTAEAHRCMDAFFTLPLPDKQRAQRRQGDSCGYASSFTGRFASKLPWKETLSFRYTDDDDGDKSKDVVASYFVDKLGEGYRHHGEVYGRYCSEMSRLSLELMEVLGESLGVGRRHFRRFFQGNDSIMRLNYYPPCQRPYDTLGTGPHCDPTSLTILHQDDVGGLQVFDAATLAWRSIRPPPGRLRRQHRRHLHGALQRALQELPPPRRRQQPGGTPLARLLPVPGDGQGGQAAQGAGGRRQPEGVPGLHVEDAAGLHHEALQVGHEDARGLLQLAQHQ

SEQ ID NO: 16837 - protein, 270 aa, Zea mays subsp. mays
  misc_feature (1)..(270): Ceres Seq. ID no. 12354462
MDAFFTLPLPDKQRAQRRQGDSCGYASSFTGRFASKLPWKETLSFRYTDDDDGDKSKDVVASYFVDKLGEGYRHHGEVYGRYCSEMSRLSLELMEVLGESLGVGRRHFRRFFQGNDSIMRLNYYPPCQRPYDTLGTGPHCDPTSLTILHQDDVGGLQVFDAATLAWRSIRPPPGRLRRQHRRHLHGALQRALQELPPPRRRQQPGGTPLARLLPVPGDGQGGQAAQGAGGRRQPEGVPGLHVEDAAGLHHEALQVGHEDARGLLQLAQHQ

SEQ ID NO: 16838 - DNA, 1239 bp, Zea mays subsp. mays
  misc_feature (1)..(1239): Ceres Seq. ID no. 12354519
gtgacattgttgtgcgccttccactacagtaatggaagcaggcgccggggaagcagcaccaagcgcgccgcgcagactgaccctgccgtggaaggtgcggctcctgctcctctgcctcgatgtcgtcgccggtctctcgatgcgtcgcgacggcaccatcaaccgctccatcttcaacctcttcgaccttcgtgccaccgccagcacgcgcccggacaggcagggcgtccggtccgccgacgtggacgcgtcgcgcggcctgtgggcgcgcgtgttctggccgtcgccggagtcgtccgcggccccgctcccagtcgtggtatacttccacggcggcgccttcacgctgctctctgcggcctcgtacgtctacgacgccatgtgccgccggttctgccgcgagctgggcgccgtcgtcgtgtccgtcaactaccgcctcgcacccgagcaccgctggcccgccgcgtacgaggacggcgtcgccatgcttcgatacctcgcctccgcgggtctccccgacagcgtcgacgtccccgtggacctctcccgctgcttcctcgccggggacagcgccggcgccaacatcgcccaccacgtggcgcagcgctggacgacggcctcctccccgccgcggtccatccccgtccacctcgctggcgccatcctggtgcagccgtactttggcggcgaggagcggacggaagctgaggtcaggctggatgggaacgtgccggtggtgaccgtgcgtggctcggactggatgtggcgggcgttcctgccggaaggcgccgatcggaaccactccgccgcgcacgtgacagacgacaacgccgacctggcggacggctttccgccggtgatggtggtgatcggtggcttcgacccgctgcaggagtggcagaggcggtacgccgacgtgctgcggaggagggggaaggaggtaagggtggtggagttcccggacgccattcacactttcttcctcttccccgagctcaccgatcatggtacgctcgtggaggcgatgaaggcgttcatacgcgagcaacgcatctgatctaattctgcctcacggtcacggatcaccaacctacgtggacctacatggtccgtgcaaataattttgtttcccatgcacgtaatggtccctacatggtccgtgcaaataatttctctataaaccactattcaagtctcccatatatttattcagttcatcgagcatctcttctagatctt

SEQ ID NO: 16839 - protein, 341 aa, Zea mays subsp. mays
  misc_feature (1)..(341): Ceres Seq. ID no. 12354520
MEAGAGEAAPSAPRRLTLPWKVRLLLLCLDVVAGLSMRRDGTINRSIFNLFDLRATASTRPDRQGVRSADVDASRGLWARVFWPSPESSAAPLPVVVYFHGGAFTLLSAASYVYDAMCRRFCRELGAVVVSVNYRLAPEHRWPAAYEDGVAMLRYLASAGLPDSVDVPVDLSRCFLAGDSAGANIAHHVAQRWTTASSPPRSIPVHLAGAILVQPYFGGEERTEAEVRLDGNVPVVTVRGSDWMWRAFLPEGADRNHSAAHVTDDNADLADGFPPVMVVIGGFDPLQEWQRRYADVLRRRGKEVRVVEFPDAIHTFFLFPELTDHGTLVEAMKAFIREQRI

SEQ ID NO: 16840 - protein, 305 aa, Zea mays subsp. mays
  misc_feature (1)..(305): Ceres Seq. ID no. 12354521
MRRDGTINRSIFNLFDLRATASTRPDRQGVRSADVDASRGLWARVFWPSPESSAAPLPVVVYFHGGAFTLLSAASYVYDAMCRRFCRELGAVVVSVNYRLAPEHRWPAAYEDGVAMLRYLASAGLPDSVDVPVDLSRCFLAGDSAGANIAHHVAQRWTTASSPPRSIPVHLAGAILVQPYFGGEERTEAEVRLDGNVPVVTVRGSDWMWRAFLPEGADRNHSAAHVTDDNADLADGFPPVMVVIGGFDPLQEWQRRYADVLRRRGKEVRVVEFPDAIHTFFLFPELTDHGTLVEAMKAFIREQRI

SEQ ID NO: 16841 - protein, 235 aa, Zea mays subsp. mays
  misc_feature (1)..(235): Ceres Seq. ID no. 12354522
VTLLCAFHYSNGSRRRGSSTKRAAQTDPAVEGAAPAPLPRCRRRSLDASRRHHQPLHLQPLRPSCHRQHAPGQAGRPVRRRGRVARPVGARVLAVAGVVRGPAPSRGILPRRRLHAALCGLVRLRRHVPPVLPRAGRRRRVRQLPPRTRAPLARRVRGRRRHASIPRLRGSPRQRRRPRGPLPLLPRRGQRRRQHRPPRGAALDDGLLPAAVHPRPPRWRHPGAAVLWRRGADGS

SEQ ID NO: 16842 - DNA, 1614 bp, Zea mays subsp. mays
  misc_feature (1)..(1614): Ceres Seq. ID no. 12354523
ctcgcaactcgcgattcccaaatcccgatgcgccctcgcgcctagcccctccgccgccgccgccgccaacatcaccttccctgtcacgggacgggccccccccctccaccgcgtcctatgacgtcgccgacctcgcaccacccggactcctccaccccgcacgcggggatcggcaacggcaacggcggcaaccaccacctccacccgccgtctctgaccccggccgctccccccgcgcaggcgcacgggggcccacaggtgcgtctcatgtgcagcttcggcggccgcatcctgccgcgcccgggggaccgccagctgcgctacgtcggcggggagacccgcatcgtgtccttcccgcgcgccgcggcctccttcgccgccctcgtcgccgcgctcgccaaggccgcgcccgcgctcttcgcgcccggaacgcccaggccgtccctcaagtaccagctgccccaggacgacctcgactccctcatctccgtcacctccgacgacgacgtcgaccacctcgtcgacgagctcgaccgcatccacgatctctccgccaacgtcgcccggccgccacgcctccgcgtcttcctcttcgcgcccgcgcccgcgcccgacgccgccttcggctccgtcctctccggcaccgccggcgacgccgcccccagcgaccagtggttcgtcgacgcgctcaacgcccccgcgcctcaccccatcgagcgcgtccgatccgagtcctcctcgatcgtctccgacgtccccgactacctcttcagcctcgacagcccgtccgacgaccccggccccggcccctcgccggctcgcgccaagtccgacgccgcggagactccgcaccaccacggcgacgacgtgccgccttccgctcgacagataccgcacgtcgcaggaggagcgtcatcgtggcccgccccgccgccgccgtacatggcacagcctatgtactacttccccgtgccgccaccggtccactacctcgaccagtctgcgcagagtggctacatgcctcgcccgatctaccacattgtcggtggcggaggaagcgaggcgcctggcggagatcttcacgcggccggcggagtctacggcgtctcgcaccacatgcaggggttcccgccgatgatgtacgcgccgccgcgcgcggtcatctacaactacaagtcggaggggatgccatcgctgcctccggaaggtggggcacactcttcctaggcgcatcggctacttcacatctctgaatcctgattattgttgcagatgcctaagctaaggagttttgcgtggtaatttttttatcgattcgtctaagtcttgttcgttgttttgtatagatggaggggttgatggtgatggatagatattaatgcagctttcgtctagtggaaatatattcgtgaaatgtatatcatactaaatagtatagtatttggtgtgattaattagtattctagttaatgtaatgtgggattcatataatctaggtggttctggtcttatagaaaccatttttgggcattttatatttacataaactggatgttgggtgaatgttctaagcagtatgtgctgtgttgaacctcaatcacttatgagtggttt

SEQ ID NO: 16843 - protein, 416 aa, Zea mays subsp. mays
  misc_feature (1)..(416): Ceres Seq. ID no. 12354524
RNSRFPNPDAPSRLAPPPPPPPTSPSLSRDGPPPSTASYDVADLAPPGLLHPARGDRQRQRRQPPPPPAVSDPGRSPRAGARGPTGASHVQLRRPHPAAPGGPPAALRRRGDPHRVLPARRGLLRRPRRRARQGRARALRARNAQAVPQVPAAPGRPRLPHLRHLRRRRRPPRRRARPHPRSLRQRRPAATPPRLPLRARARARRRLRLRPLRHRRRRRPQRPVVRRRAQRPRASPHRARPIRVLLDRLRRPRLPLQPRQPVRRPRPRPLAGSRQVRRRGDSAPPRRRRAAFRSTDTARRRRSVIVARPAAAVHGTAYVLLPRAATGPLPRPVCAEWLHASPDLPHCRWRRKRGAWRRSSRGRRSLRRLAPHAGVPADDVRAAARGHLQLQVGGDAIAASGRWGTLFLGASATSHL

SEQ ID NO: 16844 - protein, 369 aa, Zea mays subsp. mays
  misc_feature (1)..(369): Ceres Seq. ID no. 12354525
MTSPTSHHPDSSTPHAGIGNGNGGNHHLHPPSLTPAAPPAQAHGGPQVRLMCSFGGRILPRPGDRQLRYVGGETRIVSFPRAAASFAALVAALAKAAPALFAPGTPRPSLKYQLPQDDLDSLISVTSDDDVDHLVDELDRIHDLSANVARPPRLRVFLFAPAPAPDAAFGSVLSGTAGDAAPSDQWFVDALNAPAPHPIERVRSESSSIVSDVPDYLFSLDSPSDDPGPGPSPARAKSDAAETPHHHGDDVPPSARQIPHVAGGASSWPAPPPPYMAQPMYYFPVPPPVHYLDQSAQSGYMPRPIYHIVGGGGSEAPGGDLHAAGGVYGVSHHMQGFPPMMYAPPRAVIYNYKSEGMPSLPPEGGAHSS

SEQ ID NO: 16845 - protein, 319 aa, Zea mays subsp. mays
  misc_feature (1)..(319): Ceres Seq. ID no. 12354526
MCSFGGRILPRPGDRQLRYVGGETRIVSFPRAAASFAALVAALAKAAPALFAPGTPRPSLKYQLPQDDLDSLISVTSDDDVDHLVDELDRIHDLSANVARPPRLRVFLFAPAPAPDAAFGSVLSGTAGDAAPSDQWFVDALNAPAPHPIERVRSESSSIVSDVPDYLFSLDSPSDDPGPGPSPARAKSDAAETPHHHGDDVPPSARQIPHVAGGASSWPAPPPPYMAQPMYYFPVPPPVHYLDQSAQSGYMPRPIYHIVGGGGSEAPGGDLHAAGGVYGVSHHMQGFPPMMYAPPRAVIYNYKSEGMPSLPPEGGAHSS

SEQ ID NO: 16846 - DNA, 1253 bp, Zea mays subsp. mays
  misc_feature (1)..(1253): Ceres Seq. ID no. 12354559
atgaaggcgccgcgccggcgtgggggcatcgatagccgcgccggtgatacggcgcaccgccctgctcgcccagcggattcggtgcggcagacgtacgcggacagccggacccggacgcgatgcgaagtgcgaacccccaaaatattccacttgtcttcccccctcgtcgacccacggaaccttcgactcctcgccactggagtggctggctacctccaattcagcacgtaaagaaagcaaaccgcccgcagttccgttccgcaagaccagatcgcccgcttttctcctccggtcctctcctccctccccttgagccctgatcgaatcgatccacggtgccggcggacgcctcgcccccttcagttccatccaatccacgagtgaacagatggcgtcgcagtgggctgctccgccgccgggctactcggccgggcacgggcaggcgtacggcgaccagcagctggccacgccgccgcctcaggcagcgacggccgtggccgtgacggcggcgagcaacggcgtgggcaacccctacgtcgtcgtcacccccgcgtctgccgcaccgtccacctgccagaccgtcaggaaggcgctgggccgctacggcaagctgctcgaggacggaacccgcaaggccgccgacgccaccggcaacatctggcaccacctccggacggcgccgaacatggcggacgcggcggtggcgcggctgacgcaggggaccaaggtgtacgcggagggcggccacgacagggtgttctacccagacgttcggcgccatgcccggggagcagctccgcaaggcctacgcctgctacctctccacctcctcgggccccgtcatcggcacgctctacctctccacggcgcgcctcgccttctgcagcgacagcccgctctgctaccagggccctgccggccagccgcacgagtgcatgtactacaaggtggtgcttcctctgagccaggtgacatccgtgaacccttcttccagcatgcgcaaccgggcagaaaggtacattcagatcaggaccatggataaccacgagttctggttcatggggttcgtgaactacgacaaggccctcaagaatctcaacgaggccctgcagcaccgcgatgtcagcggccaccagcgctgctgatgctgatcaggcttcggttaggcactacagtcctactgctacttatttagttcatgatgaactgtgatacctttatcttatttgatgttcttgatgaataagagaacc

SEQ ID NO: 16847 - protein, 217 aa, Zea mays subsp. mays
  misc_feature (1)..(217): Ceres Seq. ID no. 12354560
MASQWAAPPPGYSAGHGQAYGDQQLATPPPQAATAVAVTAASNGVGNPYVVVTPASAAPSTCQTVRKALGRYGKLLEDGTRKAADATGNIWHHLRTAPNMADAAVARLTQGTKVYAEGGHDRVFYPDVRRHARGAAPQGLRLLPLHLLGPRHRHALPLHGAPRLLQRQPALLPGPCRPAARVHVLQGGASSEPGDIREPFFQHAQPGRKVHSDQDHG

SEQ ID NO: 16848 - protein, 121 aa, Zea mays subsp. mays
  misc_feature (1)..(121): Ceres Seq. ID no. 12354561
MPGEQLRKAYACYLSTSSGPVIGTLYLSTARLAFCSDSPLCYQGPAGQPHECMYYKVVLPLSQVTSVNPSSSMRNRAERYIQIRTMDNHEFWFMGFVNYDKALKNLNEALQHRDVSGHQRC

SEQ ID NO: 16849 - protein, 118 aa, Zea mays subsp. mays
  misc_feature (1)..(118): Ceres Seq. ID no. 12354562
MADAAVARLTQGTKVYAEGGHDRVFYPDVRRHARGAAPQGLRLLPLHLLGPRHRHALPLHGAPRLLQRQPALLPGPCRPAARVHVLQGGASSEPGDIREPFFQHAQPGRKVHSDQDHG

SEQ ID NO: 16850 - DNA, 933 bp, Zea mays subsp. mays
  misc_feature (1)..(933): Ceres Seq. ID no. 12354577
aaaaggacccaacgaagtccagccagctgagctgagcctcgtgaaccagagcatttgctccttcctcgtcctcctcgatcgacctctctccttggtgccgctgccgccatatatgaactgctagcacgcgcagcagccagcagctgccgaccggcctataatcagaaggccagaaaggatcgatggagaccatcaagtgctgcatcgcgtgcatcctgccgtgcggggcgctggacgtggtgcggatcgtgcactccaacggacgcgtggaggagatcagcgggggccccgtgctggccggggagatcatgaaggcgtaccccaagcacgtcctccggaagccgccgtccacgtgcccggccgacggcggcatcgtcgtgcagaagcccgtcatcctgccgcacaatgccgagctgcagaagggcaagatctacttcctcatgccggtcatggccaccccggcgcccgagaagcccgccgcgaagccacagccgccgcccgccgccggccaatccgcggcggccgcttcggtggcgaggagacggcgccggaggaaggaccacgccgccgcacggccggacggaggaggagcggcgcccgcctgcagcagcggggccggggcccggccgccggagggcgagaaggagcggctgctggccaacgagaggtacctgtccgagatcatgaaggagaaggcctccacggccagggaccggcggcgaggccgcgtcgccgtgtggcggccgcacctggagagcatcaccgaggatgacttgtaatcaagcaaggtgtcttcgatttttttttcctcccaccttttgtttctctctccatttctttagttttagcagcgtggtagtttcgtggcgctctcttttgttaattcctcctgctttgcctctccttgccctttggccttttatttttgttgcc

SEQ ID NO: 16851 - protein, 198 aa, Zea mays subsp. mays
  misc_feature (1)..(198): Ceres Seq. ID no. 12354578
METIKCCIACILPCGALDVVRIVHSNGRVEEISGGPVLAGEIMKAYPKHVLRKPPSTCPADGGIVVQKPVILPHNAELQKGKIYFLMPVMATPAPEKPAAKPQPPPAAGQSAAAASVARRRRRRKDHAAARPDGGGAAPACSSGAGARPPEGEKERLLANERYLSEIMKEKASTARDRRRGRVAVWRPHLESITEDDL

SEQ ID NO: 16852 - protein, 156 aa, Zea mays subsp. mays
  misc_feature (1)..(156): Ceres Seq. ID no. 12354579
MKAYPKHVLRKPPSTCPADGGIVVQKPVILPHNAELQKGKIYFLMPVMATPAPEKPAAKPQPPPAAGQSAAAASVARRRRRRKDHAAARPDGGGAAPACSSGAGARPPEGEKERLLANERYLSEIMKEKASTARDRRRGRVAVWRPHLESITEDDL

SEQ ID NO: 16853 - protein, 112 aa, Zea mays subsp. mays
  misc_feature (1)..(112): Ceres Seq. ID no. 12354580
MPVMATPAPEKPAAKPQPPPAAGQSAAAASVARRRRRRKDHAAARPDGGGAAPACSSGAGARPPEGEKERLLANERYLSEIMKEKASTARDRRRGRVAVWRPHLESITEDDL

SEQ ID NO: 16854 - DNA, 1435 bp, Zea mays subsp. mays
  misc_feature (1)..(1435): Ceres Seq. ID no. 12354581
gataagaaatggtgagcaggcaagcatggagtggagtgcttttaaatttgggtgtcgctgtcgttgaaagcgatgggtggctagttttacagacagacagcagcacctgctcctccgtctggactgactgactagtgactcagctccacccacatcccccttcgtcgtcttctccctccctgctagctgacctccaatccacgataaggcaagataagctagctaggaaggcaagggatccgatggacaagtacgagcccgttcgcgagatcggggcgggcaacttcggggtggccaagctgatgaggaacaaggacacgagggagctggtggccatgaagttcatagagcgaggaaacaggatcgacgagaacgtgttccgcgagatcgtgaaccaccgctccctccgccaccccaacatcatccggttcaaggaggtggtgctgactcccacgcaccttgcgatcgtgatggagtacgctgcgggcggggagctgttcgagcgcatctgcgacgccgggcggttccacgaggacgaggcgcgctacttcttccagcagctggtttgcggcgtcagcttctgccacgccatgaacatctgccaccgggacctcaagctggagaacacgctgctggacggcagcccggcgccgcgcctcaagatctgcgacttcggctactccaagtcctcggtgctgcactcgcgaccgaagtcaacggtgggcacgccggcgtacatcgcgcccgaggtgctgtcgcggcgagagtacgacgggaagcacgccgacgtctggtcgtgcggagtcacgctctacgtcatgctggtgggggcgtacccgttcgaggatccaaaggacccaaagaacttcaggaagacaatacagcgcatcatgtcggttcagtacaagatccccgagtacgtgcacgtctcccacaactgccgccacctcctctcccgcatcttcgtccagaacccgtacaagaggatcaccatgagcgagatcaagacccacccctggtacctcaagaacctgccgagggagctcaaggaggaggcgcaggcagcctactactacagccgccagggagacagcagcagcagcagcagcaataatgcgacagcagcacccgcctactcgtcgcagagcgtggaggagatcttgaggatcgtgcaggaggcgcagacggtgcccaagccaccgtccaggcccgacgaagcagagcaacaggaagaagaagacgaccatgacgatgacgacgactacgacagaacggtgcggcaggtgcacgccagcggagagttcgacatgattatgagcagactccaaatctgactcttagtatcttgcctgccattggtagttttgtgttgtaatgcgtgcctgtaacatgaatttcagtcaaactatacactatcataatggtgatggtattg

SEQ ID NO: 16855 - protein, 363 aa, Zea mays subsp. mays
  misc_feature (1)..(363): Ceres Seq. ID no. 12354582
MDKYEPVREIGAGNFGVAKLMRNKDTRELVAMKFIERGNRIDENVFREIVNHRSLRHPNIIRFKEVVLTPTHLAIVMEYAAGGELFERICDAGRFHEDEARYFFQQLVCGVSFCHAMNICHRDLKLENTLLDGSPAPRLKICDFGYSKSSVLHSRPKSTVGTPAYIAPEVLSRREYDGKHADVWSCGVTLYVMLVGAYPFEDPKDPKNFRKTIQRIMSVQYKIPEYVHVSHNCRHLLSRIFVQNPYKRITMSEIKTHPWYLKNLPRELKEEAQAAYYYSRQGDSSSSSSNNATAAPAYSSQSVEEILRIVQEAQTVPKPPSRPDEAEQQEEEDDHDDDDDYDRTVRQVHASGEFDMIMSRLQI

SEQ ID NO: 16856 - protein, 343 aa, Zea mays subsp. mays
  misc_feature (1)..(343): Ceres Seq. ID no. 12354583
MRNKDTRELVAMKFIERGNRIDENVFREIVNHRSLRHPNIIRFKEVVLTPTHLAIVMEYAAGGELFERICDAGRFHEDEARYFFQQLVCGVSFCHAMNICHRDLKLENTLLDGSPAPRLKICDFGYSKSSVLHSRPKSTVGTPAYIAPEVLSRREYDGKHADVWSCGVTLYVMLVGAYPFEDPKDPKNFRKTIQRIMSVQYKIPEYVHVSHNCRHLLSRIFVQNPYKRITMSEIKTHPWYLKNLPRELKEEAQAAYYYSRQGDSSSSSSNNATAAPAYSSQSVEEILRIVQEAQTVPKPPSRPDEAEQQEEEDDHDDDDDYDRTVRQVHASGEFDMIMSRLQI

SEQ ID NO: 16857 - protein, 332 aa, Zea mays subsp. mays
  misc_feature (1)..(332): Ceres Seq. ID no. 12354584
MKFIERGNRIDENVFREIVNHRSLRHPNIIRFKEVVLTPTHLAIVMEYAAGGELFERICDAGRFHEDEARYFFQQLVCGVSFCHAMNICHRDLKLENTLLDGSPAPRLKICDFGYSKSSVLHSRPKSTVGTPAYIAPEVLSRREYDGKHADVWSCGVTLYVMLVGAYPFEDPKDPKNFRKTIQRIMSVQYKIPEYVHVSHNCRHLLSRIFVQNPYKRITMSEIKTHPWYLKNLPRELKEEAQAAYYYSRQGDSSSSSSNNATAAPAYSSQSVEEILRIVQEAQTVPKPPSRPDEAEQQEEEDDHDDDDDYDRTVRQVHASGEFDMIMSRLQI

SEQ ID NO: 16858 - DNA, 931 bp, Zea mays subsp. mays
  misc_feature (1)..(931): Ceres Seq. ID no. 12354601
aatagacagaacgcaccctccagtaaagtccccatggctgctttctggttgctgctgctgttcgtcgccagcgcagtccttgttcttcgtacatggagagctcaaagcttcgtcaacaaggcgcggcaggcagggccgaggtacccgccggggctggagccgtacccgctgatcgggcacctgccacagttcttggctaaccggcaccgcgtgctcgactggatgaccgaggcgctcgcgcgccagacgaccacgtgcacgttcgtgctgcgccggccgggaggcgtgcggggtgcgatcaccgcgaacccggcgaacgtggagcacttcctgcgcaccagcttcgaccactaccccaaggggccccggttcgcgtcgctgctgcacgacttcctcggccggggcatcttcaacgccgacggcgaggcctggcgcgcgcagcggaaggtcgccagccacgagttcaacacgcgctcgctccgagctttcgtggcgcgctgcgtgcacgccgagctacacggccgcctgctcccgctgctgcgccgcgccgcggcgtccggctcccccctcgacctccaggacgtgctcgagcggttcgcgttcgacaatatctgccgcgtcgccttcgaccacgaccctcgccagctcccggacgatggtgacgacactgcggacagcagcttcgccgatgcgttccgcgacgctgcgaatctcagcgcgggccggttccggtacgcggtcccggggttctggaagatcaagaaagcgctgaacttgggttctgagaagcggctgcgggagtccatcgccatggtgcacgacttcgccgatcgcataatccagtcgcgccgggaggagatgttgagcgccggttttgagaagcacgatcttctgtcgcggttcatggcgagccaggacgagacctactccg

SEQ ID NO: 16859 - protein, 310 aa, Zea mays subsp. mays
  misc_feature (1)..(310): Ceres Seq. ID no. 12354602
NRQNAPSSKVPMAAFWLLLLFVASAVLVLRTWRAQSFVNKARQAGPRYPPGLEPYPLIGHLPQFLANRHRVLDWMTEALARQTTTCTFVLRRPGGVRGAITANPANVEHFLRTSFDHYPKGPRFASLLHDFLGRGIFNADGEAWRAQRKVASHEFNTRSLRAFVARCVHAELHGRLLPLLRRAAASGSPLDLQDVLERFAFDNICRVAFDHDPRQLPDDGDDTADSSFADAFRDAANLSAGRFRYAVPGFWKIKKALNLGSEKRLRESIAMVHDFADRIIQSRREEMLSAGFEKHDLLSRFMASQDETYS

SEQ ID NO: 16860 - protein, 299 aa, Zea mays subsp. mays
  misc_feature (1)..(299): Ceres Seq. ID no. 12354603
MAAFWLLLLFVASAVLVLRTWRAQSFVNKARQAGPRYPPGLEPYPLIGHLPQFLANRHRVLDWMTEALARQTTTCTFVLRRPGGVRGAITANPANVEHFLRTSFDHYPKGPRFASLLHDFLGRGIFNADGEAWRAQRKVASHEFNTRSLRAFVARCVHAELHGRLLPLLRRAAASGSPLDLQDVLERFAFDNICRVAFDHDPRQLPDDGDDTADSSFADAFRDAANLSAGRFRYAVPGFWKIKKALNLGSEKRLRESIAMVHDFADRIIQSRREEMLSAGFEKHDLLSRFMASQDETYS

SEQ ID NO: 16861 - protein, 236 aa, Zea mays subsp. mays
  misc_feature (1)..(236): Ceres Seq. ID no. 12354604
MTEALARQTTTCTFVLRRPGGVRGAITANPANVEHFLRTSFDHYPKGPRFASLLHDFLGRGIFNADGEAWRAQRKVASHEFNTRSLRAFVARCVHAELHGRLLPLLRRAAASGSPLDLQDVLERFAFDNICRVAFDHDPRQLPDDGDDTADSSFADAFRDAANLSAGRFRYAVPGFWKIKKALNLGSEKRLRESIAMVHDFADRIIQSRREEMLSAGFEKHDLLSRFMASQDETYS

SEQ ID NO: 16862 - DNA, 1470 bp, Zea mays subsp. mays
  misc_feature (1)..(1470): Ceres Seq. ID no. 12354613
agaaaatgttcctcgcaaagtttggctgacggcacccaccgcccacagaagcgcacctctgttctttggtgtgtggccgtgtggattcaaaaccgctgaccggccgcttatttaagcccttgccccgccggttttctcttctcccgtcggcgctggtccacgcggctccaacacctgcctgcctgcctgattcttacaccaaccaaccacgcgcgccaagccgaattcgtcttccaccgatccgccccgcccgtttcccattgcttagcttgctatggcgcagcagcagccggtgcggcggattctgaaggtggcaccgccggggaagggggacggggaatccttccccacggtgcaggcggcggtcgacgcggtgccgctgggcaaccgggcgcgcgtcgtcatccgcctcgcgccgggggtctacagggagcctgtctacgtcgccaagaccaagaacttcatcaccgtcgcgggggcctcgcccgaggccaccgtcgtgtcatgggacaacaccgccacgcgcatcaggcactcgcagtcatccagggttataggaactggaacattcggctgtggtacgttcatcattgagggggaagatttcattgcagagaatatcacgtttgagaactcagctccccagggctctgggcaggccgttgcagtccgggtaaccgcagataggtgtgctttctacaactgccggttcctcggttggcaagacacattatacttacactacgggaaacagtacttaagagactgttatattgaaggccattgtgacttcatctttggtaactctgtcgcccttatggagcattgccatatccattgcaaagcagcgggatacatcactgctcatagccggaagtccacatcagaatctactggctatgtgttcttgaggtgtactattactggacatggagaagctggatacatgttcctaggtcggccatgggggccctttggaagggttgtctttgcgtacactttcatggatcgatgcatcaagccttctgggtggcacaactgggacaaatccgagaacgagcgaactgcttgcttttatgagtacaggtgctcagggccaggcgccctcccatcgaaccgggtcacatggtgtagacagttgctggatgttgaagcagagcagttccttgcgcacacttttatcgacccagacgtcgataggccatggctcctccagatgatggcgataagaataccagcctcagcatagtttgatcccggcagccgcaggtcctgcatggttcatgcctcctttctagcctatttaaataaactaagttggaggatgcattatatttgcataagtttgtaacgtttggtgaattagtatccactttcatctcactgtgggcggtggggatagggaatgagagagcttctcttgtaacgaaccccagcactaggctgaaatatatgcagattttattttgc

SEQ ID NO: 16863 - protein, 324 aa, Zea mays subsp. mays
  misc_feature (1)..(324): Ceres Seq. ID no. 12354614
MAQQQPVRRILKVAPPGKGDGESFPTVQAAVDAVPLGNRARVVIRLAPGVYREPVYVAKTKNFITVAGASPEATVVSWDNTATRIRHSQSSRVIGTGTFGCGTFIIEGEDFIAENITFENSAPQGSGQAVAVRVTADRCAFYNCRFLGWQDTLYLHYGKQYLRDCYIEGHCDFIFGNSVALMEHCHIHCKAAGYITAHSRKSTSESTGYVFLRCTITGHGEAGYMFLGRPWGPFGRVVFAYTFMDRCIKPSGWHNWDKSENERTACFYEYRCSGPGALPSNRVTWCRQLLDVEAEQFLAHTFIDPDVDRPWLLQMMAIRIPASA

SEQ ID NO: 16864 - DNA, 1005 bp, Zea mays subsp. mays
  misc_feature (1)..(1005): Ceres Seq. ID no. 12354677
ataggtagctcactgtactgtaccctagctagctagtcgcttccagtccagagcgtcccgagaccaatggcctgccacaccgtcatcccgcttcttctcttcctcccttccctcttggcagcggctgcggacgacgtcgcccctgctcctgctcctgccccggcggcaccacccgagcccaccaacaacaacctgaccagcatcctggaaaatggcgggcagtacaccactctgctccgcctcctgaacgccacccggataacggaacagatcagcagccaactcaagaactcgtacgacggcctgaccttcttcgcgcccaacgacaacgccttcgccaagctcaaggccgccggcacgctcaacgccctcgcagaccaagaccagatccagctgctgctctaccacgtcctgccccgctactacagcctcgccacgttccagacggccagcaacccgctgcacaccgaggcgtcgggcccctccggcatgtacagtgtcaacgtcaccgccagcaccacgaaccccctggtgaacctttccactggcgtcgtcgacgtgcccatcagcagcacgctgttcgctcgcttcccgttcgccgtctactccgtcgacagcgtgctgctgcccccgcagctattccacacggcttcttctgcgccggcaccaggacagtctgcagaggcgccggtgcctggaaaggcggcaccagggcacaaggggggcgtcccaaagagcggcgacgatgtggcagcgcagccgtccgctgcggtggatggggcacaagacaccagtgtcgccgcggatggtagagggagcgcggcgtggatgacgccggtggttgttttgggtggcatggccctactgctttgcgcgtgagcagtgtgtgcttcgttctgttttgttttccttggcatctctctgatttctctctcgtggccggtttgtatgtactgcccttaaaaatgtaattctgcatttatgataacgatgatacgatggtcc

SEQ ID NO: 16865 - protein, 270 aa, Zea mays subsp. mays
  misc_feature (1)..(270): Ceres Seq. ID no. 12354678
MACHTVIPLLLFLPSLLAAAADDVAPAPAPAPAAPPEPTNNNLTSILENGGQYTTLLRLLNATRITEQISSQLKNSYDGLTFFAPNDNAFAKLKAAGTLNALADQDQIQLLLYHVLPRYYSLATFQTASNPLHTEASGPSGMYSVNVTASTTNPLVNLSTGVVDVPISSTLFARFPFAVYSVDSVLLPPQLFHTASSAPAPGQSAEAPVPGKAAPGHKGGVPKSGDDVAAQPSAAVDGAQDTSVAADGRGSAAWMTPVVVLGGMALLLCA

SEQ ID NO: 16866 - DNA, 1090 bp, Zea mays subsp. mays
  misc_feature (1)..(1090): Ceres Seq. ID no. 12354799
aaagcagccccccaccggtccaccgcgcgtccccatcggcggcggtagggcagaacagaacaccggagatggagcgggagcgcggcgcgtcggcggcgctgtgggggcacgcgcacctcccactgctggcgcgcgccgggtccaaggagtcggtcgagtacatcctgcaggcgctctggcgcacgcgccgcacgggcctcgacgccgccgaccgcaccgtcgcccgcgacgccctccagctctcctccgacgccgagctcgaccctgtcagtacccctatttccagcttttcttcgttgcttccttccttccttcctgcgccgtcgctcgcgtcgcgggcgggcgggcgttgcaggtccagaccgctcagtacccaactggtgctgcagctgctggtgtgcctgaggatactgatcagacggtgcgtcaacgaggacttcgccaaggacgacatccccaagctcttccccgaggaggtgccccccgatctgcagaagctgctcaccttgctgctgcagaagttccagccggagtggcaggcggatgccgccaaggatcaggcttctgctgcagcgcctccgccgccgccgccgcatctaacgcagttccctccgccgcagcccgaggcaagatggttctccagaacgacattgatctgctcaacccgccggcagaactcgagaagctcaagcacaagaaaaagagactcgtccagtcgcccaactccttcttcatggatgttaagtgccaggggtgcttcagcataaccactgttttcagccactcccagactgttgttgtgtgccctggctgccaaactgtcctctgccaacccacaggaggaaaggcaaggctcactgagggctgctctttccgcaggaagggagactagagcggatgtggtcttcaagttttgctctatgccagatactagcgtcatgaactgcctttagctaagattttccataagttgttctcgagcagctatgtgttgcatgttggctacttccaaacttatatctggtttggtttggattgtgatgaactaatggctctttgaatttatattatgatgttgacgatatttggc

SEQ ID NO: 16867 - protein, 296 aa, Zea mays subsp. mays
  misc_feature (1)..(296): Ceres Seq. ID no. 12354800
KQPPTGPPRVPIGGGRAEQNTGDGAGARRVGGAVGARAPPTAGARRVQGVGRVHPAGALAHAPHGPRRRRPHRRPRRPPALLRRRARPCQYPYFQLFFVASFLPSCAVARVAGGRALQVQTAQYPTGAAAAGVPEDTDQTVRQRGLRQGRHPQALPRGGAPRSAEAAHLAAAEVPAGVAGGCRQGSGFCCSASAAAAASNAVPSAAARGKMVLQNDIDLLNPPAELEKLKHKKKRLVQSPNSFFMDVKCQGCFSITTVFSHSQTVVVCPGCQTVLCQPTGGKARLTEGCSFRRKGD

SEQ ID NO: 16868 - protein, 254 aa, Zea mays subsp. mays
  misc_feature (1)..(254): Ceres Seq. ID no. 12354801
SSPPPVHRASPSAAVGQNRTPEMERERGASAALWGHAHLPLLARAGSKESVEYILQALWRTRRTGLDAADRTVARDALQLSSDAELDPVSTPISSFSSLLPSFLPAPSLASRAGGRCRSRPLSTQLVLQLLVCLRILIRRCVNEDFAKDDIPKLFPEEVPPDLQKLLTLLLQKFQPEWQADAAKDQASAAAPPPPPPHLTQFPPPQPEARWFSRTTLICSTRRQNSRSSSTRKRDSSSRPTPSSWMLSARGASA

SEQ ID NO: 16869 - protein, 232 aa, Zea mays subsp. mays
  misc_feature (1)..(232): Ceres Seq. ID no. 12354802
MERERGASAALWGHAHLPLLARAGSKESVEYILQALWRTRRTGLDAADRTVARDALQLSSDAELDPVSTPISSFSSLLPSFLPAPSLASRAGGRCRSRPLSTQLVLQLLVCLRILIRRCVNEDFAKDDIPKLFPEEVPPDLQKLLTLLLQKFQPEWQADAAKDQASAAAPPPPPPHLTQFPPPQPEARWFSRTTLICSTRRQNSRSSSTRKRDSSSRPTPSSWMLSARGASA

SEQ ID NO: 16870 - DNA, 711 bp, Zea mays subsp. mays
  misc_feature (1)..(711): Ceres Seq. ID no. 12354862
tcatttctacgacctcttggccatttggagttggacctaccagaggccccagaaaaagccccacgtcctcctgcacaagctgttgacccattctcaaaatttgggccgaaggcagagatattgcatatattccgtgccccagagaagaggccacccaaggaactctcgctcgcattcacgggtctcacgcttctgccttttatcggattcttgattgggctcgtgcgtcttggagtgaacgtgaagaacttcccgtccttgccgggaccggccgcatttgcctcagttttccatgctggaataggagcagtcttgctgctctacgttctcttctggctcaagttggaccttttcacaactctgaagtaccttggcttcctcggcatcttcctcgtgtttgtgggccataggaccctgtcctacctttcctcggcgtcagcaaaacagaagacggcatgagtggacagtgcaagcagagctttcccgatcatcaattcgttttttgaggtggccattccaggccactgggtgtctttgcttggtactctgaccgcaccctagtttttctttagctaacatgcattttgagggaggactcggtttatttcagttggctttgacgaatactgatactaggacaagtaacaggacctcacatcacagtttctgaatagaatggatgtttaatcatagcatttatatgatcattcg

SEQ ID NO: 16871 - protein, 152 aa, Zea mays subsp. mays
  misc_feature (1)..(152): Ceres Seq. ID no. 12354863
SFLRPLGHLELDLPEAPEKAPRPPAQAVDPFSKFGPKAEILHIFRAPEKRPPKELSLAFTGLTLLPFIGFLIGLVRLGVNVKNFPSLPGPAAFASVFHAGIGAVLLLYVLFWLKLDLFTTLKYLGFLGIFLVFVGHRTLSYLSSASAKQKTA

SEQ ID NO: 16872 - DNA, 1092 bp, Zea mays subsp. mays
  misc_feature (1)..(1092): Ceres Seq. ID no. 12355020
acggccagggaccaagctactcgtaaacaccatcagagtgtacacaagaacacgtacgcggcgcacggcgtcgttagtcaccaagcgggccatcggcaatggcgagcacgcaagctccagcggcggccgacaacgtggaccccgtctacgagtggctcgacgatggcgccagctaccttctccgcctcgacctcccagggttcaagaaggaggactttcgggtgcacgtggacggcgagggccggctcaccgtcatcggcaatcgcaaacccacgcccggcggcggcggcaaggcgctgcggctccacaagacgttccagctgcccaatacggccaaccttgataccatcacgggccgcttcgacggcaacgtgctcacgctcaccgtgcccaaactgctcgccggtgctgatgcccccacaacgccaccaccgcagtccaaggaggaggcgcgagtcgccggcgataagccagatcaggcggacaagctgcccgccagggttggccgtggccgtgaggagacgacggaggagcggaggaccaccgagaccgagaggactagcttggcggcgagaagcaaagaggaagacgaggagaaggccaagcccatggtggcgctgccgccgcagtcgagcgagaaggcgagcggagaccatcaacgagatgaccagcaggatggcaaggcgcaggccgaccacagggagatggtcgctcgcgaggccgcgcgcaggatcgaggcggcgcgggcgagggtggcggaggccaaggccaaggcagagcgggagaggaagtgtgagcactggaaggagcgcgccgtggaggagggcctcaagttggcggaggcggtcaataacaagaaggaggtgatcgccacggccgtcgccgccttcacacttggcgtcttcgtctcgagtaggctcttctccaggacttaatcaacccatgcgtaatcatggaccagacatattcacgtatatgagcatgagaacatgagcagcatcgccaggttatattgattcgtagacttgtacatgcatgatgcagcactaatattcacattatgtattaattattgctccctattgagcactc

SEQ ID NO: 16873 - protein, 288 aa, Zea mays subsp. mays
  misc_feature (1)..(288): Ceres Seq. ID no. 12355021
TARDQATRKHHQSVHKNTYAAHGVVSHQAGHRQWRARKLQRRPTTWTPSTSGSTMAPATFSASTSQGSRRRTFGCTWTARAGSPSSAIANPRPAAAARRCGSTRRSSCPIRPTLIPSRAASTATCSRSPCPNCSPVLMPPQRHHRSPRRRRESPAISQIRRTSCPPGLAVAVRRRRRSGGPPRPRGLAWRREAKRKTRRRPSPWWRCRRSRARRRAETINEMTSRMARRRPTTGRWSLARPRAGSRRRGRGWRRPRPRQSGRGSVSTGRSAPWRRASSWRRRSITRRR

SEQ ID NO: 16874 - protein, 278 aa, Zea mays subsp. mays
  misc_feature (1)..(278): Ceres Seq. ID no. 12355022
MASTQAPAAADNVDPVYEWLDDGASYLLRLDLPGFKKEDFRVHVDGEGRLTVIGNRKPTPGGGGKALRLHKTFQLPNTANLDTITGRFDGNVLTLTVPKLLAGADAPTTPPPQSKEEARVAGDKPDQADKLPARVGRGREETTEERRTTETERTSLAARSKEEDEEKAKPMVALPPQSSEKASGDHQRDDQQDGKAQADHREMVAREAARRIEAARARVAEAKAKAERERKCEHWKERAVEEGLKLAEAVNNKKEVIATAVAAFTLGVFVSSRLFSRT

SEQ ID NO: 16875 - protein, 234 aa, Zea mays subsp. mays
  misc_feature (1)..(234): Ceres Seq. ID no. 12355023
MAPATFSASTSQGSRRRTFGCTWTARAGSPSSAIANPRPAAAARRCGSTRRSSCPIRPTLIPSRAASTATCSRSPCPNCSPVLMPPQRHHRSPRRRRESPAISQIRRTSCPPGLAVAVRRRRRSGGPPRPRGLAWRREAKRKTRRRPSPWWRCRRSRARRRAETINEMTSRMARRRPTTGRWSLARPRAGSRRRGRGWRRPRPRQSGRGSVSTGRSAPWRRASSWRRRSITRRR

SEQ ID NO: 16876 - DNA, 1016 bp, Zea mays subsp. mays
  misc_feature (1)..(1016): Ceres Seq. ID no. 12355029
ctggtgttcttctataccacgcgtccacgccactgctaagctgctccccgttcgccaggtcggcgaccaggcgaaacgtgctgctgcaagaagaagaataggtacacagacagcatgtccggagttcaggcgatgccggcggccgtgggcgtggcggggctgagagggtcagggttggttagcagcagcagtaccggcttgttcgccggcgactgcaagaggaaggctcgtcgcccggcgtgctcggcctgggccctcaggcagagccggatcggcagcaggagcaggagcaagaggggcctcggcatcgtctgcaacctcgcgggacagtacgaggattccttcgacgacgtccagcggcaactgatgaactacttcacctacaaggccgtgaggaccgtgctgacccagctctacgagctgaacccgcccgagctaccgctggttctacaacttcgtcgctgtcaacaagcctaccgacggcaagcatttcctccgtgctctcgggcaaggagaggcaggagctcgcagagcgagtgatggtcaccaggcttcacctgtacgggaaatggataaagaaatgcgaccatgccaagacgtacgagaagatctccgacgagaacctggcgctgatgcgggagcggctgatggagacggtcatctggccgaccgacgacagcagcacggagaagatcggctgatgcctgatgcctgccgagtcctttcgggttgctgatcaagcttagctccttctattagcatgtagagcagcactctgggtttctctatcagtcagtcagtcagccagccagtcagtgggttgtatataatcggagttgtagtagacagtatacatttctctgggcaggcaatcactgtttgaggtgttaacagtgccgttttgccctcccaattaagcctctacagtcggtctaagtgaagcaaaaatgcttaccttgtagtagctaaatttacatgtgcggggatatacgttgtaatagaatatttctgcgccc

SEQ ID NO: 16877 - protein, 141 aa, Zea mays subsp. mays
  misc_feature (1)..(141): Ceres Seq. ID no. 12355030
MSGVQAMPAAVGVAGLRGSGLVSSSSTGLFAGDCKRKARRPACSAWALRQSRIGSRSRSKRGLGIVCNLAGQYEDSFDDVQRQLMNYFTYKAVRTVLTQLYELNPPELPLVLQLRRCQQAYRRQAFPPCSRARRGRSSQSE

SEQ ID NO: 16878 - protein, 135 aa, Zea mays subsp. mays
  misc_feature (1)..(135): Ceres Seq. ID no. 12355031
MPAAVGVAGLRGSGLVSSSSTGLFAGDCKRKARRPACSAWALRQSRIGSRSRSKRGLGIVCNLAGQYEDSFDDVQRQLMNYFTYKAVRTVLTQLYELNPPELPLVLQLRRCQQAYRRQAFPPCSRARRGRSSQSE

SEQ ID NO: 16879 - DNA, 1026 bp, Zea mays subsp. mays
  misc_feature (1)..(1026): Ceres Seq. ID no. 12355072
atcgcccacacgtcgaagcaggtgattggcgatccctgtccgtcctcgctcgctagctgatcgacatggccgacgacgacccaagaacgacggcggcgagcagcatgccggacttcaagcagtcggtgaagctcaagtacgtgaagctggggtaccaccacctgatcagccacggcgcgtacctgctgctggccccgctgccggggctcgtggcggcgcacctctccaccttcacggcgcgggacctggcggagctgtggcagagcctgcagtacaacctggcgtccgtgctcgtcgcgaccacggcgctggtcacggccaccgcgtacgcgctgacgcggccgcggcccgtgtacctggtggacttcgcgtgctaccggccccgcgacgagcgcaggtgcagccgcgcgcggttcatgaactgcaccgagtcgctcggcaccttcacgccggagaacgtggagttccagcgccggatcatcgagcggtcggggctgggcgaggacacgtacctcccggaggcggtgctcaacatcccgcccaacccatccatggccagcgcacgggaggaggccgagatggtcatgttcggcgcgctggacgagctgttcgccaagaccggggtgcggcccaaggagatcggcgtgctggtggtgaactgcagcctcttcaacccgacgccgtcgctgtccgccatggtcgtcaaccactacaggctccggggcaacgtcgcgagctacaacctcggcggcatgggctgcagcgcggggatcatcgccgtggacctcgccagggacctgctgcagtgccaccggggcacctacgccgtggtggtcagcacggagaacatcaccctcaactggtacctgggcaacgaccgctccatgctggtgtccaactgcctgttccgcatgggcggcgcggcgctcctgctgtcgaaccgcggctcggcgcggcgccggtccaagtaccagctggtgcacacggtgcgcacgcacagggccgccgacgaccgctgcttcggct

SEQ ID NO: 16880 - protein, 320 aa, Zea mays subsp. mays
  misc_feature (1)..(320): Ceres Seq. ID no. 12355073
MADDDPRTTAASSMPDFKQSVKLKYVKLGYHHLISHGAYLLLAPLPGLVAAHLSTFTARDLAELWQSLQYNLASVLVATTALVTATAYALTRPRPVYLVDFACYRPRDERRCSRARFMNCTESLGTFTPENVEFQRRIIERSGLGEDTYLPEAVLNIPPNPSMASAREEAEMVMFGALDELFAKTGVRPKEIGVLVVNCSLFNPTPSLSAMVVNHYRLRGNVASYNLGGMGCSAGIIAVDLARDLLQCHRGTYAVVVSTENITLNWYLGNDRSMLVSNCLFRMGGAALLLSNRGSARRRSKYQLVHTVRTHRAADDRCFG

SEQ ID NO: 16881 - protein, 307 aa, Zea mays subsp. mays
  misc_feature (1)..(307): Ceres Seq. ID no. 12355074
MPDFKQSVKLKYVKLGYHHLISHGAYLLLAPLPGLVAAHLSTFTARDLAELWQSLQYNLASVLVATTALVTATAYALTRPRPVYLVDFACYRPRDERRCSRARFMNCTESLGTFTPENVEFQRRIIERSGLGEDTYLPEAVLNIPPNPSMASAREEAEMVMFGALDELFAKTGVRPKEIGVLVVNCSLFNPTPSLSAMVVNHYRLRGNVASYNLGGMGCSAGIIAVDLARDLLQCHRGTYAVVVSTENITLNWYLGNDRSMLVSNCLFRMGGAALLLSNRGSARRRSKYQLVHTVRTHRAADDRCFG

SEQ ID NO: 16882 - protein, 203 aa, Zea mays subsp. mays
  misc_feature (1)..(203): Ceres Seq. ID no. 12355075
MNCTESLGTFTPENVEFQRRIIERSGLGEDTYLPEAVLNIPPNPSMASAREEAEMVMFGALDELFAKTGVRPKEIGVLVVNCSLFNPTPSLSAMVVNHYRLRGNVASYNLGGMGCSAGIIAVDLARDLLQCHRGTYAVVVSTENITLNWYLGNDRSMLVSNCLFRMGGAALLLSNRGSARRRSKYQLVHTVRTHRAADDRCFG

SEQ ID NO: 16883 - DNA, 1022 bp, Zea mays subsp. mays
  misc_feature (1)..(1022): Ceres Seq. ID no. 12355114
aataccagagcattagacgatcgtactttgtgaggcgctggtctcttgcacagactcggagcaagataggcctagctggttacaagccaagaacaagtagagcggtagagggaaaatatatctggagagggaaacaatggcgggcgaggagggtcttaaggtcctcggcctgcaggtgagcccgttcgtgctccgcgtgtgcttggcgctgaacatgaaaggagtgagttacgagtacgtcgaggaggacatatccaacaagagtgagctcctgctcaagtccaacccggtgcacaagaaggtgcccgtgctcatccacaacggtaagcccatctgcgagtcactcgtcatcatgcagtacgtcgacgagctgttcgccggccggccgatcctcccaaccgacccctacgagcgcgccactgctcgcttctgggctgcctacgccgacgacaagttgtttccagcgtggtacggcatggtgaaggcccagccggaggaggagagggcggagaaggcgaaggagacgctcgccgccatcgagcacatggaagtgaccttcgccaagtgctccggcggcaacgccttcttcggtggcgactccatcggctacgtcgacatcgtgctgacgtgctcggctccttcttgttctggttcgaggcggtgcgcagggttttcgacctggagatcattaacgctagcaagactccgctgttggctgcgtgggcggagcggtttgtagggactgtagaagcgaaggaggtggtgccgttgcccacggcggacatggcggtacagtacatcaataagcttcatgcccccctgccgccgccatgagttcacaatgagtcgtgtaagtgtaaccaagcagggaaaaaggtaaatggtgcggtgctttggtccaaattccaaccgaataatgttcaaagcttatattgataggcttgggttgttgtcatcaaatattgtggttcagtcgtctcctctgcaataaatataaatatgattattactttctttgccgt

SEQ ID NO: 16884 - protein, 200 aa, Zea mays subsp. mays
  misc_feature (1)..(200): Ceres Seq. ID no. 12355115
MAGEEGLKVLGLQVSPFVLRVCLALNMKGVSYEYVEEDISNKSELLLKSNPVHKKVPVLIHNGKPICESLVIMQYVDELFAGRPILPTDPYERATARFWAAYADDKLFPAWYGMVKAQPEEERAEKAKETLAAIEHMEVTFAKCSGGNAFFGGDSIGYVDIVLTCSAPSCSGSRRCAGFSTWRSLTLARLRCWLRGRSGL

SEQ ID NO: 16885 - protein, 174 aa, Zea mays subsp. mays
  misc_feature (1)..(174): Ceres Seq. ID no. 12355116
MKGVSYEYVEEDISNKSELLLKSNPVHKKVPVLIHNGKPICESLVIMQYVDELFAGRPILPTDPYERATARFWAAYADDKLFPAWYGMVKAQPEEERAEKAKETLAAIEHMEVTFAKCSGGNAFFGGDSIGYVDIVLTCSAPSCSGSRRCAGFSTWRSLTLARLRCWLRGRSGL

SEQ ID NO: 16886 - protein, 128 aa, Zea mays subsp. mays
  misc_feature (1)..(128): Ceres Seq. ID no. 12355117
MQYVDELFAGRPILPTDPYERATARFWAAYADDKLFPAWYGMVKAQPEEERAEKAKETLAAIEHMEVTFAKCSGGNAFFGGDSIGYVDIVLTCSAPSCSGSRRCAGFSTWRSLTLARLRCWLRGRSGL

SEQ ID NO: 16887 - DNA, 1736 bp, Zea mays subsp. mays
  misc_feature (1)..(1736): Ceres Seq. ID no. 12355141
aaaatggatatacttgaggctgcgcaaacagatatcagtgtctgacgcggccgcgggcatgtcagctgcatgcgctgcctcatggcagagcccgaccctggcggcgtgggacgccacgtccctcgcctcctccctgaaggcggcggccgcccgccgctccgcggcccacgtcggtccattgcacgccgtgctcctcaagctgggcctctccgcctccgccatccacgccacctccctggcgcacgtggctctgcgggccgggcttgcgcggtacgcgcgggagctgttcgacgagatgccccgcccggacgtggtctcttggacgtcactcgtcaccggccacgcgcaccaggggctacaccgcgattccctcgcgctgctccggcgcatggcgggttctggcgtccagcccaacggctactccttgtccggtgggctgctggcctgcgccggtgtcgggcagagcgcgcttgttcacgggaaggagatccatgccagcgtggtcaagatgagctcgcgtggactagtggacccggtcgtggagaacggggttcttggcatgtactcgaggtgcggaagcatggagtacgcgctgagagtgttcagggcgatgcctgtcaggaacatagttgcttggaactcgatgatggcagcgcttcttgggagcgggcaggccgaggacgcgctgaggctgttcgtttccatggtttcttctggcgtcggtgtggatggtttctcactctctatagccgtggatgcgtgcggggagctggcgctgctgaagcaggggatgcaggcgcacgcacaggttgctggcaatggattcgaggcagatgtcgtcgtcaggaactccttagtggacatgtacgccaagtgtggctgtgtcgattcggccgagctcgtcttcgaagcagtatcgtcaaacgacgctgttctttggaccacaatggtctcagcttacgggaagtctggccgtgcacaggacgccgtcagcttgtttgacaggatggcgcgcatggggatataacaagatggcatagcgtatcttgcggttctgtcagcttgtagccatggcggactcgtcagagaagcctggcactacttcagttcgatttctgatggttcgagctcggttgagatgcgagccgagcactacggatgcatggcggatctcctgtgcaggagaggttacctagaagaagctcttgagtttatcaagaacatgccgtttgactcgagcgtcgctgcctggagtgcgctgctcaactcatctcgaatacacgggaatgccaggctaagtcagttcgcagcttcctgtttgctcaagcttgaccctgagaaccacagcaactgggttgctctgtcaagtgtgcatgcatcagggaatgactggcacgagacctggacaatcagggagagcatgagcagagagtgtgtgaagaaagagcctgcgtgtagctgggttgagctgtgtgatggcgttcatgtttttgtaacggccgaccagtctcgtcctgaactgtttcaaatactgcagagtcttgattatttgaaggaggatacatcggtgatgccttggcaagtttcgtagaaaattctatgttttatattacagctttgtggtaggtggtttaaatctcactgcacagtgggcgattattctaatcaaaacaatcagttatgtaaagttgttgctcaatatactcgaatatgatgagttgatgactaattgtttg

SEQ ID NO: 16888 - protein, 341 aa, Zea mays subsp. mays
  misc_feature (1)..(341): Ceres Seq. ID no. 12355142
KWIYLRLRKQISVSDAAAGMSAACAASWQSPTLAAWDATSLASSLKAAAARRSAAHVGPLHAVLLKLGLSASAIHATSLAHVALRAGLARYARELFDEMPRPDVVSWTSLVTGHAHQGLHRDSLALLRRMAGSGVQPNGYSLSGGLLACAGVGQSALVHGKEIHASVVKMSSRGLVDPVVENGVLGMYSRCGSMEYALRVFRAMPVRNIVAWNSMMAALLGSGQAEDALRLFVSMVSSGVGVDGFSLSIAVDACGELALLKQGMQAHAQVAGNGFEADVVVRNSLVDMYAKCGCVDSAELVFEAVSSNDAVLWTTMVSAYGKSGRAQDAVSLFDRMARMGI

SEQ ID NO: 16889 - protein, 322 aa, Zea mays subsp. mays
  misc_feature (1)..(322): Ceres Seq. ID no. 12355143
MSAACAASWQSPTLAAWDATSLASSLKAAAARRSAAHVGPLHAVLLKLGLSASAIHATSLAHVALRAGLARYARELFDEMPRPDVVSWTSLVTGHAHQGLHRDSLALLRRMAGSGVQPNGYSLSGGLLACAGVGQSALVHGKEIHASVVKMSSRGLVDPVVENGVLGMYSRCGSMEYALRVFRAMPVRNIVAWNSMMAALLGSGQAEDALRLFVSMVSSGVGVDGFSLSIAVDACGELALLKQGMQAHAQVAGNGFEADVVVRNSLVDMYAKCGCVDSAELVFEAVSSNDAVLWTTMVSAYGKSGRAQDAVSLFDRMARMGI

SEQ ID NO: 16890 - protein, 310 aa, Zea mays subsp. mays
  misc_feature (1)..(310): Ceres Seq. ID no. 12355144
MRCLMAEPDPGGVGRHVPRLLPEGGGRPPLRGPRRSIARRAPQAGPLRLRHPRHLPGARGSAGRACAVRAGAVRRDAPPGRGLLDVTRHRPRAPGATPRFPRAAPAHGGFWRPAQRLLLVRWAAGLRRCRAERACSREGDPCQRGQDELAWTSGPGRGERGSWHVLEVRKHGVRAESVQGDACQEHSCLELDDGSASWERAGRGRAEAVRFHGFFWRRCGWFLTLYSRGCVRGAGAAEAGDAGARTGCWQWIRGRCRRQELLSGHVRQVWLCRFGRARLRSSIVKRRCSLDHNGLSLREVWPCTGRRQLV

SEQ ID NO: 16891 - DNA, 874 bp, Zea mays subsp. mays
  misc_feature (1)..(874): Ceres Seq. ID no. 12355162
ccgtgaaaccaacgcccctctctccccgcgcacgagacccatcgcgaatggaagttgctcctgcggtgaagcaactcctccccatggcgcagggccccaactccccgtcctcctccaccacctcctcctcgccctcgccctcggccgccgcgccgtccccgccgccgcgccagcagcagtcgcagtcgcaggcgcccgtgccgcgcatcatcgacaccacgcccttccccaccaccttcgtgcaggccgacacggccagcttcaaggaggtcgtccagaggctcaccggctccgacacgccgccgcctgcccagaagcccgccaagacccacggccaccaccaccaccaccacggcggcggcggcgtcgggcccaagaagccggccttcaagctctacgagcgccggatcggcaagaacaacctcaagatgatcgcgccgctggcggggccgtcgccgcggaaggcggcgccggaggtgctgtcgcccagcgtgctcgacttcccttccctggcgctcggtagccccgtcacgccgctgctggccgaccccttcaaccggtcggcgtcggcgtccccgggcgagcaggacgaggccgcggcggccatcgcgcagaggggcttcttcctgcacccctcgccgaggggcgtcgagccgccgcggctgctgccgctgttccccgtcacgtcccccaagatggcgccgtggccgtcgcagcagtgatcgggggcgggcccccgctgccggagaattcctagtactgccgcttcagatactacttgtttaattaactccttggtgcgtcatgtatttttgctcatggtattcaactcttgagcgatcgcgaaggaacggaaagaaagatcacactcttg

SEQ ID NO: 16892 - protein, 239 aa, Zea mays subsp. mays
  misc_feature (1)..(239): Ceres Seq. ID no. 12355163
VKPTPLSPRARDPSRMEVAPAVKQLLPMAQGPNSPSSSTTSSSPSPSAAAPSPPPRQQQSQSQAPVPRIIDTTPFPTTFVQADTASFKEVVQRLTGSDTPPPAQKPAKTHGHHHHHHGGGGVGPKKPAFKLYERRIGKNNLKMIAPLAGPSPRKAAPEVLSPSVLDFPSLALGSPVTPLLADPFNRSASASPGEQDEAAAAIAQRGFFLHPSPRGVEPPRLLPLFPVTSPKMAPWPSQQ

SEQ ID NO: 16893 - protein, 224 aa, Zea mays subsp. mays
  misc_feature (1)..(224): Ceres Seq. ID no. 12355164
MEVAPAVKQLLPMAQGPNSPSSSTTSSSPSPSAAAPSPPPRQQQSQSQAPVPRIIDTTPFPTTFVQADTASFKEVVQRLTGSDTPPPAQKPAKTHGHHHHHHGGGGVGPKKPAFKLYERRIGKNNLKMIAPLAGPSPRKAAPEVLSPSVLDFPSLALGSPVTPLLADPFNRSASASPGEQDEAAAAIAQRGFFLHPSPRGVEPPRLLPLFPVTSPKMAPWPSQQ

SEQ ID NO: 16894 - protein, 212 aa, Zea mays subsp. mays
  misc_feature (1)..(212): Ceres Seq. ID no. 12355165
MAQGPNSPSSSTTSSSPSPSAAAPSPPPRQQQSQSQAPVPRIIDTTPFPTTFVQADTASFKEVVQRLTGSDTPPPAQKPAKTHGHHHHHHGGGGVGPKKPAFKLYERRIGKNNLKMIAPLAGPSPRKAAPEVLSPSVLDFPSLALGSPVTPLLADPFNRSASASPGEQDEAAAAIAQRGFFLHPSPRGVEPPRLLPLFPVTSPKMAPWPSQQ

SEQ ID NO: 16895 - DNA, 1117 bp, Zea mays subsp. mays
  misc_feature (1)..(1117): Ceres Seq. ID no. 12355198
ccccgagccgcaaacctgcaaccaccttcccaaatcctagttctcgcttctcgtcgtctagcctcggcccgttccaaaagccccgcagctctcgcatctcatcagacgccaccaccacctccggcgaccgaaagatgatctctccggatgcagcccgcaacgtcgtaggcatcatcggcaatgtcatctccttcggcctcttcctctccccagtgctgacgttctggcggatctgcaaggccagggacgtggaggagtttaagcctgacccctacctggcgacgctgctcaactgcatgctctgggtgttctacggcatccccgtcgtccaccccaacagcatcctcgtcgtcaccatcaacggcgtcgggctcgtcatcgaggccatctacctcaccatcttcttcctttactctgatggcccgaaacgcaggaaagcgttcggaatcctggccgtggagattttgttcatggtcgccgtggtgcttggtgtgattttgggcgcccacacgcacgagaagcgctccatgatcgtcggcattctctgcgtcattttcggctcgatgatgtacgcctccccactcaccattatgagccgtgtgatcaagaccaagagcgttgagtacatgcccttcctcctctcgctggtgagcttcctcaatggctgctgctggacggcctacgcgctcatccgcttcgacctctacgttacgatccccaacgcccttggcgccttcttcggcctcatccagctaatcctctacttctgctactacaagtcgacccccaaggagaagaatgtggagctgcccaccgtctccagcaacgccggcggcggcaacgtcaccgtcagcgtcgagcgataggcgacgtagctgcagcggcagcgccgccgcccgtcgagaaagaactcgacgagacgtactttagcaatagtagttgccattcatcgctcttctaggatggtttgttttaagtgagtgctacctagttttgcccggtgcgtgtcgtgtcaaagaacagttaggggtgtttggttcacccaattaaataaagttaaagtttagtatttgctctgaatgtttgaatagtaattatgactattaaatatagtttt

SEQ ID NO: 16896 - protein, 287 aa, Zea mays subsp. mays
  misc_feature (1)..(287): Ceres Seq. ID no. 12355199
PSRKPATTFPNPSSRFSSSSLGPFQKPRSSRISSDATTTSGDRKMISPDAARNVVGIIGNVISFGLFLSPVLTFWRICKARDVEEFKPDPYLATLLNCMLWVFYGIPVVHPNSILVVTINGVGLVIEAIYLTIFFLYSDGPKRRKAFGILAVEILFMVAVVLGVILGAHTHEKRSMIVGILCVIFGSMMYASPLTIMSRVIKTKSVEYMPFLLSLVSFLNGCCWTAYALIRFDLYVTIPNALGAFFGLIQLILYFCYYKSTPKEKNVELPTVSSNAGGGNVTVSVER

SEQ ID NO: 16897 - protein, 243 aa, Zea mays subsp. mays
  misc_feature (1)..(243): Ceres Seq. ID no. 12355200
MISPDAARNVVGIIGNVISFGLFLSPVLTFWRICKARDVEEFKPDPYLATLLNCMLWVFYGIPVVHPNSILVVTINGVGLVIEAIYLTIFFLYSDGPKRRKAFGILAVEILFMVAVVLGVILGAHTHEKRSMIVGILCVIFGSMMYASPLTIMSRVIKTKSVEYMPFLLSLVSFLNGCCWTAYALIRFDLYVTIPNALGAFFGLIQLILYFCYYKSTPKEKNVELPTVSSNAGGGNVTVSVER

SEQ ID NO: 16898 - protein, 189 aa, Zea mays subsp. mays
  misc_feature (1)..(189): Ceres Seq. ID no. 12355201
MLWVFYGIPVVHPNSILVVTINGVGLVIEAIYLTIFFLYSDGPKRRKAFGILAVEILFMVAVVLGVILGAHTHEKRSMIVGILCVIFGSMMYASPLTIMSRVIKTKSVEYMPFLLSLVSFLNGCCWTAYALIRFDLYVTIPNALGAFFGLIQLILYFCYYKSTPKEKNVELPTVSSNAGGGNVTVSVER

SEQ ID NO: 16899 - DNA, 927 bp, Zea mays subsp. mays
  misc_feature (1)..(927): Ceres Seq. ID no. 12355214
agcagtccagcagagtttccgtctccccgactcccgagtcccgactgccggccctgacctgccctgcgccgcgcggagccgcggaccgcccgcccaccaccgaaaccctagagcaagcagggatgcacagtccggtcccgctcctcctcctcctgctcctctgcacggccgcggcggcctccgacggctcccagccccaggcgcaggcgcaggcacctggcgcggcacggcgggggatggtgccggtggcccccgcggaggcggagctcggcgccgtgaaggcgctcgccctcaacggcacgcggcgccggctcgggggcagcttccagctctgcgcgccctgcacctgctgcggcggggccagcggcgcctgcatcctcgcgccctgctgctactccatcaactgcaacatccccaaccgccccttcgggtactgctccttcacgcccaagtcctgccagtgcgtcggatgcaacctctgagctccgtggccgcgggattcattggattggattggtcagagtgtgtttgtgtgtgtgtgtgtgagagagagagagagtggggtggtaacgaatctgtataaaaaattccccacatccttagttaagtggcgattgctattacttctacctagtagtattttgctgtgatcactgctacgctcgacttagttgagggaaaaaaaagagaaaggggtctgggttgatctagaggtcactactctggggttttgcttttctgtcgccacacattggatgtctgattaggatgctacttgttcatagtggtttgttgttgatagctggaataaatatacctgtttaggtgcatggatctagtcatctagtgcattttagtggatgccatctcttccgtcctgatcagtgcctactgccctggaatgtgaatatgtgatagctctagctc

SEQ ID NO: 16900 - protein, 193 aa, Zea mays subsp. mays
  misc_feature (1)..(193): Ceres Seq. ID no. 12355215
AVQQSFRLPDSRVPTAGPDLPCAARSRGPPAHHRNPRASRDAQSGPAPPPPAPLHGRGGLRRLPAPGAGAGTWRGTAGDGAGGPRGGGARRREGARPQRHAAPARGQLPALRALHLLRRGQRRLHPRALLLLHQLQHPQPPLRVLLLHAQVLPVRRMQPLSSVAAGFIGLDWSECVCVCVCEREREWGGNESV

SEQ ID NO: 16901 - protein, 159 aa, Zea mays subsp. mays
  misc_feature (1)..(159): Ceres Seq. ID no. 12355216
QSSRVSVSPTPESRLPALTCPAPRGAADRPPTTETLEQAGMHSPVPLLLLLLLCTAAAASDGSQPQAQAQAPGAARRGMVPVAPAEAELGAVKALALNGTRRRLGGSFQLCAPCTCCGGASGACILAPCCYSINCNIPNRPFGYCSFTPKSCQCVGCNL

SEQ ID NO: 16902 - protein, 119 aa, Zea mays subsp. mays
  misc_feature (1)..(119): Ceres Seq. ID no. 12355217
MHSPVPLLLLLLLCTAAAASDGSQPQAQAQAPGAARRGMVPVAPAEAELGAVKALALNGTRRRLGGSFQLCAPCTCCGGASGACILAPCCYSINCNIPNRPFGYCSFTPKSCQCVGCNL

SEQ ID NO: 16903 - DNA, 1174 bp, Zea mays subsp. mays
  misc_feature (1)..(1174): Ceres Seq. ID no. 12355225
aaaggatagcctttcttcctgtgcagccactccagtgcacgccgccgcagcttgctacacgtgccgggcaagggcaatggattccagcagcagagtgatcgccttcgattgcagctccttcaaactctacatggacggccaagtcgagcgtgcggcccaacgcatgggaaaccgtgcccgccggcttcgacgcggacacgggcgtggcatccaaagacgtcgtcatcgacgtcgccaccggcgccaccgtgcggctctacctaccaccagtccagggagccacgacgaagctcccagtcgtcgtcttcttccatggcggctacttcatcgtcggctcagcccgcgagcctatgtaccatcgctatgtcaactcgctggtcgccagagcacgcgtcgtcgctgtctccgccgactaccgcctcgcgccagagcacccgctcccggcagcctacgacgactcctgggccgcgctcaagtgggcggtctccggcgcggaccagtggctgtccgaccacggcgacctcggccgcgtcttcctggtcggcatcagcgccggcggtaacattgcccacaacatggccatctctgtgggcgtgagcggcttgccggccgctgaaccaccgcgcatagaaggcgtgatcctgctccacccttccttttccggcgaacagaagatggatgtagaagaagaggagttctggcgatctaacaatagcaggtgggcggtcatcttcccgggcgcgaccggcggggcggacgatccaaggattaacccgatggcggacggcgcgccgagcctggagaagctagtgggtgaaaggctgctcgtctgcacggcgtctttggacccgagggcgccgagggggcccggatactgcgaggccgtacgggccagcgggtggcgcgggaaggtggagtggttcgagacggaaggtgaggaccacggtttcttcgtcctcaaccccggcagccacaaggcggttgaggtcatggatcgagtggttgctttccttgcggaccagtgatgacctcctcagggcacagcaaggtctagcagctcgccgcaaaaccggacgtcctagctacggcgcagccgttctcaggcgattgtttactgtctgtactcccaagagtgtcctagatgagttattggaataaacactacagtcaattc

SEQ ID NO: 16904 - protein, 224 aa, Zea mays subsp. mays
  misc_feature (1)..(224): Ceres Seq. ID no. 12355226
MYHRYVNSLVARARVVAVSADYRLAPEHPLPAAYDDSWAALKWAVSGADQWLSDHGDLGRVFLVGISAGGNIAHNMAISVGVSGLPAAEPPRIEGVILLHPSFSGEQKMDVEEEEFWRSNNSRWAVIFPGATGGADDPRINPMADGAPSLEKLVGERLLVCTASLDPRAPRGPGYCEAVRASGWRGKVEWFETEGEDHGFFVLNPGSHKAVEVMDRVVAFLADQ

SEQ ID NO: 16905 - protein, 186 aa, Zea mays subsp. mays
  misc_feature (1)..(186): Ceres Seq. ID no. 12355227
KDSLSSCAATPVHAAAACYTCRARAMDSSSRVIAFDCSSFKLYMDGQVERAAQRMGNRARRLRRGHGRGIQRRRHRRRHRRHRAALPTTSPGSHDEAPSRRLLPWRLLHRRLSPRAYVPSLCQLAGRQSTRRRCLRRLPPRARAPAPGSLRRLLGRAQVGGLRRGPVAVRPRRPRPRLPGRHQRRR

SEQ ID NO: 16906 - protein, 161 aa, Zea mays subsp. mays
  misc_feature (1)..(161): Ceres Seq. ID no. 12355228
MDSSSRVIAFDCSSFKLYMDGQVERAAQRMGNRARRLRRGHGRGIQRRRHRRRHRRHRAALPTTSPGSHDEAPSRRLLPWRLLHRRLSPRAYVPSLCQLAGRQSTRRRCLRRLPPRARAPAPGSLRRLLGRAQVGGLRRGPVAVRPRRPRPRLPGRHQRRR

SEQ ID NO: 16907 - DNA, 1031 bp, Zea mays subsp. mays
  misc_feature (1)..(1031): Ceres Seq. ID no. 12355251
agaacgcactagcatttccacgcggcgttccacttccacccgaaaccccaatcaagcgtgcactgcatctgcgtagcccgttcaccacgcactcgcttccctccctaccgtgcgatctatggacggcgacggcgcgacgtgggggcagccgatgctggagaagcggccgagccaccgggagcggcatttcacggcgggggaagtggtgcgggacgtcatcatgggggtgtccgacggcctcaccgtgcccttcgccctcgccgcggggctctccggcgccagcgcgccctcctcgctcgtcctcaccgccggcctcgccgaggccccgccggcgccatctccatgggactcggagggtaccttgcggcccagagcgaggcggaccactacaagcgggagatgagaagggagcaggaggagatcatcgccgtcccagacaccgaggccgctgagattggagagatcatgtcacggtatgggctcgagccgcaggagtacggccctgtcgtcgccggactcaggcgaaaccctcaagcttggctagacttcatgatgaggttcgagctgggactggagagaccggatcccagaagggctctgcagagcgccttcacgatcgcagtgtcctacgtggtcggcgggctggtccctctcctgccctacgtgctcgtctccgcggcgaaggatgccatgctcacatccgtcagagtcacgctggccgcgctgcttttcttcggctacgtcaagggccgcttcacggggaactggccgttcgccagtgccgtccagaccgctgtcattggagcgctcgcttcggcggcggcgtacgggatggcgaaggctgttcaggcgaggtagttgtttgttggtgaggcggcggcgtcaggcgttttgggaaccagagtttcagtaggatgcggtaaaactgaagaaagctgtataattccgatcctttgggggacttctcgtttacagtgttaatcgcgggatctagtgctagtctactcttttgaataaatctaggggaggat

SEQ ID NO: 16908 - protein, 171 aa, Zea mays subsp. mays
  misc_feature (1)..(171): Ceres Seq. ID no. 12355252
MGLGGYLAAQSEADHYKREMRREQEEIIAVPDTEAAEIGEIMSRYGLEPQEYGPVVAGLRRNPQAWLDFMMRFELGLERPDPRRALQSAFTIAVSYVVGGLVPLLPYVLVSAAKDAMLTSVRVTLAALLFFGYVKGRFTGNWPFASAVQTAVIGALASAAAYGMAKAVQAR

SEQ ID NO: 16909 - protein, 152 aa, Zea mays subsp. mays
  misc_feature (1)..(152): Ceres Seq. ID no. 12355253
MRREQEEIIAVPDTEAAEIGEIMSRYGLEPQEYGPVVAGLRRNPQAWLDFMMRFELGLERPDPRRALQSAFTIAVSYVVGGLVPLLPYVLVSAAKDAMLTSVRVTLAALLFFGYVKGRFTGNWPFASAVQTAVIGALASAAAYGMAKAVQAR

SEQ ID NO: 16910 - protein, 149 aa, Zea mays subsp. mays
  misc_feature (1)..(149): Ceres Seq. ID no. 12355254
NALAFPRGVPLPPETPIKRALHLRSPFTTHSLPSLPCDLWTATARRGGSRCWRSGRATGSGISRRGKWCGTSSWGCPTASPCPSPSPRGSPAPARPPRSSSPPASPRPRRRHLHGTRRVPCGPERGGPLQAGDEKGAGGDHRRPRHRGR

SEQ ID NO: 16911 - DNA, 1076 bp, Zea mays subsp. mays
  misc_feature (1)..(1076): Ceres Seq. ID no. 12355259
agtcctccacgcacgcacgcacgcacgaccagttgccacggcagaccaccccgcccagcggccagcttgctcgccacgaccacgatgggcttccccgtggggtactcggagtcggagatgctgctcccgcgcgtgctgctgcaggtgctcctcctcctcggccacttccaccgcttcctcctctgggccttccacgccgtggggctcggcgacctgatcgacctcggctgcaactacccgccgccgccgccctccgcgtccacggcgcacgagatgatggagcaccagcaccagcaccaggggcgcgacgacgtggcctccccgctgcagcaccagcgcccggagttccggcccgtcgcggcggcgctcatcgaggaggcgctccccgtggtgcggttcgacgagctgggcggcgcgccgtgcggcggcggcgactgcgcggtgtgcctgagcggcatcggcggcggcgacgaggtgcggcggctcggcaactgccgccacgccttccaccgggcctgcctggaccgctggatggcgcacgaccagcgcacctgcccgctctgccgcgcgccgctcatcccctgggccgccgacgccgactacgacatgtcctatccgtctcccctgccgcccacgccactgcggcggcctcacgagctgctgctgctgcttaccggcctgggcggcttccagtgatgcgcctgcgcgtgggcagcgtggctggcacttgggcaggccggccacgcgaatccgatccgtggcgaggcaaaccgcgtgctcatgtgcggcccagnacgcccggtcggtcaggcgggtgaccgccgccaaacctgctcagttgccagccgtacacgcttgccggcctcgtcttcggtcgtgtctccgactccgttggtttttttacagaggctcccagtcccaggtcaaacaaaaaaggaggcgaaacagacaaagcagtcggaaattaggcaggtactgtactaggttgatctgtaggccgattgggcgactccaaatctgtggagctgtgaatcctttggcagattaaactaaaaattgtctctatagatcagacc

SEQ ID NO: 16912 - protein, 271 aa, Zea mays subsp. mays
  misc_feature (1)..(271): Ceres Seq. ID no. 12355260
  misc_feature (264)..(264): Xaa is any aa, unknown or other
SSTHARTHDQLPRQTTPPSGQLARHDHDGLPRGVLGVGDAAPARAAAGAPPPRPLPPLPPLGLPRRGARRPDRPRLQLPAAAALRVHGARDDGAPAPAPGARRRGLPAAAPAPGVPARRGGAHRGGAPRGAVRRAGRRAVRRRRLRGVPERHRRRRRGAAARQLPPRLPPGLPGPLDGARPAHLPALPRAAHPLGRRRRLRHVLSVSPAAHATAAASRAAAAAYRPGRLPVMRLRVGSVAGTWAGRPRESDPWRGKPRAHVRPXTPGRSGG

SEQ ID NO: 16913 - protein, 231 aa, Zea mays subsp. mays
  misc_feature (1)..(231): Ceres Seq. ID no. 12355261
SPPRTHARTTSCHGRPPRPAASLLATTTMGFPVGYSESEMLLPRVLLQVLLLLGHFHRFLLWAFHAVGLGDLIDLGCNYPPPPPSASTAHEMMEHQHQHQGRDDVASPLQHQRPEFRPVAAALIEEALPVVRFDELGGAPCGGGDCAVCLSGIGGGDEVRRLGNCRHAFHRACLDRWMAHDQRTCPLCRAPLIPWAADADYDMSYPSPLPPTPLRRPHELLLLLTGLGGFQ

SEQ ID NO: 16914 - protein, 203 aa, Zea mays subsp. mays
  misc_feature (1)..(203): Ceres Seq. ID no. 12355262
MGFPVGYSESEMLLPRVLLQVLLLLGHFHRFLLWAFHAVGLGDLIDLGCNYPPPPPSASTAHEMMEHQHQHQGRDDVASPLQHQRPEFRPVAAALIEEALPVVRFDELGGAPCGGGDCAVCLSGIGGGDEVRRLGNCRHAFHRACLDRWMAHDQRTCPLCRAPLIPWAADADYDMSYPSPLPPTPLRRPHELLLLLTGLGGFQ

SEQ ID NO: 16915 - DNA, 1097 bp, Zea mays subsp. mays
  misc_feature (1)..(1097): Ceres Seq. ID no. 12355286
tcttgaagtgtggaggtgtggtgttaggaacagctatccaccacgccgccacagacgtttcaagcgcgttccacttttttcagacatggtcggcgttctgcaagcatggtgacagtgctgccgtggagctcccgtgccacgaccgcaccctactccgcgcacggtccccgcccacagtccaccccgacgcgctctccacattgcagcctcggctcgtcctcactgaacccgaggggcctcttgccatcgaaatctttaccatttccagggatcatgtcgcctccctgaagcagctctgcggtggcacgagcaccttttgcgccgtcagcgctctcatctggcagtgcgcgtgcgttgcacgacggatcccaccggactctcaggtgcgcgtgatgttcccggccgacgtccgccgccggatgaggccgcccctcccgacccactacttcggcaacgcagtgatcaggctatacgccgctggcccggcaggggacattggcacggcggcgttggcatccgtcgctgcccgcatcaagggcgccgtcgagcggatggatgacgagctggtgcggtccgcgattgactactacgagatggccgagacgaacaagagacggactgggacaggcatcttaccaccgacggacctgaatattaccagctggttgggtaggccacagcacgacgcagattttggctggggaaagccgcaatccatgtcgcgggcggagtctgtccgcggcggctctatgcacttgatgaacgacgacggtggtaccggcaacgtccgcgtgctcgtgtgcttggaggctgaaaatataaaggagctaggacggctgctttatgcaaagctctagcaagctgctagtgctatgcactaaaaataatattaataataataaggtttgttactttgcttaaggggaaccatactttttccctcgcgatttattattattaattatggcagtttgaataatgaaaaccatttgtaattcctgtgacaattagtttatgcgtccacactagaaataaaaacttgtttgtaataaactacagtttttttttgttatggcagtttcaataatgaaatccgt

SEQ ID NO: 16916 - protein, 284 aa, Zea mays subsp. mays
  misc_feature (1)..(284): Ceres Seq. ID no. 12355287
LKCGGVVLGTAIHHAATDVSSAFHFFQTWSAFCKHGDSAAVELPCHDRTLLRARSPPTVHPDALSTLQPRLVLTEPEGPLAIEIFTISRDHVASLKQLCGGTSTFCAVSALIWQCACVARRIPPDSQVRVMFPADVRRRMRPPLPTHYFGNAVIRLYAAGPAGDIGTAALASVAARIKGAVERMDDELVRSAIDYYEMAETNKRRTGTGILPPTDLNITSWLGRPQHDADFGWGKPQSMSRAESVRGGSMHLMNDDGGTGNVRVLVCLEAENIKELGRLLYAKL

SEQ ID NO: 16917 - protein, 154 aa, Zea mays subsp. mays
  misc_feature (1)..(154): Ceres Seq. ID no. 12355288
MFPADVRRRMRPPLPTHYFGNAVIRLYAAGPAGDIGTAALASVAARIKGAVERMDDELVRSAIDYYEMAETNKRRTGTGILPPTDLNITSWLGRPQHDADFGWGKPQSMSRAESVRGGSMHLMNDDGGTGNVRVLVCLEAENIKELGRLLYAKL

SEQ ID NO: 16918 - protein, 145 aa, Zea mays subsp. mays
  misc_feature (1)..(145): Ceres Seq. ID no. 12355289
MRPPLPTHYFGNAVIRLYAAGPAGDIGTAALASVAARIKGAVERMDDELVRSAIDYYEMAETNKRRTGTGILPPTDLNITSWLGRPQHDADFGWGKPQSMSRAESVRGGSMHLMNDDGGTGNVRVLVCLEAENIKELGRLLYAKL

SEQ ID NO: 16919 - DNA, 1139 bp, Zea mays subsp. mays
  misc_feature (1)..(1139): Ceres Seq. ID no. 12355294
aacggctcgaccgcactgccagagcagcgtaaagccagggtagggtaacacaatgtcgagcgtcatgacggccgcgaaagaggacgatatggtcgtgcacgacttcgccccgctactccttgtatacaagagcgggcgcctggaacgcccactggccatgccggcggtctcgtccggccgcgacgtcgacacgggcgtcgtgtccaaggacgtggccctctcgcaggactccttatcggtgcgcctgtacctcccgcccgccgctaccacagcgcccgaaaggaggctcccagtggtcgtgtacttccacggcggtggcttcgtcgtcgggtcggccaggtccgccgtgtaccaccgctgcctgaacgacctcgccgccgcttgccccgctgtggccgtttccgtcgactaccgccttgcaccagagcacccggtgcccgccgcgtacgagggactccctggcggccctcaagtgggcgttggcgccgtcgtccgcgaccgactcgtggcttgcagtgcatggcgaccctgcgcgcgtgttcctcgccggcgacagcgcggggggcaacatctgccaccaccttgccatgcacccagacatccgggacgctggcctcaggggcgtcgtgctcatccacccctggttctggggcagggaccccatccctggggagccaccgctgaaccccgcctcaaagcagcagaagggcctatgggagttcgtgtgccccgaggcggtggacggcgcggacgaccccaggatgaacccgacagcgccgagcgccccagggttggacaacctggcgtgccagaaggtgatggtgtgcgtggccgagggggacatccttcgatggcgcgggaagctgtacgcagaggcggtggcgcgggcgaggggcaccgaaaaggacgtggagctattcgaatccgaaggggtcgggcatgtgttctacctgctggagcccgtgcaggagaaggccaaggagctattggacaagatcgcgacgtttgtcaggacggaatgaggagggatgcattggtggtggtggtccggtggacactgtcacactggacatcatgtatcgttaacgtactactactacatactccatccgttctttttatttatcgttgcttagtcc

SEQ ID NO: 16920 - protein, 362 aa, Zea mays subsp. mays
  misc_feature (1)..(362): Ceres Seq. ID no. 12355295
MSSVMTAAKEDDMVVHDFAPLLLVYKSGRLERPLAMPAVSSGRDVDTGVVSKDVALSQDSLSVRLYLPPAATTAPERRLPVVVYFHGGGFVVGSARSAVYHRCLNDLAAACPAVAVSVDYRLAPEHPVPAAYEGLPGGPQVGVGAVVRDRLVACSAWRPCARVPRRRQRGGQHLPPPCHAPRHPGRWPQGRRAHPPLVLGQGPHPWGATAEPRLKAAEGPMGVRVPRGGGRRGRPQDEPDSAERPRVGQPGVPEGDGVRGRGGHPSMAREAVRRGGGAGEGHRKGRGAIRIRRGRACVLPAGARAGEGQGAIGQDRDVCQDGMRRDALVVVVRWTLSHWTSCIVNVLLLHTPSVLFIYRCLV

SEQ ID NO: 16921 - protein, 358 aa, Zea mays subsp. mays
  misc_feature (1)..(358): Ceres Seq. ID no. 12355296
MTAAKEDDMVVHDFAPLLLVYKSGRLERPLAMPAVSSGRDVDTGVVSKDVALSQDSLSVRLYLPPAATTAPERRLPVVVYFHGGGFVVGSARSAVYHRCLNDLAAACPAVAVSVDYRLAPEHPVPAAYEGLPGGPQVGVGAVVRDRLVACSAWRPCARVPRRRQRGGQHLPPPCHAPRHPGRWPQGRRAHPPLVLGQGPHPWGATAEPRLKAAEGPMGVRVPRGGGRRGRPQDEPDSAERPRVGQPGVPEGDGVRGRGGHPSMAREAVRRGGGAGEGHRKGRGAIRIRRGRACVLPAGARAGEGQGAIGQDRDVCQDGMRRDALVVVVRWTLSHWTSCIVNVLLLHTPSVLFIYRCLV

SEQ ID NO: 16922 - protein, 350 aa, Zea mays subsp. mays
  misc_feature (1)..(350): Ceres Seq. ID no. 12355297
MVVHDFAPLLLVYKSGRLERPLAMPAVSSGRDVDTGVVSKDVALSQDSLSVRLYLPPAATTAPERRLPVVVYFHGGGFVVGSARSAVYHRCLNDLAAACPAVAVSVDYRLAPEHPVPAAYEGLPGGPQVGVGAVVRDRLVACSAWRPCARVPRRRQRGGQHLPPPCHAPRHPGRWPQGRRAHPPLVLGQGPHPWGATAEPRLKAAEGPMGVRVPRGGGRRGRPQDEPDSAERPRVGQPGVPEGDGVRGRGGHPSMAREAVRRGGGAGEGHRKGRGAIRIRRGRACVLPAGARAGEGQGAIGQDRDVCQDGMRRDALVVVVRWTLSHWTSCIVNVLLLHTPSVLFIYRCLV

SEQ ID NO: 16923 - DNA, 918 bp, Zea mays subsp. mays
  misc_feature (1)..(918): Ceres Seq. ID no. 12355344
tacatttattctcttcttcttgagcccctggcctccccctcctgccaggctgcgcattctttctccagctctctgataagctagccagcgtcgtcgtcgtgtcttgttagttattagctctatctcgccgccctgcagctgctgatcgagtgagggaattcagcagcagcagcagcaggtagcatagcatagatatgacggcggcggaggtggaggccgccaaggacatcgccgaggagaaggccgtcgtgccgttgccaccgtcgcccgccaagccggccgacgacgactccaaggccatcgtcgctcttgtcgtcaaggacgctgctgctgggaaaccttctacagctattattggaggctcaactgaaagagatgcttacctcgccaagatcgtgtccgagaagaggctgagtctgatcaccgcctgggaggagagccagaaggcgagagccgacaacagggctgccaagaagcttgccttcatcacgtcctgggagaacgccaagaaagcggagatggaggcggagctcagaaagattgaggagcaactggagaagaagaaggcggcgtacgaggagaagctcaagaacaagctggcgatgctgcacaggacggcggaggagaggagggcgcagacggaggccaggcgcggcgaggagaccatcctggcggaggagatggccgccaagtaccgcgccaagggcgagggccccaccaagctctttggcctcttgaaagcgtgacctcttgctatggagaatgccctgtttcgtgcgtgtatttcgtattcccaattgcacttggtgtgtgtgtgtacgtgttgtttgttgttttctcttgtattcgatggcttgcttgacatctgttgtattgtatttgtatagaagtgcagtgcagtgcagtgctattctttct

SEQ ID NO: 16924 - protein, 183 aa, Zea mays subsp. mays
  misc_feature (1)..(183): Ceres Seq. ID no. 12355345
MTAAEVEAAKDIAEEKAVVPLPPSPAKPADDDSKAIVALVVKDAAAGKPSTAIIGGSTERDAYLAKIVSEKRLSLITAWEESQKARADNRAAKKLAFITSWENAKKAEMEAELRKIEEQLEKKKAAYEEKLKNKLAMLHRTAEERRAQTEARRGEETILAEEMAAKYRAKGEGPTKLFGLLKA

SEQ ID NO: 16925 - DNA, 856 bp, Zea mays subsp. mays
  misc_feature (1)..(856): Ceres Seq. ID no. 12355354
aatggttccatttcttatgtcacgtccaaattggaaattccatcacgcctcgccctcgccctcgccctcgccgtccccgaccagaatcgtcacttcgtccggctccggcgatctcctccaccgccgttgtcagcggtccggccgagatggggagcacttcctctatgctcatccaatacgatatcgaggaggtccaggaccattgtaaccacgcattctcgcagcaggagatcgtgtcgctgtaccaccgcttctgtcagctcgaccgcaacggaggtggcttcgtctccgctgacgagttcatgtcggtacctgagttcgccgtaaatcccctctcccagaggctcctgaggatgctggatggtctcaacttcaaggagtttgtagcatttttgtcggcttttagcccccgcacaagcctacaggaaaagattgaatttattttcagggtttatgatactgactgcaacgggaaggttgcttttgatgacatcttaagcatcttgcgagatctgacaggttcatttatgacagagcaacagagacagaaagtcttgactcatgtgttagaagaagctgggtacacaaaaaattcacatttcacactcccagactttatgaagattattggcaattctgagctcaagatggaggttgaagttcctattgactaaaaaccaaataagtatcatctagttgtatcgtgatgtgttgccgagagccccagacctgtatgttcatttgtgttgaattaagtctatggtgtatttatatccttgtaaatcaaatcatgatcatagatgtaattaaggaaacaaatgtacctgttatttggaggattagttgacttgcgctg

SEQ ID NO: 16926 - protein, 223 aa, Zea mays subsp. mays
  misc_feature (1)..(223): Ceres Seq. ID no. 12355355
WFHFLCHVQIGNSITPRPRPRPRRPRPESSLRPAPAISSTAVVSGPAEMGSTSSMLIQYDIEEVQDHCNHAFSQQEIVSLYHRFCQLDRNGGGFVSADEFMSVPEFAVNPLSQRLLRMLDGLNFKEFVAFLSAFSPRTSLQEKIEFIFRVYDTDCNGKVAFDDILSILRDLTGSFMTEQQRQKVLTHVLEEAGYTKNSHFTLPDFMKIIGNSELKMEVEVPID

SEQ ID NO: 16927 - protein, 175 aa, Zea mays subsp. mays
  misc_feature (1)..(175): Ceres Seq. ID no. 12355356
MGSTSSMLIQYDIEEVQDHCNHAFSQQEIVSLYHRFCQLDRNGGGFVSADEFMSVPEFAVNPLSQRLLRMLDGLNFKEFVAFLSAFSPRTSLQEKIEFIFRVYDTDCNGKVAFDDILSILRDLTGSFMTEQQRQKVLTHVLEEAGYTKNSHFTLPDFMKIIGNSELKMEVEVPID

SEQ ID NO: 16928 - protein, 169 aa, Zea mays subsp. mays
  misc_feature (1)..(169): Ceres Seq. ID no. 12355357
MLIQYDIEEVQDHCNHAFSQQEIVSLYHRFCQLDRNGGGFVSADEFMSVPEFAVNPLSQRLLRMLDGLNFKEFVAFLSAFSPRTSLQEKIEFIFRVYDTDCNGKVAFDDILSILRDLTGSFMTEQQRQKVLTHVLEEAGYTKNSHFTLPDFMKIIGNSELKMEVEVPID

SEQ ID NO: 16929 - DNA, 708 bp, Zea mays subsp. mays
  misc_feature (1)..(708): Ceres Seq. ID no. 12355366
catggaaggaattgcacaggcgttgctagcattggataggattgaacatgatgttgaattgacttatgagcaactgcttctgctagaaactaatctgctcttaagtggccttgatttgcacgatcaacatgaagatatgagattggatatcgacaatatgtcttatgaggaactgcttgctttggaagagcatattggctcagtgactactgcccttactgaagagcaatttaccaagtgtgtaaaccaaagtgtgtatgaagcaagaaattcttatagagatgtaagcaagatcgcagcagatgatgtgaaatgtagcgtatgtcaggaggaatacgttgatggtgaagagattggtacaatgcaatgtgaacatcagtaccatgtgcgctgcattcacgaatggcttaagcagaagaattggtgtccaatatgcaaagcttcaggctataccttcagagatgaccaagggagacgcatgaatcttggcccaaacttgtaaatagcgtggatttattattagacattgtagatgctgacgcagttcaccccaatatgtggatacgatagtctctcccgaacggtcgaacgcctggaaccttttgttactgcatcttttatcttcttagcacacccttgctgcttgacagcagtacgggtcagaaactcgaaaataaccgtggttctcaagaaatttttccagattcc

SEQ ID NO: 16930 - protein, 166 aa, Zea mays subsp. mays
  misc_feature (1)..(166): Ceres Seq. ID no. 12355367
MEGIAQALLALDRIEHDVELTYEQLLLLETNLLLSGLDLHDQHEDMRLDIDNMSYEELLALEEHIGSVTTALTEEQFTKCVNQSVYEARNSYRDVSKIAADDVKCSVCQEEYVDGEEIGTMQCEHQYHVRCIHEWLKQKNWCPICKASGYTFRDDQGRRMNLGPNL

SEQ ID NO: 16931 - protein, 121 aa, Zea mays subsp. mays
  misc_feature (1)..(121): Ceres Seq. ID no. 12355368
MRLDIDNMSYEELLALEEHIGSVTTALTEEQFTKCVNQSVYEARNSYRDVSKIAADDVKCSVCQEEYVDGEEIGTMQCEHQYHVRCIHEWLKQKNWCPICKASGYTFRDDQGRRMNLGPNL

SEQ ID NO: 16932 - protein, 114 aa, Zea mays subsp. mays
  misc_feature (1)..(114): Ceres Seq. ID no. 12355369
MSYEELLALEEHIGSVTTALTEEQFTKCVNQSVYEARNSYRDVSKIAADDVKCSVCQEEYVDGEEIGTMQCEHQYHVRCIHEWLKQKNWCPICKASGYTFRDDQGRRMNLGPNL

SEQ ID NO: 16933 - DNA, 1261 bp, Zea mays subsp. mays
  misc_feature (1)..(1261): Ceres Seq. ID no. 12355390
gacgccactcccacctctcttcttctctttcccttcgcattaatggccgctctctccctatcccctttcgtctcgctctcggagtaggacactcgcccgcttccggcttaaccttcaagattctccctcctcctcctacttcttcccgcttgggcgggcgcggcaccttccggttctgggcctcctatatatatacgcgcgcgaccgtcccccttccatactccctagcatgctcggctcgcaccccggattgatcgagctcgcccgtcgccgcgatggattcggtgccttccccctcctcttctacccgggccaccgctgctcccggtccctgctgccgctttgacgcgctgcggagggcgtgcgccaggcacgccgccgccgccgcgcgggccgccgggtgggcgctcggcgcgctgctcacctgcgtcttcgccgtcgtgggctcactcgtcggaatcttcattggtgccttcatggggatgtctacagaaagcggcatgttccgcggggctggtgtcggagcagtctcgggagcagtcttctccattgaggctgttgagtcctgcatcgagatttggaggtccagccattcgggaaaatacagcattctctatgtgctggacatcatctctagcctcttcagcggaagaattgtgtgggagaaagtcagtccagcgctacagcgtgcagtgcaaagccagatgagtctaatgagcacaccgttcatcgacaacaatgaccttttcgaaactggcagtacaggaggcatgtcaagggctctgattgataggatcccaaagatgaggttcagtgctgcaagcaattgtgacaaggaaactgatagcagctgctgctcagtctgcctgcaggattttggagcacagcaatttgtgagggccctgcctcagtgccaacacatattccatgtgcggtgcatcgacaactggctccttcggcacgcatcctgcccactatgccgggccggcgttcatattgaccatatacatatgtaaataaactcgcagggtggcacctggtgtattttcatagtgaatacccgtgctcctgttggatatcacaagtatagctggctgtatacataggttttctcctttttttttttgttacttctccggtcttatgtggggctatgctttcagctgcacgtttttgtcgaagtaatacctggattggctggatatgtacatcttgagaacggattgactaacaagctccctgaattatggtcctgtgtgct

SEQ ID NO: 16934 - protein, 246 aa, Zea mays subsp. mays
  misc_feature (1)..(246): Ceres Seq. ID no. 12355391
MDSVPSPSSSTRATAAPGPCCRFDALRRACARHAAAAARAAGWALGALLTCVFAVVGSLVGIFIGAFMGMSTESGMFRGAGVGAVSGAVFSIEAVESCIEIWRSSHSGKYSILYVLDIISSLFSGRIVWEKVSPALQRAVQSQMSLMSTPFIDNNDLFETGSTGGMSRALIDRIPKMRFSAASNCDKETDSSCCSVCLQDFGAQQFVRALPQCQHIFHVRCIDNWLLRHASCPLCRAGVHIDHIHM

SEQ ID NO: 16935 - protein, 179 aa, Zea mays subsp. mays
  misc_feature (1)..(179): Ceres Seq. ID no. 12355392
MGMSTESGMFRGAGVGAVSGAVFSIEAVESCIEIWRSSHSGKYSILYVLDIISSLFSGRIVWEKVSPALQRAVQSQMSLMSTPFIDNNDLFETGSTGGMSRALIDRIPKMRFSAASNCDKETDSSCCSVCLQDFGAQQFVRALPQCQHIFHVRCIDNWLLRHASCPLCRAGVHIDHIHM

SEQ ID NO: 16936 - protein, 177 aa, Zea mays subsp. mays
  misc_feature (1)..(177): Ceres Seq. ID no. 12355393
MSTESGMFRGAGVGAVSGAVFSIEAVESCIEIWRSSHSGKYSILYVLDIISSLFSGRIVWEKVSPALQRAVQSQMSLMSTPFIDNNDLFETGSTGGMSRALIDRIPKMRFSAASNCDKETDSSCCSVCLQDFGAQQFVRALPQCQHIFHVRCIDNWLLRHASCPLCRAGVHIDHIHM

SEQ ID NO: 16937 - DNA, 1648 bp, Zea mays subsp. mays
  misc_feature (1)..(1648): Ceres Seq. ID no. 12355441
  misc_feature (1431)..(1431): n is a, c, t, g, unknown, or other
  misc_feature (1435)..(1435): n is a, c, t, g, unknown, or other
  misc_feature (1604)..(1604): n is a, c, t, g, unknown, or other
  misc_feature (1605)..(1605): n is a, c, t, g, unknown, or other
  misc_feature (1606)..(1606): n is a, c, t, g, unknown, or other
  misc_feature (1607)..(1607): n is a, c, t, g, unknown, or other
  misc_feature (1608)..(1608): n is a, c, t, g, unknown, or other
acacagctagcaggccggcctgcgtatttcggcactgctagcacaatcacttcacagccatgccgcttgttctgctagtgctgctgctgctcttgtcctgttcttctccagttgccctgctagcagcagcgcatgaacatgacgagtacacactcgtggcgaagagctcgctgaaacccaaagctacgtgcaccggatacagggtgtctccaccccagaacatcacgtgggttccattgaacgcccctcacgggccgtgctcgccattgccgggctcggcggcgccgtccttggccgcgctgctcctccacgaccagctccgcgtcgacggcatcgagaggaggctctctgacaatccccatgatagtaagttggttccggctggcggagaggatttccaaacgaacggcaatttacttcaagtcaactacggcaattcaggacagcctatgagctccgaggcccagcagagcggcgtggttaatgcgtcggctgccggcggcggaagcagatccaagctgcccggagtgatccagacggtggttctggactcggcgagcgacgtgccgtgggtgcagtgcgtgccgtgccccatcccgccgtgccacccccaggtggacagcttctacgacccgagcaggtctcccagctctgcccccttctcgtgcagctccccgacctgcacggctctcggcccctacgccaatggctgcgccaacaaccagtgccagtacctggtccgctaccccgacgggtcgtccacgtcgggggcctacatcgccgacctgctcaccttggacgccggcaacgccgtgtcgggcttcaagttcgggtgcagccacgccgagcagggcagcttcgacgcccgggcagccggcatcatggcgctcggcggcgggcctgagtcgctgctgtcccagaccgcgtcccgctacgggaacgccttctcctactgcatcccggccacggctagtgactccggcttcttcaccctcggcgtgcccaggcgagcctcctccaggtacgtcgtcacgcccatggtcaggttcaggcaggcggccacgttctacggcgtgctcctccgcaccatcaccgtcggcggccagcggctcggcgtggcccccgcggtgttcgccgcgggctcggtactagactcccgcacggccatcacgcgcctgccgccgacggcgtaccaggccctgcgctccgcgttcaggagcagcatgaccatgtaccgctccgccccacccaaggggtatctggacacgtgctacgacttcactggcgtcgtcaacatcaggctgcccaagatctccctggtgttcgaccggaacgccgtgctgccgctcgacccgtcgggcatcctcttcaacgactgcctcgccttcaccncgaatgccgacgatcgcatgccgggcgtcctaggcagcntgcngcagcagaccatcgaggtgctatacgacgtcggcggcggcgccgtgggattccgccaaggcgcgtgctaagagatccatgtgaaggagacaataagctatactatatatatatatatatactatactatctagtgctaatttgcttggcaaccgagaacaaataaatcnnnnncaagacatgtaaaaggacatttgaagtatgtcaagaaatt

SEQ ID NO: 16938 - protein, 481 aa, Zea mays subsp. mays
  misc_feature (1)..(481): Ceres Seq. ID no. 12355442
  misc_feature (445)..(445): Xaa is any aa, unknown or other
  misc_feature (458)..(458): Xaa is any aa, unknown or other
  misc_feature (459)..(459): Xaa is any aa, unknown or other
MPLVLLVLLLLLSCSSPVALLAAAHEHDEYTLVAKSSLKPKATCTGYRVSPPQNITWVPLNAPHGPCSPLPGSAAPSLAALLLHDQLRVDGIERRLSDNPHDSKLVPAGGEDFQTNGNLLQVNYGNSGQPMSSEAQQSGVVNASAAGGGSRSKLPGVIQTVVLDSASDVPWVQCVPCPIPPCHPQVDSFYDPSRSPSSAPFSCSSPTCTALGPYANGCANNQCQYLVRYPDGSSTSGAYIADLLTLDAGNAVSGFKFGCSHAEQGSFDARAAGIMALGGGPESLLSQTASRYGNAFSYCIPATASDSGFFTLGVPRRASSRYVVTPMVRFRQAATFYGVLLRTITVGGQRLGVAPAVFAAGSVLDSRTAITRLPPTAYQALRSAFRSSMTMYRSAPPKGYLDTCYDFTGVVNIRLPKISLVFDRNAVLPLDPSGILFNDCLAFTXNADDRMPGVLGSXXQQTIEVLYDVGGGAVGFRQGAC

SEQ ID NO: 16939 - protein, 351 aa, Zea mays subsp. mays
  misc_feature (1)..(351): Ceres Seq. ID no. 12355443
  misc_feature (315)..(315): Xaa is any aa, unknown or other
  misc_feature (328)..(328): Xaa is any aa, unknown or other
  misc_feature (329)..(329): Xaa is any aa, unknown or other
MSSEAQQSGVVNASAAGGGSRSKLPGVIQTVVLDSASDVPWVQCVPCPIPPCHPQVDSFYDPSRSPSSAPFSCSSPTCTALGPYANGCANNQCQYLVRYPDGSSTSGAYIADLLTLDAGNAVSGFKFGCSHAEQGSFDARAAGIMALGGGPESLLSQTASRYGNAFSYCIPATASDSGFFTLGVPRRASSRYVVTPMVRFRQAATFYGVLLRTITVGGQRLGVAPAVFAAGSVLDSRTAITRLPPTAYQALRSAFRSSMTMYRSAPPKGYLDTCYDFTGVVNIRLPKISLVFDRNAVLPLDPSGILFNDCLAFTXNADDRMPGVLGSXXQQTIEVLYDVGGGAVGFRQGAC

SEQ ID NO: 16940 - DNA, 1064 bp, Zea mays subsp. mays
  misc_feature (1)..(1064): Ceres Seq. ID no. 12355457
aacaaccccggcctgccatgtgccacaaccgtagcctgtagcttcatccgttgcgctgcgcccggttccctcgcgcggtgcggaatttaacatggccgtgccggaggtggtggtcgacggcgtcgtcttcccgccggtggcccgcccgccgggctccgccggctcgcacttcctcggcggcgcaggcgtgcgaggcgtcgagatcggaggcaacttcatcaagttcacggccatcggcgtgtacctggaggacgcggccgtgcccgcgctggccaagaagtggggcggcaagacggccgacgagctcgcctccgacgccgccttcttccgcgacgtcgtcacgggcgacttcgagaagttcacgagggtgacgatgatcctcccgctgacgggcgagcagtacgcggagaaagtgacggagaactgcgtggcgttctggaaggccgccggcctgtacacggacgccgagggcgtcgccgtggagaagttcagggaggtgttcaagccagagactttcgcgccgggcgcctccatcctcttcacgcactcgcccgccggagtcctcaccgtcgccttctccaaggactcgtcggtgccagcggccggcggcgtggcgatcgagaacaagcgcctctgcgaggccgtgctggagtccatcatcggggagcgcggcgtgtcgccggccgcgaagctgagcctcgccgcgagggtgtcggagctcctcgccaaggagaccgccgcggccgccgacgcgccgcaggcggagcccgtctccatcaccgcctgaggcgaggagcgggcgggcgggcgagcgaacgaaccgcgaggagaaaaaaagcaaccagacggttgggcggcacggcgtctcacacctgccgcctgcgcttgcgtgctccggagtccggactggagagacgccgcgcgggtgcagtgcatccgtcgcgtcttgtctgtccgcgctatggcgtcgtgttcctgcctttctggtcgcgtagttgtcttgtgttcgctgttggtcgttctgggtaacatttgaataaaacaagcggatttgttgcacttgc

SEQ ID NO: 16941 - protein, 231 aa, Zea mays subsp. mays
  misc_feature (1)..(231): Ceres Seq. ID no. 12355458
MAVPEVVVDGVVFPPVARPPGSAGSHFLGGAGVRGVEIGGNFIKFTAIGVYLEDAAVPALAKKWGGKTADELASDAAFFRDVVTGDFEKFTRVTMILPLTGEQYAEKVTENCVAFWKAAGLYTDAEGVAVEKFREVFKPETFAPGASILFTHSPAGVLTVAFSKDSSVPAAGGVAIENKRLCEAVLESIIGERGVSPAAKLSLAARVSELLAKETAAAADAPQAEPVSITA

SEQ ID NO: 16942 - protein, 137 aa, Zea mays subsp. mays
  misc_feature (1)..(137): Ceres Seq. ID no. 12355459
MILPLTGEQYAEKVTENCVAFWKAAGLYTDAEGVAVEKFREVFKPETFAPGASILFTHSPAGVLTVAFSKDSSVPAAGGVAIENKRLCEAVLESIIGERGVSPAAKLSLAARVSELLAKETAAAADAPQAEPVSITA

SEQ ID NO: 16943 - DNA, 1167 bp, Zea mays subsp. mays
  misc_feature (1)..(1167): Ceres Seq. ID no. 12355460
aaaaggctgtcagctaaattcttcggaacccccgttgccagccggcgatcgcgccgtgggatctcatcgaggcgacgacggcgatgtcaagggaggcggcgaggacgaggagccgggtcctggtggttggcgccaccggccgcctcggtggaagcatcgctcgggccagcctcgccgcgggtcaccccaccttcgcgctcgttcggccccaccacttcgcacgccccgattcccccgtgcttgggccgctcgtagccgccggcgccactctgctccaggggtcactggaagattactcgagcctgctcgaggcggtgtgtcaggtggacgttgtcatctgcgcggtgtccacgaagcaggtgctcgagcagaagcctctgattcgggctataaaggaagctggatgcgtgaagagatttattccggcagaatttggagcagatccaacaaaggttcaaatttgtggcatggattatggcttctatgagaagaaaattgaaatccgtcattcaatagagagtgaaggcattcctcatacttacatatgctgcaacttctttatgcgctatttgcttccttcactggtgcaacctgggctagatgctcctcctagagatgaaatcaaaatatttggtgaaggaaatactaaaggtgtttttgttaaagagaatgatgttgctaaatttacaatatgcaccatagaggatcccagaacattgaacaagacgttgtatctgagacctccaggaaatgtcttctcaatgaatgaattggctgacctctgggagtcaaaactcaagaaatccctgaaaaggttatatgtaacagaagagcaacttcttaaagaaatccatgatgctccatttcccttgaagatggatttaatctttatatattcagcgtttgttaagggtgaccacacgtattttgaaattgacttgtcaatggaaggaactcaactgtatccccatgtaaattatacaacagtgaacgagtacttggatactctagtttaggatatttgttcggtttatatcttccttgtaataagtcaaaaataatgttttttttttgtttcgaatggagcattaaaagaaggggactgatggacacctatccatgtttgttctgacaagcgaatgtggtgatgatctgacaaattttttt

SEQ ID NO: 16944 - protein, 310 aa, Zea mays subsp. mays
  misc_feature (1)..(310): Ceres Seq. ID no. 12355461
MSREAARTRSRVLVVGATGRLGGSIARASLAAGHPTFALVRPHHFARPDSPVLGPLVAAGATLLQGSLEDYSSLLEAVCQVDVVICAVSTKQVLEQKPLIRAIKEAGCVKRFIPAEFGADPTKVQICGMDYGFYEKKIEIRHSIESEGIPHTYICCNFFMRYLLPSLVQPGLDAPPRDEIKIFGEGNTKGVFVKENDVAKFTICTIEDPRTLNKTLYLRPPGNVFSMNELADLWESKLKKSLKRLYVTEEQLLKEIHDAPFPLKMDLIFIYSAFVKGDHTYFEIDLSMEGTQLYPHVNYTTVNEYLDTLV

SEQ ID NO: 16945 - protein, 182 aa, Zea mays subsp. mays
  misc_feature (1)..(182): Ceres Seq. ID no. 12355462
MDYGFYEKKIEIRHSIESEGIPHTYICCNFFMRYLLPSLVQPGLDAPPRDEIKIFGEGNTKGVFVKENDVAKFTICTIEDPRTLNKTLYLRPPGNVFSMNELADLWESKLKKSLKRLYVTEEQLLKEIHDAPFPLKMDLIFIYSAFVKGDHTYFEIDLSMEGTQLYPHVNYTTVNEYLDTLV

SEQ ID NO: 16946 - protein, 161 aa, Zea mays subsp. mays
  misc_feature (1)..(161): Ceres Seq. ID no. 12355463
KGCQLNSSEPPLPAGDRAVGSHRGDDGDVKGGGEDEEPGPGGWRHRPPRWKHRSGQPRRGSPHLRARSAPPLRTPRFPRAWAARSRRRHSAPGVTGRLLEPARGGVSGGRCHLRGVHEAGARAEASDSGYKGSWMREEIYSGRIWSRSNKGSNLWHGLWLL

SEQ ID NO: 16947 - DNA, 1818 bp, Zea mays subsp. mays
  misc_feature (1)..(1818): Ceres Seq. ID no. 12355481
acagtcccactcctctctctctcgcgctctctctctttcatcgccaccaccgccgtgaaatccgcacgcgtgcttcctgtcgatttttgagctgtgactgtgagcgccatggccgtggaggctgtgtccggaaatggcaccgaggcagtggccgcggcgccggcgaaggaggtgagcaccaagcaggcgtctttccgggaggagagcaacttcctggacgatctcaaggagagcgagcgtaaggcgcttgccgagctccgcgacaaggtcgaggcggccatcgtggagggcaagctgttcgacgacggtaagccggaggtgaaggagaaggagaaggagaaggaggaggccaagaagaaggcagtggagaagaaagatgagcagcccgaagccgaggagaagggagaggaggatgacaagaaggaggccgacgccgaggaggagaagaaggaaggcgtggaggaaggggagaagaaggaaggccaggaggaaggggagaaggaggaggccgaggaggagagcggagacgacaccaagcaggaggccaaggaagaggaagccgacgacaaggcggcggcgaaggagccggagacggcggccgttgtcgtcgacaaggacatcgcgctgtggggcgtgcctttgctccctagcaagggcgacgaggccaccgacgtggtgctcctcaagttcctccgcgcgcgcgacttcaaggccggcgccgcgttcgagatgctccgccgcacgctccgctggcgcagggactggaccggcttcagctccggcgccgagtccgacgccgacctccccgaggagctcgcgggcgcgtgctacctcgacggcgcagaccacgagggccacccggtgtgctacaacgcgctgggcgtgttcgcggacgacgccgtgtacaagaaggcgctgggcaccgaggaaggcaaggccaggttcctccggtggcgggtgcgcgccatggagcgccacgtcgccgagctggacctgaggcccggcggcgtcgcgtcgctgctgcaggtgatcgacctcaggaactcgccggggccggccaagaaggacttccgagtcgccgtcaagcaggtgctcgacctgttccaggacaactaccccgagctcgtcgcgagaaacatcttggtcaacgtgccgttctggtactacgcgttcagcaccctgttctacccgttcctgacgcagaggacgaagagcaagttcgtcgttgctcgcccgtcaaaggtcaccgagaccctcctcaagtacattccgatcgaggccatcccggtgaagtacggcggcctgaagcgcgacggcgacaccgagttctcggcggacgacggcgaggtcgcggaggtcaccgtcaagggaagctccacggagaccatcgagatcgaagctactgaggctgatgccacgctgacatgggacctgactgtgctggggtgggaggtgaactacaaggaggagttcgtgccggcggacgagggctcctacactatcatcgtcaggaaaggcaagaagatggcgtccggcgaggaggcggtccgcaactcgttccgcgccggcgagccgggcaaggtcgtgctcaccgtccagaacacctcgcacaggaagaagaaggtgctgttcaggcacaaggccaagagcgcctgcgccaagaagtgctgagaggctaagaaatttgggagtgaaattggttgtggatttcaatattcgttacattctttgtgtgtgtgtaaggagagagagagagaacattgttcgctgattatttgaggtggttgttgcagcaaaaatgcaaagagttttcgattg

SEQ ID NO: 16948 - protein, 520 aa, Zea mays subsp. mays
  misc_feature (1)..(520): Ceres Seq. ID no. 12355482
MAVEAVSGNGTEAVAAAPAKEVSTKQASFREESNFLDDLKESERKALAELRDKVEAAIVEGKLFDDGKPEVKEKEKEKEEAKKKAVEKKDEQPEAEEKGEEDDKKEADAEEEKKEGVEEGEKKEGQEEGEKEEAEEESGDDTKQEAKEEEADDKAAAKEPETAAVVVDKDIALWGVPLLPSKGDEATDVVLLKFLRARDFKAGAAFEMLRRTLRWRRDWTGFSSGAESDADLPEELAGACYLDGADHEGHPVCYNALGVFADDAVYKKALGTEEGKARFLRWRVRAMERHVAELDLRPGGVASLLQVIDLRNSPGPAKKDFRVAVKQVLDLFQDNYPELVARNILVNVPFWYYAFSTLFYPFLTQRTKSKFVVARPSKVTETLLKYIPIEAIPVKYGGLKRDGDTEFSADDGEVAEVTVKGSSTETIEIEATEADATLTWDLTVLGWEVNYKEEFVPADEGSYTIIVRKGKKMASGEEAVRNSFRAGEPGKVVLTVQNTSHRKKKVLFRHKAKSACAKKC

SEQ ID NO: 16949 - protein, 313 aa, Zea mays subsp. mays
  misc_feature (1)..(313): Ceres Seq. ID no. 12355483
MLRRTLRWRRDWTGFSSGAESDADLPEELAGACYLDGADHEGHPVCYNALGVFADDAVYKKALGTEEGKARFLRWRVRAMERHVAELDLRPGGVASLLQVIDLRNSPGPAKKDFRVAVKQVLDLFQDNYPELVARNILVNVPFWYYAFSTLFYPFLTQRTKSKFVVARPSKVTETLLKYIPIEAIPVKYGGLKRDGDTEFSADDGEVAEVTVKGSSTETIEIEATEADATLTWDLTVLGWEVNYKEEFVPADEGSYTIIVRKGKKMASGEEAVRNSFRAGEPGKVVLTVQNTSHRKKKVLFRHKAKSACAKKC

SEQ ID NO: 16950 - DNA, 1158 bp, Zea mays subsp. mays
  misc_feature (1)..(1158): Ceres Seq. ID no. 12355511
agggactcgcggttcgtggcggccctggccagagtctgcgcccgctcctgcccccgccccgggccaggccaccctcgcctcctcgcgcctataaagtgcgggcgtacggcgtacccgattgccccaagccgcaacctcaaccaccttcccaaatctcagtagtcgcctctcgtcgtcttcgtctagccccggcccgttccaaaacctccgtagccgccgccgccaccccggcgaccgaagatgatctccccggacgcagcccgcaacgtagtcggcatcatcggcaatgtcatctccttcggcctcttcctgtccccagtgctgacgttctggcggatctacaaggccaaggacgtggaggagttcaagccggacccttacctggcgacgctgctcaactgcatgctctgggtgttctatggcatccccgtcgtccaccccaacagcattctcgtcgtcaccatcaacggcatcggcctcgtcatcgaggccgtctacctcactatcttcttcctctattccgacagccagaagcgcaagaaggcgttcgcgatcctggccgtggagattctgttcatggtcgccgtggtgctcggtgtgatcctcggcgcgcacactcacgagaaacgttccatgatcgtcggcatcctctgcgtcatcttcggctcgatgatgtacgcctcaccactcactatcatgagtcgagtgatcaagaccaagagcgttgagtacatgcccttcctcctgtcgctggtgagcttcctcaacggctgctgctggacggcctacgcgctcatccgcttcgacctctacgtcacgatcccgaacgccctgggcgcattcttcggcctcgtccagctgatcctctacttctgctactacaagtcgacccccaagaaggagaagaacgtggagctgcccaccgtctccagcaacgtcggcggcggcaacgtcaccgtcagcgttgagcgatagatgatgtagctgccgccgcccgtcgagaacgaactcgacgagacgtgctttacccacaagtagttttggccttgtctaattgctcttctcggatgatcgtttaagtgagtgttagttagttttgccctgcgtgtgatgtcaggaacaattaatatatccatgtggctgtgtttgccattctag

SEQ ID NO: 16951 - protein, 244 aa, Zea mays subsp. mays
  misc_feature (1)..(244): Ceres Seq. ID no. 12355512
MISPDAARNVVGIIGNVISFGLFLSPVLTFWRIYKAKDVEEFKPDPYLATLLNCMLWVFYGIPVVHPNSILVVTINGIGLVIEAVYLTIFFLYSDSQKRKKAFAILAVEILFMVAVVLGVILGAHTHEKRSMIVGILCVIFGSMMYASPLTIMSRVIKTKSVEYMPFLLSLVSFLNGCCWTAYALIRFDLYVTIPNALGAFFGLVQLILYFCYYKSTPKKEKNVELPTVSSNVGGGNVTVSVER

SEQ ID NO: 16952 - protein, 241 aa, Zea mays subsp. mays
  misc_feature (1)..(241): Ceres Seq. ID no. 12355513
GLAVRGGPGQSLRPLLPPPRARPPSPPRAYKVRAYGVPDCPKPQPQPPSQISVVASRRLRLAPARSKTSVAAAATPATEDDLPGRSPQRSRHHRQCHLLRPLPVPSADVLADLQGQGRGGVQAGPLPGDAAQLHALGVLWHPRRPPQQHSRRHHQRHRPRHRGRLPHYLLPLFRQPEAQEGVRDPGRGDSVHGRRGARCDPRRAHSRETFHDRRHPLRHLRLDDVRLTTHYHESSDQDQER

SEQ ID NO: 16953 - protein, 190 aa, Zea mays subsp. mays
  misc_feature (1)..(190): Ceres Seq. ID no. 12355514
MLWVFYGIPVVHPNSILVVTINGIGLVIEAVYLTIFFLYSDSQKRKKAFAILAVEILFMVAVVLGVILGAHTHEKRSMIVGILCVIFGSMMYASPLTIMSRVIKTKSVEYMPFLLSLVSFLNGCCWTAYALIRFDLYVTIPNALGAFFGLVQLILYFCYYKSTPKKEKNVELPTVSSNVGGGNVTVSVER

SEQ ID NO: 16954 - DNA, 1173 bp, Zea mays subsp. mays
  misc_feature (1)..(1173): Ceres Seq. ID no. 12355551
acactacaccgtaaccgtcgccggaatcgatcgacccaaagctccccttagagcccgagctctatccaacccacgaacgggatcccgatgcccatggcggcctcggttcttgtcgccgcaccggcggtctcgcccccgctgacgtggcggagatgggctcctcttctcgccgcgtcacatccacgggcgaacccgcctcccgcactgcgcctgcgggcgcccgctcctcctctccgggcctcctccgttccccgcgattcctgcgccggagccgccgtccggaggacgccgtgtgcggcggcggcggcattaggtggaggtgtgaaggcggagtccacggagcgggaggcgcccgatcgggatgctctgaagcgggtggcgctgctcgcgcttggctgctgcgctgcagccgccgcgctcggctgcggcgcggcgcgggcagcggcggaggactccatcaaggcgtcaggattcgggctacgggtggcggagtcgctgcggaggctcggatggcccgacgacaccgtcgtgttcgcgctcgcgacgctgccggtgatcgagctgcggggggcgatccccgttgggtattggctgcggctccatccagtccgcctcaccatcctatccgttcttgggaacatggtgcctgtaccattcatcatcctctacctgaagaaactcgcaacatttttgtctcagaaaagttcgtccgcgactcgaattatggacctcctctttgagcgggcacggcgcaaggctgctcctgttgaggaattccagtggctcggcttgatgctgtttgttgctgttccattcccaggcacgggagcgtggacaggggccttcattgcatctgtactaggcatgccgttctggtcaggttttacagcaaatttcgtgggagtcgtccttgcagggctgctggtgaacttgctcatgaatcttggcctaaaatacgccattgtcactggagtagttttgttctttgtttcaaccgtcatgtggagtgttcttcgttcccttaagaagtccgttaatgtcaagtgatctagtagtctttatcaaactgttcctaatcccttcagagttcagccttgcgtaggaagcttagttgtgtaattttaagtggagctttcagcttccaggtggatctacaagagagaataacactcc

SEQ ID NO: 16955 - protein, 319 aa, Zea mays subsp. mays
  misc_feature (1)..(319): Ceres Seq. ID no. 12355552
MPMAASVLVAAPAVSPPLTWRRWAPLLAASHPRANPPPALRLRAPAPPLRASSVPRDSCAGAAVRRTPCAAAAALGGGVKAESTEREAPDRDALKRVALLALGCCAAAAALGCGAARAAAEDSIKASGFGLRVAESLRRLGWPDDTVVFALATLPVIELRGAIPVGYWLRLHPVRLTILSVLGNMVPVPFIILYLKKLATFLSQKSSSATRIMDLLFERARRKAAPVEEFQWLGLMLFVAVPFPGTGAWTGAFIASVLGMPFWSGFTANFVGVVLAGLLVNLLMNLGLKYAIVTGVVLFFVSTVMWSVLRSLKKSVNVK

SEQ ID NO: 16956 - protein, 317 aa, Zea mays subsp. mays
  misc_feature (1)..(317): Ceres Seq. ID no. 12355553
MAASVLVAAPAVSPPLTWRRWAPLLAASHPRANPPPALRLRAPAPPLRASSVPRDSCAGAAVRRTPCAAAAALGGGVKAESTEREAPDRDALKRVALLALGCCAAAAALGCGAARAAAEDSIKASGFGLRVAESLRRLGWPDDTVVFALATLPVIELRGAIPVGYWLRLHPVRLTILSVLGNMVPVPFIILYLKKLATFLSQKSSSATRIMDLLFERARRKAAPVEEFQWLGLMLFVAVPFPGTGAWTGAFIASVLGMPFWSGFTANFVGVVLAGLLVNLLMNLGLKYAIVTGVVLFFVSTVMWSVLRSLKKSVNVK

SEQ ID NO: 16957 - protein, 195 aa, Zea mays subsp. mays
  misc_feature (1)..(195): Ceres Seq. ID no. 12355554
MGSSSRRVTSTGEPASRTAPAGARSSSPGLLRSPRFLRRSRRPEDAVCGGGGIRWRCEGGVHGAGGARSGCSEAGGAARAWLLRCSRRARLRRGAGSGGGLHQGVRIRATGGGVAAEARMARRHRRVRARDAAGDRAAGGDPRWVLAAAPSSPPHHPIRSWEHGACTIHHPLPEETRNIFVSEKFVRDSNYGPPL

SEQ ID NO: 16958 - DNA, 1906 bp, Zea mays subsp. mays
  misc_feature (1)..(1906): Ceres Seq. ID no. 12355602
accgctagtgctctagtcttacctagccttgctgagccccttgcagtgctgggaggagaaggacaaggtctctgatcagctcagcttgtctggtcaaagctgagagcctcgttgtgctgtgagtgcaagctcgaccgacaggacccctgccactgtgaagcacagcgtcagcggcgacaagacgaaggggcggaagctgccaagccgatagatctacgcaaatggagaccaaggacgtgtcgccgctcgccgccgccaccaccaccaccgcgggcgcccgtgcctgcaccgacctctcaaccgcctccgccggccccttcttctatggcgccgccgcagcaccagcaccagcaccatccgccgccgccgttcgcgcagcaggcggccccggttccgtcgcctgccgcgtccatgcccggcggcatgcggctctcgttcgaccagatgtccgggaaggcgcccggggagcagcaccaccactccgcgcccatgctgtacacggtgccaccaccgcagtccgccgcgggcgcgggcgcaccgggggccaatgtgctgggcatgggcgagctgatgcgcaagaagcgcggccggccgcgcaagtacgcgcccgacgggagcatggctctggcgctggcccccatctcctccgcctcagccggcggcgccgcagcccccggacagcagcagcacggcggcgggttctccatcagcagccccccgtccgaccccaacgccaagcgccgcggccggcctcccggctctggcaagaagaagcagttcgaagccttgggctcctggggcatcgccttcacccctcacatcctcaccgtcaaggccggcgaggatgttgcttcaaaaataatgacattctcacagcaaggccctcgcacagtctgcatcctttccgcgaatggtgcaattagtaatgttacacttcggcagccagccacatctggtggactagttacttatgaggggcgctttgagataatctcgctatctggttctttcctgcttgcggaggatggtgatactcgcagcaggactggtggcttgagtgtcgcacttgcaggatctgatggccgagttcttggagggtgtgttgctggaatgcttatggctgcaactcctgttcaggttgtggtggctagctttatcgcagagggaaagaaatcaaagccagcggaagcacggaaggttgaaccgatggctgctcctccaccgcagatggctacctttgttccacctccgctggccaccagccctccatcggagggaacatccagcgcatcatctgatgactctggcagcccaatccaccacagtgcgatgccgttcagcaactccagccagcatcaacaccctcaccagcaccagcaccagcacatgccgcctgcctacgcatccgggggttggtccctctcagtgcaccagcagaataggcatgattctgacatgaagatgatgtcgaactaacagtgctcaacctaggcgtcccatttgttggttgggctggagaggaaggaagctgctgatggttggtactgccgctatgaaatggtcttcttgcgccgtctgtcctgatcagtgaccccgtgttgctctggtcaatgacggtgtgtctgctatagctaagatagctaggaaggattagagtttatgggctcacttgctgttgttcccctgggtaagattaatttaatttgaattagccgctgttgtaatgctgtagccagtgtcctgaagtcgcttatcagtcagtccctgacgcgagctgtgatggttgcctgatgagatcttcacctcctagtcctaggctagttaaaatatcatttctctagtactatgaatcatgaatttacttggatgcttcggtttgattcaggaatttgatcgtattatgttt

SEQ ID NO: 16959 - protein, 383 aa, Zea mays subsp. mays
  misc_feature (1)..(383): Ceres Seq. ID no. 12355603
MAPPQHQHQHHPPPPFAQQAAPVPSPAASMPGGMRLSFDQMSGKAPGEQHHHSAPMLYTVPPPQSAAGAGAPGANVLGMGELMRKKRGRPRKYAPDGSMALALAPISSASAGGAAAPGQQQHGGGFSISSPPSDPNAKRRGRPPGSGKKKQFEALGSWGIAFTPHILTVKAGEDVASKIMTFSQQGPRTVCILSANGAISNVTLRQPATSGGLVTYEGRFEIISLSGSFLLAEDGDTRSRTGGLSVALAGSDGRVLGGCVAGMLMAATPVQVVVASFIAEGKKSKPAEARKVEPMAAPPPQMATFVPPPLATSPPSEGTSSASSDDSGSPIHHSAMPFSNSSQHQHPHQHQHQHMPPAYASGGWSLSVHQQNRHDSDMKMMSN

SEQ ID NO: 16960 - protein, 354 aa, Zea mays subsp. mays
  misc_feature (1)..(354): Ceres Seq. ID no. 12355604
MPGGMRLSFDQMSGKAPGEQHHHSAPMLYTVPPPQSAAGAGAPGANVLGMGELMRKKRGRPRKYAPDGSMALALAPISSASAGGAAAPGQQQHGGGFSISSPPSDPNAKRRGRPPGSGKKKQFEALGSWGIAFTPHILTVKAGEDVASKIMTFSQQGPRTVCILSANGAISNVTLRQPATSGGLVTYEGRFEIISLSGSFLLAEDGDTRSRTGGLSVALAGSDGRVLGGCVAGMLMAATPVQVVVASFIAEGKKSKPAEARKVEPMAAPPPQMATFVPPPLATSPPSEGTSSASSDDSGSPIHHSAMPFSNSSQHQHPHQHQHQHMPPAYASGGWSLSVHQQNRHDSDMKMMSN

SEQ ID NO: 16961 - protein, 350 aa, Zea mays subsp. mays
  misc_feature (1)..(350): Ceres Seq. ID no. 12355605
MRLSFDQMSGKAPGEQHHHSAPMLYTVPPPQSAAGAGAPGANVLGMGELMRKKRGRPRKYAPDGSMALALAPISSASAGGAAAPGQQQHGGGFSISSPPSDPNAKRRGRPPGSGKKKQFEALGSWGIAFTPHILTVKAGEDVASKIMTFSQQGPRTVCILSANGAISNVTLRQPATSGGLVTYEGRFEIISLSGSFLLAEDGDTRSRTGGLSVALAGSDGRVLGGCVAGMLMAATPVQVVVASFIAEGKKSKPAEARKVEPMAAPPPQMATFVPPPLATSPPSEGTSSASSDDSGSPIHHSAMPFSNSSQHQHPHQHQHQHMPPAYASGGWSLSVHQQNRHDSDMKMMSN

SEQ ID NO: 16962 - DNA, 757 bp, Zea mays subsp. mays
  misc_feature (1)..(757): Ceres Seq. ID no. 12355612
aagccaaacactccggcagctgtggtggagacgcctccgcctcccaaacacccgaatcaaactaacagccaccgatggcgtcgccatcgcggttgctcccgcccacgcctccttcggccgcccagccccgcggcccgcgggatcgcctcgccttgccgcgcctccggtgcctcgccgccgccgcagcctccgcctcgcccactgatggcgctgtgctgctggagcgtggcgggttccgcggcggtggccgtgcgggagttcgtcacgcttgacgagctccgcgctgccgtgcgcctccgcgtccgcaccttccacgagtacgcagacgactccgtcggaaccgaggatcacagaaaggctcttgcagatagggagtttgaagcattacaggataggatttctgggaagatgataaattttcgaagagtttcttgcataaacgggactgttccactgtccccatcattaatgtcagctgaggaactttgttctatgtgcaagtttgtggaggatggaaaagagagattagtagttggtagtttagaccttaatcagtgtctttggctaccagatgaattgactggaaagaggcctggggtacgaccgttgtttcctctttctacgctattgcagaatacttatgatcaaaacatatttttgatagttgttattggtatttttgaacttgctttggtcatcgctttgttgttgttttggcaataaagatagactcactacatctaacttctttcttgtc

SEQ ID NO: 16963 - protein, 240 aa, Zea mays subsp. mays
  misc_feature (1)..(240): Ceres Seq. ID no. 12355613
KPNTPAAVVETPPPPKHPNQTNSHRWRRHRGCSRPRLLRPPSPAARGIASPCRASGASPPPQPPPRPLMALCCWSVAGSAAVAVREFVTLDELRAAVRLRVRTFHEYADDSVGTEDHRKALADREFEALQDRISGKMINFRRVSCINGTVPLSPSLMSAEELCSMCKFVEDGKERLVVGSLDLNQCLWLPDELTGKRPGVRPLFPLSTLLQNTYDQNIFLIVVIGIFELALVIALLLFWQ

SEQ ID NO: 16964 - protein, 172 aa, Zea mays subsp. mays
  misc_feature (1)..(172): Ceres Seq. ID no. 12355614
MALCCWSVAGSAAVAVREFVTLDELRAAVRLRVRTFHEYADDSVGTEDHRKALADREFEALQDRISGKMINFRRVSCINGTVPLSPSLMSAEELCSMCKFVEDGKERLVVGSLDLNQCLWLPDELTGKRPGVRPLFPLSTLLQNTYDQNIFLIVVIGIFELALVIALLLFWQ

SEQ ID NO: 16965 - DNA, 1084 bp, Zea mays subsp. mays
  misc_feature (1)..(1084): Ceres Seq. ID no. 12355615
aagttcaggcagtttcgtgcccttttcttctccaccagctcaaagctgaacgcggcatccttcctttcacaccggggaccggcgagcagagccgcgcacagcagaacgcggaagcaagaggaggcgatcgactactcgaccagccctctccgtgtctccgatggcggctcgcgtcctcgcggccctcgcccttgccctcgccctcgccctcgtcgccgtacccgctcccacgcgggcgtccaacgacgagggggacgcgctctacgcgctgcggcagcggctgtcggaccccaacggcgtgctgcagagctgggatcccacgctcgtcaccccctgcacctggttccacatctcctgcgaccaggtcggccgcgtcgtccgcctggacttgggcaactccaacgtctccggctccatcggccctgagctcggccgccttgtcaacctcaagtacctggagctgtacaggaacaaccttgacggcgagatccccaaggaattgggcaacctcaagaacctgatcagcttggatctgtatgccaacaagctcacgggaggaatccccaagtcactctccaagctcgactcactcagattcatgcgcttgaacaacaacaagcttacaggatcaattccaagggagtttgccaagctctccaacctgaaagtcatcgatttgtctaacaatgatctctgtggaactatccctgttgatgggcctttctcaacctttcctctccgaagctttgagaacaacagcaggctcaacggtccagagctacaaggattggttccttatgattttggatgttagatgccgatcaacaatgtaccaccttccccagttgaaagggggaaagacaagatagtattatcaatagaaacctagcttcaagaatgtcgtgactatatatatgtatgatattaagactagatttgataagggtggcatagcaagtcctgatattctgtgtgcattcagaatagctgcttttatgccccttgtgttgatattttgcaaaccaaaacaaactgttctgaaacgagggcacatattgttcatgaataaatttgagcctccaat

SEQ ID NO: 16966 - protein, 217 aa, Zea mays subsp. mays; identical to SEQ ID NO: 16277
  misc_feature (1)..(217): Ceres Seq. ID no. 12355616

SEQ ID NO: 16967 - protein, 172 aa, Zea mays subsp. mays
  misc_feature (1)..(172): Ceres Seq. ID no. 12355617
VQAVSCPFLLHQLKAERGILPFTPGTGEQSRAQQNAEARGGDRLLDQPSPCLRWRLASSRPSPLPSPSPSSPYPLPRGRPTTRGTRSTRCGSGCRTPTACCRAGIPRSSPPAPGSTSPATRSAASSAWTWATPTSPAPSALSSAALSTSSTWSCTGTTLTARSPRNWATSRT

SEQ ID NO: 16968 - protein, 141 aa, Zea mays subsp. mays
  misc_feature (1)..(141): Ceres Seq. ID no. 12355618
KFRQFRALFFSTSSKLNAASFLSHRGPASRAAHSRTRKQEEAIDYSTSPLRVSDGGSRPRGPRPCPRPRPRRRTRSHAGVQRRGGRALRAAAAAVGPQRRAAELGSHARHPLHLVPHLLRPGRPRRPPGLGQLQRLRLHRP

SEQ ID NO: 16969 - DNA, 1179 bp, Zea mays subsp. mays
  misc_feature (1)..(1179): Ceres Seq. ID no. 12355619
gttgagaatcaattgctagtacgatttcttctctcctccaaaccggccaagccaccaaccagcgccccccaccgccgcctttttatttcatccacgctgctcgtgctcgctgcctgcttctcgcgcgatcgtctcggcctctcgggattctagagtggcggccggctctccgcctgttcttgtcgtcgctgctcctttcccaggatgtcggaacgttctgagagcgcaactgaaaagattatgagcagcatcatggataccattgctgacaaccttcctaagcagaagtctgggaaatttgatccaggttcagtctctgacaaagtgaagaataagctgtttggtcgtcagaagaccttgcatggagttctgggtggtggaaaacctgctgatgtgctgttatggaggaacaaaaagatatcatcgagtgttctggctcttgcaacagctatttgggttttctttgagtggctcgactaccacttactgacaattgtttcatttgcccttgttcttggaatggttgtccagtttgtttggtccaacttctcaaacatgctaagcagcggatcccgttctcaggtgccccgagttgaattgcctgatgagttatttgtgaacattgccgttgcaatcggtgcccaaataaacaagttcctgtgcttccttcaggatgtttcttgtgaaagaaacttgaagcattttgtagtggcgatcgcaggactgtgggctgctgcggtgattggaagttggtgcaatttcctgactgtcatatatgtcgggtttgtttgtgttcacacgcttccggtgctctatgagaagtacgaagaccaagtggacgatttcctctacagccttcttggtctgctgcgagatcaatatcagaagctcgaccaaggcgtcttgagcaagattcccaaggggaacatgaaggctaagaagaacgagtagtttagcaggtggtttctcgtgaatgagatcaatatcgttttgacttgtgtcgattattacctaaggcgtgtgtgccattctgaacctggctgctagttcatcgcccgccgggggtttaaactactaagctgcaatgcacaagtaatgaagtgtgctagttcattgcccacacgggtactagttcttcgactcatttaaatttctgatccgatcatttgcgggatattg

SEQ ID NO: 16970 - protein, 248 aa, Zea mays subsp. mays
  misc_feature (1)..(248): Ceres Seq. ID no. 12355620
MSERSESATEKIMSSIMDTIADNLPKQKSGKFDPGSVSDKVKNKLFGRQKTLHGVLGGGKPADVLLWRNKKISSSVLALATAIWVFFEWLDYHLLTIVSFALVLGMVVQFVWSNFSNMLSSGSRSQVPRVELPDELFVNIAVAIGAQINKFLCFLQDVSCERNLKHFVVAIAGLWAAAVIGSWCNFLTVIYVGFVCVHTLPVLYEKYEDQVDDFLYSLLGLLRDQYQKLDQGVLSKIPKGNMKAKKNE

SEQ ID NO: 16971 - protein, 236 aa, Zea mays subsp. mays
  misc_feature (1)..(236): Ceres Seq. ID no. 12355621
MSSIMDTIADNLPKQKSGKFDPGSVSDKVKNKLFGRQKTLHGVLGGGKPADVLLWRNKKISSSVLALATAIWVFFEWLDYHLLTIVSFALVLGMVVQFVWSNFSNMLSSGSRSQVPRVELPDELFVNIAVAIGAQINKFLCFLQDVSCERNLKHFVVAIAGLWAAAVIGSWCNFLTVIYVGFVCVHTLPVLYEKYEDQVDDFLYSLLGLLRDQYQKLDQGVLSKIPKGNMKAKKNE

SEQ ID NO: 16972 - protein, 232 aa, Zea mays subsp. mays
  misc_feature (1)..(232): Ceres Seq. ID no. 12355622
MDTIADNLPKQKSGKFDPGSVSDKVKNKLFGRQKTLHGVLGGGKPADVLLWRNKKISSSVLALATAIWVFFEWLDYHLLTIVSFALVLGMVVQFVWSNFSNMLSSGSRSQVPRVELPDELFVNIAVAIGAQINKFLCFLQDVSCERNLKHFVVAIAGLWAAAVIGSWCNFLTVIYVGFVCVHTLPVLYEKYEDQVDDFLYSLLGLLRDQYQKLDQGVLSKIPKGNMKAKKNE

SEQ ID NO: 16973 - DNA, 1522 bp, Zea mays subsp. mays
  misc_feature (1)..(1522): Ceres Seq. ID no. 12355623
atatacaaaaaacagttcttcctctattctattcttacatggtatcagccgcctagatcctgccttcctctcttttgcgtccgacatgagtgatacgcagagttcattttccagcactactgctgccgtttcttccaccaccgctcttcctctctctcaagctatacacagcgtgaacatcaaatcgcttgtgtcgtacattcttgatactcaagttcacaactacggcaaatggagccaactcttcaccattattctcggtcgcttcgatcttctccaccatatcactacctctgatgttttctcggatgatcctgcctgggtccgtgagaacctcacagttctctcatggatcttcgccactatctatgaagacctcgtcgacatggtgattcgtccgcccggtcgacgcgcacacgccatctggcgtcatctgtgcgacatcttctccggcaacaaggccagtcgtgccgttcatcttgaggctgcatttcactctctcaccccagggagatctttcggcgcacgactattgtcatcgtcttcaacagctggccaacaacctcgccgattgcgacgctcccatcgacgactgcaccctcgtccatcagcttgtcgccggcatgaacacaaaataccacactttgcgtaccctgctccctgctcttcctgtcttccccagtttcatgcaagctcgcgacatgctccttcttgaggagcgttctcagtctgtgtcggaccggcgcgcggcggacactgctctcgtcgccacagcgacccgaccatcctctgcgccggcttctccactcgtcgctcccaccaacaatgctggcggtgtcactgacaatcgcccgcgcggtggctacggtcgtggtcgcggccgtggccgtggccgcggtttccgctacaacggtggtggccgtagcaccggcttcctcccgccatgggttagcccatggcctgctgcctggcgcgcgccctggactggagcttctggtcccggcgttcttggagcacgcccccaggctcaggcgttcccgatgcttcagcaacctcacactacttttgcgccgcttcagcaaccgtcatgggacatctcaggccttgtccaggcgctccaggctgcttctgtacagcagcaagcaagcgtcggcgattggtttatggacaccgtgagccagctctcacatgaccaacaattctggatctggccaccaagaaaataatcatgaggtccaatagtttcggcgacctctatcccttctttggaaccagctctgcttccccgacggctcttctggcacacaccacatccgttgatgtttggcatcgtcgtctcggtcatcctaataaatattccttagctcggcttcttgatcaatttccctttttatgtaataagtctttagctgcttctcctacgtgtgaagcctgccaaaagggcaaacatgttcggctaccctttccacattctatgtcattcacatatttcccttttcaaatcatacattgcgatttatgc

SEQ ID NO: 16974 - protein, 237 aa, Zea mays subsp. mays
  misc_feature (1)..(237): Ceres Seq. ID no. 12355624
YTKNSSSSILFLHGISRLDPAFLSFASDMSDTQSSFSSTTAAVSSTTALPLSQAIHSVNIKSLVSYILDTQVHNYGKWSQLFTIILGRFDLLHHITTSDVFSDDPAWVRENLTVLSWIFATIYEDLVDMVIRPPGRRAHAIWRHLCDIFSGNKASRAVHLEAAFHSLTPGRSFGARLLSSSSTAGQQPRRLRRSHRRLHPRPSACRRHEHKIPHFAYPAPCSSCLPQFHASSRHAPS

SEQ ID NO: 16975 - protein, 209 aa, Zea mays subsp. mays
  misc_feature (1)..(209): Ceres Seq. ID no. 12355625
MSDTQSSFSSTTAAVSSTTALPLSQAIHSVNIKSLVSYILDTQVHNYGKWSQLFTIILGRFDLLHHITTSDVFSDDPAWVRENLTVLSWIFATIYEDLVDMVIRPPGRRAHAIWRHLCDIFSGNKASRAVHLEAAFHSLTPGRSFGARLLSSSSTAGQQPRRLRRSHRRLHPRPSACRRHEHKIPHFAYPAPCSSCLPQFHASSRHAPS

SEQ ID NO: 16976 - protein, 200 aa, Zea mays subsp. mays
  misc_feature (1)..(200): Ceres Seq. ID no. 12355626
MNTKYHTLRTLLPALPVFPSFMQARDMLLLEERSQSVSDRRAADTALVATATRPSSAPASPLVAPTNNAGGVTDNRPRGGYGRGRGRGRGRGFRYNGGGRSTGFLPPWVSPWPAAWRAPWTGASGPGVLGARPQAQAFPMLQQPHTTFAPLQQPSWDISGLVQALQAASVQQQASVGDWFMDTVSQLSHDQQFWIWPPRK

SEQ ID NO: 16977 - DNA, 1376 bp, Zea mays subsp. mays
  misc_feature (1)..(1376): Ceres Seq. ID no. 12355631
aagggcggcggttacttgtcccgctccaactacaaagcccagactgcccagtccgcatccccagcagccgtgacaccgcgccacagcagcctcggcgctgcgtttctgccttcccggtgagacaaatggccgccagcgccaccgacgccgacgccggcgccgggctcagatcggagttcctgcaggtcctgctcagccgccgccgcgatctccaagtgcctctctcggtggagcaagggagtccggtgaaggacccgatgtaccagaatcctccgtccaccatggaggcaaatccgatggagtcgtgccccagtaaagatgtggagaacttgagggagaagctggttgaagaaaatttctacctaatcactgagctaggtgaacaaggacgagtacctgtacttctgctgaagcttgacgaccccgttcctagaagaaaaccagctatcgtgttcctgcacagctcttacaagtgcaaagagtggctgcgcccactgcttgaggcatatgcttccaagggctacgtctgtgtggctattgactcgcgctatcacggcgaaagggccagcaatgaaaccacttacatagaggcactgaaatcggcttggcggaatggggatacaatgcctttcatttttgacacggtgtgggacttggtaaagcttggagactacctcggcgagagggaggacgtggatccctctagggttgggatcacaggcgaatcgctgggagggatgcacgcgtggtttgctgcttttgtggacacacggtacagtgtcgtcgttcctatcatcggtgttcagggattcaggtgggccattgacaacaacaagtggctggctagggtgaatagcataaggcctttatttgaagaagcaggaattgacttaggaaagagcgaattagatacagaagttgttgaaaaggtttgggaaaagatagcaccaggtctggactcgcaatttgatgccccctattcacttcctttgcttgcaccacggccgctgctacttctaaatggcgctgaagatcctcattgcccaataagtggtttaggagaagctatttcaaaaactgctaaagcttacgaagaatctggttgcgcggagaagttcatgttcattgcagagcctggagtcggccataaaatcacaatcgacatggtgaaggcagcaagcgaatggttcgatcgcttcctgcatgcatgaatgcaaaagttattgtcgcccatcatttgttctatatcgattgtgatttgtcaacagcatccagtatgtatgtcctcgtctatgtaccttagtaattgcgggtcggacaaatatctgtatctatatctttagtatattaaagcactagttttgacggtcgtccgc

SEQ ID NO: 16978 - protein, 402 aa, Zea mays subsp. mays
  misc_feature (1)..(402): Ceres Seq. ID no. 12355632
GRRLLVPLQLQSPDCPVRIPSSRDTAPQQPRRCVSAFPVRQMAASATDADAGAGLRSEFLQVLLSRRRDLQVPLSVEQGSPVKDPMYQNPPSTMEANPMESCPSKDVENLREKLVEENFYLITELGEQGRVPVLLLKLDDPVPRRKPAIVFLHSSYKCKEWLRPLLEAYASKGYVCVAIDSRYHGERASNETTYIEALKSAWRNGDTMPFIFDTVWDLVKLGDYLGEREDVDPSRVGITGESLGGMHAWFAAFVDTRYSVVVPIIGVQGFRWAIDNNKWLARVNSIRPLFEEAGIDLGKSELDTEVVEKVWEKIAPGLDSQFDAPYSLPLLAPRPLLLLNGAEDPHCPISGLGEAISKTAKAYEESGCAEKFMFIAEPGVGHKITIDMVKAASEWFDRFLHA

SEQ ID NO: 16979 - protein, 361 aa, Zea mays subsp. mays
  misc_feature (1)..(361): Ceres Seq. ID no. 12355633
MAASATDADAGAGLRSEFLQVLLSRRRDLQVPLSVEQGSPVKDPMYQNPPSTMEANPMESCPSKDVENLREKLVEENFYLITELGEQGRVPVLLLKLDDPVPRRKPAIVFLHSSYKCKEWLRPLLEAYASKGYVCVAIDSRYHGERASNETTYIEALKSAWRNGDTMPFIFDTVWDLVKLGDYLGEREDVDPSRVGITGESLGGMHAWFAAFVDTRYSVVVPIIGVQGFRWAIDNNKWLARVNSIRPLFEEAGIDLGKSELDTEVVEKVWEKIAPGLDSQFDAPYSLPLLAPRPLLLLNGAEDPHCPISGLGEAISKTAKAYEESGCAEKFMFIAEPGVGHKITIDMVKAASEWFDRFLHA

SEQ ID NO: 16980 - protein, 317 aa, Zea mays subsp. mays
  misc_feature (1)..(317): Ceres Seq. ID no. 12355634
MYQNPPSTMEANPMESCPSKDVENLREKLVEENFYLITELGEQGRVPVLLLKLDDPVPRRKPAIVFLHSSYKCKEWLRPLLEAYASKGYVCVAIDSRYHGERASNETTYIEALKSAWRNGDTMPFIFDTVWDLVKLGDYLGEREDVDPSRVGITGESLGGMHAWFAAFVDTRYSVVVPIIGVQGFRWAIDNNKWLARVNSIRPLFEEAGIDLGKSELDTEVVEKVWEKIAPGLDSQFDAPYSLPLLAPRPLLLLNGAEDPHCPISGLGEAISKTAKAYEESGCAEKFMFIAEPGVGHKITIDMVKAASEWFDRFLHA

SEQ ID NO: 16981 - DNA, 937 bp, Zea mays subsp. mays
  misc_feature (1)..(937): Ceres Seq. ID no. 12355635
cgaaagtcgaaacacagcacagcacaacaggagccaccgccccctttttccttccccccgtctcttcaattcaattcgtacggcacggccaccgggtcaccgcagcaacagaatgcggcgaatctgcatccccaagcttgtgattcttctgctgctctgcaccaggacgctgccggcgggcgtatcctctgcaaagatccatgggaacccagccaacgacctcgtggccctcatcaacggcaagagggaggcgagcaggctgcctgcgctgcgcaacagcagaggcctcgggtgcatggcgctgcagtacatctccgagtgcatggcggccaccacgggcggcgccgcctgcagcagcggcaacacgatggcgtgccagacccccgaggcccacatcacggaggtctacggccgccaactgcggcgtggagctccccacggtggacgtcatctccggccgcctcttcggctgccaccgggaccgcgacggcccggaggacgcgctggcatcagccaccgcgctctcggtgatccgcggcaaggagcacacccaggtaggcgccggcttcgaccgccgcgggcccttcttctggtgcctcctcttcagcagcggcagccccaactccacctttctcctggaggccggcggcaagggcatcgaccagacccatggctgcttcagcgctccggatcgcccctcgtgcaacgccacgccgccgcgccccggccagctcatgtgcaccattaccgcagcggcggctgtgctgctcttccgttgccttgtctccacctagctactccgaccggagtatcctactagcagcagctatgagcttcctggatgatgatattgtattgtattgcaaatctcggaccaatgtcatattccattcattcctggaactggaccagtgtcatattgtatttgcttacgccg

SEQ ID NO: 16982 - protein, 272 aa, Zea mays subsp. mays
  misc_feature (1)..(272): Ceres Seq. ID no. 12355636
ESRNTAQHNRSHRPLFPSPRLFNSIRTARPPGHRSNRMRRICIPKLVILLLLCTRTLPAGVSSAKIHGNPANDLVALINGKREASRLPALRNSRGLGCMALQYISECMAATTGGAACSSGNTMACQTPEAHITEVYGRQLRRGAPHGGRHLRPPLRLPPGPRRPGGRAGISHRALGDPRQGAHPGRRRLRPPRALLLVPPLQQRQPQLHLSPGGRRQGHRPDPWLLQRSGSPLVQRHAAAPRPAHVHHYRSGGCAALPLPCLHLATPTGVSY

SEQ ID NO: 16983 - protein, 235 aa, Zea mays subsp. mays
  misc_feature (1)..(235): Ceres Seq. ID no. 12355637
MRRICIPKLVILLLLCTRTLPAGVSSAKIHGNPANDLVALINGKREASRLPALRNSRGLGCMALQYISECMAATTGGAACSSGNTMACQTPEAHITEVYGRQLRRGAPHGGRHLRPPLRLPPGPRRPGGRAGISHRALGDPRQGAHPGRRRLRPPRALLLVPPLQQRQPQLHLSPGGRRQGHRPDPWLLQRSGSPLVQRHAAAPRPAHVHHYRSGGCAALPLPCLHLATPTGVSY

SEQ ID NO: 16984 - protein, 197 aa, Zea mays subsp. mays
  misc_feature (1)..(197): Ceres Seq. ID no. 12355638
MGTQPTTSWPSSTARGRRAGCLRCATAEASGAWRCSTSPSAWRPPRAAPPAAAATRWRARPPRPTSRRSTAANCGVELPTVDVISGRLFGCHRDRDGPEDALASATALSVIRGKEHTQVGAGFDRRGPFFWCLLFSSGSPNSTFLLEAGGKGIDQTHGCFSAPDRPSCNATPPRPGQLMCTITAAAAVLLFRCLVST

SEQ ID NO: 16985 - DNA, 1552 bp, Zea mays subsp. mays
  misc_feature (1)..(1552): Ceres Seq. ID no. 12355643
ataggccataggttgccctgcgggttttacaaaacaagaagaaaaaaaatcacctgctcaacggcggcatcatcggcaagacggcgggtttctgtaccaatctcagccttcgtgtctatctgattccaggaatcaagcgtattgtggtgaacatgaactccacatcttctcagcgtggttaccctgccaagaggtggtgtgcagcgaacatgagctccacatctatgcgtcactctgcatggaagtctgagccctggactcaccttacccacaaacagagacgaccacaatggattgcttataatccaaggacaatgaggcctccaccacttagcactgataccaattctatgaagattctgtcctggaacgttaatggactgcaagctattgtacagtcagggttttctgcagatgaattggttgccagagagaactttgacgtcttatgtcttcaagagacacacttggaggagcgcaatgttgacctttttaaaaacctggtacatgaatatgattacacctgttggtcatgcagtgttgcaaggcttggttattcaggaactgctgttatatcacgggtacaaccaatctcagttcaatatgggcttggcataccagagcatgatcaggaaggcaggcttattaccttggagtttgatgatttttacttggtcaatgcttatgtcccaaattctggccgtggtttacgtagactgaattacaggatcaatgattgggatccatgctttagcgacttcataaagaaactggaatgttctaaaccagtaattgttgctggggatctaaactgtgctcgtcaaagtattgacattcacaatcctcaagcaaaaaccgaggctgcaggtttcacaattgaagagagagagtcatttgaggtcaacttctcaagaaaaggcctcgttgatacattccgtaaacaacacccgaatgcagtggcctacactttctggggtgaaaaccagcgcattaccaacaaaggctggagactggattactttcttgcgtcagagtctattgccgacaaggtccatgattcttacactctgccagatgtagcgctcagcgatcacagtccaattggccttttgctgaagttgtaggcacttatacatctctcagctatttgacaactaaagcaggaagttttaacatcgtcctagataaaagacttgtagaaagattttgcttatgtaggctgaaaactattcaaactcgggtggtacttcgcgtggtctcctgtcgtctgtggaggttgtggatagactattcacgttgtgttcgagaagttaaaacatagcctagaacaattagctgatgttctatagcttgtgaatacatctgtttagtcggcgtaaccggcgaaagagcatctagccgaggagcatctagtcaagttagttaggtggtctaagtagcacctcttaagtgttgagtttgactctccgtggcaacaaattttaggcttggggtaaaaaaacctcttgtttatcccacgctaaagcatatgtctaagacccggtttccggtc

SEQ ID NO: 16986 - protein, 323 aa, Zea mays subsp. mays
  misc_feature (1)..(323): Ceres Seq. ID no. 12355644
MNSTSSQRGYPAKRWCAANMSSTSMRHSAWKSEPWTHLTHKQRRPQWIAYNPRTMRPPPLSTDTNSMKILSWNVNGLQAIVQSGFSADELVARENFDVLCLQETHLEERNVDLFKNLVHEYDYTCWSCSVARLGYSGTAVISRVQPISVQYGLGIPEHDQEGRLITLEFDDFYLVNAYVPNSGRGLRRLNYRINDWDPCFSDFIKKLECSKPVIVAGDLNCARQSIDIHNPQAKTEAAGFTIEERESFEVNFSRKGLVDTFRKQHPNAVAYTFWGENQRITNKGWRLDYFLASESIADKVHDSYTLPDVALSDHSPIGLLLKL

SEQ ID NO: 16987 - protein, 304 aa, Zea mays subsp. mays
  misc_feature (1)..(304): Ceres Seq. ID no. 12355645
MSSTSMRHSAWKSEPWTHLTHKQRRPQWIAYNPRTMRPPPLSTDTNSMKILSWNVNGLQAIVQSGFSADELVARENFDVLCLQETHLEERNVDLFKNLVHEYDYTCWSCSVARLGYSGTAVISRVQPISVQYGLGIPEHDQEGRLITLEFDDFYLVNAYVPNSGRGLRRLNYRINDWDPCFSDFIKKLECSKPVIVAGDLNCARQSIDIHNPQAKTEAAGFTIEERESFEVNFSRKGLVDTFRKQHPNAVAYTFWGENQRITNKGWRLDYFLASESIADKVHDSYTLPDVALSDHSPIGLLLKL

SEQ ID NO: 16988 - protein, 299 aa, Zea mays subsp. mays
  misc_feature (1)..(299): Ceres Seq. ID no. 12355646
MRHSAWKSEPWTHLTHKQRRPQWIAYNPRTMRPPPLSTDTNSMKILSWNVNGLQAIVQSGFSADELVARENFDVLCLQETHLEERNVDLFKNLVHEYDYTCWSCSVARLGYSGTAVISRVQPISVQYGLGIPEHDQEGRLITLEFDDFYLVNAYVPNSGRGLRRLNYRINDWDPCFSDFIKKLECSKPVIVAGDLNCARQSIDIHNPQAKTEAAGFTIEERESFEVNFSRKGLVDTFRKQHPNAVAYTFWGENQRITNKGWRLDYFLASESIADKVHDSYTLPDVALSDHSPIGLLLKL

SEQ ID NO: 16989 - DNA, 793 bp, Zea mays subsp. mays
  misc_feature (1)..(793): Ceres Seq. ID no. 12355690
aaaccctagaaagctcttaaaaagcccccaggggccagggctagcagcggcggcgtatccctaatcccacctccagtctctgggcaccaaatttccggcggcgatggcggcggctgtggcgaggtcagggttccggcgcatgttctccgtctctgccttcgcgccgccgaaggcgcccgccgcgcgccccaaggccgacccatcccccaacctcttcgtctccggcttaagcaagcgtaccacaagtgaaggacttagagaagcctttgcggagtttggtgaagttttgcatgctcgagttgtgaccgatcgtgtcagtgggttttctaagggatttggctttgtaaggtatgctacgaccgaagaggcagccaagggaatagagggaaaggatggaaagttccttgatggatgggttatttttgcggaatacgctaaacccagaccaccaccggaggaaacagggatgaattcgcagccccagcagtcatggggagctccatcaggttcctggggtgcacagtagatgaagtgatattgtgagagcccctccctgtcccagccctagggctcgtagcggatcgtgagggatgattttgtgtggtgtgtcgcaggtgtgaaatgcctttgttgtcccaatattcctaccgtgttgggggtggtcgcttgctcgcgtccacgtctttcacatgaattggttactgtggtagttgtagttctggatacggtaccaaaacaaaagtattgctgtcaacaatctgcaacagccgggaaaacagtcgaaaacctttgc

SEQ ID NO: 16990 - protein, 140 aa, Zea mays subsp. mays
  misc_feature (1)..(140): Ceres Seq. ID no. 12355691
MAAAVARSGFRRMFSVSAFAPPKAPAARPKADPSPNLFVSGLSKRTTSEGLREAFAEFGEVLHARVVTDRVSGFSKGFGFVRYATTEEAAKGIEGKDGKFLDGWVIFAEYAKPRPPPEETGMNSQPQQSWGAPSGSWGAQ

SEQ ID NO: 16991 - protein, 128 aa, Zea mays subsp. mays
  misc_feature (1)..(128): Ceres Seq. ID no. 12355692
MFSVSAFAPPKAPAARPKADPSPNLFVSGLSKRTTSEGLREAFAEFGEVLHARVVTDRVSGFSKGFGFVRYATTEEAAKGIEGKDGKFLDGWVIFAEYAKPRPPPEETGMNSQPQQSWGAPSGSWGAQ

SEQ ID NO: 16992 - DNA, 1589 bp, Zea mays subsp. mays
  misc_feature (1)..(1589): Ceres Seq. ID no. 12355700
attgagtataggtttgctctcctacacttttttgagaaagacattgaaggatgacatagttgttccaatgcttgattttaagatccaagatggggacattgtaccgttggtgtatggttcacagggtgattgggatagtagtctgaagatagtacttgattggtcccctttttcttcgaaggaagaacttctgcagcagtttcaggatgttggtagtcatggaactaaagtggtagtgtacaatttatggatgaatgatgatggccttttggaacttgactttgaggatgatgatgaggacatattacttagagatcaaggtagcgcaagtggggggttctcaaagagtcagaaagaaattgttaagcaacacatatcccacaggctcagattttcattgcgagcttatacctccatcctttacctcaggaagtttgataatttccaaattatattaagaggaaaacctgttgagcagatatttatcactgatgaactaaaatttaagaaagtcgttacttacagacctcaagcagcacatgattcccaagtggcctcggtaaaaattgatattggttttgcaaaggaggcccctattttgggcatttttgggatgaatgtctaccacaaagatcgacttataatgcctttctggaaggtccttcaagaaggatctagcagagggagaagtgtggttggtgtacttgaagcaaattttattgaaccagcacatgacaaacaagattttgagaggacaccattgtttattcggctagaaacaagacttagacaaattattattgatttctggaaagaaaggtgccatttgattggttaccagccaatggatccacatttaagatcccagtataaggccaccctcaaagaatcggttggtcctgctccagttcaccataaagcttccagtgtccgaagaactggagggctttcgtcaaatttactaccagagacatatgacgacataacaactgttgggttagcaaataatggttctcatttgcaatcgtctgatcaagcacaagagaacaatatggactcagaagttttggatgaggatctggtggagattggctcctctggtgtcctagatcctagttttattgagaagctgagtgaagaaaacatcgctctgttttcaaggcgtgaagagcttcgacaacgagatacacaactgaagcagacgattggagacctggagcttgagctggaggaaacaaaaaagaagtgcggtcagcttgctgctcagctcaaggcatggaagaaccagcagcatctaccctaaatgtgaagggcatcattaagaccgaggacacggaggtacacgacaacgaccaatactgacagaaaaccgaaggttacaaggaagcacggatgcatataatgtctgtctagtgggctggctaactcatggttgagttgttaaaaagaagtttagcatgtaaatcttaggcgtgtgtgctacttagctactagacagaatggttgtcatgtgcaagcaaggaagatgacttgggtgattcctgctgttaatttgctatgcaaaatgtcacgtaaggcccttatgatcc

SEQ ID NO: 16993 - protein, 433 aa, Zea mays subsp. mays
  misc_feature (1)..(433): Ceres Seq. ID no. 12355701
LSIGLLSYTFLRKTLKDDIVVPMLDFKIQDGDIVPLVYGSQGDWDSSLKIVLDWSPFSSKEELLQQFQDVGSHGTKVVVYNLWMNDDGLLELDFEDDDEDILLRDQGSASGGFSKSQKEIVKQHISHRLRFSLRAYTSILYLRKFDNFQIILRGKPVEQIFITDELKFKKVVTYRPQAAHDSQVASVKIDIGFAKEAPILGIFGMNVYHKDRLIMPFWKVLQEGSSRGRSVVGVLEANFIEPAHDKQDFERTPLFIRLETRLRQIIIDFWKERCHLIGYQPMDPHLRSQYKATLKESVGPAPVHHKASSVRRTGGLSSNLLPETYDDITTVGLANNGSHLQSSDQAQENNMDSEVLDEDLVEIGSSGVLDPSFIEKLSEENIALFSRREELRQRDTQLKQTIGDLELELEETKKKCGQLAAQLKAWKNQQHLP

SEQ ID NO: 16994 - protein, 411 aa, Zea mays subsp. mays
  misc_feature (1)..(411): Ceres Seq. ID no. 12355702
MLDFKIQDGDIVPLVYGSQGDWDSSLKIVLDWSPFSSKEELLQQFQDVGSHGTKVVVYNLWMNDDGLLELDFEDDDEDILLRDQGSASGGFSKSQKEIVKQHISHRLRFSLRAYTSILYLRKFDNFQIILRGKPVEQIFITDELKFKKVVTYRPQAAHDSQVASVKIDIGFAKEAPILGIFGMNVYHKDRLIMPFWKVLQEGSSRGRSVVGVLEANFIEPAHDKQDFERTPLFIRLETRLRQIIIDFWKERCHLIGYQPMDPHLRSQYKATLKESVGPAPVHHKASSVRRTGGLSSNLLPETYDDITTVGLANNGSHLQSSDQAQENNMDSEVLDEDLVEIGSSGVLDPSFIEKLSEENIALFSRREELRQRDTQLKQTIGDLELELEETKKKCGQLAAQLKAWKNQQHLP

SEQ ID NO: 16995 - protein, 350 aa, Zea mays subsp. mays
  misc_feature (1)..(350): Ceres Seq. ID no. 12355703
MNDDGLLELDFEDDDEDILLRDQGSASGGFSKSQKEIVKQHISHRLRFSLRAYTSILYLRKFDNFQIILRGKPVEQIFITDELKFKKVVTYRPQAAHDSQVASVKIDIGFAKEAPILGIFGMNVYHKDRLIMPFWKVLQEGSSRGRSVVGVLEANFIEPAHDKQDFERTPLFIRLETRLRQIIIDFWKERCHLIGYQPMDPHLRSQYKATLKESVGPAPVHHKASSVRRTGGLSSNLLPETYDDITTVGLANNGSHLQSSDQAQENNMDSEVLDEDLVEIGSSGVLDPSFIEKLSEENIALFSRREELRQRDTQLKQTIGDLELELEETKKKCGQLAAQLKAWKNQQHLP

SEQ ID NO: 16996 - DNA, 1815 bp, Zea mays subsp. mays
  misc_feature (1)..(1815): Ceres Seq. ID no. 12355748
aaagtcaattcataaactcacaatggcggcaacggcataccccactgtggtgctcatcccactatgcgtcccaggccacctcgcgtccatgatcgaagccggcaagcggctgctcggcagaagccgctgccccatgtccctcaccgtgctcatcacgcagatgaccatgtccgccaacctgatgtccgacgtcgacgacatcatgcggcgggaagccgactccggcctggacatccgcttcgtccacctccccgccgtggagctccccaccgtccaccacggcctcgaggacttcatgatgcgcttcatacagctccacgcgacgcacgtcaaggaggccgtctccggcatgtcgtccccggtcgccgcggtcgtggtggactacttctgcaccaccctgttcgacgtcgcgcgcgagctcgcgctgccggcgtacgcctacatgccgtccggcgcgtcgatggtcgcgctcatgctgcggttaccggcgctggacggggaggtgtccggggacttcgaggcgatggaaggaacggtcgacctgcccgggatgccgccggtgccggctcgtctcatgccgtctccgctgatgaggaaggacccgaacttcgcgtggctggtgtaccatggcaaccgcttcatggaggccgacggcgtcatcgtcaacacggtagccgagctggagccgtccatcctcgcggccatcgccgacggcctctgcgtgtcaagacgccgcgctccggccgtctacccgatcggcccggtcctgcctctcaagccgccgtccgcgcccggcgacggcgagcaggtagtagcacagcggcacgagtgcgtgaggtggctcgacgcgcagcccccagcgtccgtcgtgctgctctgctttgggagcatgggcggcagcttcccgtcgccccaggtccgcgagatcgccgacggcctcgagcgcagcgggcaccgcttcctgtgggtgctccgtggcccgccaccgccggacggttccaagtacccgacggacgccaacgtccacgagctgctcccggaagggttcctggagaggacgaagggccgaggcctcgtgtggcccacgtgggcgccgcagaaggacatcctcgccaaccccgccgtcggcggcttcgtcacccactgcggctggaactccatcctcgagagcctgtggcacggcgtgccgatggtgcccttgccgcagttcgcggagcagcacctgaacgcgttcgagctcgtgtccgtcatgggcgtcgccgttgccatgcaggtggacaggaagcgcggcaacttcgtcgaggcggcggagctggagcgcgcggtccggtgcctgatgggcgggtcggaggaggaggggaggaaggcgcgggagaaggcgacggaggcgaaggccctgagccagaacggcgtggccagcggcgggtcgtcggacgcgtcggtgcagaaactggcgcgagagattttgcacaagcacgacgacaaggggtgtgccaccgcaagcggggagagcatgggcagcgtcgtcgttcccgcatctccggccagaataatatgatcccccgaacacggagaaatcgccgtcgtccacgaataaatcggaggccgccatgcgatccgtctggcactgctcacgttgtttgacattgttcagaatcgccgtgtgcactgtagtttcttatccgcagtagcttttaccattcgaaataatgtagcatagcaagcgctgcttcttcctaagtccgtgcagcgtagcccgcgtgttcgagctagtttgtgttaagttgaatgagttaatggatgctagttgtagtc

SEQ ID NO: 16997 - protein, 526 aa, Zea mays subsp. mays
  misc_feature (1)..(526): Ceres Seq. ID no. 12355749
MRPRPPRVHDRSRQAAARQKPLPHVPHRAHHADDHVRQPDVRRRRHHAAGSRLRPGHPLRPPPRRGAPHRPPRPRGLHDALHTAPRDARQGGRLRHVVPGRRGRGGLLLHHPVRRRARARAAGVRLHAVRRVDGRAHAAVTGAGRGGVRGLRGDGRNGRPARDAAGAGSSHAVSADEEGPELRVAGVPWQPLHGGRRRHRQHGSRAGAVHPRGHRRRPLRVKTPRSGRLPDRPGPASQAAVRARRRRAGSSTAARVREVARRAAPSVRRAALLWEHGRQLPVAPGPRDRRRPRAQRAPLPVGAPWPATAGRFQVPDGRQRPRAAPGRVPGEDEGPRPRVAHVGAAEGHPRQPRRRRLRHPLRLELHPREPVARRADGALAAVRGAAPERVRARVRHGRRRCHAGGQEARQLRRGGGAGARGPVPDGRVGGGGEEGAGEGDGGEGPEPERRGQRRVVGRVGAETGARDFAQARRQGVCHRKRGEHGQRRRSRISGQNNMIPRTRRNRRRPRINRRPPCDPSGTAHVV

SEQ ID NO: 16998 - protein, 518 aa, Zea mays subsp. mays
  misc_feature (1)..(518): Ceres Seq. ID no. 12355750
KSIHKLTMAATAYPTVVLIPLCVPGHLASMIEAGKRLLGRSRCPMSLTVLITQMTMSANLMSDVDDIMRREADSGLDIRFVHLPAVELPTVHHGLEDFMMRFIQLHATHVKEAVSGMSSPVAAVVVDYFCTTLFDVARELALPAYAYMPSGASMVALMLRLPALDGEVSGDFEAMEGTVDLPGMPPVPARLMPSPLMRKDPNFAWLVYHGNRFMEADGVIVNTVAELEPSILAAIADGLCVSRRRAPAVYPIGPVLPLKPPSAPGDGEQVVAQRHECVRWLDAQPPASVVLLCFGSMGGSFPSPQVREIADGLERSGHRFLWVLRGPPPPDGSKYPTDANVHELLPEGFLERTKGRGLVWPTWAPQKDILANPAVGGFVTHCGWNSILESLWHGVPMVPLPQFAEQHLNAFELVSVMGVAVAMQVDRKRGNFVEAAELERAVRCLMGGSEEEGRKAREKATEAKALSQNGVASGGSSDASVQKLAREILHKHDDKGCATASGESMGSVVVPASPARII

SEQ ID NO: 16999 - protein, 511 aa, Zea mays subsp. mays
  misc_feature (1)..(511): Ceres Seq. ID no. 12355751
MAATAYPTVVLIPLCVPGHLASMIEAGKRLLGRSRCPMSLTVLITQMTMSANLMSDVDDIMRREADSGLDIRFVHLPAVELPTVHHGLEDFMMRFIQLHATHVKEAVSGMSSPVAAVVVDYFCTTLFDVARELALPAYAYMPSGASMVALMLRLPALDGEVSGDFEAMEGTVDLPGMPPVPARLMPSPLMRKDPNFAWLVYHGNRFMEADGVIVNTVAELEPSILAAIADGLCVSRRRAPAVYPIGPVLPLKPPSAPGDGEQVVAQRHECVRWLDAQPPASVVLLCFGSMGGSFPSPQVREIADGLERSGHRFLWVLRGPPPPDGSKYPTDANVHELLPEGFLERTKGRGLVWPTWAPQKDILANPAVGGFVTHCGWNSILESLWHGVPMVPLPQFAEQHLNAFELVSVMGVAVAMQVDRKRGNFVEAAELERAVRCLMGGSEEEGRKAREKATEAKALSQNGVASGGSSDASVQKLAREILHKHDDKGCATASGESMGSVVVPASPARII

SEQ ID NO: 17000 - DNA, 903 bp, Zea mays subsp. mays
  misc_feature (1)..(903): Ceres Seq. ID no. 12355756
agggatagcataacaccgccgaggaagcagcaagcagcaaggtcgacatgtcgtctccgccgccggtgaagctgatcggcttcttcggcagcccgtacgcgttccgcgcggaggcggcgctgtgcctgaaaggcgtgccgtacgagctgatcctggaggacctgttcggcagcaagagcgagctcctgctccaccacaaccccgtgcacaagaaggtgcccgtgctcctccacggcgacggccgggccatctccgagtccctcgtcatcgccgagtacgtcgacgaggccttcgacgggccgccgctgctccccgccgacccctacgcgcgcgccgccgcccgcttctgggccgacttcatcgagaccaggctcaccaagcccttcttcatggcgatctgggtggaggagcgcgacgcgcggctgcggttcgaggaggaggccaaggagctcgtggcgctgctggaggcgcagctcgagggaaagaggttcttcgccggcgacaggccggggtacctcgacgtggccgcgtccgcgctcgggccctggcgcagcgtcatcgaggagctcaacggtgtggcgctgctcagcgaggatgaccaccccaacctgtgccggtggaccagggactactgcgccttcgaggctctcaagccgtgcatgccggatcgggagaagctcctcgcctacttcactaagaacttcgacaggtacaaggcggccgtcaatgcgacgctatcgcagtcgcagcagtaataactgcccaactgggtacgcctctgcccggccgtatggcgggcgtttctttttttctttcttcagaataacgtagctgtgcccagtactcatgttttcaattctgcaaagtgcaaaccaacaagtcgctgtgtggtttactcttttt

SEQ ID NO: 17001 - protein, 235 aa, Zea mays subsp. mays
  misc_feature (1)..(235): Ceres Seq. ID no. 12355757
MSSPPPVKLIGFFGSPYAFRAEAALCLKGVPYELILEDLFGSKSELLLHHNPVHKKVPVLLHGDGRAISESLVIAEYVDEAFDGPPLLPADPYARAAARFWADFIETRLTKPFFMAIWVEERDARLRFEEEAKELVALLEAQLEGKRFFAGDRPGYLDVAASALGPWRSVIEELNGVALLSEDDHPNLCRWTRDYCAFEALKPCMPDREKLLAYFTKNFDRYKAAVNATLSQSQQ

SEQ ID NO: 17002 - protein, 121 aa, Zea mays subsp. mays
  misc_feature (1)..(121): Ceres Seq. ID no. 12355758
MAIWVEERDARLRFEEEAKELVALLEAQLEGKRFFAGDRPGYLDVAASALGPWRSVIEELNGVALLSEDDHPNLCRWTRDYCAFEALKPCMPDREKLLAYFTKNFDRYKAAVNATLSQSQQ

SEQ ID NO: 17003 - DNA, 1479 bp, Zea mays subsp. mays
  misc_feature (1)..(1479): Ceres Seq. ID no. 12355763
actgccactgtacttgtgttgtgttgtgctgtgctgtgctgcgagaagaaggagaagcagaggaagagcaggtgctgagaagcctgccggcgcgcgttacgacaagcatatatgggggagatcaccaatgtcatggagtaccaggccatcgccaagcagaagcttccgaagatggcctacgactactacgcgtccggcgccgaggacgagtggacgctgcaggagaacagggaggccttctccaggatcttgttccgtccgcgcatactgatcgacgtgtccaagatcgacatgaccaccaccgtgctggggttcaagatctccatgcccatcatggtcgcccccactgctatgcagaagatggctcacccagatggggagaacgccactgcgcgcgcggcggctgcggcaggcaccataatgacactgtcgtcctgggcaacttcaagcgtcgaggaggttgcctcgaccgggccagggatccgcttcttccagctatacgtctacaaggacaggaaggtggtggagcagctggtgaggcgagctgaaagagctgggttcaaggccatcgcgctcaccgtcgacacgccgcgccttggccgcagggaagctgacatcaagaacagattcgtcctgccaccacacctgacgctcaagaacttcgaaggtctggacctcggcaaaatggaccaggctgctgattcagggctggcttcctatgtcgccggccaagtcgaccgcaccctgagctggaaagacgtcaagtagttgcagaccatcaccacgctgccgatcctcgtcaagggagtgctcaccgctgaagacacgaggcttgcggtggcgaacggcgcggcggggatcatcgtgtcgaaccacggcgcgcggcagctggactacgtgccggcgaccatcagcgcgctggaggaggtcgtgaaggccgcccggggccacctccccgtgttcgtcgacggtggcgtccgccgcggcaccgacgtcttcaaggcgctcgcgctcggcgccgccggcgtattcgtcgggaggccggtggtgttctccctggcggcggcgggcgaggccggcgtgtccaacgtcctgcgcatgctgcgggacgagttcgagctcaccatggcgctcagcggctgcacctccctcgccgaaatcacccgcaagcacatcatcaccgagtccgacaagctcagcgccatcccgtcgcgcttgtagatgaggcaaaatcaatcgcctgctacgccgccggtcgatcggggatagtcagctcgtgcatggatgcatgcatgcgtgctcgatgtcgatgacgatgatgataccatatataatctaggactgcgcatatatatattttgttccagaaatgatcgatcactgtactgtactgtaaaatcttatagattattacacgcatggtgtgcgctgcatcttcattagttgttaataatggcgcacacatggtgatctctctgc

SEQ ID NO: 17004 - protein, 218 aa, Zea mays subsp. mays
  misc_feature (1)..(218): Ceres Seq. ID no. 12355764
MGEITNVMEYQAIAKQKLPKMAYDYYASGAEDEWTLQENREAFSRILFRPRILIDVSKIDMTTTVLGFKISMPIMVAPTAMQKMAHPDGENATARAAAAAGTIMTLSSWATSSVEEVASTGPGIRFFQLYVYKDRKVVEQLVRRAERAGFKAIALTVDTPRLGRREADIKNRFVLPPHLTLKNFEGLDLGKMDQAADSGLASYVAGQVDRTLSWKDVK

SEQ ID NO: 17005 - protein, 211 aa, Zea mays subsp. mays
  misc_feature (1)..(211): Ceres Seq. ID no. 12355765
MEYQAIAKQKLPKMAYDYYASGAEDEWTLQENREAFSRILFRPRILIDVSKIDMTTTVLGFKISMPIMVAPTAMQKMAHPDGENATARAAAAAGTIMTLSSWATSSVEEVASTGPGIRFFQLYVYKDRKVVEQLVRRAERAGFKAIALTVDTPRLGRREADIKNRFVLPPHLTLKNFEGLDLGKMDQAADSGLASYVAGQVDRTLSWKDVK

SEQ ID NO: 17006 - protein, 198 aa, Zea mays subsp. mays
  misc_feature (1)..(198): Ceres Seq. ID no. 12355766
MAYDYYASGAEDEWTLQENREAFSRILFRPRILIDVSKIDMTTTVLGFKISMPIMVAPTAMQKMAHPDGENATARAAAAAGTIMTLSSWATSSVEEVASTGPGIRFFQLYVYKDRKVVEQLVRRAERAGFKAIALTVDTPRLGRREADIKNRFVLPPHLTLKNFEGLDLGKMDQAADSGLASYVAGQVDRTLSWKDVK

SEQ ID NO: 17007 - DNA, 1156 bp, Zea mays subsp. mays
  misc_feature (1)..(1156): Ceres Seq. ID no. 12355771
acgaaaacaagcacagagagagagagaaccccagcgggcaaacgcctccctccccctgcctccaggccccagatccggccatccgggtagctccagaccttctccaatggcggtcaaggtctacgtcgtgttttactccacctacgggcacgttgccaagcttgctgaggagatgaagaaaggcgccgcttcagttgaaggcgtggaggtcaaagtatggcaggtcagtgtctgtcagcaacggtgcaatcttcgagttagctagaaccaatgtgttgtgtgagtctggaatggtcaccgccaaattcccatcggtttcactttcacacgcgaaggtcccggagattctgtccgaggaggtgctcggcaagatgggcgcgccacccaagaccgacgcgccggtcatcaccccgcaggagctggcggaggccgacggcgtcctcttcgggttccccacgcggttcggcatgatggcggcgcagatgaaggccttcttcgacgcgaccggcgggctgtggcgcgagcagagcctggccggcaagcccgccggcctcttcttcagcaccggctcccagggtggcggccaggagaccacgccgtgagcagccgtctcctctccttttttcacaacatgtttccttccccttgcagcaccaaccgatcgaatcgcagaagcagtgggtaacgtttcccccttggcgtggcggccaggctgacggcggtgacgcagctgacgcaccacgggatggtgttcgtgcctgtggggtacacgttcggcgccaagatattcgacatggagagcgtgcacggcggcagcccgtacggcgcgggcacgttcgccggggacgggtcgcggtggccgacggaactggagctggagcacgccttccaccagggcaagtacttcgccggcatcgccaagaggctcaagggcggctccgcctgatatcgctcgcaccctcctatacgtatacataattattatagggaacatatctggtgcatatataaatttagtgtacatggtgcatatattaaatcagcatcactcattttagatataatgtctctagttgttggtatattttgctaagaacaccctccgacgtggtgaagtatagcggtggaaaatattatttataaattgcaatgatcg

SEQ ID NO: 17008 - protein, 103 aa, Zea mays subsp. mays
  misc_feature (1)..(103): Ceres Seq. ID no. 12355772
MVTAKFPSVSLSHAKVPEILSEEVLGKMGAPPKTDAPVITPQELAEADGVLFGFPTRFGMMAAQMKAFFDATGGLWREQSLAGKPAGLFFSTGSQGGGQETTP

SEQ ID NO: 17009 - protein, 87 aa, Zea mays subsp. mays
  misc_feature (1)..(87): Ceres Seq. ID no. 12355773
RKQAQREREPQRANASLPLPPGPRSGHPGSSRPSPMAVKVYVVFYSTYGHVAKLAEEMKKGAASVEGVEVKVWQVSVCQQRCNLRVS

SEQ ID NO: 17010 - protein, 76 aa, Zea mays subsp. mays
  misc_feature (1)..(76): Ceres Seq. ID no. 12355774
MGAPPKTDAPVITPQELAEADGVLFGFPTRFGMMAAQMKAFFDATGGLWREQSLAGKPAGLFFSTGSQGGGQETTP

SEQ ID NO: 17011 - DNA, 1539 bp, Zea mays subsp. mays
  misc_feature (1)..(1539): Ceres Seq. ID no. 12355783
agtgcctccttaaacctcactgacgattcttcgttcatgtctccctcgcccaggggccgcaagagggcctgcgtcacctattgcatcagctacatcctcagctgcatcaccaagcactcccccgagtacagggtcctcatgatcggccgcatcctcgggggcatcgccacctcgctgctcttctccgccttcgagtcctggctcgtcgccgagcacaacaagagaggctttgacccgcagtggctgtccataacattctccaaagccatcttccttgggaacggcttaattgccattgtatctgggctatttgcgaaccttcttgctgagaacttgggttttggtcctgtggctccatttgatgcggctgcgtgctttctggcgattggcatggctatcataatgtcctcatggagtgaaaactacggagatccatctgaaagcaaggacctgatggcccagttcaaggttgcggctaaggcaattgcgtcagatgaaaagattgcattactgggagccatacagtcattgtttgagggctccatgtacacatttgtcttcctatggactccagcattgagtccaaatgaagaagacattcctcatggttttatttttgctacattcatgctgtcatccatgctgggtagctccatcgcgtcacgtctattagcccgaaagctcaaggttgaaggctatatgcagatcgtgttctcgatatcggctgtcacccttgtcctccctgtcgccaccaacatcttagtgccaacgtcttctgtgaaaggaggcagcgtatcaattggaggttctcttcagcttcttggtttctgcacctttgaggcatgtgttggcatattctggccgtcaatcatgaagatgagatctcagtacattcctgaggaagcgagaagcacaatcatgaacttcttccgcataccactcaacttatttgtttgtgtggtgctttacaacgtgaatgcattccctatcactgtcatgtttgggatgtgttctatcttcctcttcatggcagcaatcttgcagagacggctgatggttgtctctgatcaagtacacaaatcatcaactacacaagaaatgatcggggaagatgagccactaaatccttaggtgtcgacagaaccatacatgcgaaatcagatattgaagacgacgtacatactgcatttcgtttcgtcacctgtgcaataagatggacgtcaaaaccatgtagtagagtctagtggttttcgtttctgtagtgtagatttgaccaggctgctaagtttgcacctgtcccgagaagattagatgagcaagtcaatcaatattggctattcgcattgttgtttcttttttttaaaaaaaaaaaagatgttcgctttaaagtttaaacgatacggtatatatccttgtaagtgttgcattgctgcatctgatgacaattctggtggtgctgttactgactgttgagggctctctctacttggtcgttgtaagaactgttgcttcttaatgaaaaatgggctcaacaaattc

SEQ ID NO: 17012 - protein, 376 aa, Zea mays subsp. mays
  misc_feature (1)..(376): Ceres Seq. ID no. 12355784
SASLNLTDDSSFMSPSPRGRKRACVTYCISYILSCITKHSPEYRVLMIGRILGGIATSLLFSAFESWLVAEHNKRGFDPQWLSITFSKAIFLGNGLIAIVSGLFANLLAENLGFGPVAPFDAAACFLAIGMAIIMSSWSENYGDPSESKDLMAQFKVAAKAIASDEKIALLGAIQSLFEGSMYTFVFLWTPALSPNEEDIPHGFIFATFMLSSMLGSSIASRLLARKLKVEGYMQIVFSISAVTLVLPVATNILVPTSSVKGGSVSIGGSLQLLGFCTFEACVGIFWPSIMKMRSQYIPEEARSTIMNFFRIPLNLFVCVVLYNVNAFPITVMFGMCSIFLFMAAILQRRLMVVSDQVHKSSTTQEMIGEDEPLNP

SEQ ID NO: 17013 - protein, 364 aa, Zea mays subsp. mays
  misc_feature (1)..(364): Ceres Seq. ID no. 12355785
MSPSPRGRKRACVTYCISYILSCITKHSPEYRVLMIGRILGGIATSLLFSAFESWLVAEHNKRGFDPQWLSITFSKAIFLGNGLIAIVSGLFANLLAENLGFGPVAPFDAAACFLAIGMAIIMSSWSENYGDPSESKDLMAQFKVAAKAIASDEKIALLGAIQSLFEGSMYTFVFLWTPALSPNEEDIPHGFIFATFMLSSMLGSSIASRLLARKLKVEGYMQIVFSISAVTLVLPVATNILVPTSSVKGGSVSIGGSLQLLGFCTFEACVGIFWPSIMKMRSQYIPEEARSTIMNFFRIPLNLFVCVVLYNVNAFPITVMFGMCSIFLFMAAILQRRLMVVSDQVHKSSTTQEMIGEDEPLNP

SEQ ID NO: 17014 - protein, 330 aa, Zea mays subsp. mays
  misc_feature (1)..(330): Ceres Seq. ID no. 12355786
MIGRILGGIATSLLFSAFESWLVAEHNKRGFDPQWLSITFSKAIFLGNGLIAIVSGLFANLLAENLGFGPVAPFDAAACFLAIGMAIIMSSWSENYGDPSESKDLMAQFKVAAKAIASDEKIALLGAIQSLFEGSMYTFVFLWTPALSPNEEDIPHGFIFATFMLSSMLGSSIASRLLARKLKVEGYMQIVFSISAVTLVLPVATNILVPTSSVKGGSVSIGGSLQLLGFCTFEACVGIFWPSIMKMRSQYIPEEARSTIMNFFRIPLNLFVCVVLYNVNAFPITVMFGMCSIFLFMAAILQRRLMVVSDQVHKSSTTQEMIGEDEPLNP

SEQ ID NO: 17015 - DNA, 1668 bp, Zea mays subsp. mays
  misc_feature (1)..(1668): Ceres Seq. ID no. 12355794
atttatgaaacggaccattgaatgtgctcaagtcttctttcctccagaatcccccatctgagcaagggcgccgccgccgtcggctagcgccgcagcattgacgtggacgccgaccctctccggcagccgcttgcagcgcgtcccttccccgctcccgcggcatggactgcgcaaagaggagggcggtggcggacctccacgacgagctgatggtggagatcttctcgcgcgtgcccgtcaaagacctccgccgttgcacgtgcgtgtgcaaatcttggtgcaacatcatcaccgaccccctcaacggcaagaagctgccccagaccctggaaggcttcttccaaggcgtcgtcggagggcctcacaactacggccaattcaccagcctgtcggggagcggagaacgcgtgcctccggtcgacccttccttctccttcatcacggcaatgctgcctggcgtggagcattggtcctcttggattcttgcaacgggctcctgctctttgggtgcacccgggaggacaagttcgggtacatcgtgacaaaccctgcgactgaggaattgatgactgtgcccaccagctcctgctcttgtcctcctccaccttcggttggtggggaaagatatgcgcacacctttctgatgtttaaccctgctgtctcctcgcacttccacttggtccagatctgggaggataatgcggtgaaggaggtggaaacggtacactcttactcgtctgaaaccaaggcatggagtgacaggtcaagcaagtgggggcgaggtgaagagggcggtgaatggaagctgtggggtgaatccgtgattggattgacgcgtggctgggctttggtcgatggtctgctgcattttcttgtcttcgatcttcagaaacaagagaatgtgataattgcagtggatggggaagggaaaacttgtaggatcatcggctggcatggtaaggatgtgagaacaattgcttttattggtcaatcccaaaaccatctacactgcatcggtgtgaatttgcaattacatcaaggctcccaagtgcgcttcacgcaaatgtcgatctgggttcttgaggactatgatacagaagcatggatcctaaagcacaatgtgagctcttcgcagttctttgaattactgagtcacccaatcaaagacttccatattgtggccattcatccagatcacaattcgttcatccttgttcagcactggaaccagaaactggtatcatataacatggatactcaggaactgcatggtctctgcactcttggaaagggctatgtgattattaccccatatgttccctgtttcttggagtcatcggttcttgccaccaaacactgaggttgttgtttctggggacttctctgcatgttcaacaagagcctgatcatccaagtgtggggcaaggtgatctagtctgatggtgctttaatgtccttttgtaatgctttgagaaagctgtttacaggacaacatggttagttctatgatatatcagtgagaaagctgtttacaggacagtattgttagttctatgatatatcaaattagatcacacttaattgctggccaatataggtattagcttcggttttttgttgtgattattcaatattgaatgcgcacctgcgcacctatggtattgcccg

SEQ ID NO: 17016 - protein, 264 aa, Zea mays subsp. mays
  misc_feature (1)..(264): Ceres Seq. ID no. 12355795
MTVPTSSCSCPPPPSVGGERYAHTFLMFNPAVSSHFHLVQIWEDNAVKEVETVHSYSSETKAWSDRSSKWGRGEEGGEWKLWGESVIGLTRGWALVDGLLHFLVFDLQKQENVIIAVDGEGKTCRIIGWHGKDVRTIAFIGQSQNHLHCIGVNLQLHQGSQVRFTQMSIWVLEDYDTEAWILKHNVSSSQFFELLSHPIKDFHIVAIHPDHNSFILVQHWNQKLVSYNMDTQELHGLCTLGKGYVIITPYVPCFLESSVLATKH

SEQ ID NO: 17017 - protein, 238 aa, Zea mays subsp. mays
  misc_feature (1)..(238): Ceres Seq. ID no. 12355796
MFNPAVSSHFHLVQIWEDNAVKEVETVHSYSSETKAWSDRSSKWGRGEEGGEWKLWGESVIGLTRGWALVDGLLHFLVFDLQKQENVIIAVDGEGKTCRIIGWHGKDVRTIAFIGQSQNHLHCIGVNLQLHQGSQVRFTQMSIWVLEDYDTEAWILKHNVSSSQFFELLSHPIKDFHIVAIHPDHNSFILVQHWNQKLVSYNMDTQELHGLCTLGKGYVIITPYVPCFLESSVLATKH

SEQ ID NO: 17018 - DNA, 1858 bp, Zea mays subsp. mays
  misc_feature (1)..(1858): Ceres Seq. ID no. 12355801
tttacaagcttaaaacgcaccggcatggccattgtacaggacaacggtgtcctgcacttgcacccttatgccgtcgccgcggcggcagcggcattgatctcggcgtacatggtgtggttctgggcgctgacgcgacggctgtccgggccgcggatgtggcccctcgtcggcagcctgcccagcgtcgtcctgaaccgggcgcgggttcacgactggatcgtcgacaacctgcgctccaagggggaagcggccacgtaccagacgtgcatcttgccgctgccgttcttggcgcggcgccaggggctggtgaccgtcacgtgcaacccgcggaacctggagcacatcctgcgcgcgcgtttcgacaactaccccaagggccccatgtggcaggcggcgttccacgatctcctaggccagggcatcttcaactccgacggcgagacgtggctgctccagcgcaagacggcggcgctcgagttcaccacgaggaccttgcgccaggcgatggcgcgctgggccaaccgcatcatcaagtaccgcctgtggagtatcctcgcagaacactgcgaggccgcggcgagcgtcgacctccaggacctgctcttgcgcctcaccttcgacaacatctgcggcctcaccttcggcaaggaccccgagacactgtcgccggggttgcaggagaaccccttcgccaacgccttcgactccgccaccgaggcgacgctgcagaggttcctgttccccagcttcctgtggcgcgtcaagaaggcgctcggcgtcggcagcgagcggagcctccgcgagagcctcgcgatcgtggaccagtacatgacggaggccatcgcggcgcgcaaggcgaatccgtcggacgacctgctctccaggttcatgaagaagcgcgacggcagcggcagggcgttccccgaggacgtgctccagtgggtcgcgctcaacttcgtgctcgcgggacgcgacacgtcgtccgtcgcgctcagctggttcttctggatgctcatgctgcggcgcgacgtcgagcgcaaggtggtcctggagatcgcctccgtcctcagggagacgcgtggcgacgacagcgggaggtggaccgaggagccgctggacttcgacgagctggaccgcctcgtgtacctgaaggcggcattggcggagacgctgcggctgtacccttcggtgccgcaggactccaagtacgtggtggaggacgacgtgttgcccgatggcaccgtggtgccggccggctcagcggtcacctactccatctactcggttggacgaatggagagcatctggggaaaagactgctctgagttccggcctgagcggtggctctcggctgacgggacccggttcgagccggccaaggacgcgtaccgcttcgtggcgttcaacggcgggccgcggacgtgcctgggcaaggacctggcgtacttgcagatgaagtccatcgcttccgctgtgctactgcgccactcggtggagctcgtccctggacacaaggtggagcagaagatgtcgctcactctgttcatgaagaacggcctccgagtgcacgtcaagccgcgggacctcgccggctacgtcgtggcaccggaggaagccccgcagctgggagcctttgtgatctcgaccacaactgcagcagctgcataagcctgcatgtgcccgcgcgtattggcactggtttcttcgtgctgaagttcttctgtatgcctctgctgtcaaagtcatatcgttttcgtttctccctcttcattagactgttaggtttgtgggtacctggcgtcatattggttgtacctgtgtagtttttgtgtggatgaatcggtttgtgtacttctgt

SEQ ID NO: 17019 - protein, 555 aa, Zea mays subsp. mays
  misc_feature (1)..(555): Ceres Seq. ID no. 12355802
FTSLKRTGMAIVQDNGVLHLHPYAVAAAAAALISAYMVWFWALTRRLSGPRMWPLVGSLPSVVLNRARVHDWIVDNLRSKGEAATYQTCILPLPFLARRQGLVTVTCNPRNLEHILRARFDNYPKGPMWQAAFHDLLGQGIFNSDGETWLLQRKTAALEFTTRTLRQAMARWANRIIKYRLWSILAEHCEAAASVDLQDLLLRLTFDNICGLTFGKDPETLSPGLQENPFANAFDSATEATLQRFLFPSFLWRVKKALGVGSERSLRESLAIVDQYMTEAIAARKANPSDDLLSRFMKKRDGSGRAFPEDVLQWVALNFVLAGRDTSSVALSWFFWMLMLRRDVERKVVLEIASVLRETRGDDSGRWTEEPLDFDELDRLVYLKAALAETLRLYPSVPQDSKYVVEDDVLPDGTVVPAGSAVTYSIYSVGRMESIWGKDCSEFRPERWLSADGTRFEPAKDAYRFVAFNGGPRTCLGKDLAYLQMKSIASAVLLRHSVELVPGHKVEQKMSLTLFMKNGLRVHVKPRDLAGYVVAPEEAPQLGAFVISTTTAAAA

SEQ ID NO: 17020 - protein, 547 aa, Zea mays subsp. mays
  misc_feature (1)..(547): Ceres Seq. ID no. 12355803
MAIVQDNGVLHLHPYAVAAAAAALISAYMVWFWALTRRLSGPRMWPLVGSLPSVVLNRARVHDWIVDNLRSKGEAATYQTCILPLPFLARRQGLVTVTCNPRNLEHILRARFDNYPKGPMWQAAFHDLLGQGIFNSDGETWLLQRKTAALEFTTRTLRQAMARWANRIIKYRLWSILAEHCEAAASVDLQDLLLRLTFDNICGLTFGKDPETLSPGLQENPFANAFDSATEATLQRFLFPSFLWRVKKALGVGSERSLRESLAIVDQYMTEAIAARKANPSDDLLSRFMKKRDGSGRAFPEDVLQWVALNFVLAGRDTSSVALSWFFWMLMLRRDVERKVVLEIASVLRETRGDDSGRWTEEPLDFDELDRLVYLKAALAETLRLYPSVPQDSKYVVEDDVLPDGTVVPAGSAVTYSIYSVGRMESIWGKDCSEFRPERWLSADGTRFEPAKDAYRFVAFNGGPRTCLGKDLAYLQMKSIASAVLLRHSVELVPGHKVEQKMSLTLFMKNGLRVHVKPRDLAGYVVAPEEAPQLGAFVISTTTAAAA

SEQ ID NO: 17021 - protein, 519 aa, Zea mays subsp. mays
  misc_feature (1)..(519): Ceres Seq. ID no. 12355804
MVWFWALTRRLSGPRMWPLVGSLPSVVLNRARVHDWIVDNLRSKGEAATYQTCILPLPFLARRQGLVTVTCNPRNLEHILRARFDNYPKGPMWQAAFHDLLGQGIFNSDGETWLLQRKTAALEFTTRTLRQAMARWANRIIKYRLWSILAEHCEAAASVDLQDLLLRLTFDNICGLTFGKDPETLSPGLQENPFANAFDSATEATLQRFLFPSFLWRVKKALGVGSERSLRESLAIVDQYMTEAIAARKANPSDDLLSRFMKKRDGSGRAFPEDVLQWVALNFVLAGRDTSSVALSWFFWMLMLRRDVERKVVLEIASVLRETRGDDSGRWTEEPLDFDELDRLVYLKAALAETLRLYPSVPQDSKYVVEDDVLPDGTVVPAGSAVTYSIYSVGRMESIWGKDCSEFRPERWLSADGTRFEPAKDAYRFVAFNGGPRTCLGKDLAYLQMKSIASAVLLRHSVELVPGHKVEQKMSLTLFMKNGLRVHVKPRDLAGYVVAPEEAPQLGAFVISTTTAAAA

SEQ ID NO: 17022 - DNA, 1913 bp, Zea mays subsp. mays
  misc_feature (1)..(1913): Ceres Seq. ID no. 12355817
actctcgctttcttctgtctcgcctcgccctcgcctttgttgatcttttcctttctcgcgttcccctcgccttcctcttcctcccccacacccaccggtcgccgcccccgtcgccccggcctcctcggtccagagacgagggggtccgcgccgttccgacgccacaccgcaaccgcatcacatcaccgcctgctcccaccgtccatccgccctccctcgatcgcgctccccggatcgctggtacctccgcgcgcggctccgacctcatcttcctccatcgactggcatcggcagcggcggcgtgttcccggccaaccttcgaaagggtaatcaatcgccagacttttgggagctgtgttgggggggaccggggggaagagccaagttactgcagaggctaacatttcggttgtcgagtgatggcgcaaggcatcaacttccctgacttcatcggcgccgtgggtggccatgatggtggcgtggactttggtgggaacttctgtgacatggccttctaccagaagctaggggagggcaccaacatgtcggtcgacagcctcaacagcatgcagaccagcatgcatggggggtccatcgccatgtctgtggacaacaacagtagcgttggctctaacagtgactcccgcactggcatgcttggtcatcctggtctcaaggggcctgccattgtgggaagctactcagttgggcacagcatcttccgccctggccgggtgtcccatgccttgagtgaggatgcgctggcacatgctctgatggacaataagttcccaactgagacactcaaggattatgaggagtggactattgatctggggaagctccacttgggaatgccctttgcacaaggtgcctttgggaagctctacaggggaacatacaatgggatggatgttgctattaagcttttggagcgacctgaggctgaccctgagaaagctcaactgttagagcagcagtttgtccaagaagttatgatgcttgcaacactgagtcacccgaatattgtcaagttcattggtgcgtgcaggaagccattggtttggtgtattgtgacggagtatgcgaagggtggatctctcaagaatttcttgagcaagaggcagaacaggtctgtcccgctgaagttggcagtcaagcaggcattagatgttgcacgtggcatggcctatgtccatggccttgggttcattcatagagatcttaagtcggacaacctcctgatttctggtgataagtccattaagattgctgactttggagtggctaggattgaagtcaagactgaggggatgacacctgaaactggaacataccgctggatggctcctgaaatgatccagcataggccatacaaccagaaagttgatgtctacagttttgccattgtcctgtgggagttagtgactgggaatgtcccctttgcaaacatgagcgcagtgcaagctgcatttgctgtggttaacaagggcgtgcgaccagccataccccacgactgcctccctgcccttgcggagatcatgaccatgtgctgggacacaaaccctgaagtccgtcccccattcgctgagattgtgaggatgctggagcaggtggaggtggaggttctgaccactgtccgtaaggctcgcttccgctgttgcatcgcccaaccgatgacgctggactgacggactgagtcgtccgcaatccaggaaaagaacctggagaggggtttaatcctatgtgtttataatcccaatagacttgtgcttcagaaacagaaggctgactcctcagtctgccttctgtctttgacatgttatcgtagagtacacctagctgtcgtcaccagtggttgtaatagaggtagctttatgcttgactaaatacccttccgttataacaagtgc

SEQ ID NO: 17023 - protein, 423 aa, Zea mays subsp. mays
  misc_feature (1)..(423): Ceres Seq. ID no. 12355818
MAQGINFPDFIGAVGGHDGGVDFGGNFCDMAFYQKLGEGTNMSVDSLNSMQTSMHGGSIAMSVDNNSSVGSNSDSRTGMLGHPGLKGPAIVGSYSVGHSIFRPGRVSHALSEDALAHALMDNKFPTETLKDYEEWTIDLGKLHLGMPFAQGAFGKLYRGTYNGMDVAIKLLERPEADPEKAQLLEQQFVQEVMMLATLSHPNIVKFIGACRKPLVWCIVTEYAKGGSLKNFLSKRQNRSVPLKLAVKQALDVARGMAYVHGLGFIHRDLKSDNLLISGDKSIKIADFGVARIEVKTEGMTPETGTYRWMAPEMIQHRPYNQKVDVYSFAIVLWELVTGNVPFANMSAVQAAFAVVNKGVRPAIPHDCLPALAEIMTMCWDTNPEVRPPFAEIVRMLEQVEVEVLTTVRKARFRCCIAQPMTLD

SEQ ID NO: 17024 - protein, 394 aa, Zea mays subsp. mays
  misc_feature (1)..(394): Ceres Seq. ID no. 12355819
MAFYQKLGEGTNMSVDSLNSMQTSMHGGSIAMSVDNNSSVGSNSDSRTGMLGHPGLKGPAIVGSYSVGHSIFRPGRVSHALSEDALAHALMDNKFPTETLKDYEEWTIDLGKLHLGMPFAQGAFGKLYRGTYNGMDVAIKLLERPEADPEKAQLLEQQFVQEVMMLATLSHPNIVKFIGACRKPLVWCIVTEYAKGGSLKNFLSKRQNRSVPLKLAVKQALDVARGMAYVHGLGFIHRDLKSDNLLISGDKSIKIADFGVARIEVKTEGMTPETGTYRWMAPEMIQHRPYNQKVDVYSFAIVLWELVTGNVPFANMSAVQAAFAVVNKGVRPAIPHDCLPALAEIMTMCWDTNPEVRPPFAEIVRMLEQVEVEVLTTVRKARFRCCIAQPMTLD

SEQ ID NO: 17025 - protein, 382 aa, Zea mays subsp. mays
  misc_feature (1)..(382): Ceres Seq. ID no. 12355820
MSVDSLNSMQTSMHGGSIAMSVDNNSSVGSNSDSRTGMLGHPGLKGPAIVGSYSVGHSIFRPGRVSHALSEDALAHALMDNKFPTETLKDYEEWTIDLGKLHLGMPFAQGAFGKLYRGTYNGMDVAIKLLERPEADPEKAQLLEQQFVQEVMMLATLSHPNIVKFIGACRKPLVWCIVTEYAKGGSLKNFLSKRQNRSVPLKLAVKQALDVARGMAYVHGLGFIHRDLKSDNLLISGDKSIKIADFGVARIEVKTEGMTPETGTYRWMAPEMIQHRPYNQKVDVYSFAIVLWELVTGNVPFANMSAVQAAFAVVNKGVRPAIPHDCLPALAEIMTMCWDTNPEVRPPFAEIVRMLEQVEVEVLTTVRKARFRCCIAQPMTLD

SEQ ID NO: 17026 - DNA, 1340 bp, Zea mays subsp. mays
  misc_feature (1)..(1340): Ceres Seq. ID no. 12355829
gcagctcagttactcactccggcctccagcttttcctttgcgccccagggccggaagagcccacacaccaccaccaccactagatagccagcgacgatcgagccgcgcgccggtggacgcgcacatacacgcggtagcttccttctcaagcctagctagccccatcctgcgcgcaggcgggcggcagcgagaattgacgtgcgacgacgagcttgtgcttgctagctagagagcgaggatgtcgagccggaggccgtcgtcgcgtggcaacatctccgaggacgagatcaacgagctcatctccaagctgcaggccctgctccccagctcccgccgccgcggctccggccaggtgcgtcgttgcgaacacacatgaccgctcaactaattaactcccgttcgcctgctgcgccctttttttccgttttaaaacgtctaatgcgcgcggcgcggaatgtaatgcaggcgtcgacgacgaagctgctcaaggagacctgcagctacatcaagagcctgcaccgggaggtggacgacctgagcgaccggctgtccgacctcatggccaccatggaccacaacagccccggcgcggagatcatccgcagcatcctccgctcctgatcgcccacgcgcctcctactgcggcggcgccggccggcgcgcgagagagcgaggtcggcgacgacctcgatcgccgacaacgacgaccgcgcgcgcccgcgccccccggcccatctgttctctccaccggctggccgccgggagccgagctcaattagctagggtatatctcaacctctctctctctctctctctcgctcgctctacatgtgtgtgtacctttctcttcctttcacctgcctgtctcctccctagatctgagatcatgtggctagctctcccatatcaaaatgtactagctacacgcgcacgtatggtggtggtctctgctaagcctaagcttcactgggtagtagggtactagtagcactaggggcttaagcaagctaagcttatcctcctcatcagaatcacattagctcgcaccgcactctctggcttctcgtcgatcgtcttcgtcgtcctcgctcctccgacccacatgatggctagctctccatgtgccgcttctcctctcgcacgtgccgcttctcctcttgtgttcgatatgttgtattgtttccatgtaaatttagtcggtggcctggatcgagttggctagctctctctacaggcaagagacaaccgaccgaccactactatcctagagcaaattgattatcgtcatgatggtgtactgttcaagcttttattaacgacttttaatttacttgctacgt

SEQ ID NO: 17027 - protein, 82 aa, Zea mays subsp. mays
  misc_feature (1)..(82): Ceres Seq. ID no. 12355830
MTAQLINSRSPAAPFFSVLKRLMRAARNVMQASTTKLLKETCSYIKSLHREVDDLSDRLSDLMATMDHNSPGAEIIRSILRS

SEQ ID NO: 17028 - protein, 75 aa, Zea mays subsp. mays
  misc_feature (1)..(75): Ceres Seq. ID no. 12355831
QLSYSLRPPAFPLRPRAGRAHTPPPPLDSQRRSSRAPVDAHIHAVASFSSLASPILRAGGRQRELTCDDELVLAS

SEQ ID NO: 17029 - protein, 60 aa, Zea mays subsp. mays
  misc_feature (1)..(60): Ceres Seq. ID no. 12355832
MRAARNVMQASTTKLLKETCSYIKSLHREVDDLSDRLSDLMATMDHNSPGAEIIRSILRS

SEQ ID NO: 17030 - DNA, 1449 bp, Zea mays subsp. mays
  misc_feature (1)..(1449): Ceres Seq. ID no. 12355833
gaacaatccgttggcggattgctgcacatccgctcgatctgatagagtggttgattcagacgtcctccgctgccagtctgcgttgtcataccgtggagtttgttcgtccaggatattgccttcggaggacgatagtcttgcaagggctcttcgctcgtgccactcgcagcctttctcattcgtagaggaaggagacaccggtgcatcagggatgataagcttagcagagtatctaggaactaatgtagctgaccacatccctgaaactcccaacaacctgtcagaggagatggtgagatgcatggcggggatatactgcagactcgcagatcctcccttggttcaccacggctcgtcctcttcaccgtcgtcgtcgttctcctcgactagcgcaatctctccgcagtatgtgggggacatgtggagtcccaaatacaggagagaggcgactctggactcccgtctgataaacccgttccatgtcgatggtctgaaggagttcagtggaccttacaacacaatggttgaggttcctatgattagccgggacagtcggaggctgaaagaagccgaggacctgctccagacttacaagttgattttgtatcggttggaagccgttgatctgaggagaatgacagatgaagaaaagatcgcattctgggtcaacatacacaatgctttgctgatgcatgcttatctgaagaatggcgtcccacagaacaatctaaagaaaacatccctacttgttaaggctgcctgcaaaatagccggacgcaacatcaacgccgccgtcatccagagcattgttcttgggtgcaacacacactgccccggacagtggctacggacgctgctttaccccaggatcaaaagcaaggtgagcaaagcggggcatgagtggcgggcctttgccgttgcgcaaccggagcctcttttacgctttgcgctttgttccggcagccattctgatcccgcggtgagggtgtacactccgaagcggctgttccaccagctggagtcggccaaggaggagttcatccgggcgacggccggcgtgtggaaggagcagaagctgctgctccccaagctggtggaggcgtacgccaaggacgtgaagctctcgccgcagggcctcgtggacatggtccagcgctacctcccggagagcatgaggatggccgtgcagcggtgccagcacggcggcaggtcgtcgggcaaggtcgtggagtgggtgtcctacaacccggccttccgctacctgctcgccagggacctcgcgttccctcacctcagctgaccgttcgttaatctttagtagtatatgcgtgtgtgccatagggttagaagtagagaagggatcatgtgcagtttttgtgtggtggttgtcaatggcttttgtagatgatgaacaggaaacaggggaagaaatgagagaaagcacgtttg

SEQ ID NO: 17031 - protein, 432 aa, Zea mays subsp. mays
  misc_feature (1)..(432): Ceres Seq. ID no. 12355834
NNPLADCCTSARSDRVVDSDVLRCQSALSYRGVCSSRILPSEDDSLARALRSCHSQPFSFVEEGDTGASGMISLAEYLGTNVADHIPETPNNLSEEMVRCMAGIYCRLADPPLVHHGSSSSPSSSFSSTSAISPQYVGDMWSPKYRREATLDSRLINPFHVDGLKEFSGPYNTMVEVPMISRDSRRLKEAEDLLQTYKLILYRLEAVDLRRMTDEEKIAFWVNIHNALLMHAYLKNGVPQNNLKKTSLLVKAACKIAGRNINAAVIQSIVLGCNTHCPGQWLRTLLYPRIKSKVSKAGHEWRAFAVAQPEPLLRFALCSGSHSDPAVRVYTPKRLFHQLESAKEEFIRATAGVWKEQKLLLPKLVEAYAKDVKLSPQGLVDMVQRYLPESMRMAVQRCQHGGRSSGKVVEWVSYNPAFRYLLARDLAFPHLS

SEQ ID NO: 17032 - protein, 362 aa, Zea mays subsp. mays
  misc_feature (1)..(362): Ceres Seq. ID no. 12355835
MISLAEYLGTNVADHIPETPNNLSEEMVRCMAGIYCRLADPPLVHHGSSSSPSSSFSSTSAISPQYVGDMWSPKYRREATLDSRLINPFHVDGLKEFSGPYNTMVEVPMISRDSRRLKEAEDLLQTYKLILYRLEAVDLRRMTDEEKIAFWVNIHNALLMHAYLKNGVPQNNLKKTSLLVKAACKIAGRNINAAVIQSIVLGCNTHCPGQWLRTLLYPRIKSKVSKAGHEWRAFAVAQPEPLLRFALCSGSHSDPAVRVYTPKRLFHQLESAKEEFIRATAGVWKEQKLLLPKLVEAYAKDVKLSPQGLVDMVQRYLPESMRMAVQRCQHGGRSSGKVVEWVSYNPAFRYLLARDLAFPHLS

SEQ ID NO: 17033 - protein, 336 aa, Zea mays subsp. mays
  misc_feature (1)..(336): Ceres Seq. ID no. 12355836
MVRCMAGIYCRLADPPLVHHGSSSSPSSSFSSTSAISPQYVGDMWSPKYRREATLDSRLINPFHVDGLKEFSGPYNTMVEVPMISRDSRRLKEAEDLLQTYKLILYRLEAVDLRRMTDEEKIAFWVNIHNALLMHAYLKNGVPQNNLKKTSLLVKAACKIAGRNINAAVIQSIVLGCNTHCPGQWLRTLLYPRIKSKVSKAGHEWRAFAVAQPEPLLRFALCSGSHSDPAVRVYTPKRLFHQLESAKEEFIRATAGVWKEQKLLLPKLVEAYAKDVKLSPQGLVDMVQRYLPESMRMAVQRCQHGGRSSGKVVEWVSYNPAFRYLLARDLAFPHLS

SEQ ID NO: 17034 - DNA, 1439 bp, Zea mays subsp. mays
  misc_feature (1)..(1439): Ceres Seq. ID no. 12355841
agttccacggttccacccccgccggccacactcgtctctctcacgagccacagcccacaggctagctctctagccagtccagtccacgcagcgcagggatggcgtcgttcgccgtggcaacggccccgtcgctagcggccccggcagccaagaggaggcccgccgccggcgtcacgtacgtggagtgcatgaaagcctacagcggcctcaaggggctcaacaaggtgaccatgctcggggtgcgcaagaccgccgactactccttcgccaaggtcgtggcatcgctcagcctcgcgggcaggaagcggcgcggaggagcgttcggcgcccagatgaggttttacgcttacacagtggtgacggttgcaccacgtgagcgagcgcagcgaagccaacacaactgccggcggacaagtgtccccatagacgagatccatggcggagcgccggaagagcgtctcctccgtgctgtttgcttcggcgcgcgccgggaggggataatggcagcagtgagctcggtctctattctgcccctcgcgtcgctgaggcctcttccgttgaggcgtgctgctaggaatgtgttggagggaggagggagaagggcttcgagtcccctgctcctcgcgaggtatgggctgtggcgcggacgcccggctgctgctgtgggcggcgaagcagagttggccctcgaagatgcggatgccgcgatgagggtggccgccgacgacgacagcatcacggccacggtggtgtccgtgctgctcacacttgcgttcgtcggcctctccatcctcaccctcggggtgatctacctgtcggtgcaggacttcttgcagaagagggaaaaggagaagtttgagaaggaggaggccgaaaagcagaaagaggaggcgaggaagaagagggctaagtcgaggcagaagagaagaaattattgatctcaggatgaactacccccaccaatatgctgtaacactgaactccattgccggctccattgcccggggttgtgctcacgccatcagttttggagtctcttggatgctgtaacactgaactccattgccggctccattgcccggggttgtgctcacgccatcagttttggagtccggaggagggaggaaaagcagggtagccagaatctctattggcgtcgcctgtttcattgtgttcatgatgatcctttcagtaataggcctttttaggaagtaaaggaaacgtttgtgctctggtttctgcaagaggtttgcacataaacaattttttattgctgtctaggctccaacctttggttgataaacactcacaataagtaacgaaggaataagaataaatgatgagagatataagaatatgaaaatgaataaatgatgtgacaggttgttgtagagcagcatgatctaagtgaatgcataactctactcttatattatatc

SEQ ID NO: 17035 - protein, 279 aa, Zea mays subsp. mays
  misc_feature (1)..(279): Ceres Seq. ID no. 12355842
MASFAVATAPSLAAPAAKRRPAAGVTYVECMKAYSGLKGLNKVTMLGVRKTADYSFAKVVASLSLAGRKRRGGAFGAQMRFYAYTVVTVAPRERAQRSQHNCRRTSVPIDEIHGGAPEERLLRAVCFGARREGIMAAVSSVSILPLASLRPLPLRRAARNVLEGGGRRASSPLLLARYGLWRGRPAAAVGGEAELALEDADAAMRVAADDDSITATVVSVLLTLAFVGLSILTLGVIYLSVQDFLQKREKEKFEKEEAEKQKEEARKKRAKSRQKRRNY

SEQ ID NO: 17036 - protein, 249 aa, Zea mays subsp. mays
  misc_feature (1)..(249): Ceres Seq. ID no. 12355843
MKAYSGLKGLNKVTMLGVRKTADYSFAKVVASLSLAGRKRRGGAFGAQMRFYAYTVVTVAPRERAQRSQHNCRRTSVPIDEIHGGAPEERLLRAVCFGARREGIMAAVSSVSILPLASLRPLPLRRAARNVLEGGGRRASSPLLLARYGLWRGRPAAAVGGEAELALEDADAAMRVAADDDSITATVVSVLLTLAFVGLSILTLGVIYLSVQDFLQKREKEKFEKEEAEKQKEEARKKRAKSRQKRRNY

SEQ ID NO: 17037 - protein, 235 aa, Zea mays subsp. mays
  misc_feature (1)..(235): Ceres Seq. ID no. 12355844
MLGVRKTADYSFAKVVASLSLAGRKRRGGAFGAQMRFYAYTVVTVAPRERAQRSQHNCRRTSVPIDEIHGGAPEERLLRAVCFGARREGIMAAVSSVSILPLASLRPLPLRRAARNVLEGGGRRASSPLLLARYGLWRGRPAAAVGGEAELALEDADAAMRVAADDDSITATVVSVLLTLAFVGLSILTLGVIYLSVQDFLQKREKEKFEKEEAEKQKEEARKKRAKSRQKRRNY

SEQ ID NO: 17038 - DNA, 1453 bp, Zea mays subsp. mays
  misc_feature (1)..(1453): Ceres Seq. ID no. 12355877
ctcttttccgccctccacccctcgcgagctctccacccctccacacgaccgccgcccatggtggccgcgccaccaccgccgccgcagtttgccaagcacttcgctgctgggccgcccccgccgccccaagctggtgctgggcgccgcacgccgaccccgccctcgtctggatccggcgggaacgggtgcgaagaaaataaaaccatttgggtcggtgacctccagtactggatggatgaaaactacctacataactgcttcgggcccagcggcgaggtggttacaataaaagttatccgcaataggcaaacaggacagtcagaggggtatggatttgttgagttcttttctcatgcatcagcagagaaagctcttcagaattttactggtcatgtgatgccaaacactgaccggccatttaaattgaactgggcatcgtatagcatgggtgaaaagcgatctgaagtggcttctgatcactcgatatttgttggcgatctagctgctgatgtcactgatgaaatgctgctggagcttttctccagcaagtaccgctcggtgaaaggagctaaagttattattgatgcaaacacaggccgttccaggggctatggatttgtcaggtttggagacgacaacgacaaatctcatgccatgtctgaaatgaatggtgtatattgctctacgaggccaattcgtataggacctgcgactcccagaagatcttcaggtgattctggctcctcgactcctggtcattcagatggtgattcttctaacagaacggtatatgttggtgggcttgaccccaatgtcagtgaagatgaactgagaaaagcctttgccaaatatgatcttgcctctgtgaaaattcctctaggaaagcaatgtggctttgttcaatttgttagcagaactgatgctgaagaagcactacaaggattaaatggatcactcattggaaagcaggcagttcgcctttcatgggtccgcagcccatcgcataagcagtctaggggtgactccgtcaacaggaggaacaacatgtactatggcacaccattctacggcggatatggctatgcctccccggtgccacacccaaacatgtacgctgcagcgtatggcacgtacccgctatatggcaaccagcagctagtgagctagagagctcccctccgacgtgtcccctctgacgggaaacaaaggttttggtccggtgagcatagtagcgtcaggtgagaaggtgcctttataaggctgtcctaagaagtgggcgagatatgttgttgcatcgttatcgttatggtgcctgtaactgttgtgtgtgccgtgtgcgtccggaagaattggatggaatggaactcgtggcttgttgtagtacatcagagagtcatgttattctttcaagaaattttgacttggtaataaattaaactattgtttgtgcgtc

SEQ ID NO: 17039 - protein, 388 aa, Zea mays subsp. mays
  misc_feature (1)..(388): Ceres Seq. ID no. 12355878
LFSALHPSRALHPSTRPPPMVAAPPPPPQFAKHFAAGPPPPPQAGAGRRTPTPPSSGSGGNGCEENKTIWVGDLQYWMDENYLHNCFGPSGEVVTIKVIRNRQTGQSEGYGFVEFFSHASAEKALQNFTGHVMPNTDRPFKLNWASYSMGEKRSEVASDHSIFVGDLAADVTDEMLLELFSSKYRSVKGAKVIIDANTGRSRGYGFVRFGDDNDKSHAMSEMNGVYCSTRPIRIGPATPRRSSGDSGSSTPGHSDGDSSNRTVYVGGLDPNVSEDELRKAFAKYDLASVKIPLGKQCGFVQFVSRTDAEEALQGLNGSLIGKQAVRLSWVRSPSHKQSRGDSVNRRNNMYYGTPFYGGYGYASPVPHPNMYAAAYGTYPLYGNQQLVS

SEQ ID NO: 17040 - protein, 369 aa, Zea mays subsp. mays
  misc_feature (1)..(369): Ceres Seq. ID no. 12355879
MVAAPPPPPQFAKHFAAGPPPPPQAGAGRRTPTPPSSGSGGNGCEENKTIWVGDLQYWMDENYLHNCFGPSGEVVTIKVIRNRQTGQSEGYGFVEFFSHASAEKALQNFTGHVMPNTDRPFKLNWASYSMGEKRSEVASDHSIFVGDLAADVTDEMLLELFSSKYRSVKGAKVIIDANTGRSRGYGFVRFGDDNDKSHAMSEMNGVYCSTRPIRIGPATPRRSSGDSGSSTPGHSDGDSSNRTVYVGGLDPNVSEDELRKAFAKYDLASVKIPLGKQCGFVQFVSRTDAEEALQGLNGSLIGKQAVRLSWVRSPSHKQSRGDSVNRRNNMYYGTPFYGGYGYASPVPHPNMYAAAYGTYPLYGNQQLVS

SEQ ID NO: 17041 - protein, 311 aa, Zea mays subsp. mays
  misc_feature (1)..(311): Ceres Seq. ID no. 12355880
MDENYLHNCFGPSGEVVTIKVIRNRQTGQSEGYGFVEFFSHASAEKALQNFTGHVMPNTDRPFKLNWASYSMGEKRSEVASDHSIFVGDLAADVTDEMLLELFSSKYRSVKGAKVIIDANTGRSRGYGFVRFGDDNDKSHAMSEMNGVYCSTRPIRIGPATPRRSSGDSGSSTPGHSDGDSSNRTVYVGGLDPNVSEDELRKAFAKYDLASVKIPLGKQCGFVQFVSRTDAEEALQGLNGSLIGKQAVRLSWVRSPSHKQSRGDSVNRRNNMYYGTPFYGGYGYASPVPHPNMYAAAYGTYPLYGNQQLVS

SEQ ID NO: 17042 - DNA, 1454 bp, Zea mays subsp. mays
  misc_feature (1)..(1454): Ceres Seq. ID no. 12355885
aaaaaattagaaaattctgcgttaattactccaggcttaaggttaagcacctcccaaacacgccctatgagggccctcgtccggatccacctgcccgcggccatctccaccggatccttcctccacacctcctcaaccgccgcctccaagaccctagtaccgaaccccaacctcgtcccgctccggctcgtccgccacttcccggccatggccgccaccgccgcagacgagttcgtgaagggccgcgtcttccccaacggcgtcgccgtcataacgctcgaccgacccaaggccctcaacgccatgaacctcgaaatggatgttagatacaaggcacttcttgatgaatgggaaacaaatccaagtgtcaagtgtattcttgtggaaagcagctcttctcgtgccttctcagcagggatggatattaagggggttgccgtggaaatacaaaaagacaaaaaaaacaccacttgtgcaaaaggtattcacagcagagtactctttaatttgtaagatacatgagtatgcaaaaccttatatatgcttgatggatggagtgacaatgggatttggaattgggctatcagggcatggccgctaccgcattattacagagagaacactcctagccatgcctgaaaatggtattggcctgttcccagacgttggctttgcttacattggtgcaaaagcaccaggagggggtgcagttggagtttaccttgggattactggaaaaaggatatcatcacctgctgatgctatgttcataggccttggtactcactatgtaccttctgcaaatttgggttcactcaaggagtccctgctgagtgctaacttcaccaatgatcctcatagagacgttgagtcagttctgacaggatacaagaaagaaccagagtctgaaccacaactaaaaaagcttttgccatatatcatttcttctttcagtcctgataaatcagtggctgaatctgtggaagagctaaagaaatgtagccgaagtggtgatgctgcagtggcagaatgggccattgaagctttagcaggaattgagaaaggcgctccattttctctttgtttaacacagaagcatttctctcaagttgcatcagcatatgggactagtgaacactatttatctaagctggctggtgttatgaaattggaatatcgcattgccttgaggtcgtcgattagaaacgattttgttgaaggtgtgcgtgctgttttagttgacaaggaccagaatccgaagtggaatccagccactctggaagaagtaaacatggccgaggtggaatcagttttcgagccattaggggccgaggctgagttgagtgtgtgaaatatggcctgccacactcagttttcttatttgtgctgcaataataatgtatacaaaacagaaatgcgatgcccacagaaacaataaatgctgtgtcttcatg

SEQ ID NO: 17043 - protein, 343 aa, Zea mays subsp. mays
  misc_feature (1)..(343): Ceres Seq. ID no. 12355886
MLDTRHFLMNGKQIQVSSVFLWKAALLVPSQQGWILRGLPWKYKKTKKTPLVQKVFTAEYSLICKIHEYAKPYICLMDGVTMGFGIGLSGHGRYRIITERTLLAMPENGIGLFPDVGFAYIGAKAPGGGAVGVYLGITGKRISSPADAMFIGLGTHYVPSANLGSLKESLLSANFTNDPHRDVESVLTGYKKEPESEPQLKKLLPYIISSFSPDKSVAESVEELKKCSRSGDAAVAEWAIEALAGIEKGAPFSLCLTQKHFSQVASAYGTSEHYLSKLAGVMKLEYRIALRSSIRNDFVEGVRAVLVDKDQNPKWNPATLEEVNMAEVESVFEPLGAEAELSV

SEQ ID NO: 17044 - protein, 335 aa, Zea mays subsp. mays
  misc_feature (1)..(335): Ceres Seq. ID no. 12355887
MNGKQIQVSSVFLWKAALLVPSQQGWILRGLPWKYKKTKKTPLVQKVFTAEYSLICKIHEYAKPYICLMDGVTMGFGIGLSGHGRYRIITERTLLAMPENGIGLFPDVGFAYIGAKAPGGGAVGVYLGITGKRISSPADAMFIGLGTHYVPSANLGSLKESLLSANFTNDPHRDVESVLTGYKKEPESEPQLKKLLPYIISSFSPDKSVAESVEELKKCSRSGDAAVAEWAIEALAGIEKGAPFSLCLTQKHFSQVASAYGTSEHYLSKLAGVMKLEYRIALRSSIRNDFVEGVRAVLVDKDQNPKWNPATLEEVNMAEVESVFEPLGAEAELSV

SEQ ID NO: 17045 - protein, 267 aa, Zea mays subsp. mays
  misc_feature (1)..(267): Ceres Seq. ID no. 12355888
MDGVTMGFGIGLSGHGRYRIITERTLLAMPENGIGLFPDVGFAYIGAKAPGGGAVGVYLGITGKRISSPADAMFIGLGTHYVPSANLGSLKESLLSANFTNDPHRDVESVLTGYKKEPESEPQLKKLLPYIISSFSPDKSVAESVEELKKCSRSGDAAVAEWAIEALAGIEKGAPFSLCLTQKHFSQVASAYGTSEHYLSKLAGVMKLEYRIALRSSIRNDFVEGVRAVLVDKDQNPKWNPATLEEVNMAEVESVFEPLGAEAELSV

SEQ ID NO: 17046 - DNA, 1429 bp, Zea mays subsp. mays
  misc_feature (1)..(1429): Ceres Seq. ID no. 12355893
gttttcattgctcacactgctgtctccgttccatcccctacgagatctgccccctcgccctcgccctgctccaatccccatctccttgcggcccgatccaccctgctccaatcccccggcgatggtcgtgtgcaaatgccgaaaggcgacgagggtttactgcttcgtccatcaggtccccgtctgtggcgtgtgcatatgcttcccggaacatcagctatgtgtggtgaagaactatgctgaatgggttgttaattctgagtatgactggccacaacactgttcgtcttgcaattctgttctcgaaggtggaactgaagaaacaacacgattgggttgcttgcatgtggtacacaccaaatgcttgatatcacatatccaaagttttcctacccaaacagcaccagatggatacgtctgcccctcctgttctgcacccatatggccaccttctagcattaaagatacaggttcgcgccttcacactgaactgaaagaagcgatagtccagactggaatggagaaaaatgtatttggaaatcattatgtgacaatagctaaagctgatactcagacacctcctgcttttgcatcagatcctctcaaaactttatccaatcgtgatgatagagaatttaatagtgcaaatgcagctaaagatgctgctttgccatcaacattacattctgggatgtactcttctgctgtaggatctgagacaactattcatgttgatccagaaattgttgaaatagagggttctagtcctgtatcgacccaattttcagtgcaggactccaacttcatcaggagtccaagcccacatgggcctggtgctatgacaagaaaaggcgctaatactgttgatagacaaaattctgagatttcttattatgctgatgatgaagatggaaataggaaaaagtatactaaaaggggtacatttcgtcacaaatttctaaggatgctgctgccgttctggtccagtgcactgccaacgctaccagtcacagcaccatcaaaaaaagagagtgatgctctagaggggagtcgatcacgccatcagagatcatcaagaatggatcccactaagatcttacttgcaatggctatggcatgtatagcaactatgggaatactctattaccggttgtcacagcgaggtctttctgaaaccttcctagaggacgagactcattaatcttgccttcctgtattgcgttgttgctgattcaaaggattttaccctctgtattttttttcgtttaccctttgtgggcctttttggtggtttgaaggtggggtagtggttagtagactctttctatattccgattcatgctcatgtttatgtgactactataatggtatatacaatattgtattatctacagctgagatcatagaaaatttaacccatggacagttc

SEQ ID NO: 17047 - protein, 399 aa, Zea mays subsp. mays
  misc_feature (1)..(399): Ceres Seq. ID no. 12355894
FSLLTLLSPFHPLRDLPPRPRPAPIPISLRPDPPCSNPPAMVVCKCRKATRVYCFVHQVPVCGVCICFPEHQLCVVKNYAEWVVNSEYDWPQHCSSCNSVLEGGTEETTRLGCLHVVHTKCLISHIQSFPTQTAPDGYVCPSCSAPIWPPSSIKDTGSRLHTELKEAIVQTGMEKNVFGNHYVTIAKADTQTPPAFASDPLKTLSNRDDREFNSANAAKDAALPSTLHSGMYSSAVGSETTIHVDPEIVEIEGSSPVSTQFSVQDSNFIRSPSPHGPGAMTRKGANTVDRQNSEISYYADDEDGNRKKYTKRGTFRHKFLRMLLPFWSSALPTLPVTAPSKKESDALEGSRSRHQRSSRMDPTKILLAMAMACIATMGILYYRLSQRGLSETFLEDETH

SEQ ID NO: 17048 - protein, 359 aa, Zea mays subsp. mays
  misc_feature (1)..(359): Ceres Seq. ID no. 12355895
MVVCKCRKATRVYCFVHQVPVCGVCICFPEHQLCVVKNYAEWVVNSEYDWPQHCSSCNSVLEGGTEETTRLGCLHVVHTKCLISHIQSFPTQTAPDGYVCPSCSAPIWPPSSIKDTGSRLHTELKEAIVQTGMEKNVFGNHYVTIAKADTQTPPAFASDPLKTLSNRDDREFNSANAAKDAALPSTLHSGMYSSAVGSETTIHVDPEIVEIEGSSPVSTQFSVQDSNFIRSPSPHGPGAMTRKGANTVDRQNSEISYYADDEDGNRKKYTKRGTFRHKFLRMLLPFWSSALPTLPVTAPSKKESDALEGSRSRHQRSSRMDPTKILLAMAMACIATMGILYYRLSQRGLSETFLEDETH

SEQ ID NO: 17049 - protein, 227 aa, Zea mays subsp. mays
  misc_feature (1)..(227): Ceres Seq. ID no. 12355896
MEKNVFGNHYVTIAKADTQTPPAFASDPLKTLSNRDDREFNSANAAKDAALPSTLHSGMYSSAVGSETTIHVDPEIVEIEGSSPVSTQFSVQDSNFIRSPSPHGPGAMTRKGANTVDRQNSEISYYADDEDGNRKKYTKRGTFRHKFLRMLLPFWSSALPTLPVTAPSKKESDALEGSRSRHQRSSRMDPTKILLAMAMACIATMGILYYRLSQRGLSETFLEDETH

SEQ ID NO: 17050 - DNA, 1377 bp, Zea mays subsp. mays
  misc_feature (1)..(1377): Ceres Seq. ID no. 12355901
aaaaccgcaaatatcttcttaccccaacgccggcacgccgcccaaaaacccttgcggcgtcgcactcacactagcgaccaacccccaaccccagaccttcctctccggcggcggccggcgcgcgcgcgcgagggagatggaccgcccttccggcacatcgtaccagcgctttccccgcgttcggatccgcgagctcaaggacgactacgccaagttcgaactccgcgacaccgacgctagcatggccaacgccctccgccgcgtcatgatcgccgaagtcccaactgtcgccatcgatctcgtagagatcgaggttaactcctccgtcctcaacgacgagttcatcgcccaccgtctggggctcatcccgctcacctccgccgccgccatgcaaatgcgcttctctcgggactgcgacgcttgcgacggcgacggctcctgcgagtactgctccgtcgagtttcacctctccgtgcacgccaccgactctgaccagacgctcgaggtcacatccaacgacctgagatccatggaccccaaggtctgcccagtcgaccaagcacgcgcctaccagcacgcgctcggaggcaccgacccctttggagccaatgcctcgaacgaaaacaggggcatacttattgtaaagctgcgtcggggacaagaactaaggcttcgtgccatagctaggaaaggaattggcaaggaccatgccaaatggtcaccagctgctaccgtgactttcatgtatgagcctgacatacgtatcaatgaagaactaatggaaacattgacggtggaagagagaataagcttgattgaaagcagccctacaaaagtatttgagcttgattctgccaatcaggtggtggtgaaaaacgcggaggcatacacctacgacgacgaggtgatcaagcacgccgaggccatcgggaagccaggcttggtggagatcaccgccaaggaggacagcttcgtcttcaccgtagaaacaaccggtgccatcacagcctacgagctgatcatgaacgcgatcacggtgctgaggcagaagctggatgccgtccgccttcaggacgacgacggcgaccttggcgagctcggcgcccaccttggtgggccttaggagctttgagcaagaaggaatcgccctgtggcctccctccctcccactgcctacgtaggcctatctaactgccgtgcgtgctagtcgatcgatcgaaaccgaacggttctgataaaccttatggtgtctaaagctccagatttatggattgccaaacacccagcaccgaattccagtttaatttccttgcccgccttgttttcgtgcgggtgacatctgcgccgtgaatttgcatgcttgtgcgtcttgttatt

SEQ ID NO: 17051 - protein, 373 aa, Zea mays subsp. mays
  misc_feature (1)..(373): Ceres Seq. ID no. 12355902
KPQISSYPNAGTPPKNPCGVALTLATNPQPQTFLSGGGRRARAREMDRPSGTSYQRFPRVRIRELKDDYAKFELRDTDASMANALRRVMIAEVPTVAIDLVEIEVNSSVLNDEFIAHRLGLIPLTSAAAMQMRFSRDCDACDGDGSCEYCSVEFHLSVHATDSDQTLEVTSNDLRSMDPKVCPVDQARAYQHALGGTDPFGANASNENRGILIVKLRRGQELRLRAIARKGIGKDHAKWSPAATVTFMYEPDIRINEELMETLTVEERISLIESSPTKVFELDSANQVVVKNAEAYTYDDEVIKHAEAIGKPGLVEITAKEDSFVFTVETTGAITAYELIMNAITVLRQKLDAVRLQDDDGDLGELGAHLGGP

SEQ ID NO: 17052 - protein, 328 aa, Zea mays subsp. mays
  misc_feature (1)..(328): Ceres Seq. ID no. 12355903
MDRPSGTSYQRFPRVRIRELKDDYAKFELRDTDASMANALRRVMIAEVPTVAIDLVEIEVNSSVLNDEFIAHRLGLIPLTSAAAMQMRFSRDCDACDGDGSCEYCSVEFHLSVHATDSDQTLEVTSNDLRSMDPKVCPVDQARAYQHALGGTDPFGANASNENRGILIVKLRRGQELRLRAIARKGIGKDHAKWSPAATVTFMYEPDIRINEELMETLTVEERISLIESSPTKVFELDSANQVVVKNAEAYTYDDEVIKHAEAIGKPGLVEITAKEDSFVFTVETTGAITAYELIMNAITVLRQKLDAVRLQDDDGDLGELGAHLGGP

SEQ ID NO: 17053 - protein, 293 aa, Zea mays subsp. mays
  misc_feature (1)..(293): Ceres Seq. ID no. 12355904
MANALRRVMIAEVPTVAIDLVEIEVNSSVLNDEFIAHRLGLIPLTSAAAMQMRFSRDCDACDGDGSCEYCSVEFHLSVHATDSDQTLEVTSNDLRSMDPKVCPVDQARAYQHALGGTDPFGANASNENRGILIVKLRRGQELRLRAIARKGIGKDHAKWSPAATVTFMYEPDIRINEELMETLTVEERISLIESSPTKVFELDSANQVVVKNAEAYTYDDEVIKHAEAIGKPGLVEITAKEDSFVFTVETTGAITAYELIMNAITVLRQKLDAVRLQDDDGDLGELGAHLGGP

SEQ ID NO: 17054 - DNA, 1020 bp, Zea mays subsp. mays
  misc_feature (1)..(1020): Ceres Seq. ID no. 12355909
cccgcactctctctcaactcattggcagcagcaaccgcagccgcgagggccaagcaggggggacaaggaaaagggccgacgaagaggaaaaaggaagaacgcgtcgcggagccatggggcttggccttggcgtgcgggcggcgcccttcacgtacgcggcgcacgcactggccgtcgcggcggcggccatggttctcgtctggtccatccagttccgcggcgggctcgccatcgagtccaccaacaagaacctcatcttcaacgttcaccctgttcttatgcttatcggttatgttattatcggcggtgaagctataatggtgtacagggtacttccaacatcgaatcatgacacaactaagctgatccatctaattctccacgggattgcacttgtccttggtgcggttggaatatactttgctttcaaaaatcacaatgagagtgggattgccaatctttacagcctgcactcttggattgggataggaacaattactttgtatggtattcagtggataattggattcgtcacgttcttcttccctggtgctgcgccaaacgtgaagaagggtgttcttccttggcacgtactctttgggctctttgtctacatcttagcactggctaatgcagaactcggctttcttgagaagctcactttcctcgagagctcaggtctcgacaaatatggcacagaggcattcttagtgaacttcacagcattggttgtcgtgttatttggtgcctctgttgtggtggctgctatagctccagttcgccttgaagaaccacagggttatgatccaattccagaaaactagtgcaaatgaaatgtacagcgtatgcagttgccaagattggctgttaccacatggagataagatattcatgtctctttattgacggagaagaaggtgatggaattatcacaataaagatgtagacataaatgtgtgtgtatatacattctgtgacacttcaaaatttcagtatatgcaaaactgaatatcctgcttc

SEQ ID NO: 17055 - protein, 273 aa, Zea mays subsp. mays
  misc_feature (1)..(273): Ceres Seq. ID no. 12355910
RTLSQLIGSSNRSREGQAGGTRKRADEEEKGRTRRGAMGLGLGVRAAPFTYAAHALAVAAAAMVLVWSIQFRGGLAIESTNKNLIFNVHPVLMLIGYVIIGGEAIMVYRVLPTSNHDTTKLIHLILHGIALVLGAVGIYFAFKNHNESGIANLYSLHSWIGIGTITLYGIQWIIGFVTFFFPGAAPNVKKGVLPWHVLFGLFVYILALANAELGFLEKLTFLESSGLDKYGTEAFLVNFTALVVVLFGASVVVAAIAPVRLEEPQGYDPIPEN

SEQ ID NO: 17056 - protein, 236 aa, Zea mays subsp. mays
  misc_feature (1)..(236): Ceres Seq. ID no. 12355911
MGLGLGVRAAPFTYAAHALAVAAAAMVLVWSIQFRGGLAIESTNKNLIFNVHPVLMLIGYVIIGGEAIMVYRVLPTSNHDTTKLIHLILHGIALVLGAVGIYFAFKNHNESGIANLYSLHSWIGIGTITLYGIQWIIGFVTFFFPGAAPNVKKGVLPWHVLFGLFVYILALANAELGFLEKLTFLESSGLDKYGTEAFLVNFTALVVVLFGASVVVAAIAPVRLEEPQGYDPIPEN

SEQ ID NO: 17057 - protein, 211 aa, Zea mays subsp. mays
  misc_feature (1)..(211): Ceres Seq. ID no. 12355912
MVLVWSIQFRGGLAIESTNKNLIFNVHPVLMLIGYVIIGGEAIMVYRVLPTSNHDTTKLIHLILHGIALVLGAVGIYFAFKNHNESGIANLYSLHSWIGIGTITLYGIQWIIGFVTFFFPGAAPNVKKGVLPWHVLFGLFVYILALANAELGFLEKLTFLESSGLDKYGTEAFLVNFTALVVVLFGASVVVAAIAPVRLEEPQGYDPIPEN

SEQ ID NO: 17058 - DNA, 1445 bp, Zea mays subsp. mays
  misc_feature (1)..(1445): Ceres Seq. ID no. 12355917
accttcttcccagatcaataggggcgaggcgacaccagcgaggagacgaaatcgtttaaaggcgccagcttgtcttctgttccatttgtggtttcatttcctctgcaaacgatttccattttttctgcacgccgtcagctgatccttttcgccgtagtatccccgagcaaaagagaaaacccttttttttgtgcgctgtgctgtttcgccatctctgttcgtcccaccgaggcaccgactcaatccccattcttggcatctggcttcacaaaacaagaccggttcccgttccctagatctctgcgtagaggcggcggcgaggcacctgaatccggcaaaaaagggttcgcggtttggttgggaggagcgcaggagcccggcgccaaaacccaatcttggcgcccgggctgccgtgcgccatcgtcttctccctgtggtgtttagggagaggagaaggccggtggagatggtgccgtgggaagggtacgtcagcgacgagacgatgggcaccttctcgcccatcgtgctctactggctgtacgccggcggctaccagctgatccttcaccgccggccgcttgagcggtacaggctccacacgcgggacgaggaggaggagaagaacctcgtcagcctctccaccgtcgtccgtggcgtactcctgcagcagctcgtgcaggccatcgtcgcgatgattttgttcatggtgacttctgatagctcaataactgttgttcagccacctatcgtcgtccagatcttccagtttctagttgcaatgttagtgatggactcatggcagtactttgtgcaccgctacatgcaccaaaacaagttcctgtatcggcacatccactcgcagcaccatcggctgattgtcccttacgctatcggggctctgtacaaccacccactggagggcctgcttctggacaccttaggaggcgccatctccttcttggtctccggcatgacgccgaggaccgccgtgttcttcttctgcttcgcagtcctcaagacggtcgacgatcactgcgggctttggctaccgtataacatcttccagcacctgttccagaacaacaccgcctatcacgacatccaccaccagctgcaaggaaccaaatacaactactcccagccattcttctcgatctgggacagaatgctaggaacccacatgccgtacgacttagtgagcaggaaagaaggtggatttgaagcaaggccgtcgcgagactagcttgaagtcatggaagtgtacaggctccggtgaatgagtcagacagaatatggttttttagctgtcatggactcatggttcattttttaaaaaaaaattgtgcagggctgccatttacattgctgtgcagatagtgcatttgaaaatccacacttctgtatgtacccagttatttgtgtaattgattgaacctctcgtcgtg

SEQ ID NO: 17059 - protein, 258 aa, Zea mays subsp. mays
  misc_feature (1)..(258): Ceres Seq. ID no. 12355918
MVPWEGYVSDETMGTFSPIVLYWLYAGGYQLILHRRPLERYRLHTRDEEEEKNLVSLSTVVRGVLLQQLVQAIVAMILFMVTSDSSITVVQPPIVVQIFQFLVAMLVMDSWQYFVHRYMHQNKFLYRHIHSQHHRLIVPYAIGALYNHPLEGLLLDTLGGAISFLVSGMTPRTAVFFFCFAVLKTVDDHCGLWLPYNIFQHLFQNNTAYHDIHHQLQGTKYNYSQPFFSIWDRMLGTHMPYDLVSRKEGGFEARPSRD

SEQ ID NO: 17060 - protein, 246 aa, Zea mays subsp. mays
  misc_feature (1)..(246): Ceres Seq. ID no. 12355919
MGTFSPIVLYWLYAGGYQLILHRRPLERYRLHTRDEEEEKNLVSLSTVVRGVLLQQLVQAIVAMILFMVTSDSSITVVQPPIVVQIFQFLVAMLVMDSWQYFVHRYMHQNKFLYRHIHSQHHRLIVPYAIGALYNHPLEGLLLDTLGGAISFLVSGMTPRTAVFFFCFAVLKTVDDHCGLWLPYNIFQHLFQNNTAYHDIHHQLQGTKYNYSQPFFSIWDRMLGTHMPYDLVSRKEGGFEARPSRD

SEQ ID NO: 17061 - protein, 183 aa, Zea mays subsp. mays
  misc_feature (1)..(183): Ceres Seq. ID no. 12355920
MILFMVTSDSSITVVQPPIVVQIFQFLVAMLVMDSWQYFVHRYMHQNKFLYRHIHSQHHRLIVPYAIGALYNHPLEGLLLDTLGGAISFLVSGMTPRTAVFFFCFAVLKTVDDHCGLWLPYNIFQHLFQNNTAYHDIHHQLQGTKYNYSQPFFSIWDRMLGTHMPYDLVSRKEGGFEARPSRD

SEQ ID NO: 17062 - DNA, 1952 bp, Zea mays subsp. mays
  misc_feature (1)..(1952): Ceres Seq. ID no. 12355921
tggcctttccgatgtacccaactgcctttccattaaggctaaagcgtccgtgggcttcagggctacctatgttcaatggtgggaggagtgatgagttcgctcgttattcttctctcatgtggctccgagatggaaacagaggggctcaatcactgaacttccagggacttggagcatcatcatggcttcaaccaagaatagattatccattattaggtctgaagccagatacttaccagcagatggctgctgctgcactggaagaaattagagctggggatcatttgaagcagatatcttctctcctgccagtgcaacagcctcaaaatttgagtggtggattagatcctttatatggaaatcctgttctgcagcagatgcagttccaatctcagcagtcatccttgcaagttgtgcagcaaggttatggtccaaatgcaagcgactctgggttccttcaaaatcagctgcagctgcaaaagcagcagcagcagcaagctctgcaacaacaatcgcatcaggaaatgcaacatcacctctcagctagctgtcatgatattgctaatgtagcttctggtgtgtctgagtctggatctgcttctcaaacacaatcttctttgctttctgggtcatcataccaacagatctatgatggaaacagtggtccaggtctgcatgtgcacaacggtttccacaactgttcaagccaagagtcctccaaccttcttaatctctcaagaagtggacaattcatggcatcagagggatggcctttgaagaggttggctgtggaatctctttctggtcatgagctccaacctatgcagcacaagtttgagaaagtgaatcaccaaagtaatgtgtctcacatttctagcaccttgcccccactgtcagcaagagacagttatagtgcccaggctagtggtacaaatgatcagagtcacctgctttcatcatcatttgcaatccatgatggcttgacagccgtcaggagtggtggtgttggcagtggaactgatgcgataaccatagcttcgttgagatataatgatatgaatttgctacctgaaaaccccatcgcaacttccagttgtttgggcgaatcaggaaccttcaattctctcgacgatgtgtgtggtgtaaacccatcacaaggtggaacctttgtgaaggtttacaaatcagggtcccctgggagatcgctcgacatcaccaggttcagcagctactacgagttacgtagcgagctcgagcggttatttggtcttgaaggccaactggaggaccctgtaagatcaggctggcagcttgtattcgttgaccgggaaaacgatattcttctcgtcggcgatgacccgtggcaggagtttgtgaatagtgtatggtgcataaagatcctctcgccgcaagacgtgcagcagatggtccgcagcggaggcgaccttctgtctacaactggagcgaggacgctgcagggcagtgtctgcgatgattattctgcaggccacgacatgcagaacctcaccggcagcatcgcacctgtggtgcctctggactactgagaccgagatgaagaccggaaactgaagttctgaaccaaaaccggcaattcagcactgcaggattgccgtccacgagtcttttcggttcctatgatcttctctcaagtcgtgttggtcagaaataacctagtcgttaatatagctagatccattgtatcattatggtaatggacatgttgtacgatagctgttgtagctatgtgtagtcatagcctaagctctaaatggcaggcaagaattgctctatgaaagtatggatgcaggcactcactgtagaggtgacctagccctgtagttctctatatcttctcatatctaaaagctgacggttccatgtggcgcctaaactattgaaccctgtcacctttgtcataattttttcacctc

SEQ ID NO: 17063 - protein, 520 aa, Zea mays subsp. mays
  misc_feature (1)..(520): Ceres Seq. ID no. 12355922
AFPMYPTAFPLRLKRPWASGLPMFNGGRSDEFARYSSLMWLRDGNRGAQSLNFQGLGASSWLQPRIDYPLLGLKPDTYQQMAAAALEEIRAGDHLKQISSLLPVQQPQNLSGGLDPLYGNPVLQQMQFQSQQSSLQVVQQGYGPNASDSGFLQNQLQLQKQQQQQALQQQSHQEMQHHLSASCHDIANVASGVSESGSASQTQSSLLSGSSYQQIYDGNSGPGLHVHNGFHNCSSQESSNLLNLSRSGQFMASEGWPLKRLAVESLSGHELQPMQHKFEKVNHQSNVSHISSTLPPLSARDSYSAQASGTNDQSHLLSSSFAIHDGLTAVRSGGVGSGTDAITIASLRYNDMNLLPENPIATSSCLGESGTFNSLDDVCGVNPSQGGTFVKVYKSGSPGRSLDITRFSSYYELRSELERLFGLEGQLEDPVRSGWQLVFVDRENDILLVGDDPWQEFVNSVWCIKILSPQDVQQMVRSGGDLLSTTGARTLQGSVCDDYSAGHDMQNLTGSIAPVVPLDY

SEQ ID NO: 17064 - protein, 517 aa, Zea mays subsp. mays
  misc_feature (1)..(517): Ceres Seq. ID no. 12355923
MYPTAFPLRLKRPWASGLPMFNGGRSDEFARYSSLMWLRDGNRGAQSLNFQGLGASSWLQPRIDYPLLGLKPDTYQQMAAAALEEIRAGDHLKQISSLLPVQQPQNLSGGLDPLYGNPVLQQMQFQSQQSSLQVVQQGYGPNASDSGFLQNQLQLQKQQQQQALQQQSHQEMQHHLSASCHDIANVASGVSESGSASQTQSSLLSGSSYQQIYDGNSGPGLHVHNGFHNCSSQESSNLLNLSRSGQFMASEGWPLKRLAVESLSGHELQPMQHKFEKVNHQSNVSHISSTLPPLSARDSYSAQASGTNDQSHLLSSSFAIHDGLTAVRSGGVGSGTDAITIASLRYNDMNLLPENPIATSSCLGESGTFNSLDDVCGVNPSQGGTFVKVYKSGSPGRSLDITRFSSYYELRSELERLFGLEGQLEDPVRSGWQLVFVDRENDILLVGDDPWQEFVNSVWCIKILSPQDVQQMVRSGGDLLSTTGARTLQGSVCDDYSAGHDMQNLTGSIAPVVPLDY

SEQ ID NO: 17065 - protein, 498 aa, Zea mays subsp. mays
  misc_feature (1)..(498): Ceres Seq. ID no. 12355924
MFNGGRSDEFARYSSLMWLRDGNRGAQSLNFQGLGASSWLQPRIDYPLLGLKPDTYQQMAAAALEEIRAGDHLKQISSLLPVQQPQNLSGGLDPLYGNPVLQQMQFQSQQSSLQVVQQGYGPNASDSGFLQNQLQLQKQQQQQALQQQSHQEMQHHLSASCHDIANVASGVSESGSASQTQSSLLSGSSYQQIYDGNSGPGLHVHNGFHNCSSQESSNLLNLSRSGQFMASEGWPLKRLAVESLSGHELQPMQHKFEKVNHQSNVSHISSTLPPLSARDSYSAQASGTNDQSHLLSSSFAIHDGLTAVRSGGVGSGTDAITIASLRYNDMNLLPENPIATSSCLGESGTFNSLDDVCGVNPSQGGTFVKVYKSGSPGRSLDITRFSSYYELRSELERLFGLEGQLEDPVRSGWQLVFVDRENDILLVGDDPWQEFVNSVWCIKILSPQDVQQMVRSGGDLLSTTGARTLQGSVCDDYSAGHDMQNLTGSIAPVVPLDY

SEQ ID NO: 17066 - DNA, 1980 bp, Zea mays subsp. mays
  misc_feature (1)..(1980): Ceres Seq. ID no. 12355925
aagaacagcgccatttcttaatcgcagagcctaaacccggtcctcctaattatatcgccacagtgctgtcacaaccaggcgcgatcacaaagcttaaaacgcactggcatggccactactgtactggatgccggtgaactgcacttgcacccctatgccgtcgccgccgcggcggcggcattggtgtcgatgtacatggtgtggttctgggcgctgacacgggggctgtccgggccgcggatgtggcccctcgtcggcagcctgcccagcgtcgtcctgaaccgggcgcgggttcacgactggatcgtcgacaacctgcgctccacgggggaagcggccacgtaccagacgtgcatcttgccgatgccgttcctcgcgcggcgccaggggctggtgaccgtgacgtgcaacccgcggaacctggagcacatcctgcgcgtgcgtttcgacaactaccccaagggccccatgtggcaggcggcgttccacgacctcctgggccagggcatcttcaactccgacggcgagacgtggctgctccagcgcaagacggcggcgctcgagttcaccacgcggaccttgcgccaggcgatggcgcgctgggccaaccgcatcatcaagtaccgcctgtggagcatcctcgcggaccgctgcgaggccgccgcgagcgtcgacctccaggacctgctcctgcgcctcaccttcgacaacatctgcggcctcacgttcggcaaggaccccgagacactgtcgccggggctgcaggagaaccccttcgccaacgccttcgactccgccaccgaggcgacgctgcagaggttcctgttccccagcttcctgtggcgcgtcaagaaggcgctcggcgtcggcagcgagcggagcctccgcgagagcctcgcgaccgtggaccagtacatgacggaggccatcgcggcgcgcaaggcgacgccgtcggacgacctgctctccaggttcatgaagaagcgcgacggcagcggcagggcgttcccagaggacgtgctccagtgggtcgcgctcaacttcgtgctcgccgggcgcgacacgtcgtccgtcgcgctcagctggttcttctggatgctcatgctgcggcgcgacgtcgagcgcaaggtggtcctggagatcgtctccgtggtcagggagacgcggggcgacgaccgcaggaggtggaccgaggagccgctggacttcgacgagctggaccgcctcgtgtacctcaaggcagcgttggcggagacgctgcggctgtacccgtcggtgccgcaggactccaagtacgtggtggaggacgacgtgctgcccgatggcaccgtggtgccggccggctcagcggtcacctactccatctactcggttggacggatggagagcatctgggggaaggactgcgctgagttccggcccgagcggtggctctcggctgacggcacccgtttcgagccgcccaaggacgcgtaccgcttcgtggcgttcaacggcgggccccggacgtgcctgggcaaggacctggcgtacctgcagatgaagtccatcgcgtccgctgtgctgctgcgccactcggtcgagctcgtccctgggcacaaggtggagcagaagatgtcgctcactctgttcatgaagagcggcctccgcgtgcacgtcaagccgcgggacctcgccggctacgtcgcggcaccggaggacgcaccgcagctgggagcctttgtgatcccgaccacaactgcagcagctgcataagccttgcatatgcccgcgcacattggctcgggcttcttcctgctgaacttttttctgctatgtgatgtgcctctgcatgccaaagtcgtatcgttttctctgcacccccttcattagactgttaggtttgtggctacctggcgttttatggttgtaactgtgtatttttgtgtggatggatgtggtggtggatttaggataaaggatgaatgatacaaaattatt

SEQ ID NO: 17067 - protein, 548 aa, Zea mays subsp. mays
  misc_feature (1)..(548): Ceres Seq. ID no. 12355926
MATTVLDAGELHLHPYAVAAAAAALVSMYMVWFWALTRGLSGPRMWPLVGSLPSVVLNRARVHDWIVDNLRSTGEAATYQTCILPMPFLARRQGLVTVTCNPRNLEHILRVRFDNYPKGPMWQAAFHDLLGQGIFNSDGETWLLQRKTAALEFTTRTLRQAMARWANRIIKYRLWSILADRCEAAASVDLQDLLLRLTFDNICGLTFGKDPETLSPGLQENPFANAFDSATEATLQRFLFPSFLWRVKKALGVGSERSLRESLATVDQYMTEAIAARKATPSDDLLSRFMKKRDGSGRAFPEDVLQWVALNFVLAGRDTSSVALSWFFWMLMLRRDVERKVVLEIVSVVRETRGDDRRRWTEEPLDFDELDRLVYLKAALAETLRLYPSVPQDSKYVVEDDVLPDGTVVPAGSAVTYSIYSVGRMESIWGKDCAEFRPERWLSADGTRFEPPKDAYRFVAFNGGPRTCLGKDLAYLQMKSIASAVLLRHSVELVPGHKVEQKMSLTLFMKSGLRVHVKPRDLAGYVAAPEDAPQLGAFVIPTTTAAAA

SEQ ID NO: 17068 - protein, 521 aa, Zea mays subsp. mays
  misc_feature (1)..(521): Ceres Seq. ID no. 12355927
MYMVWFWALTRGLSGPRMWPLVGSLPSVVLNRARVHDWIVDNLRSTGEAATYQTCILPMPFLARRQGLVTVTCNPRNLEHILRVRFDNYPKGPMWQAAFHDLLGQGIFNSDGETWLLQRKTAALEFTTRTLRQAMARWANRIIKYRLWSILADRCEAAASVDLQDLLLRLTFDNICGLTFGKDPETLSPGLQENPFANAFDSATEATLQRFLFPSFLWRVKKALGVGSERSLRESLATVDQYMTEAIAARKATPSDDLLSRFMKKRDGSGRAFPEDVLQWVALNFVLAGRDTSSVALSWFFWMLMLRRDVERKVVLEIVSVVRETRGDDRRRWTEEPLDFDELDRLVYLKAALAETLRLYPSVPQDSKYVVEDDVLPDGTVVPAGSAVTYSIYSVGRMESIWGKDCAEFRPERWLSADGTRFEPPKDAYRFVAFNGGPRTCLGKDLAYLQMKSIASAVLLRHSVELVPGHKVEQKMSLTLFMKSGLRVHVKPRDLAGYVAAPEDAPQLGAFVIPTTTAAAA

SEQ ID NO: 17069 - protein, 519 aa, Zea mays subsp. mays
  misc_feature (1)..(519): Ceres Seq. ID no. 12355928
MVWFWALTRGLSGPRMWPLVGSLPSVVLNRARVHDWIVDNLRSTGEAATYQTCILPMPFLARRQGLVTVTCNPRNLEHILRVRFDNYPKGPMWQAAFHDLLGQGIFNSDGETWLLQRKTAALEFTTRTLRQAMARWANRIIKYRLWSILADRCEAAASVDLQDLLLRLTFDNICGLTFGKDPETLSPGLQENPFANAFDSATEATLQRFLFPSFLWRVKKALGVGSERSLRESLATVDQYMTEAIAARKATPSDDLLSRFMKKRDGSGRAFPEDVLQWVALNFVLAGRDTSSVALSWFFWMLMLRRDVERKVVLEIVSVVRETRGDDRRRWTEEPLDFDELDRLVYLKAALAETLRLYPSVPQDSKYVVEDDVLPDGTVVPAGSAVTYSIYSVGRMESIWGKDCAEFRPERWLSADGTRFEPPKDAYRFVAFNGGPRTCLGKDLAYLQMKSIASAVLLRHSVELVPGHKVEQKMSLTLFMKSGLRVHVKPRDLAGYVAAPEDAPQLGAFVIPTTTAAAA

SEQ ID NO: 17070 - DNA, 1493 bp, Zea mays subsp. mays
  misc_feature (1)..(1493): Ceres Seq. ID no. 12355953
tcgcgatgggtggcggcagggaacacagcccacggtttttgctggctccccgcctcgtccccgtcacccccctcctccgctccgcctcctgtttatagtcgcctgctgtcgcggcccctttttccttccaccacccaccggccaccaccctccgcggttgcctagttgccttgactgcctgcctcgtcttaccaccaagctaagctagcgcgttccttcgttcgttcgttcgttccttcctccctcgcttcctgttgctcggtccatggaggtggcggcggccgcggcggcgggcgcgggggttgtggagctgcagctggacctcctcgaggcggcggcgccgacggagcgagaggccaagaggcgccgggtgcacccggttccagcgggcccaccggccggggcagcagcggcggcagcagcgccggggcgccgcagccgcaggcgccgcgccgtgcagcgtctcttccaggcctgccgccacgtcttccggggccccggcaccgtgcccagtcccggcgaggtccagctgctccgccacatgctcgacaggatgcggccggaggacgtgggcctgagcccggacctgagcttcttcagagctcgagacgccacacgtggcggtggcaccccgaccataacgcacacgacgatatacaaatgcccgaatttctcgatggtcatcctcttcctgccgcgaaacgcggtgatcccgctccacaaccaccctgggatgacggtgttcagcaagctgctcctggggtcgatgcacgtcaagtcgtacgactggctcaacactgctgaccccgacccttcttccgccacgagcaccaccagctcttcgtcctccgatggcccatgcctgaggctggcgaaactggtggttgacgacgtcttcacggcgccctgcgacacctccgtgctgtacccgacggcgggagggaacatgcaccggttcaccgccatggcgccctgcgcgatcctcgacgtcctcggccccccctactccatagaggaggacagggactgcacgtactacgcggaattaccgtacgcaaaccactcgctggtggctgcgggcgacgacgtggagcggggccagggccaaggccatctggcgtggcttgaggagatcgacatgccgagagagctcaagatgtgcagcgtccactatggcggaccgccgatctccgacgagtgacgtcgccggccgtcgtctccctcactggttgtactatgtctaactgatcgcggcacggcagagccgtgccgccgtctaacgttgtgtatagcaggcagcagcaagccataggctgtagttacacaaagtcccgatcgagtacaatgcttctcgcttgcctgcatcgttgttctctagatgccctttctttcttgttatttttgtttctactactacaagtagacgatgttttgtcctgacgatggatgatacagataagtcatatatatccacatatttcatttttgtcgtt

SEQ ID NO: 17071 - protein, 311 aa, Zea mays subsp. mays
  misc_feature (1)..(311): Ceres Seq. ID no. 12355954
MEVAAAAAAGAGVVELQLDLLEAAAPTEREAKRRRVHPVPAGPPAGAAAAAAAPGRRSRRRRAVQRLFQACRHVFRGPGTVPSPGEVQLLRHMLDRMRPEDVGLSPDLSFFRARDATRGGGTPTITHTTIYKCPNFSMVILFLPRNAVIPLHNHPGMTVFSKLLLGSMHVKSYDWLNTADPDPSSATSTTSSSSSDGPCLRLAKLVVDDVFTAPCDTSVLYPTAGGNMHRFTAMAPCAILDVLGPPYSIEEDRDCTYYAELPYANHSLVAAGDDVERGQGQGHLAWLEEIDMPRELKMCSVHYGGPPISDE

SEQ ID NO: 17072 - protein, 219 aa, Zea mays subsp. mays
  misc_feature (1)..(219): Ceres Seq. ID no. 12355955
MLDRMRPEDVGLSPDLSFFRARDATRGGGTPTITHTTIYKCPNFSMVILFLPRNAVIPLHNHPGMTVFSKLLLGSMHVKSYDWLNTADPDPSSATSTTSSSSSDGPCLRLAKLVVDDVFTAPCDTSVLYPTAGGNMHRFTAMAPCAILDVLGPPYSIEEDRDCTYYAELPYANHSLVAAGDDVERGQGQGHLAWLEEIDMPRELKMCSVHYGGPPISDE

SEQ ID NO: 17073 - protein, 215 aa, Zea mays subsp. mays
  misc_feature (1)..(215): Ceres Seq. ID no. 12355956
MRPEDVGLSPDLSFFRARDATRGGGTPTITHTTIYKCPNFSMVILFLPRNAVIPLHNHPGMTVFSKLLLGSMHVKSYDWLNTADPDPSSATSTTSSSSSDGPCLRLAKLVVDDVFTAPCDTSVLYPTAGGNMHRFTAMAPCAILDVLGPPYSIEEDRDCTYYAELPYANHSLVAAGDDVERGQGQGHLAWLEEIDMPRELKMCSVHYGGPPISDE

SEQ ID NO: 17074 - DNA, 1697 bp, Zea mays subsp. mays
  misc_feature (1)..(1697): Ceres Seq. ID no. 12355964
atactgcgcgttgcaagctcccacttcctgaggaacaggaactccatgagatccgcggcatccgccgtcccgttcatctgcacaaaaagaccgtaatccttctttttcctctcctccccatccgcggagtgtaaatcgtctctcgctagcgcgttcagtagaaaccctaaaccccgcctcctcccctcgccggggtaggggctacgggtgtcaacgcccgccatggacgcattccggaagcaactggatgtgctcatgggcgctaaccgcaacggcgacgtcgaggaggtgagccgcaactactacgaccgcgacgtctgccggctcttcctcgccggcctttgcccccacgacctcttccagctcacgaaaatggatcttggtccttgttctaagattcactcgcttcaactgcggaaagattatgaagaagcgaaagcaaagggaacagagaattttgacagagaactcgaggatatgatagaaaggctcattgtggagtgcgacaggaaaattcagagggccctgaaacgacttgcggatgacgatgccaaggctgctattgcgatatccgtctcggaggttactctgacggatgacatactgcagctgtcaaaacagatcaaggaaaaaatggtagaagttgatgcctttgattttgaagggagaactgatgataaaataaaggcccaggaagtagtggaagaactcagaactaaaagagctgatatgcaggctaccctcttgcttgatgcttttaacaaggacagagcttcattaactcagcctgctcaacctcctcaagtgacggcagcgccaccaccagctccacccgatgctcgtactcaagaaatgatcaatgaaaagcttaagaaagctgaagagcttggggaacaaggcatggttgatgaagctcagaaagctttggaagaggcagaagctctgaaaaagctggcgcgacgtccggagccaccttcagacccttctaaatatactgccgctgatgtttggattaccgatcaaaagttgcgcctctgtgatatatgtggagcatttctgagtgtatatgacaatgatcgacgtcttgctgaccattttggagggaaactgcatctaggctacatgctgattcgtgacaaacagaaagaacttcaggagcagagaaacaaaaggaggacaggcaaaactgaagatgataggcgatctagagagcagagcaaggatcgaaacggcccgccgtccagggatagagattcagaaaggagagacagggttgagtctcgagatggaagaagagattatgatagggaacgcgataggcgtcacgatagggaccgtcgccatgaccgcgaccgggatagggattatgaccgctcccgcggatatgactcaaggagaagagagcgttcacgctccagggagcgcagcaggcgccatgagagatactaaatgttactccatggctgacagattttggattgctggcgtctgttctggtttgtgttgtgctttgtgtcttatcttccgaagtttcctgttcctgctcgagaaatccgaaagccaatctgcgttctgcatcatgtcatgtcctagtgtcgtactgtttagttatatgccaagaacatctctttcatcaaatgaatatttggaaacaccaacgcacttgacgctaaatgggaatgaagtgtggagtattt

SEQ ID NO: 17075 - protein, 408 aa, Zea mays subsp. mays
  misc_feature (1)..(408): Ceres Seq. ID no. 12355965
MDAFRKQLDVLMGANRNGDVEEVSRNYYDRDVCRLFLAGLCPHDLFQLTKMDLGPCSKIHSLQLRKDYEEAKAKGTENFDRELEDMIERLIVECDRKIQRALKRLADDDAKAAIAISVSEVTLTDDILQLSKQIKEKMVEVDAFDFEGRTDDKIKAQEVVEELRTKRADMQATLLLDAFNKDRASLTQPAQPPQVTAAPPPAPPDARTQEMINEKLKKAEELGEQGMVDEAQKALEEAEALKKLARRPEPPSDPSKYTAADVWITDQKLRLCDICGAFLSVYDNDRRLADHFGGKLHLGYMLIRDKQKELQEQRNKRRTGKTEDDRRSREQSKDRNGPPSRDRDSERRDRVESRDGRRDYDRERDRRHDRDRRHDRDRDRDYDRSRGYDSRRRERSRSRERSRRHERY

SEQ ID NO: 17076 - protein, 397 aa, Zea mays subsp. mays
  misc_feature (1)..(397): Ceres Seq. ID no. 12355966
MGANRNGDVEEVSRNYYDRDVCRLFLAGLCPHDLFQLTKMDLGPCSKIHSLQLRKDYEEAKAKGTENFDRELEDMIERLIVECDRKIQRALKRLADDDAKAAIAISVSEVTLTDDILQLSKQIKEKMVEVDAFDFEGRTDDKIKAQEVVEELRTKRADMQATLLLDAFNKDRASLTQPAQPPQVTAAPPPAPPDARTQEMINEKLKKAEELGEQGMVDEAQKALEEAEALKKLARRPEPPSDPSKYTAADVWITDQKLRLCDICGAFLSVYDNDRRLADHFGGKLHLGYMLIRDKQKELQEQRNKRRTGKTEDDRRSREQSKDRNGPPSRDRDSERRDRVESRDGRRDYDRERDRRHDRDRRHDRDRDRDYDRSRGYDSRRRERSRSRERSRRHERY

SEQ ID NO: 17077 - protein, 358 aa, Zea mays subsp. mays
  misc_feature (1)..(358): Ceres Seq. ID no. 12355967
MDLGPCSKIHSLQLRKDYEEAKAKGTENFDRELEDMIERLIVECDRKIQRALKRLADDDAKAAIAISVSEVTLTDDILQLSKQIKEKMVEVDAFDFEGRTDDKIKAQEVVEELRTKRADMQATLLLDAFNKDRASLTQPAQPPQVTAAPPPAPPDARTQEMINEKLKKAEELGEQGMVDEAQKALEEAEALKKLARRPEPPSDPSKYTAADVWITDQKLRLCDICGAFLSVYDNDRRLADHFGGKLHLGYMLIRDKQKELQEQRNKRRTGKTEDDRRSREQSKDRNGPPSRDRDSERRDRVESRDGRRDYDRERDRRHDRDRRHDRDRDRDYDRSRGYDSRRRERSRSRERSRRHERY

SEQ ID NO: 17078 - DNA, 1180 bp, Zea mays subsp. mays
  misc_feature (1)..(1180): Ceres Seq. ID no. 12355979
attcgcgccgggttccgcgagatctctggtgccccccggtttcgctcccgcgccccaatgctccctgtcgcgagtcgtggtctccgccgctcgttgcatcttcgttaccgatcagttgatcccgctcatccggcgggggatcatccgaccattggcagtctaccttttcaacactaaagcttctaagttgatgagtgatgaggccaggcaagcaaagattgtcaaattctcggagtccatttggaaacttacatactatgcttctgttcaagcatgggtcctcatgataataaagcaagaaccatggtcgttggatatggtgcagtactttgatggctggccaaatcaacccatcgtgtcctcgttgatgcttttctatatgtgccagtgtggattttatatctacagcattggtgctcttgttgcttgggaaacccgcagaaaagattttgctgtaatgatgtctcatcatgtaataacatctactcttattggagtttcatatctgacaggattttttcgaattgggaccatcgttcttgctcttcatgatacaagtgatgtgtttcttgagactgccaaattgtgcaagtacacagaaaaggagttgggggctagcttgtttttcggtctcttcgctatctcctggcttctattgcgtttgatttacttcccgttttggataatcaaagcctctagctatcattccatcacattctggaggaagctggatgaattccctacagctttgtactatatcttcaatacaatgcttctcacattgcttgtattccatatgtactggtggaaactcatatgtttgatgataatgagacaattgaataataaaggacaggttacagatgatgttcgatctgattctgaggatgacgagtaatgggggagattcattctttgacatctgcaatgtgtcatttcttcgccaatacttatctacgcctgcttccagaattgattgttttgatcgtggcaagtctcgggcatggataggaaagtttatcctctgtatattgccttgtgatatcaaacatggctagaacgagaatggagcaggtcctatacattacgggtatagctagcaagcttacttgaaggttccttcaaaaaattttggttcaccttttctgatatatggggaaagatatgagagggggtacag

SEQ ID NO: 17079 - protein, 298 aa, Zea mays subsp. mays
  misc_feature (1)..(298): Ceres Seq. ID no. 12355980
FAPGSARSLVPPGFAPAPQCSLSRVVVSAARCIFVTDQLIPLIRRGIIRPLAVYLFNTKASKLMSDEARQAKIVKFSESIWKLTYYASVQAWVLMIIKQEPWSLDMVQYFDGWPNQPIVSSLMLFYMCQCGFYIYSIGALVAWETRRKDFAVMMSHHVITSTLIGVSYLTGFFRIGTIVLALHDTSDVFLETAKLCKYTEKELGASLFFGLFAISWLLLRLIYFPFWIIKASSYHSITFWRKLDEFPTALYYIFNTMLLTLLVFHMYWWKLICLMIMRQLNNKGQVTDDVRSDSEDDE

SEQ ID NO: 17080 - protein, 235 aa, Zea mays subsp. mays
  misc_feature (1)..(235): Ceres Seq. ID no. 12355981
MSDEARQAKIVKFSESIWKLTYYASVQAWVLMIIKQEPWSLDMVQYFDGWPNQPIVSSLMLFYMCQCGFYIYSIGALVAWETRRKDFAVMMSHHVITSTLIGVSYLTGFFRIGTIVLALHDTSDVFLETAKLCKYTEKELGASLFFGLFAISWLLLRLIYFPFWIIKASSYHSITFWRKLDEFPTALYYIFNTMLLTLLVFHMYWWKLICLMIMRQLNNKGQVTDDVRSDSEDDE

SEQ ID NO: 17081 - protein, 204 aa, Zea mays subsp. mays
  misc_feature (1)..(204): Ceres Seq. ID no. 12355982
MIIKQEPWSLDMVQYFDGWPNQPIVSSLMLFYMCQCGFYIYSIGALVAWETRRKDFAVMMSHHVITSTLIGVSYLTGFFRIGTIVLALHDTSDVFLETAKLCKYTEKELGASLFFGLFAISWLLLRLIYFPFWIIKASSYHSITFWRKLDEFPTALYYIFNTMLLTLLVFHMYWWKLICLMIMRQLNNKGQVTDDVRSDSEDDE

SEQ ID NO: 17082 - DNA, 1435 bp, Zea mays subsp. mays
  misc_feature (1)..(1435): Ceres Seq. ID no. 12355983
atcaaatcacacacccatcagatcacaaaggcaaagaggagagagagagagagagggatgatgaggacgacgatgagagagatatactactaaactatctatccatcaatcaatcaggtagcccggcagcaatcgcgtgccgcctttcctctcacgtacaccaccacacctcccaggctcagctcgattcgttcgttgccgcgtcaaatcgggacaagaagccagccggccctgttgcagtgttgcttcgcctgccctgctgctgttgcttgcgccacgcacgtacctgaagaaagcagcgacggattgatcgaccggtggttcgctgtcgccacggccggcatgtcgtcctcgtcctcgtcctcgtcgtcctccgccgcctccgccgccacggtgttcccgcggtccccgcagctgccgcctccggtcctggtggagaacggcctcacgccgctgcatcagcttacgccggtagccgcggccgcgccggccgccgagcagctctgctacgtgcactgctacttctgcgacaccgtcctcgtcgtgagcgtgcctacgagcagcttgttcaagacggtgacggtacgatgcggccactgcagcagcttgctcaccgtcgacatgaggggcctcctcttcccgggcacgccgacggacacggtcgcgggggccgcaccaccaccagctgctgacactagtacgactaccaccaccatcaccacggcgccgccgccggccaactcggtcaacaacgggcagttccacctcccccactcgctcaaccaccctcaccaccaatccctcctggtggtacgcgcgtggttcaaagctgccggtggagctagctagctcgctctgatctgatgtcatatatcgcatgcctaatctcttgtttccgcgcgcgcgcgtgcatgcaggacgagatatccagcgccgcgaacccgagcctgcagttgcagatggagcagcacggcggcctcggcggcctgatactcggcggcagcaggaacacggccgcgccgcctccgccgcagccgcctgcagcgggtaaaggggccaaagagccgtcgccgcgcactaatcccgccgtcaacagacctccggagaagaggcagcgcgtgccgtcggcctacaaccgcttcatcaaggacgaaatccaacgcatcaaggctggcaatcccaacatctcgcacagggaggccttcagcgcggcggccaagaactgggcgcactttccacatatccactttggactcatgccggatcaccaggggctcaagacgacaagcctgctacctcagggtcaccagagaaaggacgggcttcttaaggaagggctctacgcggcagcggcggcggccgcagctcatgcggcagccaacatggggattgctccatactaatttacaattactcctactcaagcttgctactg

SEQ ID NO: 17083 - protein, 179 aa, Zea mays subsp. mays
  misc_feature (1)..(179): Ceres Seq. ID no. 12355984
MSYIACLISCFRARACMQDEISSAANPSLQLQMEQHGGLGGLILGGSRNTAAPPPPQPPAAGKGAKEPSPRTNPAVNRPPEKRQRVPSAYNRFIKDEIQRIKAGNPNISHREAFSAAAKNWAHFPHIHFGLMPDHQGLKTTSLLPQGHQRKDGLLKEGLYAAAAAAAAHAAANMGIAPY

SEQ ID NO: 17084 - protein, 168 aa, Zea mays subsp. mays
  misc_feature (1)..(168): Ceres Seq. ID no. 12355985
MSSSSSSSSSSAASAATVFPRSPQLPPPVLVENGLTPLHQLTPVAAAAPAAEQLCYVHCYFCDTVLVVSVPTSSLFKTVTVRCGHCSSLLTVDMRGLLFPGTPTDTVAGAAPPPAADTSTTTTTITTAPPPANSVNNGQFHLPHSLNHPHHQSLLVVRAWFKAAGGAS

SEQ ID NO: 17085 - protein, 163 aa, Zea mays subsp. mays
  misc_feature (1)..(163): Ceres Seq. ID no. 12355986
MQDEISSAANPSLQLQMEQHGGLGGLILGGSRNTAAPPPPQPPAAGKGAKEPSPRTNPAVNRPPEKRQRVPSAYNRFIKDEIQRIKAGNPNISHREAFSAAAKNWAHFPHIHFGLMPDHQGLKTTSLLPQGHQRKDGLLKEGLYAAAAAAAAHAAANMGIAPY

SEQ ID NO: 17086 - DNA, 1346 bp, Zea mays subsp. mays
  misc_feature (1)..(1346): Ceres Seq. ID no. 12356016
gactcgtcctcttccctcgccgcgagctccgggttcccctgcgcatagctaggccaagccaggtataccccaaccatcgcatgggagccgcgactgccccgacgaagcggagacgcggccccagcaagacgcaggaggaggccatggcgcgcgcgagcccggaggcgcggcggcgaccgcggccgcgcctggtgggctatgaggagctgccggagtacctcaaggacaacgagtacatccgcgggcactaccgcgccgagtggcccgtccgcgacgcgctcctcagcgccttcgcctggcacaacgagacgctcaacgtctggacgcatctgggagggttcctgttcttcctagcgctcgcggtcgccggaggacggaaggaggccgccgacggtgccgctccgggtatcatgaggttcgttgtgagactagattcatggggcagcgaccatccgggccagccgaggcacgacgacgccggggcatcgctgcccagtgtgccgcggtggccgcggacggtgttcctggtgggggccatgtcgtgcctcgccatcagcgcggcggcgcacctgctggcgtgccactcgcggcgcgccagcgcggtgttctggcagctggactacgcgggcatctccgtgatgatcgtcgcctccttcgtgccgccggtgtactacgccttcctctgccacccgccggcgcgggcggcctacctgtgcgccatcgcggcgctgggcgcgctggtggtggccgcgctgctctccccgtcctgctcgtccccgcgctaccgccgcctccgcgcggcgctgttcctggccatgggcctgtcgggcgtcgtcccggcgctgcacgcgctctggctcaactggggccacgccgcctgctacctggcgctgggcatcgaggtcgtcatgggcctcacctacgccacgggcgcctggttctacgtcagccgcgtgccggagaagtggcgacccggggtgttcgacgtcgtcggccacagccaccagatcttccacgtcctcgtgctcgtcggcgccgtcacgcactacgtcgccgtcgccgtgctcatccactggcgggagaaggtggccgtcgcctgtggcgccgcgtcggcgtaggctcacctgtttggttggctcactcaacaaccattcgaatggcaaaccaagtagtcgcaacatagatcagctctagagtttgagtgtgaccttcgacgatttataatttaattgatggggtgattgagtatggtggttcattagttcatgagatttatctgtcgagtgagtgcgtgcctcagatttccagaccttttgtttccagcctactcaactttttgtcccgtc

SEQ ID NO: 17087 - protein, 371 aa, Zea mays subsp. mays
  misc_feature (1)..(371): Ceres Seq. ID no. 12356017
LVLFPRRELRVPLRIARPSQVYPNHRMGAATAPTKRRRGPSKTQEEAMARASPEARRRPRPRLVGYEELPEYLKDNEYIRGHYRAEWPVRDALLSAFAWHNETLNVWTHLGGFLFFLALAVAGGRKEAADGAAPGIMRFVVRLDSWGSDHPGQPRHDDAGASLPSVPRWPRTVFLVGAMSCLAISAAAHLLACHSRRASAVFWQLDYAGISVMIVASFVPPVYYAFLCHPPARAAYLCAIAALGALVVAALLSPSCSSPRYRRLRAALFLAMGLSGVVPALHALWLNWGHAACYLALGIEVVMGLTYATGAWFYVSRVPEKWRPGVFDVVGHSHQIFHVLVLVGAVTHYVAVAVLIHWREKVAVACGAASA

SEQ ID NO: 17088 - protein, 345 aa, Zea mays subsp. mays
  misc_feature (1)..(345): Ceres Seq. ID no. 12356018
MGAATAPTKRRRGPSKTQEEAMARASPEARRRPRPRLVGYEELPEYLKDNEYIRGHYRAEWPVRDALLSAFAWHNETLNVWTHLGGFLFFLALAVAGGRKEAADGAAPGIMRFVVRLDSWGSDHPGQPRHDDAGASLPSVPRWPRTVFLVGAMSCLAISAAAHLLACHSRRASAVFWQLDYAGISVMIVASFVPPVYYAFLCHPPARAAYLCAIAALGALVVAALLSPSCSSPRYRRLRAALFLAMGLSGVVPALHALWLNWGHAACYLALGIEVVMGLTYATGAWFYVSRVPEKWRPGVFDVVGHSHQIFHVLVLVGAVTHYVAVAVLIHWREKVAVACGAASA

SEQ ID NO: 17089 - protein, 324 aa, Zea mays subsp. mays
  misc_feature (1)..(324): Ceres Seq. ID no. 12356019
MARASPEARRRPRPRLVGYEELPEYLKDNEYIRGHYRAEWPVRDALLSAFAWHNETLNVWTHLGGFLFFLALAVAGGRKEAADGAAPGIMRFVVRLDSWGSDHPGQPRHDDAGASLPSVPRWPRTVFLVGAMSCLAISAAAHLLACHSRRASAVFWQLDYAGISVMIVASFVPPVYYAFLCHPPARAAYLCAIAALGALVVAALLSPSCSSPRYRRLRAALFLAMGLSGVVPALHALWLNWGHAACYLALGIEVVMGLTYATGAWFYVSRVPEKWRPGVFDVVGHSHQIFHVLVLVGAVTHYVAVAVLIHWREKVAVACGAASA

SEQ ID NO: 17090 - DNA, 1283 bp, Zea mays subsp. mays
  misc_feature (1)..(1283): Ceres Seq. ID no. 12356020
gcccacctaccactaccagtcgcggacgctcctcccacaactcgcgggtctcgagatgttcaggggttgcggcctgttcgccggcgcccgccgggggcgcggcggcgacctcaggaagcgcggggagcaaggcggcgcgagctcgcgggtggcgccggccgagcccgtgtgcgtggacgaggcggaggacggcggcgccgcgcggcagctggcgtgggcggaggtggagaccgccacgggcggcttctcgtccagggtggtcggccgcggcggcttcagcacggtgtacctcgcctcgctctcctcctcgcggctcggcgccgtcaaggtgcactgcagcagcgagcgcctccgccgcgcgttccgccgggagctcgacgtgctgctctccctccgccacccgcacgtcgtccgcctcctcgcctactgcgacgagcgcgacgagggcgtgctggtgttcgagtacgcgcccaacggcgacctccacgagaggctccacggcggcgcgggcgcgggcaccctcccctgggcgcgccgcgtggcggtcgcgttccaggtggcctcggcgctggagtacctccacgagggccgcgacccggccgtcgtccacggggacatcaaggcctccaacgtcctcctcgacgccagcatggacgccaagctctgcgacttcggcttcgcgcacgtcggcgtctcggccacgatgggcggccgccggccctcggaccgcgccgtcatgggctctccgggctacgtcgacccgcacctcctccgctccggagtggccaccaaggcgagcgacgtgtacagctttggcgtgctgctgctcgagctcctgacgggcaaggaggccgtctgccgcgagacagggcaccggctcacggccgcggtgaggcctaagctcagcgatggtgatcaactgccgggcgttctggaccagaggctgggaggagactacgacgccgctgaggcggccgccgtggccgagctcgccatgcagtgcgtcagtgacagccctgggctccgcccgtccatggccgacgtggtgcgcgtgctccaggagaagacctccgccgctggatcgagagtcgaccgcaagcaagatggtgtcctaagttagatgcctatggagtagtgtgtaaatatgtccttgatggtgctataattgtgttgagggtagttagccacaagaattggcgcagtgagatgaggttttagaatcactagatctctgatagaaaattttgtcatgccatcgagttgtcaatttgtcttgttgtgtt

SEQ ID NO: 17091 - protein, 354 aa, Zea mays subsp. mays
  misc_feature (1)..(354): Ceres Seq. ID no. 12356021
MFRGCGLFAGARRGRGGDLRKRGEQGGASSRVAPAEPVCVDEAEDGGAARQLAWAEVETATGGFSSRVVGRGGFSTVYLASLSSSRLGAVKVHCSSERLRRAFRRELDVLLSLRHPHVVRLLAYCDERDEGVLVFEYAPNGDLHERLHGGAGAGTLPWARRVAVAFQVASALEYLHEGRDPAVVHGDIKASNVLLDASMDAKLCDFGFAHVGVSATMGGRRPSDRAVMGSPGYVDPHLLRSGVATKASDVYSFGVLLLELLTGKEAVCRETGHRLTAAVRPKLSDGDQLPGVLDQRLGGDYDAAEAAAVAELAMQCVSDSPGLRPSMADVVRVLQEKTSAAGSRVDRKQDGVLS

SEQ ID NO: 17092 - protein, 299 aa, Zea mays subsp. mays
  misc_feature (1)..(299): Ceres Seq. ID no. 12356022
AHLPLPVADAPPTTRGSRDVQGLRPVRRRPPGARRRPQEARGARRRELAGGAGRARVRGRGGGRRRRAAAGVGGGGDRHGRLLVQGGRPRRLQHGVPRLALLLAARRRQGALQQRAPPPRVPPGARRAALPPPPARRPPPRLLRRARRGRAGVRVRAQRRPPREAPRRRGRGHPPLGAPRGGRVPGGLGAGVPPRGPRPGRRPRGHQGLQRPPRRQHGRQALRLRLRARRRLGHDGRPPALGPRRHGLSGLRRPAPPPLRSGHQGERRVQLWRAAARAPDGQGGRLPRDRAPAHGRGEA

SEQ ID NO: 17093 - protein, 372 aa, Zea mays subsp. mays
  misc_feature (1)..(372): Ceres Seq. ID no. 12356023
PTYHYQSRTLLPQLAGLEMFRGCGLFAGARRGRGGDLRKRGEQGGASSRVAPAEPVCVDEAEDGGAARQLAWAEVETATGGFSSRVVGRGGFSTVYLASLSSSRLGAVKVHCSSERLRRAFRRELDVLLSLRHPHVVRLLAYCDERDEGVLVFEYAPNGDLHERLHGGAGAGTLPWARRVAVAFQVASALEYLHEGRDPAVVHGDIKASNVLLDASMDAKLCDFGFAHVGVSATMGGRRPSDRAVMGSPGYVDPHLLRSGVATKASDVYSFGVLLLELLTGKEAVCRETGHRLTAAVRPKLSDGDQLPGVLDQRLGGDYDAAEAAAVAELAMQCVSDSPGLRPSMADVVRVLQEKTSAAGSRVDRKQDGVLS

SEQ ID NO: 17094 - DNA, 1382 bp, Zea mays subsp. mays
  misc_feature (1)..(1382): Ceres Seq. ID no. 12356032
atcccaccccgaagggcgtcgccgagctagccattgccgcctcccggctcgcgactcgcgagtcacaggcgcagccgagcgttccttggggacgaggctacatcgcgatgtggtggagggcggtgaggcgccggtgggtcgcgacggcgcggcccgcgtcctccgcggcggcgggggcggagaagagctgccgcgccgtggtggtgccgcgtttcggtgggccggaggtgctcgaggtcaggcagggcatgcctgtgcccgatctgaagccgcaggaggtgctcgtgcgcgcacgcgctgtctctatcaaccccctggaccttcgaatgcgatgtggctatgggcgctccatattcgaaccactcctacctctgatcattggtcgggacattagcggtgaagttgcggccaccggaactttggcatcgtctttttctattggccaagaagtgtttggttcgttgcatccaactgctctcagagggacatatgctgattatgctatcctgtcactggacgagcttactctcaaaccatctacactcagtcatgtggaggctagtgcaatcccgtttgctgctttgactgcatggcgcgctttacatggtacggctcgtatttctgaaggacaaagagttcttgtgattggtggaggaggagcggttggattagctgctgttcaacttgcggtggctgctgggtgtgtggtttctgctacctgtggaacacaaagtattgagcgagttatgggagttggtgctgaacaagctattgactacactgctgaggatactgaagcagcaattaaaggaaagtttgatgctgttttagacaccataggagtacctgagacagaaagaattggcatcaatgttcttaggagaggtggacactatatgacccttcagggagaagcagctgccctagcagataggtatggattggctgtagggcttcctgctgctactgctgttttactaaagaaacagatgcagtatcgttattctcatggaatagagtattggtggacatacatgagagctgacgccgaaggccttcacgagatccaaaggctatctggagctgggaaactacagatacctgtggagaagacctttcccatcagccatgtaagagaagctcatgcggccaaggagaaaaagttggctcctggcaaggtggttctggaattcgattaatgttattaagattttgtccattgggacctgaagggctgtgcgtttgcaaatcatgatagttttttttgtaaaaaaataaatctgaatctctctgccgacttcaggttccattttatcgttccgtttcagtagaaatacggtaaataatcatatcagctatggcctatgggcacgattttcctg

SEQ ID NO: 17095 - protein, 398 aa, Zea mays subsp. mays
  misc_feature (1)..(398): Ceres Seq. ID no. 12356033
PTPKGVAELAIAASRLATRESQAQPSVPWGRGYIAMWWRAVRRRWVATARPASSAAAGAEKSCRAVVVPRFGGPEVLEVRQGMPVPDLKPQEVLVRARAVSINPLDLRMRCGYGRSIFEPLLPLIIGRDISGEVAATGTLASSFSIGQEVFGSLHPTALRGTYADYAILSLDELTLKPSTLSHVEASAIPFAALTAWRALHGTARISEGQRVLVIGGGGAVGLAAVQLAVAAGCVVSATCGTQSIERVMGVGAEQAIDYTAEDTEAAIKGKFDAVLDTIGVPETERIGINVLRRGGHYMTLQGEAAALADRYGLAVGLPAATAVLLKKQMQYRYSHGIEYWWTYMRADAEGLHEIQRLSGAGKLQIPVEKTFPISHVREAHAAKEKKLAPGKVVLEFD

SEQ ID NO: 17096 - protein, 363 aa, Zea mays subsp. mays
  misc_feature (1)..(363): Ceres Seq. ID no. 12356034
MWWRAVRRRWVATARPASSAAAGAEKSCRAVVVPRFGGPEVLEVRQGMPVPDLKPQEVLVRARAVSINPLDLRMRCGYGRSIFEPLLPLIIGRDISGEVAATGTLASSFSIGQEVFGSLHPTALRGTYADYAILSLDELTLKPSTLSHVEASAIPFAALTAWRALHGTARISEGQRVLVIGGGGAVGLAAVQLAVAAGCVVSATCGTQSIERVMGVGAEQAIDYTAEDTEAAIKGKFDAVLDTIGVPETERIGINVLRRGGHYMTLQGEAAALADRYGLAVGLPAATAVLLKKQMQYRYSHGIEYWWTYMRADAEGLHEIQRLSGAGKLQIPVEKTFPISHVREAHAAKEKKLAPGKVVLEFD

SEQ ID NO: 17097 - protein, 316 aa, Zea mays subsp. mays
  misc_feature (1)..(316): Ceres Seq. ID no. 12356035
MPVPDLKPQEVLVRARAVSINPLDLRMRCGYGRSIFEPLLPLIIGRDISGEVAATGTLASSFSIGQEVFGSLHPTALRGTYADYAILSLDELTLKPSTLSHVEASAIPFAALTAWRALHGTARISEGQRVLVIGGGGAVGLAAVQLAVAAGCVVSATCGTQSIERVMGVGAEQAIDYTAEDTEAAIKGKFDAVLDTIGVPETERIGINVLRRGGHYMTLQGEAAALADRYGLAVGLPAATAVLLKKQMQYRYSHGIEYWWTYMRADAEGLHEIQRLSGAGKLQIPVEKTFPISHVREAHAAKEKKLAPGKVVLEFD

SEQ ID NO: 17098 - DNA, 1170 bp, Zea mays subsp. mays
  misc_feature (1)..(1170): Ceres Seq. ID no. 12356036
gttccctctttcctctcctctttccccatccgtccaatcaaccgggctgctctgctgcctctccggcgccattgacgagcaagagagtgctccgacacctggtccgtcgcgtgccgtgcccacccgctaaggccagggcgccccgactcgagctcaccgcgtcgaactcgaaccgctgctgttcctcggcagggggcagggtcgtcgaggatgccggagcactcagagaacgcggcggcggacctgatgggcaacatcatggagaccatcgcggagaacctcccgaggcagaagtccgtgcggttcgacgacggcgacggctcctccatctccgagcaggccaagaagctgttcagcggcggcgagagcaggaagaagtcggtccaccacgtgctgggcggcggcaaatccgccgacgtgctgctgtggcggaacaagaagatctcgtccagcgtgctgggcgtggcgacgctggtgtgggtgttcttcgagtggctggactaccacttcctcaccatcctctgcttcgtgctcgcgctcggcatggccgtccagttcgcctggtccatcttctcgtccagcgtgcctcgcgtgcagctgccggaggagctgttcgcgagcgccggcgcggccgccggcgcccaggtgaacagggcgctgggcttcctccaggacgtggcctgcggacgcgacctcaagcggctggtcatcgtgatcgccgggttcttcgctgcggcggtcgtcggcagcttctgcaacctcctgacggtcatctacatcgggttcgtgtgcgcgcacaccctgccggtgctgtacgagaggtaccaggaccaggtggacgagttcctgtacaacatgctagggctggtgcagagccagtacagcaagctggacagcaagggcatcctcaaggggggcgtcaagttcaggaagagcgactagctgatttcctcccatctacgactacgatttgattcatcctgggaatcttgatcgatcgacacttgttctgttctgtacagcgagtaacaaccgctgctgctagctacattctttactgtactgtacttgtgtgatgacatcatatcttcgcgtcgcgtgtactgaagaaactacacattgcactaaggttgctttcgtacgtgtacgtgctcatctttcttccttggt

SEQ ID NO: 17099 - protein, 323 aa, Zea mays subsp. mays
  misc_feature (1)..(323): Ceres Seq. ID no. 12356037
SLFPLLFPHPSNQPGCSAASPAPLTSKRVLRHLVRRVPCPPAKARAPRLELTASNSNRCCSSAGGRVVEDAGALRERGGGPDGQHHGDHRGEPPEAEVRAVRRRRRLLHLRAGQEAVQRRREQEEVGPPRAGRRQIRRRAAVAEQEDLVQRAGRGDAGVGVLRVAGLPLPHHPLLRARARHGRPVRLVHLLVQRASRAAAGGAVRERRRGRRRPGEQGAGLPPGRGLRTRPQAAGHRDRRVLRCGGRRQLLQPPDGHLHRVRVRAHPAGAVREVPGPGGRVPVQHARAGAEPVQQAGQQGHPQGGRQVQEERLADFLPSTTTI

SEQ ID NO: 17100 - protein, 243 aa, Zea mays subsp. mays
  misc_feature (1)..(243): Ceres Seq. ID no. 12356038
MPEHSENAAADLMGNIMETIAENLPRQKSVRFDDGDGSSISEQAKKLFSGGESRKKSVHHVLGGGKSADVLLWRNKKISSSVLGVATLVWVFFEWLDYHFLTILCFVLALGMAVQFAWSIFSSSVPRVQLPEELFASAGAAAGAQVNRALGFLQDVACGRDLKRLVIVIAGFFAAAVVGSFCNLLTVIYIGFVCAHTLPVLYERYQDQVDEFLYNMLGLVQSQYSKLDSKGILKGGVKFRKSD

SEQ ID NO: 17101 - protein, 231 aa, Zea mays subsp. mays
  misc_feature (1)..(231): Ceres Seq. ID no. 12356039
MGNIMETIAENLPRQKSVRFDDGDGSSISEQAKKLFSGGESRKKSVHHVLGGGKSADVLLWRNKKISSSVLGVATLVWVFFEWLDYHFLTILCFVLALGMAVQFAWSIFSSSVPRVQLPEELFASAGAAAGAQVNRALGFLQDVACGRDLKRLVIVIAGFFAAAVVGSFCNLLTVIYIGFVCAHTLPVLYERYQDQVDEFLYNMLGLVQSQYSKLDSKGILKGGVKFRKSD

SEQ ID NO: 17102 - DNA, 1565 bp, Zea mays subsp. mays
  misc_feature (1)..(1565): Ceres Seq. ID no. 12356044
gccgcaacgaattcccagtctccagccaaccaccgcagacaagatcctctcttccgcgtccccaaaccctcgagttcgcacgggctccggccagattcgcgcagtctaagcttcgaatcggcgcatggaggcggcagcagtagccgcggcgctcaggtcgcctaccgccaccaccgccgccgccgccgctggccccacgtggcggcccgctgccccgggcgccgcctcgctcgcctttgaccggagacgcagcttcgccttcggctccgtcaagggtctcgggcggcagcagcagctcacctctaggtctactaggaggcgaagcagtgtggtcagggcatcctggtccccctcggagtctctgccaccgtcctcgccgatcgcgcctctcaggatggaatcgccggcggggcagctactctcgcaaatcctgcacacgcacccgcacttgctgtctgccgctgccgagcagcagctcgagcagctccagactgaccgcgaggccgacaaggagaaggataaggagagcgatgctggcgacaagctggctccgacaggtggcaacctcgtgctgtacaggcggattgctgaagtaaaagagaaggaacggagaaggactttggaggagatactctatgctctggttgttcagaagttcgttgaagctggtgtctctctggttccagcactctcacgctccaccgatccttctggaagagttgatcagtgggcagaaactgtggaagaaaatcttcaacgtctgcactcgcacgaggcctatgaaatgatcgagaatcacctcaccctcattctggggcagcgtcaaggtgacgccactatcgcagccataagtaagctccgtgttggccaggtctatgctgcatctgtgatgtacggttatttcctgaagagagttgaccagaggttccagctcgagaagacaatgaagggcctcccttggggatcagaagaggaagacagcgctttgaatcaagttatgatgaccgacttgatgccttcagctcagacttctagctctcatccagagatgggctcgtggaccgcgcctgccttcagcacaggagggcccagccaatctatcaagccttgccgccttaggtcgtatgtcatgtcgtttgattccgatacgctccagaggtatgcgacagtcaggtcaaaggaggccttcggcatcattgagaagcacacggaagcgctatttgggaagccagagattgtgatcacacctgaaggcacccttgattcttccaaggatgagcatattaggataagctttgctgggctgagaaggctgatcctggaggctgttaccttcggatcgttcctctgggacgttgagagctttgtggattcccggtaccatttcgtgaccagctaagatggtcatcctaagtgaagaacgattcatggtttacggatcttgtctcacaatgtctatgggcttcggaaaggctgttgtacaatgatgttagactgttaccactccccttaggccatgtttttcaccgttaatatatgtgaattggatggtattgagttgattt

SEQ ID NO: 17103 - protein, 424 aa, Zea mays subsp. mays
  misc_feature (1)..(424): Ceres Seq. ID no. 12356045
MEAAAVAAALRSPTATTAAAAAGPTWRPAAPGAASLAFDRRRSFAFGSVKGLGRQQQLTSRSTRRRSSVVRASWSPSESLPPSSPIAPLRMESPAGQLLSQILHTHPHLLSAAAEQQLEQLQTDREADKEKDKESDAGDKLAPTGGNLVLYRRIAEVKEKERRRTLEEILYALVVQKFVEAGVSLVPALSRSTDPSGRVDQWAETVEENLQRLHSHEAYEMIENHLTLILGQRQGDATIAAISKLRVGQVYAASVMYGYFLKRVDQRFQLEKTMKGLPWGSEEEDSALNQVMMTDLMPSAQTSSSHPEMGSWTAPAFSTGGPSQSIKPCRLRSYVMSFDSDTLQRYATVRSKEAFGIIEKHTEALFGKPEIVITPEGTLDSSKDEHIRISFAGLRRLILEAVTFGSFLWDVESFVDSRYHFVTS

SEQ ID NO: 17104 - protein, 334 aa, Zea mays subsp. mays
  misc_feature (1)..(334): Ceres Seq. ID no. 12356046
MESPAGQLLSQILHTHPHLLSAAAEQQLEQLQTDREADKEKDKESDAGDKLAPTGGNLVLYRRIAEVKEKERRRTLEEILYALVVQKFVEAGVSLVPALSRSTDPSGRVDQWAETVEENLQRLHSHEAYEMIENHLTLILGQRQGDATIAAISKLRVGQVYAASVMYGYFLKRVDQRFQLEKTMKGLPWGSEEEDSALNQVMMTDLMPSAQTSSSHPEMGSWTAPAFSTGGPSQSIKPCRLRSYVMSFDSDTLQRYATVRSKEAFGIIEKHTEALFGKPEIVITPEGTLDSSKDEHIRISFAGLRRLILEAVTFGSFLWDVESFVDSRYHFVTS

SEQ ID NO: 17105 - DNA, 978 bp, Zea mays subsp. mays
  misc_feature (1)..(978): Ceres Seq. ID no. 12356047
gctcgatctgttttcgttttgtaagattcattcacgtctgcgctgtggctctattcagatttggtcgagatttctgggtttgaccagctgatggctgatgtcgacgagtaccgttgcttcattgggaacctgtcctggtcaacgactgatgaaagcctcaaggatgcgttcagcaaattcggcaacctcactgaggcaaaggtggttcttgacaaattttcaggacgttctcgtggtttcggctttgtaacttttgatgagaagcaagccatggaggatgctattgagggaatgaatggactggacttggacgggaggaacatcactgttgataaagctcagccacaaggacctggtagagaccgtaatggtgaccgtgattatgaccgcgagcgtggatctcgttatgaacgtggtcgtgactatggtggtgggcgtgcaccgcgaggtggtggtggtggtggtggtggtggtggtgactgcttcaagtgtgggaaacctggtcattttgctagagagtgcccatctggggatggtgggagaggggacagatatggtgggagagatgacaggtatggtggcggtggcggtggcggtcgttatggttctgaccgtggtggtgaccgatactctggccgtagccgagatggcggcagctatgggggtggcgatcgctacagccgtgaccgatcaggtccttactgatggccttagttcttgattgagaagtatgtgccatccaggtatgaaagtctatctactattataaggcttgttattgtgtctggaactttgttatcctgtagttggagtcgacatgtaccgtgagaaatcagctgctttgttatagaccgtattactgaccggtttattatcgtttcctgcttgccaggcatatgacttggtcatagtgcttggcgcttggatcctgcatgtttgcttgatgtgctatttggctattaaaagatggattttgtc

SEQ ID NO: 17106 - protein, 204 aa, Zea mays subsp. mays
  misc_feature (1)..(204): Ceres Seq. ID no. 12356048
MADVDEYRCFIGNLSWSTTDESLKDAFSKFGNLTEAKVVLDKFSGRSRGFGFVTFDEKQAMEDAIEGMNGLDLDGRNITVDKAQPQGPGRDRNGDRDYDRERGSRYERGRDYGGGRAPRGGGGGGGGGGDCFKCGKPGHFARECPSGDGGRGDRYGGRDDRYGGGGGGGRYGSDRGGDRYSGRSRDGGSYGGGDRYSRDRSGPY

SEQ ID NO: 17107 - protein, 144 aa, Zea mays subsp. mays
  misc_feature (1)..(144): Ceres Seq. ID no. 12356049
MEDAIEGMNGLDLDGRNITVDKAQPQGPGRDRNGDRDYDRERGSRYERGRDYGGGRAPRGGGGGGGGGGDCFKCGKPGHFARECPSGDGGRGDRYGGRDDRYGGGGGGGRYGSDRGGDRYSGRSRDGGSYGGGDRYSRDRSGPY

SEQ ID NO: 17108 - protein, 141 aa, Zea mays subsp. mays
  misc_feature (1)..(141): Ceres Seq. ID no. 12356050
MDWTWTGGTSLLIKLSHKDLVETVMVTVIMTASVDLVMNVVVTMVVGVHREVVVVVVVVVVTASSVGNLVILLESAHLGMVGEGTDMVGEMTGMVAVAVAVVMVLTVVVTDTLAVAEMAAAMGVAIATAVTDQVLTDGLSS

SEQ ID NO: 17109 - DNA, 1168 bp, Zea mays subsp. mays
  misc_feature (1)..(1168): Ceres Seq. ID no. 12356054
agcactcagaccaccaccagcagttctgagctagctatggcgatgatgatgagagcattggcagcagcggccatcctggccacggcgtttgccgtgtcggcacgagccgagcccccgcagtgcggcgccaactccaccacggcgctctgcccctactgcctgtgctgcagcaaatggggcttctgcggcagcaccgaagcctactgcggcaacggctgccagagccagtgcgaccgctgcaacgccaccgtcgcgtccatcgtcacgcgggagctcttcgacgagctgctgctgcaccgcaacgacctcaggtgccccgcccagggcttctacacctacgactcgttcatcgccgcggcgggcgccgacgcttccgacggcttcggcaccacgggcgccgtcgacatccggaagcgcgaggtcgccgcgttcctggcggagccggcgcaccggacctcgggcggctgggacggcgcgcccaacggcacctacgcctggggcttctgctacaagccggccggcgcccagaacgtcacggaccccgtcgccttcttcgagacggccatcgcgagctggatgacggcgtcggcgcgcccgcccaagccgtcgtgccacgacgtcgtcaccgagcagtggaccccctcggacgccgacaaggccgcggggaggctgcggggcttcggcgtcatcgccaacatcatcaacggcgacgccgagtgcggccgcggccccgacgccggtggccaggaccggatcggcttctacaagcgcttctgcgacatccttggcgtcagctacggcgacaacttggactgcttcgaccagaagcccttcggcgctgcccaccgccgccgccttagctgaaactaccagcggcccgcgtcacgctgacgcgtaaaagaataatgcatgcatgggcaccgcacagggcacaaatcaataacagctctcttttaaataatctgcatgcttattcgcttgcataagcatgcacacgtagtagatcgtgcatgtgtagggcgagcatgtttactttcatcccgggcggccggggttgtgtcgtcgtgcgagttgccgtgaagatgtactatgcctcatgcatgttttctatgccatatattatataaataaatgcataaaaaaactgagctgcaacgatggcagcgcc

SEQ ID NO: 17110 - protein, 287 aa, Zea mays subsp. mays
  misc_feature (1)..(287): Ceres Seq. ID no. 12356055
STQTTTSSSELAMAMMMRALAAAAILATAFAVSARAEPPQCGANSTTALCPYCLCCSKWGFCGSTEAYCGNGCQSQCDRCNATVASIVTRELFDELLLHRNDLRCPAQGFYTYDSFIAAAGADASDGFGTTGAVDIRKREVAAFLAEPAHRTSGGWDGAPNGTYAWGFCYKPAGAQNVTDPVAFFETAIASWMTASARPPKPSCHDVVTEQWTPSDADKAAGRLRGFGVIANIINGDAECGRGPDAGGQDRIGFYKRFCDILGVSYGDNLDCFDQKPFGAAHRRRLS

SEQ ID NO: 17111 - protein, 275 aa, Zea mays subsp. mays
  misc_feature (1)..(275): Ceres Seq. ID no. 12356056
MAMMMRALAAAAILATAFAVSARAEPPQCGANSTTALCPYCLCCSKWGFCGSTEAYCGNGCQSQCDRCNATVASIVTRELFDELLLHRNDLRCPAQGFYTYDSFIAAAGADASDGFGTTGAVDIRKREVAAFLAEPAHRTSGGWDGAPNGTYAWGFCYKPAGAQNVTDPVAFFETAIASWMTASARPPKPSCHDVVTEQWTPSDADKAAGRLRGFGVIANIINGDAECGRGPDAGGQDRIGFYKRFCDILGVSYGDNLDCFDQKPFGAAHRRRLS

SEQ ID NO: 17112 - protein, 273 aa, Zea mays subsp. mays
  misc_feature (1)..(273): Ceres Seq. ID no. 12356057
MMMRALAAAAILATAFAVSARAEPPQCGANSTTALCPYCLCCSKWGFCGSTEAYCGNGCQSQCDRCNATVASIVTRELFDELLLHRNDLRCPAQGFYTYDSFIAAAGADASDGFGTTGAVDIRKREVAAFLAEPAHRTSGGWDGAPNGTYAWGFCYKPAGAQNVTDPVAFFETAIASWMTASARPPKPSCHDVVTEQWTPSDADKAAGRLRGFGVIANIINGDAECGRGPDAGGQDRIGFYKRFCDILGVSYGDNLDCFDQKPFGAAHRRRLS

SEQ ID NO: 17113 - DNA, 2047 bp, Zea mays subsp. mays
  misc_feature (1)..(2047): Ceres Seq. ID no. 12356085
acaaacttccctgaattcctgttcgctaccttcgcttccgctccaaaaaccaaataaaaaacgcacctttccttcccttctcctccccttcgctttcccccgtcctcccttccctcgatcccctcgccggaaaagatcccattccatccacctccacgtcccggcgcaatcagagtttccggcggcaaagcaggaaggcggaagcgaaaggaatgttgcacctttaagtagcgcggcgacctggtgtttcttcctggccggcgatgggctgcttcccgtgcttcgactccccggcagatgagcagcttaaccccaaattcggtggcgccggtgggtacggcggcacgtcctctgccgtcgcggcgtacggaaacggcacaggcgccggcgtcagcatcggccggcacggggacagggggtacccggacctgcagcaggcgcccatggcggctccgcgcgtcgagaagctctcagcagcggctgagaaagcaagagtaaagagcaatgggctcaccaaagaggctttggtgccaaaggatgccaatggcaatgccatctcagcgcaaactttcaccttccgtgagcttgctaccgccaccaggaacttcaggcccgagtgcttcctgggagagggaggttttggacgtgtttacaagggccgccttgagagcacaggccaggttgttgctataaagcagcttaacagggatgggcttcaaggaaacagagaatttctagtagaagttctcatgctcagcttactacatcatcaaaacctggttaatttgattggttattgtgctgatggagaccagagacttcttgtttatgaatatatgccttctggatcacttgaagatcatttgcacgatctacctcttgataaagaggccttggactggaacaccaggatgaaaattgcagcaggtgctgccaaaggactggagtaccttcatgacaaagctaatccaccagttatttatagggatttcaagtcatcgaacattctgttggatgaaagtttccacccgaagctgtctgattttggacttgctaagttgggtccagttggcgacaaatcacatgtctcaacacgtgtaatgggtacatatggttattgtgcaccagaatatgctatgacagggcagctgacagtgaagtctgacgtgtatagttttggggttgtcttgctagagttgattactggccgtagggctattgacagcaccagaccacatggagaacaaaatcttgtctcatgggcacgtcctctgtttaacgacagaagaaagctccctaagatggctgacccgaggctggaagggcgataccccatgcgtgggctttaccaagcccttgcagtggcttcgatgtgcattcagtcggaggctgcttcacgcccactgattgcagatgtcgtgactgctctgtcctacttggcatcccagccatatgatcccaacgcagctcttgcttcaaggaagccaggcggcgatcagcgaagcaagcctggcgagaacggcagggcagtttccaggaatgatgaaactggaagctccggccacaaaacacctgccaaggaccgagaggactcacctagggacctcccagcgatcctgaacaaggaccttgaccgggagcgcatggtggccgaggcgaagatgtggggcgaccgggagcgcatggtggccgaggctaagatgtggggcgaccgagagcgcatggtggctgaggcgaagatgtggggtgaaaattggcgtgacaagcggcgtgcagagattgggcaggggagcctggattcggttactgggaacagctagggggcaattaagcgaacagaaacgtgacatccacccatgcatttcgtttgtttatttccaggtccattttcgttctggcggcggtcggcaggccccagggttgtacatttctaggtcagggaagagtgggaaagcggcagcgttgtactggacagtgaatgcatgtggttgtacatgtaaattctcagaaaagttttgtgagaatgaaaggacatatttgagttccg

SEQ ID NO: 17114 - protein, 518 aa, Zea mays subsp. mays
  misc_feature (1)..(518): Ceres Seq. ID no. 12356086
MGCFPCFDSPADEQLNPKFGGAGGYGGTSSAVAAYGNGTGAGVSIGRHGDRGYPDLQQAPMAAPRVEKLSAAAEKARVKSNGLTKEALVPKDANGNAISAQTFTFRELATATRNFRPECFLGEGGFGRVYKGRLESTGQVVAIKQLNRDGLQGNREFLVEVLMLSLLHHQNLVNLIGYCADGDQRLLVYEYMPSGSLEDHLHDLPLDKEALDWNTRMKIAAGAAKGLEYLHDKANPPVIYRDFKSSNILLDESFHPKLSDFGLAKLGPVGDKSHVSTRVMGTYGYCAPEYAMTGQLTVKSDVYSFGVVLLELITGRRAIDSTRPHGEQNLVSWARPLFNDRRKLPKMADPRLEGRYPMRGLYQALAVASMCIQSEAASRPLIADVVTALSYLASQPYDPNAALASRKPGGDQRSKPGENGRAVSRNDETGSSGHKTPAKDREDSPRDLPAILNKDLDRERMVAEAKMWGDRERMVAEAKMWGDRERMVAEAKMWGENWRDKRRAEIGQGSLDSVTGNS

SEQ ID NO: 17115 - protein, 458 aa, Zea mays subsp. mays
  misc_feature (1)..(458): Ceres Seq. ID no. 12356087
MAAPRVEKLSAAAEKARVKSNGLTKEALVPKDANGNAISAQTFTFRELATATRNFRPECFLGEGGFGRVYKGRLESTGQVVAIKQLNRDGLQGNREFLVEVLMLSLLHHQNLVNLIGYCADGDQRLLVYEYMPSGSLEDHLHDLPLDKEALDWNTRMKIAAGAAKGLEYLHDKANPPVIYRDFKSSNILLDESFHPKLSDFGLAKLGPVGDKSHVSTRVMGTYGYCAPEYAMTGQLTVKSDVYSFGVVLLELITGRRAIDSTRPHGEQNLVSWARPLFNDRRKLPKMADPRLEGRYPMRGLYQALAVASMCIQSEAASRPLIADVVTALSYLASQPYDPNAALASRKPGGDQRSKPGENGRAVSRNDETGSSGHKTPAKDREDSPRDLPAILNKDLDRERMVAEAKMWGDRERMVAEAKMWGDRERMVAEAKMWGENWRDKRRAEIGQGSLDSVTGNS

SEQ ID NO: 17116 - protein, 356 aa, Zea mays subsp. mays; identical to SEQ ID NO: 15668
  misc_feature (1)..(356): Ceres Seq. ID no. 12356088

SEQ ID NO: 17117 - DNA, 1237 bp, Zea mays subsp. mays
  misc_feature (1)..(1237): Ceres Seq. ID no. 12356095
atccggtcccaaaagtagaaaagggcaagcgacgagcacagcacagcacagcacaagcacgccttccgttttgggaaggcgaggagaggggaaccccggcccagggagagttgtggggaggggatcggcggcggaggagatggaggagcgggagaagctcgtgtgcctggccaagcttgccgagcaggcggagcggtacgacgatatggtggaattcatgaagaatcttgctaggatggacgtggatatgagtgctgaagaaaggcatttgttctcagttggtttcaagaacactattggagcaaagagggcatcatggagaatcatttgttcacatgagcaaaaggtcgcagctgatcgtcagactggtgtgatgatagatgtctataagaagaaagtagaagaggaactaaggaaggtttgcaatgaagtattgtcagtcattgctattcattgccttcccttggccagtacgggtgaaaatatcgtattcttttataagatgaaaggtgactactaccgttacttggctgaatttagcactggaactgaaaagaaagctgcctctgatcagtcacttatggcctatcagcatgccatggttgtcgcctccagtgagctctcacctgctcaccaaatccggcttggccttgccctcaatttgtcggtcttcttttatgagataatgaactctcatgagagagcttgccaagtggcaaaacaagcatttgatgaggctcttactgagataaattctggtgagggagtttacaaggatagcacaattatgatgcagcttctgaaggacaacttagcattgtggacatcagaactaactggaggtgaagcatccaagggtagcgacgatgtggacatggagggttgatacattctccatgttttaaggaaacacagaaagcacgcaaaaatatccaggctgtgatgctagcgaacctgggtcctcaagttttttctgcatcggaactcagaggagccttgtgtatttttctgaagtttctgtccgtctcgggttttttttttgaggtctgtttgttcctctcttttggccatcgtttggtcctggagtcagtcactcactaccaagtgtttcagaggtctgaactggtgagcatctagatctgttgttgctttttttttcttcttctgtgcttcagaggcatctttgtacaccgatggaaaactgtttctcttatcaacgcatagactgtcagtgctg

SEQ ID NO: 17118 - protein, 294 aa, Zea mays subsp. mays
  misc_feature (1)..(294): Ceres Seq. ID no. 12356096
SGPKSRKGQATSTAQHSTSTPSVLGRRGEGNPGPGRVVGRGSAAEEMEEREKLVCLAKLAEQAERYDDMVEFMKNLARMDVDMSAEERHLFSVGFKNTIGAKRASWRIICSHEQKVAADRQTGVMIDVYKKKVEEELRKVCNEVLSVIAIHCLPLASTGENIVFFYKMKGDYYRYLAEFSTGTEKKAASDQSLMAYQHAMVVASSELSPAHQIRLGLALNLSVFFYEIMNSHERACQVAKQAFDEALTEINSGEGVYKDSTIMMQLLKDNLALWTSELTGGEASKGSDDVDMEG

SEQ ID NO: 17119 - protein, 248 aa, Zea mays subsp. mays
  misc_feature (1)..(248): Ceres Seq. ID no. 12356097
MEEREKLVCLAKLAEQAERYDDMVEFMKNLARMDVDMSAEERHLFSVGFKNTIGAKRASWRIICSHEQKVAADRQTGVMIDVYKKKVEEELRKVCNEVLSVIAIHCLPLASTGENIVFFYKMKGDYYRYLAEFSTGTEKKAASDQSLMAYQHAMVVASSELSPAHQIRLGLALNLSVFFYEIMNSHERACQVAKQAFDEALTEINSGEGVYKDSTIMMQLLKDNLALWTSELTGGEASKGSDDVDMEG

SEQ ID NO: 17120 - protein, 226 aa, Zea mays subsp. mays
  misc_feature (1)..(226): Ceres Seq. ID no. 12356098
MVEFMKNLARMDVDMSAEERHLFSVGFKNTIGAKRASWRIICSHEQKVAADRQTGVMIDVYKKKVEEELRKVCNEVLSVIAIHCLPLASTGENIVFFYKMKGDYYRYLAEFSTGTEKKAASDQSLMAYQHAMVVASSELSPAHQIRLGLALNLSVFFYEIMNSHERACQVAKQAFDEALTEINSGEGVYKDSTIMMQLLKDNLALWTSELTGGEASKGSDDVDMEG

SEQ ID NO: 17121 - DNA, 1370 bp, Zea mays subsp. mays
  misc_feature (1)..(1370): Ceres Seq. ID no. 12356099
tcaagagtcaagatacatcagagtagctcattgcatagtttcagtgtgtaattatatatttgtctcctctagtgcagtactagagtctagtctagctagtttagattgagtctgcttgttcatctagcgcgtgttttggggtaggtagctagctagctagacacgcgcacccggacaaacgcacgcagcagacaccaagcaggaatcatcggcggcaggcggagggatggggctgagggagattgagtcgacattgccgccggggttcaggttctatcccagcgacgaggagctggtatgccattacctctacaggaaggtggccaacgagcgctccgtgcaggggacgctggtggaggtcgacctgcacgcgcgggaaccatgggagcttccagacgcggccaagctgacggcgagcgagtggtacttcttcagcttcagggaccgcaagtacgcgaccgggccgcgcacgaaccgcgccaccaagacgggctactggaaggccaccggcaaggaccgcgaggtgcgcgacccggccgcccgcgccgtcgtcgtcggcatgcggaagacgctcgtcttctaccagggccgtgcccccagcggcgtcaagtcatgctgggtcatgcacgagttccgcctcgactcgccgcgtacgacgacgacgccaccgaaggaggactgggtgctgtgcagggtgttccagaagcggaaagtcgacggcagcgagcaagacaacggcgtctccccctcgccgccggtctttgccggcgcatcgcagtcgcagggggtcgtcctgccgccggaccagccctgcgtggtggacgcgtacgtcgtggtagaccagccgggctcttcttccgtcggactcgcgccgccgcaggagaacctcggtagcggcctggacgcgttgctgacgaacggagcgatgtggcagtacacctcgtcggtcttcggtcacttgttgccgcaggaggcgaccagctccccgccggtgatggacctaggctccaggggaggagaaggaggagactacgggtgcagcttcttctacgacagcagcttcgaggacatggccaacatcgggttccgacaagggtggatgggctgatccaggaccaggaagcacacgtacgtgcgtgcagtcatgcgatatggaatgtgcatttgtgaaggaagtgattgaattaattgattccattagtagtagcaccctctagtgttgtacagtaggtacgtatatagtgtgagattagattattattgggaattgttagagtgcaccggcctctcaaatccaaagaagtaacagcggaaagaaaagctagtagctagagcacacatgtatatatttgcacaaggtagatggtttg

SEQ ID NO: 17122 - protein, 293 aa, Zea mays subsp. mays
  misc_feature (1)..(293): Ceres Seq. ID no. 12356100
MGLREIESTLPPGFRFYPSDEELVCHYLYRKVANERSVQGTLVEVDLHAREPWELPDAAKLTASEWYFFSFRDRKYATGPRTNRATKTGYWKATGKDREVRDPAARAVVVGMRKTLVFYQGRAPSGVKSCWVMHEFRLDSPRTTTTPPKEDWVLCRVFQKRKVDGSEQDNGVSPSPPVFAGASQSQGVVLPPDQPCVVDAYVVVDQPGSSSVGLAPPQENLGSGLDALLTNGAMWQYTSSVFGHLLPQEATSSPPVMDLGSRGGEGGDYGCSFFYDSSFEDMANIGFRQGWMG

SEQ ID NO: 17123 - protein, 198 aa, Zea mays subsp. mays
  misc_feature (1)..(198): Ceres Seq. ID no. 12356101
MPLPLQEGGQRALRAGDAGGGRPARAGTMGASRRGQADGERVVLLQLQGPQVRDRAAHEPRHQDGLLEGHRQGPRGARPGRPRRRRRHAEDARLLPGPCPQRRQVMLGHARVPPRLAAYDDDATEGGLGAVQGVPEAESRRQRARQRRLPLAAGLCRRIAVAGGRPAAGPALRGGRVRRGRPAGLFFRRTRAAAGEPR

SEQ ID NO: 17124 - protein, 182 aa, Zea mays subsp. mays
  misc_feature (1)..(182): Ceres Seq. ID no. 12356102
MRKTLVFYQGRAPSGVKSCWVMHEFRLDSPRTTTTPPKEDWVLCRVFQKRKVDGSEQDNGVSPSPPVFAGASQSQGVVLPPDQPCVVDAYVVVDQPGSSSVGLAPPQENLGSGLDALLTNGAMWQYTSSVFGHLLPQEATSSPPVMDLGSRGGEGGDYGCSFFYDSSFEDMANIGFRQGWMG

SEQ ID NO: 17125 - DNA, 1055 bp, Zea mays subsp. mays
  misc_feature (1)..(1055): Ceres Seq. ID no. 12356111
gctctgctttgctcccgttcccatgctgatttttttaggcggctgctggcctgcctgtctccactggaagctccggattacgtagaaaaggggcgggcggcatgaggatccagtgcgacgcgtgcgaggccgcggcggccgcggtggtgtgctgcgccgacgaggcggcgctgtgcgcgcgctgcgacgtggagatccacgccgccaacaagctcgccagcaagcaccagcggctcccgctcggcgacgccgcggcgctccccgccagcctcccgcgctgcgacgtgtgccaggagaggccggccttcatcttctgcgtcgaggacagggcgctcctctgccgccgactgcgacgagcccatccacgtccccggcacgctctccggcaaccaccagcgctacctcgccaccggcatccgcgtcggcttcagctccgtctgcggcgccagcgccgagggcctcccgccggcgccgcccaagggcagctccaagcccgcggccgtcgtcagcgcgccagctgccgggacgaccaccaaaacaaggacggtcaaggacgcgctgccgcaggaggtgccgtcctcgccgttcctgccaccgtccggttgggccgtcgaggacctcctcgagctgtcggactacgaatccagcgacaagaaagactcgtctcttgggctcaaggagctggagtggttcgaggacatcgacctgttccacgcccattcgccagctaaaactgccatggcggagttcttcgcctcgccgcagccagtgagtaacgccgggttctacaaggcgaacggggcgcgcctgttcaagaagtcacggatggaagtgcctgacgacgacgacgaggactacttcatcgttcctgatcttggctgagatgagagatctctgcatgattctccagtcatgtgatgtgtgtatgtatgcaaaatatgtatgtatgccatcatggggtgcactgacgcttacgttggacatatgtaattatccagtcatgtgatgtgtatgtacgcaaaatatgtatgtatgccatcatgggatgcactggc

SEQ ID NO: 17126 - protein, 209 aa, Zea mays subsp. mays
  misc_feature (1)..(209): Ceres Seq. ID no. 12356112
MRIQCDACEAAAAAVVCCADEAALCARCDVEIHAANKLASKHQRLPLGDAAALPASLPRCDVCQERPAFIFCVEDRALLCRRLRRAHPRPRHALRQPPALPRHRHPRRLQLRLRRQRRGPPAGAAQGQLQARGRRQRASCRDDHQNKDGQGRAAAGGAVLAVPATVRLGRRGPPRAVGLRIQRQERLVSWAQGAGVVRGHRPVPRPFAS

SEQ ID NO: 17127 - DNA, 1318 bp, Zea mays subsp. mays
  misc_feature (1)..(1318): Ceres Seq. ID no. 12356113
atccaatcgaagctctggaacctcctccactcccagcttccgccgacgctcgcttcagctgctgctttccttcccatccttcaacaggtgcaatttgcatttcccatggagctcactgattaataacgtcccttgggttcatctatgccggtaaagagggcgcatttgaagccacatgccgcagacatcaagaggaacccccatgtacatgagctttacaaattggtttaccgacttccggagaaccttagctggctgttggcaccaccagaaattcctaaaagacctgcctcaaagaagaaaaaacaaaaagacgaaatagtggccggtaacagctttggtgtgatcttggagtgggagggagttgttgtggatgatgatgatccagacttggagccccgggtttggtatgttctatcactagaagaggggaagtctttccctccagatgcattgctgaagaaaatcgagggaatgagaactgaccaggctattgcagaagtcttatgttggtcagaagattcagcagaaatccaaaggttggcaacacacaaggaggttatatatcaaaaactccaaggcggatactaccagctgcgaccacatgtgcttgatttcttgaacacccttgtgggttttgacattccaatagcaattgcagctcctcgctcaaggaagagccttgaagaagggatcaaaactgttggtctgcaaggctacttcgatgctataattgcattggatgacttctgcctagggaaacctgatggtgagatgtttgaagtcgcagcggagcaacttggtctggagccagatgtctgtgttgtgtttggtaactcaaacttgacgacggaatctgcacataacgctgggatgaggtgtgtggcagttgcaggccgacaccctgcctatgagctccaatcagcaaaccatgttgtgagatggcttgaccagctctctattgttgacttgcagaggcttgctaatggtgaagttattggtcgcaggggtagagaatctgacatggatatggaaattgtgattgaggaatgatgatgtttctgcaaaaatgacgcactaatatattgttgtgcttataatctgatacacctaagtaatgcgttacattttctaaacaggccaagcagtgcaagttccggactaaggatactctggagtttgcattaccttcctggtttgcttgtgatgaattggaattcgcctaaaactcttttagtcattagagttggaagtgaagacaactcccacccgtaacttgtgtatgtacagtatatatatgtattacctattcttcccc

SEQ ID NO: 17128 - protein, 302 aa, Zea mays subsp. mays
  misc_feature (1)..(302): Ceres Seq. ID no. 12356114
MPVKRAHLKPHAADIKRNPHVHELYKLVYRLPENLSWLLAPPEIPKRPASKKKKQKDEIVAGNSFGVILEWEGVVVDDDDPDLEPRVWYVLSLEEGKSFPPDALLKKIEGMRTDQAIAEVLCWSEDSAEIQRLATHKEVIYQKLQGGYYQLRPHVLDFLNTLVGFDIPIAIAAPRSRKSLEEGIKTVGLQGYFDAIIALDDFCLGKPDGEMFEVAAEQLGLEPDVCVVFGNSNLTTESAHNAGMRCVAVAGRHPAYELQSANHVVRWLDQLSIVDLQRLANGEVIGRRGRESDMDMEIVIEE

SEQ ID NO: 17129 - protein, 192 aa, Zea mays subsp. mays
  misc_feature (1)..(192): Ceres Seq. ID no. 12356115
MRTDQAIAEVLCWSEDSAEIQRLATHKEVIYQKLQGGYYQLRPHVLDFLNTLVGFDIPIAIAAPRSRKSLEEGIKTVGLQGYFDAIIALDDFCLGKPDGEMFEVAAEQLGLEPDVCVVFGNSNLTTESAHNAGMRCVAVAGRHPAYELQSANHVVRWLDQLSIVDLQRLANGEVIGRRGRESDMDMEIVIEE

SEQ ID NO: 17130 - DNA, 909 bp, Zea mays subsp. mays
  misc_feature (1)..(909): Ceres Seq. ID no. 12356120
accaaagcaaaccgaagccgcactctaccgcgctcctcccgaaccacagctatgctcgcccaccgcctcctcctcctcctcgccgtcgccgcggcgagcggcaccgccttcgctaagccgacggcgtacgaagccctcgctgactacgacttcccgccggggatcctccccaagggcgtggtcgcctacacgctcgacaacgccacgggcgccttcacggccacgctcgacgcctccgcgtccggcagcgggtcctccgtctgcgagttctccatccagggctcctactcgctccgctaccagaccaagatcaccggaaagatcgcccccgaccacctcaccgacctcgagggcgtctccgtcaaggtcctcttcttctggctcaacatcgtcgaggtcacccggcgcggcgacaacctcgagttctccgtcggcatcgtctccgcggacttcgggattgaaaacttcctcgagtgccccacctgtggctgcgggttcgactgcaacaacctgctcatgctgcagaagcccggcgccgccaccgccaagctgcgcctgcggggtgccttctagaactccacttctgcagatttggtgactgctgctgtaagctgcctcgactagtagtgctgtatgtctagtagatgtgggttaataaagagggcaaacttgaaagatcccagcttttagatgtgggatggggtaaccaagttcaggactcgatgtcatgtttcaccaattgtttcagacagttctaggaacagtcagagaagcaattaagacctttcaaatattttaatttatacgtctctatggaaattgtcttatttccattgagatgtttgcccctcatgtgaattagtttgtgaagtggtgatagttgaatcccatggatatggatggttgcct

SEQ ID NO: 17131 - protein, 198 aa, Zea mays subsp. mays
  misc_feature (1)..(198): Ceres Seq. ID no. 12356121
PKQTEAALYRAPPEPQLCSPTASSSSSPSPRRAAPPSLSRRRTKPSLTTTSRRGSSPRAWSPTRSTTPRAPSRPRSTPPRPAAGPPSASSPSRAPTRSATRPRSPERSPPTTSPTSRASPSRSSSSGSTSSRSPGAATTSSSPSASSPRTSGLKTSSSAPPVAAGSTATTCSCCRSPAPPPPSCACGVPSRTPLLQIW

SEQ ID NO: 17132 - protein, 190 aa, Zea mays subsp. mays
  misc_feature (1)..(190): Ceres Seq. ID no. 12356122
TKANRSRTLPRSSRTTAMLAHRLLLLLAVAAASGTAFAKPTAYEALADYDFPPGILPKGVVAYTLDNATGAFTATLDASASGSGSSVCEFSIQGSYSLRYQTKITGKIAPDHLTDLEGVSVKVLFFWLNIVEVTRRGDNLEFSVGIVSADFGIENFLECPTCGCGFDCNNLLMLQKPGAATAKLRLRGAF

SEQ ID NO: 17133 - protein, 173 aa, Zea mays subsp. mays
  misc_feature (1)..(173): Ceres Seq. ID no. 12356123
MLAHRLLLLLAVAAASGTAFAKPTAYEALADYDFPPGILPKGVVAYTLDNATGAFTATLDASASGSGSSVCEFSIQGSYSLRYQTKITGKIAPDHLTDLEGVSVKVLFFWLNIVEVTRRGDNLEFSVGIVSADFGIENFLECPTCGCGFDCNNLLMLQKPGAATAKLRLRGAF

SEQ ID NO: 17134 - DNA, 858 bp, Zea mays subsp. mays
  misc_feature (1)..(858): Ceres Seq. ID no. 12356124
aacgaactccagaaataatccgccctcgtatcctcacgcccacaaaacacccgaagaaaagaagagactgaacgccgcgagttcacgtgacgatggagaacgccgcctccgccatcgctaagccgtcgctgtccaagaagccctcgccgtcgttccgcctccggaacggcagcctcaacgcactgcgcctgcgccgcgtgttcgacctcttcgaccgcaacggcgacggcgagatcagcctcgacgagatggcctcggcgctcgacgcgctcggcctcggcgccgaccgctccggcctggaggccgcggttggcgggtacatcccggccggcgccgcggggctccgcttcaacgacttcgagtccctccaccgcgcgctcggggacgcgctgttcgggccccatgccggtggctgtgaccgaggatgacgacgacgagggggacatgaaggaggcgttccgggtgttcgatgaggacggcgacggcttcatctcggccgccgagctgcaggccgtgctcaagaagctcggcctgcccgaggctcggaacctggccactgtgcaggagatgatctgcaacgtcgaccgcaactgcgacggccgcgtcgacttcggcgagttcaagaacatgatgcaggggatcaccgtgtggggcgcttagctgccgcgcacctgcgttgtcacaccccctctactgcgtggtgtcatgtatgtatccaggcaccgtaggatgcgcttttctacccggcgcttcttcctcctcttgatggcgcagtggattcttcctgttcttggctttgctatctgactctgcttgtagtcttgagaatctggcggcacacagacatagttttctttc

SEQ ID NO: 17135 - protein, 111 aa, Zea mays subsp. mays
  misc_feature (1)..(111): Ceres Seq. ID no. 12356125
MENAASAIAKPSLSKKPSPSFRLRNGSLNALRLRRVFDLFDRNGDGEISLDEMASALDALGLGADRSGLEAAVGGYIPAGAAGLRFNDFESLHRALGDALFGPHAGGCDRG

SEQ ID NO: 17136 - protein, 85 aa, Zea mays subsp. mays
  misc_feature (1)..(85): Ceres Seq. ID no. 12356126
MPVAVTEDDDDEGDMKEAFRVFDEDGDGFISAAELQAVLKKLGLPEARNLATVQEMICNVDRNCDGRVDFGEFKNMMQGITVWGA

SEQ ID NO: 17137 - protein, 71 aa, Zea mays subsp. mays
  misc_feature (1)..(71): Ceres Seq. ID no. 12356127
MKEAFRVFDEDGDGFISAAELQAVLKKLGLPEARNLATVQEMICNVDRNCDGRVDFGEFKNMMQGITVWGA

SEQ ID NO: 17138 - DNA, 1119 bp, Zea mays subsp. mays
  misc_feature (1)..(1119): Ceres Seq. ID no. 12356187
gctgacgtcatcagtgcctttccccttccttgtttgctgaagtccctggtgtggaccgtggagtctcagggagaagcgcatgcgcacgccaatcggcaatccaccaaagattccgttctcccagtcgcctctcccagtcccagatctcgttcactcgcactcgcgcaaccccgcggccccgcgcctaatggcatcctgtggcgccggcgacgccgcgtcagcgcagccgagggccagtatctcgcacgtcatcttcgatatggacggccttctcctcgacacggagggcttctacacggaggtgcaggagaagatcctagcgaggtacgacaaggtgttcgactggtcgctcaaggccaagatgatgggcaagaaggcggccgagtctgcccgcatcttcgtcgacgagtgcggcctcaacggcctcctcacccccgagcagttcctcgaggagcgcgagagcatgctccaagcgctcttcccatcctgtaccaagctgccaggagtactacgtttggtgcatcatcttcatgccaacggagtaccaatggctgttgcgacaggatcccataaacgccattttgcactgaagacccagaatcaccaggaaatgttttccctgatgcatcacgttgtcatgggtgatgatccagaggtgaaggctggcaaaccatcccctgatatttttcttgctgctatgaggaggtttgagggcggcgtagaacctagcaagtgcttggtttttgaagacgctccttcgggtgtagctgcagcgaaaaatgccggaatgtctgtagtgatggtcccggatccaaggctggatgtttcgtatcacaaaggagctgaccaagttctcagttcattgctggacttcaaacctgccgaatggggcttgccggcatttaaagagtagacattccatacaagataacaagattataagagtctagtgaagaagaatgtgagatactccctaagatgcaaattaaagagtacaattctttaagatgctgctcaaggaaaattccataaaatgttggtcaaacatacaattgaacattcttgtcgcctcctaactatgtgtcaccaaattactctgaataagttcgttccgattcc

SEQ ID NO: 17139 - protein, 277 aa, Zea mays subsp. mays
  misc_feature (1)..(277): Ceres Seq. ID no. 12356188
MRTPIGNPPKIPFSQSPLPVPDLVHSHSRNPAAPRLMASCGAGDAASAQPRASISHVIFDMDGLLLDTEGFYTEVQEKILARYDKVFDWSLKAKMMGKKAAESARIFVDECGLNGLLTPEQFLEERESMLQALFPSCTKLPGVLRLVHHLHANGVPMAVATGSHKRHFALKTQNHQEMFSLMHHVVMGDDPEVKAGKPSPDIFLAAMRRFEGGVEPSKCLVFEDAPSGVAAAKNAGMSVVMVPDPRLDVSYHKGADQVLSSLLDFKPAEWGLPAFKE

SEQ ID NO: 17140 - protein, 241 aa, Zea mays subsp. mays
  misc_feature (1)..(241): Ceres Seq. ID no. 12356189
MASCGAGDAASAQPRASISHVIFDMDGLLLDTEGFYTEVQEKILARYDKVFDWSLKAKMMGKKAAESARIFVDECGLNGLLTPEQFLEERESMLQALFPSCTKLPGVLRLVHHLHANGVPMAVATGSHKRHFALKTQNHQEMFSLMHHVVMGDDPEVKAGKPSPDIFLAAMRRFEGGVEPSKCLVFEDAPSGVAAAKNAGMSVVMVPDPRLDVSYHKGADQVLSSLLDFKPAEWGLPAFKE

SEQ ID NO: 17141 - protein, 217 aa, Zea mays subsp. mays
  misc_feature (1)..(217): Ceres Seq. ID no. 12356190
MDGLLLDTEGFYTEVQEKILARYDKVFDWSLKAKMMGKKAAESARIFVDECGLNGLLTPEQFLEERESMLQALFPSCTKLPGVLRLVHHLHANGVPMAVATGSHKRHFALKTQNHQEMFSLMHHVVMGDDPEVKAGKPSPDIFLAAMRRFEGGVEPSKCLVFEDAPSGVAAAKNAGMSVVMVPDPRLDVSYHKGADQVLSSLLDFKPAEWGLPAFKE

SEQ ID NO: 17142 - DNA, 1539 bp, Zea mays subsp. mays
  misc_feature (1)..(1539): Ceres Seq. ID no. 12356198
agaagcacggcaatctcgatctcgttcgttcccctgagcggcagtcagtgcgagcgagcgcgcacacagacaactcatcctctcccctctctctctcacacacacacatccatcatcccatccctgtgacgggcgatccgagggcctaccgacgatggtgtccgccgtgctccggaccatcctcgtgacgggcggcgccgggtacatcggcagccacacggtgctgcagctgctgcagcagggcttccgcgtcgtcgtcgtcgacaacctcgacaacgcctccgaggccgccctcgcccgcgtcgccgagctcgccgggcacgacggcgccaacctcgtcttccacaaggttgaccttcgcgacaggcacgcgttggtggacatcttctcgtcgcacaggttcgaggctgtcattcactttgctgggctcaaggctgttggggagagcgtgcacaagcccctgctttactacgacaacaacctggtcggcaccatcaccctcctggaggtgatggctgcgaatggctgcaagaagctggtgttctcgtcatctgcaactgtctatgggtggcccaaggaagtaccatgcaccgaagaattcccgctctgcgccaccaatccctatgggcggacaaagcttgtgattgaagacatctgccgcgacgtccaccgctccgacccggactggaagatcatactgctcaggtacttcaaccccgttggcgctcatccaagcgggtacatcggcgaagacccctgcggtgtcccgaacaacctgatgccctacgtgcagcaagtcgctgttgtgaggttacctcacctcacggtctacgggacggactacagcaccaaggatgggactggggtgcgtgattacatccacgttgtcgacctggctgacggccacatagcagccctgaggaagctccacgaagactccgacaaaataggctgtgaagtgtacaacttggggactggaaaggggacgtcggtgttggaaatggtggctgcattcgagaaggcttctgggaagaaaatccctctgggtgttcgctgggcgaagacccggagacgcagagatcgtctacgccgcaactgccaaggcagagaaagagctcaaatggaaggccaagtacgggatcgaggagatgtgcagagatctgtggaactgggcgagcaagaacccgtacgggtacgctgggtcacgcgacaacagcaaatgaaccacccatccatgcatcccatcctgcagtaggagcaagcagcagccttatagcctatgctaccataattagtaactcatcaatcatgcatacataatcagccagtcatctgattaggggtactgcgatgggcctcgcttcttcagtgtatagagggaggaggaggggggtcatcttgatattctttttttttatcattcccgaatgattattattagtagccagttcgatattactccatggttggttgctagagaaggaataagctccattcatatacctaactaaagatatatatatacatgcattcactgtc

SEQ ID NO: 17143 - protein, 366 aa, Zea mays subsp. mays
  misc_feature (1)..(366): Ceres Seq. ID no. 12356199
MVSAVLRTILVTGGAGYIGSHTVLQLLQQGFRVVVVDNLDNASEAALARVAELAGHDGANLVFHKVDLRDRHALVDIFSSHRFEAVIHFAGLKAVGESVHKPLLYYDNNLVGTITLLEVMAANGCKKLVFSSSATVYGWPKEVPCTEEFPLCATNPYGRTKLVIEDICRDVHRSDPDWKIILLRYFNPVGAHPSGYIGEDPCGVPNNLMPYVQQVAVVRLPHLTVYGTDYSTKDGTGVRDYIHVVDLADGHIAALRKLHEDSDKIGCEVYNLGTGKGTSVLEMVAAFEKASGKKIPLGVRWAKTRRRRDRLRRNCQGRERAQMEGQVRDRGDVQRSVELGEQEPVRVRWVTRQQQMNHPSMHPILQ

SEQ ID NO: 17144 - protein, 247 aa, Zea mays subsp. mays
  misc_feature (1)..(247): Ceres Seq. ID no. 12356200
MAANGCKKLVFSSSATVYGWPKEVPCTEEFPLCATNPYGRTKLVIEDICRDVHRSDPDWKIILLRYFNPVGAHPSGYIGEDPCGVPNNLMPYVQQVAVVRLPHLTVYGTDYSTKDGTGVRDYIHVVDLADGHIAALRKLHEDSDKIGCEVYNLGTGKGTSVLEMVAAFEKASGKKIPLGVRWAKTRRRRDRLRRNCQGRERAQMEGQVRDRGDVQRSVELGEQEPVRVRWVTRQQQMNHPSMHPILQ

SEQ ID NO: 17145 - DNA, 1475 bp, Zea mays subsp. mays
  misc_feature (1)..(1475): Ceres Seq. ID no. 12356205
gttctgttggcagcaagtgcaatgagcatcaatgcatcagccatcatgctggtacttccaaaagagcgaaaggtttgccaattctgaaggagaaagcaaaccatatctgaaagacaaagcgcggacggaccctttgagcatccaattcgtgagctttggcgtctgtgtattttaatcgggagctgtaggctgtagctagctagagaggtttagagcagcacccaaatggcgagcaaggtggtggacctccggtcagacacggtcaccaagccctccgaggccatgcgggccgccatggccgccgccgacgtcgacgacgacgtcctgggcgcggacccgaccgcgcatcgcttcgaggcggagatggccgcggtcatgggcaaggaagccgcgctgttcgtgccgtcgggcaccatgggcaacctcatctccgtcctcgtgcactgcgacgtcaggggcagccgaggccatcctcggcgacaactcgcacatccacgtctacgagaacggcggcatctccaccatcggcggcgtgcaccccaggaccgtgaagaacaaccccgacggtaccatggatatcgacaagatcgttgccgccatcaggcatcctgatctccattacccgacgaccagactgatctgcttggagaacacacatgggaatactggtggaaagtgtttatctgtagaatacactgacaaggttggtgaaattgccaagagccatggcttgaagcttcatatagatggagctcgcatcttcaatgcgtctgtggcacttggagttcctgtagatagactcgtaaaagctgctgattcagtttcggtatgcctatcgaaagggttaggcgcacccgtcggatcagtgattgttggttcgaaggctttcattgacaaggccagaattctccggaagaccctaggcggtggaatgagacaggtgggagttctttgtgctgctgctcatgttgccgttcgtgacactatgggaaagcttgcggatgaccacaggaaggctaaagctttggcagtgggactgaagaaaatcgagcagattacagtggacccagcttcggtcgagaccaatatggtattctttgaggtcatggatccaagaatatcacctgacaaactgtgtcaagtcttggaacagcacaacgtgcttgcaatgccagccaattcaaaaagtattaggttcgtcgtccattaccaaatttcagacgctgatgttcggtacgcattggcatgtgtccagaaagcaatcaaagagctactggaaggcagtactgagttggggcattcgataaacggagctaccaaaagctcgtatgggcactagatcacttggattctggcaacctgatgcatgcagcgacacatggtacccagatgcttgttagctgctctgcttgtctgtgaccaacgcctagctgttgtagtctcgcctttcccgaataattgttgctgttcagtcg

SEQ ID NO: 17146 - protein, 255 aa, Zea mays subsp. mays
  misc_feature (1)..(255): Ceres Seq. ID no. 12356206
MDIDKIVAAIRHPDLHYPTTRLICLENTHGNTGGKCLSVEYTDKVGEIAKSHGLKLHIDGARIFNASVALGVPVDRLVKAADSVSVCLSKGLGAPVGSVIVGSKAFIDKARILRKTLGGGMRQVGVLCAAAHVAVRDTMGKLADDHRKAKALAVGLKKIEQITVDPASVETNMVFFEVMDPRISPDKLCQVLEQHNVLAMPANSKSIRFVVHYQISDADVRYALACVQKAIKELLEGSTELGHSINGATKSSYGH

SEQ ID NO: 17147 - protein, 135 aa, Zea mays subsp. mays
  misc_feature (1)..(135): Ceres Seq. ID no. 12356207
MRQVGVLCAAAHVAVRDTMGKLADDHRKAKALAVGLKKIEQITVDPASVETNMVFFEVMDPRISPDKLCQVLEQHNVLAMPANSKSIRFVVHYQISDADVRYALACVQKAIKELLEGSTELGHSINGATKSSYGH

SEQ ID NO: 17148 - protein, 128 aa, Zea mays subsp. mays
  misc_feature (1)..(128): Ceres Seq. ID no. 12356208
MASKVVDLRSDTVTKPSEAMRAAMAAADVDDDVLGADPTAHRFEAEMAAVMGKEAALFVPSGTMGNLISVLVHCDVRGSRGHPRRQLAHPRLRERRHLHHRRRAPQDREEQPRRYHGYRQDRCRHQAS

SEQ ID NO: 17149 - DNA, 1202 bp, Zea mays subsp. mays
  misc_feature (1)..(1202): Ceres Seq. ID no. 12356239
atcctttgctggcacgaccaaaaacttctcttcatccaatctgcaactccctcccgcaccaaaccttacccaggactaggaggaggaaagaaatggaggaataaagcagagtgagaagagaagaggaagcgaggcctctgctccagctcctatacaggagcgagcgacccagacgcctctgcttcggtgcttcccagtgccagtagtcgccaatccgcccaggtctcatgcttcggtccacgcacccacccagccccagcagcggcagctccgacgccacgatggtcgggggcggcgccccgagcggcgccaagctgctgcagatcctcaacgtgcgggtggtgggcagcggcgaccgcgtggtggtgctgtcccacgggttcggcacggaccagtcggcgtggagccgcgtgctcccctacctcacccgcgaccaccgcgtggtgctctacgacctcgtctgcgccggcagcgtcaacccggagcacttcgacttccgccgctacgacacgctggactcgtacgtcgacgacctgctcgccatcctcgacgcgctccgcgtctcgcgctgcgccttcgtcgggcactccgtgtccgccatgatcggcatcctcgcctccatccgccgccccgagctcttcgccaaggctcgtcctcatcggcgcgtcgcccaggttcctgaacgaccacgactaccacggcgggttcgagctgccggagatccagcaggtgttcgacgcgatggcggccaactactcggcgtgggcgaccgggtacgccccgctggcggttggcgcggacgtgcccgcggcggtgcaggagttcagccgcacgctcttcaacatgcggccggacatctcgctccacgtctgccgcaccgtgttcaacacggacctccgcggcgtgctgggcatggtgcgcgccccctgcgtggtggtgcagaccacccgcgacgtctccgtcccggcctccgtcgccgcctacctcaaggcccacctcggcggccgcaccgccgtcgagttcctccagaccgagggccacctcccgcacctcagcgcccccggcctcctcgcccaggtgctccgccgcgcgctcgcccggtactagcagccgggccggccaggcctgtttttaccgcctcgatttacccctgccgagaccgagaatcaagaaatggcgcgactcgcgccgtttgctgtgtc

SEQ ID NO: 17150 - protein, 325 aa, Zea mays subsp. mays
  misc_feature (1)..(325): Ceres Seq. ID no. 12356240
MLRSTHPPSPSSGSSDATMVGGGAPSGAKLLQILNVRVVGSGDRVVVLSHGFGTDQSAWSRVLPYLTRDHRVVLYDLVCAGSVNPEHFDFRRYDTLDSYVDDLLAILDALRVSRCAFVGHSVSAMIGILASIRRPELFAKARPHRRVAQVPERPRLPRRVRAAGDPAGVRRDGGQLLGVGDRVRPAGGWRGRARGGAGVQPHALQHAAGHLAPRLPHRVQHGPPRRAGHGARPLRGGADHPRRLRPGLRRRLPQGPPRRPHRRRVPPDRGPPPAPQRPRPPRPGAPPRARPVLAAGPARPVFTASIYPCRDRESRNGATRAVCCV

SEQ ID NO: 17151 - protein, 307 aa, Zea mays subsp. mays
  misc_feature (1)..(307): Ceres Seq. ID no. 12356241
MVGGGAPSGAKLLQILNVRVVGSGDRVVVLSHGFGTDQSAWSRVLPYLTRDHRVVLYDLVCAGSVNPEHFDFRRYDTLDSYVDDLLAILDALRVSRCAFVGHSVSAMIGILASIRRPELFAKARPHRRVAQVPERPRLPRRVRAAGDPAGVRRDGGQLLGVGDRVRPAGGWRGRARGGAGVQPHALQHAAGHLAPRLPHRVQHGPPRRAGHGARPLRGGADHPRRLRPGLRRRLPQGPPRRPHRRRVPPDRGPPPAPQRPRPPRPGAPPRARPVLAAGPARPVFTASIYPCRDRESRNGATRAVCCV

SEQ ID NO: 17152 - protein, 201 aa, Zea mays subsp. mays
  misc_feature (1)..(201): Ceres Seq. ID no. 12356242
MIGILASIRRPELFAKARPHRRVAQVPERPRLPRRVRAAGDPAGVRRDGGQLLGVGDRVRPAGGWRGRARGGAGVQPHALQHAAGHLAPRLPHRVQHGPPRRAGHGARPLRGGADHPRRLRPGLRRRLPQGPPRRPHRRRVPPDRGPPPAPQRPRPPRPGAPPRARPVLAAGPARPVFTASIYPCRDRESRNGATRAVCCV

SEQ ID NO: 17153 - DNA, 1486 bp, Zea mays subsp. mays
  misc_feature (1)..(1486): Ceres Seq. ID no. 12356243
acgggaccggtaacttctagaacccaccaccttccatccttccttcctttcctctctctctctctctcctcgcgcccacggtgcccgccagccagatccgcgcgttcaccggcgccatggccgccgagcatgccaccgccgcggtgggtgagccgcctcccgccacgtcgcagccggcggagggcgtgacggcggcggcgggccagaggtccgtgcccacgccgttcctcagcaagacgtaccagctggtggacgacccggcggtggacgacatcatctcgtggaacgacgacgggtctgccttcatcgtgtggcgcccggcggagttcgcgcgcgatctgttgcccaagtacttcaagcacaacaacttctccagcttcgtgcgccagctcaacacctacgggttcaggaagatcgtgccggacaggtgggagttcgcgaacgactgcttccgccgaggggagaagcggctgctctgcgacatacaccgccggaaggtgtcgccggccacgggggcggtcacggtggccgccgccgccgctgcggccatcccgatggcgctgcccgtgggctctccggtgtactccggcgaggagcaggtgctgtcaagctcgtccccggagcccccgtcgctgcagcagcacccgccggcgccgtccgggtcgggctccggcggggtggtctcgggcgacgtgggcgaggagaacgagcggttgcggcgggagaacgcgcggctggcgcgcgagctcggacagatgaagaagctctgcaacaacatcctcctcctcatgtccaagtacgccgccactcagcagccggacgccgccaaggaggcggccgccgggaactgcaccggcgagtcgtcggatgccgccgcggcgcctccgctcccttcgatcctggagctcctaccctcgtgccgcgccgaccccgcgcccgctgnagccggaacggatcacgaggatgacgaaaaggcgggcgctaggctgttcggcgtctccatcgggcggaaacgaatgcgggacgagagcgaccaccacgccggcgtctgcgcagcggaggtgaaagccgagccggtggacgcgcgtcccgaccagcagcggcagcgcaacgccacggagccgcagtcgtggcccatttaccggcccaggcctgtgtaccacccgctccgggcctgcaacggctcgggcagcgctgggagcgaccacgacgggtccaacgactcgaggtgacgggagcaatcgtcgatctgccctcagtaaattagtattacacttactaatggtactaggtaactatattacaggttaaactaggatgtgagctctaaatctctaattatgtggggatttactgaccgatcctatgtaaaaatctccagtgtttatgtagttgatctcatattactgcaagtaccgagtatcctttctgtaccataaaactagaggttaacttatgcacagtagactaatattttctttaagtc

SEQ ID NO: 17154 - protein, 371 aa, Zea mays subsp. mays
  misc_feature (1)..(371): Ceres Seq. ID no. 12356244
  misc_feature (276)..(276): Xaa is any aa, unknown or other
MAAEHATAAVGEPPPATSQPAEGVTAAAGQRSVPTPFLSKTYQLVDDPAVDDIISWNDDGSAFIVWRPAEFARDLLPKYFKHNNFSSFVRQLNTYGFRKIVPDRWEFANDCFRRGEKRLLCDIHRRKVSPATGAVTVAAAAAAAIPMALPVGSPVYSGEEQVLSSSSPEPPSLQQHPPAPSGSGSGGVVSGDVGEENERLRRENARLARELGQMKKLCNNILLLMSKYAATQQPDAAKEAAAGNCTGESSDAAAAPPLPSILELLPSCRADPAPAXAGTDHEDDEKAGARLFGVSIGRKRMRDESDHHAGVCAAEVKAEPVDARPDQQRQRNATEPQSWPIYRPRPVYHPLRACNGSGSAGSDHDGSNDSR

SEQ ID NO: 17155 - protein, 225 aa, Zea mays subsp. mays
  misc_feature (1)..(225): Ceres Seq. ID no. 12356245
  misc_feature (130)..(130): Xaa is any aa, unknown or other
MALPVGSPVYSGEEQVLSSSSPEPPSLQQHPPAPSGSGSGGVVSGDVGEENERLRRENARLARELGQMKKLCNNILLLMSKYAATQQPDAAKEAAAGNCTGESSDAAAAPPLPSILELLPSCRADPAPAXAGTDHEDDEKAGARLFGVSIGRKRMRDESDHHAGVCAAEVKAEPVDARPDQQRQRNATEPQSWPIYRPRPVYHPLRACNGSGSAGSDHDGSNDSR

SEQ ID NO: 17156 - DNA, 1634 bp, Zea mays subsp. mays
  misc_feature (1)..(1634): Ceres Seq. ID no. 12356246
aagcatagcagcagcccattgcctgcctttcggcttaccctctctctctctctctcacacacacacacaaccactcacactgccggttggtttcccttccgttgtggttggtgcgtacttagtggcggccggccatggcgcggaggaggggcttctcggcggtggtgccgccggcgtggctgccggcggtgctcctgtgcctggcaggcgcggcgtcgggcgagccgctgccgcagtactacaatgccatcttcagcttcggcgactccttctccgacacgggcaacttcgtcatcatcaactcgggcaagctgcccaacatgcccaagttcccgccgccgtacgcgaggtgctccaacggccgcctcgtgatcgacttcctggccgaggcgttcggtctcccgctgctccctccgtcggcgaacaagggcaccaacttcagccagggcgccaacttcgcggtgatgggcgcgacggcgcttgacctcaagtacttcaaggacaacaacgtgtggagcatcccgcccttcaacacgtccatgggcgtgcagctggagtggttccaggaggtgaagcgcagcatctgccccgacgaccccggcgcgtgccgcgccctgttcgggagggccctgttcgtgttcggcgagttcggcggcaacgactacagcttcgcgtggaaggcggactggtcgctggagaaggtgaagacgatggtgccggcggtggtggcgtcgctggtgggcggcgtggagcggctgctggacgagggcgcccgccacgtcgtggtgccgggcaacctccccgccggatgcatccccatcacgctcaccatgtacccgtccgaggaccgctccgagtacgacccgcgcaccggctgcctcaagaagtacaacagcgtcgcgctctaccacaacgccatgctccgcgtcgcgctcgaccgcctgcagcgcccccgcccggagtccccgcgtcgtctacgccgactactacacgccctacatacagttcgcgcgcacaccgcacctctacggctacaagcgcggcgctctgcgggcttgctgcggcggcggcgggccgtacaactacaacgtgagcgcgtcgtgcgggctccccggcgccaccacctgcgaggaccccgacgcgcacgtcagctgggacggcatccacctcaccgaggcgccctaccgcttcatcgccaacacctgggtcaagggcccctacgcgcacccgccgctcgccaccgtcgtgctcgaggacatggtcgactgatcctcttgtggtttggcacaagggaagagctgatatgtaacgtgaattccattcgttcatgtccatgtatattgggtactaccggagcggagtaacaaaaaaaaaatatatatgttagtcttttctgtttttttttcgtcgtgcacctgtgtgccgtgcagtcgcatagatcaatgaagaaaccactccagctgtttttgatgattggtttaggcggacttgcaagcggtcgagcctgcttatgttgggcagtgtactgtacacgctaaggccttgttcgtttctgtcggatcggtgggtcggaacgattccaaaccggattgcttctctaatttatataaactttgattgagtggaacgattcc

SEQ ID NO: 17157 - protein, 409 aa, Zea mays subsp. mays
  misc_feature (1)..(409): Ceres Seq. ID no. 12356247
MARRRGFSAVVPPAWLPAVLLCLAGAASGEPLPQYYNAIFSFGDSFSDTGNFVIINSGKLPNMPKFPPPYARCSNGRLVIDFLAEAFGLPLLPPSANKGTNFSQGANFAVMGATALDLKYFKDNNVWSIPPFNTSMGVQLEWFQEVKRSICPDDPGACRALFGRALFVFGEFGGNDYSFAWKADWSLEKVKTMVPAVVASLVGGVERLLDEGARHVVVPGNLPAGCIPITLTMYPSEDRSEYDPRTGCLKKYNSVALYHNAMLRVALDRLQRPRPESPRRLRRLLHALHTVRAHTAPLRLQARRSAGLLRRRRAVQLQRERVVRAPRRHHLRGPRRARQLGRHPPHRGALPLHRQHLGQGPLRAPAARHRRARGHGRLILLWFGTREELICNVNSIRSCPCILGTTGAE

SEQ ID NO: 17158 - protein, 347 aa, Zea mays subsp. mays
  misc_feature (1)..(347): Ceres Seq. ID no. 12356248
MPKFPPPYARCSNGRLVIDFLAEAFGLPLLPPSANKGTNFSQGANFAVMGATALDLKYFKDNNVWSIPPFNTSMGVQLEWFQEVKRSICPDDPGACRALFGRALFVFGEFGGNDYSFAWKADWSLEKVKTMVPAVVASLVGGVERLLDEGARHVVVPGNLPAGCIPITLTMYPSEDRSEYDPRTGCLKKYNSVALYHNAMLRVALDRLQRPRPESPRRLRRLLHALHTVRAHTAPLRLQARRSAGLLRRRRAVQLQRERVVRAPRRHHLRGPRRARQLGRHPPHRGALPLHRQHLGQGPLRAPAARHRRARGHGRLILLWFGTREELICNVNSIRSCPCILGTTGAE

SEQ ID NO: 17159 - protein, 299 aa, Zea mays subsp. mays
  misc_feature (1)..(299): Ceres Seq. ID no. 12356249
MGATALDLKYFKDNNVWSIPPFNTSMGVQLEWFQEVKRSICPDDPGACRALFGRALFVFGEFGGNDYSFAWKADWSLEKVKTMVPAVVASLVGGVERLLDEGARHVVVPGNLPAGCIPITLTMYPSEDRSEYDPRTGCLKKYNSVALYHNAMLRVALDRLQRPRPESPRRLRRLLHALHTVRAHTAPLRLQARRSAGLLRRRRAVQLQRERVVRAPRRHHLRGPRRARQLGRHPPHRGALPLHRQHLGQGPLRAPAARHRRARGHGRLILLWFGTREELICNVNSIRSCPCILGTTGAE

SEQ ID NO: 17160 - DNA, 1237 bp, Zea mays subsp. mays
  misc_feature (1)..(1237): Ceres Seq. ID no. 12356266
atattcattgttcggcccccaagcgagagcatactccgcattgcgaatttgcaagctaaccatggcaccctcgcatgcccactctcgctccgtgccgctcctcctcctcgtgataggagtttgttgctgctgcagtggagcagtcatcgccccgtcgtcggtcgtctccgacgacgacccgacctgtcctcgggagccgacggcggcggtggcagccgtgtcgtcagctgagtctagctacgtcgagccacgccggtgccagccgccggcgccgcacatcgcggtggccgtgttcccctacgacgtcgacccgatgcagttcgcgctgaacctggagtacaccgaggccgagttcttcctgcacggcgcgtacggcgtggggctcgaccacctcgcgccgaggctggcgctgggcggcccgcctccggtgggcgcccggaaggccaacctcgacgaggtgacgaggcgcatcgtcgcggagtttggcctgcaggaagttggccacatcagggctatccagcgcacggtcggcgggattcctcggccgttgatagacctcagcgcccacaacttcgctagggtgatggacgaggcgttcgggacccgcctggaccctcccttcgatccctacgtcaacagcctcaacttcctgctggcctcgtacgtcatcccctacctcggcatcaacggctacgtcggcaccaaccccatcgtcgacggctaccagacaaagaagcttctggcagggctgctgggggtggaggcggcgcaggacgcggtgttccgggcacgcctcttcgagcgcctcggcgaggccgtgccaccgtacgggaacatcacggtggccgagttcacggaccgcgtgtcggcgctgcgcaaccggctggggcggtgcggggtcaaggacgaggggctcacggtgccccgccggctcggcgccgagggcgccatctgcaccaacgtgctctccgcggacagggactcgctctcctacgcccggacgcccgccgagctgctcagcatcctctacctcaccggcgacgagcgcgtgcccggcgggttctatccggagggtgccaacgggaggatcgccaggtcctttcttggcaagccacatggaaactagccaatgcaagctgccgatttgaactacgtgtccgtgcagaaacccggaacatatatatgcatggttggatgaacttgcaaagtttgctgaataatataacagtggattgat

SEQ ID NO: 17161 - protein, 374 aa, Zea mays subsp. mays
  misc_feature (1)..(374): Ceres Seq. ID no. 12356267
YSLFGPQARAYSALRICKLTMAPSHAHSRSVPLLLLVIGVCCCCSGAVIAPSSVVSDDDPTCPREPTAAVAAVSSAESSYVEPRRCQPPAPHIAVAVFPYDVDPMQFALNLEYTEAEFFLHGAYGVGLDHLAPRLALGGPPPVGARKANLDEVTRRIVAEFGLQEVGHIRAIQRTVGGIPRPLIDLSAHNFARVMDEAFGTRLDPPFDPYVNSLNFLLASYVIPYLGINGYVGTNPIVDGYQTKKLLAGLLGVEAAQDAVFRARLFERLGEAVPPYGNITVAEFTDRVSALRNRLGRCGVKDEGLTVPRRLGAEGAICTNVLSADRDSLSYARTPAELLSILYLTGDERVPGGFYPEGANGRIARSFLGKPHGN

SEQ ID NO: 17162 - protein, 354 aa, Zea mays subsp. mays
  misc_feature (1)..(354): Ceres Seq. ID no. 12356268
MAPSHAHSRSVPLLLLVIGVCCCCSGAVIAPSSVVSDDDPTCPREPTAAVAAVSSAESSYVEPRRCQPPAPHIAVAVFPYDVDPMQFALNLEYTEAEFFLHGAYGVGLDHLAPRLALGGPPPVGARKANLDEVTRRIVAEFGLQEVGHIRAIQRTVGGIPRPLIDLSAHNFARVMDEAFGTRLDPPFDPYVNSLNFLLASYVIPYLGINGYVGTNPIVDGYQTKKLLAGLLGVEAAQDAVFRARLFERLGEAVPPYGNITVAEFTDRVSALRNRLGRCGVKDEGLTVPRRLGAEGAICTNVLSADRDSLSYARTPAELLSILYLTGDERVPGGFYPEGANGRIARSFLGKPHGN

SEQ ID NO: 17163 - protein, 270 aa, Zea mays subsp. mays
  misc_feature (1)..(270): Ceres Seq. ID no. 12356269
MQFALNLEYTEAEFFLHGAYGVGLDHLAPRLALGGPPPVGARKANLDEVTRRIVAEFGLQEVGHIRAIQRTVGGIPRPLIDLSAHNFARVMDEAFGTRLDPPFDPYVNSLNFLLASYVIPYLGINGYVGTNPIVDGYQTKKLLAGLLGVEAAQDAVFRARLFERLGEAVPPYGNITVAEFTDRVSALRNRLGRCGVKDEGLTVPRRLGAEGAICTNVLSADRDSLSYARTPAELLSILYLTGDERVPGGFYPEGANGRIARSFLGKPHGN

SEQ ID NO: 17164 - DNA, 1527 bp, Zea mays subsp. mays
  misc_feature (1)..(1527): Ceres Seq. ID no. 12356270
aacgcaacacttccgtgccctacgccccagaacctcccaccgcatcggagggctccgcgcctccgctacgccgatggcgtcccagccgccgccagagcccgcaccggccgaggcgggtctggaaagcatggagggcctcgtcctcgacacggtcatctcaagagccggcgcgcgccccgcagcggcgctcgcctgcgccagcacgcgcctccgcaccgccgttgccgacgactccctctggcgcagattctgcggtgaggacctggggctcgacgctcccgtcgatccagagggccggcctcttccctccttccaggttgcatataaactttggttggagtcttttggcatgtaccctctacctatggtaaagagagtgagacaattctggacttcaatgaaaacttggttgtctgaaaactttcctgaggcatacaaaacgttatgcgaaggtgtttctgaagctcaattaaagtcagcagaggatgatcttggtttcaagctccctatgcccacaaagctgttgtatcgcttttgcaatgctcaactgccttttagtgaggaccatgacacaaataaaagcatttccactcatggattgattgggggctatgcgttttatgatcattgggtgaatgtgcatttgtcaccgcttgagcaaatagttgaagagacgaaggactctatcgggagttccctgatgtatttcatgggcgcaaattcattgtagtggcaacttcatggtttcatccgaaaacatttcttctagattgctcaaatggtgaactttatgttggtacatacaacttaccgataggaggaatgcttccctgtgtgcccaaagcattgataaagccagcaggtaatgatctagcacaagatggactacttctgtggttagaagaacaccttaggcgtttacagagtggcatgatcaagacccgtatgctgatggcatcgagatatatcagcttatatccagaagcacctccatcatgcagttcagctgttacaaatggcattaaggtacgctcatctgctgtctttgtgccagaacatcctgggaggcctggggaaaaatttatgttcacttactcaattcgcatgtcagttccagaggcatgcatgctaggtggcgtgtactattcttcctgccagctttgctcccgccactggaccatcagatcgtgtgacagggttgtttctgatgtgagcggaggaggggttattggagagtatcctctactgttacctggcgaggatgagtttgtctacgagagttgcacgccactgccccaagtacctggatctgtggagggctctttttcgtttgtgcctggcaagttgagccgacctgaagggaagccgttcgaagtcatggtggctcctttccctcttgatgtgccagaatacatcttctgatgatcacagcagaaataaatgtatgtatgcttgttggggaaaagtccggatgcttgtaataaccttattggagtaatgtaaaataaggaaccgtgcgctcttcgt

SEQ ID NO: 17165 - protein, 242 aa, Zea mays subsp. mays
  misc_feature (1)..(242): Ceres Seq. ID no. 12356271
TQHFRALRPRTSHRIGGLRASATPMASQPPPEPAPAEAGLESMEGLVLDTVISRAGARPAAALACASTRLRTAVADDSLWRRFCGEDLGLDAPVDPEGRPLPSFQVAYKLWLESFGMYPLPMVKRVRQFWTSMKTWLSENFPEAYKTLCEGVSEAQLKSAEDDLGFKLPMPTKLLYRFCNAQLPFSEDHDTNKSISTHGLIGGYAFYDHWVNVHLSPLEQIVEETKDSIGSSLMYFMGANSL

SEQ ID NO: 17166 - protein, 218 aa, Zea mays subsp. mays
  misc_feature (1)..(218): Ceres Seq. ID no. 12356272
MASQPPPEPAPAEAGLESMEGLVLDTVISRAGARPAAALACASTRLRTAVADDSLWRRFCGEDLGLDAPVDPEGRPLPSFQVAYKLWLESFGMYPLPMVKRVRQFWTSMKTWLSENFPEAYKTLCEGVSEAQLKSAEDDLGFKLPMPTKLLYRFCNAQLPFSEDHDTNKSISTHGLIGGYAFYDHWVNVHLSPLEQIVEETKDSIGSSLMYFMGANSL

SEQ ID NO: 17167 - protein, 200 aa, Zea mays subsp. mays
  misc_feature (1)..(200): Ceres Seq. ID no. 12356273
MEGLVLDTVISRAGARPAAALACASTRLRTAVADDSLWRRFCGEDLGLDAPVDPEGRPLPSFQVAYKLWLESFGMYPLPMVKRVRQFWTSMKTWLSENFPEAYKTLCEGVSEAQLKSAEDDLGFKLPMPTKLLYRFCNAQLPFSEDHDTNKSISTHGLIGGYAFYDHWVNVHLSPLEQIVEETKDSIGSSLMYFMGANSL

SEQ ID NO: 17168 - DNA, 1244 bp, Zea mays subsp. mays
  misc_feature (1)..(1244): Ceres Seq. ID no. 12356309
acccatccaagataccgacgagcaggccagagcgaaggaatggactccatggccagcgacgacagcaaccaaggagcagcagccaagccgaagccgaagccaccaccgctaccgctgtccgtgcgcctccagctggccgggctgacagcggccatcgacgccgtggagcgccgcgacgggacggtgaaccgctgcctgtacggcgtgatcgaccggctcctgagcgcgcgcgccagcccgcgcccggacgcctccggggtgcgctcctacgacgtgaccatggacgcgtcccgcggcatctgggcgcgcgtcttcgcgccggccgcggcggaccgcccgctccccgtggtggtgtacttccacggcggcggcttcgcgctcttctccccggccatcgggcccttcaacggcgtgtgccgccgcctctgcgccgcgctcggcgccgtcgtggtgtccgtcaactaccgcctggccccggagcaccgctggcccgccgcctacgacgacggcgtcgacgcgctgcgcttcctcgacgcccgcggcggcgtcccgggcctggacgacggcgtgcccgtcgacctcggcacctgcttcctggccggggagagcgcgggcggaaacatcgtgcaccacgtcgccaaccgctgggcggcggcgtggcagccgtccgcgcgggccctccgcgtcgcgggcgtcttccccgtgcagccctacttcggcggcgtggagcgcacgccgtcggagctggagctagagggcgtggcgcccgtggtcaacctcaggcgctccgacttctcgtggaccgcgttcctgcccgacggcgccacccgcgaccacccggccgcgcacgtcaccgacgacaacgccgacctcgccgacgacttcccgcccgccatggtcattatcggcggcttcgacccgctcatggactggcagcgacgctacgccgacgtgctgcgccggaaggggaaggaggtgctggtggccgagtacccaggcatgttccacggcttctacggcttcccggagctccccgaggctaccaaggtgctgcaggatatgaaggccttcgtcgacagccacatacccacgcccaagctcgccgacgcgtgatgcacgaacaccatcccattccattctagtgtcatgagtcatgactgcttggttcatctatctgctgtcaaaatatatacttcctatatattaaagcagggcgcaaagcttccatctggtgcgcccacgcc

SEQ ID NO: 17169 - protein, 379 aa, Zea mays subsp. mays
  misc_feature (1)..(379): Ceres Seq. ID no. 12356310
PSKIPTSRPERRNGLHGQRRQQPRSSSQAEAEATTATAVRAPPAGRADSGHRRRGAPRRDGEPLPVRRDRPAPERARQPAPGRLRGALLRRDHGRVPRHLGARLRAGRGGPPAPRGGVLPRRRLRALLPGHRALQRRVPPPLRRARRRRGVRQLPPGPGAPLARRLRRRRRRAALPRRPRRRPGPGRRRARRPRHLLPGRGERGRKHRAPRRQPLGGGVAAVRAGPPRRGRLPRAALLRRRGAHAVGAGARGRGARGQPQALRLLVDRVPARRRHPRPPGRARHRRQRRPRRRLPARHGHYRRLRPAHGLAATLRRRAAPEGEGGAGGRVPRHVPRLLRLPGAPRGYQGAAGYEGLRRQPHTHAQARRRVMHEHHPIPF

SEQ ID NO: 17170 - protein, 370 aa, Zea mays subsp. mays
  misc_feature (1)..(370): Ceres Seq. ID no. 12356311
THPRYRRAGQSEGMDSMASDDSNQGAAAKPKPKPPPLPLSVRLQLAGLTAAIDAVERRDGTVNRCLYGVIDRLLSARASPRPDASGVRSYDVTMDASRGIWARVFAPAAADRPLPVVVYFHGGGFALFSPAIGPFNGVCRRLCAALGAVVVSVNYRLAPEHRWPAAYDDGVDALRFLDARGGVPGLDDGVPVDLGTCFLAGESAGGNIVHHVANRWAAAWQPSARALRVAGVFPVQPYFGGVERTPSELELEGVAPVVNLRRSDFSWTAFLPDGATRDHPAAHVTDDNADLADDFPPAMVIIGGFDPLMDWQRRYADVLRRKGKEVLVAEYPGMFHGFYGFPELPEATKVLQDMKAFVDSHIPTPKLADA

SEQ ID NO: 17171 - protein, 357 aa, Zea mays subsp. mays
  misc_feature (1)..(357): Ceres Seq. ID no. 12356312
MDSMASDDSNQGAAAKPKPKPPPLPLSVRLQLAGLTAAIDAVERRDGTVNRCLYGVIDRLLSARASPRPDASGVRSYDVTMDASRGIWARVFAPAAADRPLPVVVYFHGGGFALFSPAIGPFNGVCRRLCAALGAVVVSVNYRLAPEHRWPAAYDDGVDALRFLDARGGVPGLDDGVPVDLGTCFLAGESAGGNIVHHVANRWAAAWQPSARALRVAGVFPVQPYFGGVERTPSELELEGVAPVVNLRRSDFSWTAFLPDGATRDHPAAHVTDDNADLADDFPPAMVIIGGFDPLMDWQRRYADVLRRKGKEVLVAEYPGMFHGFYGFPELPEATKVLQDMKAFVDSHIPTPKLADA

SEQ ID NO: 17172 - DNA, 1070 bp, Zea mays subsp. mays
  misc_feature (1)..(1070): Ceres Seq. ID no. 12356321
agattttgacaacgccttcccaacttgctcgctcccgcaacgacagcgcgcacttggattcggcgaccaccggagcgcggaggaggcacaggcgccgatctagagacgatggccgccgcgggctcctcgccgtccttctcctcctcgagtaagcggctggaagggaaggtggccctcgtcaccggtggcgccaccggcatcggcgaggccatcgttcgcctcttcatggagcacggcgccaaggtctgcatcgcggacatccaggatgaggccgggcagcagctgcgcgacgccctgggaggtgacgcgcagggcgccatgttcgtccactgcgacgtgacgtcggaggaggacgtgagccgcgccgtggacgctgcggcggagcggttcggcgcgctggacgtgatggtgaataacgccggcgtgacgggcaccaaggtgacggacatccgcaccgtggacttcgcggaggcgcgcagggtgctcgacgtcaacgtgcacggcgtgttcctggtgatgaagcacgcggcgcgcgctatgatcccgcggaagcggggctccatcgtgtcgctggccagcgtggccagcgccatcggcgggacgggcccgcacgtctacacggcgtccaagcacgccgtggtcgggctcaccaagagcgtcgccgcggagctcggccgtcatggggtgcgcgtcaactgcgtgtccccctatgccgtgcccacggcgctgtcgatgccgcacctgccccagggcgcgcgcgcagatgacgcgctcaaggacttcctggcctttgtcggcggcgaggccaacctcaagggcgtcgacgccatgcccgaggacgtcgcccaggcggtgctctacctggccagcgacgaggcgaggtacgtcagcgcggtcaacctcatggtggacggaggcttcacagccgtaaacaataacctcagggcgtttgaggattagttgaggcatttatgccagctctgggattgggagggagtattaccactatttcttctgctgttgtgacaagtgagtgcaagactaataaactgcagcatgttcatgtagcc

SEQ ID NO: 17173 - protein, 283 aa, Zea mays subsp. mays
  misc_feature (1)..(283): Ceres Seq. ID no. 12356322
MAAAGSSPSFSSSSKRLEGKVALVTGGATGIGEAIVRLFMEHGAKVCIADIQDEAGQQLRDALGGDAQGAMFVHCDVTSEEDVSRAVDAAAERFGALDVMVNNAGVTGTKVTDIRTVDFAEARRVLDVNVHGVFLVMKHAARAMIPRKRGSIVSLASVASAIGGTGPHVYTASKHAVVGLTKSVAAELGRHGVRVNCVSPYAVPTALSMPHLPQGARADDALKDFLAFVGGEANLKGVDAMPEDVAQAVLYLASDEARYVSAVNLMVDGGFTAVNNNLRAFED

SEQ ID NO: 17174 - protein, 244 aa, Zea mays subsp. mays
  misc_feature (1)..(244): Ceres Seq. ID no. 12356323
MEHGAKVCIADIQDEAGQQLRDALGGDAQGAMFVHCDVTSEEDVSRAVDAAAERFGALDVMVNNAGVTGTKVTDIRTVDFAEARRVLDVNVHGVFLVMKHAARAMIPRKRGSIVSLASVASAIGGTGPHVYTASKHAVVGLTKSVAAELGRHGVRVNCVSPYAVPTALSMPHLPQGARADDALKDFLAFVGGEANLKGVDAMPEDVAQAVLYLASDEARYVSAVNLMVDGGFTAVNNNLRAFED

SEQ ID NO: 17175 - protein, 213 aa, Zea mays subsp. mays
  misc_feature (1)..(213): Ceres Seq. ID no. 12356324
MFVHCDVTSEEDVSRAVDAAAERFGALDVMVNNAGVTGTKVTDIRTVDFAEARRVLDVNVHGVFLVMKHAARAMIPRKRGSIVSLASVASAIGGTGPHVYTASKHAVVGLTKSVAAELGRHGVRVNCVSPYAVPTALSMPHLPQGARADDALKDFLAFVGGEANLKGVDAMPEDVAQAVLYLASDEARYVSAVNLMVDGGFTAVNNNLRAFED

SEQ ID NO: 17176 - DNA, 1341 bp, Zea mays subsp. mays
  misc_feature (1)..(1341): Ceres Seq. ID no. 12356334
atccctcccaactccagcgccgctaggggtcaaatcgaaaaatggcgttgctgagcccgcgcgtgccgcggctgccgccctccaccttcacctccgttgccggtgcccggtgctttggccctgccgcgaggtgccaggcgacggcggcgggcggcgtggcggccgcggggcccccgtcgtcggagctggaggccatccggtggggcagcgccaagctgcagggcgctcgcgacgagatggaggatgaggtcttgctccgccccggggctccctcctcgatggcttctccttcgccgccgtcttggatggacacgccggcttctccgccgtccagttcctcagggatgagctgtacaaggagtgcgcagctgcgttggacggcggcgcggtgctcagcactaagaatctcgacgctatcacggcctccatccagcgtgccttcgccgctgtcgacgccaagctctccacctggctcgagcaaacggacaaggacgactctggtgctacggccactgtcatgtttctcaggagcgatgtgcttgttgtctcgcacattggggactcttgcttggtgatatcacgtggtggaagatctgaagctttgactggctctcatcgaccgtatgggaacaacaaaacgtcccttgaagaggtcaagaggatcagagcagcaggtggatggattgttgatgggcgcatatgtggagacatatctgtatctcgtgcttttggggacataagatttaagacacaaaagaatgaaatgctggtgaaaggagttaaacaaggaaggtggactgataagttcatctcacgaatacaatttaaagatgatatagtaatctcgtcacctgatgtatctctggtagagcttggaccagacgtggaatttgttctgttggcaatggtctttgggactacataaaaagctctgaagctgtagcttttgtcagagatcaactccgtcagcatggtgatgtccagttggcctgcgaggcacttggtcagaaagctctggatcaacggtcccaagacaatattagcatagtcatagctgacttggggaggacaaactggaaggcgttgcccgatgaaaggccgaacttgttcttgtaactaagtcaagcagtcgcgactgtaggggttgtctcaataggaatttgggtctcgtcgttccttgggttacagtagaactagctactccgtccggatgtgtatattacctactgagtttacatctttctgctagcagtagcagctgcaaaatatatgtatattcgtatatagtgtgtgaattgatagggtaatctgtttgggtaatactgagtgaacgtgtgaagt

SEQ ID NO: 17177 - protein, 177 aa, Zea mays subsp. mays
  misc_feature (1)..(177): Ceres Seq. ID no. 12356335
MALLSPRVPRLPPSTFTSVAGARCFGPAARCQATAAGGVAAAGPPSSELEAIRWGSAKLQGARDEMEDEVLLRPGAPSSMASPSPPSWMDTPASPPSSSSGMSCTRSAQLRWTAARCSALRISTLSRPPSSVPSPLSTPSSPPGSSKRTRTTLVLRPLSCFSGAMCLLSRTLGTLAW

SEQ ID NO: 17178 - protein, 135 aa, Zea mays subsp. mays
  misc_feature (1)..(135): Ceres Seq. ID no. 12356336
MFLRSDVLVVSHIGDSCLVISRGGRSEALTGSHRPYGNNKTSLEEVKRIRAAGGWIVDGRICGDISVSRAFGDIRFKTQKNEMLVKGVKQGRWTDKFISRIQFKDDIVISSPDVSLVELGPDVEFVLLAMVFGTT

SEQ ID NO: 17179 - protein, 112 aa, Zea mays subsp. mays
  misc_feature (1)..(112): Ceres Seq. ID no. 12356337
MEDEVLLRPGAPSSMASPSPPSWMDTPASPPSSSSGMSCTRSAQLRWTAARCSALRISTLSRPPSSVPSPLSTPSSPPGSSKRTRTTLVLRPLSCFSGAMCLLSRTLGTLAW

SEQ ID NO: 17180 - DNA, 1685 bp, Zea mays subsp. mays
  misc_feature (1)..(1685): Ceres Seq. ID no. 12356347
accccacaccaaaagaaaccaactaaaatcccaaaagagaggaaaggcacaaacagacggtacaaagaaagggacgctcgtctcgtctcgtcacgtgccgccgccatggctgctctgggccgtggcctgcccctcctcctcctgctcctcctcctcgccgtatcgggggccgccaacgccgcggcggcgcccggcggcatgtccatcatcacctacaacgaggagcacggcgcgcgggggctggagcggacggagccggaggtgcgggccatgtacgacctctggctcgcggagcacggccgcgcctacaacgcgctgggcgagggcgagggcgagcgcgaccgccgcttcctcgtcttctgggacaacctccgcttcgtcgacgcgcacaacgagcgcgccggcgcccgcggcttccgcctcgggatgaaccagttcgccgacctcaccaacgacgagttccgcgccgcgtacctcggcgccatggtccccgccgcccgccggggagccgtcgtgggggagaggtaccgccacgacggcgccgccgaggagctgccggagagcgtcgactggagggagaagggcgccgtcgcgcccgtcaagaaccaggggcaatgcggaagttgctgggctttctctgcagtaagctcagtggaaagcgttaaccagatcgtcaccggtgagatggtgacactgtctgaacaggagctcgtagagtgctcgactgacggagggaacagcggctgcaacggcgggctcatggacgccgctttcgatttcatcataaagaacgggggcatcgataccgaagatgactacccttacagagccgtggacgggaagtgcgacatgaacaggaaaaatgccagggttgtgagcatcgatggctttgaagacgtgcctgagaacgacgagaagtcgctgcagaaggcggttgctcaccagccagttagcgttgccattgaggccggaggccgggagttccagctctacaaatcgggtgtcttcagcggaagctgcaccacgaaccttgaccatggtgtcgtcgcggtcggctacggcgccgagaacgggaaggactactggatcgtccgcaactcgtggggcccgaagtggggcgaggctggttacatccgtatggagaggaacgtcaacgccagcactgggaagtgcgggatcgcgatgatggcgtcctacccgacgaagaagggcgcgaaccctcccaggccgtctccaaccccgccaacaccgccggctgcccctgacaatgtctgcgacgagaacttctcgtgctccgcgggcagcacctgctgctgcgcgtttggcttcaggaacgtctgcttggtctggggctgctgcccggtcgagggcgccacctgctgcaaggatcacgccagctgctgcccgccgggctaccctgtctgcaacgtcagagctggaacttgctcggtgagcaagaacagcccactgagcgtcaaggccttgaagcgcactctcgccaagctgagcaccgcatgaggacctcgatctgggactgcccattgctttttctgactcatgggcgttcagatcaccaagagcaagatttcatagattatctatatgtttgtataagtactattaccgtcccatgaatccgctgtaaataactagtacctctgattaaaaggataatattatttgtc

SEQ ID NO: 17181 - protein, 505 aa, Zea mays subsp. mays
  misc_feature (1)..(505): Ceres Seq. ID no. 12356348
TPHQKKPTKIPKERKGTNRRYKERDARLVSSRAAAMAALGRGLPLLLLLLLLAVSGAANAAAAPGGMSIITYNEEHGARGLERTEPEVRAMYDLWLAEHGRAYNALGEGEGERDRRFLVFWDNLRFVDAHNERAGARGFRLGMNQFADLTNDEFRAAYLGAMVPAARRGAVVGERYRHDGAAEELPESVDWREKGAVAPVKNQGQCGSCWAFSAVSSVESVNQIVTGEMVTLSEQELVECSTDGGNSGCNGGLMDAAFDFIIKNGGIDTEDDYPYRAVDGKCDMNRKNARVVSIDGFEDVPENDEKSLQKAVAHQPVSVAIEAGGREFQLYKSGVFSGSCTTNLDHGVVAVGYGAENGKDYWIVRNSWGPKWGEAGYIRMERNVNASTGKCGIAMMASYPTKKGANPPRPSPTPPTPPAAPDNVCDENFSCSAGSTCCCAFGFRNVCLVWGCCPVEGATCCKDHASCCPPGYPVCNVRAGTCSVSKNSPLSVKALKRTLAKLSTA

SEQ ID NO: 17182 - protein, 470 aa, Zea mays subsp. mays
  misc_feature (1)..(470): Ceres Seq. ID no. 12356349
MAALGRGLPLLLLLLLLAVSGAANAAAAPGGMSIITYNEEHGARGLERTEPEVRAMYDLWLAEHGRAYNALGEGEGERDRRFLVFWDNLRFVDAHNERAGARGFRLGMNQFADLTNDEFRAAYLGAMVPAARRGAVVGERYRHDGAAEELPESVDWREKGAVAPVKNQGQCGSCWAFSAVSSVESVNQIVTGEMVTLSEQELVECSTDGGNSGCNGGLMDAAFDFIIKNGGIDTEDDYPYRAVDGKCDMNRKNARVVSIDGFEDVPENDEKSLQKAVAHQPVSVAIEAGGREFQLYKSGVFSGSCTTNLDHGVVAVGYGAENGKDYWIVRNSWGPKWGEAGYIRMERNVNASTGKCGIAMMASYPTKKGANPPRPSPTPPTPPAAPDNVCDENFSCSAGSTCCCAFGFRNVCLVWGCCPVEGATCCKDHASCCPPGYPVCNVRAGTCSVSKNSPLSVKALKRTLAKLSTA

SEQ ID NO: 17183 - protein, 439 aa, Zea mays subsp. mays
  misc_feature (1)..(439): Ceres Seq. ID no. 12356350
MSIITYNEEHGARGLERTEPEVRAMYDLWLAEHGRAYNALGEGEGERDRRFLVFWDNLRFVDAHNERAGARGFRLGMNQFADLTNDEFRAAYLGAMVPAARRGAVVGERYRHDGAAEELPESVDWREKGAVAPVKNQGQCGSCWAFSAVSSVESVNQIVTGEMVTLSEQELVECSTDGGNSGCNGGLMDAAFDFIIKNGGIDTEDDYPYRAVDGKCDMNRKNARVVSIDGFEDVPENDEKSLQKAVAHQPVSVAIEAGGREFQLYKSGVFSGSCTTNLDHGVVAVGYGAENGKDYWIVRNSWGPKWGEAGYIRMERNVNASTGKCGIAMMASYPTKKGANPPRPSPTPPTPPAAPDNVCDENFSCSAGSTCCCAFGFRNVCLVWGCCPVEGATCCKDHASCCPPGYPVCNVRAGTCSVSKNSPLSVKALKRTLAKLSTA

SEQ ID NO: 17184 - DNA, 1025 bp, Zea mays subsp. mays
  misc_feature (1)..(1025): Ceres Seq. ID no. 12356370
ccaatctgtgtttgtctttgcttgccccccttctcccccctcatctccccccttttcttgttcctgtgcctgtgcattggctggcgatggggtccacttctccttcaggcctggagctcaccatggctgtcccgggcctcagctcctcctctggctcagaggggtttggatgcaacaacaacaacgggagcgggaacgggaacaacatgagggacctggacatgaaccagccggcgagcggcggcgaggaggaggagttcccaatggggagcgtggaggaggaggaggacgagcgcggcggcgccggcgggccgcaccgcgccaagaagctccggctgtccaaggagcagtcccgcctcctggaggagagcttccgcctcaaccacaccctcacaccgaagcaaaaggaggccttggctgtcaagctcaagctgcggcccaggcaggtggaggtctggttccagaaccgcagggctaggacgaagcttaagcagacggagctggagtgcgagtacctgaagcgctgcttcggctcgctgaccgaggagaaccggcggctgcagcgggaggtggaggagctgcgcgcgatgcgggtggccccgcccaccgtgctctccccgcacacccggcagccgctcccggcgtccgcgctcaccatgtgcccgcgctgcgagcgcatcaccgccgcaacggccgcgcgcaccccacgcccggcgcccgccgcgagccccttccacccgcgccgcccgtccgcggcgttttagcctagtctcccgctgcatgcggttccggccggtagggggaaggagcggaaagtttggttgttagggggggggggcagagtgtttgtgctgtgtaaatttgatgatggatggagaaaaccagcgcgggcccgtgtagctttttaggtgtaggtgtaggtgtagggtttggaccttggagtcccttcgcgtcaacgtccccgtccccgtgttccgttccatgccgtgcatggcttgatggatcaaaagtttgtactagcttcc

SEQ ID NO: 17185 - protein, 253 aa, Zea mays subsp. mays
  misc_feature (1)..(253): Ceres Seq. ID no. 12356371
NLCLSLLAPLLPPHLPPFLVPVPVHWLAMGSTSPSGLELTMAVPGLSSSSGSEGFGCNNNNGSGNGNNMRDLDMNQPASGGEEEEFPMGSVEEEEDERGGAGGPHRAKKLRLSKEQSRLLEESFRLNHTLTPKQKEALAVKLKLRPRQVEVWFQNRRARTKLKQTELECEYLKRCFGSLTEENRRLQREVEELRAMRVAPPTVLSPHTRQPLPASALTMCPRCERITAATAARTPRPAPAASPFHPRRPSAAF

SEQ ID NO: 17186 - protein, 225 aa, Zea mays subsp. mays
  misc_feature (1)..(225): Ceres Seq. ID no. 12356372
MGSTSPSGLELTMAVPGLSSSSGSEGFGCNNNNGSGNGNNMRDLDMNQPASGGEEEEFPMGSVEEEEDERGGAGGPHRAKKLRLSKEQSRLLEESFRLNHTLTPKQKEALAVKLKLRPRQVEVWFQNRRARTKLKQTELECEYLKRCFGSLTEENRRLQREVEELRAMRVAPPTVLSPHTRQPLPASALTMCPRCERITAATAARTPRPAPAASPFHPRRPSAAF

SEQ ID NO: 17187 - protein, 213 aa, Zea mays subsp. mays
  misc_feature (1)..(213): Ceres Seq. ID no. 12356373
MAVPGLSSSSGSEGFGCNNNNGSGNGNNMRDLDMNQPASGGEEEEFPMGSVEEEEDERGGAGGPHRAKKLRLSKEQSRLLEESFRLNHTLTPKQKEALAVKLKLRPRQVEVWFQNRRARTKLKQTELECEYLKRCFGSLTEENRRLQREVEELRAMRVAPPTVLSPHTRQPLPASALTMCPRCERITAATAARTPRPAPAASPFHPRRPSAAF

SEQ ID NO: 17188 - DNA, 1490 bp, Zea mays subsp. mays
  misc_feature (1)..(1490): Ceres Seq. ID no. 12356378
atcacgaatcaccaacaccctctcctccaccttccatcccgatcaccgccgccaccgctttcgttccacgtcccgatggcaccggtagatctaacccccaggcagccccggaaggcgtatggcggcgacgccggcgcctactacgagtggagcccagccgacctgcccatgctcggcgtcgcctccatcggcgcaggccaagctctccctcgccgccggtgggctctcgctccccagctactccgactcttccaaggtcgcgtacgttcttgaaggcactggcacctgcggcatcgtcctgccggaggcgaccaaggagaaggtgctggccgtgaaggagggcgacgccctcgcgctccccttcggcgtggtcacgtggtggcacaacggccccgccgcgccgacccagctcacggtcctcttcctcggcgacacctccaagggccacaggccggggcagttcaccaacttccagctgacgggcgcgagcggcatcttcacgggcttctccaccgagttcgtgtcgcgcgcgtgggacctgccggaggcgaacgccgcggcgctggtgtcgagccagccggcgtcgggcatcgtcagggcctcgtccccgctgccggcgccctcggcgcaggaccgcgagggggtggcgctcaactgcctggaggcgccgctggacgtggacatcccgggcgggggccgcgtggtggtgctcaacacggcgaacctgcccctggtcagggaggtcgggctgggcgccgacctggtccgcatcgacgcgcactccatgtgctccccgggcttctcgtgcgactcggcgtaccaggtcacctacatcgtgcgcggcagcgggcgcgtgcaggtggtcgggcccgacggggtgcgcgtcctggagacgcgcgtcgagggcggcttcctcttcatcgtgccccgcttccacgtggtgtccaagatcgcggacgcgtcgggcatggaatggttctccatcatcaccacccccaacccgatcttcagccatctggccggaaagacgtcggtgtggaaagccatctcggcggaggtgctgcaggcntcgttcaacaccacgccggagatggagaagctgttccggtccaagaggcttgactcggagatcttcttcgcgcccccgtccaactgagcaaataggcggaagcccacggtggagtgctctcgtgaagtcgtcgtggttagattagcattagcttagctcgccttaataaagagagaatggtggtggtcctcggctcactgcttcttcagtagcttcagtcgttcagtggttcagtcgttgcgtcggtcggttgtcgtgtccgttcgtcgaactgccaagttttgttaattattattattgtcaccctctgttttgtctaggtctagggctggaaaaaaactttaagccgcggcttgttcaggctcgcgagctatattgttttaattaatctataaaataataataaatattataattctat

SEQ ID NO: 17189 - protein, 345 aa, Zea mays subsp. mays
  misc_feature (1)..(345): Ceres Seq. ID no. 12356379
  misc_feature (317)..(317): Xaa is any aa, unknown or other
MAATPAPTTSGAQPTCPCSASPPSAQAKLSLAAGGLSLPSYSDSSKVAYVLEGTGTCGIVLPEATKEKVLAVKEGDALALPFGVVTWWHNGPAAPTQLTVLFLGDTSKGHRPGQFTNFQLTGASGIFTGFSTEFVSRAWDLPEANAAALVSSQPASGIVRASSPLPAPSAQDREGVALNCLEAPLDVDIPGGGRVVVLNTANLPLVREVGLGADLVRIDAHSMCSPGFSCDSAYQVTYIVRGSGRVQVVGPDGVRVLETRVEGGFLFIVPRFHVVSKIADASGMEWFSIITTPNPIFSHLAGKTSVWKAISAEVLQXSFNTTPEMEKLFRSKRLDSEIFFAPPSN

SEQ ID NO: 17190 - DNA, 1101 bp, Zea mays subsp. mays
  misc_feature (1)..(1101): Ceres Seq. ID no. 12356388
ctctcgcgtccccgtcttcctcttgtcgcctgcctctgcggctctgcctacctctctcgaagcttctcgctctcctgggtggccgtgtccagtctcccacgccaccgccccgaccgccggtaggtaataccagttccaagagcactcgacatggcggccgctaatgttggggaatcaacaagcggcggcggcagcagcagcagcagcggcgccgacgccgggggcggattcgagtgcaacatatgcttcgagctgccgcaggagccgatcgtgacgctgtgcgggcacctcttctgctggccgtgcctctacaagtggctgcgcatccactcgcactcgcccgagtgcccggtgtgcaaggccgtggtcgaggaggagaagctcgtgcccctgtacggccgcggcaaggaccgcgtcgacccgaggtccaagaacgtccccggggcggccgacatccccagccgtccggctgggcagaggccggccacggctccgcaggcggaccccaacaacgcccacttccccaacgccgccaacccggcgaacccgtggttcatgggcggcggcggcggaggcatcccgctggccaacgcgcgctgggggaactacaccttctcggcggcgttcggtgggctgttcccgctgctcagcttccaggtgcacgggttcccggacgccacggcctatggccagccagctgggttcccgtacgggtacggccacggccacgcttttcatggcgggcacgctggagcacatgcccacgccgcagctgcagctcctcgggcacgcgcagcaccagcagcagcaggcggatgtgtaccttaaggcgctgctcatcctagtcggcgttctggttatcgcgagcctcgtcacgttctagggcgtcgcctgttggtaggtgttcatcatattgttgctgccttgctggtaataaataagagagagagacagagacaacacgaccgaaactgaattattcagagcggtgcaatgtgttgatagaagggttgttgttgtacatgctgatacatgattgtatactgtggtctttgaacatacattattatcgaataataatctggaggctctgtttgaagt

SEQ ID NO: 17191 - protein, 225 aa, Zea mays subsp. mays
  misc_feature (1)..(225): Ceres Seq. ID no. 12356389
MAAANVGESTSGGGSSSSSGADAGGGFECNICFELPQEPIVTLCGHLFCWPCLYKWLRIHSHSPECPVCKAVVEEEKLVPLYGRGKDRVDPRSKNVPGAADIPSRPAGQRPATAPQADPNNAHFPNAANPANPWFMGGGGGGIPLANARWGNYTFSAAFGGLFPLLSFQVHGFPDATAYGQPAGFPYGYGHGHAFHGGHAGAHAHAAAAAPRARAAPAAAGGCVP

SEQ ID NO: 17192 - protein, 200 aa, Zea mays subsp. mays
  misc_feature (1)..(200): Ceres Seq. ID no. 12356390
MLRAAAGADRDAVRAPLLLAVPLQVAAHPLALARVPGVQGRGRGGEARAPVRPRQGPRRPEVQERPRGGRHPQPSGWAEAGHGSAGGPQQRPLPQRRQPGEPVVHGRRRRRHPAGQRALGELHLLGGVRWAVPAAQLPGARVPGRHGLWPASWVPVRVRPRPRFSWRARWSTCPRRSCSSSGTRSTSSSRRMCTLRRCSS

SEQ ID NO: 17193 - DNA, 973 bp, Zea mays subsp. mays
  misc_feature (1)..(973): Ceres Seq. ID no. 12356391
ctctcctttcctttttgctccgatccgatccgatcaatgaccaagtcgaagggtggttcggtggacgcgcacgctggtggcgcacgtcctggcagcgggcgccgtcgtgctggtgctcctgtggtgcatccacttccgcggcggcctcgccctccgctcccaggacaagccgctcatcttcaacgtccaccccgtgctcatggtcctcggccccatcgtcctcggcggagaagccatcctcagctaccgctctctcccgctcgcccgcgacgccaggaagaaggtgcacctggcgctgcacgccgcgggcctcgccgcgggcgtcctcggcgtctacgccgtcttcaagttccacgtcgagagcggcatcccaaacctctactcgctgcactcctgggtcggcatcgccgccatcaccctctacggcctccagtggaccgccgggttcctcgcctacttcttcccgggcgcctcccccgccaccaggcgcagaacgctgccgtggcacgccgtcttcggcctcctcgtcttcgtgctcgccgtcggcaccgcgcagctgggcttcctcgagaagctcaccttcatgcagggcccgccactgcgcctgcccaagtacggcgcagaggcgctgctcgtcaacttcacctccgtcaccgtgctcctcctcggcgtcgccgtcgtgcttgccatcgtcgatattgacgggacccggtacaacaccatcatctgactcagcgtcaagctgctgcatgctactacgatcagggatcgatgttgcctgtggtgtgtaggtgtgtggtgtacagtacagtacagattttatatgtttgtccggtgtttctgtgtgactaaactaaatatcataaaaaaatatatatattacaagttctttgcatggcatgcatgggtttagatctctgaggaggcatatgtatattttgtcctaaataatttcaagttcaagggaggaatg

SEQ ID NO: 17194 - protein, 262 aa, Zea mays subsp. mays
  misc_feature (1)..(262): Ceres Seq. ID no. 12356392
LLSFLLRSDPINDQVEGWFGGRARWWRTSWQRAPSCWCSCGASTSAAASPSAPRTSRSSSTSTPCSWSSAPSSSAEKPSSATALSRSPATPGRRCTWRCTPRASPRASSASTPSSSSTSRAASQTSTRCTPGSASPPSPSTASSGPPGSSPTSSRAPPPPPGAERCRGTPSSASSSSCSPSAPRSWASSRSSPSCRARHCACPSTAQRRCSSTSPPSPCSSSASPSCLPSSILTGPGTTPSSDSASSCCMLLRSGIDVACGV

SEQ ID NO: 17195 - protein, 233 aa, Zea mays subsp. mays
  misc_feature (1)..(233): Ceres Seq. ID no. 12356393
LSFPFCSDPIRSMTKSKGGSVDAHAGGARPGSGRRRAGAPVVHPLPRRPRPPLPGQAAHLQRPPRAHGPRPHRPRRRSHPQLPLSPARPRRQEEGAPGAARRGPRRGRPRRLRRLQVPRRERHPKPLLAALLGRHRRHHPLRPPVDRRVPRLLLPGRLPRHQAQNAAVARRLRPPRLRARRRHRAAGLPREAHLHAGPATAPAQVRRRGAARQLHLRHRAPPRRRRRACHRRY

SEQ ID NO: 17196 - protein, 221 aa, Zea mays subsp. mays
  misc_feature (1)..(221): Ceres Seq. ID no. 12356394
MTKSKGGSVDAHAGGARPGSGRRRAGAPVVHPLPRRPRPPLPGQAAHLQRPPRAHGPRPHRPRRRSHPQLPLSPARPRRQEEGAPGAARRGPRRGRPRRLRRLQVPRRERHPKPLLAALLGRHRRHHPLRPPVDRRVPRLLLPGRLPRHQAQNAAVARRLRPPRLRARRRHRAAGLPREAHLHAGPATAPAQVRRRGAARQLHLRHRAPPRRRRRACHRRY

SEQ ID NO: 17197 - protein, 176 aa, Zea mays subsp. mays
  misc_feature (1)..(176): Ceres Seq. ID no. 12356395
MVLGPIVLGGEAILSYRSLPLARDARKKVHLALHAAGLAAGVLGVYAVFKFHVESGIPNLYSLHSWVGIAAITLYGLQWTAGFLAYFFPGASPATRRRTLPWHAVFGLLVFVLAVGTAQLGFLEKLTFMQGPPLRLPKYGAEALLVNFTSVTVLLLGVAVVLAIVDIDGTRYNTII

SEQ ID NO: 17198 - DNA, 1428 bp, Zea mays subsp. mays
  misc_feature (1)..(1428): Ceres Seq. ID no. 12356422
acgcagggtggctaggagttgagtcgtgcagaagagacaaaggtcctcacttggctaagctagacacgtacgagtgcaggaaacaagataagtcgcggtttgcgacggcgagaagcgccggatgagtgtccactgtccacaagtccagattccaattccagtccgatcgtgagctcagctcagctccgctagtcctctccccgcacgcaccaccaccagcagcagtccagcaccatgggcggcgccctgctcctcacgctgctcctcgcggccgtgcccctctccttgggcggcggcggcggcgcgcacccgggctactccgacgacgacgagagcgcctgcacggtggacgcgggcgcggagctgctgcggcggatggaggagcgcgggcccgacaggcgcatcatcgacatcacgcacgcggtcgtgccggacctgccggcgttcgccacgggggcggtcgcggggcccatgctgcgcctcagggagtccatggcggacgggtccgagtacaacctgtcggagctgcggatggagtgccacaccggcacgcacgtcgacgcgcctggccacatcaaccaggcccacttcgccgcctgcctcgacgtcgacacgctcgacctccacgtcctcaacggacctgcattgctagttgatgtgccaagaaacacaaatataacagctgaagcgatggaattcctaaacatcccgagaggggttcgccgagttctgttcagaacactgaacactgacaggaagttgatgtggaggaagggaggtgacatgagctacgttgggtttacagaggatggcgcgcagtggttagtcgacaacaccgacataaagctagttggagttgacggtctgtcagtggcatcatttgatcacctgatctctgcccacgtggtctttttcaaaaccccggatataatccctgttgagagcctgaatctggacgacatcgaggcggggatatacatgctgcactgtctacctctcaggctggtcggagccgagggtgcaccgaccagatgcatcctcatcaagtgatcgttcctcggccggcctgctcttgctgccttgctggaggtggcgacactggaccatgccagctgagctggtgctccgtcgtgggtcgcgtggccaatatttggctcgcatgcagtcgtcgatctatatggaacagaacactgcatgcctatgtagatacgcttgtatggacaataaaggaaccgcagtacttctgtcgatgaaatacttttgggtgagccggtaatctaaaacaccaggcctacaggttaagctgggaggccctggaaggctgaggctagcggctggggatggatccagatttttattcgaatgctatttttttggtcatatttctttgattgtaaacaaataacatatatgattttctatatctct

SEQ ID NO: 17199 - protein, 271 aa, Zea mays subsp. mays
  misc_feature (1)..(271): Ceres Seq. ID no. 12356423
MGGALLLTLLLAAVPLSLGGGGGAHPGYSDDDESACTVDAGAELLRRMEERGPDRRIIDITHAVVPDLPAFATGAVAGPMLRLRESMADGSEYNLSELRMECHTGTHVDAPGHINQAHFAACLDVDTLDLHVLNGPALLVDVPRNTNITAEAMEFLNIPRGVRRVLFRTLNTDRKLMWRKGGDMSYVGFTEDGAQWLVDNTDIKLVGVDGLSVASFDHLISAHVVFFKTPDIIPVESLNLDDIEAGIYMLHCLPLRLVGAEGAPTRCILIK

SEQ ID NO: 17200 - protein, 224 aa, Zea mays subsp. mays
  misc_feature (1)..(224): Ceres Seq. ID no. 12356424
MEERGPDRRIIDITHAVVPDLPAFATGAVAGPMLRLRESMADGSEYNLSELRMECHTGTHVDAPGHINQAHFAACLDVDTLDLHVLNGPALLVDVPRNTNITAEAMEFLNIPRGVRRVLFRTLNTDRKLMWRKGGDMSYVGFTEDGAQWLVDNTDIKLVGVDGLSVASFDHLISAHVVFFKTPDIIPVESLNLDDIEAGIYMLHCLPLRLVGAEGAPTRCILIK

SEQ ID NO: 17201 - protein, 192 aa, Zea mays subsp. mays
  misc_feature (1)..(192): Ceres Seq. ID no. 12356425
MLRLRESMADGSEYNLSELRMECHTGTHVDAPGHINQAHFAACLDVDTLDLHVLNGPALLVDVPRNTNITAEAMEFLNIPRGVRRVLFRTLNTDRKLMWRKGGDMSYVGFTEDGAQWLVDNTDIKLVGVDGLSVASFDHLISAHVVFFKTPDIIPVESLNLDDIEAGIYMLHCLPLRLVGAEGAPTRCILIK

SEQ ID NO: 17202 - DNA, 1752 bp, Zea mays subsp. mays
  misc_feature (1)..(1752): Ceres Seq. ID no. 12356447
aggatcggagaacatccgccgcgactccatgctccaggagatcaagtctgcctaccagattcttgcccacaagtaccatcctgatatgaataagagtcccgaagcagaagaaaagttcaaggagatcagtgctgcatatgagccaagcttggatctgaccgctgtactttgtgtcgccgcttgaatctacggttctcttcttccttgttcatcccgtggatctgtcccgtggtggtccaagcattcgatttctgctattataacatccaacgttggcggtgaagagcaaggggacagataagcccaaaggcagcaaggggaacgtcgacaaggaccccaacaagcctgactcccaacattttttgtccgccggtgctgtagcggaagcccaaaggcagcaaggggaacgtcgacaaggaccccaacaaggctgactcccaacattttttgtccgccggtgctgtagcggcggcgctgggtgagctcccccatgctgggctctgggatgctcccaggcgccggggttcggcgagacggggactgatctggtgctgggctctgggatgctcccaggcgccgctgccttgcagttcctcggtcgattcaagggaatattatcagtggaagagactggtgaatcaaaggccgtcaacgctagatggaggcaaagtgcctgctgcattgggccaccatgtttttggtgcgggctgttcctcacggaaccaacatatctacatatatttttcatcttctcatcaagggagtatatgggtcgggagcaaggttctacatgacctactagggtatgtaaaaattatggaagtagggccacgagatggtctacagaatgagaaggacatcgtgccaacacctgtaaaggttgagcttatacgaagattggccacatccggattacctgttgtggaggcaacgagttttgtatctccaaaacgggtacctcaggcaggactgaggctgtttcatcctcctctgctgcggggtgggctaggtcgtcaccatggcgtcactcgtggcgtcttgtgcagtagggacgacagcagggagctgtcaagatgggttacctcaagatggacgaggagttcctcaagaggggcgagagcgggggcacgtgctgcgtcatagcccttctccgaaagggtagactagtcgtctccaatattggagactgtcatgtggtgctcagccgagcagggaaggcaaaggtgctcacctctgaccatcgggcctcccaggaggatgagaagcaaagaattgagaatttgggtggatttgtggtgaattaccatgggacatggagagtccagggctccctggcagtgtctaggggcaatggggatggacacctaaagcagtgggttgtggctgaccgagagactagaacgctcctcatcgaccaccagtgcgagttcttgatacttgcttctgatggcctatggggtaagattgataatcaggatgcagttgaccaaaactctaggcattagcactaacagagaccggtggaaggcaggactttgctgcctaaagtttccatgagtcagcgctatttttgggtgtttaacattcattctttgtcatagaaccatttgttatattattagatgtaattagatctatttgattcattcttcggaaatatttattgagataatgcggggtgatctctcgcttcatgatccattgactgtaaaaggcgatttgcctatgttaatacaatgatatattctattc

SEQ ID NO: 17203 - protein, 143 aa, Zea mays subsp. mays
  misc_feature (1)..(143): Ceres Seq. ID no. 12356448
MGYLKMDEEFLKRGESGGTCCVIALLRKGRLVVSNIGDCHVVLSRAGKAKVLTSDHRASQEDEKQRIENLGGFVVNYHGTWRVQGSLAVSRGNGDGHLKQWVVADRETRTLLIDHQCEFLILASDGLWGKIDNQDAVDQNSRH

SEQ ID NO: 17204 - protein, 138 aa, Zea mays subsp. mays
  misc_feature (1)..(138): Ceres Seq. ID no. 12356449
MDEEFLKRGESGGTCCVIALLRKGRLVVSNIGDCHVVLSRAGKAKVLTSDHRASQEDEKQRIENLGGFVVNYHGTWRVQGSLAVSRGNGDGHLKQWVVADRETRTLLIDHQCEFLILASDGLWGKIDNQDAVDQNSRH

SEQ ID NO: 17205 - protein, 108 aa, Zea mays subsp. mays
  misc_feature (1)..(108): Ceres Seq. ID no. 12356450
MEVGPRDGLQNEKDIVPTPVKVELIRRLATSGLPVVEATSFVSPKRVPQAGLRLFHPPLLRGGLGRHHGVTRGVLCSRDDSRELSRWVTSRWTRSSSRGARAGARAAS

SEQ ID NO: 17206 - DNA, 1434 bp, Zea mays subsp. mays
  misc_feature (1)..(1434): Ceres Seq. ID no. 12356470
accgagatgcaatgcaatgcaaacatcctccctcttctcctgctcctcacagacatcttatcctagctcccggtcgaaggccgtaggtaggattcccttctctattcctcgtccgcttcctcctccggcagccggacctagctagctagctttcttgccgttcgccgcccatggctaggaagtgctctagctgtgggaacaacggccacaactccaggacctgcggcgggcacagcaggaccacggcggccttcgagaacaacggcggcgccggcgtgaggctgttcggggtgcagctgcacgtggggtcctcgtcgcccgtagccgtagccatgaagaggtgcttcagcatggagtgcctgtcgtcgccgccgcccgccgcgccggcgtactacgcggccgctctcgccgccgccaacagcagctcgccgtcggcgtccgcgtcggcgtcctcgtcctcgtcgctcgtctcggtggaggaggcacaggcacccgagaagatggccagcgggtacctctccgacgggctcgtgggcagggcgcaggcggagaggaagaagggcgttccgtggacggaggacgagcaccggcggttcctggcgggcctggagaagctcgggaagggcgactggcgaggcatctcccggcacttcgtcacgacgcggacgccgacgcaggtggccagccacgcccagaagtacttcctccggcagagcagcctggcgcacaagaagcgcaggtccagcctcttcgacgtggtggagaacgctgctgagagggcgacgacgacgagctccagggagcgcccgaggctcacggtcacggatgcgataatcgcgaccgcctctgctgcagcacccggaacaacggcagcactcccggccctgtcgctcggcatccgacggccagcgaggcctgagtaccacgttgacgtcgcgctgcctccgagcagcctgtccatgcagctgccgcggtgctcggcggcaatgggtagcgcgtcggcgtcgccgtcgccgagcctggcgctggcgctggcggggccgaaacacaagcacccttcgccttcgtccctgacggcggcaaaggctagtagtagtggccaggcaccagacctggagctgaagatctcgaccggccggcagagcgagcaccaggtccagacgggctcgccgccgaggacgccctttctgggcaccatcagggtcacgtaaccggaatgacggcggcggcggttagtcgggaatgtcctgctggtagaagaagagcttggccgggccggggtgggaaaactgaaaaggaggagcttttggcagtggtgttggtgtgtgtgtgttgctgccagtggcagccgagacgacgatgccgttcgtttatcacgtgggtgtggtgttgtgcatcatcatcagaaagatggaaactttactttagtggcct

SEQ ID NO: 17207 - protein, 346 aa, Zea mays subsp. mays
  misc_feature (1)..(346): Ceres Seq. ID no. 12356471
MARKCSSCGNNGHNSRTCGGHSRTTAAFENNGGAGVRLFGVQLHVGSSSPVAVAMKRCFSMECLSSPPPAAPAYYAAALAAANSSSPSASASASSSSSLVSVEEAQAPEKMASGYLSDGLVGRAQAERKKGVPWTEDEHRRFLAGLEKLGKGDWRGISRHFVTTRTPTQVASHAQKYFLRQSSLAHKKRRSSLFDVVENAAERATTTSSRERPRLTVTDAIIATASAAAPGTTAALPALSLGIRRPARPEYHVDVALPPSSLSMQLPRCSAAMGSASASPSPSLALALAGPKHKHPSPSSLTAAKASSSGQAPDLELKISTGRQSEHQVQTGSPPRTPFLGTIRVT

SEQ ID NO: 17208 - protein, 292 aa, Zea mays subsp. mays
  misc_feature (1)..(292): Ceres Seq. ID no. 12356472
MKRCFSMECLSSPPPAAPAYYAAALAAANSSSPSASASASSSSSLVSVEEAQAPEKMASGYLSDGLVGRAQAERKKGVPWTEDEHRRFLAGLEKLGKGDWRGISRHFVTTRTPTQVASHAQKYFLRQSSLAHKKRRSSLFDVVENAAERATTTSSRERPRLTVTDAIIATASAAAPGTTAALPALSLGIRRPARPEYHVDVALPPSSLSMQLPRCSAAMGSASASPSPSLALALAGPKHKHPSPSSLTAAKASSSGQAPDLELKISTGRQSEHQVQTGSPPRTPFLGTIRVT

SEQ ID NO: 17209 - protein, 286 aa, Zea mays subsp. mays
  misc_feature (1)..(286): Ceres Seq. ID no. 12356473
MECLSSPPPAAPAYYAAALAAANSSSPSASASASSSSSLVSVEEAQAPEKMASGYLSDGLVGRAQAERKKGVPWTEDEHRRFLAGLEKLGKGDWRGISRHFVTTRTPTQVASHAQKYFLRQSSLAHKKRRSSLFDVVENAAERATTTSSRERPRLTVTDAIIATASAAAPGTTAALPALSLGIRRPARPEYHVDVALPPSSLSMQLPRCSAAMGSASASPSPSLALALAGPKHKHPSPSSLTAAKASSSGQAPDLELKISTGRQSEHQVQTGSPPRTPFLGTIRVT

SEQ ID NO: 17210 - DNA, 1116 bp, Zea mays subsp. mays
  misc_feature (1)..(1116): Ceres Seq. ID no. 12356519
aaaagaccaaaggatgtcgacaccaggagccccgagcctggccacgacagcggcggctgtcctgtgcgtcctggccgcggcgctcgcggtcacggtcgcgagcggccagcagtgcgggcagcaggccggcggcgcaacgtgccgcgactgcctctgctgcagccgcttcggcttttgcggcgacacctccgagtactgcggcgccgggtgccagagccagtgcaccggctgcggcccgcgtcccgcgggccccggcgtggcatccgtcgtgccgagagacctcttcgagcggctgctcctccaccgcaacgacgcggcgtgccctgcgcgcgggttctacacctacgacgcgttcctggccgccgcggccgcgttcccggccttcggcacgacgggcggcgacgagcagcggaaacgggaggtcgcggcgttcctgggccagacctcccacgagaccacgggcgggtggccgaccgcgcccgacgggcccttctcgtggggttactgcttcaagcaggagcgcaacccgccgtcggactactgcgagccgcggccgcagtggccgtgcgcgcccggcaagaagtacttcggccgcggccccatccagatctccttcaactacaactacggcccggcggggcgagccatcggcgtggacctcctcaacaacccggacctcgtcgcgacggaccccgtgatatccttcaagacagcgctgtggttctggatgaacgcgcgggacaacaagccgtcgtgccacgccgtgatcacggggcagtggacgcccacggctgcggacagggcggccggccggggcgcgccagggtacggcgtgatcaccaacatcatcaacggtgggatcgagtgcgggcacgggacggacccccgggtcaccgaccggattggcttctacaagcgctactgcgatgtcttccgcatcggctacgggagcaatctcgattgcgacggccagaggcccttcaatagcggactggcggttgaggtggcggcgcagtgaaaacgtgtgtgtgtgtgtgtgactgtgtgttgcttcgtcggtttgaataaatttcatgtaaaaaccggtgcttcatccgaaaataaggcactttacgt

SEQ ID NO: 17211 - protein, 338 aa, Zea mays subsp. mays
  misc_feature (1)..(338): Ceres Seq. ID no. 12356520
KDQRMSTPGAPSLATTAAAVLCVLAAALAVTVASGQQCGQQAGGATCRDCLCCSRFGFCGDTSEYCGAGCQSQCTGCGPRPAGPGVASVVPRDLFERLLLHRNDAACPARGFYTYDAFLAAAAAFPAFGTTGGDEQRKREVAAFLGQTSHETTGGWPTAPDGPFSWGYCFKQERNPPSDYCEPRPQWPCAPGKKYFGRGPIQISFNYNYGPAGRAIGVDLLNNPDLVATDPVISFKTALWFWMNARDNKPSCHAVITGQWTPTAADRAAGRGAPGYGVITNIINGGIECGHGTDPRVTDRIGFYKRYCDVFRIGYGSNLDCDGQRPFNSGLAVEVAAQ

SEQ ID NO: 17212 - protein, 334 aa, Zea mays subsp. mays
  misc_feature (1)..(334): Ceres Seq. ID no. 12356521
MSTPGAPSLATTAAAVLCVLAAALAVTVASGQQCGQQAGGATCRDCLCCSRFGFCGDTSEYCGAGCQSQCTGCGPRPAGPGVASVVPRDLFERLLLHRNDAACPARGFYTYDAFLAAAAAFPAFGTTGGDEQRKREVAAFLGQTSHETTGGWPTAPDGPFSWGYCFKQERNPPSDYCEPRPQWPCAPGKKYFGRGPIQISFNYNYGPAGRAIGVDLLNNPDLVATDPVISFKTALWFWMNARDNKPSCHAVITGQWTPTAADRAAGRGAPGYGVITNIINGGIECGHGTDPRVTDRIGFYKRYCDVFRIGYGSNLDCDGQRPFNSGLAVEVAAQ

SEQ ID NO: 17213 - protein, 328 aa, Zea mays subsp. mays
  misc_feature (1)..(328): Ceres Seq. ID no. 12356522
KRPKDVDTRSPEPGHDSGGCPVRPGRGARGHGRERPAVRAAGRRRNVPRLPLLQPLRLLRRHLRVLRRRVPEPVHRLRPASRGPRRGIRRAERPLRAAAPPPQRRGVPCARVLHLRRVPGRRGRVPGLRHDGRRRAAETGGRGVPGPDLPRDHGRVADRARRALLVGLLLQAGAQPAVGLLRAAAAVAVRARQEVLRPRPHPDLLQLQLRPGGASHRRGPPQQPGPRRDGPRDILQDSAVVLDERAGQQAVVPRRDHGAVDAHGCGQGGRPGRARVRRDHQHHQRWDRVRARDGPPGHRPDWLLQALLRCLPHRLREQSRLRRPEALQ

SEQ ID NO: 17214 - DNA, 1701 bp, Zea mays subsp. mays
  misc_feature (1)..(1701): Ceres Seq. ID no. 12356548
ttcagctcgaggccttgtcttgagttctctagctcgtccacaggcctggccagctagctagctagcactgacactgaccgagaccctgcagctagcagctgatcgatccatccatggccatgggctgctgctacggtgatttcttcgacaaggccaagccttacctcgccatgatctccctgcagttcggctatgccggcatgaacgtcatcaccaaggtctccctcaaccacggcatgagccactacgtgctcgtcgtctaccgccacgcctttgccaccgtctctattgcaccgtttgctctcatccttgagaggaaggtgaggcccaacatgacgtggtccgtcttcctccagatcttcgtgttggcactgctcgggcctgtgatagaccagaacttctactacgccggcctcaagttcaccgggccgaccttcgcgtgcgccatgagcaacatccttcctgccatgaccttcgtcatggccgtgattttcaggatggagaaggtggacctgaagaagatgcggtgccagggcgaaggtggccgggacgctggtgaccgtggccggcgcgatgatgatgacgctgtacaagggcccgctgatgaagatggcgtggaccagcagcggccacgcgcacggcggcggcggcggcgccgaggcggccgtcatcgaccccagcggcagggagtggttcctgggctcgctcttcgtcatcgtcgccaccctcgcctgggcctcgctcttcatcctccaggcgcacaccctgaagcagtacgcggcgccgctctccctcaccaccctcatctgcttcgtcggcaccctacaggccatcgtcgtcaccttcgccatggagcaccgcccctccgtctggaccatcggcttcgacatgaacctcctcgccgccgcatacgccggcattgtcacgtcgagcatagcgtactacgtgcaaggcctggtgatccagaagaccgggcccgtgttcgcgtcggcgttcagcccgctgatgatgatcatcgtggccgtcatgggctccttcatcctcgccgagaagatattcctcggcggcgtcctcggcgccgtcctcatcgtcatcgggctctactcggtgctctggggcaagcacaaggagacgcaggacaaggaggacgatgagactacagagctgcccgtcgtggcaataatggcatccaaaaccaatggagtcgtctacgacgacgacgatgacgtcgtcttcgtcaaggagatcgccgccgccggcgctggcgctgttggaggagatgactcggagtgcaggaaggcgactggggtggtgaagtcatcctcccgtggacacggagctgctggtgcagtttgatggaacatgcatggaagaggcggtgtccaactgctaacttcctttccttgcattgccatgtgtgtcccctagtatctactgacgttgcatgcatcacagggtcgggtgattgagagaggcagctgcgatgcagagtggaaggactggaataattttgttctgtgcccttttgaattttgctacctttttgtacctaagatgtatctactagtatatttaacttgtattttcttatgctttaatttctgtggagaaaaaagtgatgttccgggacttaagcgaaggacatatatatatgtatgtatcacatcggcttttgccatgtaatatattattgcttttctt

SEQ ID NO: 17215 - protein, 346 aa, Zea mays subsp. mays
  misc_feature (1)..(346): Ceres Seq. ID no. 12356549
MAMGCCYGDFFDKAKPYLAMISLQFGYAGMNVITKVSLNHGMSHYVLVVYRHAFATVSIAPFALILERKVRPNMTWSVFLQIFVLALLGPVIDQNFYYAGLKFTGPTFACAMSNILPAMTFVMAVIFRMEKVDLKKMRCQGEGGRDAGDRGRRDDDDAVQGPADEDGVDQQRPRARRRRRRRGGRHRPQRQGVVPGLALRHRRHPRLGLALHPPGAHPEAVRGAALPHHPHLLRRHPTGHRRHLRHGAPPLRLDHRLRHEPPRRRIRRHCHVEHSVLRARPGDPEDRARVRVGVQPADDDHRGRHGLLHPRREDIPRRRPRRRPHRHRALLGALGQAQGDAGQGGR

SEQ ID NO: 17216 - protein, 344 aa, Zea mays subsp. mays
  misc_feature (1)..(344): Ceres Seq. ID no. 12356550
MGCCYGDFFDKAKPYLAMISLQFGYAGMNVITKVSLNHGMSHYVLVVYRHAFATVSIAPFALILERKVRPNMTWSVFLQIFVLALLGPVIDQNFYYAGLKFTGPTFACAMSNILPAMTFVMAVIFRMEKVDLKKMRCQGEGGRDAGDRGRRDDDDAVQGPADEDGVDQQRPRARRRRRRRGGRHRPQRQGVVPGLALRHRRHPRLGLALHPPGAHPEAVRGAALPHHPHLLRRHPTGHRRHLRHGAPPLRLDHRLRHEPPRRRIRRHCHVEHSVLRARPGDPEDRARVRVGVQPADDDHRGRHGLLHPRREDIPRRRPRRRPHRHRALLGALGQAQGDAGQGGR

SEQ ID NO: 17217 - protein, 327 aa, Zea mays subsp. mays
  misc_feature (1)..(327): Ceres Seq. ID no. 12356551
MISLQFGYAGMNVITKVSLNHGMSHYVLVVYRHAFATVSIAPFALILERKVRPNMTWSVFLQIFVLALLGPVIDQNFYYAGLKFTGPTFACAMSNILPAMTFVMAVIFRMEKVDLKKMRCQGEGGRDAGDRGRRDDDDAVQGPADEDGVDQQRPRARRRRRRRGGRHRPQRQGVVPGLALRHRRHPRLGLALHPPGAHPEAVRGAALPHHPHLLRRHPTGHRRHLRHGAPPLRLDHRLRHEPPRRRIRRHCHVEHSVLRARPGDPEDRARVRVGVQPADDDHRGRHGLLHPRREDIPRRRPRRRPHRHRALLGALGQAQGDAGQGGR

SEQ ID NO: 17218 - DNA, 1602 bp, Zea mays subsp. mays
  misc_feature (1)..(1602): Ceres Seq. ID no. 12356556
aaacgaaaacgagccagccgggcaaacaacactcacatcttacaccagccgcactcccctgtcctcctctccgagacgagacggacgggacggcaggcaccaccgcaccggcgccaccccacccgccggctcagagcgggggcccggccacccgaatcacacagatcggaacgccggaggaggagcaacgcgggcgcggagaggcccgccagcgaaggcgcagtgcaagctctgggttcccggatccgataccaccggtctctcggcgagtgtgtaatccagcgagcgagcgctcggtttttgccgtgagagcgggagatgagtgctctgaagaaatccgacaagaaagccgccctcgacttcgcggcatggagcttcaacgtcaccacgtcggtcggactcatcatggtcaacaaggcgttgatggctacgtatggattcagttttgccacgacattaactgggcttcattttgtgaccactaccttgatgactatcgtatttcgatggttaggcctgagccagccatcccacttacccctagcagatctagttaaatttgtgatattttcgaacttgtcaattgttgggatgaatgtgagcttgatgtggaactctgtgggcttttatcagatagcaaagctgtgcatgatacctgcatcctgtcttctggaggttgtctttgatcatgtacattattcccgggacacaaagctgagcataatggtcgtgcttataggagttgcagtctgcacagttactgatgtcagtgtgaatgcaagaggtctaatcgcggctgttatagctgtttggagcacagctttgcaacaatattatgtccattttctccaacgcaagtactctttgaactcattcaacctgctgggccacactgctccagcccaagctgggtcactcctgctagtgggaccatttgcagattacttgttgacaggcaaaagggtggatcacttcagtttctcatcacttgctctgtttttcctggcactctcatgcttcatcgccattggtgttaatctgagccaattcatctgtattgggcgcttctctgctgtatccttccaagtcttaggccacatgaagaccgtacttgttctgtcccttgggttcctactctttggcaaggagggcctgaatcttcaggtagtccttgggatggttctggccgttcttggaatgatatggtacgggaacgcatctgccaaaccaggcggcaaagagcggcgcagcgtcctaccgctgaggtctgcaagtctcaagggaagttcggaagaaaagggcggtgccgagaaatagtcttgctctctctgattgccaacttgaacggggagttttccgttccaaggttgaatttctggtgaggtgacgtgaagtaccacatattgggaactcttgcctaatatttgacgcagagaacaaactcgttccatctagaaacccaggattgttatagttacaggtatactgtaaaggttcattttttttggcgctctgaatcaatttgcagtgaggggaaagacagacatggttgttacgagtcttcaagacagttttttatcgaatatataatgcagttgtttg

SEQ ID NO: 17219 - protein, 332 aa, Zea mays subsp. mays
  misc_feature (1)..(332): Ceres Seq. ID no. 12356557
MSALKKSDKKAALDFAAWSFNVTTSVGLIMVNKALMATYGFSFATTLTGLHFVTTTLMTIVFRWLGLSQPSHLPLADLVKFVIFSNLSIVGMNVSLMWNSVGFYQIAKLCMIPASCLLEVVFDHVHYSRDTKLSIMVVLIGVAVCTVTDVSVNARGLIAAVIAVWSTALQQYYVHFLQRKYSLNSFNLLGHTAPAQAGSLLLVGPFADYLLTGKRVDHFSFSSLALFFLALSCFIAIGVNLSQFICIGRFSAVSFQVLGHMKTVLVLSLGFLLFGKEGLNLQVVLGMVLAVLGMIWYGNASAKPGGKERRSVLPLRSASLKGSSEEKGGAEK

SEQ ID NO: 17220 - protein, 303 aa, Zea mays subsp. mays
  misc_feature (1)..(303): Ceres Seq. ID no. 12356558
MVNKALMATYGFSFATTLTGLHFVTTTLMTIVFRWLGLSQPSHLPLADLVKFVIFSNLSIVGMNVSLMWNSVGFYQIAKLCMIPASCLLEVVFDHVHYSRDTKLSIMVVLIGVAVCTVTDVSVNARGLIAAVIAVWSTALQQYYVHFLQRKYSLNSFNLLGHTAPAQAGSLLLVGPFADYLLTGKRVDHFSFSSLALFFLALSCFIAIGVNLSQFICIGRFSAVSFQVLGHMKTVLVLSLGFLLFGKEGLNLQVVLGMVLAVLGMIWYGNASAKPGGKERRSVLPLRSASLKGSSEEKGGAEK

SEQ ID NO: 17221 - protein, 297 aa, Zea mays subsp. mays
  misc_feature (1)..(297): Ceres Seq. ID no. 12356559
MATYGFSFATTLTGLHFVTTTLMTIVFRWLGLSQPSHLPLADLVKFVIFSNLSIVGMNVSLMWNSVGFYQIAKLCMIPASCLLEVVFDHVHYSRDTKLSIMVVLIGVAVCTVTDVSVNARGLIAAVIAVWSTALQQYYVHFLQRKYSLNSFNLLGHTAPAQAGSLLLVGPFADYLLTGKRVDHFSFSSLALFFLALSCFIAIGVNLSQFICIGRFSAVSFQVLGHMKTVLVLSLGFLLFGKEGLNLQVVLGMVLAVLGMIWYGNASAKPGGKERRSVLPLRSASLKGSSEEKGGAEK

SEQ ID NO: 17222 - DNA, 1630 bp, Zea mays subsp. mays
  misc_feature (1)..(1630): Ceres Seq. ID no. 12356575
gcggccaccggcttattcaagagcaccaaaagagtttcggcatggatggatagcacacagcgagcgagcgagagcggtgagcccggccaccagcgccggaggccgtcgtcgtcttactagccgacgctcgacttgggcatgaattgctagccgcgcgggtgagagattgctaggtagccagctaggtacggtgtggggagttgaatcggaggtctgccgctcgaggcggcggcggcagaaggccggtaggatgaagaagctccactggctggtgcggttcctgttcgggccggtgccggtctacttctcggcgctggccatcctcatcgtgctcaccaacgcgcagtacttcgggctggtgggcgtcggcgtggcgccgcgcaccgcgaagctggcctcctcggcgcccgtggtcagcgtcatgaagtactgcgacatcttccgcggcgagtgggtgccggacgcggaggcgccctactacaaccacaagacgtgccacatgatccaggagcaccagaactgcctcaagtacggccgccccgacctgggcttcctcaagtggcggtggcggccctccggatgcgagctgccgcgcttcgacccgctgcagttcctgcagttcgcccgcgggaagtcgctggccttcgtcggggactcgctggcgcggaaccacatgcagtcgctgctctgcctcctgtcccaggtggcgtatcccaaggacctgtcggcgaacccgtcggaccagaacaaggtgtaccactaccgggcgtacaacttcaccatcagcatgttctggtcgccgttcctggtgcgcgcccgggagcccgaccacgacggccccgcgcacacgggccactggagcctctacctggacgagcccgacgacaagtgggtgtcccagatgccccgcttcgactacgtgctggtgtcggcggccaactggttctcccgcccctccctcttctacgagcggcggcgcctcgtcgggtgcagcttctgcagccgccagtacggcgtgcccgacctgacgctctactactcgcagcgccgcgcgtggcgcgtggcgctgcgcgccatcaacgacctggagcgcctgcgagggcgcgtcatcctgcgcatgctctccccgatgtcgcacttcgagaacgggacctgggaccacggcggcgactgcaggcgcacgcagccgctgcgggcgaaccagaccgccatggagggccgcgacctgcacttctacaccgcgcagatggaggagttccgcgccgcggagaaggccgccgccgagaaggggcggcgcctgatgctcatggacgccacggcggcgatgctgatgcggcccgacggccaccccagccgctacgggcactggcccaacgagaaggtgcagctctacaacgactgcatccactggtgcctcccgggacccatcgacatctggaacgacatgctcttccagatgctcctcgcctagcagcaagcagcaaagattaaaaaaaaaactcagcaattcggtcgccggtaaccgtgcacagattggccttcttttttttgccttgtttcgtttttttaaaaaaagaagaaaatggtgcaattttgacaagcaaggattcgaaattcgccggtaaccccc

SEQ ID NO: 17223 - protein, 406 aa, Zea mays subsp. mays
  misc_feature (1)..(406): Ceres Seq. ID no. 12356576
MKKLHWLVRFLFGPVPVYFSALAILIVLTNAQYFGLVGVGVAPRTAKLASSAPVVSVMKYCDIFRGEWVPDAEAPYYNHKTCHMIQEHQNCLKYGRPDLGFLKWRWRPSGCELPRFDPLQFLQFARGKSLAFVGDSLARNHMQSLLCLLSQVAYPKDLSANPSDQNKVYHYRAYNFTISMFWSPFLVRAREPDHDGPAHTGHWSLYLDEPDDKWVSQMPRFDYVLVSAANWFSRPSLFYERRRLVGCSFCSRQYGVPDLTLYYSQRRAWRVALRAINDLERLRGRVILRMLSPMSHFENGTWDHGGDCRRTQPLRANQTAMEGRDLHFYTAQMEEFRAAEKAAAEKGRRLMLMDATAAMLMRPDGHPSRYGHWPNEKVQLYNDCIHWCLPGPIDIWNDMLFQMLLA

SEQ ID NO: 17224 - protein, 349 aa, Zea mays subsp. mays
  misc_feature (1)..(349): Ceres Seq. ID no. 12356577
MKYCDIFRGEWVPDAEAPYYNHKTCHMIQEHQNCLKYGRPDLGFLKWRWRPSGCELPRFDPLQFLQFARGKSLAFVGDSLARNHMQSLLCLLSQVAYPKDLSANPSDQNKVYHYRAYNFTISMFWSPFLVRAREPDHDGPAHTGHWSLYLDEPDDKWVSQMPRFDYVLVSAANWFSRPSLFYERRRLVGCSFCSRQYGVPDLTLYYSQRRAWRVALRAINDLERLRGRVILRMLSPMSHFENGTWDHGGDCRRTQPLRANQTAMEGRDLHFYTAQMEEFRAAEKAAAEKGRRLMLMDATAAMLMRPDGHPSRYGHWPNEKVQLYNDCIHWCLPGPIDIWNDMLFQMLLA

SEQ ID NO: 17225 - protein, 323 aa, Zea mays subsp. mays
  misc_feature (1)..(323): Ceres Seq. ID no. 12356578
MIQEHQNCLKYGRPDLGFLKWRWRPSGCELPRFDPLQFLQFARGKSLAFVGDSLARNHMQSLLCLLSQVAYPKDLSANPSDQNKVYHYRAYNFTISMFWSPFLVRAREPDHDGPAHTGHWSLYLDEPDDKWVSQMPRFDYVLVSAANWFSRPSLFYERRRLVGCSFCSRQYGVPDLTLYYSQRRAWRVALRAINDLERLRGRVILRMLSPMSHFENGTWDHGGDCRRTQPLRANQTAMEGRDLHFYTAQMEEFRAAEKAAAEKGRRLMLMDATAAMLMRPDGHPSRYGHWPNEKVQLYNDCIHWCLPGPIDIWNDMLFQMLLA

SEQ ID NO: 17226 - DNA, 1287 bp, Zea mays subsp. mays
  misc_feature (1)..(1287): Ceres Seq. ID no. 12356579
ctaaaactaaggcatagcggtaaacaccaccgaagtctcagcttctccgaggaaggggcgcaattgctgaagcagccacttcaccttgggcccatacagaaatggcggcttcttgcgcctccacactcccttcactttccttcgtttcctcctccagttcatcccgccgattcaggcgctctggtgtggtggccatggccagcgttgggcagaaggtgtatgcgcccggtgtggcggtgtcggagggcaatggcgggctgccgaaaatcgacctcaaatccccgcacgggagcgaggctgagatttatctgtttggagcgtgtgttacttctttcaaagtccctaatggcaaggacctgctctttgttcgaccagatgctgtgtttaatggacagaaacccatcagcggtggaattccacattgtttcccccagtttggcccaggtcccatgcagcagcatgggtttgcacggaatgtgaattggtctatcacagattcagaagtcacagaaggagatccagctgtaactttggaactgaaagatgacacttatagccgttctatgtgggatttcagcttccatgcactgtacaaggtttccctgcactctaaaagcttgtcaacaactctagcaataataaatacagatgacaagcctttctcattcaactcagccctccacacttatttcagtgcttccataactggcgtttctgtgaaaggtctaaaaggttgcaagactctcaataaggaccctgacccaaaaaatcctttggagggcaaagaagagagggaagaggtgacttttccaggattcgtcgactgcgtctaccttggtgcaccaagtgaactcatcctggacaatggattgggtgacaaaattgccattgcaaattcaaattggtcagatgcagtcttgtggaatcctcacttgcagatggaggcctgctacaaagattttgtctgtgtggaaaacgccaagattgaaatggtacaactggagccaaaacaatcttgggtggcagaacagaaaattgaactagtctgatgataatgtcttgcagcaactgcatcaagtagagtgagacgcagatggcgctcccccagtgtcattcttcatggcacatgtcatcacaatagctatacatgtgatgttttctgttaaaaagaataaatgatgcaaatcatgaatttttttctagcagtctgatgtgtattgaattgcaaatgtacaatttgaactgcatggatctgttgaaataaagggagtgcccatttgatctttg

SEQ ID NO: 17227 - protein, 315 aa, Zea mays subsp. mays
  misc_feature (1)..(315): Ceres Seq. ID no. 12356580
MAASCASTLPSLSFVSSSSSSRRFRRSGVVAMASVGQKVYAPGVAVSEGNGGLPKIDLKSPHGSEAEIYLFGACVTSFKVPNGKDLLFVRPDAVFNGQKPISGGIPHCFPQFGPGPMQQHGFARNVNWSITDSEVTEGDPAVTLELKDDTYSRSMWDFSFHALYKVSLHSKSLSTTLAIINTDDKPFSFNSALHTYFSASITGVSVKGLKGCKTLNKDPDPKNPLEGKEEREEVTFPGFVDCVYLGAPSELILDNGLGDKIAIANSNWSDAVLWNPHLQMEACYKDFVCVENAKIEMVQLEPKQSWVAEQKIELV

SEQ ID NO: 17228 - protein, 284 aa, Zea mays subsp. mays
  misc_feature (1)..(284): Ceres Seq. ID no. 12356581
MASVGQKVYAPGVAVSEGNGGLPKIDLKSPHGSEAEIYLFGACVTSFKVPNGKDLLFVRPDAVFNGQKPISGGIPHCFPQFGPGPMQQHGFARNVNWSITDSEVTEGDPAVTLELKDDTYSRSMWDFSFHALYKVSLHSKSLSTTLAIINTDDKPFSFNSALHTYFSASITGVSVKGLKGCKTLNKDPDPKNPLEGKEEREEVTFPGFVDCVYLGAPSELILDNGLGDKIAIANSNWSDAVLWNPHLQMEACYKDFVCVENAKIEMVQLEPKQSWVAEQKIELV

SEQ ID NO: 17229 - protein, 199 aa, Zea mays subsp. mays
  misc_feature (1)..(199): Ceres Seq. ID no. 12356582
MQQHGFARNVNWSITDSEVTEGDPAVTLELKDDTYSRSMWDFSFHALYKVSLHSKSLSTTLAIINTDDKPFSFNSALHTYFSASITGVSVKGLKGCKTLNKDPDPKNPLEGKEEREEVTFPGFVDCVYLGAPSELILDNGLGDKIAIANSNWSDAVLWNPHLQMEACYKDFVCVENAKIEMVQLEPKQSWVAEQKIELV

SEQ ID NO: 17230 - DNA, 987 bp, Zea mays subsp. mays
  misc_feature (1)..(987): Ceres Seq. ID no. 12356601
atccgcttgtccctaccacctccaccaaccaaaacccccaaccgccgaggtcaccggcgactccgtcctcgccgcgccgcgccgtgaggatgtcgttccactaccacgaccacgggctgtnnatggacgccgcggcagcggcggccgccgccgcgtcgtcgccgaaccctagcggcttctcccccggcatcggcggggaaagggagaaggcggccatcgcggcgcacccgctgtacgagcgcctcctggaggcgcacgtcgcctgcctacgcgtcgccacccccgtcgaccagctcccccgcatcgacgcgcagatcgccgcgcgcccncngccgctcnccgcggccgccggggccgcggccgcgggaggcccgtccggcggggaggagctcgacctcttcatgacgcactatgtattgctcctttgctgatgcaaggngcagttgcagcagcatgtacgtgttcatgcaatggaagcagtgatgggttgctgggagcttgnacaatctttacaaagcctaacaggggcatctccgggtgaaggcactggaggaaccatgtctgacgatgaagataaccaggtggatagtgaagccaacatgttcgatggaaatgatggatcagacggtatgggctttggccccctaatactgacagagggtgaacggtccttagttgagcgtgtacggaaggagctgaagaacgagcttaagcagggttacaaggaaaagcttgtcgatatcagggaagagatcatgcgcaaacgcagggctgggaaacttcctggagataccgcatctgtactgaaagcttggtggcaagctcattcgaagtggccgtacccaactgaagacgacaaggccagactggtgcaggaaacggggttgcagctaaagcagatcaacaactggttcattaaccaacgcaaacggaactggcacagcaacccaacatcctcggctgaaaagaccaaaaaaaaaaaaaaaa

SEQ ID NO: 17231 - protein, 172 aa, Zea mays subsp. mays
  misc_feature (1)..(172): Ceres Seq. ID no. 12356602
  misc_feature (11)..(11): Xaa is any aa, unknown or other
MEAVMGCWELXQSLQSLTGASPGEGTGGTMSDDEDNQVDSEANMFDGNDGSDGMGFGPLILTEGERSLVERVRKELKNELKQGYKEKLVDIREEIMRKRRAGKLPGDTASVLKAWWQAHSKWPYPTEDDKARLVQETGLQLKQINNWFINQRKRNWHSNPTSSAEKTKKKKK

SEQ ID NO: 17232 - protein, 168 aa, Zea mays subsp. mays
  misc_feature (1)..(168): Ceres Seq. ID no. 12356603
  misc_feature (7)..(7): Xaa is any aa, unknown or other
MGCWELXQSLQSLTGASPGEGTGGTMSDDEDNQVDSEANMFDGNDGSDGMGFGPLILTEGERSLVERVRKELKNELKQGYKEKLVDIREEIMRKRRAGKLPGDTASVLKAWWQAHSKWPYPTEDDKARLVQETGLQLKQINNWFINQRKRNWHSNPTSSAEKTKKKKK

SEQ ID NO: 17233 - protein, 143 aa, Zea mays subsp. mays
  misc_feature (1)..(143): Ceres Seq. ID no. 12356604
MSDDEDNQVDSEANMFDGNDGSDGMGFGPLILTEGERSLVERVRKELKNELKQGYKEKLVDIREEIMRKRRAGKLPGDTASVLKAWWQAHSKWPYPTEDDKARLVQETGLQLKQINNWFINQRKRNWHSNPTSSAEKTKKKKK

SEQ ID NO: 17234 - DNA, 1540 bp, Zea mays subsp. mays
  misc_feature (1)..(1540): Ceres Seq. ID no. 12356636
cctttatatggaaatcctgttctgcagcagatgcagttccaatctcagcagtcatccttgcaagttgtgcagcaaggttatggtccaaatgcaagcgactctgggttccttcaaaatcagctgcagctgcaaaagcagcaggagccactaccacagcagcagcagcaagctctgcaacaacaatcgcatcaggaaatgcaacatcacctctcagctagctgtcatgatattgctaatgtagcttctggtgtgtctgagtctggatctgcttctcaaacagaatcttctttgctttctgggtcatcgtaccaacagatctatgatggaaacagtggtccaggtctgcatctgcacaacggtttccacaactgttcaagccaagagtcctccaaccttcttaatctctcaagaagtggacaattcatggcatcagagggatggcctttgaagaggttggctgtggaatctctttctggtcatgagctccaacctgtgcagcacaagtttgagaaagtgaatcaccaaagtaatgtgtctcacatttctagcaccttgcccccactgtcagcaagagacagttatagtgcccaggctagtggtacaaatgatcagagtcacctgctttcatcatcatttgcaatccatgatggcttgacagccgtcaggagtggtggtgttggcagtggaactgatgcgataaccatagcttcgttgagatataatgatatgaatttgctacctgaaaaccccatcgcaacttccagttgtttgggcgaatcaggaaccttcaattctctcgacgatgtgtgtggtgtaaacccatcacaaggtggaacctttgtgaaggtttacaaatcagggtcccctgggagatcgctcgacatcaccaggttcagcagctactacgagttacgtagcgagctcgagcggttatttggtcttgaaggccaactggaggaccctgtaagatcaggctggcagcttgtattcgttgaccgggaaaacgatattcttctcgtcggcgatgacccgtggcaggagtttgtgaatagtgtatggtgcataaagatcctctcgccgcaagacgtgcagcagatggtccgcggcggaggcgaccttctgtctacaactggagtgaggacactgcagggcagtgtctgcgatgattattctgcaggccacgacatgcagaatctcaccggcagcatcgcacctgtggtgcctctggactactgagaccgagatgaagaccagaaactgaagttctgaaccaaaaccggcaattcagcaccgcaggattgccgtccacgagtcttttcggttcctatgatctatcttctctcaagttgtgttggtcagaaataacctagtcgttaatatagctagatccattgtatcattatggtaatggacatgttgtacgatagctgttgtagctacgtgtagccatagcctaagctctaaatggcaggcaagaattggtctatgaaagtatggatgcaggcactcactgtagaggtgacctagccctgtagttctc

SEQ ID NO: 17235 - protein, 411 aa, Zea mays subsp. mays
  misc_feature (1)..(411): Ceres Seq. ID no. 12356637
PLYGNPVLQQMQFQSQQSSLQVVQQGYGPNASDSGFLQNQLQLQKQQEPLPQQQQQALQQQSHQEMQHHLSASCHDIANVASGVSESGSASQTESSLLSGSSYQQIYDGNSGPGLHLHNGFHNCSSQESSNLLNLSRSGQFMASEGWPLKRLAVESLSGHELQPVQHKFEKVNHQSNVSHISSTLPPLSARDSYSAQASGTNDQSHLLSSSFAIHDGLTAVRSGGVGSGTDAITIASLRYNDMNLLPENPIATSSCLGESGTFNSLDDVCGVNPSQGGTFVKVYKSGSPGRSLDITRFSSYYELRSELERLFGLEGQLEDPVRSGWQLVFVDRENDILLVGDDPWQEFVNSVWCIKILSPQDVQQMVRGGGDLLSTTGVRTLQGSVCDDYSAGHDMQNLTGSIAPVVPLDY

SEQ ID NO: 17236 - protein, 401 aa, Zea mays subsp. mays
  misc_feature (1)..(401): Ceres Seq. ID no. 12356638
MQFQSQQSSLQVVQQGYGPNASDSGFLQNQLQLQKQQEPLPQQQQQALQQQSHQEMQHHLSASCHDIANVASGVSESGSASQTESSLLSGSSYQQIYDGNSGPGLHLHNGFHNCSSQESSNLLNLSRSGQFMASEGWPLKRLAVESLSGHELQPVQHKFEKVNHQSNVSHISSTLPPLSARDSYSAQASGTNDQSHLLSSSFAIHDGLTAVRSGGVGSGTDAITIASLRYNDMNLLPENPIATSSCLGESGTFNSLDDVCGVNPSQGGTFVKVYKSGSPGRSLDITRFSSYYELRSELERLFGLEGQLEDPVRSGWQLVFVDRENDILLVGDDPWQEFVNSVWCIKILSPQDVQQMVRGGGDLLSTTGVRTLQGSVCDDYSAGHDMQNLTGSIAPVVPLDY

SEQ ID NO: 17237 - protein, 346 aa, Zea mays subsp. mays
  misc_feature (1)..(346): Ceres Seq. ID no. 12356639
MQHHLSASCHDIANVASGVSESGSASQTESSLLSGSSYQQIYDGNSGPGLHLHNGFHNCSSQESSNLLNLSRSGQFMASEGWPLKRLAVESLSGHELQPVQHKFEKVNHQSNVSHISSTLPPLSARDSYSAQASGTNDQSHLLSSSFAIHDGLTAVRSGGVGSGTDAITIASLRYNDMNLLPENPIATSSCLGESGTFNSLDDVCGVNPSQGGTFVKVYKSGSPGRSLDITRFSSYYELRSELERLFGLEGQLEDPVRSGWQLVFVDRENDILLVGDDPWQEFVNSVWCIKILSPQDVQQMVRGGGDLLSTTGVRTLQGSVCDDYSAGHDMQNLTGSIAPVVPLDY

SEQ ID NO: 17238 - DNA, 1170 bp, Zea mays subsp. mays
  misc_feature (1)..(1170): Ceres Seq. ID no. 12356672
atctgaagcctgtaacatctccgccatccgcctgaaggctcgaagcacgacgccaatggcctcccccaacgccgacccggctcagcaccacgcctcgacgccgccgctcctcctcgccgtacgccacctgccgttccccggcgtccaccggacgcgcgcgctccccggccccgacgtcctgacccctctcgcccgccgcctcgaggagctcgcgtccgcggcgacctcccacccgctcctgaagccgctcttcgccgcccactcacacctctcttccttctcccagggcaggaggcggctggtggcggcgcggcgtgcgacggtgctgtccggggggcactgcttcgcggcggtgctagggaactcggtggccgggttggtggtgtccaacggcatcaacaacttcctcaacctctacaacacggtgctcgtcgtcaggctcgtgctcacgtggttccccaacacgccgcccgccatcgtcgcgcctctcagcacgatatgtgacccgtacctgaacatcttccggggcatcatcccgccgctcgggggaacgctggacctgtcgccgatcctcgctttcctcgtcctcaacgccttcaccagcacggcggccgcgcttccggcggagctcccgagctcggcagcggcgcagcaccaccagaggactgctgcttcatccagctcggcgactcccagtcccaaccagaggaaatggatgcggagaatgcgatcaaagacatcacagggagaagatggtggtcactaggcatgtgagcttgtggctgggttcgtcaaatgccttattgttaccagctggggatcatgcttcgcatcagacgctcgagatctgcacagcaatgtgttggacatgcatgctcctcgctctctagccatcgaatgcaaactctgtcaatgccgcatgcagagttcgcccctttggttcaccacgttgcttcagagcttcaaatggtttttgtgcgttgtaatgcgttggcgttgcggagctttcttcaaatggtttttgtgctttgtaatgctttggcggtgagggctgtgctttctgctgcatgtatgtgtagcactttcggtcagctttcttgaattccgatagtgtgatcgcgatgcgtagccaaattcagtcttgagagagtaccaatcgaactttcatcg

SEQ ID NO: 17239 - protein, 254 aa, Zea mays subsp. mays
  misc_feature (1)..(254): Ceres Seq. ID no. 12356673
SEACNISAIRLKARSTTPMASPNADPAQHHASTPPLLLAVRHLPFPGVHRTRALPGPDVLTPLARRLEELASAATSHPLLKPLFAAHSHLSSFSQGRRRLVAARRATVLSGGHCFAAVLGNSVAGLVVSNGINNFLNLYNTVLVVRLVLTWFPNTPPAIVAPLSTICDPYLNIFRGIIPPLGGTLDLSPILAFLVLNAFTSTAAALPAELPSSAAAQHHQRTAASSSSATPSPNQRKWMRRMRSKTSQGEDGGH

SEQ ID NO: 17240 - protein, 236 aa, Zea mays subsp. mays
  misc_feature (1)..(236): Ceres Seq. ID no. 12356674
MASPNADPAQHHASTPPLLLAVRHLPFPGVHRTRALPGPDVLTPLARRLEELASAATSHPLLKPLFAAHSHLSSFSQGRRRLVAARRATVLSGGHCFAAVLGNSVAGLVVSNGINNFLNLYNTVLVVRLVLTWFPNTPPAIVAPLSTICDPYLNIFRGIIPPLGGTLDLSPILAFLVLNAFTSTAAALPAELPSSAAAQHHQRTAASSSSATPSPNQRKWMRRMRSKTSQGEDGGH

SEQ ID NO: 17241 - DNA, 751 bp, Zea mays subsp. mays
  misc_feature (1)..(751): Ceres Seq. ID no. 12356736
ggagaaagtaccaagtgctcagggagttcagtctgacaatgatcctaacaatacaaccatttttgttggtggtcttgaccccaatgtcactgaagatatgttgaaacaagttttcaccccttatggggacgtagtccatgttaagattcctgttggcaaaagatgtggttttgttcaatatgctaacagatcttcggcagaggaggcattggtaattctgcaaggcaccttggttggagggcagaatgtgaggctttcatggggtcgcagcccttcaaacaaacaagttcagcctcaacaggactccaaccagtgggccggggctaatgctggatattatggctacggtcaaggctatgaggcctatgggtacccccagtctcaggaccctaatatgtataattatggagctggagcttatgctggctatccaaattaccaacaacaaccagtagcacagcaaccgccgcagcaacagtgagaggtccagtgacgctactgtcatttgggtgattgacgtggaaatatttatgagttgtaagatgagcttcggatgcaagctggattaggtatacagacatgattttcgtagtactcagattctgagttgccctcgtatcagagcttgtggtcccaatagcctgcagctgcagctaaaacgatctattttggtagcggaatgttttatctgcttattttgtaccgtgtcttccgctactgcggagccttgataacttgctatgttggattt

SEQ ID NO: 17242 - protein, 159 aa, Zea mays subsp. mays
  misc_feature (1)..(159): Ceres Seq. ID no. 12356737
EKVPSAQGVQSDNDPNNTTIFVGGLDPNVTEDMLKQVFTPYGDVVHVKIPVGKRCGFVQYANRSSAEEALVILQGTLVGGQNVRLSWGRSPSNKQVQPQQDSNQWAGANAGYYGYGQGYEAYGYPQSQDPNMYNYGAGAYAGYPNYQQQPVAQQPPQQQ

SEQ ID NO: 17243 - protein, 127 aa, Zea mays subsp. mays
  misc_feature (1)..(127): Ceres Seq. ID no. 12356738
MLKQVFTPYGDVVHVKIPVGKRCGFVQYANRSSAEEALVILQGTLVGGQNVRLSWGRSPSNKQVQPQQDSNQWAGANAGYYGYGQGYEAYGYPQSQDPNMYNYGAGAYAGYPNYQQQPVAQQPPQQQ

SEQ ID NO: 17244 - DNA, 1242 bp, Zea mays subsp. mays
  misc_feature (1)..(1242): Ceres Seq. ID no. 12356776
atattgcaactttgccaaacacgcacacagcagatccgtctagtgcactagggctcacaatctcgaaggtagctatatcttctcttagtttgctcgtcaccaccggcaatggctacggcgacgactaagccggcggcggggcgcggcgggaggcgctacgcgctgctgctggcgctctgggactcggagtacgcgaaggaggtgtacggcgggtactacaacgtctttgtcgccgctttcggcgccgacgacgtcgtcgtcggcggtggggagggcccggccggcgataggtggcactgcttccgtgtgatcgccggcgagttccctgcgccggaggacctggcgtcgtacgacggcttcgtggtgagcggcagcccgcaggacgcgcacggcgacgaaacatggatccggcgcctctgcgcgctcatccagaccgtccacgccatgaggaagcgggtgctcggcgtctgcttcggccaccaggttctgtgccgagcactgggcgggagggtcggcagggctaggaacggctgggacgtcggggtgaggaaggtgacgtttgcgcgagaccgcctggagagccttgagttcctcggggacctcgtccaggagcttccccggaggcgcctccctcatcgaggttcaccaggacgaggtgtgggagatcccgcctgcggcgacggtgctggcctactcggagaagacgcgcgtggaggtgttcgcggtcggggagcacgcgctgggcatccagggccacccggagtacaccgtcgacatccttcacaacctcatcgaccgcctcaccaagcagaacgacatccggaggagcgtcggcgaggaggcgcggcggacggtcgccgagaccggcgggccggaccgcgctttctggaccgcgctctgcaaaggttttctcggagggggaggggcgggaggagaccgtccgcagccgtctgctgctctgcctgcggtgcgggagacggcgccgccggaggtgacgactagctgcgccgtcgctggttgcttcgccagcgccgcaggtgcaatggtccagatggcgcgcagcaactagttatggctagggctgcccaaaatcttgagtacctggttcctttttgctgcaggattgcactctgtactgcagttcgattttctgttgacagaaagatgtactctagttctcctctaaattattggtgatgtactatactagctagaaactactgcctttgattgatcagtgcc

SEQ ID NO: 17245 - protein, 297 aa, Zea mays subsp. mays
  misc_feature (1)..(297): Ceres Seq. ID no. 12356777
MATATTKPAAGRGGRRYALLLALWDSEYAKEVYGGYYNVFVAAFGADDVVVGGGEGPAGDRWHCFRVIAGEFPAPEDLASYDGFVVSGSPQDAHGDETWIRRLCALIQTVHAMRKRVLGVCFGHQVLCRALGGRVGRARNGWDVGVRKVTFARDRLESLEFLGDLVQELPRRRLPHRGSPGRGVGDPACGDGAGLLGEDARGGVRGRGARAGHPGPPGVHRRHPSQPHRPPHQAERHPEERRRGGAADGRRDRRAGPRFLDRALQRFSRRGRGGRRPSAAVCCSACGAGDGAAGGDD

SEQ ID NO: 17246 - protein, 185 aa, Zea mays subsp. mays
  misc_feature (1)..(185): Ceres Seq. ID no. 12356778
MRKRVLGVCFGHQVLCRALGGRVGRARNGWDVGVRKVTFARDRLESLEFLGDLVQELPRRRLPHRGSPGRGVGDPACGDGAGLLGEDARGGVRGRGARAGHPGPPGVHRRHPSQPHRPPHQAERHPEERRRGGAADGRRDRRAGPRFLDRALQRFSRRGRGGRRPSAAVCCSACGAGDGAAGGDD

SEQ ID NO: 17247 - DNA, 1499 bp, Zea mays subsp. mays
  misc_feature (1)..(1499): Ceres Seq. ID no. 12356783
agggccagttccgtccgacgcgtcgcaacaacccccagggctcaattgacgcgcgggggcgtttcggtcatccagtcatccccctcccctgccaaaggcgaagagcagaagcagaagcagcagcagcaggcgaagaggcagtggtagacatgccaaggtcatcagccggggcgtcatgcacagcagttgaccattctgagcagagcagaaaggatgatgaatatgagaggctggttacaagagctcaacatgcaacatctgatgttggcacgacaattttatctgagcaaccaaagtcaagatctttcatttggtggatgaaagttctgcttggctgcttccttcttatattagtgggctatgtcttcgtgaaatggggggtcccctttgtctttgagaaggttctcttgccaatcatgcaatgggaagccagtgcttttgggcgtccagtattagctattgttctcgttgcatctttggctctctttccagttattctagttccttctggaccttctatgtggttagcaggaatgatctttggatatggttggggtttcttgattataatggccgggagtactattggcatggtggttccatattggattggttcattgttccgtgaacgtctgcatgtatggctgacaaagtggcctcagcagatagcactaataaaactcgcgggtgaaggaaattggttccagcagtttcgggttgtcgcgcttttcagaatctcaccattcccatatacaatttttaattatgccgtgactgtgacagaaattaagttcaacccttatctatgtggttctgttgctggaatggtacctgaggccttcatttatatctacagtgggcgtttaatacgtacattggctgacatgaagtacggcaactataaaatgacaccagtggaaatagcatacaacgccatttccttcgtcatcgctatcgccctcacggtcgccttcacggtgtacgcgaagagagctctgggtgacataaaaagtccggacgatggcatcggtaaagacgaagaagatcacggcccaaatggctcaggggtgcgtatgaatcgtcgtcaggagcgtgccgacgcacgttacatagaactagatgatatgtgatggtgtgttggcccggatcttgcttggaaggaggcaccagtaggtcattaggtgcacggctacggtaggtagctagctatagtttacaagaggaggctaaaataatccacacccagctgacgtggtttgcgtgattcgtttcgtgtgctttgcccactgcactgccatactgtctgaatctgaaggtgcagggctactcactactgagttactgaccgagcgatgctgctctcaacgatgtttctgtgaccatcagcgtatcatccagtccttgatctgaagcctacactggagcttcatgttgaagcatacattggacttgagtagtacatttgtatataacgtaactgctaatagagttagcatatg

SEQ ID NO: 17248 - protein, 375 aa, Zea mays subsp. mays
  misc_feature (1)..(375): Ceres Seq. ID no. 12356784
GQFRPTRRNNPQGSIDARGRFGHPVIPLPCQRRRAEAEAAAAGEEAVVDMPRSSAGASCTAVDHSEQSRKDDEYERLVTRAQHATSDVGTTILSEQPKSRSFIWWMKVLLGCFLLILVGYVFVKWGVPFVFEKVLLPIMQWEASAFGRPVLAIVLVASLALFPVILVPSGPSMWLAGMIFGYGWGFLIIMAGSTIGMVVPYWIGSLFRERLHVWLTKWPQQIALIKLAGEGNWFQQFRVVALFRISPFPYTIFNYAVTVTEIKFNPYLCGSVAGMVPEAFIYIYSGRLIRTLADMKYGNYKMTPVEIAYNAISFVIAIALTVAFTVYAKRALGDIKSPDDGIGKDEEDHGPNGSGVRMNRRQERADARYIELDDM

SEQ ID NO: 17249 - protein, 326 aa, Zea mays subsp. mays
  misc_feature (1)..(326): Ceres Seq. ID no. 12356785
MPRSSAGASCTAVDHSEQSRKDDEYERLVTRAQHATSDVGTTILSEQPKSRSFIWWMKVLLGCFLLILVGYVFVKWGVPFVFEKVLLPIMQWEASAFGRPVLAIVLVASLALFPVILVPSGPSMWLAGMIFGYGWGFLIIMAGSTIGMVVPYWIGSLFRERLHVWLTKWPQQIALIKLAGEGNWFQQFRVVALFRISPFPYTIFNYAVTVTEIKFNPYLCGSVAGMVPEAFIYIYSGRLIRTLADMKYGNYKMTPVEIAYNAISFVIAIALTVAFTVYAKRALGDIKSPDDGIGKDEEDHGPNGSGVRMNRRQERADARYIELDDM

SEQ ID NO: 17250 - protein, 270 aa, Zea mays subsp. mays
  misc_feature (1)..(270): Ceres Seq. ID no. 12356786
MKVLLGCFLLILVGYVFVKWGVPFVFEKVLLPIMQWEASAFGRPVLAIVLVASLALFPVILVPSGPSMWLAGMIFGYGWGFLIIMAGSTIGMVVPYWIGSLFRERLHVWLTKWPQQIALIKLAGEGNWFQQFRVVALFRISPFPYTIFNYAVTVTEIKFNPYLCGSVAGMVPEAFIYIYSGRLIRTLADMKYGNYKMTPVEIAYNAISFVIAIALTVAFTVYAKRALGDIKSPDDGIGKDEEDHGPNGSGVRMNRRQERADARYIELDDM

SEQ ID NO: 17251 - DNA, 1918 bp, Zea mays subsp. mays
  misc_feature (1)..(1918): Ceres Seq. ID no. 12356802
agattgacctgttgccctgttgagtgtgaaggaggcgcacgcgcttgagctgaagaaactgccgcgctgatctagcccgccgggatgggcgcctcggggcctgcggctccgccggcaacgcatcgccgccgctgcatccagctgctgctgctgctcgccctggccgtcgcgccgcttggcagccgtgggcttcgcgtccgtgccgcgggggcggacacgggagggctgagccgggacgcgttcccgaaggggttcgtcttcgggacggcgacgtccgcgtaccaggtcgagggcgcggcgacgtccggcggccgcgggccctgcatctgggatcccttcgtccacacccccggaaagattgctgaagacgccaacgcagatgttacaacagatgaatatcatcgctacaaggaagatgttgatctcatgaaaagcctaaattttgatgcataccggttttcaatctcctggtccaggatcttcccagatggcgaagggaaaattaatgaagaaggagtacagtattacaacaatcttatagactacatgattaagcaaggccttactccttacgccaaccttaaccactatgatcttccgcttgcgcttcagaagaagtaccaaggctggttaggcccaaaaattgtggacatatttgctgactatgctgatttttgtttcaagacttttggcaatcgagtcaagaactggttcacattaaatgagccaaggatagtagcattccttggttatgataaagggcttaacccccctaaccggtgcacacaatgcactgccggtgggaactcatcgacagaaccttacattgttgttcataacattctcctatctcatgctactgcagttgcaagataccgcaataaataccaggcaactcagaaaggcaaggtcgggatagttcttgacttcaactggtatgaaccttttacaaactcaactgaagatcaaaaagcagcgcaaagggccagggacttccatattggttggtttcttgatccattaataaatgggcaatatccaaagataatgcaagacattgtgaaagaccggctaccaagtttcacacctgaacaggccaagctagtcaagggctcatcagactatttcgggatcaatcaatatactacatactacattgcagatcaacaaactcctccgcagggaccaccgagctactcgtccgactggggcgtccaatattactttcaaaggaatggcgtgcaaattggacagatggcgcactcaatttggctttacatcgtcccatcggggcatgtatggagtcgtgaactacctaaaggaaaagtaccataatccaatcatcatcatatcggaaaacggaatggatcagcctggaaacctcacgcgcgaggagtacgtgcacgacgccgtgaggatcgacttctacaagaactacctgacggagctaaagagagggatcgacggcggcgcgaacgtgatcggctacttcgcgtggtctctcctggacaacttcgagtggctgtcgggctacacgtccaagttcggcatcgtctacgtcgacttcgcgacgctgaagcggtaccccaaggactcggcgtactggttcagagacatgctttcggggacgggctccaaggctgctaccccgcagactggttcaggcggccggccggctggttcggcttcagccacctcgaacggacctgccttgctggtctcccttttggtctccttgggtgttctgcttccatccatcttcatggtttcctcggtctaattagaaatgtattttcatagtacggatttgtagttgtgtggatgacaacatgttccttttaagaatcaggacatgttgcatcgatgcgggacctgttgtaggaatgagaccatgattcagggcttattgttcagagtc

SEQ ID NO: 17252 - protein, 416 aa, Zea mays subsp. mays
  misc_feature (1)..(416): Ceres Seq. ID no. 12356803
MGASGPAAPPATHRRRCIQLLLLLALAVAPLGSRGLRVRAAGADTGGLSRDAFPKGFVFGTATSAYQVEGAATSGGRGPCIWDPFVHTPGKIAEDANADVTTDEYHRYKEDVDLMKSLNFDAYRFSISWSRIFPDGEGKINEEGVQYYNNLIDYMIKQGLTPYANLNHYDLPLALQKKYQGWLGPKIVDIFADYADFCFKTFGNRVKNWFTLNEPRIVAFLGYDKGLNPPNRCTQCTAGGNSSTEPYIVVHNILLSHATAVARYRNKYQATQKGKVGIVLDFNWYEPFTNSTEDQKAAQRARDFHIGWFLDPLINGQYPKIMQDIVKDRLPSFTPEQAKLVKGSSDYFGINQYTTYYIADQQTPPQGPPSYSSDWGVQYYFQRNGVQIGQMAHSIWLYIVPSGHVWSRELPKGKVP

SEQ ID NO: 17253 - protein, 302 aa, Zea mays subsp. mays
  misc_feature (1)..(302): Ceres Seq. ID no. 12356804
MKSLNFDAYRFSISWSRIFPDGEGKINEEGVQYYNNLIDYMIKQGLTPYANLNHYDLPLALQKKYQGWLGPKIVDIFADYADFCFKTFGNRVKNWFTLNEPRIVAFLGYDKGLNPPNRCTQCTAGGNSSTEPYIVVHNILLSHATAVARYRNKYQATQKGKVGIVLDFNWYEPFTNSTEDQKAAQRARDFHIGWFLDPLINGQYPKIMQDIVKDRLPSFTPEQAKLVKGSSDYFGINQYTTYYIADQQTPPQGPPSYSSDWGVQYYFQRNGVQIGQMAHSIWLYIVPSGHVWSRELPKGKVP

SEQ ID NO: 17254 - protein, 262 aa, Zea mays subsp. mays
  misc_feature (1)..(262): Ceres Seq. ID no. 12356805
MIKQGLTPYANLNHYDLPLALQKKYQGWLGPKIVDIFADYADFCFKTFGNRVKNWFTLNEPRIVAFLGYDKGLNPPNRCTQCTAGGNSSTEPYIVVHNILLSHATAVARYRNKYQATQKGKVGIVLDFNWYEPFTNSTEDQKAAQRARDFHIGWFLDPLINGQYPKIMQDIVKDRLPSFTPEQAKLVKGSSDYFGINQYTTYYIADQQTPPQGPPSYSSDWGVQYYFQRNGVQIGQMAHSIWLYIVPSGHVWSRELPKGKVP

SEQ ID NO: 17255 - DNA, 1400 bp, Zea mays subsp. mays
  misc_feature (1)..(1400): Ceres Seq. ID no. 12356826
atcctgaacccgaaagctgaactaccacacacaacaaataactgacgcaggcgatccatcactccacagtgtccacacaccggtcggaaccgaggccaaccgccgccgccgccgccaatgtcgtcccctgcagcgccggtgcagccgccggcgccgcgcgcggtgcgcttcggcgtcctgggatgcgctgacatcgcgcgtaagatctcgcgcgcaatgctgatgctccctccgggcgccgccaccatcgccgccgtaggcagtcgctccgatgacaaggcccgccgcttcatctccgaaatcggcttccccgcggcgcgcgtccacgggtcctacgagtctctcctagaggacccggacgtggaggccgtgtacctcccgctccccactagtctccacgtgccctgggccacagccgtcgctgcgcgtggcaagcacctgctcctcgagaagcccaccgcgctctgcactgccgaactcgacgccatcctcagcgcctgcgacgcctccggggtccagttcatggacaccaccatgtggatccacaacccgcgcactgccaagatgcgggagatcgtcagcgacaaggacgcctttggcgacgtcagagtgataaacagtatgtgcagctttcgggcatccgaggaattcctcaagaatgacatcagggtaaagccagaccttgacgccttgggtgtcctcggtgatgttggatggtactgcatcctctcaatcctgtgggctgttgactatgagctgcctgagaccgtgatcgctcaccgccatcctgtcaagaaccaggctggcgtgctccttgcttgcggtgcgaccttgtactgggcagatggcaagactgcaaacttcaactgctcgtttcttgctaacctcgcctttgacgtgaccgtctatggcacaaacggcactctccatgtcactgacctggtcattccgtacgaagagagctctgcggagttcagtgtggcctcgaagtcaagcttcgtcaaacccaccatcggatgggatccattgccagagaagcatgttgttactactgatctgccacaggaggcactcatgatccaggaattcacaaggcttgtgcagaacgtccgcgccggtggcaggcctgagggtaagtggccggctatcacccggaagacgcaggtggtactggatgccgtgaaagcttctattgacaagggatctgaaccacttgaggttgccagctaaatacaacaaatgccagctccttgtgctaggtttgtacttaatggcttctactcgtatttgctgtcgcgcaaatgaaggtagtaattgtaatactgtcacgtaaattgaaactggtaattgtaataatcttaaggaatctggtcaaattgaggagaacatttttacagttc

SEQ ID NO: 17256 - protein, 370 aa, Zea mays subsp. mays
  misc_feature (1)..(370): Ceres Seq. ID no. 12356827
MSSPAAPVQPPAPRAVRFGVLGCADIARKISRAMLMLPPGAATIAAVGSRSDDKARRFISEIGFPAARVHGSYESLLEDPDVEAVYLPLPTSLHVPWATAVAARGKHLLLEKPTALCTAELDAILSACDASGVQFMDTTMWIHNPRTAKMREIVSDKDAFGDVRVINSMCSFRASEEFLKNDIRVKPDLDALGVLGDVGWYCILSILWAVDYELPETVIAHRHPVKNQAGVLLACGATLYWADGKTANFNCSFLANLAFDVTVYGTNGTLHVTDLVIPYEESSAEFSVASKSSFVKPTIGWDPLPEKHVVTTDLPQEALMIQEFTRLVQNVRAGGRPEGKWPAITRKTQVVLDAVKASIDKGSEPLEVAS

SEQ ID NO: 17257 - protein, 337 aa, Zea mays subsp. mays
  misc_feature (1)..(337): Ceres Seq. ID no. 12356828
MLMLPPGAATIAAVGSRSDDKARRFISEIGFPAARVHGSYESLLEDPDVEAVYLPLPTSLHVPWATAVAARGKHLLLEKPTALCTAELDAILSACDASGVQFMDTTMWIHNPRTAKMREIVSDKDAFGDVRVINSMCSFRASEEFLKNDIRVKPDLDALGVLGDVGWYCILSILWAVDYELPETVIAHRHPVKNQAGVLLACGATLYWADGKTANFNCSFLANLAFDVTVYGTNGTLHVTDLVIPYEESSAEFSVASKSSFVKPTIGWDPLPEKHVVTTDLPQEALMIQEFTRLVQNVRAGGRPEGKWPAITRKTQVVLDAVKASIDKGSEPLEVAS

SEQ ID NO: 17258 - protein, 335 aa, Zea mays subsp. mays
  misc_feature (1)..(335): Ceres Seq. ID no. 12356829
MLPPGAATIAAVGSRSDDKARRFISEIGFPAARVHGSYESLLEDPDVEAVYLPLPTSLHVPWATAVAARGKHLLLEKPTALCTAELDAILSACDASGVQFMDTTMWIHNPRTAKMREIVSDKDAFGDVRVINSMCSFRASEEFLKNDIRVKPDLDALGVLGDVGWYCILSILWAVDYELPETVIAHRHPVKNQAGVLLACGATLYWADGKTANFNCSFLANLAFDVTVYGTNGTLHVTDLVIPYEESSAEFSVASKSSFVKPTIGWDPLPEKHVVTTDLPQEALMIQEFTRLVQNVRAGGRPEGKWPAITRKTQVVLDAVKASIDKGSEPLEVAS

SEQ ID NO: 17259 - DNA, 1828 bp, Zea mays subsp. mays
  misc_feature (1)..(1828): Ceres Seq. ID no. 12356837
atgcatagtaaagttagcaatgtcgatggattacttggctgctgctgtacccgtgaccttggctctgggagtgggatctatcttgttggtcttacgatggacgtactgccgccgccgaacaagcgccgaagaagtgagactgccgccggggtcaaggggcctcctgttcctgggggagacgctccactacctggcagcgtcctccaccccgggggtattgccaccattcttccagcgacggttggagaggtatggccccatcttccggacgaacctggtcggggaggacctcgtcgtgtcgctggacgcggagctgaacgcgcacgtgctgaagcaggaggagcgcggcttccagatctggtacccgccctccttcatgcgcgtcttcggcgccgacaacatcaccgccaagctcggcgtgctccaccactacatgaggaccctcgtgctccgcctcttcggccaccagaccgtccgctccgtgctgctgcacgacgtgcagcggagcgcgcgcgacgagctgcgctcatggctcggccgcccggacgtcgaggtcaggacggccacctccaggatgatatttggcgtcactgccaagaagctgatcagccatgacgacgcagcatctggagaaacgttgtggagatgcttccacgactggacttcggggctgctctcgtttccggtttccattcccggcacaaccttctacagatgcatgcagggacgtaagaaggttatgacgatgctgaaacagcagctcgtcgagcgtcgacggaacgcagcggagcgcgagacagaggattttcttcgatctcgtgatcgatgaactgaacaagccagaccctatgatggacgagagcaccgcgttggacttgctgttcaccatgttgtttgcgagccatgagacgacgtccatggtattaaccgtcatactcaagtatctgacggacaaccccaaagctttgcaagagctgacagaggagcacgaaagaatcctggaaagtagggccaatccaggctctgacctcacgtgggaggagtacaagtctatgaaattcacatctcatgttgtacatgagtcgctaaggctcgcaaacatcgcactggccatgttcaggaaagcaaatcaggatgtgcacataaatgggtacacaattccaaaaggatcaaagatcatgatgtgtccactagcatcgcacttgaatacggaggtctacgaggacccctcagtgttcaatccatggagatggaaggatattcctgaaccagtaggcacttctaaggacttcatggccttcgggggtggtttgcgcctatgtgctggtgccgacttttccaagatgcagatggctatgttcctccattacttggtcacaaattacaggtggaaacccgtcggcggtgggacaatgctattctatccaggactgcaatttccagaaggcttccacatccagcttcttccaaaaatcccaaacgtggttccataaaccctatgaagaaatatgaatacaaataatttaagcaaatattctaaatgtaccatggggaattgaagttcgataacgatatggtacgggctaatttggtgatccacttgttaccaaatcaaccctaatggtagcaggtcggattgtcagaacaaataatagtttcaccaaacagaaggggagtatgtatgtgtgtaacattttatagttataaataatagtagagtaaattctgctcgttgtgtaacaactatgcaggtgagtaaaaattggttcagcatattgtatacattatgcccagttcaatgaaaaaaaaactttgttgtttggtgcgt

SEQ ID NO: 17260 - protein, 275 aa, Zea mays subsp. mays
  misc_feature (1)..(275): Ceres Seq. ID no. 12356838
CIVKLAMSMDYLAAAVPVTLALGVGSILLVLRWTYCRRRTSAEEVRLPPGSRGLLFLGETLHYLAASSTPGVLPPFFQRRLERYGPIFRTNLVGEDLVVSLDAELNAHVLKQEERGFQIWYPPSFMRVFGADNITAKLGVLHHYMRTLVLRLFGHQTVRSVLLHDVQRSARDELRSWLGRPDVEVRTATSRMIFGVTAKKLISHDDAASGETLWRCFHDWTSGLLSFPVSIPGTTFYRCMQGRKKVMTMLKQQLVERRRNAAERETEDFLRSRDR

SEQ ID NO: 17261 - protein, 269 aa, Zea mays subsp. mays
  misc_feature (1)..(269): Ceres Seq. ID no. 12356839
MSMDYLAAAVPVTLALGVGSILLVLRWTYCRRRTSAEEVRLPPGSRGLLFLGETLHYLAASSTPGVLPPFFQRRLERYGPIFRTNLVGEDLVVSLDAELNAHVLKQEERGFQIWYPPSFMRVFGADNITAKLGVLHHYMRTLVLRLFGHQTVRSVLLHDVQRSARDELRSWLGRPDVEVRTATSRMIFGVTAKKLISHDDAASGETLWRCFHDWTSGLLSFPVSIPGTTFYRCMQGRKKVMTMLKQQLVERRRNAAERETEDFLRSRDR

SEQ ID NO: 17262 - protein, 267 aa, Zea mays subsp. mays
  misc_feature (1)..(267): Ceres Seq. ID no. 12356840
MDYLAAAVPVTLALGVGSILLVLRWTYCRRRTSAEEVRLPPGSRGLLFLGETLHYLAASSTPGVLPPFFQRRLERYGPIFRTNLVGEDLVVSLDAELNAHVLKQEERGFQIWYPPSFMRVFGADNITAKLGVLHHYMRTLVLRLFGHQTVRSVLLHDVQRSARDELRSWLGRPDVEVRTATSRMIFGVTAKKLISHDDAASGETLWRCFHDWTSGLLSFPVSIPGTTFYRCMQGRKKVMTMLKQQLVERRRNAAERETEDFLRSRDR

SEQ ID NO: 17263 - DNA, 1742 bp, Zea mays subsp. mays
  misc_feature (1)..(1742): Ceres Seq. ID no. 12356991
aagcgcccaaggcagcggagagagctagctccctcctcctcctcaggtagcgagcgagcgagcgagcgagctcctctgcccctctgcacacctggcctccccttctccgctgcaggaccgccgttgacgactgctccaccagtactgcgcgcgcccgcgctgcctacccttacctagccagagcgcggcgcgcgagagggagaacgaccaggaggggaggagatcgatcgatcgatcgatcgagatagatggctttcctcaacatggagcagcagacctgggccttcaccttcggtatcctaggtaacataatctcgctgatggtgttcctttcgccgctgccgacgttctaccgcgtgtaccgcaagaagtcgacggaggggttccagtcgaccccgtacgtggtgacgctgttcagctgcatgctgtggatcttctacgcgctgctcaagtccggcgccgagctgctggtgaccatcaacggcgtcgggtgcgtgatcgaggcggcgtacctggcgacgtacctggtgtacgcgcccaaggccgccagggcgctgacggccaagatgctgctgggctcaacgtcggcgtcttcggcctcgccgcgctcgccaccatggtggtctccagcgccggcctccgcgtgcgcgtgctcggatggatctgcgtcagcgtcgcgctcagcgtattcgccgcgccgctcagcatcatgcggcaggtggtccggaccaagagcgtggagttcatgcccttctcgctctccttcttcctggtgctgagcgccgtgatctggttcgcgtacggcgcgctgaagagggacgtgttcgtggcgttccccaacgtgctgggcttcgtcttcggcgtcgcgcagatggcgctgtacatggcgtacaggaacaaggagcccgcggcggcggcggcggcgatagcggtgacggtggatcaggaggcgaagctgccggagcacgccaaggaggtggtggtggccgaggccagggcgagctgcggtgccgaggtgcaccccatcgacatcgatatcgaagctacgccgacgccggtcgaggaggtgcacgagccgcaggtggtcgtggtcgtggtcgtcgacgtggagcctgtcacctgcgccggcgccgccgaggcagatgcgtccggcgttgccgacggcggcgtccctggacccatggcgccgccggagcagctggcgatcaagcccgacatggccatttccgtggaggcgtaggttggttaaagtgtgatagcagagtgagtcgatatcgatcagtagtaggtttgtcgagtcgcctgctgctgctgctacgcgacagcagcggccagatgtactgcctgcatgcatgcagtccctcccgttgactcgacccgtagagatgggatgggatggaagtagccgggcccttgggcgagtagcggcgccttgggttggcacccacgggccagccgtactggcctgtgtgatgaaccggcgagagaaagagatgagataatgtgcgagcgagagagaaggttgggttgtggtagactggtagttgaagaagacggctagctagctagatgctgctgggctctctatctgtctctagatctgtgtgtgtctgtgtaatcgaggattccctcaccttgcttgccgcctcccttttgtgtccttctagtctgatgattgttttcattccatccatgccggcgtcgcagtaataaaaaaaaaattggaatggacgggttcactg

SEQ ID NO: 17264 - protein, 237 aa, Zea mays subsp. mays
  misc_feature (1)..(237): Ceres Seq. ID no. 12356992
MDLRQRRAQRIRRAAQHHAAGGPDQERGVHALLALLLPGAERRDLVRVRRAEEGRVRGVPQRAGLRLRRRADGAVHGVQEQGARGGGGGDSGDGGSGGEAAGARQGGGGGRGQGELRCRGAPHRHRYRSYADAGRGGARAAGGRGRGRRRGACHLRRRRRGRCVRRCRRRRPWTHGAAGAAGDQARHGHFRGGVGWLKCDSRVSRYRSVVGLSSRLLLLLRDSSGQMYCLHACSPSR

SEQ ID NO: 17265 - protein, 207 aa, Zea mays subsp. mays
  misc_feature (1)..(207): Ceres Seq. ID no. 12356993
MVVSSAGLRVRVLGWICVSVALSVFAAPLSIMRQVVRTKSVEFMPFSLSFFLVLSAVIWFAYGALKRDVFVAFPNVLGFVFGVAQMALYMAYRNKEPAAAAAAIAVTVDQEAKLPEHAKEVVVAEARASCGAEVHPIDIDIEATPTPVEEVHEPQVVVVVVVDVEPVTCAGAAEADASGVADGGVPGPMAPPEQLAIKPDMAISVEA

SEQ ID NO: 17266 - protein, 176 aa, Zea mays subsp. mays
  misc_feature (1)..(176): Ceres Seq. ID no. 12356994
MAFLNMEQQTWAFTFGILGNIISLMVFLSPLPTFYRVYRKKSTEGFQSTPYVVTLFSCMLWIFYALLKSGAELLVTINGVGCVIEAAYLATYLVYAPKAARALTAKMLLGSTSASSASPRSPPWWSPAPASACACSDGSASASRSAYSPRRSASCGRWSGPRAWSSCPSRSPSSWC

SEQ ID NO: 17267 - DNA, 1658 bp, Zea mays subsp. mays
  misc_feature (1)..(1658): Ceres Seq. ID no. 12357029
aattttggcgtgctttacttccgcttccaatataccttttttctgcgacaaaaatcatttttgttaattgcgaaaaggaaagagcccgtgtgaacaggaggggtgaggagaagagggggaaaagagagagaaatcggagggcattagcaagaaaccatgagttctaggttcgcaatccctagtcgtcttgtcctgatcttacttgagtgctcgtgagctctttccagtggctaaagactgcagatttgagttctggcccaagaaccgcgtgctagcccgccatggaggtgaggtccgagcaagggctgatggcggggagggatctattcggcatgccgaagagcccgccggcgcccgcgcccgccgtcgtccgccgccatgcagagcgtgcgcatggcgtacaccgcggacggcaccgccgtgttcgctccggtgagctcttcgcctgcgacgccgtcttaccagccgcagggcgcagcccacggcgctagcatgtccgcggcgacggtcgttggaggcaatggcgctccagctgcgccgagcatgggtgagccgctggccaagaagaagcgcggacgaccaaggaagtacgggcccgacgggtccatggcgctggcaatggtgcctgcttcggcggcttcagggtcgccggcgacagggcagggtttttctgggccgttctcaccgcctgcgttaaatccggcgagctctctggtggtggcgtcgccagacggattcaagaagcggggccggcctaagggttctaccaacaggccacgcgtggacgctgctgggtcatcaggagctggatttacacctcatgttatcacagttcaagctggggaggacgtggcatcaaagattatgtcattttcccagcatggaacacacggagtttgtgttctttcaggcaaatggctccatatcaaatgtaacgcttcgtcagactgctacatcaggcagaactgtaacatacgagggtcaattcgagatactgtcgctgtcggggtcattcttcctggctgaggatggtgtccagcgcagccgaaacggaggcctcagcgtgtcgctggctggtcctgatggccgtctgttgggtggtggggtcgcaggacttctagtagcggcttcaccggttcagatagtactgggaagcttcaattctggaggcggaaaggagccacaaaagcaggctccttcagaacctacatcggctccaccgagggttgctccgacagctgggatgggaggacccagcagcccttcttcaagaggcacattgagcgagtcatccggtggcgctggaagcccaccgccactgcatcgagccatggctgctagtgctagcaatagtaaccagccaccgttcttgtccagcatgccttggagatgagtttgcagcttgcattctcttggccaattccaggcaggatgtagcaatctgcgctttcagtagcgcccgttgtgtgagtagctgtgtgcagtacaagccagaagcttgggtgggaatataattgcgtctggtaaatctgtagctctgttgtaggttccaccctgaattcctgtgctaggtgtgttgagctgtgtaagcaatgtaatcctttcagcgttatcaaatgctatttagttaaatgtttctaccaaggcatgtcgatttg

SEQ ID NO: 17268 - protein, 215 aa, Zea mays subsp. mays
  misc_feature (1)..(215): Ceres Seq. ID no. 12357030
MQSVRMAYTADGTAVFAPVSSSPATPSYQPQGAAHGASMSAATVVGGNGAPAAPSMGEPLAKKKRGRPRKYGPDGSMALAMVPASAASGSPATGQGFSGPFSPPALNPASSLVVASPDGFKKRGRPKGSTNRPRVDAAGSSGAGFTPHVITVQAGEDVASKIMSFSQHGTHGVCVLSGKWLHIKCNASSDCYIRQNCNIRGSIRDTVAVGVILPG

SEQ ID NO: 17269 - protein, 210 aa, Zea mays subsp. mays
  misc_feature (1)..(210): Ceres Seq. ID no. 12357031
MAYTADGTAVFAPVSSSPATPSYQPQGAAHGASMSAATVVGGNGAPAAPSMGEPLAKKKRGRPRKYGPDGSMALAMVPASAASGSPATGQGFSGPFSPPALNPASSLVVASPDGFKKRGRPKGSTNRPRVDAAGSSGAGFTPHVITVQAGEDVASKIMSFSQHGTHGVCVLSGKWLHIKCNASSDCYIRQNCNIRGSIRDTVAVGVILPG

SEQ ID NO: 17270 - protein, 190 aa, Zea mays subsp. mays
  misc_feature (1)..(190): Ceres Seq. ID no. 12357032
MLSQFKLGRTWHQRLCHFPSMEHTEFVFFQANGSISNVTLRQTATSGRTVTYEGQFEILSLSGSFFLAEDGVQRSRNGGLSVSLAGPDGRLLGGGVAGLLVAASPVQIVLGSFNSGGGKEPQKQAPSEPTSAPPRVAPTAGMGGPSSPSSRGTLSESSGGAGSPPPLHRAMAASASNSNQPPFLSSMPWR

SEQ ID NO: 17271 - DNA, 1200 bp, Zea mays subsp. mays
  misc_feature (1)..(1200): Ceres Seq. ID no. 12357037
acgacgaccacatctccccgctgggacctggtgctcggcggcgtgcgccccactacccaaccaactgaaccatgcacaagagcactgcacgacgcccgcacggcaccgaccccgcaccaagccaacggaaaccgagcacccgcacccgcccggggtggaattgggaactgaggaaaaaaaaaacacccacacccacacccgcgtccgcgtgctctctctgccccatccgcgcgcccctcctcctccaccgcccgtcccactcccgccgccgccgccgcccggccgtctgctggcgatggcgtaccgggcggacgacgactacgactacctcttcaaggtggtgctcatcggcgactccggcgtcggcaagtcgaacctgctctcgcgcttcacgcgcaacgagttcagcctcggagtccaagtccaccatcggcgtcgagttcgccacccgcagcatccacgtcgaggacaaggtcgtcaaggcccagatctgggacaccgccggccaggaaagataccgcgctatcacgagcgcgtactaccgcggagcggtaggggcgctggtcgtgtacgacgtcacgcggcacgtcaccttcgagaacgtggagcggtggatgagggagctgagggaccacacggacgccaacatcgtcatgatgctggtagggaacaaggcggacctgcgccacctcagggccgtcccgaccgaggacgccaaggccttcgccgagcgccagaacgccttcttcatggagacgtcggccctggaggcgatgaacgtggaggacgccttcaccgaggtgctcgcgcagatctaccgcgtcgtcagcaagaaggcgctcgacatcggcgacgaccccgccgcgcctcccaggggccataccatcaacgtcggcggcaaggacgacgtgtccgcggtcaagaagtctgcctgctgctcgtcttagcttgggaggacaggatagagcgtgtacttgggtttggttgttgatacttcagcactagagggcacatgacgttattgcagtcatggtcctcgatctgtattcattcgtttccaggtgtctcgttgattttgccatttgatacattgattcattcaggacttgggcctttctggtatagtgtagggacaccttgttccttttatttcttgtacctgcatactgtcgcttctcttatcaaactagctgcattact

SEQ ID NO: 17272 - protein, 329 aa, Zea mays subsp. mays
  misc_feature (1)..(329): Ceres Seq. ID no. 12357038
RRPHLPAGTWCSAACAPLPNQLNHAQEHCTTPARHRPRTKPTETEHPHPPGVELGTEEKKNTHTHTRVRVLSLPHPRAPPPPPPVPLPPPPPPGRLLAMAYRADDDYDYLFKVVLIGDSGVGKSNLLSRFTRNEFSLGVQVHHRRRVRHPQHPRRGQGRQGPDLGHRRPGKIPRYHERVLPRSGRGAGRVRRHAARHLRERGAVDEGAEGPHGRQHRHDAGREQGGPAPPQGRPDRGRQGLRRAPERLLHGDVGPGGDERGGRLHRGARADLPRRQQEGARHRRRPRRASQGPYHQRRRQGRRVRGQEVCLLLVLAWEDRIERVLGFGC

SEQ ID NO: 17273 - protein, 291 aa, Zea mays subsp. mays
  misc_feature (1)..(291): Ceres Seq. ID no. 12357039
MHKSTARRPHGTDPAPSQRKPSTRTRPGWNWELRKKKTPTPTPASACSLCPIRAPLLLHRPSHSRRRRRPAVCWRWRTGRTTTTTTSSRWCSSATPASASRTCSRASRATSSASESKSTIGVEFATRSIHVEDKVVKAQIWDTAGQERYRAITSAYYRGAVGALVVYDVTRHVTFENVERWMRELRDHTDANIVMMLVGNKADLRHLRAVPTEDAKAFAERQNAFFMETSALEAMNVEDAFTEVLAQIYRVVSKKALDIGDDPAAPPRGHTINVGGKDDVSAVKKSACCSS

SEQ ID NO: 17274 - protein, 231 aa, Zea mays subsp. mays
  misc_feature (1)..(231): Ceres Seq. ID no. 12357040
MAYRADDDYDYLFKVVLIGDSGVGKSNLLSRFTRNEFSLGVQVHHRRRVRHPQHPRRGQGRQGPDLGHRRPGKIPRYHERVLPRSGRGAGRVRRHAARHLRERGAVDEGAEGPHGRQHRHDAGREQGGPAPPQGRPDRGRQGLRRAPERLLHGDVGPGGDERGGRLHRGARADLPRRQQEGARHRRRPRRASQGPYHQRRRQGRRVRGQEVCLLLVLAWEDRIERVLGFGC

SEQ ID NO: 17275 - DNA, 1476 bp, Zea mays subsp. mays
  misc_feature (1)..(1476): Ceres Seq. ID no. 12357049
ctcccgcggccattgcaggtcttgcagcaacgtctctctcctctgggcggtgggcgctcgatgttcttggctccttcacttggacttcgccccgtcggcgtccactgatcaattgatcatctgcaggtagataagctaccagcatctattttgcgtatctgaactccaaaaaggagagctcgaaactacagcaatgggttgctaccctgtgttctgtaggaagaagaactccagaagccaggttgtgcagcttgaccaagacatcccaatcgcgggcaacgtgaaaatctactcgtccaaggagctgaggaaagccacgggaaatttctgcccgggaagcaagcttggacagggttctttcggccgtgtatacctgggaaaactgaacaatggcgagaaagttgccatcaaggtgctctcctcagagtccaggcaagggacaaaggagttcttgaatgaactgagtgtcatatccaacataactcaccacaaccttgtcaaactgcatggctgctgcatcgacggaggccagaagatgctggtctacaactacgtggagaacaacagccttgcacaaacccttttcggtaattcccgcagcggcatcagatttgactggagaacaagggtggagatctgcgttggcgttgccgatgggctcacgtacctccacgaagaagtccgtccaccgatcgtccaccgcgacatcaaagcgagcaacatccttctcgacagaaatctgagacccaagatagcagactttgggctggcgaagttcttccctggcaacatgacacacatcagcaccagagttgcagggacgctaggatatcttgcgccagagtacgccatccgagggcagctgaccaagaaggccgacgtctacagctttggtgtactgctgctggagatcgtcagtggcagatgccacactgatcccacattacctcttgacgagcagttcctcctagaaaaggtctggacactctcggagtccgatgatcttgagagcatcatcgacggtaccatggagcgcgatttcgacaccgaggaagcacgtcggttgctgaaaataggtcttctgtgcacccaggatagccccaagatcaggccctccatgtcaatggttgccaagatgctgaagggtgagtgtgatgtgagtgaaaagatcatgcggcccagcctgatcacagacgtcatggacctgaaagtcaggacagtagagccgatccagttcagtttatccccatcgatgtcacctgcgctgagcagctcactggtgtccacacttgcattagctggtagcacagttgtagagagccgctgaaggaactagttaaaggaccaggttcctacaaaaaatggtttgttagaagcagcatgaattgtttttttgtttgtgttttagtacattgtaaggttgtcagtttgtatatataacatcctagtttgattatcgagattagagattttggc

SEQ ID NO: 17276 - protein, 377 aa, Zea mays subsp. mays
  misc_feature (1)..(377): Ceres Seq. ID no. 12357050
MGCYPVFCRKKNSRSQVVQLDQDIPIAGNVKIYSSKELRKATGNFCPGSKLGQGSFGRVYLGKLNNGEKVAIKVLSSESRQGTKEFLNELSVISNITHHNLVKLHGCCIDGGQKMLVYNYVENNSLAQTLFGNSRSGIRFDWRTRVEICVGVADGLTYLHEEVRPPIVHRDIKASNILLDRNLRPKIADFGLAKFFPGNMTHISTRVAGTLGYLAPEYAIRGQLTKKADVYSFGVLLLEIVSGRCHTDPTLPLDEQFLLEKVWTLSESDDLESIIDGTMERDFDTEEARRLLKIGLLCTQDSPKIRPSMSMVAKMLKGECDVSEKIMRPSLITDVMDLKVRTVEPIQFSLSPSMSPALSSSLVSTLALAGSTVVESR

SEQ ID NO: 17277 - protein, 263 aa, Zea mays subsp. mays
  misc_feature (1)..(263): Ceres Seq. ID no. 12357051
MLVYNYVENNSLAQTLFGNSRSGIRFDWRTRVEICVGVADGLTYLHEEVRPPIVHRDIKASNILLDRNLRPKIADFGLAKFFPGNMTHISTRVAGTLGYLAPEYAIRGQLTKKADVYSFGVLLLEIVSGRCHTDPTLPLDEQFLLEKVWTLSESDDLESIIDGTMERDFDTEEARRLLKIGLLCTQDSPKIRPSMSMVAKMLKGECDVSEKIMRPSLITDVMDLKVRTVEPIQFSLSPSMSPALSSSLVSTLALAGSTVVESR

SEQ ID NO: 17278 - DNA, 1368 bp, Zea mays subsp. mays
  misc_feature (1)..(1368): Ceres Seq. ID no. 12357062
aaaaaagaaaaaaaccacaaagagattcctctcaccaccaccaaccctagacgatcctcctccgccatgatgcgggacggcgtgcctccgtcggtggccggctccggcggcgcggcgggcggcgacgggcccaggcgatgctcgcagtgcgggcaccacgggcacaacgcgcgaacctgcacggcgcggcccgtcaagctcttcggcgtgcgcatcggggacaagcccatccggaagagcgccagcatggggaacatcgcgcacctcgccgcggagggcagcggcggcagggaggaagggtacggctccgacggggagcgcccgcacaagaagcgaggtgaggcatggactgaagaggagcacaagaagtttctgcttgggttgaataagctagggaaaggcgattggcgtggtatatcccgtaaatatgttgtttcaaggacacctactcaagtggctagccatgcgcaaaagtatttcaatcgccaaacaaatgtgcatagaagaaagagaagatcaagcctattcgatatggtgattgatgacccgtctgatcaacttccgctctcgcgttcatcttcacaagaaatggagcagcaacatttagatgatccacagcctgttgcagccctgcctgcacctgtggtctctccagctactgtggtacctcctgtgcctgtggaagtgtctgcttcagttccatcgccagttcaggtcccagttccagtttcagccccagtgatgacatctcagcctatggaacaggactcagataccacaagttcaattgctggagaggcaggaacggtgatgccaggagccatgcccccctatctttatccaatgatgattcctcctccatactaccatactgcttttgtaccaatgccctgctacggttatgttcctttttactgtgagccacaaggtgctgcacaggctccgcatgaggttgtcaagccagtggctgttcattcaacgcctccactgaatgccaaagacctttacaacatgtctgaattgagcctgaagggcgactcgaatgcaaacggtggtgtgcctgcttcccccttgcctccgaagccgatcggtagaccagagaggcaatctgctttccatggcaaaggacctacacctaccggtggctcgtcaggtggactgattcctgcagtcaagtgaattcgattatgctcctaaacatgccttcatgtgtatgtaatactagaaatagccaaatcgtaatagccgcctgtgctgctaaaatggtggtgtgttttctagcaaaatatctatactgctcattttagccttcaccagtttggaagtcatgatccgagggtaaatatattgttagcttgttgtttttgt

SEQ ID NO: 17279 - protein, 392 aa, Zea mays subsp. mays
  misc_feature (1)..(392): Ceres Seq. ID no. 12357063
KKEKNHKEIPLTTTNPRRSSSAMMRDGVPPSVAGSGGAAGGDGPRRCSQCGHHGHNARTCTARPVKLFGVRIGDKPIRKSASMGNIAHLAAEGSGGREEGYGSDGERPHKKRGEAWTEEEHKKFLLGLNKLGKGDWRGISRKYVVSRTPTQVASHAQKYFNRQTNVHRRKRRSSLFDMVIDDPSDQLPLSRSSSQEMEQQHLDDPQPVAALPAPVVSPATVVPPVPVEVSASVPSPVQVPVPVSAPVMTSQPMEQDSDTTSSIAGEAGTVMPGAMPPYLYPMMIPPPYYHTAFVPMPCYGYVPFYCEPQGAAQAPHEVVKPVAVHSTPPLNAKDLYNMSELSLKGDSNANGGVPASPLPPKPIGRPERQSAFHGKGPTPTGGSSGGLIPAVK

SEQ ID NO: 17280 - protein, 370 aa, Zea mays subsp. mays
  misc_feature (1)..(370): Ceres Seq. ID no. 12357064
MMRDGVPPSVAGSGGAAGGDGPRRCSQCGHHGHNARTCTARPVKLFGVRIGDKPIRKSASMGNIAHLAAEGSGGREEGYGSDGERPHKKRGEAWTEEEHKKFLLGLNKLGKGDWRGISRKYVVSRTPTQVASHAQKYFNRQTNVHRRKRRSSLFDMVIDDPSDQLPLSRSSSQEMEQQHLDDPQPVAALPAPVVSPATVVPPVPVEVSASVPSPVQVPVPVSAPVMTSQPMEQDSDTTSSIAGEAGTVMPGAMPPYLYPMMIPPPYYHTAFVPMPCYGYVPFYCEPQGAAQAPHEVVKPVAVHSTPPLNAKDLYNMSELSLKGDSNANGGVPASPLPPKPIGRPERQSAFHGKGPTPTGGSSGGLIPAVK

SEQ ID NO: 17281 - protein, 369 aa, Zea mays subsp. mays
  misc_feature (1)..(369): Ceres Seq. ID no. 12357065
MRDGVPPSVAGSGGAAGGDGPRRCSQCGHHGHNARTCTARPVKLFGVRIGDKPIRKSASMGNIAHLAAEGSGGREEGYGSDGERPHKKRGEAWTEEEHKKFLLGLNKLGKGDWRGISRKYVVSRTPTQVASHAQKYFNRQTNVHRRKRRSSLFDMVIDDPSDQLPLSRSSSQEMEQQHLDDPQPVAALPAPVVSPATVVPPVPVEVSASVPSPVQVPVPVSAPVMTSQPMEQDSDTTSSIAGEAGTVMPGAMPPYLYPMMIPPPYYHTAFVPMPCYGYVPFYCEPQGAAQAPHEVVKPVAVHSTPPLNAKDLYNMSELSLKGDSNANGGVPASPLPPKPIGRPERQSAFHGKGPTPTGGSSGGLIPAVK

SEQ ID NO: 17282 - DNA, 1562 bp, Zea mays subsp. mays
  misc_feature (1)..(1562): Ceres Seq. ID no. 12357066
acggcccaaccccatccactcctttcctcccacccgccagccgtcacccgcgcgtgcagccagcttccctgctacccccgcgcgccgccagccgagcggacgccggccctgccccgcacgccggcacgcggcacgcgcagccagctgccccacacgacgccggccgccctcgcactccccaccgcgctacccggcagccccgcgctacccggtcctcgctcggcgtccttgattcccaccgcacggcggcccttcttctgccaccgcacaccgcgcaggagcactgcccttcgccccttgtttagctgcagcaggagcgccgcccagccggccaccaccaccgcagcttgagagttgagacctgcagttgacgaccagaggccagagggcgttgctgcgctgcttcctcccctttttctgctgcgacgacggctggtcgagcgccgccacacttcgcagcttcgctggctcttcgcaggtgacgagcacccaccagacatggggcaaggtggacaagagaagtcgttcaatttccttcaagttttgctcgagggcagcatagctggaggaactgctggtgttgtggtggaaacagcactttacccgattgatactataaaaaccaggcttcaggctgctcgaggtggaagccggattgaatggaaaggcttgtattctggattagctggaaatctcactggcgtccttccggcctctgcgatatttgtcggggtgtatgagccaactaaaagaaaattactggaaacacttcctgaaaatctgagtgcagttgcccattttactgcaggggccattggaggtattgctgcttccctcgtccgtgtccctacagaggtggtcaaacaaaggatgcaaactggtcagttcaagtctgcacctgatgctgttcgtctcattgttgctaaagaaggatttaaaggactgtacgctggttatggttcctttctacttcgagatctaccatttgatgccatccagttctgcatttatgagcaacttcgaattggctacaaacttgtggcgaaaagggagttgaatgatccagagaatgcacttatcggtgcttttgctggcgccatcactggagctataacaaccccccttgatgtcatgaagacaagattgatggttcagggacaagggaaccaatacactggaattgtaagctgtgctcagacaatcctcagagaggaaggccctaaggcattcttgaagggcattgagccgcgagtgctgtggatcggcatcggtgggtccatcttctttggcgtgctggagaaaaccaagtcgatgctagccgagaggaggaaccgcgagcttcgggccgtcaaggacgaatgagtggagatcagctcttttttggcgttgagtccttaccctgaaacaaaatacacaattttacttgccgggggaggcagggggacaacctcgccggcccgtacctgtactccacggcgttcacgttatcacgtacgtagaaatcatgagcatgactgacggtttctacagattgaaaaccaaaacgtcttacatgcgctggc

SEQ ID NO: 17283 - protein, 287 aa, Zea mays subsp. mays
  misc_feature (1)..(287): Ceres Seq. ID no. 12357067
MGQGGQEKSFNFLQVLLEGSIAGGTAGVVVETALYPIDTIKTRLQAARGGSRIEWKGLYSGLAGNLTGVLPASAIFVGVYEPTKRKLLETLPENLSAVAHFTAGAIGGIAASLVRVPTEVVKQRMQTGQFKSAPDAVRLIVAKEGFKGLYAGYGSFLLRDLPFDAIQFCIYEQLRIGYKLVAKRELNDPENALIGAFAGAITGAITTPLDVMKTRLMVQGQGNQYTGIVSCAQTILREEGPKAFLKGIEPRVLWIGIGGSIFFGVLEKTKSMLAERRNRELRAVKDE

SEQ ID NO: 17284 - protein, 163 aa, Zea mays subsp. mays
  misc_feature (1)..(163): Ceres Seq. ID no. 12357068
MQTGQFKSAPDAVRLIVAKEGFKGLYAGYGSFLLRDLPFDAIQFCIYEQLRIGYKLVAKRELNDPENALIGAFAGAITGAITTPLDVMKTRLMVQGQGNQYTGIVSCAQTILREEGPKAFLKGIEPRVLWIGIGGSIFFGVLEKTKSMLAERRNRELRAVKDE

SEQ ID NO: 17285 - DNA, 820 bp, Zea mays subsp. mays
  misc_feature (1)..(820): Ceres Seq. ID no. 12357112
ctcggtctctctggagtctggactcgcctccacggctccaccatgtatcccaaggcggcagacgaaggtgcgcagccgctggccacgggcatccccttcagcggcggcggcggctactaccaggcgggcggcgcgatggcggcggcgttcgcggtgcaggcgcaggcgcccgtcgccgcctggtccaccgggctctgcaactgcttcgacgactgccacaactgctgcgtgacgtgcgtgtgcccgtgcatcacgttcgggcagaccgcggagatcatcgaccggggctccacgtcctgcggcaccagcgggggcgctgtacgcgctcgtcatgctgctcaccggctgtcagtgcgtctactcctgcttctaccgcgccaagatgcgcgcgcagtacggcctccaggtgagcccctgctccgactgctgcgtgcactgctgctgccagtggctgcgcgctctgccaggagtaccgcgagctcaagaagcgaggcttcgacatgagcataggatggcatgcgaacatggagaggcaggggcgcgccgccgccgccgtgccgccgcacatgcatcctgggatgacccgctgacgctctgccgctcgcctcacttctgctgaggaaatcaagtgatttggtattggtccgctcccagcaggcagtatcaactactgtaaccaatccatgatctgtatgcggtatcgggctgaactgatactttatggacttgttgcttcaacttagtccgtaaaacgctcaagaccacatgaaaatatggtccataaaacttgttcaaaaatagacattttgcactatatttt

SEQ ID NO: 17286 - protein, 167 aa, Zea mays subsp. mays
  misc_feature (1)..(167): Ceres Seq. ID no. 12357113
LGLSGVWTRLHGSTMYPKAADEGAQPLATGIPFSGGGGYYQAGGAMAAAFAVQAQAPVAAWSTGLCNCFDDCHNCCVTCVCPCITFGQTAEIIDRGSTSCGTSGGAVRARHAAHRLSVRLLLLLPRQDARAVRPPGEPLLRLLRALLLPVAARSARSTASSRSEAST

SEQ ID NO: 17287 - protein, 153 aa, Zea mays subsp. mays
  misc_feature (1)..(153): Ceres Seq. ID no. 12357114
MYPKAADEGAQPLATGIPFSGGGGYYQAGGAMAAAFAVQAQAPVAAWSTGLCNCFDDCHNCCVTCVCPCITFGQTAEIIDRGSTSCGTSGGAVRARHAAHRLSVRLLLLLPRQDARAVRPPGEPLLRLLRALLLPVAARSARSTASSRSEAST

SEQ ID NO: 17288 - protein, 135 aa, Zea mays subsp. mays
  misc_feature (1)..(135): Ceres Seq. ID no. 12357115
RSLWSLDSPPRLHHVSQGGRRRCAAAGHGHPLQRRRRLLPGGRRDGGGVRGAGAGARRRLVHRALQLLRRLPQLLRDVRVPVHHVRADRGDHRPGLHVLRHQRGRCTRSSCCSPAVSASTPASTAPRCARSTASR

SEQ ID NO: 17289 - DNA, 1005 bp, Zea mays subsp. mays
  misc_feature (1)..(1005): Ceres Seq. ID no. 12357150
agcatccatcaactgctaccgagttaagtatattctgagctcgtctgcagccaaaagcttccatttgcattgcgatgggggctctgcctcgtggcctgctagctggcatctgcgccgtcttgttagcagcagtggttgcccttgcccatggtgcggaacaggaaacagcgtcaatggtggtcggcttggccaagtgcgccgactgcaccaggaagaacatgaaagctgatgcggcattcaacggccttcaagtggctgtcaagtgcaagaacgccaacggcgtcttcgagaccaaggccctcggtgaggttgacaagtccggcagcttcagcgttcccctcccggctgacctcctccgcgaggatggcgagctgaagcaagactgcttctcgcagctccacagcgcggccaacaagccatgccccggacaggagccgtcttggatcgtccggccaaccaccgacaacgacgacgacgacaagatgaagaataccttcgtcgcagtcgccggcaaggtgcactacccatcaaaggagtgcgcctctgctttcctcttctaccatttgttcaagaagcacctgttgcacaagaagcccatggtgatcatccctcacatccacaagaagcccatggtgccgatgtaccgccactcgcccgtgccggagtacaagccacctcacccgacgcccaccccgatctaccatgctgcagctgagcacaagacacagaaccccgagacggaccctgaaaagttcaagaagctgctccccttcataaaaaagaaccccttctttcccaagttccccaagtttcctcccgtcaaggaggagaacaaggcgtaaaaatatgagggcgagataccaagtgtacccctttcctctgcatccactcttacgtagtgtctgttgcatcttgcatggaccgtcattacctcctgtttcttgacagtgtttgtaacctctcaccggccagggctcccactaatagaaataaaacttttgttct

SEQ ID NO: 17290 - protein, 255 aa, Zea mays subsp. mays
  misc_feature (1)..(255): Ceres Seq. ID no. 12357151
MGALPRGLLAGICAVLLAAVVALAHGAEQETASMVVGLAKCADCTRKNMKADAAFNGLQVAVKCKNANGVFETKALGEVDKSGSFSVPLPADLLREDGELKQDCFSQLHSAANKPCPGQEPSWIVRPTTDNDDDDKMKNTFVAVAGKVHYPSKECASAFLFYHLFKKHLLHKKPMVIIPHIHKKPMVPMYRHSPVPEYKPPHPTPTPIYHAAAEHKTQNPETDPEKFKKLLPFIKKNPFFPKFPKFPPVKEENKA

SEQ ID NO: 17291 - protein, 222 aa, Zea mays subsp. mays
  misc_feature (1)..(222): Ceres Seq. ID no. 12357152
MVVGLAKCADCTRKNMKADAAFNGLQVAVKCKNANGVFETKALGEVDKSGSFSVPLPADLLREDGELKQDCFSQLHSAANKPCPGQEPSWIVRPTTDNDDDDKMKNTFVAVAGKVHYPSKECASAFLFYHLFKKHLLHKKPMVIIPHIHKKPMVPMYRHSPVPEYKPPHPTPTPIYHAAAEHKTQNPETDPEKFKKLLPFIKKNPFFPKFPKFPPVKEENKA

SEQ ID NO: 17292 - protein, 207 aa, Zea mays subsp. mays
  misc_feature (1)..(207): Ceres Seq. ID no. 12357153
MKADAAFNGLQVAVKCKNANGVFETKALGEVDKSGSFSVPLPADLLREDGELKQDCFSQLHSAANKPCPGQEPSWIVRPTTDNDDDDKMKNTFVAVAGKVHYPSKECASAFLFYHLFKKHLLHKKPMVIIPHIHKKPMVPMYRHSPVPEYKPPHPTPTPIYHAAAEHKTQNPETDPEKFKKLLPFIKKNPFFPKFPKFPPVKEENKA

SEQ ID NO: 17293 - DNA, 1017 bp, Zea mays subsp. mays
  misc_feature (1)..(1017): Ceres Seq. ID no. 12357240
actctcgctgtttcctgcgtgatctgcttgtgtagctactagctagctagcggagcggaacccatgggctgcgaggaggaagagaggctgctgttcccgtccttcgtctttcccgagagcttcgcggaggccgccacccccggctccggtggtgagcagaagaaggctcggcagcgtcggaggcgcaagccgcggccggcggagggcggcgagggcgcggacgagcaggccaggaagcggcggctgagcgacgaccaggcgcggttcctggagctcagcttcaggaaggagcgcaagctggagacgccccgcaaggtgcagctggccgccgatctgggcctcgacgccaagcaggtggccgtctggttccagaaccgccgcgcccgccacaagagcaagctcatggaggaggagttctccaagctccgcgccgcgcacgacgccgtcgtcctccacaactgccacctcgagaccgagctgctgaagatgaaggacaggctggcggaggtggaggaggagaagacgaagctcgtcgcggcggcggcggcggcggccggcggcgcagcgggcgcagggagcagcagcccgagctcgtcgtcgttctcgacggtgacgcaccacccggccgcggcgctgcaggtggggcagttcggggtggagccggaggaggccgccgacctcgcctacatgaccgagtacgcctacaacagctacatgaacatgatggacctcgcgcccggctacttcggcggagtcgtctacgactacgaccacttcaactgatccacgagcatgcaggaggaggaggagggaagctacaagacgaaggaaggattgactggcctatcagctaggtactattttcgtgttaatggatggatggaccgatttgcagggcgcgcgtagcagtagtagcaatcaaggtcactagtatagtctgtcagtacgacgacgtcgatcagtcaatgtctcccctgacgataattattaagtcgatctattcagtagtaacttgtt

SEQ ID NO: 17294 - protein, 239 aa, Zea mays subsp. mays
  misc_feature (1)..(239): Ceres Seq. ID no. 12357241
MGCEEEERLLFPSFVFPESFAEAATPGSGGEQKKARQRRRRKPRPAEGGEGADEQARKRRLSDDQARFLELSFRKERKLETPRKVQLAADLGLDAKQVAVWFQNRRARHKSKLMEEEFSKLRAAHDAVVLHNCHLETELLKMKDRLAEVEEEKTKLVAAAAAAAGGAAGAGSSSPSSSSFSTVTHHPAAALQVGQFGVEPEEAADLAYMTEYAYNSYMNMMDLAPGYFGGVVYDYDHFN

SEQ ID NO: 17295 - protein, 126 aa, Zea mays subsp. mays
  misc_feature (1)..(126): Ceres Seq. ID no. 12357242
MEEEFSKLRAAHDAVVLHNCHLETELLKMKDRLAEVEEEKTKLVAAAAAAAGGAAGAGSSSPSSSSFSTVTHHPAAALQVGQFGVEPEEAADLAYMTEYAYNSYMNMMDLAPGYFGGVVYDYDHFN

SEQ ID NO: 17296 - DNA, 1180 bp, Zea mays subsp. mays
  misc_feature (1)..(1180): Ceres Seq. ID no. 12357243
attcctctccgccccctcccaccccacccgcttctaggacgcagcagcgcacccccgatcctcgcctgtcgcctccatctccattcgcaggcctgagaccctcgcctgcaccgcgctgccgccagccatgggaatggggcctctgcgagaacgccgcgtcggccgccgctgagtccgcggccttgccggaggccggcgccgcctcggcagcgggctcgtacgcggtgctgcagtgcggcgaggactcggagtacgtgcggcagaagtacggcggctacttcgccgtcttccgcgcgctgctggaggaggacggcgagagctggcgcgtgtaccgcgccgtcggcggggagctccccaccgacgccgaggccggccggcttcgacgggttcgtcatctccgggagctgctccgacgcgcacggcgacgagccctggatcctggacctcgtcggcctcatccgccgcctccacgccgccggcaagcgcatcctcggcgtctgcttcggccaccagatcctgtgccgggcgctgggcgggcgcaccgggcggtcgaccaagggctgggacatcggggtgagctgcatccacccgacggcggcggcggcgcggctgttcgcgccgctgaagctgccggtgcacatgccggtgatcgagttccaccacgacgaggtgtgggagctgcccgccggcgccgaggtgctggcgcggtcggaccagacccgcgtggagatgttccgcctgggggaccgcgccatgggcgtccagggccacccggagtacagcaaggacatcctcatgagcatcgccgaccgcctcctccggcataaccacatcctggactgccaggtggacgtggccaaggcgagcttcgacgtgcggcagccggacaaggagctgtggaagaaggtgtgcaggggcttcctcaaggggaggctgcaggcgctatagcaattccactaaccgctgcagaggaggaaattgggatgtcttaggttaatttttaattcacccttgttttgtgcttcagagctcaagagttgtacataaactactattgtccgaagcattaataaactcaacaacatcgttctcgtactgcctgctgtttctgtgcctcgtcgacagtctcagcatctgtcattggcgtatctggtgaacgatgtcgttggaactgattttc

SEQ ID NO: 17297 - protein, 274 aa, Zea mays subsp. mays
  misc_feature (1)..(274): Ceres Seq. ID no. 12357244
SSPPPPTPPASRTQQRTPDPRLSPPSPFAGLRPSPAPRCRQPWEWGLCENAASAAAESAALPEAGAASAAGSYAVLQCGEDSEYVRQKYGGYFAVFRALLEEDGESWRVYRAVGGELPTDAEAGRLRRVRHLRELLRRARRRALDPGPRRPHPPPPRRRQAHPRRLLRPPDPVPGAGRAHRAVDQGLGHRGELHPPDGGGGAAVRAAEAAGAHAGDRVPPRRGVGAARRRRGAGAVGPDPRGDVPPGGPRHGRPGPPGVQQGHPHEHRRPPPPA

SEQ ID NO: 17298 - DNA, 1496 bp, Zea mays subsp. mays
  misc_feature (1)..(1496): Ceres Seq. ID no. 12357245
caaagatcttatgatgccctgggagactttgttttgtggtgtatagatagcatcatgtctgaattgtcaggctcatcagctggatctaagggttcaaagaaggttgcccaacagtctccaagggcccaggttgcaatctttgttgttcttgccatgactttaagaagaaagcctgatgtacttgtaaatgttatgccaaagataatgggaaacaataaatatcttggacaggaaaagcttcccatcattgtctggtttattgctcaggcatctcaaggtgacctagtgactggcatgttttgctgggctcattttctatttcccacgttatgtgcgaagccaagtgggaatccccttgcaagagatttggttttgcagttgcttgaaagaattttatctgtcaccaaagctcgttctatcttattgaatggtgctgttagaaagggggaacgcctagttccccctgtttcatttgacttgttcatgagagccacatttccggtttctggtgctcgggtgaaggctacagaaaggtttgaagtagcttatcgaacaatcaaggagttggctcttgccggttctcctggctctaaaactgtgaaacaagcatcacagcaacttttacctttgtgtgcaaaagcaatgcaagaaaacaacacagagctcaccagggaggctgttgatgtgttcatttggtgcttgacacaaaatgcagagtccaacaagcagtgggaaagaatttatcctgaaaatactgaagccagtgttgctgtcctgagcaaaattgtgattgattggaaggacgtgtctcctaagctcaattctgaagctctcaaggcaacagtgaagaacttgaaggctaagaatgaggcagcgctggagtcagcaacagatgctggaaagcaggcatctatcaaagaagcagacaagcactgtaaggtgatccttggaaagctgacgcgcggttccacctgcctgaagagcacccttgtgggcatcgccctcgcagttgcagctagtctcgtgctatcatctcctgacatggaccttgcgctcgagtgggagaagatccaggcgatggtctcatcgcacctgtcgttctgaagatacctgtccggaatctccagacgtgggtggatctaagtcatacaagccatccaaaggggatggctgactcagcagtgaagagagctcaaggggtggtgagaataagagggaggggggggggataggtgctagaaccgaaaggttatagttttcatgagtcgccatttttttcccgcgcttcctccagcagcagcggtgccctgataggagggagatgcagtagtcgactttgcagagagttggtttaatcggggtgggtgcgaactgcgaagaaggtttgagtcaaatggctcgaccagaggattaacaccttttgcttttctctttgtgcatctgagatgatgttggcaaacagttttggttatctagaatcttgaatcgtattccgc

SEQ ID NO: 17299 - protein, 367 aa, Zea mays subsp. mays
  misc_feature (1)..(367): Ceres Seq. ID no. 12357246
QRSYDALGDFVLWCIDSIMSELSGSSAGSKGSKKVAQQSPRAQVAIFVVLAMTLRRKPDVLVNVMPKIMGNNKYLGQEKLPIIVWFIAQASQGDLVTGMFCWAHFLFPTLCAKPSGNPLARDLVLQLLERILSVTKARSILLNGAVRKGERLVPPVSFDLFMRATFPVSGARVKATERFEVAYRTIKELALAGSPGSKTVKQASQQLLPLCAKAMQENNTELTREAVDVFIWCLTQNAESNKQWERIYPENTEASVAVLSKIVIDWKDVSPKLNSEALKATVKNLKAKNEAALESATDAGKQASIKEADKHCKVILGKLTRGSTCLKSTLVGIALAVAASLVLSSPDMDLALEWEKIQAMVSSHLSF

SEQ ID NO: 17300 - protein, 349 aa, Zea mays subsp. mays
  misc_feature (1)..(349): Ceres Seq. ID no. 12357247
MSELSGSSAGSKGSKKVAQQSPRAQVAIFVVLAMTLRRKPDVLVNVMPKIMGNNKYLGQEKLPIIVWFIAQASQGDLVTGMFCWAHFLFPTLCAKPSGNPLARDLVLQLLERILSVTKARSILLNGAVRKGERLVPPVSFDLFMRATFPVSGARVKATERFEVAYRTIKELALAGSPGSKTVKQASQQLLPLCAKAMQENNTELTREAVDVFIWCLTQNAESNKQWERIYPENTEASVAVLSKIVIDWKDVSPKLNSEALKATVKNLKAKNEAALESATDAGKQASIKEADKHCKVILGKLTRGSTCLKSTLVGIALAVAASLVLSSPDMDLALEWEKIQAMVSSHLSF

SEQ ID NO: 17301 - protein, 316 aa, Zea mays subsp. mays
  misc_feature (1)..(316): Ceres Seq. ID no. 12357248
MTLRRKPDVLVNVMPKIMGNNKYLGQEKLPIIVWFIAQASQGDLVTGMFCWAHFLFPTLCAKPSGNPLARDLVLQLLERILSVTKARSILLNGAVRKGERLVPPVSFDLFMRATFPVSGARVKATERFEVAYRTIKELALAGSPGSKTVKQASQQLLPLCAKAMQENNTELTREAVDVFIWCLTQNAESNKQWERIYPENTEASVAVLSKIVIDWKDVSPKLNSEALKATVKNLKAKNEAALESATDAGKQASIKEADKHCKVILGKLTRGSTCLKSTLVGIALAVAASLVLSSPDMDLALEWEKIQAMVSSHLSF

SEQ ID NO: 17302 - DNA, 1517 bp, Zea mays subsp. mays
  misc_feature (1)..(1517): Ceres Seq. ID no. 12357252
aaactctgtgcgccttggtgtgaccggtggtctctgtgctcccaagctgagcagcagcaatcgccgttccggaggccggagcacagagacgagacccgccgagcagtttgggtttttttttttttttgatgatttggtgcacctacctaaagaagcctttggcatcgagtacgcctagtaccaccaccaccaccaaagaagccttgagcatgcagggttgctgccagtaaaacgaagatctacatggtgcttgagtttgtcaacggcggcgagctcttcgacaagatcgctatcaaggggaaactgtccgaacacgagggcaggaggctcttccagcagctaatcgacggcgtcagctattgccatgacagaggtgtctaccaccgagacctcaagccagagaatgtccttgttgatcggaagggcaccatcaagatctctgacttcggcctcagcgctctacctcaacatctcgggagtgacggacttctgcacacaacatgtggcagccccaactacatagctcctgaggttctgcaaaacagaggctatgacggctccttgtcagatctctggtcgtgtggggtgatcctctacgtgatgcttgttggctgccttcccttcgacgacaggaacctcgtcgttctttatcagaagattttcaagggagactgtcagatccccaagtggctttcgcctgccgcgcaggaccttctcaagaggatcctccaaccgaatccgatgaagaggatcaacgtcgcggggatcagggagcacgagtggttcaagaaggactacgtgcctgctgttccgcacgatgatgacgaagacgtccttcctagtccagctccctcgataaagccaatcgatgagccgggcgcaagagaagtgttctcctatcaacgcttttcagttgatcgggatggcctcttcccttgacctttctggtttcttcgaggaagaggatgcagcgcaaagaaagattcggttcacttcgacgcacccacccaaggatctatttgacaagatcgagagcgttgtcatggagatgggattcaaagtccataggggggcaggcaagctcaaggtcttgaagaatagcaagtgttccaggaacccgtcatcattgttggtgtgcaccgaggtgtttgagctcggtccatcattatatgtcgtagagcttaggaaatcccacggagactctacgttgtatagacagctgtgcgaaaggctctccgatgagctaggtgcctgcaagacagaccagatcgcgaggactgaatcatcgagtgacgacctctcgagcgtcgatggcgaagcgttccctctatctgggttctgatcatattgctttccctgtgttgttttgggaacaggggatgaggaacatgctcgttcctgatgcaattctagattaggatcatgaatatagtgtacaaagccagcggcggcggcggtgcaaattagccaccgggttgaatataaataatatatatatatgatatgttgcatcttcg

SEQ ID NO: 17303 - protein, 231 aa, Zea mays subsp. mays
  misc_feature (1)..(231): Ceres Seq. ID no. 12357253
MVLEFVNGGELFDKIAIKGKLSEHEGRRLFQQLIDGVSYCHDRGVYHRDLKPENVLVDRKGTIKISDFGLSALPQHLGSDGLLHTTCGSPNYIAPEVLQNRGYDGSLSDLWSCGVILYVMLVGCLPFDDRNLVVLYQKIFKGDCQIPKWLSPAAQDLLKRILQPNPMKRINVAGIREHEWFKKDYVPAVPHDDDEDVLPSPAPSIKPIDEPGAREVFSYQRFSVDRDGLFP

SEQ ID NO: 17304 - protein, 157 aa, Zea mays subsp. mays
  misc_feature (1)..(157): Ceres Seq. ID no. 12357254
MSRAQEKCSPINAFQLIGMASSLDLSGFFEEEDAAQRKIRFTSTHPPKDLFDKIESVVMEMGFKVHRGAGKLKVLKNSKCSRNPSSLLVCTEVFELGPSLYVVELRKSHGDSTLYRQLCERLSDELGACKTDQIARTESSSDDLSSVDGEAFPLSGF

SEQ ID NO: 17305 - protein, 139 aa, Zea mays subsp. mays
  misc_feature (1)..(139): Ceres Seq. ID no. 12357255
MASSLDLSGFFEEEDAAQRKIRFTSTHPPKDLFDKIESVVMEMGFKVHRGAGKLKVLKNSKCSRNPSSLLVCTEVFELGPSLYVVELRKSHGDSTLYRQLCERLSDELGACKTDQIARTESSSDDLSSVDGEAFPLSGF

SEQ ID NO: 17306 - DNA, 681 bp, Zea mays subsp. mays
  misc_feature (1)..(681): Ceres Seq. ID no. 12357263
aagtagcagctacatacgtcctcctccattaatattggcagcaagctaggatcatcagcatctgagcttatatattactacatcgatcggttgccaaatggcggggatgacagtcggcaataagctggcgctggctgcggtgctgctgtgcgcggcggcggccatggccacggcgcagcaggcctccggcgtgcgcgccacctacaacttctacaacccgcagcagaacaactgggacctcaacgccgtgagcgcgtactgcgcgacgtgggacgccagcaagccgctgtcgtggcgcatgaagtacggctggacggccttctgcgggcccgccggccccaccggccaggccgcgtgcgggcagtgtcttctggtgaccaacacggcgacgggggcgtccatcacggtgaggatcgtggaccagtgcagcaacggcggcctggacctggactacgacacggcgttcaagcccatcgacaccaacggccagggcttccaggccggccacctcaccgtcaactaccagttcgtcaactgcggcgacaactgaactgatagattattcacctgtgcatgcacctatatgtactagcaccattattccaagagttatatggatgtgatcccacacgtaagagccaataaaacatatatgcccagtggaataaactgaattaccta

SEQ ID NO: 17307 - protein, 150 aa, Zea mays subsp. mays
  misc_feature (1)..(150): Ceres Seq. ID no. 12357264
MAGMTVGNKLALAAVLLCAAAAMATAQQASGVRATYNFYNPQQNNWDLNAVSAYCATWDASKPLSWRMKYGWTAFCGPAGPTGQAACGQCLLVTNTATGASITVRIVDQCSNGGLDLDYDTAFKPIDTNGQGFQAGHLTVNYQFVNCGDN

SEQ ID NO: 17308 - protein, 147 aa, Zea mays subsp. mays
  misc_feature (1)..(147): Ceres Seq. ID no. 12357265
MTVGNKLALAAVLLCAAAAMATAQQASGVRATYNFYNPQQNNWDLNAVSAYCATWDASKPLSWRMKYGWTAFCGPAGPTGQAACGQCLLVTNTATGASITVRIVDQCSNGGLDLDYDTAFKPIDTNGQGFQAGHLTVNYQFVNCGDN

SEQ ID NO: 17309 - protein, 128 aa, Zea mays subsp. mays
  misc_feature (1)..(128): Ceres Seq. ID no. 12357266
MATAQQASGVRATYNFYNPQQNNWDLNAVSAYCATWDASKPLSWRMKYGWTAFCGPAGPTGQAACGQCLLVTNTATGASITVRIVDQCSNGGLDLDYDTAFKPIDTNGQGFQAGHLTVNYQFVNCGDN

SEQ ID NO: 17310 - DNA, 1502 bp, Zea mays subsp. mays
  misc_feature (1)..(1502): Ceres Seq. ID no. 12357279
attatagccacggccggccggtggacgacagcaccacaccacctccaactacccgagaccatcgacgagcatcttcctgcatctgcaatggctgccgctaccgtgtccgtcccccgcatcaagctgggctcccaggggctagaggtctccgcgcagggcctcggctgcatgggcatgtccgccttctacggtccgcccaaacccgagcctgacatgatcaagctcatccaccacgccgtcgccgccggggtcaccctccttgacacctccgacatgtacggcccgcacaccaacgagatcctgctaggcaaggcgcttcaaggcggtgtaaaggagaaggtcgagctggccaccaagtttgccgtctccttcgccgacggcaagcgcgagatccgcggtgacccggcgtatgtacgggcagcctgcgaagccagcctcaagcggctcggcatcgactgcatcgacctctactaccagcaccgcatcgacaagaaggtgcccatcgaggtcacgattggtgaactcaagaagctagtggaagaaggaaaggttaagtacattgggttatccgaagcatctgcatcaacaatccgaagagctcacgcagtccatcctattactgcagtacagcttgaatggtcattatggtctagagatgcggaagaagatataattcccacttgcagagaacttggaattggaattgtagcttacagtccactaggcagagggtttttttgtagtggagcaaaactagttgactcactgtcagagcaggacttccgcaagcatatgcctagacttcaaccagagaatattgtcaagaatgctaagatattcgagcatgtgaatgcaatggcagctaaaaaaggatgcacaccatcacagctagcattggcatgggttcaccatcagggaaacgatgtttgccccatacctggaacaacaaaaatcgagaacttcaaccagaacgtgggggcgctttctgtgaagttgacaccagatgagatggccgaactcgagtcctgtgctgctgcaggtgaaatcttgggtgaccgttatcctcaaatggccaacacctggaaggactctgagaccccgccattgtcttcttggaaatctgagtagccaatctggtgtctcttcaattctgccaccgtcacattggtgtatctccaaattgtcggactgcagaagatactcaggtgcactttgcaaaagcgtccatatgatgtgcttgccttttgcaagctatgatgtttggtacttggtgtgtattgcatgcctcaatttgtatcaagagtatttacccatgagtatagcttgaaggttaaaaccactggttcgacgaataaccatatgcatttgtatcgagagtatttaccatgagtagcaaactgaattttgtaataatagtcaaaagtgtgattgtaaaatgtacttagggaatgtggtacgctatattagcgtgcaaacataagtatagccagttaagcccctcc

SEQ ID NO: 17311 - protein, 375 aa, Zea mays subsp. mays
  misc_feature (1)..(375): Ceres Seq. ID no. 12357280
IIATAGRWTTAPHHLQLPETIDEHLPASAMAAATVSVPRIKLGSQGLEVSAQGLGCMGMSAFYGPPKPEPDMIKLIHHAVAAGVTLLDTSDMYGPHTNEILLGKALQGGVKEKVELATKFAVSFADGKREIRGDPAYVRAACEASLKRLGIDCIDLYYQHRIDKKVPIEVTIGELKKLVEEGKVKYIGLSEASASTIRRAHAVHPITAVQLEWSLWSRDAEEDIIPTCRELGIGIVAYSPLGRGFFCSGAKLVDSLSEQDFRKHMPRLQPENIVKNAKIFEHVNAMAAKKGCTPSQLALAWVHHQGNDVCPIPGTTKIENFNQNVGALSVKLTPDEMAELESCAAAGEILGDRYPQMANTWKDSETPPLSSWKSE

SEQ ID NO: 17312 - protein, 346 aa, Zea mays subsp. mays
  misc_feature (1)..(346): Ceres Seq. ID no. 12357281
MAAATVSVPRIKLGSQGLEVSAQGLGCMGMSAFYGPPKPEPDMIKLIHHAVAAGVTLLDTSDMYGPHTNEILLGKALQGGVKEKVELATKFAVSFADGKREIRGDPAYVRAACEASLKRLGIDCIDLYYQHRIDKKVPIEVTIGELKKLVEEGKVKYIGLSEASASTIRRAHAVHPITAVQLEWSLWSRDAEEDIIPTCRELGIGIVAYSPLGRGFFCSGAKLVDSLSEQDFRKHMPRLQPENIVKNAKIFEHVNAMAAKKGCTPSQLALAWVHHQGNDVCPIPGTTKIENFNQNVGALSVKLTPDEMAELESCAAAGEILGDRYPQMANTWKDSETPPLSSWKSE

SEQ ID NO: 17313 - protein, 319 aa, Zea mays subsp. mays
  misc_feature (1)..(319): Ceres Seq. ID no. 12357282
MGMSAFYGPPKPEPDMIKLIHHAVAAGVTLLDTSDMYGPHTNEILLGKALQGGVKEKVELATKFAVSFADGKREIRGDPAYVRAACEASLKRLGIDCIDLYYQHRIDKKVPIEVTIGELKKLVEEGKVKYIGLSEASASTIRRAHAVHPITAVQLEWSLWSRDAEEDIIPTCRELGIGIVAYSPLGRGFFCSGAKLVDSLSEQDFRKHMPRLQPENIVKNAKIFEHVNAMAAKKGCTPSQLALAWVHHQGNDVCPIPGTTKIENFNQNVGALSVKLTPDEMAELESCAAAGEILGDRYPQMANTWKDSETPPLSSWKSE

SEQ ID NO: 17314 - DNA, 1676 bp, Zea mays subsp. mays
  misc_feature (1)..(1676): Ceres Seq. ID no. 12357283
cagatcttatcccttccagttccaggcagcatccccagcctgacgaaggaattgaggacgctcgagctcgagctacgtcaggatccaacaccaccatggttacgggaacaagaggacgttcgtgctctacccgtcgctgggcgtgggccacctgatcccgatggtggagctggccaagcacctcttgcgccacggccacggcgcgctcatcgccgtggtcaacccgcccgacaccgacgccgtgtcggccgccgcggtggagcgcctcgcggcggccaacccggccatcgcgttccgcctcctgccggtcccggccagcccggacgccggcgcggactgggtgaagcgcgacctggacacgctccggctcgccaaccccgtgctccgggacttcctgctccggtcccagcccgcagccgacgccgacgcgctcatcctcgacatgttctgcgtcgacgcgctcgacgtcgcggcggagctcggcgtcccggcctacttcttcttcgcctccgcggcgggggacctcgccatgttcctcaacctgccgtacctctaccccaccctgccgtcgttcagggacatgggcgaggcgccggtgcgctgccccggcatgccgccggtccgggcgatggacatgccgctgacggtgcaggacagggacagcgaccggaccaaggtccggatgtaccagttccgccgcatcccggaggggaggggcgtgctggtcaacagcttcgcctggctggagcccagggcactgagagcgctcggcgacggcgtctgcgtgcccggccgcccgacgccgagggtcttctgcgtcgggccactggtcaacgacggcagcagcacggcggggggcggggggaggcacgagtgcctggcgtggctggacgcgcagcctaagcggagcgtcgtgttcctctgcttcggcagcaagggctccttccccgccgcgcagttacaggagatcgcccacgggctggagagctccggccaccggttcctgtgggccgtgaggagcccgccggaagaaccggacacggacctggggaagctgcttcccgaagggttcctggacaggaacagagacagaggcatggtggtgaaggactgggtgccacaggcagaggtggtgcggcacgaggcggtccgcgcgttcgtcacgcactgcggctggaactccacgctcgaggccatcatgtctggcctgcccatgatatgctggccgctgtacgcggagcaggggctcaacaaggtgttcatggtggaggagtggaggatcggggtggagctgcgcgggtacgaaaagttcgtcaaggcggaggagctggaagcgaaggtcagactggtgatggaggctgaggaagggaggatcctccgggagaggctcgcggtggcgagggagaaggcgttgggggctactaaggaaggcgggtcttctgaagtggcattcgcggagttctttggagatttggacaagagcagctctccgtcggtaaacggagaatgcgattgaattgatcactggtgtgctggtgtggcagatggactgcgaacgtatatatactttaggattcaatatcacttagtattttgacagtacgagactaaaatattgcatctgtggtatgggaataaaattggattcaagcagagcgccacttgcgttgcgtgct

SEQ ID NO: 17315 - protein, 451 aa, Zea mays subsp. mays
  misc_feature (1)..(451): Ceres Seq. ID no. 12357284
MVELAKHLLRHGHGALIAVVNPPDTDAVSAAAVERLAAANPAIAFRLLPVPASPDAGADWVKRDLDTLRLANPVLRDFLLRSQPAADADALILDMFCVDALDVAAELGVPAYFFFASAAGDLAMFLNLPYLYPTLPSFRDMGEAPVRCPGMPPVRAMDMPLTVQDRDSDRTKVRMYQFRRIPEGRGVLVNSFAWLEPRALRALGDGVCVPGRPTPRVFCVGPLVNDGSSTAGGGGRHECLAWLDAQPKRSVVFLCFGSKGSFPAAQLQEIAHGLESSGHRFLWAVRSPPEEPDTDLGKLLPEGFLDRNRDRGMVVKDWVPQAEVVRHEAVRAFVTHCGWNSTLEAIMSGLPMICWPLYAEQGLNKVFMVEEWRIGVELRGYEKFVKAEELEAKVRLVMEAEEGRILRERLAVAREKALGATKEGGSSEVAFAEFFGDLDKSSSPSVNGECD

SEQ ID NO: 17316 - protein, 357 aa, Zea mays subsp. mays
  misc_feature (1)..(357): Ceres Seq. ID no. 12357285
MFCVDALDVAAELGVPAYFFFASAAGDLAMFLNLPYLYPTLPSFRDMGEAPVRCPGMPPVRAMDMPLTVQDRDSDRTKVRMYQFRRIPEGRGVLVNSFAWLEPRALRALGDGVCVPGRPTPRVFCVGPLVNDGSSTAGGGGRHECLAWLDAQPKRSVVFLCFGSKGSFPAAQLQEIAHGLESSGHRFLWAVRSPPEEPDTDLGKLLPEGFLDRNRDRGMVVKDWVPQAEVVRHEAVRAFVTHCGWNSTLEAIMSGLPMICWPLYAEQGLNKVFMVEEWRIGVELRGYEKFVKAEELEAKVRLVMEAEEGRILRERLAVAREKALGATKEGGSSEVAFAEFFGDLDKSSSPSVNGECD

SEQ ID NO: 17317 - protein, 328 aa, Zea mays subsp. mays
  misc_feature (1)..(328): Ceres Seq. ID no. 12357286
MFLNLPYLYPTLPSFRDMGEAPVRCPGMPPVRAMDMPLTVQDRDSDRTKVRMYQFRRIPEGRGVLVNSFAWLEPRALRALGDGVCVPGRPTPRVFCVGPLVNDGSSTAGGGGRHECLAWLDAQPKRSVVFLCFGSKGSFPAAQLQEIAHGLESSGHRFLWAVRSPPEEPDTDLGKLLPEGFLDRNRDRGMVVKDWVPQAEVVRHEAVRAFVTHCGWNSTLEAIMSGLPMICWPLYAEQGLNKVFMVEEWRIGVELRGYEKFVKAEELEAKVRLVMEAEEGRILRERLAVAREKALGATKEGGSSEVAFAEFFGDLDKSSSPSVNGECD

SEQ ID NO: 17318 - DNA, 1393 bp, Zea mays subsp. mays
  misc_feature (1)..(1393): Ceres Seq. ID no. 12357291
ctgccacctgaaatcccccgaacctatacttttccttcccccgatccaggcggttctcttcccagaagccagcccagaatggcggcatccgacgcgctgcagtccatcgtttacagccgtgggtcgctccgcctcctcgatcagaggaagctgccgctcgagatggagtacatcgacgtcaagagttccgccgatggctggaatgcaataagagacatggttgtccgtggtgctccagcaatagccatagcagcggcactagcattagccgttgaagtttctgatttagattttattggtacgcctgaagaagcagcttcttttgtttcaaagaaattggaataccttgtatccagccgaccaactgcagtgaacctatctgatgctgcaacaaagctccaaactttggtatcaaaggcagctgaaactgcaaaagattccaagtctatctttcaggtctacattgaggccgcagagacgatgcttgttgatgatgtggcagataataaagctattggctcacatggagctgtatttcttcaaaggcagcttgcaaattcaaaaaagatatctgttctaacccattgtaatactggcagtcttgcaactgctggttatggaactgcccttggggttatacgcgctcttcattcggggggagttttagagaaggccttttgcaccgaaactcgtccatttaaccagggatccagacttacagctttcgagttagttcatgaaaaaatacctgcaacactgatagcagattctgctgctgctgcgttgatgaaacaagggcatgttcaggctgtcattgttggtgctgatcgaatagcagcaaatggtgacacagccaacaagattggcacatacaacctcgccatctccgcgaagcatcatagtgtccagttctatgtgtcagcgccggtaacttccattgatctctccctcccatctggggatgagatagtcatagaagaaagatcaccaaaggagttgctgaactctgaaggtggtctgggaaagcaagttgctgcatccggtatatcagtctggaacccagctttcgatgttactccagcaaatctgatcactgcaatcataacagaaaagggtgtgatcacaaaaactgatgctgatggatctttcgacatcaaaggattccttctgcccgcaaaataatactctagcgtggcttccattctgaatgacaaatgtctggatcgacactgttgtattctgttttctctattatacacaataataaagtcatgtcctcataggattttggtgtaagttttatggataggagatcgacgctagggtgtgtacccatagcggcgcgtatgagccgtgttttcacacgagtgggcaagtgaaaaagagatgtggc

SEQ ID NO: 17319 - protein, 393 aa, Zea mays subsp. mays
  misc_feature (1)..(393): Ceres Seq. ID no. 12357292
LPPEIPRTYTFPSPDPGGSLPRSQPRMAASDALQSIVYSRGSLRLLDQRKLPLEMEYIDVKSSADGWNAIRDMVVRGAPAIAIAAALALAVEVSDLDFIGTPEEAASFVSKKLEYLVSSRPTAVNLSDAATKLQTLVSKAAETAKDSKSIFQVYIEAAETMLVDDVADNKAIGSHGAVFLQRQLANSKKISVLTHCNTGSLATAGYGTALGVIRALHSGGVLEKAFCTETRPFNQGSRLTAFELVHEKIPATLIADSAAAALMKQGHVQAVIVGADRIAANGDTANKIGTYNLAISAKHHSVQFYVSAPVTSIDLSLPSGDEIVIEERSPKELLNSEGGLGKQVAASGISVWNPAFDVTPANLITAIITEKGVITKTDADGSFDIKGFLLPAK

SEQ ID NO: 17320 - protein, 367 aa, Zea mays subsp. mays
  misc_feature (1)..(367): Ceres Seq. ID no. 12357293
MAASDALQSIVYSRGSLRLLDQRKLPLEMEYIDVKSSADGWNAIRDMVVRGAPAIAIAAALALAVEVSDLDFIGTPEEAASFVSKKLEYLVSSRPTAVNLSDAATKLQTLVSKAAETAKDSKSIFQVYIEAAETMLVDDVADNKAIGSHGAVFLQRQLANSKKISVLTHCNTGSLATAGYGTALGVIRALHSGGVLEKAFCTETRPFNQGSRLTAFELVHEKIPATLIADSAAAALMKQGHVQAVIVGADRIAANGDTANKIGTYNLAISAKHHSVQFYVSAPVTSIDLSLPSGDEIVIEERSPKELLNSEGGLGKQVAASGISVWNPAFDVTPANLITAIITEKGVITKTDADGSFDIKGFLLPAK

SEQ ID NO: 17321 - protein, 339 aa, Zea mays subsp. mays
  misc_feature (1)..(339): Ceres Seq. ID no. 12357294
MEYIDVKSSADGWNAIRDMVVRGAPAIAIAAALALAVEVSDLDFIGTPEEAASFVSKKLEYLVSSRPTAVNLSDAATKLQTLVSKAAETAKDSKSIFQVYIEAAETMLVDDVADNKAIGSHGAVFLQRQLANSKKISVLTHCNTGSLATAGYGTALGVIRALHSGGVLEKAFCTETRPFNQGSRLTAFELVHEKIPATLIADSAAAALMKQGHVQAVIVGADRIAANGDTANKIGTYNLAISAKHHSVQFYVSAPVTSIDLSLPSGDEIVIEERSPKELLNSEGGLGKQVAASGISVWNPAFDVTPANLITAIITEKGVITKTDADGSFDIKGFLLPAK

SEQ ID NO: 17322 - DNA, 1879 bp, Zea mays subsp. mays
  misc_feature (1)..(1879): Ceres Seq. ID no. 12357342
accagcccgacccaccaccaccatcgccaccattaccctctcgcccctgcctctccggccgccagcccatcccgtccccgtcccatgccgcagcgcgcagcggccgcactgacacaccagtgagcgagcagagcgagagcgaggcctgatgcggcagcggcagcaaggcgaggagcaccgggagatattcgtccagtggagaccctgcgacaagaagaggtcttaggccctccgccgccacgcgcaccggcagacaaatccgcgcaggccttcttccgatccgcaaaggcgccgcctttttcgccgattccacaggccggagcccggggagaaaggcagacagacagaccggaagatgagcgcgtccgtgggccggacccgtgtggggcggtacgagctcggccggaccctcggcgaaggcaccttcgccaaggtcaagttcgcccggaacgtcgagaccggagagaatgtcgccatcaagatcctcgacaaggagaaggtcctcaagcacaagatgatcgcccagatcaagcgggagatctcgaccatgaagctcatcaggcaccccaacgtcatccggatgtatgaggtgatggccagcaagacaaagatatacatcgtcatggagctcgtcaccggtggcgaactcttcgacaaaatcgcctcgcgtggaaggctgaaagaggatgacgcaaggaagtacttccagcagctgatcaactctgtcgattactgccatagccgaggcgtctaccaccgcgatctcaagcctgaaaatctcctgcttgatgctagcggcacgctcaaggtttcggattttggactgagcgcactatctcaacaagtccgagaggatggtctgctgcacacaacctgtggaactcccaactatgttgctcccgaggttataaacaataagggctatgatggagctaaggctgatctgtggtcatgtggagtgattctctttgtcctcatggcggggtacctcccatttgaagattcgaacctgatgtcgctctacaagaagattttcaaagcggatttcagttgcccgtcctggttctccacaagcgcaaagaagctcatcaagaagatacttgaacctaatgctaacaatagaataactattgcagagctcattaacaacgagtggttcaagaaggggtatcagcctcccagatttgaaacagcagatgttaatctggatgacgtgaactccatcttcgatgaatccggggagccagcacagcttgttgttgagaggagagaagaaaggccatcagtgatgaacgctttcgagttaatctctacgtctcagggcctcaatctcgggacgctcttcgagaagcaaacgggttctgttaagcgagaaacaaggtttgcgtcaaggcttcctgcaaatgagatactgtcgaagatcgaagcagcagcgggacccatgggcttcaacgttcagaagcgcaactataagctgaagctgcaaggggagaaccctggaaggaaaggtcagctggccatcgcaacagaggttttcgaggtcacgccttccctgtacatggttgagctgcgcaagtccaacggcgacacccttgaattccacaagttctaccacaacatctcaaatggactgaaggacgtgatgtggaagccggagagcggcatcgtggaaggcgacgaggcgcggcaaaggaggtccccgtgatggggtctgcaaccaagttttagaagtagcgctgcagataactagtcatcagggagcctggcgggaactgagcctgtgactgcttcctgtttgtttggatgttttgtttttgtctaaggtgctttctgactaaagtatgctggataatgtgaatgaagaatgtgcagagttttc

SEQ ID NO: 17323 - protein, 449 aa, Zea mays subsp. mays
  misc_feature (1)..(449): Ceres Seq. ID no. 12357343
MSASVGRTRVGRYELGRTLGEGTFAKVKFARNVETGENVAIKILDKEKVLKHKMIAQIKREISTMKLIRHPNVIRMYEVMASKTKIYIVMELVTGGELFDKIASRGRLKEDDARKYFQQLINSVDYCHSRGVYHRDLKPENLLLDASGTLKVSDFGLSALSQQVREDGLLHTTCGTPNYVAPEVINNKGYDGAKADLWSCGVILFVLMAGYLPFEDSNLMSLYKKIFKADFSCPSWFSTSAKKLIKKILEPNANNRITIAELINNEWFKKGYQPPRFETADVNLDDVNSIFDESGEPAQLVVERREERPSVMNAFELISTSQGLNLGTLFEKQTGSVKRETRFASRLPANEILSKIEAAAGPMGFNVQKRNYKLKLQGENPGRKGQLAIATEVFEVTPSLYMVELRKSNGDTLEFHKFYHNISNGLKDVMWKPESGIVEGDEARQRRSP

SEQ ID NO: 17324 - protein, 396 aa, Zea mays subsp. mays
  misc_feature (1)..(396): Ceres Seq. ID no. 12357344
MIAQIKREISTMKLIRHPNVIRMYEVMASKTKIYIVMELVTGGELFDKIASRGRLKEDDARKYFQQLINSVDYCHSRGVYHRDLKPENLLLDASGTLKVSDFGLSALSQQVREDGLLHTTCGTPNYVAPEVINNKGYDGAKADLWSCGVILFVLMAGYLPFEDSNLMSLYKKIFKADFSCPSWFSTSAKKLIKKILEPNANNRITIAELINNEWFKKGYQPPRFETADVNLDDVNSIFDESGEPAQLVVERREERPSVMNAFELISTSQGLNLGTLFEKQTGSVKRETRFASRLPANEILSKIEAAAGPMGFNVQKRNYKLKLQGENPGRKGQLAIATEVFEVTPSLYMVELRKSNGDTLEFHKFYHNISNGLKDVMWKPESGIVEGDEARQRRSP

SEQ ID NO: 17325 - protein, 385 aa, Zea mays subsp. mays
  misc_feature (1)..(385): Ceres Seq. ID no. 12357345
MKLIRHPNVIRMYEVMASKTKIYIVMELVTGGELFDKIASRGRLKEDDARKYFQQLINSVDYCHSRGVYHRDLKPENLLLDASGTLKVSDFGLSALSQQVREDGLLHTTCGTPNYVAPEVINNKGYDGAKADLWSCGVILFVLMAGYLPFEDSNLMSLYKKIFKADFSCPSWFSTSAKKLIKKILEPNANNRITIAELINNEWFKKGYQPPRFETADVNLDDVNSIFDESGEPAQLVVERREERPSVMNAFELISTSQGLNLGTLFEKQTGSVKRETRFASRLPANEILSKIEAAAGPMGFNVQKRNYKLKLQGENPGRKGQLAIATEVFEVTPSLYMVELRKSNGDTLEFHKFYHNISNGLKDVMWKPESGIVEGDEARQRRSP

SEQ ID NO: 17326 - DNA, 974 bp, Zea mays subsp. mays
  misc_feature (1)..(974): Ceres Seq. ID no. 12357407
accatttcgatacgcgcgagggaacggggccggccggccggccggggatcggaactgaagtgtgggcacacaagagtcacaacagggggagtgggggacattccaatcagttccctgcgtgtgagcgatgcagcgggacgcgagaagctggtcgccggcgccggccacggacgccgccggcccttacgcgatgccttcgcccgtgcagccgtcgaccaagagcacgaaggagacggtgaagaatgcgctgtcgcggtgggggcggaaggtcggggaggcgaccaggaaggccgaggacctgtcgcgcaacacatggcagcacttgaggacggcgccgagcatcgcggaggccgcggtggggaggatcgcgcaggggaccaaggtgctggcggagggcggccacgacaggatattccgccaggccttcagcgccccgcccgacgagcagctgcgcaagtcctacgcttgctacctctccacggccgccggcccggtgatgggcgtcctgtacctgtccacggccagggtcgccttctgcagcgacagcccgctgtcctacgaggcttccggcggcgacagaacggagtggacccactacaaggtggcgattcctctccaacggctgcgggcggcgagcccgtccgccaacaagacgaagcccgcggagaagttcgtccagctggtgtcggtggacagccaagagttctggttcatgggcttcgtcaactacgacggcgcggtggcgcacctgcaggaagcgctgagcgggttccgcaacctgcaggcgtgacatggaggacctcaataaaatgctcagtgttgtcttgtacgtgctcgccacaactgattgatctgcgtgtgttgccgtgctagtgtttgcatcgtgttttgcgtgtgcggatttgcatgtcattttttgatttggttgccattgtcagcgagagaacagtccaatcattttattcagatttcag

SEQ ID NO: 17327 - protein, 290 aa, Zea mays subsp. mays
  misc_feature (1)..(290): Ceres Seq. ID no. 12357408
TISIRARERGRPAGRGSELKCGHTRVTTGGVGDIPISSLRVSDAAGREKLVAGAGHGRRRPLRDAFARAAVDQEHEGDGEECAVAVGAEGRGGDQEGRGPVAQHMAALEDGAEHRGGRGGEDRAGDQGAGGGRPRQDIPPGLQRPARRAAAQVLRLLPLHGRRPGDGRPVPVHGQGRLLQRQPAVLRGFRRRQNGVDPLQGGDSSPTAAGGEPVRQQDEARGEVRPAGVGGQPRVLVHGLRQLRRRGGAPAGSAERVPQPAGVTWRTSIKCSVLSCTCSPQLIDLRVLPC

SEQ ID NO: 17328 - protein, 220 aa, Zea mays subsp. mays
  misc_feature (1)..(220): Ceres Seq. ID no. 12357409
MQRDARSWSPAPATDAAGPYAMPSPVQPSTKSTKETVKNALSRWGRKVGEATRKAEDLSRNTWQHLRTAPSIAEAAVGRIAQGTKVLAEGGHDRIFRQAFSAPPDEQLRKSYACYLSTAAGPVMGVLYLSTARVAFCSDSPLSYEASGGDRTEWTHYKVAIPLQRLRAASPSANKTKPAEKFVQLVSVDSQEFWFMGFVNYDGAVAHLQEALSGFRNLQA

SEQ ID NO: 17329 - protein, 199 aa, Zea mays subsp. mays
  misc_feature (1)..(199): Ceres Seq. ID no. 12357410
MPSPVQPSTKSTKETVKNALSRWGRKVGEATRKAEDLSRNTWQHLRTAPSIAEAAVGRIAQGTKVLAEGGHDRIFRQAFSAPPDEQLRKSYACYLSTAAGPVMGVLYLSTARVAFCSDSPLSYEASGGDRTEWTHYKVAIPLQRLRAASPSANKTKPAEKFVQLVSVDSQEFWFMGFVNYDGAVAHLQEALSGFRNLQA

SEQ ID NO: 17330 - DNA, 1768 bp, Zea mays subsp. mays
  misc_feature (1)..(1768): Ceres Seq. ID no. 12357458
accggtgacgaagccttccgtgtcatcaggatcgcagggttttgtttcgtttcgcgggcgttgggaatccatccatggcgaggaagatgctcatcgacggggaggtggcggccgtcgcggatggtgggcactatgactacgatctcttcgtcatcggggcgggcagcggcggtgttcgcggctctcgcaccgccgcctccttcggagctaaggttgcgatttgtgagctcccattccaccccatcagctcagagtggctaggaggacatggtgggacttgcgtgatacgtggttgcgtacctaaaaagatactcgtgtatggtgcatcattccgtggagaatttgaggattcgataattttgggtgggagattaacggagatattaacttcaattggaaaacgctattggaaaataagactaaagaaattgttagattaaatggtgtgtatcagaggatccttaccagtgccggtgtgacaatgattgaaggggcaggcagtctagttgatgctcatactgttgaagttagccagcccgatggttcaaagcaaaggtataccgcgaagcacattttgatcgcgactggtagccgtgctcaacgtgtcaacatacctggaaaggatctggctattacttctgatgaggccttgagcttggaggagcttccaaagcgcgctgtaatcctgggtggcggatatattgctgttgaatttgcttctatctggagggggatgggtgctgaagtagatttgttttatcgaagagatcttcctctaagaggttttgatgatgagatgagagctattgttgcaagcaaccttgagggaaggggaatcaagttgcatccagggacaaatctctctgagttgagtaaaacggctgacggaataaaagttgtaactgataaaggagaagagctcattgcagatgttgtcctatttgcgacagggcgcacaccaaactcccagagactgaacttgcaagctgcaggcgttgagattgaccgggttggagccatcaaggttgacgaatattctcgtacttctgctcctagtgtatgggctgtgggtgatgtaacaaaccggattaatttaacacctgttgcattaatggaggcaacttgctttgctaaaactgtgtttggtggccagcaagttaagcctgatcacagagatgttccttgtgctgttttctccattccaccactatctgtagtgggcctcagcgaagaacaggccttggaggaagccaatggtgatattcttgttttcatctcatcattcaacccaatgaagaacagcatatccaagcgccaggagaagactatcatgaaactggtagttgatgctgaaactgacaaagtacttggtgcatccatgtgtggaccagacgcacctgaaattatccagggcatcgctattgcggttaaatgtggagccaccaaagcagacttcgacagcactgtcggaatccacccttccgctgctgaagagttcgtgaccatgcgcaccgtgacaaggcgcttgagcccgacatccaagccaaagacgaacttgtaagcaagaaattggtgttttgggggaatgttacaccggacaaatacactggtttcatcacgttggtaatttttacgtcattggaactggaaccatgtatattgaaggaataagtttttttttcatggcaacacaccgaaaataatgagaccatggattttcttgatacaaataatgagctcaagcagagaacgtttatggttggttctc

SEQ ID NO: 17331 - protein, 359 aa, Zea mays subsp. mays
  misc_feature (1)..(359): Ceres Seq. ID no. 12357459
MIEGAGSLVDAHTVEVSQPDGSKQRYTAKHILIATGSRAQRVNIPGKDLAITSDEALSLEELPKRAVILGGGYIAVEFASIWRGMGAEVDLFYRRDLPLRGFDDEMRAIVASNLEGRGIKLHPGTNLSELSKTADGIKVVTDKGEELIADVVLFATGRTPNSQRLNLQAAGVEIDRVGAIKVDEYSRTSAPSVWAVGDVTNRINLTPVALMEATCFAKTVFGGQQVKPDHRDVPCAVFSIPPLSVVGLSEEQALEEANGDILVFISSFNPMKNSISKRQEKTIMKLVVDAETDKVLGASMCGPDAPEIIQGIAIAVKCGATKADFDSTVGIHPSAAEEFVTMRTVTRRLSPTSKPKTNL

SEQ ID NO: 17332 - protein, 275 aa, Zea mays subsp. mays
  misc_feature (1)..(275): Ceres Seq. ID no. 12357460
MGAEVDLFYRRDLPLRGFDDEMRAIVASNLEGRGIKLHPGTNLSELSKTADGIKVVTDKGEELIADVVLFATGRTPNSQRLNLQAAGVEIDRVGAIKVDEYSRTSAPSVWAVGDVTNRINLTPVALMEATCFAKTVFGGQQVKPDHRDVPCAVFSIPPLSVVGLSEEQALEEANGDILVFISSFNPMKNSISKRQEKTIMKLVVDAETDKVLGASMCGPDAPEIIQGIAIAVKCGATKADFDSTVGIHPSAAEEFVTMRTVTRRLSPTSKPKTNL

SEQ ID NO: 17333 - protein, 254 aa, Zea mays subsp. mays
  misc_feature (1)..(254): Ceres Seq. ID no. 12357461
MRAIVASNLEGRGIKLHPGTNLSELSKTADGIKVVTDKGEELIADVVLFATGRTPNSQRLNLQAAGVEIDRVGAIKVDEYSRTSAPSVWAVGDVTNRINLTPVALMEATCFAKTVFGGQQVKPDHRDVPCAVFSIPPLSVVGLSEEQALEEANGDILVFISSFNPMKNSISKRQEKTIMKLVVDAETDKVLGASMCGPDAPEIIQGIAIAVKCGATKADFDSTVGIHPSAAEEFVTMRTVTRRLSPTSKPKTNL

SEQ ID NO: 17334 - DNA, 1411 bp, Zea mays subsp. mays
  misc_feature (1)..(1411): Ceres Seq. ID no. 12357466
agagagagagacaagagagagagagagagagagctaacgatggcgtccagagacgcggccagcagccccaaatcagcgccgcgtcgccatgggccggcggcgcccaagaatggcgccgacctgctcagcccacggttccggtcggctgccgcgctggccggctgggacgaggagtccgtcctccttgccgcgatggtcgtcgacgacaccccagtccgcgactcccgtcgcaagaggcgggcctccacctcctccgtcggcggcagcgccggatccagcaccaggaagaggaggccgcgcaggctgtctccggccaagatcccgccggtggttttcgcgctcgacgacgaaaagtcggacactgcggcagatagcaaatcggaagtgaaggccgccaaggaggaagagaagcctgtccttgtgggcgacaaggaggcgtccggttctggcgagaaagcagtggccgcggcaaacatgccgtgcatggatcggctccgggaggagctctcttgcgcgatttgcctggacatctgctttgagccgaccactacgccttgtggacacagcttctgcatgagatgcttaagacacgctgcagccaagtgcgggaaacggtgtcccaaatgcaggcagttcatcagcagctcgaaatcgtgcaccatcaacactgtgctctggaacaccattcagctcttatttcccagtgaggttgaggcaagaaagggttcgagctcatcaccttcaccatgcgacaaggacgatgtgagagctaataggttctcacaaggtggccccggtatgagaactaggagcaggagcagcggcagcggcttcatcagcagcgagggtaggacaagaagcagcttcatcgaacccggcgccagtgcgaacttcatcgtcagcacatatggcagcgcaagaagcagtaacagcaggaggggcttcgtccctgcctcgcagctgctgttgacaagattagagcaatctgaagatgccgcggcgttggcgtacaggttgcaacaggaggagttcgtgaatgcctttgaggagcctgagcaggagaggcagccacgcgacgccgtgtccacagcacgagacaccctgagagccatggcctcccgggccatccgcctccgtgctagaggctggcctgtttagtactactattgctctgctctgcatggaagttgagacctctgaacatataggcatcggtggggttgatagctctcgacattcactagggactctagaagatgtctgccccacgattgttcacgggaaggcccagcgacagctatgggctcccaactagaggagaagacgcgtaggctcaaagctgctgtcgccggtgagttgtaaaaatgctaaaaatctcattctctaagttttcagatgaagtgcacctagt

SEQ ID NO: 17335 - protein, 385 aa, Zea mays subsp. mays
  misc_feature (1)..(385): Ceres Seq. ID no. 12357467
RERDKRERERELTMASRDAASSPKSAPRRHGPAAPKNGADLLSPRFRSAAALAGWDEESVLLAAMVVDDTPVRDSRRKRRASTSSVGGSAGSSTRKRRPRRLSPAKIPPVVFALDDEKSDTAADSKSEVKAAKEEEKPVLVGDKEASGSGEKAVAAANMPCMDRLREELSCAICLDICFEPTTTPCGHSFCMRCLRHAAAKCGKRCPKCRQFISSSKSCTINTVLWNTIQLLFPSEVEARKGSSSSPSPCDKDDVRANRFSQGGPGMRTRSRSSGSGFISSEGRTRSSFIEPGASANFIVSTYGSARSSNSRRGFVPASQLLLTRLEQSEDAAALAYRLQQEEFVNAFEEPEQERQPRDAVSTARDTLRAMASRAIRLRARGWPV

SEQ ID NO: 17336 - protein, 372 aa, Zea mays subsp. mays
  misc_feature (1)..(372): Ceres Seq. ID no. 12357468
MASRDAASSPKSAPRRHGPAAPKNGADLLSPRFRSAAALAGWDEESVLLAAMVVDDTPVRDSRRKRRASTSSVGGSAGSSTRKRRPRRLSPAKIPPVVFALDDEKSDTAADSKSEVKAAKEEEKPVLVGDKEASGSGEKAVAAANMPCMDRLREELSCAICLDICFEPTTTPCGHSFCMRCLRHAAAKCGKRCPKCRQFISSSKSCTINTVLWNTIQLLFPSEVEARKGSSSSPSPCDKDDVRANRFSQGGPGMRTRSRSSGSGFISSEGRTRSSFIEPGASANFIVSTYGSARSSNSRRGFVPASQLLLTRLEQSEDAAALAYRLQQEEFVNAFEEPEQERQPRDAVSTARDTLRAMASRAIRLRARGWPV

SEQ ID NO: 17337 - protein, 321 aa, Zea mays subsp. mays
  misc_feature (1)..(321): Ceres Seq. ID no. 12357469
MVVDDTPVRDSRRKRRASTSSVGGSAGSSTRKRRPRRLSPAKIPPVVFALDDEKSDTAADSKSEVKAAKEEEKPVLVGDKEASGSGEKAVAAANMPCMDRLREELSCAICLDICFEPTTTPCGHSFCMRCLRHAAAKCGKRCPKCRQFISSSKSCTINTVLWNTIQLLFPSEVEARKGSSSSPSPCDKDDVRANRFSQGGPGMRTRSRSSGSGFISSEGRTRSSFIEPGASANFIVSTYGSARSSNSRRGFVPASQLLLTRLEQSEDAAALAYRLQQEEFVNAFEEPEQERQPRDAVSTARDTLRAMASRAIRLRARGWPV

SEQ ID NO: 17338 - DNA, 1591 bp, Zea mays subsp. mays
  misc_feature (1)..(1591): Ceres Seq. ID no. 12357866
aggcagagctctcacgcggacggcggacctggccacctggggggcgcggacggagccttcgcttttcccccctcccctccctttcgaacgactaccgaggaggcatccgaggtggccagccacgatgatggccgcggcggcgctgaggccgcacaagtcttcgccggcgcgcgtgcccacgcggtgcgtggccgcgctctgcgccgcctgcttcctcgtcggcgtcggcgtcgtcaacaggtactggcctgttcctgagcctcatcccggttgcccagacaaggctggccctgaccactcgagggccgtgttgaaccaagcgtcacagactcgcgaagtcgtcatggcgttggacaagacgatatccgacatcgagatgcgcctggctgcggctagagccgcccaggcgatgagccagggcatgtcaccgggcgactcggactcggagggcgaccagggaaccgcgcggcgtaggatgtcttttgtcatgggcgttttcaccactcttgctaaccggaagcggagagattcaataaggcagacgtggatgccacagggtgatcagttgcgaagattggaagacaagggcgttgttatccgttttgttgttggacgcagtgcaaatccaaacctggaaaatgaggtcgaccatgcaattgatatggaggatgaagaatacagtgatatcttgagaattaatcatgtggaaggctatggagggctccctatgaaggttcagatgttcctttcgactgctcttacaatgtgggacgctgatttctatgtaaaagccgacgataatgtccatgtcaacattggtatcaccagatcgattttggcgcgacacaggatgaaacctcgggtgtacattggctgcatgaaatctggacctgttgttgctaagaatgactccaagtattatgagccagaccattggaagtttgggactgagggtaacaactactttaggcatgcaacacgtcagttgtatgctgtaaccagggatttagcaacttacatatcagcaaaccggcatatcctgcacaagtattcaaatgaagatgtatcatttggctcttggttgatcgggttggaagttgagcatgttgatgagagaagcctttgctgtggtactcccccagactgcgaatggaaagggcaggccgggaacccatgtgcggcgtccttcgactggaactgcactggcatctgcaatccggtggagaggatgacagaggtacaccgacgatgttgggaaggccttggagccgaagggcacgcacagtctttgacttttgacagccaatagttggcgcttggcggatcattgtcgcaccattttcttcctcttctttagggccctgtaattaatatgcggagatgaacttgtatgcaatggctcggtttttcagatgtgcagcaatggcatcgtttcctggccagttcgcgtgcggaaactggggtagagaattaggagttcaatctgcaagtgagtctctaataactggagatgcctcactggacgtccgatgaaactggggtagactgtttgattctctgatgaaagaattagctgtctgtctgagttctc

SEQ ID NO: 17339 - protein, 435 aa, Zea mays subsp. mays
  misc_feature (1)..(435): Ceres Seq. ID no. 12357867
GRALTRTADLATWGARTEPSLFPPPLPFERLPRRHPRWPATMMAAAALRPHKSSPARVPTRCVAALCAACFLVGVGVVNRYWPVPEPHPGCPDKAGPDHSRAVLNQASQTREVVMALDKTISDIEMRLAAARAAQAMSQGMSPGDSDSEGDQGTARRRMSFVMGVFTTLANRKRRDSIRQTWMPQGDQLRRLEDKGVVIRFVVGRSANPNLENEVDHAIDMEDEEYSDILRINHVEGYGGLPMKVQMFLSTALTMWDADFYVKADDNVHVNIGITRSILARHRMKPRVYIGCMKSGPVVAKNDSKYYEPDHWKFGTEGNNYFRHATRQLYAVTRDLATYISANRHILHKYSNEDVSFGSWLIGLEVEHVDERSLCCGTPPDCEWKGQAGNPCAASFDWNCTGICNPVERMTEVHRRCWEGLGAEGHAQSLTFDSQ

SEQ ID NO: 17340 - protein, 394 aa, Zea mays subsp. mays
  misc_feature (1)..(394): Ceres Seq. ID no. 12357868
MMAAAALRPHKSSPARVPTRCVAALCAACFLVGVGVVNRYWPVPEPHPGCPDKAGPDHSRAVLNQASQTREVVMALDKTISDIEMRLAAARAAQAMSQGMSPGDSDSEGDQGTARRRMSFVMGVFTTLANRKRRDSIRQTWMPQGDQLRRLEDKGVVIRFVVGRSANPNLENEVDHAIDMEDEEYSDILRINHVEGYGGLPMKVQMFLSTALTMWDADFYVKADDNVHVNIGITRSILARHRMKPRVYIGCMKSGPVVAKNDSKYYEPDHWKFGTEGNNYFRHATRQLYAVTRDLATYISANRHILHKYSNEDVSFGSWLIGLEVEHVDERSLCCGTPPDCEWKGQAGNPCAASFDWNCTGICNPVERMTEVHRRCWEGLGAEGHAQSLTFDSQ

SEQ ID NO: 17341 - protein, 393 aa, Zea mays subsp. mays
  misc_feature (1)..(393): Ceres Seq. ID no. 12357869
MAAAALRPHKSSPARVPTRCVAALCAACFLVGVGVVNRYWPVPEPHPGCPDKAGPDHSRAVLNQASQTREVVMALDKTISDIEMRLAAARAAQAMSQGMSPGDSDSEGDQGTARRRMSFVMGVFTTLANRKRRDSIRQTWMPQGDQLRRLEDKGVVIRFVVGRSANPNLENEVDHAIDMEDEEYSDILRINHVEGYGGLPMKVQMFLSTALTMWDADFYVKADDNVHVNIGITRSILARHRMKPRVYIGCMKSGPVVAKNDSKYYEPDHWKFGTEGNNYFRHATRQLYAVTRDLATYISANRHILHKYSNEDVSFGSWLIGLEVEHVDERSLCCGTPPDCEWKGQAGNPCAASFDWNCTGICNPVERMTEVHRRCWEGLGAEGHAQSLTFDSQ

SEQ ID NO: 17342 - DNA, 1168 bp, Zea mays subsp. mays
  misc_feature (1)..(1168): Ceres Seq. ID no. 12357881
agaataggataggatagcccctgttcttctagcctgctagtctgctacactccacgtctctacctctaccgcacattttgctacgctccagctccatcgactatcgagtgcttgctggacgccggggccgggcaatggatccgggcagcgcggagatcgttttcgactgcgatttcttccggatatacagcgacggtcgcgtcgagcgtttcgccggcatggaaaccgtgcccgcgggcttcgacgccgacaccggcgtcacctcaaaagacgtggtcgtcgacgccgccaccggcatcgcgacgcggctctacctgccagccatccctacggccccgtcatctccccagtcggacggcaacggcaacggcaacggcagcgccacggcgaagcttcccatcctcgtcatcttccacggcggcggcttcgtcatcggctcaccggctgatcctggtttccaccgctacatgaactcgctggtcgctagcgcccgcgtcgtcgctgtctccgtcggctaccgcctcgcgcccgaaaacccgctccctgcagcctacaaggactcctggaccgcgctcaactgggctgtttccggcgcggacccgtggctgtccgcccacggtgacctcggccgcgtcttcgtggccggttacagcgccgggtcgaacatcgcccacaacatggccatcgccgcgggcgtcagaggcttgcgcgccgcggaaccaccacgagtagaaggcgtgatcctgctccacccttcgtttgccggtgaacagaggatggaagaagaggatgacagattctggcaagttaataagaggaggtggaaggccatcttccccggtgcgagagacgggctggacgatccgagaatcaacccggtcgtcgctggcgcgccgagcttggcgaagctggtgggcgagcggctgctcgtgtgcacggcgtcggaggacccgagggcaccgaggggccgggcatactgcgaggcggtgagggccagctgttggccgggaaaggtggagagcttcgaatcacaaaacgagggacacgggttcttcgtttccggccacggcagcacccaggccattgcgctgatggatcgagtggttggtttcattgttggccattaacttcgattgttcaaaataaatgaaattaagggttgtttgct

SEQ ID NO: 17343 - protein, 330 aa, Zea mays subsp. mays
  misc_feature (1)..(330): Ceres Seq. ID no. 12357882
MDPGSAEIVFDCDFFRIYSDGRVERFAGMETVPAGFDADTGVTSKDVVVDAATGIATRLYLPAIPTAPSSPQSDGNGNGNGSATAKLPILVIFHGGGFVIGSPADPGFHRYMNSLVASARVVAVSVGYRLAPENPLPAAYKDSWTALNWAVSGADPWLSAHGDLGRVFVAGYSAGSNIAHNMAIAAGVRGLRAAEPPRVEGVILLHPSFAGEQRMEEEDDRFWQVNKRRWKAIFPGARDGLDDPRINPVVAGAPSLAKLVGERLLVCTASEDPRAPRGRAYCEAVRASCWPGKVESFESQNEGHGFFVSGHGSTQAIALMDRVVGFIVGH

SEQ ID NO: 17344 - protein, 302 aa, Zea mays subsp. mays
  misc_feature (1)..(302): Ceres Seq. ID no. 12357883
METVPAGFDADTGVTSKDVVVDAATGIATRLYLPAIPTAPSSPQSDGNGNGNGSATAKLPILVIFHGGGFVIGSPADPGFHRYMNSLVASARVVAVSVGYRLAPENPLPAAYKDSWTALNWAVSGADPWLSAHGDLGRVFVAGYSAGSNIAHNMAIAAGVRGLRAAEPPRVEGVILLHPSFAGEQRMEEEDDRFWQVNKRRWKAIFPGARDGLDDPRINPVVAGAPSLAKLVGERLLVCTASEDPRAPRGRAYCEAVRASCWPGKVESFESQNEGHGFFVSGHGSTQAIALMDRVVGFIVGH

SEQ ID NO: 17345 - protein, 219 aa, Zea mays subsp. mays
  misc_feature (1)..(219): Ceres Seq. ID no. 12357884
MNSLVASARVVAVSVGYRLAPENPLPAAYKDSWTALNWAVSGADPWLSAHGDLGRVFVAGYSAGSNIAHNMAIAAGVRGLRAAEPPRVEGVILLHPSFAGEQRMEEEDDRFWQVNKRRWKAIFPGARDGLDDPRINPVVAGAPSLAKLVGERLLVCTASEDPRAPRGRAYCEAVRASCWPGKVESFESQNEGHGFFVSGHGSTQAIALMDRVVGFIVGH

SEQ ID NO: 17346 - DNA, 1504 bp, Zea mays subsp. mays
  misc_feature (1)..(1504): Ceres Seq. ID no. 12357893
atcaggcctacttggcgcgcgcgcgtctctctctgtctagcggccgagtttaacagttaaaccctagctcaccgtcgtgctcgcctccccgcgcctgctcccttcaggcactgacagttcgccgccgcggcggcgctttcgagcccacgcggaagcgcacctagtgccatggcgaagaagcggaagcacaccgacgcccaggcagagacggccggcgcagagaagccagacgactccgcaccggcgcgcccggagcgcacgctcttcggcttcaaggatccggcccccgacgccgtgcccgcctctgcggcctccagggccgcggtggcgccgtttaggaacagggagaaggtactcatcacctgctcccgccgcatcacgtacaggtatcgtcatctgatgcaggacgtgctatcgatgctcccgcacgcgaagaaggacagcaaggtcgagtcgaagcagagcaaggggaacgctctcaacgagatgctcgagctcaggagctgctccagttgtctcttcttcgagtgccgaaaacagaaggatctttacctttggatggtgaagtctcctggaggaccatcagtgaaatttctagttaatgctgttcacaccatggaggagttgaagcttacgggtaaccatctgaaagggtcacggccacttcttacattttctacaaattttgatgagcaacctcattggaagcttgtgaaggaaattataactcatatatttgctactcctaaagatcaccgtaaagcaaaacctttccatgaccatgtatttgtcttctccattgtggatggccatgtttggttccgaaactaccagatttctgttccccacaatgagattgataaagttgataaaggtggtatggataaaatgacacttattgaggttggccccaggttctgtttgaatccaatcaaaatatttggtggtagttttggtggtcctacatggtatgagaacccatactacatttcccccaatcagatccgtgcactagagaagaggcagaaggcaggcaaatatgccaagaaggtgaaggccaaggtgaggaggaagatgcacgagatggagaacacgctggagcctgatgagtttgctgagctctggaaaggggagtaggctttgatcgaccctgtcaatgtcgtgaagcacccgcaactcctgtcagcaagcgcagattttgtttacctgtgtggcagtgtctatgttgtggaagttctgtatgacaaggcctacgtttattttacataaaatcggattttagtgataacttatgcccatatgacattctctcttgtttgcttctagtggatgtggtgccaagtgttatatcacttatgtgattggtagctgagaatcatggggaagcgcgatcacagttcaaacctcaagatatcaatgtgatagccatagccgtgttccatatgtatactatgtacttcatttcagcaatggttttgtaaggaaaatagatcaagcttcattt

SEQ ID NO: 17347 - protein, 322 aa, Zea mays subsp. mays
  misc_feature (1)..(322): Ceres Seq. ID no. 12357894
MAKKRKHTDAQAETAGAEKPDDSAPARPERTLFGFKDPAPDAVPASAASRAAVAPFRNREKVLITCSRRITYRYRHLMQDVLSMLPHAKKDSKVESKQSKGNALNEMLELRSCSSCLFFECRKQKDLYLWMVKSPGGPSVKFLVNAVHTMEELKLTGNHLKGSRPLLTFSTNFDEQPHWKLVKEIITHIFATPKDHRKAKPFHDHVFVFSIVDGHVWFRNYQISVPHNEIDKVDKGGMDKMTLIEVGPRFCLNPIKIFGGSFGGPTWYENPYYISPNQIRALEKRQKAGKYAKKVKAKVRRKMHEMENTLEPDEFAELWKGE

SEQ ID NO: 17348 - protein, 245 aa, Zea mays subsp. mays
  misc_feature (1)..(245): Ceres Seq. ID no. 12357895
MQDVLSMLPHAKKDSKVESKQSKGNALNEMLELRSCSSCLFFECRKQKDLYLWMVKSPGGPSVKFLVNAVHTMEELKLTGNHLKGSRPLLTFSTNFDEQPHWKLVKEIITHIFATPKDHRKAKPFHDHVFVFSIVDGHVWFRNYQISVPHNEIDKVDKGGMDKMTLIEVGPRFCLNPIKIFGGSFGGPTWYENPYYISPNQIRALEKRQKAGKYAKKVKAKVRRKMHEMENTLEPDEFAELWKGE

SEQ ID NO: 17349 - protein, 239 aa, Zea mays subsp. mays
  misc_feature (1)..(239): Ceres Seq. ID no. 12357896
MLPHAKKDSKVESKQSKGNALNEMLELRSCSSCLFFECRKQKDLYLWMVKSPGGPSVKFLVNAVHTMEELKLTGNHLKGSRPLLTFSTNFDEQPHWKLVKEIITHIFATPKDHRKAKPFHDHVFVFSIVDGHVWFRNYQISVPHNEIDKVDKGGMDKMTLIEVGPRFCLNPIKIFGGSFGGPTWYENPYYISPNQIRALEKRQKAGKYAKKVKAKVRRKMHEMENTLEPDEFAELWKGE

SEQ ID NO: 17350 - DNA, 1677 bp, Zea mays subsp. mays
  misc_feature (1)..(1677): Ceres Seq. ID no. 12357902
actgtctccacaaacaaaattgtagagtcggagaccaacgccacgccgacatcgacagcactgatccgacaagtcgccgtttctgccctaagcacggacgctgtcggtcacactcgcctcttgttttctcccgagccccatccttccctcccggtctctccttgcgagctagtaccctacttgctccacagtgccacaccgctcgcgctggagtatgggttcgagcccgatgtggtggtcaggaccaccaccgtcgccgtggagccgcggtttagggaaatggtgggcgctggtagggccattcgtggtgaaggccgtcgggttcctgctgctcgcgggcctcttgttccgggtgctctggtcctttccgtcctctccggcgccggcgttgcagatcacaaaaggaaaatgcagtcttttcaatggggaatggataccaaacccctctggtccagcctatacaaatgcaagctgtcgatttattgacgatcaccagaactgcatgatgaatggtagacctgataaggaatatctacattggaagtggaaaccttatggatgtgatcttccaccatttgatgcagtaagatttctagattctatgagaaacaaaggttggggactaattggtgactccatcctccgtaaccaagttcagtcattgctttgccttctgtctaaggctgaagaacctgttgaggtttaccatgataacgaattcaaaaacaggagatggcacttccaatcctacaacttcacagtgtccatcgtctgggctcctttcctcatcaaatctggtatttttgagaatgaggatggcgtgtctacctctgaaatacagctccaccttgatatactcgatgctaactggacaagtcagtatgagagctttgactatattattatttctggcggacaatggtttctgaggacagcggtctactgggagaacggtgcagtggttggtggtcataattctcagaacaagaacctcgctgaacttggttttgagcacctgtatcggaaaactctacaaaacgttttcaacttcatcgtctcagcgaaacacaagccagtaattttcttcaggacctggtcacctgatcacttcgaggatggagagtggttcagcggtgggtcttgtcgcaggaaattgccctacaacaagggagagtacagagagggtaacatcgagcgtgtcatgagacagatcgagcttgagtccttcaacaaggctgtagccgcgcttaggggttcagcggacgtggatagactgagactgatggatacctacagcctctcgtccttgagaccggacggccacgttgggccttacagaacaccctatccctttgcaaggggcagcagtaaatccacgcccgtccaaaatgattgcttgcactggtgtgtaccaggccccattgatgcatggaatgatcttgttatgaagatggccctggatccatgaaaaccttatggatttgtatggtgtgctcttatggagtaagtagcagctaagtgggcacaaaaaagtgtgtccgttttggtttagctgtaaaataggagtgctagcaaatagagaaacctcagggttggctttgttgcaaagatatgtgtatgttgttttaaagctttataagtttcaactgggcagatactgccagttgttcctggttt

SEQ ID NO: 17351 - protein, 417 aa, Zea mays subsp. mays
  misc_feature (1)..(417): Ceres Seq. ID no. 12357903
MGSSPMWWSGPPPSPWSRGLGKWWALVGPFVVKAVGFLLLAGLLFRVLWSFPSSPAPALQITKGKCSLFNGEWIPNPSGPAYTNASCRFIDDHQNCMMNGRPDKEYLHWKWKPYGCDLPPFDAVRFLDSMRNKGWGLIGDSILRNQVQSLLCLLSKAEEPVEVYHDNEFKNRRWHFQSYNFTVSIVWAPFLIKSGIFENEDGVSTSEIQLHLDILDANWTSQYESFDYIIISGGQWFLRTAVYWENGAVVGGHNSQNKNLAELGFEHLYRKTLQNVFNFIVSAKHKPVIFFRTWSPDHFEDGEWFSGGSCRRKLPYNKGEYREGNIERVMRQIELESFNKAVAALRGSADVDRLRLMDTYSLSSLRPDGHVGPYRTPYPFARGSSKSTPVQNDCLHWCVPGPIDAWNDLVMKMALDP

SEQ ID NO: 17352 - protein, 412 aa, Zea mays subsp. mays
  misc_feature (1)..(412): Ceres Seq. ID no. 12357904
MWWSGPPPSPWSRGLGKWWALVGPFVVKAVGFLLLAGLLFRVLWSFPSSPAPALQITKGKCSLFNGEWIPNPSGPAYTNASCRFIDDHQNCMMNGRPDKEYLHWKWKPYGCDLPPFDAVRFLDSMRNKGWGLIGDSILRNQVQSLLCLLSKAEEPVEVYHDNEFKNRRWHFQSYNFTVSIVWAPFLIKSGIFENEDGVSTSEIQLHLDILDANWTSQYESFDYIIISGGQWFLRTAVYWENGAVVGGHNSQNKNLAELGFEHLYRKTLQNVFNFIVSAKHKPVIFFRTWSPDHFEDGEWFSGGSCRRKLPYNKGEYREGNIERVMRQIELESFNKAVAALRGSADVDRLRLMDTYSLSSLRPDGHVGPYRTPYPFARGSSKSTPVQNDCLHWCVPGPIDAWNDLVMKMALDP

SEQ ID NO: 17353 - protein, 321 aa, Zea mays subsp. mays
  misc_feature (1)..(321): Ceres Seq. ID no. 12357905
MMNGRPDKEYLHWKWKPYGCDLPPFDAVRFLDSMRNKGWGLIGDSILRNQVQSLLCLLSKAEEPVEVYHDNEFKNRRWHFQSYNFTVSIVWAPFLIKSGIFENEDGVSTSEIQLHLDILDANWTSQYESFDYIIISGGQWFLRTAVYWENGAVVGGHNSQNKNLAELGFEHLYRKTLQNVFNFIVSAKHKPVIFFRTWSPDHFEDGEWFSGGSCRRKLPYNKGEYREGNIERVMRQIELESFNKAVAALRGSADVDRLRLMDTYSLSSLRPDGHVGPYRTPYPFARGSSKSTPVQNDCLHWCVPGPIDAWNDLVMKMALDP

SEQ ID NO: 17354 - DNA, 1621 bp, Zea mays subsp. mays
  misc_feature (1)..(1621): Ceres Seq. ID no. 12357943
atactcgatttctatttctctcaatcggttctctcgttctcctacctcccttgcgctctgcgactctcttcttgtctctggtggcgacgagctgacgattgggcggccgccgccgccgacctacgccaggtgcccgagtctccacctttggaccttcaccggcgacgaacacccaccagttgacttggacagccagaactttggaaatggcaagatcaccaaaaggtaggaacctccaagctcgtcaacgtaggtcagcttcttcagatgtgcccttgaggtcctgtgagacgaaaggaacaagcaaaggaaatgatgtgtcagtgacatctgagaagaatgaatggaaaggagcaacttgcccagtttgcttggagcatccacatgatgctgttctcctcctgtgtacctctcaccacaagggctgccggccatatatgtgtggtaccaactaccgtcattccaactgccttgaacactttaaaggagcttatgcaaaggaaaaaatggctcttggtgtttcagctgagtctgcatctggccttccattatcctcaaacacactgccatcaagcaaccagccatgtgtaatggaacttgcctgccctctgtgccgtggagaggttaaaggatggactgtggttgagcctgctcgtcagtatctgaaccggaaaaggagaaattgcatgcatgatgggtgctcattccatggctcgtataaggagctttgcaagcatgtgaaatcgaagcaccctacagcaaaacctcgtgaagttgatcctgctactgcagatgagtggaaaaggtttgaatgtgagagagagcggcaggatgccatcagcactatcaggtccatgaacccaggatctgtgatcatgggggattatgtccttgagttgaatggtggtggcaacaaccatttgctctcagatggagataactttgacttaggggaaaggctcaacttcttcacatccttagatcgtactttgaatgagagaattgacctgtacgactcgtcagatggtttggatgaggggtttgacttcttggcatccctgtttacccatggcaggagaatctctactggaggctcattgagcagggcttatagaagacacagggacaggcctagacgttcaacgaattctgctgatgcttctgacattcagcatgagtcagctagcactcaaaggggacagcgtgctgttcgggctacaggcaggacttcacggcgccaccaccacctacgcgaggcagctgagagatgaaatcatttttagaggcggggtgctttttcatgctatccatgtgcaggggacgcaaaataacacaccatggtatgttgctgctctagtggtcggaggtccgtcagattcttccttttttttgtcccattgttgagacagcaaccgaggatataagattggatggagatgaggtctctgtttggcttgtgctgatgcctgcatgatgtgctctgcgatgtgcatccagttttgggatcaagcagctccacttttccggtgctgcctttgcatggattttgtgaatgcccttgccttgagtttcctttccctttctgttgatcaaaggaaacttcaaacagattgttttggcc

SEQ ID NO: 17355 - protein, 354 aa, Zea mays subsp. mays
  misc_feature (1)..(354): Ceres Seq. ID no. 12357944
MARSPKGRNLQARQRRSASSDVPLRSCETKGTSKGNDVSVTSEKNEWKGATCPVCLEHPHDAVLLLCTSHHKGCRPYMCGTNYRHSNCLEHFKGAYAKEKMALGVSAESASGLPLSSNTLPSSNQPCVMELACPLCRGEVKGWTVVEPARQYLNRKRRNCMHDGCSFHGSYKELCKHVKSKHPTAKPREVDPATADEWKRFECERERQDAISTIRSMNPGSVIMGDYVLELNGGGNNHLLSDGDNFDLGERLNFFTSLDRTLNERIDLYDSSDGLDEGFDFLASLFTHGRRISTGGSLSRAYRRHRDRPRRSTNSADASDIQHESASTQRGQRAVRATGRTSRRHHHLREAAER

SEQ ID NO: 17356 - protein, 277 aa, Zea mays subsp. mays
  misc_feature (1)..(277): Ceres Seq. ID no. 12357945
MCGTNYRHSNCLEHFKGAYAKEKMALGVSAESASGLPLSSNTLPSSNQPCVMELACPLCRGEVKGWTVVEPARQYLNRKRRNCMHDGCSFHGSYKELCKHVKSKHPTAKPREVDPATADEWKRFECERERQDAISTIRSMNPGSVIMGDYVLELNGGGNNHLLSDGDNFDLGERLNFFTSLDRTLNERIDLYDSSDGLDEGFDFLASLFTHGRRISTGGSLSRAYRRHRDRPRRSTNSADASDIQHESASTQRGQRAVRATGRTSRRHHHLREAAER

SEQ ID NO: 17357 - protein, 254 aa, Zea mays subsp. mays
  misc_feature (1)..(254): Ceres Seq. ID no. 12357946
MALGVSAESASGLPLSSNTLPSSNQPCVMELACPLCRGEVKGWTVVEPARQYLNRKRRNCMHDGCSFHGSYKELCKHVKSKHPTAKPREVDPATADEWKRFECERERQDAISTIRSMNPGSVIMGDYVLELNGGGNNHLLSDGDNFDLGERLNFFTSLDRTLNERIDLYDSSDGLDEGFDFLASLFTHGRRISTGGSLSRAYRRHRDRPRRSTNSADASDIQHESASTQRGQRAVRATGRTSRRHHHLREAAER

SEQ ID NO: 17358 - DNA, 1285 bp, Zea mays subsp. mays
  misc_feature (1)..(1285): Ceres Seq. ID no. 12357949
ctggtacttggcaatcctctctagctagctcagcatccgacgacgggacttgcacgatggatgctgctctgctcgtcgtctccctcgtcctctgcctgctggcggctgcccctgcggcgtccgcggcgcgggccttcttcgtcttcggcgactccctcgtcgacaacggcaacaacaactacctgctgaccacggcgcgcgccgacgcgcccccctacggcatcgacttccccacgcaccaagccacgggccgcttctccaacgggcttaacatccccgacatcatcagcgagcacctcggggccgaacctgcgctgccgtacctgagccccgagctccgaggggagaagctgctcgtcggcgccaacttcgcgtcggccggcgtcgggatcctcaacgacacaggaatacagtttgtgaacatcatcaggatcggcgaccagctgcagtacttccgggagtaccagcggaagctgcgagccctcgtcggcgagccgcaggcgacgcagctcgtgaaccaggccctcgtgctcatcacgctcggcggcaacgacttcgtgaacaactactacctggtgcccatgtccgtgcggtcgcgccagtacgcactcccggactacgtccgcttcatcgtctccgagtacaggaagatcctctcgaggctgtacgagctgggcgcgcggcgcgtgatcgtgacggggacggggccgctggggtgcgtcccggccgagctggcgctgcacagccagaacggcgagtgcgcggcggagctgacgcgcgccgtgaacctcttcaacccgcagatggtggacatggtgcgcggcatcaaccgcgccatcggcgccgacgtcttcgtcaccgccaacacctaccgcatgaacttcgactacctcgcaaacccgcaggacttcgggttcacgaacgtgcaggtggcgtgctgcggccagggccccgtacaacgggatcgggctgtgcacggcggcgtcgaacgtgtgcgacaaccgcgacgtgttcgcgttctgggacgcgttccaccccacggagagggcaaaccgcatcatcgtcgcccagttcatgcacggcgacacggactacatgcaccccatgaacctcagcaccatcctcgccacggaccaggagggcctctagactatagcttgatcagccggacacgattatacgtacatgcgtgatgtgtctcacgtgcctagcacgttagccatgtgttggatgatggcagcccaatttgccaataatattcgtgcctcgatccaagtttcacctt

SEQ ID NO: 17359 - protein, 396 aa, Zea mays subsp. mays
  misc_feature (1)..(396): Ceres Seq. ID no. 12357950
GTWQSSLASSASDDGTCTMDAALLVVSLVLCLLAAAPAASAARAFFVFGDSLVDNGNNNYLLTTARADAPPYGIDFPTHQATGRFSNGLNIPDIISEHLGAEPALPYLSPELRGEKLLVGANFASAGVGILNDTGIQFVNIIRIGDQLQYFREYQRKLRALVGEPQATQLVNQALVLITLGGNDFVNNYYLVPMSVRSRQYALPDYVRFIVSEYRKILSRLYELGARRVIVTGTGPLGCVPAELALHSQNGECAAELTRAVNLFNPQMVDMVRGINRAIGADVFVTANTYRMNFDYLANPQDFGFTNVQVACCGQGPVQRDRAVHGGVERVRQPRRVRVLGRVPPHGEGKPHHRRPVHARRHGLHAPHEPQHHPRHGPGGPLDYSLISRTRLYVHA

SEQ ID NO: 17360 - protein, 378 aa, Zea mays subsp. mays
  misc_feature (1)..(378): Ceres Seq. ID no. 12357951
MDAALLVVSLVLCLLAAAPAASAARAFFVFGDSLVDNGNNNYLLTTARADAPPYGIDFPTHQATGRFSNGLNIPDIISEHLGAEPALPYLSPELRGEKLLVGANFASAGVGILNDTGIQFVNIIRIGDQLQYFREYQRKLRALVGEPQATQLVNQALVLITLGGNDFVNNYYLVPMSVRSRQYALPDYVRFIVSEYRKILSRLYELGARRVIVTGTGPLGCVPAELALHSQNGECAAELTRAVNLFNPQMVDMVRGINRAIGADVFVTANTYRMNFDYLANPQDFGFTNVQVACCGQGPVQRDRAVHGGVERVRQPRRVRVLGRVPPHGEGKPHHRRPVHARRHGLHAPHEPQHHPRHGPGGPLDYSLISRTRLYVHA

SEQ ID NO: 17361 - protein, 203 aa, Zea mays subsp. mays
  misc_feature (1)..(203): Ceres Seq. ID no. 12357952
MSVRSRQYALPDYVRFIVSEYRKILSRLYELGARRVIVTGTGPLGCVPAELALHSQNGECAAELTRAVNLFNPQMVDMVRGINRAIGADVFVTANTYRMNFDYLANPQDFGFTNVQVACCGQGPVQRDRAVHGGVERVRQPRRVRVLGRVPPHGEGKPHHRRPVHARRHGLHAPHEPQHHPRHGPGGPLDYSLISRTRLYVHA

SEQ ID NO: 17362 - DNA, 1432 bp, Zea mays subsp. mays
  misc_feature (1)..(1432): Ceres Seq. ID no. 12357962
gcaggttccagtattccaccacgcggcgtcgcctgccgaaccccgaaccttctcgaggtcgaggcccctcccctttcgccaggaggtgcgcacggcacgactaacctccacactccccactagcttttcttcccagtttgctccgattttgattccatgaaaacaatgagcaggcgcaacagccgtaccatctatgtaggcaatctccctggggacatccgtgagagggaggttgaggatctcttctacaagtatggccgtattttggatattgacttgaaaatacctccgagacctcctggatacgcattcgttgagtttgaggatccacgtgatgctgatgatgcaatttatggccgtgatgggtataactttgatggctacaggttgagggttgaattagctcatggtggcagaggccagtcttattcttatgatcgttcaagcagctatagcagtgcatgccgtggaggtgtttctaggcgctctgatttccgtgttatggtcactggtttaccctcatcggcatcgtggcaagatctgaaggaccacatgcggcgcgctggtgatgtctgtttctctgatgtataccgtgaggctggagaaactattggaattgtggattatacaaattatgacgatatgaaatacgcgattaggaagcttgatgactcacagttcaggaatgcattttcaagagcatatatcagggtgagggagtatgatgctagatcacgaagcagaagccgtagccactcgtactctagaacccccagctacagcaggagcaggagtccaaaatctgtttctcagtcaccctcatctgtggatgaaagatcgctatcaagatctcgatccccaatttcttctccttctcatgcaagatatgcgacaagccctaggagcagaagcgcatcccgttctcggtctcctgttagatccgattgaactttgagagcccttgaagcagtgagcagccccagggagaagaaaggaacttgagagtatgccgtgccatcacaatggtccgagtgattatgctgttgccactgctccctcacatttaagaggtttcctcttatttagacggcgcatttaattaacattatcttgctaaagagagacttatgcgtagtctacttgtgtactcgttcgtttgtcctcatgttcttggcttcaggaactctggttttttatcattgtacccatagtaaaacctagatgtagttggggtatgccgtatgcgtctatattcggttggtcgaatgtaaatctggatgcatatatgcatctgtttggtttcatttaggcctttccttggtttcgtgattaatgacaacataagcttattgctgtgatcaaagtatattttgtanaggtaattaaagctagtcncncaataatggagattgcttagacaacgtatggtttt

SEQ ID NO: 17363 - protein, 263 aa, Zea mays subsp. mays
  misc_feature (1)..(263): Ceres Seq. ID no. 12357963
MKTMSRRNSRTIYVGNLPGDIREREVEDLFYKYGRILDIDLKIPPRPPGYAFVEFEDPRDADDAIYGRDGYNFDGYRLRVELAHGGRGQSYSYDRSSSYSSACRGGVSRRSDFRVMVTGLPSSASWQDLKDHMRRAGDVCFSDVYREAGETIGIVDYTNYDDMKYAIRKLDDSQFRNAFSRAYIRVREYDARSRSRSRSHSYSRTPSYSRSRSPKSVSQSPSSVDERSLSRSRSPISSPSHARYATSPRSRSASRSRSPVRSD

SEQ ID NO: 17364 - protein, 260 aa, Zea mays subsp. mays
  misc_feature (1)..(260): Ceres Seq. ID no. 12357964
MSRRNSRTIYVGNLPGDIREREVEDLFYKYGRILDIDLKIPPRPPGYAFVEFEDPRDADDAIYGRDGYNFDGYRLRVELAHGGRGQSYSYDRSSSYSSACRGGVSRRSDFRVMVTGLPSSASWQDLKDHMRRAGDVCFSDVYREAGETIGIVDYTNYDDMKYAIRKLDDSQFRNAFSRAYIRVREYDARSRSRSRSHSYSRTPSYSRSRSPKSVSQSPSSVDERSLSRSRSPISSPSHARYATSPRSRSASRSRSPVRSD

SEQ ID NO: 17365 - protein, 148 aa, Zea mays subsp. mays
  misc_feature (1)..(148): Ceres Seq. ID no. 12357965
MVTGLPSSASWQDLKDHMRRAGDVCFSDVYREAGETIGIVDYTNYDDMKYAIRKLDDSQFRNAFSRAYIRVREYDARSRSRSRSHSYSRTPSYSRSRSPKSVSQSPSSVDERSLSRSRSPISSPSHARYATSPRSRSASRSRSPVRSD

SEQ ID NO: 17366 - DNA, 868 bp, Zea mays subsp. mays
  misc_feature (1)..(868): Ceres Seq. ID no. 12358010
gtattgcgggaactgaaagcaaaccaaaaaagaaagagagggggagagacacagaggcctcactccacacactgtcttgtctctcagtcccagagctttcttggatcgcgaggaatccactggaaattttgcaattgtagtagagaactgtatcgtccgacgaaggtgcatggtgttggccatgggtcacggcagggaacagagacgagcaggtcggcgctctccccccagctcattgatcctgtcctcgctataaggtagtcctgcggtggcctccgaatttcactcaatcgaacacgacatgaagcggccacgcggcgccagtccccctctggctgcgatgaccaatccgaacgatgatggttacggcgtggtcgggatggaggcggacgcagacgcggacgcggacgaggagatgatggcgtgcggcggcggcggggagaagaagcggcgcctgagctccgagcaggtgcgcgcgctggagcggagcttcgaggtggagaacaagctggagccggagcgcaaggcgcggctggcgcgcgacctcggcctgcagccgcgccaggtcgccgtctggttccagaaccgccgcgcccgctggaagaccaagcagctggagcgcgactactccgcgctccgccagtcctacgacgcgctgcggcacgaccacgacgcgctgcgccgcgacaaggacgccctcctcgccgagatcaaggagctcaaggcgaagctcggggacgaggaggcagcggcgagcttcacgtcggtcaaggcggagccggcggcctcggacgggcctccccccgtaggggtggggtcgtccgagagtgactccagcgcggtgctgaacgacgcggacccgcccgtg

SEQ ID NO: 17367 - protein, 189 aa, Zea mays subsp. mays
  misc_feature (1)..(189): Ceres Seq. ID no. 12358011
MKRPRGASPPLAAMTNPNDDGYGVVGMEADADADADEEMMACGGGGEKKRRLSSEQVRALERSFEVENKLEPERKARLARDLGLQPRQVAVWFQNRRARWKTKQLERDYSALRQSYDALRHDHDALRRDKDALLAEIKELKAKLGDEEAAASFTSVKAEPAASDGPPPVGVGSSESDSSAVLNDADPPV

SEQ ID NO: 17368 - protein, 176 aa, Zea mays subsp. mays
  misc_feature (1)..(176): Ceres Seq. ID no. 12358012
MTNPNDDGYGVVGMEADADADADEEMMACGGGGEKKRRLSSEQVRALERSFEVENKLEPERKARLARDLGLQPRQVAVWFQNRRARWKTKQLERDYSALRQSYDALRHDHDALRRDKDALLAEIKELKAKLGDEEAAASFTSVKAEPAASDGPPPVGVGSSESDSSAVLNDADPPV

SEQ ID NO: 17369 - protein, 163 aa, Zea mays subsp. mays
  misc_feature (1)..(163): Ceres Seq. ID no. 12358013
MEADADADADEEMMACGGGGEKKRRLSSEQVRALERSFEVENKLEPERKARLARDLGLQPRQVAVWFQNRRARWKTKQLERDYSALRQSYDALRHDHDALRRDKDALLAEIKELKAKLGDEEAAASFTSVKAEPAASDGPPPVGVGSSESDSSAVLNDADPPV

SEQ ID NO: 17370 - DNA, 699 bp, Zea mays subsp. mays
  misc_feature (1)..(699): Ceres Seq. ID no. 12358014
aaaaaagtccccattagtaaggcaaaagccgcaaaggcttatccttccgagtctccaccaacgacaatggcgagcgctcccgccggctttgcccccaccgtcgctgcttccacaagcttcggcttcactatcgtggcatgccccttcccctcgcgcacgcatcttccagcggcctcctccgttggggttcgcaatcagcagcgcgcgtccactgccaccgcctgcctgccgccgccgagtacctcccatggcgccgccaccaggctgtacgtcagcggtctttcgttccgcacaaccgaacggagcctccgggacgcgttcgagaagtttggtgaccttacggaagtttgtctcgtgatggatagagtagcgaagcgaccgagaggtttcgctttcctttcttacaccggggaggaggaagccaggggcgccatggaagggatgcacgggaagttcctggatggcagagtgatctttgtcgaggttgcgaaacgaagagttgaagcctgaaggatcgtgcccaaatactgctcaaaaacttgattgttggttccagcaaagtccctggtgagacacacactgatgcaggcaaagtttagatgtgaacagaggaaccgaagaaaccttagcagcattcggtcgtgtagctgccatttcattgttttacaaaacaacattcgtaatttacatatataggtc

SEQ ID NO: 17371 - protein, 169 aa, Zea mays subsp. mays
  misc_feature (1)..(169): Ceres Seq. ID no. 12358015
KKVPISKAKAAKAYPSESPPTTMASAPAGFAPTVAASTSFGFTIVACPFPSRTHLPAASSVGVRNQQRASTATACLPPPSTSHGAATRLYVSGLSFRTTERSLRDAFEKFGDLTEVCLVMDRVAKRPRGFAFLSYTGEEEARGAMEGMHGKFLDGRVIFVEVAKRRVEA

SEQ ID NO: 17372 - protein, 147 aa, Zea mays subsp. mays
  misc_feature (1)..(147): Ceres Seq. ID no. 12358016
MASAPAGFAPTVAASTSFGFTIVACPFPSRTHLPAASSVGVRNQQRASTATACLPPPSTSHGAATRLYVSGLSFRTTERSLRDAFEKFGDLTEVCLVMDRVAKRPRGFAFLSYTGEEEARGAMEGMHGKFLDGRVIFVEVAKRRVEA

SEQ ID NO: 17373 - protein, 118 aa, Zea mays subsp. mays
  misc_feature (1)..(118): Ceres Seq. ID no. 12358017
KKSPLVRQKPQRLILPSLHQRQWRALPPALPPPSLLPQASASLSWHAPSPRARIFQRPPPLGFAISSARPLPPPACRRRVPPMAPPPGCTSAVFRSAQPNGASGTRSRSLVTLRKFVS

SEQ ID NO: 17374 - DNA, 701 bp, Zea mays subsp. mays
  misc_feature (1)..(701): Ceres Seq. ID no. 12358026
ctcttatcatggttagcaatcccgcaattcagttcatgctatatgagactcttctgaagaaattgaagaagagacgagcctctaatttcaagggagctgatggattgactgctcttgaaatttttcttcttggtgctgttgcgaaacttggtgcaaccgtcgttacgtatccccttctagttgttaaggcaagacttcaggcaaagcacatgattaacgatgacaagaggcatcgctacaaaggtacacttgatgcgttcacaaagatggtacgatatgagggtctgtcagggatgtacaaaggaatgggcacaaaaattgtgcaaagtgtttttgcttctgctttgctttttatgattaaggaggagctggtgaagggtgctcgactattggtaactggtaacactagtctggttaagaaactaccatcaaagtcatcaagatgaactacgggcatcgcaagcgttagtatatgttcccaaaaagccatttattatccgcataaacagtaaaacaaggtcgacaagctatagagctcgcctctgctttggagatgtcaactgtaggttacacaatagccagtatgattcacgtagggaccaaagactatgttggatagatatttgtatcattcatgtaaaatgtatgtggaagattgaaacagaagaaaataaataagtatgataatttgaacttcggcc

SEQ ID NO: 17375 - protein, 147 aa, Zea mays subsp. mays
  misc_feature (1)..(147): Ceres Seq. ID no. 12358027
LIMVSNPAIQFMLYETLLKKLKKRRASNFKGADGLTALEIFLLGAVAKLGATVVTYPLLVVKARLQAKHMINDDKRHRYKGTLDAFTKMVRYEGLSGMYKGMGTKIVQSVFASALLFMIKEELVKGARLLVTGNTSLVKKLPSKSSR

SEQ ID NO: 17376 - protein, 145 aa, Zea mays subsp. mays
  misc_feature (1)..(145): Ceres Seq. ID no. 12358028
MVSNPAIQFMLYETLLKKLKKRRASNFKGADGLTALEIFLLGAVAKLGATVVTYPLLVVKARLQAKHMINDDKRHRYKGTLDAFTKMVRYEGLSGMYKGMGTKIVQSVFASALLFMIKEELVKGARLLVTGNTSLVKKLPSKSSR

SEQ ID NO: 17377 - protein, 136 aa, Zea mays subsp. mays
  misc_feature (1)..(136): Ceres Seq. ID no. 12358029
MLYETLLKKLKKRRASNFKGADGLTALEIFLLGAVAKLGATVVTYPLLVVKARLQAKHMINDDKRHRYKGTLDAFTKMVRYEGLSGMYKGMGTKIVQSVFASALLFMIKEELVKGARLLVTGNTSLVKKLPSKSSR

SEQ ID NO: 17378 - DNA, 842 bp, Zea mays subsp. mays
  misc_feature (1)..(842): Ceres Seq. ID no. 12358082
aacatcatcagctcgcgttgcgtgctcggcccgcctaatcctctttctttagctcaagaccggcgactaaatttggcgccagccggcagcagggggtataagtagtcgccgccgccgtcttcctcgcacctccccgctccgctctcccttgtcgagttctcagcaccggccgatccatcctcctccgcctccctcggttcggcctctggcctgcacaccatgaactctcgcttccggagcctctggagagccatggctggggcggcgagcagcggcaaggacacggtgcgcctgcggctgcacctgctcccggaccgccacgacgactgcgtgctcgtgtcggaggcgcccctgagcagcgacaagggcggggagttcttcatcgacatggacaggcaggcgccctccgccacggcggcggagcactgcgcggcgagcctgggcgccgcgtgcgccggcggcggcttcgtcatgagctgcagggtggagggggaggcgaggagcagcaggccgttcgtgcagcttgccatgcggcatgtcacgtgcatggaggacgccgccatgttcgtcgcgctcgccgcggccgtcgacctcagcgtcaaggcgtgccgcccgttccgcaggaaaccgaacaagaaggccgcctngccgtcgcccgaccacctcgagctcgacacctaggaacgcagaacaggaaggccccgccgactagcacccatggccgcccatggatccatctaactcgacctgtaaattcacttaatttcaagagctggactgaatcgtttgccacaatcaaaactctgttgtttgactggcctcagcagttagtacatgtttgg

SEQ ID NO: 17379 - protein, 153 aa, Zea mays subsp. mays
  misc_feature (1)..(153): Ceres Seq. ID no. 12358083
  misc_feature (143)..(143): Xaa is any aa, unknown or other
MNSRFRSLWRAMAGAASSGKDTVRLRLHLLPDRHDDCVLVSEAPLSSDKGGEFFIDMDRQAPSATAAEHCAASLGAACAGGGFVMSCRVEGEARSSRPFVQLAMRHVTCMEDAAMFVALAAAVDLSVKACRPFRRKPNKKAAXPSPDHLELDT

SEQ ID NO: 17380 - protein, 142 aa, Zea mays subsp. mays
  misc_feature (1)..(142): Ceres Seq. ID no. 12358084
  misc_feature (132)..(132): Xaa is any aa, unknown or other
MAGAASSGKDTVRLRLHLLPDRHDDCVLVSEAPLSSDKGGEFFIDMDRQAPSATAAEHCAASLGAACAGGGFVMSCRVEGEARSSRPFVQLAMRHVTCMEDAAMFVALAAAVDLSVKACRPFRRKPNKKAAXPSPDHLELDT

SEQ ID NO: 17381 - protein, 97 aa, Zea mays subsp. mays
  misc_feature (1)..(97): Ceres Seq. ID no. 12358085
  misc_feature (87)..(87): Xaa is any aa, unknown or other
MDRQAPSATAAEHCAASLGAACAGGGFVMSCRVEGEARSSRPFVQLAMRHVTCMEDAAMFVALAAAVDLSVKACRPFRRKPNKKAAXPSPDHLELDT

SEQ ID NO: 17382 - DNA, 625 bp, Zea mays subsp. mays
  misc_feature (1)..(625): Ceres Seq. ID no. 12358088
attcgttgcagttggcccaaaaatacttgcccggcccaatcgaatctctgaccgatataccgaaccctagcccagttgttccgccgagcgaacgatccagaagcagaagccaccgatcggcgtgccgcgtgcgtgaggcgatcggagcatcccgtcccgaggaggaagacaaccggcgacgcggggggaacatggggaagacgccggtgcggatgaaggcggtcgtgtacgcgctgtcgcccttccagcagaaggtaatgccggggctgtggaaggacatcaccaccaagatccaccacaaggtcaccgagaactggatctccgccacgctcctcctcacccccgtcgtcggcacctaccaatacgccatgtggtacaaggagcaggagaagctttcccacagatattaaatgcgctgcccttgacagacagcactcggagttttcatgatgggtttcataatcctcccatgatgatttaacatttgtttgatcaatttcagttcaacgccttttcatcgttccatatgcatatatggtatccgtgtctggcaaacttattttgaggcttgctaaatatgtaccttttgtctctgaagttgttaaataaagcaaattaacttcct

SEQ ID NO: 17383 - protein, 135 aa, Zea mays subsp. mays
  misc_feature (1)..(135): Ceres Seq. ID no. 12358089
SLQLAQKYLPGPIESLTDIPNPSPVVPPSERSRSRSHRSACRVREAIGASRPEEEDNRRRGGNMGKTPVRMKAVVYALSPFQQKVMPGLWKDITTKIHHKVTENWISATLLLTPVVGTYQYAMWYKEQEKLSHRY

SEQ ID NO: 17384 - protein, 72 aa, Zea mays subsp. mays; identical to SEQ ID NO: 14412
  misc_feature (1)..(72): Ceres Seq. ID no. 12358090

SEQ ID NO: 17385 - DNA, 1563 bp, Zea mays subsp. mays
  misc_feature (1)..(1563): Ceres Seq. ID no. 12358091
accttcctccacggctccaccatcccctcccctgccctgcccccaccgccccgcttccttccgccttgctccgttgcttcctcccaccacagtccactccactcgccggccctgcagctcagtatttgactgagactggtggtggagctgctagcagcgagcctgctacttcctggtcctgacggtgcgttcagacctcagaccagtgccgacgacgagctgtgaggagagggcaaggaagcaagcctgtgaggaaggcggcgatggagaggtacgaggtgatcaaggacataggatcgggcaacttcggggtggccaagctggtccgggacgtcaggaccaaggagctcttcgccgtcaagttcatcgagcgggggatgaagattgatgagaatgtccaaagggagatcatgaaccacaggtcactgaggcatccaaacatagttaaatttaaggaggttgtgctaactcccacacatttggccatagttatggaatatgctgctggtggtgagctatttgaaaggatctgtaatgctggaagatttagtgaggatgaggcgagatttttcttccaacaactgatttcaggagttagttattgccactcaatgcaaatatgccatagagatttgaaactagaaaacactctcctggatgatagtatagcacctcggctaaagatatgtgattttggttactccaagtcctctgtgttgcactctcaaccaaaatcaactgtcgggacaccagcttacattgctcctgaggtccttgctagaaaggaatatgatggaaaggtcgccgatgtttggtcatgtggagttactctgtatgtgatgcttgttggtgcctatccctttgaggaccccgacgaaccgaagaatttccgcaagacgcttactcggattatcagcgtccagtacgcggttcctgattttgtccgagtttcaatggagtgcaggcatctgctgtctcggatctttgtggcgaaacctgagcaacggataaccatcccagagatcaagaaccacccatggttcttgaagaacctgcccatcgagatgaccgacgagtaccagatgaacctacagctagtcgacatgaatgtcccctcgcaaagcctggaggagatcatgtccatcatactggaggcccggaagcccggcgacgggctgaagcatgcgggacagctccccggccttgggagcatggagctggatgacattgatgttgacgacatagacgttgaggacagtggcgactttgtatgtgccttgtgacgcggttcaggctgtccggcaccgttgctgcggtggactctcccccactctcctggtctttgtgtcttgctgttattccatgttgtttgtttcagcgagctccgagctcccattttgttgttgtaatatcacatgttttgtgtaaccaaggtagtgacgctgtggataaataatagacgttatgtgttgtattcttgctgaattgttgttcagctccttctgtttgccctgtatgaactgggcagtttcatgagtaccacaatgtgtatgttgatggccc

SEQ ID NO: 17386 - protein, 339 aa, Zea mays subsp. mays; identical to SEQ ID NO: 15008
  misc_feature (1)..(339): Ceres Seq. ID no. 12358092

SEQ ID NO: 17387 - protein, 301 aa, Zea mays subsp. mays; identical to SEQ ID NO: 15009
  misc_feature (1)..(301): Ceres Seq. ID no. 12358093

SEQ ID NO: 17388 - protein, 290 aa, Zea mays subsp. mays; identical to SEQ ID NO: 15010
  misc_feature (1)..(290): Ceres Seq. ID no. 12358094

SEQ ID NO: 17389 - DNA, 1316 bp, Zea mays subsp. mays
  misc_feature (1)..(1316): Ceres Seq. ID no. 12358113
gtgtgccccgtctcggaacagcgcggaccaccagagcgtgcgcgtccgtgccccacccctccctctctatccatggcggtcccccgcgggtgcctcgggctccccctggtcgccgtgctcctcgcgtccctctgccgcggccaggcggcggtgagggagctcaaggtcgggtactacgccgagacgtgcccggaggccgaggacatcgtccgtgagaccatggcgcgcgcgcgcgcacgcgaggcccgcagcgtcgcctccgtcatgcgcctccagttccacgactgcttcgtcaacgggtgcgacggctcggtgctgatggacgccacgccgacgatgcccggcgagaaggatgcgctctccaacatcaactccctgcgctcgttcgaggtcgtcgacgagatcaaggacgcgctggaggagcgctgccccggagtggtctcctgcgccgacatcgtcatcattgccgcccgcgacgccgtcgtcctgaccggtgggcctaactgggaggtgcggctcgggcgcgaggacagcatgacggcgagccaggaggacgcggacaacatcatgccgagcccgcgcgcaaacgcgagcgctctcatccggctcttcgcggggctcaacctcagcgtcaccgacctggtcgcgctctcgggctcgcactccatcggcgaggcccgctgcttctccatcgtcttccgcctctacaaccagtctggatccggccgccccgacccgcacatggacaccgcctaccgccgctcgctcgacgcactctgccccaagggcggcgacgaggaggtcacgggaggcctggacgccaccccacgcatcttcgacaaccagtacttcgaggacctcgtcgcgctccgcggcttcctcaactccgaccagacgctcttctctgacaacaccaggacccgtcgggtcgtcgagcggctcagcaaggaccaggacgccttcttcagggccttcatcgaggggatgataaagatgggggagctccaaaaccccaggaaaggggagatacggcgcaactgtcgcgttgctaacaactcgccgtggcaaccaaggacggggatggcgtccggacagtcgacatctgagctccggtgatgaggttggtgtttcagaagaaatcgagccctgatatggtactaatatgttgacatgcattgttgtttttttggtcgtgtgtaagttttgcacctacctatggctgtggtgcccgagctgcgctcattgctgacgtggggaataattgagacattgtgccttagctccaataacgttcaatatatttatcctttatatcg

SEQ ID NO: 17390 - protein, 371 aa, Zea mays subsp. mays
  misc_feature (1)..(371): Ceres Seq. ID no. 12358114
VCPVSEQRGPPERARPCPTPPSLSMAVPRGCLGLPLVAVLLASLCRGQAAVRELKVGYYAETCPEAEDIVRETMARARAREARSVASVMRLQFHDCFVNGCDGSVLMDATPTMPGEKDALSNINSLRSFEVVDEIKDALEERCPGVVSCADIVIIAARDAVVLTGGPNWEVRLGREDSMTASQEDADNIMPSPRANASALIRLFAGLNLSVTDLVALSGSHSIGEARCFSIVFRLYNQSGSGRPDPHMDTAYRRSLDALCPKGGDEEVTGGLDATPRIFDNQYFEDLVALRGFLNSDQTLFSDNTRTRRVVERLSKDQDAFFRAFIEGMIKMGELQNPRKGEIRRNCRVANNSPWQPRTGMASGQSTSELR

SEQ ID NO: 17391 - protein, 347 aa, Zea mays subsp. mays
  misc_feature (1)..(347): Ceres Seq. ID no. 12358115
MAVPRGCLGLPLVAVLLASLCRGQAAVRELKVGYYAETCPEAEDIVRETMARARAREARSVASVMRLQFHDCFVNGCDGSVLMDATPTMPGEKDALSNINSLRSFEVVDEIKDALEERCPGVVSCADIVIIAARDAVVLTGGPNWEVRLGREDSMTASQEDADNIMPSPRANASALIRLFAGLNLSVTDLVALSGSHSIGEARCFSIVFRLYNQSGSGRPDPHMDTAYRRSLDALCPKGGDEEVTGGLDATPRIFDNQYFEDLVALRGFLNSDQTLFSDNTRTRRVVERLSKDQDAFFRAFIEGMIKMGELQNPRKGEIRRNCRVANNSPWQPRTGMASGQSTSELR

SEQ ID NO: 17392 - protein, 298 aa, Zea mays subsp. mays
  misc_feature (1)..(298): Ceres Seq. ID no. 12358116
MARARAREARSVASVMRLQFHDCFVNGCDGSVLMDATPTMPGEKDALSNINSLRSFEVVDEIKDALEERCPGVVSCADIVIIAARDAVVLTGGPNWEVRLGREDSMTASQEDADNIMPSPRANASALIRLFAGLNLSVTDLVALSGSHSIGEARCFSIVFRLYNQSGSGRPDPHMDTAYRRSLDALCPKGGDEEVTGGLDATPRIFDNQYFEDLVALRGFLNSDQTLFSDNTRTRRVVERLSKDQDAFFRAFIEGMIKMGELQNPRKGEIRRNCRVANNSPWQPRTGMASGQSTSELR

SEQ ID NO: 17393 - DNA, 2419 bp, Zea mays subsp. mays
  misc_feature (1)..(2419): Ceres Seq. ID no. 12358117
atgtgggctcatctcttccttatcgacgctgtggccgcccagccgcccacgttgcctcctccctgagacaatccccacgccaccgcgcaccggagacgaacctgaggagagaaaaatctgcgcccgtcagtgtgctcgcctacttctacgctccgctcgttcccccaaatagttcctcggcttcgctcccttcccctccctgctccggctccggtttgcacacagtaagaaaagatggcgctgccatccatgagtcttgcggcaaagggtgtgcttcccttctcagcacgtacctcgagtggtgtcacacaaaggccggtgtcagtgaccgcttccttggagcacaaaaccagcgatgccagaaggaagttcctaaaacttgcgcttgggaaccttggagttggactgcccaccttgttgggcgctaagaaagctctcgctgatgagcaaggcgtctcgtcctcgaggatgtcttattcgaggttccttgagtatcttgacaaggatagagtgaagaaggttgatttgtttgagaatgggacaattgctattgtggaggccatttctcctgagcttggtaaccgcatgcaaagagtccgtgtgcagcttcctggtctaagccaggagcttcttcagaagttgagggagaagaacatcgattttgctgctcacagcaaccaggaagactctggttctcttctgttcaaccttattggaaatttggcattcccgcttatccttatcggtggtctgtttttactttcaagaagggcacagggtggcctcggtggacccaatggtcctggctttccccttggttttggtcaatctagggccaagtttcagatggaacccaacactggtgttacatttgatgatgttgctggtgtcgatgaagcgaagcaagacttcatggaagtggttgagttcttgaagaaacccgaaaggttcactgctgttggtgctcgcattcctaagggtgttctgcttgtcggtcctcctgggacgggtaaaactttgcttgccaaggcaattgcaggagaggctggcgtgccatttttctcaatttcaggttctgagtttgtggagatgtttgttggtgttggagcttccagagttcgtgaccttttcaagaaggccaaggagaatgctccttgcatagtgtttgttgatgaaattgatgctgttggaaggcaaagaggtacaggtattggtggtggaaatgatgaaagggagcagactctcaatcaactactaactgagatggatggtttcgagggcaacactggaattattgttattgctgccactaaccgggctgacatcttggattccgctttacttagacctgggcgttttgatagacaggtgtctgtcgacgttcctgatgtacgtggaaggacagagattctaaaagtgcatggtagcaacaagaagtttgattctgatgtttctcttgatgtcatagcaatgagaacacctgggttcagcggagcagacttggcaaaccttctgaatgaagcagccattctggctggaagacggggaaggacagcaatttcttcaaaagagattgatgattctattgacagaattgtagctggtatggaagggactgtgatgacagactggaagagcaaaagtcttgttgcttaccatgaagttgggcatgcaatttgcggaactttgacgcctggccatgatcctgtccaaaaggttaccttagttccaaggggtcaagctcgtggtcttacatggtttatcccgatggatgacccaacactcatctccaggcagcaactttttgccagaattgttggcggccttggtggtagagctgctgaggaggtcatatttggagagcctgaggtgaccactggagctgctggtgacttgcagcaaattactggcttagccaagcagatggttgtgacattcggtatgtctgaaattggtccatggtctctgatggagggtggagcgcagagtggggacgtcatcatgagaatgatggcaaggaactccatgtcagagaagctcgcggaggacattgattcggccgtgaagcagttgtcggatgaggcctacgagatcgctttgaggcacattagaaacaacagggaggccattgacaaaatcgttgaggtgctcattgagaaggagacagtgaccggagacgagttccgggcgatcctttctgagtttgccgagatccctgttgagaaccgggttcccccagccacaccggcggccgcgctcccagcctaaaccctagccttgtaggggaggattttcttgttgtatggtgttcatattttggattcttggtgtacactaactctactaaatctgccggattttcggtacacgacatgtaagatgtaacttactcatggtgaattaatagtaaaatgtaatt

SEQ ID NO: 17394 - protein, 677 aa, Zea mays subsp. mays
  misc_feature (1)..(677): Ceres Seq. ID no. 12358118
MALPSMSLAAKGVLPFSARTSSGVTQRPVSVTASLEHKTSDARRKFLKLALGNLGVGLPTLLGAKKALADEQGVSSSRMSYSRFLEYLDKDRVKKVDLFENGTIAIVEAISPELGNRMQRVRVQLPGLSQELLQKLREKNIDFAAHSNQEDSGSLLFNLIGNLAFPLILIGGLFLLSRRAQGGLGGPNGPGFPLGFGQSRAKFQMEPNTGVTFDDVAGVDEAKQDFMEVVEFLKKPERFTAVGARIPKGVLLVGPPGTGKTLLAKAIAGEAGVPFFSISGSEFVEMFVGVGASRVRDLFKKAKENAPCIVFVDEIDAVGRQRGTGIGGGNDEREQTLNQLLTEMDGFEGNTGIIVIAATNRADILDSALLRPGRFDRQVSVDVPDVRGRTEILKVHGSNKKFDSDVSLDVIAMRTPGFSGADLANLLNEAAILAGRRGRTAISSKEIDDSIDRIVAGMEGTVMTDWKSKSLVAYHEVGHAICGTLTPGHDPVQKVTLVPRGQARGLTWFIPMDDPTLISRQQLFARIVGGLGGRAAEEVIFGEPEVTTGAAGDLQQITGLAKQMVVTFGMSEIGPWSLMEGGAQSGDVIMRMMARNSMSEKLAEDIDSAVKQLSDEAYEIALRHIRNNREAIDKIVEVLIEKETVTGDEFRAILSEFAEIPVENRVPPATPAAALPA

SEQ ID NO: 17395 - protein, 672 aa, Zea mays subsp. mays
  misc_feature (1)..(672): Ceres Seq. ID no. 12358119
MSLAAKGVLPFSARTSSGVTQRPVSVTASLEHKTSDARRKFLKLALGNLGVGLPTLLGAKKALADEQGVSSSRMSYSRFLEYLDKDRVKKVDLFENGTIAIVEAISPELGNRMQRVRVQLPGLSQELLQKLREKNIDFAAHSNQEDSGSLLFNLIGNLAFPLILIGGLFLLSRRAQGGLGGPNGPGFPLGFGQSRAKFQMEPNTGVTFDDVAGVDEAKQDFMEVVEFLKKPERFTAVGARIPKGVLLVGPPGTGKTLLAKAIAGEAGVPFFSISGSEFVEMFVGVGASRVRDLFKKAKENAPCIVFVDEIDAVGRQRGTGIGGGNDEREQTLNQLLTEMDGFEGNTGIIVIAATNRADILDSALLRPGRFDRQVSVDVPDVRGRTEILKVHGSNKKFDSDVSLDVIAMRTPGFSGADLANLLNEAAILAGRRGRTAISSKEIDDSIDRIVAGMEGTVMTDWKSKSLVAYHEVGHAICGTLTPGHDPVQKVTLVPRGQARGLTWFIPMDDPTLISRQQLFARIVGGLGGRAAEEVIFGEPEVTTGAAGDLQQITGLAKQMVVTFGMSEIGPWSLMEGGAQSGDVIMRMMARNSMSEKLAEDIDSAVKQLSDEAYEIALRHIRNNREAIDKIVEVLIEKETVTGDEFRAILSEFAEIPVENRVPPATPAAALPA

SEQ ID NO: 17396 - protein, 599 aa, Zea mays subsp. mays
  misc_feature (1)..(599): Ceres Seq. ID no. 12358120
MSYSRFLEYLDKDRVKKVDLFENGTIAIVEAISPELGNRMQRVRVQLPGLSQELLQKLREKNIDFAAHSNQEDSGSLLFNLIGNLAFPLILIGGLFLLSRRAQGGLGGPNGPGFPLGFGQSRAKFQMEPNTGVTFDDVAGVDEAKQDFMEVVEFLKKPERFTAVGARIPKGVLLVGPPGTGKTLLAKAIAGEAGVPFFSISGSEFVEMFVGVGASRVRDLFKKAKENAPCIVFVDEIDAVGRQRGTGIGGGNDEREQTLNQLLTEMDGFEGNTGIIVIAATNRADILDSALLRPGRFDRQVSVDVPDVRGRTEILKVHGSNKKFDSDVSLDVIAMRTPGFSGADLANLLNEAAILAGRRGRTAISSKEIDDSIDRIVAGMEGTVMTDWKSKSLVAYHEVGHAICGTLTPGHDPVQKVTLVPRGQARGLTWFIPMDDPTLISRQQLFARIVGGLGGRAAEEVIFGEPEVTTGAAGDLQQITGLAKQMVVTFGMSEIGPWSLMEGGAQSGDVIMRMMARNSMSEKLAEDIDSAVKQLSDEAYEIALRHIRNNREAIDKIVEVLIEKETVTGDEFRAILSEFAEIPVENRVPPATPAAALPA

SEQ ID NO: 17397 - DNA, 1255 bp, Zea mays subsp. mays
  misc_feature (1)..(1255): Ceres Seq. ID no. 12358141
gcaaaaatctcctctctcgcttcatttcttttttctttccatcgaattcctcgtcaccaacacgcacgcggcctctgcctccgcgatccgcgtctccatcctgaggctccgaatcgatctcccttcctcaccaaaccggagcacttcggaggccggacccggcgagaagcgaccgaccgcagccagctcacgtctccctcttcatccaccatgctgagggtcgcgggcaggcgcctctcgtccgctctcgcctggcgccccgccgccgccgcctcaggctcccggggccctctcgccggtacactacccggccgcgacgacgacgacacacgcgactgcagggcgcgtttcgccatcgaatctcccttcttcgccgctgccagagggttttctgcagagactcttgctccaagaaaccaggatgtgggcttatccgagctcccagcaactgtggcagctgtgaagaatccaagtggaaaaatcgtgtatgatgagtataaccatgagcgctacccgcctggagaccccagcaagcgtgcatttgcctactttgtgctgagtggtgggaggttcatttacgcatctttgctgcgacttctcgtcttaaaatttgtcctgagcatgtcagcaagtaaggatgttctcgcgcttgcctcacttgaggttgacctctcaagcattgagcctggaaccacggtgacggtgaagtggcgtggcaagccggtcttcataaggcggaggacagaggatgatatcaagttggccaacagtgttgacgtcgcatccctccgccacccagagcaggatgcagagcgtgtcaagaaccccgaatggctggtcgtcattggggtctgcactcacctgggctgcatcccgctccctaatgcaggagactttggtggctggttctgcccgtgccacggctcgcactacgacatttctggtaggatccgcaagggcccggcacccttcaacctggaagtgccgacatacagcttcttggaagagaacaagcttctcatcggctgagattgctgttagtgttgttcgtgtggccctgtcgtttttgtttgatcaacaacttcaccttttctcttgcctgggttagggcatacctttgtgggttgtttctgagtgcagtgttgttgctagcacctgacagtaatgaataacctgctgctacataaaggatactgttaattgttgtcaaatttggttctgtttttttcctgacagcaatgaacaaacttctgct

SEQ ID NO: 17398 - protein, 342 aa, Zea mays subsp. mays
  misc_feature (1)..(342): Ceres Seq. ID no. 12358142
AKISSLASFLFSFHRIPRHQHARGLCLRDPRLHPEAPNRSPFLTKPEHFGGRTRREATDRSQLTSPSSSTMLRVAGRRLSSALAWRPAAAASGSRGPLAGTLPGRDDDDTRDCRARFAIESPFFAAARGFSAETLAPRNQDVGLSELPATVAAVKNPSGKIVYDEYNHERYPPGDPSKRAFAYFVLSGGRFIYASLLRLLVLKFVLSMSASKDVLALASLEVDLSSIEPGTTVTVKWRGKPVFIRRRTEDDIKLANSVDVASLRHPEQDAERVKNPEWLVVIGVCTHLGCIPLPNAGDFGGWFCPCHGSHYDISGRIRKGPAPFNLEVPTYSFLEENKLLIG

SEQ ID NO: 17399 - protein, 272 aa, Zea mays subsp. mays
  misc_feature (1)..(272): Ceres Seq. ID no. 12358143
MLRVAGRRLSSALAWRPAAAASGSRGPLAGTLPGRDDDDTRDCRARFAIESPFFAAARGFSAETLAPRNQDVGLSELPATVAAVKNPSGKIVYDEYNHERYPPGDPSKRAFAYFVLSGGRFIYASLLRLLVLKFVLSMSASKDVLALASLEVDLSSIEPGTTVTVKWRGKPVFIRRRTEDDIKLANSVDVASLRHPEQDAERVKNPEWLVVIGVCTHLGCIPLPNAGDFGGWFCPCHGSHYDISGRIRKGPAPFNLEVPTYSFLEENKLLIG

SEQ ID NO: 17400 - DNA, 1304 bp, Zea mays subsp. mays
  misc_feature (1)..(1304): Ceres Seq. ID no. 12358154
attttcgtcagctctcctggcgcccggtggctcgccggcgcaaattaagtaattaacccgaactccctggcattctccgcgggcctgtagtcttgtagcctatcgcttgcttcgccgtagcacttgcttaattagggcggtgttcgagaggtgggtgtggtggtgtactggtgtactagtactactcgcctcgcctcgcctcgcctcgagggtttgtttgactggcggaggcaggagctgcggcggtccgggagcgcatggggaacgcgaacgccaaggagggggagaacggccacatggcggcgtctcctgagccggcggctcccaacggcggcggaggaagcagcagctcggcgggaggcgctgccgcgcgacctccaccgttgtcgccgccagacgacgtgatgctggagcgtccaccgcccgtgccctatctcttcgtgccgcaggttccagagactccactgcacagacctactgagctctctcctcttctcaaccattcaccggtaaacgaatccaccgaccaccactcccaggatcagggtattccaactctgattacatggagccaaggaggagatgaggtgttcctggaaggatcgtgggataactggacatcgaggagggcacttgagagatctggaaaagatcacgccgtcttgttggttctgccatccggagtctaccattaccggatcatcgtggacggggagctgaggtacatccctgaactacctcacgcagctgacgaaagagggcgagtggccaacgtcctcgatgtccatgactacgtgccagaaagcctcgacagcgtagccgagttcgaagcgcccccgtctcccgtgcacagctacgacctgcattgcccgggcgacgaggagttcgccaaggagccgcccacgctcccgccccagcttctcgtgtccgtcctcgggggggacgtcgatagcgctggccatggcaatcaagctttgaagccacagcacgtcgtcctcgaccacctgttcatcgagaaagggtgggggtcgcagtcgctgctcgccctcggcgtcacccaccggtttgagtccaagtacgtgagctttgtgctctacaagccgttggagaggtgatggtggtactgtctactagctgtgtgtgagtggaagaacagagtggactgctggaggtgaataatgtgtgtgtgtgcccttgtatagaagggaaatgcatgcaggagcttgtagctgtagctgatcttttattttatttttttattttcctttcactttcgacgaaagtaataaattagttgaccatgc

SEQ ID NO: 17401 - protein, 285 aa, Zea mays subsp. mays
  misc_feature (1)..(285): Ceres Seq. ID no. 12358155
MGNANAKEGENGHMAASPEPAAPNGGGGSSSSAGGAAARPPPLSPPDDVMLERPPPVPYLFVPQVPETPLHRPTELSPLLNHSPVNESTDHHSQDQGIPTLITWSQGGDEVFLEGSWDNWTSRRALERSGKDHAVLLVLPSGVYHYRIIVDGELRYIPELPHAADERGRVANVLDVHDYVPESLDSVAEFEAPPSPVHSYDLHCPGDEEFAKEPPTLPPQLLVSVLGGDVDSAGHGNQALKPQHVVLDHLFIEKGWGSQSLLALGVTHRFESKYVSFVLYKPLER

SEQ ID NO: 17402 - protein, 272 aa, Zea mays subsp. mays
  misc_feature (1)..(272): Ceres Seq. ID no. 12358156
MAASPEPAAPNGGGGSSSSAGGAAARPPPLSPPDDVMLERPPPVPYLFVPQVPETPLHRPTELSPLLNHSPVNESTDHHSQDQGIPTLITWSQGGDEVFLEGSWDNWTSRRALERSGKDHAVLLVLPSGVYHYRIIVDGELRYIPELPHAADERGRVANVLDVHDYVPESLDSVAEFEAPPSPVHSYDLHCPGDEEFAKEPPTLPPQLLVSVLGGDVDSAGHGNQALKPQHVVLDHLFIEKGWGSQSLLALGVTHRFESKYVSFVLYKPLER

SEQ ID NO: 17403 - protein, 236 aa, Zea mays subsp. mays
  misc_feature (1)..(236): Ceres Seq. ID no. 12358157
MLERPPPVPYLFVPQVPETPLHRPTELSPLLNHSPVNESTDHHSQDQGIPTLITWSQGGDEVFLEGSWDNWTSRRALERSGKDHAVLLVLPSGVYHYRIIVDGELRYIPELPHAADERGRVANVLDVHDYVPESLDSVAEFEAPPSPVHSYDLHCPGDEEFAKEPPTLPPQLLVSVLGGDVDSAGHGNQALKPQHVVLDHLFIEKGWGSQSLLALGVTHRFESKYVSFVLYKPLER

SEQ ID NO: 17404 - DNA, 1415 bp, Zea mays subsp. mays
  misc_feature (1)..(1415): Ceres Seq. ID no. 12358173
acggccgaccttatgtgacagttcgggcaccgacgtccgtctccgtacttccggctgtgtgcgaaactgcgaacgcgtgatatctccgcgtacgcaaacgcgacgcgaaggtcagcacggacaactctacccctccgcctcgaccctgaccccccacctcgtcggcgatgagttcctcttccaacggcgggaagaagccggctcccggcggcggccgcagggggtcccgccatccgcacgctcgctgacataagccgtgggcccaccggcttcccaggtgccggaggcggcgacagcggcagcgacgacgacgagccacaggaatactacaccggtggcgagaagagtggaatgcttgttcaagatccaacaagaagaaatgatgtggatgcgatatttgaacaagccagacaagcgggtatcaaaggaatgcctcctcctcttgatggcgagtcttccagctctaggagctttacagggactggccgacttcttacaggggagacaatatcatctgctgcacctcaggaaccagtaccaattcgagtacgccacaatatacatttgtggaacaatggctttagtgtggatgatggtccactgagatactacgacgatcctgaaaatgcagagttccttgagagccttaagatgtcaaagtgccccaaggagctggtgcctactgatggagaacatgttgatgcgtctgttattagaaggatggaagattacagggaacctgtaaggcctcgatcagctttccagggtgttggaagaacccttggtggtggaccttccccagatgagagcgcaacagctgctcctgcatcagcggcccctgctgcttcgaggtccgctggcgttgtcgtggatgactcccagccatttacgtccatacagctgaggctggctgacggcactcgcatgggtcgcccggttcaacatgcaccacaccgtgggagacatcaggtcctttatagacgcagctcggcctggagctgcaaggccttatcagctgcagacgggtttccctcccaagcagctggctgacccaacgcagaccgtggagcaagctgggcttgcaaactctgttatcatgcagaagatgtaaatgcttcggctggcaacctggggagctcggatgcatcgtactgcatcttctgaaaaccgtaatattatggttgatcatgttatcagatactgctctggtgcatcattctcagtcatggttacttacagtagcatctggtgcctcgttgggagcacaggagtttataattcatctaggaactgaagtatgctttcttgcatcactattgcatcacttttttcatttttaatattggtgttatgatatttcgtgtttccatggccgcttccttgcaagttgaagcgcgactcgcaagtcgcagcat

SEQ ID NO: 17405 - protein, 232 aa, Zea mays subsp. mays
  misc_feature (1)..(232): Ceres Seq. ID no. 12358174
MLVQDPTRRNDVDAIFEQARQAGIKGMPPPLDGESSSSRSFTGTGRLLTGETISSAAPQEPVPIRVRHNIHLWNNGFSVDDGPLRYYDDPENAEFLESLKMSKCPKELVPTDGEHVDASVIRRMEDYREPVRPRSAFQGVGRTLGGGPSPDESATAAPASAAPAASRSAGVVVDDSQPFTSIQLRLADGTRMGRPVQHAPHRGRHQVLYRRSSAWSCKALSAADGFPSQAAG

SEQ ID NO: 17406 - protein, 206 aa, Zea mays subsp. mays
  misc_feature (1)..(206): Ceres Seq. ID no. 12358175
MPPPLDGESSSSRSFTGTGRLLTGETISSAAPQEPVPIRVRHNIHLWNNGFSVDDGPLRYYDDPENAEFLESLKMSKCPKELVPTDGEHVDASVIRRMEDYREPVRPRSAFQGVGRTLGGGPSPDESATAAPASAAPAASRSAGVVVDDSQPFTSIQLRLADGTRMGRPVQHAPHRGRHQVLYRRSSAWSCKALSAADGFPSQAAG

SEQ ID NO: 17407 - protein, 132 aa, Zea mays subsp. mays
  misc_feature (1)..(132): Ceres Seq. ID no. 12358176
MSKCPKELVPTDGEHVDASVIRRMEDYREPVRPRSAFQGVGRTLGGGPSPDESATAAPASAAPAASRSAGVVVDDSQPFTSIQLRLADGTRMGRPVQHAPHRGRHQVLYRRSSAWSCKALSAADGFPSQAAG

SEQ ID NO: 17408 - DNA, 1976 bp, Zea mays subsp. mays
  misc_feature (1)..(1976): Ceres Seq. ID no. 12358191
tgcgggatccaaatgaacatttaaatttgttaattatttttttgttctatgatcctattcatagttcactatgctcaagtaattttgaggctgcaagttatggacacatgttaccatatatccaaggaggaacataaatatcaatctttttcaatgtgatagtggtttgaaaccattgcatttgtacttttaccgtgagagtccatagcttttgtgataaacatgttttcagaagcctggccaagaaaagttgatattattctagtattctagcaggactgtgctagcagtattctaggctattgcagatttctgactaaaacattaggtgtatatccttagatattcacattgaatacaggtaaatcacatttgatgcaggagatggattatagagaagaagcaagaaatggacttaagttcagagaattgtttgggaaatttagagatgtgtcggttcctgaaatgtatctggaacagacaagaaggcgagtccttatcatggaatggatcgagggggaaaagttatcagaagtcagagatcaatatttggttgaggttggagtatattgttcactttcacagctattagaatatggattctatcatgcagatccacaccctggaaatcttttgcgtacagttgatgggaaattagcctacttagattttgggatgatgggagaattccgacaagaacttcgtgatggatttattgaagcttgtcttcatcttgttaaccgtgattttgatgctttagcaaaagactttgtaacccttggtttacttcctccaactgcccagaaaggtgaagtcacaaaggcattgacaggtgtatttgagaatgctgttaacagaggagttcagaatataagctttggagatctgtcaggaaatcttggacgaacaatgtataaattcaagttccagataccgtcttacttttcccttgtaattcgaagccttgctgttttagaaggtatcgcaatcagcttcaatccaaagtataaagttctggggagttcatatccatggattgcaagaaaagttctcactgacagttcgccaaagcttcgatcaactttgcagactcttctttataaggatggcactttccaaattgatcgcctggaatctttgttaactgagtcacttcgtgcaagaacagagcaatcattggtcagaaatgaacaagatgtcgacagtacgagatatgcaattaagcaagtcttgtcattcacactcgctgaccagggtgcctttgtgaaggacttacttcttcaggagattgctaagggaatagatgcacttggtgtagccacattaagttctgcaacgtctgcagcagcctccagattgccattcggtggtggaccatccccattgacctcactagatgacgaagatgccacaaacttaagaaatctgtatcgcctgctcctacttttatctaaggtttctcagaaggaaaatccatctccaattcctgaatataacagtgccatagagaaggaaggtggtagcacggatgaacttgctcttgcgctgtatggaatgacctctctgccagaatttcttccagttctttctgtcattcctgagcttccaccggagtcccaacagcagttgcttcttctgccagcggatttaaccaatcgtattttatctcgggctctcgcgagaaccattagaagactcatgtaaagccataggtgcagaaattttcggtccctgcttaatttttattttactattctttttggttcactgctagaagatggggatttttttagcatctcatctacaacccaagatcaatcccttttttgttatctacgattactatgtacatattgttcaaactaaagcaggcattgtaaatggcccatgttgttatgcacatatggtgtaactgataaactttaaatatatgtgaacatagaaataattctgtaatgcaatttgcctcgaaagcg

SEQ ID NO: 17409 - protein, 442 aa, Zea mays subsp. mays
  misc_feature (1)..(442): Ceres Seq. ID no. 12358192
MQEMDYREEARNGLKFRELFGKFRDVSVPEMYLEQTRRRVLIMEWIEGEKLSEVRDQYLVEVGVYCSLSQLLEYGFYHADPHPGNLLRTVDGKLAYLDFGMMGEFRQELRDGFIEACLHLVNRDFDALAKDFVTLGLLPPTAQKGEVTKALTGVFENAVNRGVQNISFGDLSGNLGRTMYKFKFQIPSYFSLVIRSLAVLEGIAISFNPKYKVLGSSYPWIARKVLTDSSPKLRSTLQTLLYKDGTFQIDRLESLLTESLRARTEQSLVRNEQDVDSTRYAIKQVLSFTLADQGAFVKDLLLQEIAKGIDALGVATLSSATSAAASRLPFGGGPSPLTSLDDEDATNLRNLYRLLLLLSKVSQKENPSPIPEYNSAIEKEGGSTDELALALYGMTSLPEFLPVLSVIPELPPESQQQLLLLPADLTNRILSRALARTIRRLM

SEQ ID NO: 17410 - protein, 439 aa, Zea mays subsp. mays
  misc_feature (1)..(439): Ceres Seq. ID no. 12358193
MDYREEARNGLKFRELFGKFRDVSVPEMYLEQTRRRVLIMEWIEGEKLSEVRDQYLVEVGVYCSLSQLLEYGFYHADPHPGNLLRTVDGKLAYLDFGMMGEFRQELRDGFIEACLHLVNRDFDALAKDFVTLGLLPPTAQKGEVTKALTGVFENAVNRGVQNISFGDLSGNLGRTMYKFKFQIPSYFSLVIRSLAVLEGIAISFNPKYKVLGSSYPWIARKVLTDSSPKLRSTLQTLLYKDGTFQIDRLESLLTESLRARTEQSLVRNEQDVDSTRYAIKQVLSFTLADQGAFVKDLLLQEIAKGIDALGVATLSSATSAAASRLPFGGGPSPLTSLDDEDATNLRNLYRLLLLLSKVSQKENPSPIPEYNSAIEKEGGSTDELALALYGMTSLPEFLPVLSVIPELPPESQQQLLLLPADLTNRILSRALARTIRRLM

SEQ ID NO: 17411 - protein, 412 aa, Zea mays subsp. mays
  misc_feature (1)..(412): Ceres Seq. ID no. 12358194
MYLEQTRRRVLIMEWIEGEKLSEVRDQYLVEVGVYCSLSQLLEYGFYHADPHPGNLLRTVDGKLAYLDFGMMGEFRQELRDGFIEACLHLVNRDFDALAKDFVTLGLLPPTAQKGEVTKALTGVFENAVNRGVQNISFGDLSGNLGRTMYKFKFQIPSYFSLVIRSLAVLEGIAISFNPKYKVLGSSYPWIARKVLTDSSPKLRSTLQTLLYKDGTFQIDRLESLLTESLRARTEQSLVRNEQDVDSTRYAIKQVLSFTLADQGAFVKDLLLQEIAKGIDALGVATLSSATSAAASRLPFGGGPSPLTSLDDEDATNLRNLYRLLLLLSKVSQKENPSPIPEYNSAIEKEGGSTDELALALYGMTSLPEFLPVLSVIPELPPESQQQLLLLPADLTNRILSRALARTIRRLM

SEQ ID NO: 17412 - DNA, 1601 bp, Zea mays subsp. mays
  misc_feature (1)..(1601): Ceres Seq. ID no. 12358266
atccacttcgcccgcccgcccgctgcctgactgccattattgcctcccggtcttcgctgtccatccgaccgtccgtggcttctccctccggtccccgctacccgccccgccccgccgagaagcttcgggctagctagcaagctagctagccacctacccgtgctttggttcggttggttggcgccatagccattgccgaggagcgagggagcagccgggcgggcagtcaggaggcggtgagtaagcatgctgggagcgagccccaggggcaggaaggccgccgcgccgccggtgaagctggggtcggcgaaggaggcgccggcggccggtggagctggaggagggagcggcggcaaggtgctggcggaggaggtgtgggaggtgcggcccggcgggatgctggtgcagaagaggggcggcggcgacgacgagccgtcgcccaacgtgaagcccgtgcccaccatccgggtcaaggtcaagcacgccggcgtcacgcacgagatctacatcagttccgaggcctccttcggggagctgaagaagctggtggccgccaagacggggctgcaccccgacgaccagaaggtgctgtacaaggacagggagcgtgactccaaggcgttcctggacacggccggcgtcagggaccgctccaaggtggtggtgctggaggaccccgaggcccgcgcgcgccgcctcatcggggagcgccgcagcggccacctccagaaggccgccagggccgtcgccgcggtcaccgccgaggtcgacaagctggcacccaaggtggcggcgttggacgcgtcggtgcgcaggggggagaaggtcgcggagaaggatgtggtgcaggtgacggagctgctaatgaacgagctgctcaggctcgacgccgtggtcgcggacggcgacgtcaaggcgcagaggcggatgcaggtgaagcgcgtccagaagtacgtggagacgctggacgcggtggcggccaagaacgccgccctcgtcggcaagtccggcgagaaggccgcggccaagccggcgccggcgccggcgccggccccggccccgccgccgcggcagcagggacaggggcagacgcggtgggagatgttcgacctgctgtcgtcgctgccgtccacgtcctcggcctcgtcaacgacgaccgtgagctccacggcgtcctccggcgcgccgccgccgagccgcccggactggatgctcttctgacgagggagggacggcggccccgcaccggccggccaccggcgcgaaagcgaaaggcgagtgcttgatgcggtgcgatgcttgtgtgccaaaaattgcaccccaaatctggtagctcgtcgagtgtcctgatgaggccatgattgggcaggcggggggctatctagctttgggccacacagctgcattgcgttgggctgcatggtaccgtaccagccaattcgagttcatcaatcatgtggtgtgagagtattttttttcttcttcacctctcctttttctttccttccttttgagtttttttttccttctcctcctcctcctcttcttcttcttgttcatggaaggtttgggattcttttggagtgcatactatactattc

SEQ ID NO: 17413 - protein, 324 aa, Zea mays subsp. mays
  misc_feature (1)..(324): Ceres Seq. ID no. 12358267
MLGASPRGRKAAAPPVKLGSAKEAPAAGGAGGGSGGKVLAEEVWEVRPGGMLVQKRGGGDDEPSPNVKPVPTIRVKVKHAGVTHEIYISSEASFGELKKLVAAKTGLHPDDQKVLYKDRERDSKAFLDTAGVRDRSKVVVLEDPEARARRLIGERRSGHLQKAARAVAAVTAEVDKLAPKVAALDASVRRGEKVAEKDVVQVTELLMNELLRLDAVVADGDVKAQRRMQVKRVQKYVETLDAVAAKNAALVGKSGEKAAAKPAPAPAPAPAPPPRQQGQGQTRWEMFDLLSSLPSTSSASSTTTVSSTASSGAPPPSRPDWMLF

SEQ ID NO: 17414 - protein, 274 aa, Zea mays subsp. mays
  misc_feature (1)..(274): Ceres Seq. ID no. 12358268
MLVQKRGGGDDEPSPNVKPVPTIRVKVKHAGVTHEIYISSEASFGELKKLVAAKTGLHPDDQKVLYKDRERDSKAFLDTAGVRDRSKVVVLEDPEARARRLIGERRSGHLQKAARAVAAVTAEVDKLAPKVAALDASVRRGEKVAEKDVVQVTELLMNELLRLDAVVADGDVKAQRRMQVKRVQKYVETLDAVAAKNAALVGKSGEKAAAKPAPAPAPAPAPPPRQQGQGQTRWEMFDLLSSLPSTSSASSTTTVSSTASSGAPPPSRPDWMLF

SEQ ID NO: 17415 - DNA, 1259 bp, Zea mays subsp. mays
  misc_feature (1)..(1259): Ceres Seq. ID no. 12358301
agtgtctcctcccttccctctagtattttacagtattttactcgctgcctgcgttccaaaacctttcgtcttttcccccgccgtctacaaagacttcacactcgcagtcgcagccgcaggctgctccggcagactccttcaccgcgaagacttctcctctcctctctcctctctcccttccactcgcgctctcctggataccgcgcgcggcgacgagatggcgatagatcacgggacccctctcgggctgaagcggagaggcgccatgggcggaggtggcgagtgctgcgacgacggcagcgagacccggcggttgccgccgtggctgaggccgctgctgtccgcgagcttcttcgtccaatgcagggtccacgccgacgcgcacaagagcgagtgcaacatgtactgcctcgactgcatgggcgacgctctctgcgcgctctgcctcgccgcgcgccaccgcgaccaccactccatccagatacggaggtcgtcgtaccacgacgtgatccgggtgtcggagatacagaaggtgctggacatcgccggcgtgcagacgtacatcatcaacagcgcgcgcgtggtgttcctgaacgagcggccgcagccccgcccgggcaagggcgtcaccaacacctacgaggtctgcgagcgcagcctcctcgactgcttccgcttctgctcccttgggtgcaagatagtgggcacggcccgtggctaccgtcctgggaagaagaagcacggcggcggcggcggtaacaagaagagggcggcgccggcgccggcgcttaaggacgtgcggtctgactcggaggactcgtgcaccagcaccagcggcgccagcagcgacaagagcagcgtcgtgcagagctcccctccgccgccgacctctgccagccaccgcccccccgggaacaagcgccggaagggcgtcccgcaccggtcgcccttgggcagcctcatcgtcgagctctaggactcttcgtcagcgccaaggcaaggcaaggcaacgcactctgtactgtacatgacataccccccgaagagaagggaataacaaacagtaagcctctggacgtggagggcgaagggcgacagcggtaagccgtaagatcggacaatccttagttttgcttcttctcaggttttgttttgcttttacagttactaccactctagcagtggtaccatcagtaagataaccgcgactaagttttgcagccttgtacattgtaatattattattactatagaccagg

SEQ ID NO: 17416 - protein, 324 aa, Zea mays subsp. mays
  misc_feature (1)..(324): Ceres Seq. ID no. 12358302
VSPPFPLVFYSILLAACVPKPFVFSPAVYKDFTLAVAAAGCSGRLLHREDFSSPLSSLPSTRALLDTARGDEMAIDHGTPLGLKRRGAMGGGGECCDDGSETRRLPPWLRPLLSASFFVQCRVHADAHKSECNMYCLDCMGDALCALCLAARHRDHHSIQIRRSSYHDVIRVSEIQKVLDIAGVQTYIINSARVVFLNERPQPRPGKGVTNTYEVCERSLLDCFRFCSLGCKIVGTARGYRPGKKKHGGGGGNKKRAAPAPALKDVRSDSEDSCTSTSGASSDKSSVVQSSPPPPTSASHRPPGNKRRKGVPHRSPLGSLIVEL

SEQ ID NO: 17417 - protein, 252 aa, Zea mays subsp. mays
  misc_feature (1)..(252): Ceres Seq. ID no. 12358303
SVSSLPSSILQYFTRCLRSKTFRLFPRRLQRLHTRSRSRRLLRQTPSPRRLLLSSLLSPFHSRSPGYRARRRDGDRSRDPSRAEAERRHGRRWRVLRRRQRDPAVAAVAEAAAVRELLRPMQGPRRRAQERVQHVLPRLHGRRSLRALPRRAPPRPPLHPDTEVVVPRRDPGVGDTEGAGHRRRADVHHQQRARGVPERAAAAPPGQGRHQHLRGLRAQPPRLLPLLLPWVQDSGHGPWLPSWEEEARRRRR

SEQ ID NO: 17418 - protein, 252 aa, Zea mays subsp. mays
  misc_feature (1)..(252): Ceres Seq. ID no. 12358304
MAIDHGTPLGLKRRGAMGGGGECCDDGSETRRLPPWLRPLLSASFFVQCRVHADAHKSECNMYCLDCMGDALCALCLAARHRDHHSIQIRRSSYHDVIRVSEIQKVLDIAGVQTYIINSARVVFLNERPQPRPGKGVTNTYEVCERSLLDCFRFCSLGCKIVGTARGYRPGKKKHGGGGGNKKRAAPAPALKDVRSDSEDSCTSTSGASSDKSSVVQSSPPPPTSASHRPPGNKRRKGVPHRSPLGSLIVEL

SEQ ID NO: 17419 - DNA, 1407 bp, Zea mays subsp. mays
  misc_feature (1)..(1407): Ceres Seq. ID no. 12358313
gatacaaaacacaaactctcggagacagggaagtagcgtagctagatccagagctcggcgccagagatacccgacatcctcgtcatgtctccggttgcaagcaagggagtagtgatggacggtgcggtggcggtggcggcagtggccgccgccgtgctgctgtgcctccatctgccggcggtggcgcgaggccagctgcaggtggggttctacaacacgagctgccccaacgccgagtccctggtccgccaggcggtggccagcgcgttcgccaacgactccggcatcgccgccggcctcatccgcctccatttccacgactgcttcgtcaggggctgcgatgcgtcggtgctgctgacctccgccaacaacacggcggagcgtgacgcgccgcccaacaacccgagcctccacgggttccaggtgatcgacgcggcgaaggcggcggtggagcagagctgcccgcagacggtgtcgtgcgcggacatcgtggccttcgcggcgcgcgacagcatcaacctcactggcaacctgccgtaccaggtgccctcgggccgccgggacggcaacgtctccctcgacacggaggccaacagcaacctgccggcgccaacgttcaacgcgtcccagctggtggccagcttcgcggccaagaacctcaccgacgaggagatggtcatcctctccggcgcccacaccgtcggccgctccttctgcacatcgtttctcgcgcgcatctacaacggatccaccccgatcgttgactctggcctgagcgccgggtacgccacactgctgcgcgcgctgtgcccgtccaacgccaactcgtccacgcccacgaccacggtgatcgaccccagcacgccggcggtgctggacaacaactactacaagctgctgccgctcaacctgggcctcttcttctccgacaaccagctgcgcgtcaactccacgctcaacgcctccgtcaacagcttcgccgccaacgagacgctctggaaggagaagttcgtcgccgccatgtcaagatgggaaacatccaggtgctcacggggacccagggccagatcaggctcaactgcagcatcgtcaacaacggctcgtcgtcggtggggatccagcagatgacagtgcccaactcctactctggcgccaccgcgtcccttgatgatgagatcgccacgagctgatctagatcggcgcggtgtgatgtgatgatagatatttgcattgtgtgtccatctttaggctattaattagtacgtttgctcccggtacgcgcgagagtgcgtagttcgtgtgtcattcatatgcgcgtacacgagatttccagtatcaccatgcatgtatcccgtgaatcatcatcagtaaataaaactggtgctctttgagagtctattattatcg

SEQ ID NO: 17420 - protein, 347 aa, Zea mays subsp. mays
  misc_feature (1)..(347): Ceres Seq. ID no. 12358314
MSPVASKGVVMDGAVAVAAVAAAVLLCLHLPAVARGQLQVGFYNTSCPNAESLVRQAVASAFANDSGIAAGLIRLHFHDCFVRGCDASVLLTSANNTAERDAPPNNPSLHGFQVIDAAKAAVEQSCPQTVSCADIVAFAARDSINLTGNLPYQVPSGRRDGNVSLDTEANSNLPAPTFNASQLVASFAAKNLTDEEMVILSGAHTVGRSFCTSFLARIYNGSTPIVDSGLSAGYATLLRALCPSNANSSTPTTTVIDPSTPAVLDNNYYKLLPLNLGLFFSDNQLRVNSTLNASVNSFAANETLWKEKFVAAMSRWETSRCSRGPRARSGSTAASSTTARRRWGSSR

SEQ ID NO: 17421 - protein, 337 aa, Zea mays subsp. mays
  misc_feature (1)..(337): Ceres Seq. ID no. 12358315
MDGAVAVAAVAAAVLLCLHLPAVARGQLQVGFYNTSCPNAESLVRQAVASAFANDSGIAAGLIRLHFHDCFVRGCDASVLLTSANNTAERDAPPNNPSLHGFQVIDAAKAAVEQSCPQTVSCADIVAFAARDSINLTGNLPYQVPSGRRDGNVSLDTEANSNLPAPTFNASQLVASFAAKNLTDEEMVILSGAHTVGRSFCTSFLARIYNGSTPIVDSGLSAGYATLLRALCPSNANSSTPTTTVIDPSTPAVLDNNYYKLLPLNLGLFFSDNQLRVNSTLNASVNSFAANETLWKEKFVAAMSRWETSRCSRGPRARSGSTAASSTTARRRWGSSR

SEQ ID NO: 17422 - DNA, 1454 bp, Zea mays subsp. mays
  misc_feature (1)..(1454): Ceres Seq. ID no. 12358320
atcgtcatatctccaggcggcgtcgtcaggcccttccgccgtcgtcacgcaaccgagctcggcacgcggcaacagccgcctccacacagcgcctgcaacctcctcctgcccacccatggccgccgctcgtcccggcaatctcagcgaattggagcagaaatggcataacggcggcgggcctgcgtgtgtgcttggcgtcggcacagccaacccagccaactgcgttcggcaagatgagtacactgactggtacttccgtatcaccaagagcgatcatcttacgcacaccaaagcaatcatgaggaaaacgtgtgagaagatgatggtaaaaaaacgctacttgcaagtcaatgaggagctcttcagtgtgcaccccgagttcttggaccctgcagctccaagtctgcaaggcaagctagctgtcgtggccggtgccatgccagggcttgtggctgctgccgcagagaaagccattgccgactggggccgcccggccggagacatcacccacctcgtcttcgccaccagttccagtgcccagctgcctcacattgacctccgcatcgctgcccttctcgggttaagcaccactgtgcagcgcacggtgatcggctttcacgcctgcagcggcagctccgccgcgctccgcgttgccaagtacatcgccgagaacaaccgcagcgcgcgagtcctcgtcgcttgcgcggacatgtggagcgtcatggatagttacgtagttcctaacgtagaccaccgctacggaattattggccacgcctttatcggtgacggtgccggcgcagttgtcgtcggaagccgaccacaggaacccgttgagcgcccaatcttcgagatggtatcagcgtcgcaggccacggtgcccggctcggagcgggcggttgccgtcgagctcaccaattgtggcctggagtatcgcctcgagtttggagatgtggcggcggaggtcggtggcaacatcgagcggtgcctgcttgacgcgctgtcgccgttgggcattggtagtgttggctggaataacctcttctgggtggtgcacccgggtggccccaggatcatggacaccttcacggcggctctcaagctacagcccgagaagctgtctgccagtcggcgtgtgcttagggagtacggcaacatcaccggcccgactctgatctttgtcctcgacgaggctatacgccgtcgccagctcgaccacgaggaggggagctgcgagtgggggctcatggtgggattgggcccggggttcaccattgatgtaatggcattgcgtgcgtgcagtggtaaatccacaccaacaccaagaatcaagagtagtctgtaagggagagccagaactcagaagcggccctttggttgtctgtttgtcagtgcgtttgtacgtgtcttcatcccaataaaataaataaataactgtggtttggctttgtggc

SEQ ID NO: 17423 - protein, 447 aa, Zea mays subsp. mays
  misc_feature (1)..(447): Ceres Seq. ID no. 12358321
SSYLQAASSGPSAVVTQPSSARGNSRLHTAPATSSCPPMAAARPGNLSELEQKWHNGGGPACVLGVGTANPANCVRQDEYTDWYFRITKSDHLTHTKAIMRKTCEKMMVKKRYLQVNEELFSVHPEFLDPAAPSLQGKLAVVAGAMPGLVAAAAEKAIADWGRPAGDITHLVFATSSSAQLPHIDLRIAALLGLSTTVQRTVIGFHACSGSSAALRVAKYIAENNRSARVLVACADMWSVMDSYVVPNVDHRYGIIGHAFIGDGAGAVVVGSRPQEPVERPIFEMVSASQATVPGSERAVAVELTNCGLEYRLEFGDVAAEVGGNIERCLLDALSPLGIGSVGWNNLFWVVHPGGPRIMDTFTAALKLQPEKLSASRRVLREYGNITGPTLIFVLDEAIRRRQLDHEEGSCEWGLMVGLGPGFTIDVMALRACSGKSTPTPRIKSSL

SEQ ID NO: 17424 - protein, 409 aa, Zea mays subsp. mays
  misc_feature (1)..(409): Ceres Seq. ID no. 12358322
MAAARPGNLSELEQKWHNGGGPACVLGVGTANPANCVRQDEYTDWYFRITKSDHLTHTKAIMRKTCEKMMVKKRYLQVNEELFSVHPEFLDPAAPSLQGKLAVVAGAMPGLVAAAAEKAIADWGRPAGDITHLVFATSSSAQLPHIDLRIAALLGLSTTVQRTVIGFHACSGSSAALRVAKYIAENNRSARVLVACADMWSVMDSYVVPNVDHRYGIIGHAFIGDGAGAVVVGSRPQEPVERPIFEMVSASQATVPGSERAVAVELTNCGLEYRLEFGDVAAEVGGNIERCLLDALSPLGIGSVGWNNLFWVVHPGGPRIMDTFTAALKLQPEKLSASRRVLREYGNITGPTLIFVLDEAIRRRQLDHEEGSCEWGLMVGLGPGFTIDVMALRACSGKSTPTPRIKSSL

SEQ ID NO: 17425 - protein, 348 aa, Zea mays subsp. mays
  misc_feature (1)..(348): Ceres Seq. ID no. 12358323
MRKTCEKMMVKKRYLQVNEELFSVHPEFLDPAAPSLQGKLAVVAGAMPGLVAAAAEKAIADWGRPAGDITHLVFATSSSAQLPHIDLRIAALLGLSTTVQRTVIGFHACSGSSAALRVAKYIAENNRSARVLVACADMWSVMDSYVVPNVDHRYGIIGHAFIGDGAGAVVVGSRPQEPVERPIFEMVSASQATVPGSERAVAVELTNCGLEYRLEFGDVAAEVGGNIERCLLDALSPLGIGSVGWNNLFWVVHPGGPRIMDTFTAALKLQPEKLSASRRVLREYGNITGPTLIFVLDEAIRRRQLDHEEGSCEWGLMVGLGPGFTIDVMALRACSGKSTPTPRIKSSL

SEQ ID NO: 17426 - DNA, 1531 bp, Zea mays subsp. mays
  misc_feature (1)..(1531): Ceres Seq. ID no. 12358328
atcagcgctagcttagctatccggccgcatccgctgctcgcctcctcacttgagcgtgtgtcgtgtagcatttagtcagctgctcctgcttgctagggttagggtttgcgggcgcgcgcgcgcgtgcccgcgcgcgagctggccgcgggagggatgacgccgcaccggtcgccggcggggaccggaggaagtggcggcggagggccgccggcgctacactacctgagcggcccttacggagacaccaccttcaccaaggttttcgtgggcggcctcgcctgggagacgcggagtgaggggcttcgcgcccactttgaggtctacggggacatcctcgaggccgttgtcatcaccgaccgcgccacaggccgctccaagggctacggattcgtaaccttccaggacccagagtcggcgaggatggcctgcatggacccatatccagtgatcgatggccggccgtgctaattgcaaccttgccatcttagggcgtcctggtccagctgtgcctttcggccatcagcatatggacctgaatacctatatcagcagctttgtagaatgcatatggtccatatgttggacaacagtatattccagtttacggtggcccaaggacagtaggcccagcagtctacccatatgggcagtctggccaacctgtaccaagtgatcatgcttattctcttggttatgccccaagtcgtgttctcccactatcgaatcagaatgttaacgctgcaaatgttgtgcgcataccaccacttcaacaatttcctccaggagctccacgacctcagcaacagcttttggcccctgctcgtgcaccgccattcccacagaacaacgtttctgaacaagcgacaggttgacaaggatgccagaaagtgacgaattttaggtatcctatagtctgcagcaggactaagaaaagttgtaccgctaaattgggcggcatgcttttttcttgcaaattgttttcgtttgctctctaaagtctgcaggttgtccctatccatggttacctgaacttcttataacgtgagtgtctgatctgctccgcgggaaggggcaggcaagctcgagcgactgaagatgaagcccctcttgctcagcttctgtcagtgtctgtacattccccatctgccagacatcctgatagctgatggtctgtgcaggaccaaagtggatgccggaaatggagtccggcctccaacctgtgtataatataggtcatgtagtggtccaaatcgtagaacaggtccattctttgaaaacatctggttgtgtatattaattctcttagcaccttcagtgcatgttttcatgtctcattagagggaataggtatttcaatgtcattgcattgtcagtgagtcatgtacattattatactgaaaatgtaaactatatatgtcatctgtgtcaactgacaactgtaatcaaataatgacatccctatcttgggaaagaacatgatttattgcaagttgcaacggatggggaaaactagggatggatacggatactt

SEQ ID NO: 17427 - protein, 104 aa, Zea mays subsp. mays
  misc_feature (1)..(104): Ceres Seq. ID no. 12358329
MTPHRSPAGTGGSGGGGPPALHYLSGPYGDTTFTKVFVGGLAWETRSEGLRAHFEVYGDILEAVVITDRATGRSKGYGFVTFQDPESARMACMDPYPVIDGRPC

SEQ ID NO: 17428 - protein, 82 aa, Zea mays subsp. mays
  misc_feature (1)..(82): Ceres Seq. ID no. 12358330
MGSLANLYQVIMLILLVMPQVVFSHYRIRMLTLQMLCAYHHFNNFLQELHDLSNSFWPLLVHRHSHRTTFLNKRQVDKDARK

SEQ ID NO: 17429 - protein, 73 aa, Zea mays subsp. mays
  misc_feature (1)..(73): Ceres Seq. ID no. 12358331
MAGRANCNLAILGRPGPAVPFGHQHMDLNTYISSFVECIWSICWTTVYSSLRWPKDSRPSSLPIWAVWPTCTK

SEQ ID NO: 17430 - DNA, 1548 bp, Zea mays subsp. mays
  misc_feature (1)..(1548): Ceres Seq. ID no. 12358336
acggaccagcagatcgcgcgcgggagtgagagggcgacagggcgtggccgcgaggtgggcatgggatcggagggacgggtctggaatggcgcgggcgtggccgccggcagcggctatggcggcatcgtcgaggcgaaagcgaccaccgcggcgcccgcggacgttcccacgtcggcggcctccgtcgacatctcgctgccgctcccggagatgtcgcctcacatcataggtctctgcaaggagttggtcaaagggtggtcgtcgattgacagctcgcgcttctccatcgagaccgtgtctgggggcatcaccaatctattgctcaaggtttctgtcaaaggaaacaatggcaatgagtcttctgttactgttcggttgtatggaccaaatacagacttggtgattgatcggaaaagggaattgcaggcgataccgtatctctcagctgcagggttcggggctcggctgcttggaatgtttgaaaatggagtagttcagtcattcatctatgctcgaacactgtcacctgcagacatgaaagaacctaaaatagcagctgaaattgccaaggagctacgcaaatttcatcaagtagatataccagggtctaaagaaccacaattgtggaatgatatattcaagtttttgaagaaagctgcagcattgaagtttgaggataatgagcagcaaaagagatatgtaaagatctcatttagagaaatacaagatgaagttaaagaacttaaggatctcttggacattctgcatgcacctgtggtttatgcacacaatgacttgctttcaggaaatctgatgctcaatgatttggaagggaagctatattttattgattttgagtatgggtcatacagctaccgtgggtatgacattgcaaatcatttcaatgagtatgcaggatttgactgtgactataatttgtacccagataaagatgcccagtatcacttctttaggaattatctgcaccctgatagacctagtgaggtgcaggcacaagatatggaagtactttatgtggaaacaaacactttcagactagcatcgcacatttactgggcattatgggctcttattcaggcaaaggtatccccaattgactttgactatcttggatacttcttcttacggtatggtgagtacaagaaacaaagggactcctgcttcgccttggcacaaagtttcctctccgggctaagaaatggctagagcctgagaatctggtcaagggtttgcactgttgtacgcatactcggggcgggtacgcgttgtgatcatcgtctgctactcagaaactctactatagtggtggtagcagcctcattttgttgtatctgatggtagtttcgtcatcgcctgataggaaagtctcatgatcgccctcgggaacgcagggtggcgagatctgtacttatatttgtaataaacacaatccggatgggttctgtcctgtgcaatttgttgtgcgcataagcattccgtgtttttatacattattgtgaggaattgcataagtttttttgtttttcg

SEQ ID NO: 17431 - protein, 408 aa, Zea mays subsp. mays
  misc_feature (1)..(408): Ceres Seq. ID no. 12358337
TDQQIARGSERATGRGREVGMGSEGRVWNGAGVAAGSGYGGIVEAKATTAAPADVPTSAASVDISLPLPEMSPHIIGLCKELVKGWSSIDSSRFSIETVSGGITNLLLKVSVKGNNGNESSVTVRLYGPNTDLVIDRKRELQAIPYLSAAGFGARLLGMFENGVVQSFIYARTLSPADMKEPKIAAEIAKELRKFHQVDIPGSKEPQLWNDIFKFLKKAAALKFEDNEQQKRYVKISFREIQDEVKELKDLLDILHAPVVYAHNDLLSGNLMLNDLEGKLYFIDFEYGSYSYRGYDIANHFNEYAGFDCDYNLYPDKDAQYHFFRNYLHPDRPSEVQAQDMEVLYVETNTFRLASHIYWALWALIQAKVSPIDFDYLGYFFLRYGEYKKQRDSCFALAQSFLSGLRNG

SEQ ID NO: 17432 - protein, 388 aa, Zea mays subsp. mays
  misc_feature (1)..(388): Ceres Seq. ID no. 12358338
MGSEGRVWNGAGVAAGSGYGGIVEAKATTAAPADVPTSAASVDISLPLPEMSPHIIGLCKELVKGWSSIDSSRFSIETVSGGITNLLLKVSVKGNNGNESSVTVRLYGPNTDLVIDRKRELQAIPYLSAAGFGARLLGMFENGVVQSFIYARTLSPADMKEPKIAAEIAKELRKFHQVDIPGSKEPQLWNDIFKFLKKAAALKFEDNEQQKRYVKISFREIQDEVKELKDLLDILHAPVVYAHNDLLSGNLMLNDLEGKLYFIDFEYGSYSYRGYDIANHFNEYAGFDCDYNLYPDKDAQYHFFRNYLHPDRPSEVQAQDMEVLYVETNTFRLASHIYWALWALIQAKVSPIDFDYLGYFFLRYGEYKKQRDSCFALAQSFLSGLRNG

SEQ ID NO: 17433 - protein, 338 aa, Zea mays subsp. mays
  misc_feature (1)..(338): Ceres Seq. ID no. 12358339
MSPHIIGLCKELVKGWSSIDSSRFSIETVSGGITNLLLKVSVKGNNGNESSVTVRLYGPNTDLVIDRKRELQAIPYLSAAGFGARLLGMFENGVVQSFIYARTLSPADMKEPKIAAEIAKELRKFHQVDIPGSKEPQLWNDIFKFLKKAAALKFEDNEQQKRYVKISFREIQDEVKELKDLLDILHAPVVYAHNDLLSGNLMLNDLEGKLYFIDFEYGSYSYRGYDIANHFNEYAGFDCDYNLYPDKDAQYHFFRNYLHPDRPSEVQAQDMEVLYVETNTFRLASHIYWALWALIQAKVSPIDFDYLGYFFLRYGEYKKQRDSCFALAQSFLSGLRNG

SEQ ID NO: 17434 - DNA, 1175 bp, Zea mays subsp. mays
  misc_feature (1)..(1175): Ceres Seq. ID no. 12358359
aaatccacaaaggcacaaagatggaaaaggtgtattggactctttttaaagctaaaaaaacagttcaaaagattgctgcttttcgcttcagtgctgctccgattctgtttcagaagattaacaatttgaaattgtgacgatcctaattgccatcttctcgataataatgaggaaaaaaagattgacgcgcttttcgtgtcctcagaaactgcgggtttgctgaaattctcctccactttcccaagcaaagaacaaagaaccgcccttgttctctgcgactctgcccggccggtctccgaggcgggcggagggaaccagagagcaaggcgaggagcgcggaagggctgagggaaggggcggcggggcatggctcgccggccggcgtcgtgggagcagggcggcgacgagtacgactatctcttcaaggtcgtgctcatcggcgactctggcgtggggaagtccaacctgctctcccgcttcaccaagaacaccttcgccctcgactccaagtccaccatcggcgttgagttcgccacgcgcacactccaggtggagaacaagattataaaagctcaaatctgggacactgctgggcaggagaggtaccgagcaattacaagtgcttactatcgaggagctgtcggggcgttgctagtctacgatgtcactaaagtaatgacatttgagaatgtgaagaggtggttgaaggagctccgggaccatgctgactcgaacatagtcgtaatgctcattggcaacaagactgaccttaggcacctgcgctctgtcgccgttgaggatgctgcaagctttgcaggagagcgaaaggttttgttcttcatcgagacctctgcgctcgatgcgacaaacgtcgagaaggccttccacaccgttctagccgagatctaccggataatcagcaagaagcccctgtcttcggaggagtctggtttggggtccggtaacctcagagagggacagtccatccaagtgtcagccacaaattctggcgcccttacgtcgcggtgctgctcttcttagagccacgcccaccagaatcatctgaagaacaacagttcgtcaagaaggtcctctcttccgaagtcgaaatatttactcccctttgtgtgaacaataagcgtagatttaaagaatgtcagactcagacgctgact

SEQ ID NO: 17435 - protein, 224 aa, Zea mays subsp. mays
  misc_feature (1)..(224): Ceres Seq. ID no. 12358360
MARRPASWEQGGDEYDYLFKVVLIGDSGVGKSNLLSRFTKNTFALDSKSTIGVEFATRTLQVENKIIKAQIWDTAGQERYRAITSAYYRGAVGALLVYDVTKVMTFENVKRWLKELRDHADSNIVVMLIGNKTDLRHLRSVAVEDAASFAGERKVLFFIETSALDATNVEKAFHTVLAEIYRIISKKPLSSEESGLGSGNLREGQSIQVSATNSGALTSRCCSS

SEQ ID NO: 17436 - protein, 121 aa, Zea mays subsp. mays
  misc_feature (1)..(121): Ceres Seq. ID no. 12358361
MTFENVKRWLKELRDHADSNIVVMLIGNKTDLRHLRSVAVEDAASFAGERKVLFFIETSALDATNVEKAFHTVLAEIYRIISKKPLSSEESGLGSGNLREGQSIQVSATNSGALTSRCCSS

SEQ ID NO: 17437 - DNA, 1425 bp, Zea mays subsp. mays
  misc_feature (1)..(1425): Ceres Seq. ID no. 12358365
aacatctagagcttggaggaaagctagctagcgagaggaataggatcgcaatggtggaacggccgggcagatcggcaggcgtcagggaggccaataagacttccgctgccgccatggtgaagacgacgacgacgacgaccaccaataaggaggagctggagagcccgtcctacaggttagcagcgttcaagagcctcttctcgtgcaggaacagccacgcgcggccgcgggcgccggacaccggcaacaggagcaagagggggctgggctgctccgcgccgtccatctgcaagctcaaggacgacagcgtgcccgtgccgcccaaggaaaccacgggcacggcgtcggcaggcgagccctgcaagcgccgcgcgtccgtgagcgggagcagcgatcggtgcgtgaagaagccccaatgtggcgctggcagcaacaagcagctgcagcgtggcgggtcgtcgtcgtcgtcgggcgggtcgtcgttcagggccggcatgcagctgaggcggctttcggggtgctacgagtgccacatggtggtggcgggcagcgcctccatgagggccaccaccatctgcccctgcccggactgcggcgaggtgttcgtcaggcaggagagcctccagctccaccagtccatcaggcacgcagtgtccgagcttggcactgacgacacgagccgcaacatcatcgagatcatcttccagtccagctggctcaagaagcagagccccgtgtgcaaggtcgaccgcatcctcaaggtgaacaacacgcccagaacgctggcccgcttcgaggagtaccgcgacgctgtcaaggccagggcgggcgccgagcagctggcggtagcggcggccaacagcaacaggcacccgcgctgcaccgccgacggcaacgagctgctccggttccactgcgccaccctggcctgctcgctcggcctcaacggcgccacgcacctctgcgacgccgcggggacctgcgcagcgtgcggcatcatccgcgacggcttcagcagcggcggggtgctgaccatggccacgagcggccgcgcgcacgacgccgtgcccgctgcggaggctggcgccggactggatgaggaaaccactccaagggcgatgctggtgtgccgggtcatcgcgggaagggtgaagcggcccaaagaagcggtaccagaggaggaggccgtcgccgaagccgccgaggagtcggagtacgactcggttgcggggtcggccggggtgtactccaacctggaggagctgctggtgttcaaccccagggccatcctcccatgctttgtcgttgtctacaaggcttagctactggtggttacactttacaatccatgcaatgcagtccttgtattaagtaacaaacaattcatgataaacctaatgtattgactgacgaatggtcactctc

SEQ ID NO: 17438 - protein, 439 aa, Zea mays subsp. mays
  misc_feature (1)..(439): Ceres Seq. ID no. 12358366
HLELGGKLASERNRIAMVERPGRSAGVREANKTSAAAMVKTTTTTTTNKEELESPSYRLAAFKSLFSCRNSHARPRAPDTGNRSKRGLGCSAPSICKLKDDSVPVPPKETTGTASAGEPCKRRASVSGSSDRCVKKPQCGAGSNKQLQRGGSSSSSGGSSFRAGMQLRRLSGCYECHMVVAGSASMRATTICPCPDCGEVFVRQESLQLHQSIRHAVSELGTDDTSRNIIEIIFQSSWLKKQSPVCKVDRILKVNNTPRTLARFEEYRDAVKARAGAEQLAVAAANSNRHPRCTADGNELLRFHCATLACSLGLNGATHLCDAAGTCAACGIIRDGFSSGGVLTMATSGRAHDAVPAAEAGAGLDEETTPRAMLVCRVIAGRVKRPKEAVPEEEAVAEAAEESEYDSVAGSAGVYSNLEELLVFNPRAILPCFVVVYKA

SEQ ID NO: 17439 - protein, 423 aa, Zea mays subsp. mays
  misc_feature (1)..(423): Ceres Seq. ID no. 12358367
MVERPGRSAGVREANKTSAAAMVKTTTTTTTNKEELESPSYRLAAFKSLFSCRNSHARPRAPDTGNRSKRGLGCSAPSICKLKDDSVPVPPKETTGTASAGEPCKRRASVSGSSDRCVKKPQCGAGSNKQLQRGGSSSSSGGSSFRAGMQLRRLSGCYECHMVVAGSASMRATTICPCPDCGEVFVRQESLQLHQSIRHAVSELGTDDTSRNIIEIIFQSSWLKKQSPVCKVDRILKVNNTPRTLARFEEYRDAVKARAGAEQLAVAAANSNRHPRCTADGNELLRFHCATLACSLGLNGATHLCDAAGTCAACGIIRDGFSSGGVLTMATSGRAHDAVPAAEAGAGLDEETTPRAMLVCRVIAGRVKRPKEAVPEEEAVAEAAEESEYDSVAGSAGVYSNLEELLVFNPRAILPCFVVVYKA

SEQ ID NO: 17440 - protein, 402 aa, Zea mays subsp. mays
  misc_feature (1)..(402): Ceres Seq. ID no. 12358368
MVKTTTTTTTNKEELESPSYRLAAFKSLFSCRNSHARPRAPDTGNRSKRGLGCSAPSICKLKDDSVPVPPKETTGTASAGEPCKRRASVSGSSDRCVKKPQCGAGSNKQLQRGGSSSSSGGSSFRAGMQLRRLSGCYECHMVVAGSASMRATTICPCPDCGEVFVRQESLQLHQSIRHAVSELGTDDTSRNIIEIIFQSSWLKKQSPVCKVDRILKVNNTPRTLARFEEYRDAVKARAGAEQLAVAAANSNRHPRCTADGNELLRFHCATLACSLGLNGATHLCDAAGTCAACGIIRDGFSSGGVLTMATSGRAHDAVPAAEAGAGLDEETTPRAMLVCRVIAGRVKRPKEAVPEEEAVAEAAEESEYDSVAGSAGVYSNLEELLVFNPRAILPCFVVVYKA

SEQ ID NO: 17441 - DNA, 1357 bp, Zea mays subsp. mays
  misc_feature (1)..(1357): Ceres Seq. ID no. 12358369
gtgcgggcggatgcacttgtttgcgtcccgtgcgcgcgtgatctgatcagcgcgttcgcgtggctcggtcgccacccaactcgacaccgcccacctccacctcctcctcctccgcgtccgcttttttgtccgggcacacccccgcccgacgccgccggaaccagaccagaccacaccacaccacaggagaggagaggagctccggcccgccaaaaaaaaatagcaggggcaggggccgcaggcgccgcgacccatgggcgtcaagcaggtcctcgtccgcccccgctacggcgacgaggatgtcgtcgaccagtcgccgccgccgcccatgtcgtcctcgccctgcggccgctacgtcctccaccgcgtctgcaggttcgacacgctcgccggcgtagccatcaagtacggcgtcgaggtggcggacgtgaagcgcgccaacggcctcaccaccgacctgcagatgttcgcgcacaagacgctgcgggtcccgctccacggcaggcacgcgccgtctcctccctcctcgtccccaagccacgccgccagagaatggactaaaaatgctgcttccctggacccgctccttaaaccaccacggagcacagtttcgccatccatgagccttctactacaggggtgccatggcctgacgccggctccaaagggggacctgaacctgaccgatgaatgcgctcaaggccatcacaggaaagccggaagcttatcgagcaccttgttgccgaggagagccgggcaagggctggccctgaggccaaagtctggcggtcgggcagacacgaacggcatccaccaggacctgttggctgcgtgggtgccctcgtacggggacgggttgcgcgcggtgaagagatcgtcgagcgctccggagttccaggattcggacagcgtcagcctcgcctcggcgtggctgaagagcaagtggaacctgaaaccggattatgccttcaccctggcgctgttcgacggcatctccaagcctctcctggacagcatccccaagcctctcctcgacaacatccccaactcgatcgttgcttggagaaacaaggcggccagagattagcagcttcgtttcgtctctttacagccaaaaaaaagaaggcctcgaacggttggacacactgtgctgaaatggcgcgatggatacagtgacacattacttgcacatacatactgtgctgaatctattgtgccaaagcagcagcagcagcagattgggagctgggagatgagcctgggggtgtattcttttcatttttgtacgtacacatataggaatgaaggcaaacgcctagcagcattcccatgacctaataaagaaatagcttgttct

SEQ ID NO: 17442 - protein, 277 aa, Zea mays subsp. mays
  misc_feature (1)..(277): Ceres Seq. ID no. 12358370
MGVKQVLVRPRYGDEDVVDQSPPPPMSSSPCGRYVLHRVCRFDTLAGVAIKYGVEVADVKRANGLTTDLQMFAHKTLRVPLHGRHAPSPPSSSPSHAAREWTKNAASLDPLLKPPRSTVSPSMSLLLQGCHGLTPAPKGDLNLTDECAQGHHRKAGSLSSTLLPRRAGQGLALRPKSGGRADTNGIHQDLLAAWVPSYGDGLRAVKRSSSAPEFQDSDSVSLASAWLKSKWNLKPDYAFTLALFDGISKPLLDSIPKPLLDNIPNSIVAWRNKAARD

SEQ ID NO: 17443 - protein, 252 aa, Zea mays subsp. mays
  misc_feature (1)..(252): Ceres Seq. ID no. 12358371
MSSSPCGRYVLHRVCRFDTLAGVAIKYGVEVADVKRANGLTTDLQMFAHKTLRVPLHGRHAPSPPSSSPSHAAREWTKNAASLDPLLKPPRSTVSPSMSLLLQGCHGLTPAPKGDLNLTDECAQGHHRKAGSLSSTLLPRRAGQGLALRPKSGGRADTNGIHQDLLAAWVPSYGDGLRAVKRSSSAPEFQDSDSVSLASAWLKSKWNLKPDYAFTLALFDGISKPLLDSIPKPLLDNIPNSIVAWRNKAARD

SEQ ID NO: 17444 - protein, 207 aa, Zea mays subsp. mays
  misc_feature (1)..(207): Ceres Seq. ID no. 12358372
MFAHKTLRVPLHGRHAPSPPSSSPSHAAREWTKNAASLDPLLKPPRSTVSPSMSLLLQGCHGLTPAPKGDLNLTDECAQGHHRKAGSLSSTLLPRRAGQGLALRPKSGGRADTNGIHQDLLAAWVPSYGDGLRAVKRSSSAPEFQDSDSVSLASAWLKSKWNLKPDYAFTLALFDGISKPLLDSIPKPLLDNIPNSIVAWRNKAARD

SEQ ID NO: 17445 - DNA, 1684 bp, Zea mays subsp. mays
  misc_feature (1)..(1684): Ceres Seq. ID no. 12358384
tcccgtatcctgtgccagctgactcgccttctcaagttctgaaacgcagcggagcgcgccggaggagagcaaagcggacagcggaggatagagagagcagaacaccagatcagatcagatggcgcctccgtctccccagccgccgctagtgcgcgtgctcgaccgcatccgcgtctcgcccgccgccggctgattctgagcaagagcccgcgctccctctcactttcttcgacgttgcctggctcttcaccggccccgtcgagcgcctcttcttcttccgccacccggagccggcctccactctcccgctcctgcgctcctcgctctccctcgcgctccgccgcttctacccactcgccggcaccatcaggccccacgcgcctttcctctgctcctacacccatggtaccgatgccctcaccatggtcgtcgccgagtcgaacagccccgacgatttcgacagcctcgtagccaggtcgcccagcgacctggacgggatccgccccctcgttccgcagttgccgccgccgggggaagacggagcgttcgcgctcgccgccgtgcaggccactgtcttcccaggccgtggcctctgcctcggcgtctccgtccaccacgctgcctgcgacgatgcctccaccatgcatttcgtccgcacctgggccgctacctgccgcctaggactcgagaacgacgacggatccgaggacgccgtgctatcgccacgtccggtgctggaccgctccgtcgtcgccgaccccgacgacctgcgcgggaagacgctcgccgggatggcgcgcctcgcccctcctccttctccgccgccgcagcagcaggaggagaagacgccgatggtgatggcgtcgttcctgctggggcgcgagcagatcgaccggatcaaggagggcgcggcagcaaaggcatcgtctttcgtggcggcgtcggccttggcgtgggtgtgcctcctcaagtgcggttccgttggcgtcgcgggcgcccggcgcagccacatgctcttctccgccgagtgccggtccaggctgacgccaccgctgccggccgaatacttcggcaactgcctgcgcccctgcttcgtggaagccgccacggcggaccttctctctggggaaactgaggacggcgtggctgcggcggcgtcggcgatcgggagcgcgatccaggagatggagcagggcgtgctggaaggcgcggaggggtggttgggcagggtgctgtcggtgcttcccgagcggcccatgtccgtgggcgggtcccccaggcacggcgtgtacgaaaccacggacttcgggtggggccggccggcgagggtggagatggtgtcggtggagaagacgcccgggacggtagcgctggcagacagcccggagggagacggaggcatcgagctcggggtggtgttgccgccggacgccatggatgcatttgcttcgtgctttgcgcatgccgtcggcgccaacgtctgattggcattccgatccgaggtgcagctgctgccttcaacaacacaggaccaaaagattcgattgaagcagcgtattatttgtgcttgattaattggtttactttactgtcttgagagtgagctcgttcttgctgctgatgtgcgaagtcaaggaataaacaaccggattgttccgaaatcaatcaagcgtcactatgattt

SEQ ID NO: 17446 - protein, 353 aa, Zea mays subsp. mays
  misc_feature (1)..(353): Ceres Seq. ID no. 12358385
MVVAESNSPDDFDSLVARSPSDLDGIRPLVPQLPPPGEDGAFALAAVQATVFPGRGLCLGVSVHHAACDDASTMHFVRTWAATCRLGLENDDGSEDAVLSPRPVLDRSVVADPDDLRGKTLAGMARLAPPPSPPPQQQEEKTPMVMASFLLGREQIDRIKEGAAAKASSFVAASALAWVCLLKCGSVGVAGARRSHMLFSAECRSRLTPPLPAEYFGNCLRPCFVEAATADLLSGETEDGVAAAASAIGSAIQEMEQGVLEGAEGWLGRVLSVLPERPMSVGGSPRHGVYETTDFGWGRPARVEMVSVEKTPGTVALADSPEGDGGIELGVVLPPDAMDAFASCFAHAVGANV

SEQ ID NO: 17447 - protein, 280 aa, Zea mays subsp. mays
  misc_feature (1)..(280): Ceres Seq. ID no. 12358386
MHFVRTWAATCRLGLENDDGSEDAVLSPRPVLDRSVVADPDDLRGKTLAGMARLAPPPSPPPQQQEEKTPMVMASFLLGREQIDRIKEGAAAKASSFVAASALAWVCLLKCGSVGVAGARRSHMLFSAECRSRLTPPLPAEYFGNCLRPCFVEAATADLLSGETEDGVAAAASAIGSAIQEMEQGVLEGAEGWLGRVLSVLPERPMSVGGSPRHGVYETTDFGWGRPARVEMVSVEKTPGTVALADSPEGDGGIELGVVLPPDAMDAFASCFAHAVGANV

SEQ ID NO: 17448 - protein, 230 aa, Zea mays subsp. mays
  misc_feature (1)..(230): Ceres Seq. ID no. 12358387
MARLAPPPSPPPQQQEEKTPMVMASFLLGREQIDRIKEGAAAKASSFVAASALAWVCLLKCGSVGVAGARRSHMLFSAECRSRLTPPLPAEYFGNCLRPCFVEAATADLLSGETEDGVAAAASAIGSAIQEMEQGVLEGAEGWLGRVLSVLPERPMSVGGSPRHGVYETTDFGWGRPARVEMVSVEKTPGTVALADSPEGDGGIELGVVLPPDAMDAFASCFAHAVGANV

SEQ ID NO: 17449 - DNA, 1266 bp, Zea mays subsp. mays
  misc_feature (1)..(1266): Ceres Seq. ID no. 12358430
gtcaaagcagagtctgcccctccccgcgccgttctttttggttccccactccccagtccccgccgccgccgaaacccgcagatggaggtcgtcgtcgccgcgaagcagaaggcgaagaaacacatacacctcttctactgctcagaatgcgaggagctcgcccttaagatcgccgccagctccgacgccatcgagctccaatccatcaactggcggagcttcgacgacgggttcccgaacctgttcatcaacaaggcgcacgacatccgtgggcagcacgtggcgttcctggcctccttcagctcgccgtcggtcatattcgagcagatctccgtcatcttcgcgctgcccaagctattcattgcctcattcactctcgtgctgcctttcttccccacgggctcattcgagcgcgttgaggaggagggcgatgtcgccaccgcgttcaccctcgcgcgcattctctcgatgatccccaagtcgcgcggcgggcctaccagcgtcgtcatctacgacatccacgcgctccaggagaggttctacttcggggacgacgtcctgccatgcttcgagacagggatcccgctcctgctgcagcgcctccgccagctcccggacgcagaaaatatcaccattgcctttccagatgacggtgcgtggaagcggttccacaagctgttacagcactttccaatgatagtctgtaacaaggttcgggaaggtgacaagagaatagttcgtataaaggaaggactacctgaaggccgtcatgttgttattgttgatgatttagtgcaatctgggggaactcttagagaatgccagaaagttctagctttgcatggcgctgcaaaagtcagtgcttatgtgactcatgctgtgtttcctaagcagtcatatgaacgtttcatggcgtctagttctgctgggccaggtgacagatttgcttacttctggatcacggactcatgcccacacacagtaaaagctattgggcaaagacctccatttgaggttctgagcctcgctggctcaattgcagatgctcttcagatatgagcgtacactggtagatgggcatgggcttggattgttgatgcccaccagattgaaacttgtactatgaggtggaatgctcccgcttttcctaaatgtaagagttggtttccagttcctggaaaagcaaataatgtgtagtaagttaagtacctgaaggttccataaacagccctgtggtttgtaataaaatcaggcattggatactcg

SEQ ID NO: 17450 - protein, 352 aa, Zea mays subsp. mays
  misc_feature (1)..(352): Ceres Seq. ID no. 12358431
VKAESAPPRAVLFGSPLPSPRRRRNPQMEVVVAAKQKAKKHIHLFYCSECEELALKIAASSDAIELQSINWRSFDDGFPNLFINKAHDIRGQHVAFLASFSSPSVIFEQISVIFALPKLFIASFTLVLPFFPTGSFERVEEEGDVATAFTLARILSMIPKSRGGPTSVVIYDIHALQERFYFGDDVLPCFETGIPLLLQRLRQLPDAENITIAFPDDGAWKRFHKLLQHFPMIVCNKVREGDKRIVRIKEGLPEGRHVVIVDDLVQSGGTLRECQKVLALHGAAKVSAYVTHAVFPKQSYERFMASSSAGPGDRFAYFWITDSCPHTVKAIGQRPPFEVLSLAGSIADALQI

SEQ ID NO: 17451 - protein, 325 aa, Zea mays subsp. mays
  misc_feature (1)..(325): Ceres Seq. ID no. 12358432
MEVVVAAKQKAKKHIHLFYCSECEELALKIAASSDAIELQSINWRSFDDGFPNLFINKAHDIRGQHVAFLASFSSPSVIFEQISVIFALPKLFIASFTLVLPFFPTGSFERVEEEGDVATAFTLARILSMIPKSRGGPTSVVIYDIHALQERFYFGDDVLPCFETGIPLLLQRLRQLPDAENITIAFPDDGAWKRFHKLLQHFPMIVCNKVREGDKRIVRIKEGLPEGRHVVIVDDLVQSGGTLRECQKVLALHGAAKVSAYVTHAVFPKQSYERFMASSSAGPGDRFAYFWITDSCPHTVKAIGQRPPFEVLSLAGSIADALQI

SEQ ID NO: 17452 - protein, 196 aa, Zea mays subsp. mays
  misc_feature (1)..(196): Ceres Seq. ID no. 12358433
MIPKSRGGPTSVVIYDIHALQERFYFGDDVLPCFETGIPLLLQRLRQLPDAENITIAFPDDGAWKRFHKLLQHFPMIVCNKVREGDKRIVRIKEGLPEGRHVVIVDDLVQSGGTLRECQKVLALHGAAKVSAYVTHAVFPKQSYERFMASSSAGPGDRFAYFWITDSCPHTVKAIGQRPPFEVLSLAGSIADALQI

SEQ ID NO: 17453 - DNA, 810 bp, Zea mays subsp. mays
  misc_feature (1)..(810): Ceres Seq. ID no. 12358470
tcatctacttccgcgacggcgtagcgacgggcagttcgacatggtcctgaacgaggagctggcggacctggagaaggcgatcaaggtgggcggctacgcgccgaccgtcaccgtgatcgtggccaagaagcggcaccacacgcgcctgttccccaaggaccccagccagccgcagacgaagaacgggaacgtgccgcccggcacggtggtggacacgggcgtggtggacccgtccgcgtacgacttctacctgtgcagccacgccgggatcctgggcacgagcaggccgacgcactactacagcctggtggacgagcacggcttccggtccgacgacctgcagaagctggtctacaacctctgcttcgtgttcgcgcggtgcaccaagcccgtgtcgctggcgacgcccgtctactacgccgacctcgcggcgtaccgtggcaggctctactacgaggcggccatgatgccgtcccaccagcgagggacggggtcggcttcttcttcttcggcgtcctcgggctcctccgctgggacttttggcgtcactaacttcccgaggctgcacaaggatgtggagaacaacatgttcttcatctgacaccagtattttcttttgtgtgtacgcgtcttgccttttcttttgtgtggttatcagtttttaaaaaaaacttcaagtacactgcagtgtgcaagttcgtactggatatacactgcatgactgtagatgaaggaaaagaagcaggtttgagttgtgaagaactgaagatagcgctgtaattgttccagcacaaggtcctgttggaatgc

SEQ ID NO: 17454 - protein, 199 aa, Zea mays subsp. mays
  misc_feature (1)..(199): Ceres Seq. ID no. 12358471
HLLPRRRSDGQFDMVLNEELADLEKAIKVGGYAPTVTVIVAKKRHHTRLFPKDPSQPQTKNGNVPPGTVVDTGVVDPSAYDFYLCSHAGILGTSRPTHYYSLVDEHGFRSDDLQKLVYNLCFVFARCTKPVSLATPVYYADLAAYRGRLYYEAAMMPSHQRGTGSASSSSASSGSSAGTFGVTNFPRLHKDVENNMFFI

SEQ ID NO: 17455 - protein, 186 aa, Zea mays subsp. mays
  misc_feature (1)..(186): Ceres Seq. ID no. 12358472
MVLNEELADLEKAIKVGGYAPTVTVIVAKKRHHTRLFPKDPSQPQTKNGNVPPGTVVDTGVVDPSAYDFYLCSHAGILGTSRPTHYYSLVDEHGFRSDDLQKLVYNLCFVFARCTKPVSLATPVYYADLAAYRGRLYYEAAMMPSHQRGTGSASSSSASSGSSAGTFGVTNFPRLHKDVENNMFFI

SEQ ID NO: 17456 - DNA, 942 bp, Zea mays subsp. mays
  misc_feature (1)..(942): Ceres Seq. ID no. 12358481
catgttcacaacttaagaactgtttattctggtgtcagtgacagcactgcatttgccactccattccccttccctgggaaacaacagttatctgggatgcatgcacaaggggctaccaatgaaaagacatggcaagatttccgtctttttgagccttcaaaacagaacatgctccaaaattaccaccaaagaaatcagcaaaatggtcaaatagctgaacaagagccagaaaattctgtctggtctagcagttaccatgtgtgattcagtaacttgtaccaggatgattgctggagttgctggggactattggattaagtggcacagcctgatctattgagcttggcccatacctgcagcactctgttaaatttcttttgagcatggtggtctttgaagcatgacaatggctgctcttaggtttgggattgccaccatcttctgggacaaagagggagtggaggttgattgatctgtcggcagtctgatggggatgaattatacgaggtcttcaacgctgacacaaagggttaatgaaacaaactcgaatccattgattataggcgctccgcacggaccatatgattcatctctcgttggacatgtagctacaagaatggtgtcagtgggcggttgctgccgcaactaaaagtccattcagtgtggatgtcagttgggctacgctatctaagaataaaaagtttgaggaacaacgagcatgttgccaagtagtttctcaagtataagttactgcgtctagttatattgttcctttcctttcggcaacaatgtgtcatgttgctgtcgcgctagttgcaagttgcaattaaacgtttggaacagtttgtcatgttatttgtgtggcttctatatggctatatgtttgctggaactgtatggaccaaccctcagtgctacctacaaaagtttatgatttgactg

SEQ ID NO: 17457 - protein, 87 aa, Zea mays subsp. mays
  misc_feature (1)..(87): Ceres Seq. ID no. 12358482
HVHNLRTVYSGVSDSTAFATPFPFPGKQQLSGMHAQGATNEKTWQDFRLFEPSKQNMLQNYHQRNQQNGQIAEQEPENSVWSSSYHV

SEQ ID NO: 17458 - protein, 55 aa, Zea mays subsp. mays
  misc_feature (1)..(55): Ceres Seq. ID no. 12358483
MHAQGATNEKTWQDFRLFEPSKQNMLQNYHQRNQQNGQIAEQEPENSVWSSSYHV

SEQ ID NO: 17459 - protein, 53 aa, Zea mays subsp. mays
  misc_feature (1)..(53): Ceres Seq. ID no. 12358484
MGMNYTRSSTLTQRVNETNSNPLIIGAPHGPYDSSLVGHVATRMVSVGGCCRN

SEQ ID NO: 17460 - DNA, 976 bp, Zea mays subsp. mays
  misc_feature (1)..(976): Ceres Seq. ID no. 12358492
agaaaggatgggctctgacaaatcctgacctaattgaccagtgcgcaagagaggattttgttgagagagttaaaactcagcaagatgaaggctgcaatgtccatggttttttagatgtcagtaaagttgctggaaattttcactttgccccaggcaaaggtttttatgaatcgaacatagatgtgcctgagctgtcattacttgaaggtggtttcaatattacccacaaaataaacaaactgtcctttgggacagaatttcctggtgttgtcaatccacttgatggtgctcagtggacacagccagcttcagatgggacataccagtatttcataaaagttgtccctacaatatacactgatataagaggacacaatattcattcgaaccagttctcggtaacggaacattttagggatggaaatgttcgtccgaaaccccaacctggagtttttttcttctatgatttctcacctataaaggtgatattcacagaagaaaatagatccctactccactacctgacaaacctttgtgctatagtgggaggtgtgttcactgtctcgggtatcatcgactcgtttatataccacggacagaaggcactcaagaagaaaatggagctaggtaaatacagatgatcaacatcgaccttgtactggccccatcgtttccaagttttgtggcatgtaaggaggggatatgcctgctaaatacgacaagatgccacttacattgctgaggttgcaatttgcaaggccatcagactgatgttattgcacgtgagctgatcagataacatgtaaaaagacaatgaatagcctggtctggggggagtgctttgatgtccatcattgttcactgacattgaaatggcccgaaccggtgcggtggagtaatttgagttcggaggtggatatatcatagatcatagaatgtttcttatgaaagtttcttcaaggaaacagcttcactc

SEQ ID NO: 17461 - protein, 212 aa, Zea mays subsp. mays
  misc_feature (1)..(212): Ceres Seq. ID no. 12358493
KGWALTNPDLIDQCAREDFVERVKTQQDEGCNVHGFLDVSKVAGNFHFAPGKGFYESNIDVPELSLLEGGFNITHKINKLSFGTEFPGVVNPLDGAQWTQPASDGTYQYFIKVVPTIYTDIRGHNIHSNQFSVTEHFRDGNVRPKPQPGVFFFYDFSPIKVIFTEENRSLLHYLTNLCAIVGGVFTVSGIIDSFIYHGQKALKKKMELGKYR

SEQ ID NO: 17462 - DNA, 922 bp, Zea mays subsp. mays
  misc_feature (1)..(922): Ceres Seq. ID no. 12358505
ccggcagtctgcgatcaaaccgcacgcaagcgaaccacagcgtgctcgccatctcactgactgtgacgacggcaacaagccagtgagcagctcgccatggcagcagtgtccaccgcgccggcgctcgaaggccgcatcgcgctcgtcaccggcggctcccggggcatcggccgcgaggtgtcgtcccacctcgccgcgctcggcgcgcgtgtcgtggtcaactacgccaccaacccggccaaggccgaggagctcgtcgcggagctcgcctcgcgcggcctccgcgccgtggccgtgcgcgcggacgtctccgatccggacgccgtgcgcgcgctcttcgaccgcgccgaggaggccttcgggtccccgccccacgtagtggtcgcctgcgcgggcatcatggacgccaagtaccccgcgctggtcgacactgccgtcgaggacttcgacgccacgttcgcggtgaacacgcgcggcaagttcctggtgtgccgggaggccgcccggcgcatcccccccaacagcggtgggcgcatcgtgacgttctcgtccacgacggttgccgtgctgccgccgggctacgcggcgtacgctgcgtccaacgccgctgtggaggcgatgacgaaggtcctggccaaggaggtggcgccgaaggggatcacggccaacgtggtggcgccgggccctgtgcgcacggagctcttccttgccgggaaggatgaggcgttcctagagagggtaaagaactccatgcgtatagccgagacgacagacatagcgcccgtggtggcgttcctggcgagcgaggcctcgggctgggtgaacgggcaggttatcagggtcaatgggggcgtcgcatgagtgcggcgttgttattattacctcattatctgccatggctttccaaggatgttgttttcct

SEQ ID NO: 17463 - protein, 254 aa, Zea mays subsp. mays
  misc_feature (1)..(254): Ceres Seq. ID no. 12358506
MAAVSTAPALEGRIALVTGGSRGIGREVSSHLAALGARVVVNYATNPAKAEELVAELASRGLRAVAVRADVSDPDAVRALFDRAEEAFGSPPHVVVACAGIMDAKYPALVDTAVEDFDATFAVNTRGKFLVCREAARRIPPNSGGRIVTFSSTTVAVLPPGYAAYAASNAAVEAMTKVLAKEVAPKGITANVVAPGPVRTELFLAGKDEAFLERVKNSMRIAETTDIAPVVAFLASEASGWVNGQVIRVNGGVA

SEQ ID NO: 17464 - protein, 153 aa, Zea mays subsp. mays
  misc_feature (1)..(153): Ceres Seq. ID no. 12358507
MDAKYPALVDTAVEDFDATFAVNTRGKFLVCREAARRIPPNSGGRIVTFSSTTVAVLPPGYAAYAASNAAVEAMTKVLAKEVAPKGITANVVAPGPVRTELFLAGKDEAFLERVKNSMRIAETTDIAPVVAFLASEASGWVNGQVIRVNGGVA

SEQ ID NO: 17465 - DNA, 664 bp, Zea mays subsp. mays
  misc_feature (1)..(664): Ceres Seq. ID no. 12358535
aaagagttttccatcccttcacatttcccattccctccctcgtcatcccgcattcgtctatggcggctgcactgggcgccgtgctccggcggctgcatacggcggcggcgcagccccctcgcctgacgaaattcgcgctgcacccgcccaaattcgttgaaatcgaattcgctgatggtagctcatttcacctgtcagcagaatttctcagagtatacagcccagcagttgatagcaaaatccgatcagtgggcggtgaaaaggttatatttggacgacgacatgttgggataatgtcagctgaatcagtaggaaactacggagtccggatactctttgatgacttgcacaagacagggatcttcacatgggattacttgcaccatctcggttcaaacaaattcagtctgatgagaaattacatcagaactttgagaaagcatggtcttagtcgcgatccccagagaaggaaatgatggagcaacagtctctagacagcctcgcttcttggcgcatggatcgctccatcaggcttgcctgccatgtaacaaagagatgctcaattgaatatttgagatgtgaacgcataacgcaaggatatccattaactagtgatcaacagtgactgtgatgggaaagactgaataaaagtactaaaacgttc

SEQ ID NO: 17466 - protein, 157 aa, Zea mays subsp. mays
  misc_feature (1)..(157): Ceres Seq. ID no. 12358536
RVFHPFTFPIPSLVIPHSSMAAALGAVLRRLHTAAAQPPRLTKFALHPPKFVEIEFADGSSFHLSAEFLRVYSPAVDSKIRSVGGEKVIFGRRHVGIMSAESVGNYGVRILFDDLHKTGIFTWDYLHHLGSNKFSLMRNYIRTLRKHGLSRDPQRRK

SEQ ID NO: 17467 - protein, 138 aa, Zea mays subsp. mays
  misc_feature (1)..(138): Ceres Seq. ID no. 12358537
MAAALGAVLRRLHTAAAQPPRLTKFALHPPKFVEIEFADGSSFHLSAEFLRVYSPAVDSKIRSVGGEKVIFGRRHVGIMSAESVGNYGVRILFDDLHKTGIFTWDYLHHLGSNKFSLMRNYIRTLRKHGLSRDPQRRK

SEQ ID NO: 17468 - DNA, 1454 bp, Zea mays subsp. mays
  misc_feature (1)..(1454): Ceres Seq. ID no. 12358548
acgacgctttttctccatggtttggtgtgcatttcctctctcctgtccccacttgacacatccatgtcccaatctcccccaacctcaggtcaaccgccgctacccaagatccagtctccgttctccctctcctctcgcttcatacacaccagggcggcagcggcagcggcaggggcccgccatcaccaacccacctcccttcaattataaacctataaaatatcatcattgacccaagctgaggcgactagtgggtattgatttttggtggggcagatcaaggagggggggagggggttaacttccaaggaaccagttcattgctggttctgctagcaggaggttggatttcagaggcagaagctttcagccaggcgggctcagggcgcgggcacatcaatggctggcaaggaaatcctccacaaggtgaaggacaaggtgaaagatgcatttagttcatcaggaccagaaacagggaaaggcaagacaaagttatcaggcaagcgtgtcaagcatggttaccatctggtgaagggcaaatctaatcatccaatggaggattatctagtggcagagtaccggcaagttggtgaacatgatttgggattgtttgctatattcgatggtcacctgggccacactgttccagactttttgagctcccatcttttcaataacatcttgagtgagccagaattcttgagtgatccagaaactgctatccgaaacgcataccaacttacggatcagaagatattggaaaacgcagcagagttgggaagaggtggctccacagctgttactgccatcttaataggaagtgacaagttcgtgaaactagttgttgcaaatgttggggattcacgggcagttattagcaagaacggtgtagcgaagcagctttcagttgaccatgaaccaaacatggagcgacaaacgatcgagcagaagggtggctttgtatcaaacctaccgggtgatgtgccacgtgttgatgggcagctggcagttgcaagggcatttggagaccggagcttgaagaagcacctcagctctgatccatatgtggtcgagcaaactatcgatgaaaatactgagtttttaattctagcaagtgatggcttgtggaaggtgatgtccaaccaggaggctgtcgacgagatcaaggattgcaaggacgcgcaggcagctgccaagcacctgacggagcaggccgtgaatcggaagagcaaagacgacatttcagttatcgtagtcaagttcatgtgctagcacatcgtcaggttaaatggtctcccgattgtataccgtgttaaattatcttttaagtcttgtgctcgctggtgtcggacattttgtttaccttctttggttttgggaccccacaaagagggtcaaggcttgtaacatattgttgtttgtttaaggctccaaataaagcatggtaccaccat
